United States Patent Application Publication US 2019/0290729 A1 - sequence listing, part 4

SEQ ID NO: 33847 - protein, 33 aa, Artificial Sequence
  Non-cyclic GFR-binding peptide
  MOD_RES (1)..(2): Xaa is C or S
XXVPTRLSPISILYKDSANNVVLKYHYDMVVES

SEQ ID NO: 33848 - protein, 33 aa, Artificial Sequence
  Non-cyclic GFR-binding peptide
  MOD_RES (1)..(33): Xaa is C or S
XVPARLSATSILYYDAANNVVLRKHRDMVVEAX

SEQ ID NO: 33849 - protein, 39 aa, Artificial Sequence
  Non-cyclic GFR-binding peptide
  MOD_RES (6)..(7)..(39): Xaa is C or S
GSAGPXXTPTKMSPISMLYKNDKQQIILKYHYGMVVDRX

SEQ ID NO: 33850 - protein, 31 aa, Artificial Sequence
  Non-cyclic GFR-binding peptide
  MOD_RES (1)..(1): Xaa is C or S
XVPTKLSATSILYYDKGVVTYLRKHRGMAVS

SEQ ID NO: 33851 - protein, 38 aa, Artificial Sequence
  Non-cyclic GFR-binding peptide
  MOD_RES (6)..(7): Xaa is C or S
HVPKPXXAPTKLEPISVLYLDDSSNVIKFKYENMVVRS

SEQ ID NO: 33852 - protein, 38 aa, Artificial Sequence
  Non-cyclic GFR-binding peptide
  MOD_RES (1)..(35)..(37): Xaa is C or S
  MOD_RES (15)..(16)..(17)..(18)..(19): Xaa is A or G
  MOD_RES (20)..(21)..(22)..(23): Xaa is A or G or absent
XVPEKMSPINILYFXXXXXXXXXYGKIPNMTVESXAXR

SEQ ID NO: 33853 - protein, 43 aa, Artificial Sequence
  Non-cyclic GFR-binding peptide
  MOD_RES (5)..(6)..(40)..(42): Xaa is C or S
  MOD_RES (20)..(21)..(22)..(23)..(24): Xaa is A or G
  MOD_RES (25)..(26)..(27)..(28): Xaa is A or G or absent
IPEPXXVPEKMEPISILYLXXXXXXXXXKFKYENMTVESXAXR

SEQ ID NO: 33854 - protein, 38 aa, Artificial Sequence
  Non-cyclic GFR-binding peptide
  MOD_RES (4)..(5)..(37): Xaa is C or S
PEPXXVPEKMNAISILYFDENKNVVLKKYRNMTVESXA

SEQ ID NO: 33855 - protein, 36 aa, Artificial Sequence
  Non-cyclic GFR-binding peptide
  MOD_RES (1)..(2)..(35): Xaa is C or S
  MOD_RES (16)..(17)..(18)..(19)..(20): Xaa is A or G
  MOD_RES (21)..(22)..(23)..(24): Xaa is A or G or absent
XXAPVKTSATSMLYYXXXXXXXXXLRKHRMIVEEXG

SEQ ID NO: 33856 - protein, 38 aa, Artificial Sequence
  Non-cyclic GFR-binding peptide
  MOD_RES (2)..(3)..(36)..(38): Xaa is C or S
  MOD_RES (17)..(18)..(19)..(20)..(21): Xaa is A or G
  MOD_RES (22)..(23)..(24)..(25): Xaa is A or G or absent
PXXVPQALSPINILYFXXXXXXXXXYGKIPMIVRSXKX

SEQ ID NO: 33857 - protein, 37 aa, Artificial Sequence
  Non-cyclic GFR-binding peptide
  MOD_RES (6)..(7): Xaa is C or S
GIPEPXXVPEKMEPISILYLDENKNVVKFKYENMTVE

SEQ ID NO: 33858 - protein, 38 aa, Artificial Sequence
  Non-cyclic GFR-binding peptide
  MOD_RES (4)..(5): Xaa is C or S
  MOD_RES (19)..(20)..(21)..(22)..(23): Xaa is A or G
  MOD_RES (24)..(25)..(26)..(27): Xaa is A or G or absent
PEPXXVPEKMNAISILYFXXXXXXXXXLKKYRNMTVES

SEQ ID NO: 33859 - protein, 38 aa, Artificial Sequence
  Non-cyclic GFR-binding peptide
  MOD_RES (4)..(5)..(37): Xaa is C or S
AGPXXTPTKMSATSMLYYNDKQQIILRKHRGMVVDRXG

SEQ ID NO: 33860 - protein, 37 aa, Artificial Sequence
  Non-cyclic GFR-binding peptide
  MOD_RES (2)..(3)..(35)..(37): Xaa is C or S
TXXVPTRLSPISILYKDSANNVVLKYHYDMVVESXGX

SEQ ID NO: 33861 - protein, 38 aa, Artificial Sequence
  Non-cyclic GFR-binding peptide
  MOD_RES (4)..(5)..(37): Xaa is C or S
PASXXVPARLSATSILYYDAANNVVLRKHRDMVVEAXG

SEQ ID NO: 33862 - protein, 32 aa, Artificial Sequence
  Non-cyclic GFR-binding peptide
  MOD_RES (1)..(32): Xaa is C or S
XVPQALSPINILYFVGRKPKVYGKIPMIVRSX

SEQ ID NO: 33863 - protein, 36 aa, Artificial Sequence
  Non-cyclic GFR-binding peptide
  MOD_RES (1)..(35): Xaa is C or S
  MOD_RES (15)..(16)..(17)..(18)..(19): Xaa is A or G
  MOD_RES (20)..(21)..(22)..(23): Xaa is A or G or absent
XTPTKMSPISMLYKXXXXXXXXXLKYHYGMVVDRXG

SEQ ID NO: 33864 - protein, 36 aa, Artificial Sequence
  Non-cyclic GFR-binding peptide
  MOD_RES (1)..(35): Xaa is C or S
  MOD_RES (15)..(16)..(17)..(18)..(19): Xaa is A or G
  MOD_RES (20)..(21)..(22)..(23): Xaa is A or G or absent
XVPTRLSPISILYKXXXXXXXXXLKYHYDMVVESXG

SEQ ID NO: 33865 - protein, 40 aa, Artificial Sequence
  Non-cyclic GFR-binding peptide
  MOD_RES (6)..(7): Xaa is C or S
  MOD_RES (21)..(22)..(23)..(24)..(25): Xaa is A or G
  MOD_RES (26)..(27)..(28)..(29): Xaa is A or G or absent
HVPKPXXAPTKLSPISVLYKXXXXXXXXXLKYHYNMVVRS

SEQ ID NO: 33866 - protein, 36 aa, Artificial Sequence
  Non-cyclic GFR-binding peptide
  MOD_RES (2)..(3)..(34)..(36): Xaa is C or S
TXXAPVKTSPISMLYKDNGRVLLLKYHYMIVEEXGX

SEQ ID NO: 33867 - protein, 34 aa, Artificial Sequence
  Non-cyclic GFR-binding peptide
  MOD_RES (1)..(1): Xaa is C or S
  MOD_RES (15)..(16)..(17)..(18)..(19): Xaa is A or G
  MOD_RES (20)..(21)..(22)..(23): Xaa is A or G or absent
XTPTKMSATSMLYYXXXXXXXXXLRKHRGMVVDR

SEQ ID NO: 33868 - protein, 37 aa, Artificial Sequence
  Non-cyclic GFR-binding peptide
  MOD_RES (3)..(4): Xaa is C or S
  MOD_RES (18)..(19)..(20)..(21)..(22): Xaa is A or G
  MOD_RES (23)..(24)..(25)..(26): Xaa is A or G or absent
PTXXVPTRLEPISILYLXXXXXXXXXKFKYEDMVVES

SEQ ID NO: 33869 - protein, 35 aa, Artificial Sequence
  Non-cyclic GFR-binding peptide
  MOD_RES (2)..(3)..(35): Xaa is C or S
PXXVPEKMSPISILYKDENKNVVLKYHYNMTVESX

SEQ ID NO: 33870 - protein, 33 aa, Artificial Sequence
  Non-cyclic GFR-binding peptide
  MOD_RES (1)..(32): Xaa is C or S
XAPVKTSPISMLYKDNGRVLLLKYHYMIVEEXG

SEQ ID NO: 33871 - protein, 33 aa, Artificial Sequence
  Non-cyclic GFR-binding peptide
  MOD_RES (33)..(33): Xaa is C or S
  MOD_RES (14)..(15)..(16)..(17)..(18): Xaa is A or G
  MOD_RES (19)..(20)..(21)..(22): Xaa is A or G or absent
VPQALSPINILYFXXXXXXXXXYGKIPMIVRSX

SEQ ID NO: 33872 - protein, 40 aa, Artificial Sequence
  Non-cyclic GFR-binding peptide
  MOD_RES (6)..(7)..(39): Xaa is C or S
GSAGPXXTPTKMEPISMLYLNDKQQIIKFKYEGMVVDRXG

SEQ ID NO: 33873 - protein, 31 aa, Artificial Sequence
  Non-cyclic GFR-binding peptide
  MOD_RES (1)..(1): Xaa is C or S
XVPQDLSPINILYFVGRTPKVYGKIPMVVKS

SEQ ID NO: 33874 - protein, 37 aa, Artificial Sequence
  Non-cyclic GFR-binding peptide
  MOD_RES (2)..(3)..(37): Xaa is C or S
  MOD_RES (17)..(18)..(19)..(20)..(21): Xaa is A or G
  MOD_RES (22)..(23)..(24)..(25): Xaa is A or G or absent
PXXVPEKMSPINILYFXXXXXXXXXYGKIPNMTVESX

SEQ ID NO: 33875 - protein, 38 aa, Artificial Sequence
  Non-cyclic GFR-binding peptide
  MOD_RES (4)..(5): Xaa is C or S
  MOD_RES (19)..(20)..(21)..(22)..(23): Xaa is A or G
  MOD_RES (24)..(25)..(26)..(27): Xaa is A or G or absent
AGPXXTPTKMSPISMLYKXXXXXXXXXLKYHYGMVVDR

SEQ ID NO: 33876 - protein, 35 aa, Artificial Sequence
  Non-cyclic GFR-binding peptide
  MOD_RES (2)..(3): Xaa is C or S
  MOD_RES (17)..(18)..(19)..(20)..(21): Xaa is A or G
  MOD_RES (22)..(23)..(24)..(25): Xaa is A or G or absent
TXXVPTRLSPISILYKXXXXXXXXXLKYHYDMVVE

SEQ ID NO: 33877 - protein, 35 aa, Artificial Sequence
  Non-cyclic GFR-binding peptide
  MOD_RES (2)..(3): Xaa is C or S
  MOD_RES (17)..(18)..(19)..(20)..(21): Xaa is A or G
  MOD_RES (22)..(23)..(24)..(25): Xaa is A or G or absent
TXXVPTRLEPISILYLXXXXXXXXXKFKYEDMVVE

SEQ ID NO: 33878 - protein, 37 aa, Artificial Sequence
  Non-cyclic GFR-binding peptide
  MOD_RES (4)..(5): Xaa is C or S
  MOD_RES (19)..(20)..(21)..(22)..(23): Xaa is A or G
  MOD_RES (24)..(25)..(26)..(27): Xaa is A or G or absent
PEPXXVPEKMSATSILYYXXXXXXXXXLRKHRNMTVE

SEQ ID NO: 33879 - protein, 35 aa, Artificial Sequence
  Non-cyclic GFR-binding peptide
  MOD_RES (32)..(34): Xaa is C or S
VPARLSATSILYYDAANNVVLRKHRDMVVEAXGXR

SEQ ID NO: 33880 - protein, 40 aa, Artificial Sequence
  Non-cyclic GFR-binding peptide
  MOD_RES (5)..(6)..(37)..(39): Xaa is C or S
VPSTXXAPVKTEPISMLYLDNGRVLLKFKYEMIVEEXGXL

SEQ ID NO: 33881 - protein, 38 aa, Artificial Sequence
  Non-cyclic GFR-binding peptide
  MOD_RES (3)..(4)..(35)..(37): Xaa is C or S
APXXVPQALSPINILYFVGRKPKVYGKIPMIVRSXKXS

SEQ ID NO: 33882 - protein, 40 aa, Artificial Sequence
  Non-cyclic GFR-binding peptide
  MOD_RES (2)..(3)..(37)..(39): Xaa is C or S
  MOD_RES (17)..(18)..(19)..(20)..(21): Xaa is A or G
  MOD_RES (22)..(23)..(24)..(25): Xaa is A or G or absent
TXXVPTRLSPISILYKXXXXXXXXXLKYHYDMVVESXGXR

SEQ ID NO: 33883 - protein, 37 aa, Artificial Sequence
  Non-cyclic GFR-binding peptide
  MOD_RES (1)..(35)..(37): Xaa is C or S
  MOD_RES (15)..(16)..(17)..(18)..(19): Xaa is A or G
  MOD_RES (20)..(21)..(22)..(23): Xaa is A or G or absent
XVPEKMSATSILYYXXXXXXXXXLRKHRNMTVESXAX

SEQ ID NO: 33884 - protein, 35 aa, Artificial Sequence
  Non-cyclic GFR-binding peptide
  MOD_RES (1)..(33)..(35): Xaa is C or S
XVPEKMSPISILYKDENKNVVLKYHYNMTVESXAX

SEQ ID NO: 33885 - protein, 40 aa, Artificial Sequence
  Non-cyclic GFR-binding peptide
  MOD_RES (2)..(3)..(37)..(39): Xaa is C or S
  MOD_RES (17)..(18)..(19)..(20)..(21): Xaa is A or G
  MOD_RES (22)..(23)..(24)..(25): Xaa is A or G or absent
PXXTPTKMSATSMLYYXXXXXXXXXLRKHRGMVVDRXGXS

SEQ ID NO: 33886 - protein, 34 aa, Artificial Sequence
  Non-cyclic GFR-binding peptide
  MOD_RES (1)..(2): Xaa is C or S
  MOD_RES (16)..(17)..(18)..(19)..(20): Xaa is A or G
  MOD_RES (21)..(22)..(23)..(24): Xaa is A or G or absent
XXVPEKMNAISILYFXXXXXXXXXLKKYRNMTVE

SEQ ID NO: 33887 - protein, 32 aa, Artificial Sequence
  Non-cyclic GFR-binding peptide
  MOD_RES (31)..(31): Xaa is C or S
VSQDLSPINILYFIGKTPKIYGKIPMIVKSXK

SEQ ID NO: 33888 - protein, 35 aa, Artificial Sequence
  Non-cyclic GFR-binding peptide
  MOD_RES (3)..(4)..(35): Xaa is C or S
STXXAPVKTSPISMLYKDNGRVLLLKYHYMIVEEX

SEQ ID NO: 33889 - protein, 40 aa, Artificial Sequence
  Non-cyclic GFR-binding peptide
  MOD_RES (4)..(5)..(39): Xaa is C or S
  MOD_RES (19)..(20)..(21)..(22)..(23): Xaa is A or G
  MOD_RES (24)..(25)..(26)..(27): Xaa is A or G or absent
PASXXVPARLSATSILYYXXXXXXXXXLRKHRDMVVEAXG

SEQ ID NO: 33890 - protein, 33 aa, Artificial Sequence
  Non-cyclic GFR-binding peptide
  MOD_RES (2)..(3): Xaa is C or S
TXXAPVKTEPISMLYLDNGRVLLKFKYEMIVEE

SEQ ID NO: 33891 - protein, 39 aa, Artificial Sequence
  Non-cyclic GFR-binding peptide
  MOD_RES (2)..(3)..(37)..(39): Xaa is C or S
  MOD_RES (17)..(18)..(19)..(20)..(21): Xaa is A or G
  MOD_RES (22)..(23)..(24)..(25): Xaa is A or G or absent
PXXTPTKMSPISMLYKXXXXXXXXXLKYHYGMVVDRXGX

SEQ ID NO: 33892 - protein, 36 aa, Artificial Sequence
  Non-cyclic GFR-binding peptide
  MOD_RES (3)..(4): Xaa is C or S
  MOD_RES (18)..(19)..(20)..(21)..(22): Xaa is A or G
  MOD_RES (23)..(24)..(25)..(26): Xaa is A or G or absent
ASXXVPARLSATSILYYXXXXXXXXXLRKHRDMVVE

SEQ ID NO: 33893 - protein, 36 aa, Artificial Sequence
  Non-cyclic GFR-binding peptide
  MOD_RES (2)..(3)..(35): Xaa is C or S
TXXVPTRLSATSILYYDSANNVVLRKHRDMVVESXG

SEQ ID NO: 33894 - protein, 37 aa, Artificial Sequence
  Non-cyclic GFR-binding peptide
  MOD_RES (3)..(4)..(36): Xaa is C or S
PTXXVPTRLEPISILYLDSANNVVKFKYEDMVVESXG

SEQ ID NO: 33895 - protein, 38 aa, Artificial Sequence
  Non-cyclic GFR-binding peptide
  MOD_RES (4)..(5)..(38): Xaa is C or S
  MOD_RES (19)..(20)..(21)..(22)..(23): Xaa is A or G
  MOD_RES (24)..(25)..(26)..(27): Xaa is A or G or absent
AAPXXVPQALSPINILYFXXXXXXXXXYGKIPMIVRSX

SEQ ID NO: 33896 - protein, 42 aa, Artificial Sequence
  Non-cyclic GFR-binding peptide
  MOD_RES (5)..(6)..(40)..(42): Xaa is C or S
  MOD_RES (20)..(21)..(22)..(23)..(24): Xaa is A or G
  MOD_RES (25)..(26)..(27)..(28): Xaa is A or G or absent
TPPTXXVPTRLEPISILYLXXXXXXXXXKFKYEDMVVESXGX

SEQ ID NO: 33897 - protein, 39 aa, Artificial Sequence
  Non-cyclic GFR-binding peptide
  MOD_RES (6)..(7)..(39): Xaa is C or S
STPPTXXVPTRLSATSILYYDSANNVVLRKHRDMVVESX

SEQ ID NO: 33898 - protein, 41 aa, Artificial Sequence
  Non-cyclic GFR-binding peptide
  MOD_RES (5)..(6)..(40): Xaa is C or S
  MOD_RES (20)..(21)..(22)..(23)..(24): Xaa is A or G
  MOD_RES (25)..(26)..(27)..(28): Xaa is A or G or absent
IPEPXXVPEKMSATSILYYXXXXXXXXXLRKHRNMTVESXA

SEQ ID NO: 33899 - protein, 34 aa, Artificial Sequence
  Non-cyclic GFR-binding peptide
  MOD_RES (34)..(34): Xaa is C or S
  MOD_RES (14)..(15)..(16)..(17)..(18): Xaa is A or G
  MOD_RES (19)..(20)..(21)..(22): Xaa is A or G or absent
TPTKMSPISMLYKXXXXXXXXXLKYHYGMVVDRX

SEQ ID NO: 33900 - protein, 43 aa, Artificial Sequence
  Non-cyclic GFR-binding peptide
  MOD_RES (6)..(7)..(41)..(43): Xaa is C or S
  MOD_RES (21)..(22)..(23)..(24)..(25): Xaa is A or G
  MOD_RES (26)..(27)..(28)..(29): Xaa is A or G or absent
GIPEPXXVPEKMEPISILYLXXXXXXXXXKFKYENMTVESXAX

SEQ ID NO: 33901 - protein, 39 aa, Artificial Sequence
  Non-cyclic GFR-binding peptide
  MOD_RES (3)..(4)..(36)..(38): Xaa is C or S
EPXXVPEKMNAISILYFDENKNVVLKKYRNMTVESXAXR

SEQ ID NO: 33902 - protein, 35 aa, Artificial Sequence
  Non-cyclic GFR-binding peptide
  MOD_RES (3)..(4)..(35): Xaa is C or S
STXXAPVKTSATSMLYYDNGRVLLLRKHRMIVEEX

SEQ ID NO: 33903 - protein, 39 aa, Artificial Sequence
  Non-cyclic GFR-binding peptide
  MOD_RES (3)..(4)..(38): Xaa is C or S
  MOD_RES (18)..(19)..(20)..(21)..(22): Xaa is A or G
  MOD_RES (23)..(24)..(25)..(26): Xaa is A or G or absent
ASXXVPARLSATSILYYXXXXXXXXXLRKHRDMVVEAXG

SEQ ID NO: 33904 - protein, 36 aa, Artificial Sequence
  Non-cyclic GFR-binding peptide
  MOD_RES (34)..(36): Xaa is C or S
  MOD_RES (14)..(15)..(16)..(17)..(18): Xaa is A or G
  MOD_RES (19)..(20)..(21)..(22): Xaa is A or G or absent
VPTRLSPISILYKXXXXXXXXXLKYHYDMVVESXGX

SEQ ID NO: 33905 - protein, 40 aa, Artificial Sequence
  Non-cyclic GFR-binding peptide
  MOD_RES (6)..(7)..(39): Xaa is C or S
GIPEPXXVPEKMSATSILYYDENKNVVLRKHRNMTVESXA

SEQ ID NO: 33906 - protein, 36 aa, Artificial Sequence
  Non-cyclic GFR-binding peptide
  MOD_RES (3)..(4)..(36): Xaa is C or S
GPXXTPTKMSATSMLYYNDKQQIILRKHRGMVVDRX

SEQ ID NO: 33907 - protein, 40 aa, Artificial Sequence
  Non-cyclic GFR-binding peptide
  MOD_RES (6)..(7): Xaa is C or S
  MOD_RES (21)..(22)..(23)..(24)..(25): Xaa is A or G
  MOD_RES (26)..(27)..(28)..(29): Xaa is A or G or absent
GSAGPXXTPTKMEPISMLYLXXXXXXXXXKFKYEGMVVDR

SEQ ID NO: 33908 - protein, 37 aa, Artificial Sequence
  Non-cyclic GFR-binding peptide
  MOD_RES (1)..(2)..(36): Xaa is C or S
  MOD_RES (16)..(17)..(18)..(19)..(20): Xaa is A or G
  MOD_RES (21)..(22)..(23)..(24): Xaa is A or G or absent
XXVPEKMSATSILYYXXXXXXXXXLRKHRNMTVESXA

SEQ ID NO: 33909 - protein, 38 aa, Artificial Sequence
  Non-cyclic GFR-binding peptide
  MOD_RES (1)..(35)..(37): Xaa is C or S
  MOD_RES (15)..(16)..(17)..(18)..(19): Xaa is A or G
  MOD_RES (20)..(21)..(22)..(23): Xaa is A or G or absent
XVPTRLSPISILYKXXXXXXXXXLKYHYDMVVESXGXR

SEQ ID NO: 33910 - protein, 39 aa, Artificial Sequence
  Non-cyclic GFR-binding peptide
  MOD_RES (2)..(3)..(37)..(39): Xaa is C or S
  MOD_RES (17)..(18)..(19)..(20)..(21): Xaa is A or G
  MOD_RES (22)..(23)..(24)..(25): Xaa is A or G or absent
SXXVPARLSATSILYYXXXXXXXXXLRKHRDMVVEAXGX

SEQ ID NO: 33911 - protein, 39 aa, Artificial Sequence
  Non-cyclic GFR-binding peptide
  MOD_RES (3)..(4)..(36)..(38): Xaa is C or S
PTXXVPTRLEPISILYLDSANNVVKFKYEDMVVESXGXR

SEQ ID NO: 33912 - protein, 31 aa, Artificial Sequence
  Non-cyclic GFR-binding peptide
TPTKMEPISMLYLNDKQQIIKFKYEGMVVDR

SEQ ID NO: 33913 - protein, 38 aa, Artificial Sequence
  Non-cyclic GFR-binding peptide
  MOD_RES (4)..(5)..(36)..(38): Xaa is C or S
ASPXXVPQDLSPINILYFVGRTPKVYGKIPMVVKSXKX

SEQ ID NO: 33914 - protein, 36 aa, Artificial Sequence
  Non-cyclic GFR-binding peptide
  MOD_RES (2)..(3)..(35): Xaa is C or S
PXXVPEKMSPINILYFDENKNVVYGKIPNMTVESXA

SEQ ID NO: 33915 - protein, 33 aa, Artificial Sequence
  Non-cyclic GFR-binding peptide
  MOD_RES (2)..(3): Xaa is C or S
PXXTPTKMSATSMLYYNDKQQIILRKHRGMVVD

SEQ ID NO: 33916 - protein, 35 aa, Artificial Sequence
  Non-cyclic GFR-binding peptide
  MOD_RES (32)..(34): Xaa is C or S
VPEKMSPINILYFDENKNVVYGKIPNMTVESXAXR

SEQ ID NO: 33917 - protein, 35 aa, Artificial Sequence
  Non-cyclic GFR-binding peptide
  MOD_RES (1)..(2)..(35): Xaa is C or S
  MOD_RES (16)..(17)..(18)..(19)..(20): Xaa is A or G
  MOD_RES (21)..(22)..(23)..(24): Xaa is A or G or absent
XXAPVKTEPISMLYLXXXXXXXXXKFKYEMIVEEX

SEQ ID NO: 33918 - protein, 39 aa, Artificial Sequence
  Non-cyclic GFR-binding peptide
  MOD_RES (6)..(7): Xaa is C or S
  MOD_RES (21)..(22)..(23)..(24)..(25): Xaa is A or G
  MOD_RES (26)..(27)..(28)..(29): Xaa is A or G or absent
RVPSTXXAPVKTSATSMLYYXXXXXXXXXLRKHRMIVEE

SEQ ID NO: 33919 - protein, 36 aa, Artificial Sequence
  Non-cyclic GFR-binding peptide
  MOD_RES (1)..(35): Xaa is C or S
  MOD_RES (15)..(16)..(17)..(18)..(19): Xaa is A or G
  MOD_RES (20)..(21)..(22)..(23): Xaa is A or G or absent
XVPEKMEPISILYLXXXXXXXXXKFKYENMTVESXA

SEQ ID NO: 33920 - protein, 40 aa, Artificial Sequence
  Non-cyclic GFR-binding peptide
  MOD_RES (6)..(7)..(39): Xaa is C or S
STPPTXXVPTRLSPISILYKDSANNVVLKYHYDMVVESXG

SEQ ID NO: 33921 - protein, 41 aa, Artificial Sequence
  Non-cyclic GFR-binding peptide
  MOD_RES (5)..(6)..(39)..(41): Xaa is C or S
  MOD_RES (20)..(21)..(22)..(23)..(24): Xaa is A or G
  MOD_RES (25)..(26)..(27)..(28): Xaa is A or G or absent
VPSTXXAPVKTSATSMLYYXXXXXXXXXLRKHRMIVEEXGX

SEQ ID NO: 33922 - protein, 37 aa, Artificial Sequence
  Non-cyclic GFR-binding peptide
  MOD_RES (2)..(3)..(34)..(36): Xaa is C or S
PXXVPQDLSPINILYFVGRTPKVYGKIPMVVKSXKXS

SEQ ID NO: 33923 - protein, 37 aa, Artificial Sequence
  Non-cyclic GFR-binding peptide
  MOD_RES (5)..(6)..(37): Xaa is C or S
VPSTXXAPVKTSATSMLYYDNGRVLLLRKHRMIVEEX

SEQ ID NO: 33924 - protein, 33 aa, Artificial Sequence
  Non-cyclic GFR-binding peptide
  MOD_RES (1)..(2)..(33): Xaa is C or S
XXVPQDLSPINILYFVGRTPKVYGKIPMVVKSX

SEQ ID NO: 33925 - protein, 33 aa, Artificial Sequence
  Non-cyclic GFR-binding peptide
  MOD_RES (31)..(33): Xaa is C or S
APVKTSATSMLYYDNGRVLLLRKHRMIVEEXGX

SEQ ID NO: 33926 - protein, 34 aa, Artificial Sequence
  Non-cyclic GFR-binding peptide
  MOD_RES (32)..(34): Xaa is C or S
VPTRLSATSILYYDSANNVVLRKHRDMVVESXGX

SEQ ID NO: 33927 - protein, 32 aa, Artificial Sequence
  Non-cyclic GFR-binding peptide
  MOD_RES (1)..(2): Xaa is C or S
XXTPTKMSATSMLYYNDKQQIILRKHRGMVVD

SEQ ID NO: 33928 - protein, 40 aa, Artificial Sequence
  Non-cyclic GFR-binding peptide
  MOD_RES (5)..(6)..(39): Xaa is C or S
  MOD_RES (20)..(21)..(22)..(23)..(24): Xaa is A or G
  MOD_RES (25)..(26)..(27)..(28): Xaa is A or G or absent
VPSTXXAPVKTSPISMLYKXXXXXXXXXLKYHYMIVEEXG

SEQ ID NO: 33929 - protein, 35 aa, Artificial Sequence
  Non-cyclic GFR-binding peptide
  MOD_RES (1)..(2): Xaa is C or S
  MOD_RES (16)..(17)..(18)..(19)..(20): Xaa is A or G
  MOD_RES (21)..(22)..(23)..(24): Xaa is A or G or absent
XXVPTKLSATSILYYXXXXXXXXXLRKHRGMAVSE

SEQ ID NO: 33930 - protein, 34 aa, Artificial Sequence
  Non-cyclic GFR-binding peptide
  MOD_RES (34)..(34): Xaa is C or S
  MOD_RES (14)..(15)..(16)..(17)..(18): Xaa is A or G
  MOD_RES (19)..(20)..(21)..(22): Xaa is A or G or absent
VPTRLEPISILYLXXXXXXXXXKFKYEDMVVESX

SEQ ID NO: 33931 - protein, 42 aa, Artificial Sequence
  Non-cyclic GFR-binding peptide
  MOD_RES (4)..(5)..(39)..(41): Xaa is C or S
  MOD_RES (19)..(20)..(21)..(22)..(23): Xaa is A or G
  MOD_RES (24)..(25)..(26)..(27): Xaa is A or G or absent
PEPXXVPEKMSPISILYKXXXXXXXXXLKYHYNMTVESXAXR

SEQ ID NO: 33932 - protein, 38 aa, Artificial Sequence
  Non-cyclic GFR-binding peptide
  MOD_RES (4)..(5)..(37): Xaa is C or S
PEPXXVPEKMEPISILYLDENKNVVKFKYENMTVESXA

SEQ ID NO: 33933 - protein, 42 aa, Artificial Sequence
  Non-cyclic GFR-binding peptide
  MOD_RES (6)..(7)..(41): Xaa is C or S
  MOD_RES (21)..(22)..(23)..(24)..(25): Xaa is A or G
  MOD_RES (26)..(27)..(28)..(29): Xaa is A or G or absent
GSAGPXXTPTKMSATSMLYYXXXXXXXXXLRKHRGMVVDRXG

SEQ ID NO: 33934 - protein, 38 aa, Artificial Sequence
  Non-cyclic GFR-binding peptide
  MOD_RES (1)..(2)..(36)..(38): Xaa is C or S
  MOD_RES (16)..(17)..(18)..(19)..(20): Xaa is A or G
  MOD_RES (21)..(22)..(23)..(24): Xaa is A or G or absent
XXVPTRLSPISILYKXXXXXXXXXLKYHYDMVVESXGX

SEQ ID NO: 33935 - protein, 41 aa, Artificial Sequence
  Non-cyclic GFR-binding peptide
  MOD_RES (5)..(6)..(40): Xaa is C or S
  MOD_RES (20)..(21)..(22)..(23)..(24): Xaa is A or G
  MOD_RES (25)..(26)..(27)..(28): Xaa is A or G or absent
TPPTXXVPTRLSATSILYYXXXXXXXXXLRKHRDMVVESXG

SEQ ID NO: 33936 - protein, 32 aa, Artificial Sequence
  Non-cyclic GFR-binding peptide
  MOD_RES (32)..(32): Xaa is C or S
VPARLSATSILYYDAANNVVLRKHRDMVVEAX

SEQ ID NO: 33937 - protein, 33 aa, Artificial Sequence
  Non-cyclic GFR-binding peptide
  MOD_RES (1)..(2): Xaa is C or S
XXVPARLSATSILYYDAANNVVLRKHRDMVVEA

SEQ ID NO: 33938 - protein, 32 aa, Artificial Sequence
  Non-cyclic GFR-binding peptide
  MOD_RES (1)..(32): Xaa is C or S
XAPVKTEPISMLYLDNGRVLLKFKYEMIVEEX

SEQ ID NO: 33939 - protein, 39 aa, Artificial Sequence
  Non-cyclic GFR-binding peptide
  MOD_RES (4)..(5)..(39): Xaa is C or S
  MOD_RES (19)..(20)..(21)..(22)..(23): Xaa is A or G
  MOD_RES (24)..(25)..(26)..(27): Xaa is A or G or absent
SKAXXVPTKLSATSILYYXXXXXXXXXLRKHRGMAVSEX

SEQ ID NO: 33940 - protein, 33 aa, Artificial Sequence
  Non-cyclic GFR-binding peptide
  MOD_RES (1)..(1): Xaa is C or S
  MOD_RES (15)..(16)..(17)..(18)..(19): Xaa is A or G
  MOD_RES (20)..(21)..(22)..(23): Xaa is A or G or absent
XVPTRLSPISILYKXXXXXXXXXLKYHYDMVVE

SEQ ID NO: 33941 - protein, 44 aa, Artificial Sequence
  Non-cyclic GFR-binding peptide
  MOD_RES (6)..(7)..(41)..(43): Xaa is C or S
  MOD_RES (21)..(22)..(23)..(24)..(25): Xaa is A or G
  MOD_RES (26)..(27)..(28)..(29): Xaa is A or G or absent
KASKAXXVPTKLSATSILYYXXXXXXXXXLRKHRGMAVSEXGXR

SEQ ID NO: 33942 - protein, 37 aa, Artificial Sequence
  Non-cyclic GFR-binding peptide
  MOD_RES (1)..(2)..(34)..(36): Xaa is C or S
XXVPEKMNAISILYFDENKNVVLKKYRNMTVESXAXR

SEQ ID NO: 33943 - protein, 36 aa, Artificial Sequence
  Non-cyclic GFR-binding peptide
  MOD_RES (3)..(4)..(35): Xaa is C or S
APXXVPQALSPINILYFVGRKPKVYGKIPMIVRSXK

SEQ ID NO: 33944 - protein, 40 aa, Artificial Sequence
  Non-cyclic GFR-binding peptide
  MOD_RES (5)..(6)..(40): Xaa is C or S
  MOD_RES (20)..(21)..(22)..(23)..(24): Xaa is A or G
  MOD_RES (25)..(26)..(27)..(28): Xaa is A or G or absent
SAGPXXTPTKMSATSMLYYXXXXXXXXXLRKHRGMVVDRX

SEQ ID NO: 33945 - protein, 34 aa, Artificial Sequence
  Non-cyclic GFR-binding peptide
  MOD_RES (2)..(3): Xaa is C or S
PXXVPEKMSPINILYFDENKNVVYGKIPNMTVES

SEQ ID NO: 33946 - protein, 36 aa, Artificial Sequence
  Non-cyclic GFR-binding peptide
  MOD_RES (3)..(4): Xaa is C or S
  MOD_RES (18)..(19)..(20)..(21)..(22): Xaa is A or G
  MOD_RES (23)..(24)..(25)..(26): Xaa is A or G or absent
PTXXVPTRLSATSILYYXXXXXXXXXLRKHRDMVVE

SEQ ID NO: 33947 - protein, 42 aa, Artificial Sequence
  Non-cyclic GFR-binding peptide
  MOD_RES (5)..(6)..(39)..(41): Xaa is C or S
  MOD_RES (20)..(21)..(22)..(23)..(24): Xaa is A or G
  MOD_RES (25)..(26)..(27)..(28): Xaa is A or G or absent
VPSTXXAPVKTEPISMLYLXXXXXXXXXKFKYEMIVEEXGXL

SEQ ID NO: 33948 - protein, 37 aa, Artificial Sequence
  Non-cyclic GFR-binding peptide
  MOD_RES (2)..(3)..(36): Xaa is C or S
  MOD_RES (17)..(18)..(19)..(20)..(21): Xaa is A or G
  MOD_RES (22)..(23)..(24)..(25): Xaa is A or G or absent
PXXVSQDLSPINILYFXXXXXXXXXYGKIPMIVKSXK

SEQ ID NO: 33949 - protein, 39 aa, Artificial Sequence
  Non-cyclic GFR-binding peptide
  MOD_RES (4)..(5)..(37)..(39): Xaa is C or S
PEPXXVPEKMSPISILYKDENKNVVLKYHYNMTVESXAX

SEQ ID NO: 33950 - protein, 38 aa, Artificial Sequence
  Non-cyclic GFR-binding peptide
  MOD_RES (6)..(7): Xaa is C or S
GSAGPXXTPTKMSPISMLYKNDKQQIILKYHYGMVVDR

SEQ ID NO: 33951 - protein, 37 aa, Artificial Sequence
  Non-cyclic GFR-binding peptide
  MOD_RES (2)..(3)..(37): Xaa is C or S
  MOD_RES (17)..(18)..(19)..(20)..(21): Xaa is A or G
  MOD_RES (22)..(23)..(24)..(25): Xaa is A or G or absent
SXXVPARLSATSILYYXXXXXXXXXLRKHRDMVVEAX

SEQ ID NO: 33952 - protein, 34 aa, Artificial Sequence
  Non-cyclic GFR-binding peptide
  MOD_RES (1)..(2): Xaa is C or S
  MOD_RES (16)..(17)..(18)..(19)..(20): Xaa is A or G
  MOD_RES (21)..(22)..(23)..(24): Xaa is A or G or absent
XXVPEKMSATSILYYXXXXXXXXXLRKHRNMTVE

SEQ ID NO: 33953 - protein, 35 aa, Artificial Sequence
  Non-cyclic GFR-binding peptide
  MOD_RES (3)..(4): Xaa is C or S
PTXXVPTRLSATSILYYDSANNVVLRKHRDMVVES

SEQ ID NO: 33954 - protein, 43 aa, Artificial Sequence
  Non-cyclic GFR-binding peptide
  MOD_RES (6)..(7)..(40)..(42): Xaa is C or S
  MOD_RES (21)..(22)..(23)..(24)..(25): Xaa is A or G
  MOD_RES (26)..(27)..(28)..(29): Xaa is A or G or absent
ASAAPXXVPQALSPINILYFXXXXXXXXXYGKIPMIVRSXKXS

SEQ ID NO: 33955 - protein, 33 aa, Artificial Sequence
  Non-cyclic GFR-binding peptide
  MOD_RES (14)..(15)..(16)..(17)..(18): Xaa is A or G
  MOD_RES (19)..(20)..(21)..(22): Xaa is A or G or absent
VPTKLSATSILYYXXXXXXXXXLRKHRGMAVSE

SEQ ID NO: 33956 - protein, 41 aa, Artificial Sequence
  Non-cyclic GFR-binding peptide
  MOD_RES (6)..(7)..(39)..(41): Xaa is C or S
GSAGPXXTPTKMEPISMLYLNDKQQIIKFKYEGMVVDRXGX

SEQ ID NO: 33957 - protein, 35 aa, Artificial Sequence
  Non-cyclic GFR-binding peptide
  MOD_RES (1)..(2): Xaa is C or S
  MOD_RES (16)..(17)..(18)..(19)..(20): Xaa is A or G
  MOD_RES (21)..(22)..(23)..(24): Xaa is A or G or absent
XXVPEKMSPISILYKXXXXXXXXXLKYHYNMTVES

SEQ ID NO: 33958 - protein, 36 aa, Artificial Sequence
  Non-cyclic GFR-binding peptide
  MOD_RES (2)..(3): Xaa is C or S
  MOD_RES (17)..(18)..(19)..(20)..(21): Xaa is A or G
  MOD_RES (22)..(23)..(24)..(25): Xaa is A or G or absent
PXXVPEKMSATSILYYXXXXXXXXXLRKHRNMTVES

SEQ ID NO: 33959 - protein, 34 aa, Artificial Sequence
  Non-cyclic GFR-binding peptide
  MOD_RES (32)..(34): Xaa is C or S
VPEKMNAISILYFDENKNVVLKKYRNMTVESXAX

SEQ ID NO: 33960 - protein, 39 aa, Artificial Sequence
  Non-cyclic GFR-binding peptide
  MOD_RES (2)..(3)..(36)..(38): Xaa is C or S
  MOD_RES (17)..(18)..(19)..(20)..(21): Xaa is A or G
  MOD_RES (22)..(23)..(24)..(25): Xaa is A or G or absent
TXXAPVKTSPISMLYKXXXXXXXXXLKYHYMIVEEXGXL

SEQ ID NO: 33961 - protein, 35 aa, Artificial Sequence
  Non-cyclic GFR-binding peptide
  MOD_RES (3)..(4): Xaa is C or S
GPXXTPTKMEPISMLYLNDKQQIIKFKYEGMVVDR

SEQ ID NO: 33962 - protein, 38 aa, Artificial Sequence
  Non-cyclic GFR-binding peptide
  MOD_RES (5)..(6)..(37): Xaa is C or S
SAAPXXVPQALSPINILYFVGRKPKVYGKIPMIVRSXK

SEQ ID NO: 33963 - protein, 34 aa, Artificial Sequence
  Non-cyclic GFR-binding peptide
  MOD_RES (2)..(3): Xaa is C or S
PXXVPEKMSATSILYYDENKNVVLRKHRNMTVES

SEQ ID NO: 33964 - protein, 39 aa, Artificial Sequence
  Non-cyclic GFR-binding peptide
  MOD_RES (3)..(4)..(38): Xaa is C or S
  MOD_RES (18)..(19)..(20)..(21)..(22): Xaa is A or G
  MOD_RES (23)..(24)..(25)..(26): Xaa is A or G or absent
EPXXVPEKMEPISILYLXXXXXXXXXKFKYENMTVESXA

SEQ ID NO: 33965 - protein, 41 aa, Artificial Sequence
  Non-cyclic GFR-binding peptide
  MOD_RES (3)..(4)..(38)..(40): Xaa is C or S
  MOD_RES (18)..(19)..(20)..(21)..(22): Xaa is A or G
  MOD_RES (23)..(24)..(25)..(26): Xaa is A or G or absent
KAXXVPTKLSATSILYYXXXXXXXXXLRKHRGMAVSEXGXR

SEQ ID NO: 33966 - protein, 35 aa, Artificial Sequence
  Non-cyclic GFR-binding peptide
  MOD_RES (1)..(2)..(33)..(35): Xaa is C or S
XXAPVKTSATSMLYYDNGRVLLLRKHRMIVEEXGX

SEQ ID NO: 33967 - protein, 37 aa, Artificial Sequence
  Non-cyclic GFR-binding peptide
  MOD_RES (4)..(5): Xaa is C or S
  MOD_RES (19)..(20)..(21)..(22)..(23): Xaa is A or G
  MOD_RES (24)..(25)..(26)..(27): Xaa is A or G or absent
AGPXXTPTKMSPISMLYKXXXXXXXXXLKYHYGMVVD

SEQ ID NO: 33968 - protein, 35 aa, Artificial Sequence
  Non-cyclic GFR-binding peptide
  MOD_RES (1)..(35): Xaa is C or S
  MOD_RES (15)..(16)..(17)..(18)..(19): Xaa is A or G
  MOD_RES (20)..(21)..(22)..(23): Xaa is A or G or absent
XVPTRLEPISILYLXXXXXXXXXKFKYEDMVVESX

SEQ ID NO: 33969 - protein, 32 aa, Artificial Sequence
  Non-cyclic GFR-binding peptide
  MOD_RES (14)..(15)..(16)..(17)..(18): Xaa is A or G
  MOD_RES (19)..(20)..(21)..(22): Xaa is A or G or absent
APVKTSATSMLYYXXXXXXXXXLRKHRMIVEE

SEQ ID NO: 33970 - protein, 37 aa, Artificial Sequence
  Non-cyclic GFR-binding peptide
  MOD_RES (3)..(4)..(35)..(37): Xaa is C or S
SPXXVSQDLSPINILYFIGKTPKIYGKIPMIVKSXKX

SEQ ID NO: 33971 - protein, 37 aa, Artificial Sequence
  Non-cyclic GFR-binding peptide
  MOD_RES (3)..(4): Xaa is C or S
  MOD_RES (18)..(19)..(20)..(21)..(22): Xaa is A or G
  MOD_RES (23)..(24)..(25)..(26): Xaa is A or G or absent
KAXXVPTKLSATSILYYXXXXXXXXXLRKHRGMAVSE

SEQ ID NO: 33972 - protein, 35 aa, Artificial Sequence
  Non-cyclic GFR-binding peptide
  MOD_RES (32)..(34): Xaa is C or S
VPTKLSATSILYYDKGVVTYLRKHRGMAVSEXGXR

SEQ ID NO: 33973 - protein, 43 aa, Artificial Sequence
  Non-cyclic GFR-binding peptide
  MOD_RES (5)..(6)..(40)..(42): Xaa is C or S
  MOD_RES (20)..(21)..(22)..(23)..(24): Xaa is A or G
  MOD_RES (25)..(26)..(27)..(28): Xaa is A or G or absent
SAGPXXTPTKMSPISMLYKXXXXXXXXXLKYHYGMVVDRXGXS

SEQ ID NO: 33974 - protein, 40 aa, Artificial Sequence
  Non-cyclic GFR-binding peptide
  MOD_RES (4)..(5)..(39): Xaa is C or S
  MOD_RES (19)..(20)..(21)..(22)..(23): Xaa is A or G
  MOD_RES (24)..(25)..(26)..(27): Xaa is A or G or absent
PEPXXVPEKMEPISILYLXXXXXXXXXKFKYENMTVESXA

SEQ ID NO: 33975 - protein, 36 aa, Artificial Sequence
  Non-cyclic GFR-binding peptide
  MOD_RES (3)..(4): Xaa is C or S
  MOD_RES (18)..(19)..(20)..(21)..(22): Xaa is A or G
  MOD_RES (23)..(24)..(25)..(26): Xaa is A or G or absent
GPXXTPTKMSPISMLYKXXXXXXXXXLKYHYGMVVD

SEQ ID NO: 33976 - protein, 38 aa, Artificial Sequence
  Non-cyclic GFR-binding peptide
  MOD_RES (2)..(3)..(37): Xaa is C or S
  MOD_RES (17)..(18)..(19)..(20)..(21): Xaa is A or G
  MOD_RES (22)..(23)..(24)..(25): Xaa is A or G or absent
PXXTPTKMSATSMLYYXXXXXXXXXLRKHRGMVVDRXG

SEQ ID NO: 33977 - protein, 39 aa, Artificial Sequence
  Non-cyclic GFR-binding peptide
  MOD_RES (6)..(7)..(39): Xaa is C or S
STPPTXXVPTRLEPISILYLDSANNVVKFKYEDMVVESX

SEQ ID NO: 33978 - protein, 34 aa, Artificial Sequence
  Non-cyclic GFR-binding peptide
  MOD_RES (1)..(1): Xaa is C or S
  MOD_RES (15)..(16)..(17)..(18)..(19): Xaa is A or G
  MOD_RES (20)..(21)..(22)..(23): Xaa is A or G or absent
XVPEKMSPISILYKXXXXXXXXXLKYHYNMTVES

SEQ ID NO: 33979 - protein, 34 aa, Artificial Sequence
  Non-cyclic GFR-binding peptide
  MOD_RES (34)..(34): Xaa is C or S
  MOD_RES (14)..(15)..(16)..(17)..(18): Xaa is A or G
  MOD_RES (19)..(20)..(21)..(22): Xaa is A or G or absent
VPTRLSPISILYKXXXXXXXXXLKYHYDMVVESX

SEQ ID NO: 33980 - protein, 35 aa, Artificial Sequence
  Non-cyclic GFR-binding peptide
  MOD_RES (4)..(5): Xaa is C or S
PEPXXVPEKMEPISILYLDENKNVVKFKYENMTVE

SEQ ID NO: 33981 - protein, 39 aa, Artificial Sequence
  Non-cyclic GFR-binding peptide
  MOD_RES (5)..(6)..(39): Xaa is C or S
  MOD_RES (20)..(21)..(22)..(23)..(24): Xaa is A or G
  MOD_RES (25)..(26)..(27)..(28): Xaa is A or G or absent
SASPXXVPQDLSPINILYFXXXXXXXXXYGKIPMVVKSX

SEQ ID NO: 33982 - protein, 42 aa, Artificial Sequence
  Non-cyclic GFR-binding peptide
  MOD_RES (6)..(7)..(41): Xaa is C or S
  MOD_RES (21)..(22)..(23)..(24)..(25): Xaa is A or G
  MOD_RES (26)..(27)..(28)..(29): Xaa is A or G or absent
STPPTXXVPTRLSATSILYYXXXXXXXXXLRKHRDMVVESXG

SEQ ID NO: 33983 - protein, 31 aa, Artificial Sequence
  Non-cyclic GFR-binding peptide
VPEKMSPISILYKDENKNVVLKYHYNMTVES

SEQ ID NO: 33984 - protein, 34 aa, Artificial Sequence
  Non-cyclic GFR-binding peptide
  MOD_RES (3)..(4): Xaa is C or S
EPXXVPEKMSPISILYKDENKNVVLKYHYNMTVE

SEQ ID NO: 33985 - protein, 39 aa, Artificial Sequence
  Non-cyclic GFR-binding peptide
  MOD_RES (1)..(2)..(36)..(38): Xaa is C or S
  MOD_RES (16)..(17)..(18)..(19)..(20): Xaa is A or G
  MOD_RES (21)..(22)..(23)..(24): Xaa is A or G or absent
XXVPTRLEPISILYLXXXXXXXXXKFKYEDMVVESXGXR

SEQ ID NO: 33986 - protein, 40 aa, Artificial Sequence
  Non-cyclic GFR-binding peptide
  MOD_RES (4)..(5)..(39): Xaa is C or S
  MOD_RES (19)..(20)..(21)..(22)..(23): Xaa is A or G
  MOD_RES (24)..(25)..(26)..(27): Xaa is A or G or absent
PEPXXVPEKMNAISILYFXXXXXXXXXLKKYRNMTVESXA

SEQ ID NO: 33987 - protein, 37 aa, Artificial Sequence
  Non-cyclic GFR-binding peptide
  MOD_RES (4)..(5): Xaa is C or S
  MOD_RES (19)..(20)..(21)..(22)..(23): Xaa is A or G
  MOD_RES (24)..(25)..(26)..(27): Xaa is A or G or absent
PPTXXVPTRLSPISILYKXXXXXXXXXLKYHYDMVVE

SEQ ID NO: 33988 - protein, 38 aa, Artificial Sequence
  Non-cyclic GFR-binding peptide
  MOD_RES (3)..(4)..(36)..(38): Xaa is C or S
GPXXTPTKMSPISMLYKNDKQQIILKYHYGMVVDRXGX

SEQ ID NO: 33989 - protein, 37 aa, Artificial Sequence
  Non-cyclic GFR-binding peptide
  MOD_RES (1)..(35)..(37): Xaa is C or S
  MOD_RES (15)..(16)..(17)..(18)..(19): Xaa is A or G
  MOD_RES (20)..(21)..(22)..(23): Xaa is A or G or absent
XVPTRLEPISILYLXXXXXXXXXKFKYEDMVVESXGX

SEQ ID NO: 33990 - protein, 34 aa, Artificial Sequence
  Non-cyclic GFR-binding peptide
  MOD_RES (34)..(34): Xaa is C or S
  MOD_RES (14)..(15)..(16)..(17)..(18): Xaa is A or G
  MOD_RES (19)..(20)..(21)..(22): Xaa is A or G or absent
VPARLSATSILYYXXXXXXXXXLRKHRDMVVEAX

SEQ ID NO: 33991 - protein, 35 aa, Artificial Sequence
  Non-cyclic GFR-binding peptide
  MOD_RES (1)..(35): Xaa is C or S
  MOD_RES (15)..(16)..(17)..(18)..(19): Xaa is A or G
  MOD_RES (20)..(21)..(22)..(23): Xaa is A or G or absent
XTPTKMSPISMLYKXXXXXXXXXLKYHYGMVVDRX

SEQ ID NO: 33992 - protein, 42 aa, Artificial Sequence
  Non-cyclic GFR-binding peptide
  MOD_RES (6)..(7)..(39)..(41): Xaa is C or S
STPPTXXVPTRLEPISILYLDSANNVVKFKYEDMVVESXGXR

SEQ ID NO: 33993 - protein, 41 aa, Artificial Sequence
  Non-cyclic GFR-binding peptide
  MOD_RES (5)..(6)..(39)..(41): Xaa is C or S
  MOD_RES (20)..(21)..(22)..(23)..(24): Xaa is A or G
  MOD_RES (25)..(26)..(27)..(28): Xaa is A or G or absent
VPSTXXAPVKTEPISMLYLXXXXXXXXXKFKYEMIVEEXGX

SEQ ID NO: 33994 - protein, 42 aa, Artificial Sequence
  Non-cyclic GFR-binding peptide
  MOD_RES (5)..(6)..(40)..(42): Xaa is C or S
  MOD_RES (20)..(21)..(22)..(23)..(24): Xaa is A or G
  MOD_RES (25)..(26)..(27)..(28): Xaa is A or G or absent
TPPTXXVPTRLSATSILYYXXXXXXXXXLRKHRDMVVESXGX

SEQ ID NO: 33995 - protein, 35 aa, Artificial Sequence
  Non-cyclic GFR-binding peptide
  MOD_RES (2)..(3): Xaa is C or S
  MOD_RES (17)..(18)..(19)..(20)..(21): Xaa is A or G
  MOD_RES (22)..(23)..(24)..(25): Xaa is A or G or absent
PXXTPTKMEPISMLYLXXXXXXXXXKFKYEGMVVD

SEQ ID NO: 33996 - protein, 33 aa, Artificial Sequence
  Non-cyclic GFR-binding peptide
  MOD_RES (1)..(2): Xaa is C or S
XXVPEKMNAISILYFDENKNVVLKKYRNMTVES

SEQ ID NO: 33997 - protein, 36 aa, Artificial Sequence
  Non-cyclic GFR-binding peptide
  MOD_RES (1)..(2)..(36): Xaa is C or S
  MOD_RES (16)..(17)..(18)..(19)..(20): Xaa is A or G
  MOD_RES (21)..(22)..(23)..(24): Xaa is A or G or absent
XXVPEKMEPISILYLXXXXXXXXXKFKYENMTVESX

SEQ ID NO: 33998 - protein, 41 aa, Artificial Sequence
  Non-cyclic GFR-binding peptide
  MOD_RES (6)..(7)..(41): Xaa is C or S
  MOD_RES (21)..(22)..(23)..(24)..(25): Xaa is A or G
  MOD_RES (26)..(27)..(28)..(29): Xaa is A or G or absent
HVPKPXXAPTKLSPISVLYKXXXXXXXXXLKYHYNMVVRSX

SEQ ID NO: 33999 - protein, 36 aa, Artificial Sequence
  Non-cyclic GFR-binding peptide
  MOD_RES (2)..(3)..(36): Xaa is C or S
  MOD_RES (17)..(18)..(19)..(20)..(21): Xaa is A or G
  MOD_RES (22)..(23)..(24)..(25): Xaa is A or G or absent
PXXVSQDLSPINILYFXXXXXXXXXYGKIPMIVKSX

SEQ ID NO: 34000 - protein, 44 aa, Artificial Sequence
  Non-cyclic GFR-binding peptide
  MOD_RES (6)..(7)..(41)..(43): Xaa is C or S
  MOD_RES (21)..(22)..(23)..(24)..(25): Xaa is A or G
  MOD_RES (26)..(27)..(28)..(29): Xaa is A or G or absent
GSAGPXXTPTKMSATSMLYYXXXXXXXXXLRKHRGMVVDRXGXS

SEQ ID NO: 34001 - protein, 38 aa, Artificial Sequence
  Non-cyclic GFR-binding peptide
  MOD_RES (6)..(7): Xaa is C or S
GIPEPXXVPEKMSPINILYFDENKNVVYGKIPNMTVES

SEQ ID NO: 34002 - protein, 37 aa, Artificial Sequence
  Non-cyclic GFR-binding peptide
  MOD_RES (4)..(5): Xaa is C or S
  MOD_RES (19)..(20)..(21)..(22)..(23): Xaa is A or G
  MOD_RES (24)..(25)..(26)..(27): Xaa is A or G or absent
AGPXXTPTKMEPISMLYLXXXXXXXXXKFKYEGMVVD

SEQ ID NO: 34003 - protein, 41 aa, Artificial Sequence
  Non-cyclic GFR-binding peptide
  MOD_RES (3)..(4)..(38)..(40): Xaa is C or S
  MOD_RES (18)..(19)..(20)..(21)..(22): Xaa is A or G
  MOD_RES (23)..(24)..(25)..(26): Xaa is A or G or absent
ASXXVPARLSATSILYYXXXXXXXXXLRKHRDMVVEAXGXR

SEQ ID NO: 34004 - protein, 41 aa, Artificial Sequence
  Non-cyclic GFR-binding peptide
  MOD_RES (6)..(7)..(39)..(41): Xaa is C or S
GIPEPXXVPEKMNAISILYFDENKNVVLKKYRNMTVESXAX

SEQ ID NO: 34005 - protein, 35 aa, Artificial Sequence
  Non-cyclic GFR-binding peptide
  MOD_RES (4)..(5): Xaa is C or S
AAPXXVPQALSPINILYFVGRKPKVYGKIPMIVRS

SEQ ID NO: 34006 - protein, 39 aa, Artificial Sequence
  Non-cyclic GFR-binding peptide
  MOD_RES (4)..(5)..(37)..(39): Xaa is C or S
PEPXXVPEKMEPISILYLDENKNVVKFKYENMTVESXAX

SEQ ID NO: 34007 - protein, 38 aa, Artificial Sequence
  Non-cyclic GFR-binding peptide
  MOD_RES (5)..(6)..(38): Xaa is C or S
APASXXVPARLSATSILYYDAANNVVLRKHRDMVVEAX

SEQ ID NO: 34008 - protein, 38 aa, Artificial Sequence
  Non-cyclic GFR-binding peptide
  MOD_RES (4)..(5): Xaa is C or S
  MOD_RES (19)..(20)..(21)..(22)..(23): Xaa is A or G
  MOD_RES (24)..(25)..(26)..(27): Xaa is A or G or absent
PPTXXVPTRLEPISILYLXXXXXXXXXKFKYEDMVVES

SEQ ID NO: 34009 - protein, 41 aa, Artificial Sequence
  Non-cyclic GFR-binding peptide
  MOD_RES (6)..(7)..(41): Xaa is C or S
  MOD_RES (21)..(22)..(23)..(24)..(25): Xaa is A or G
  MOD_RES (26)..(27)..(28)..(29): Xaa is A or G or absent
GIPEPXXVPEKMSATSILYYXXXXXXXXXLRKHRNMTVESX

SEQ ID NO: 34010 - protein, 34 aa, Artificial Sequence
  Non-cyclic GFR-binding peptide
  MOD_RES (1)..(2)..(33): Xaa is C or S
XXAPVKTSPISMLYKDNGRVLLLKYHYMIVEEXG

SEQ ID NO: 34011 - protein, 39 aa, Artificial Sequence
  Non-cyclic GFR-binding peptide
  MOD_RES (4)..(5)..(39): Xaa is C or S
  MOD_RES (19)..(20)..(21)..(22)..(23): Xaa is A or G
  MOD_RES (24)..(25)..(26)..(27): Xaa is A or G or absent
PEPXXVPEKMSATSILYYXXXXXXXXXLRKHRNMTVESX

SEQ ID NO: 34012 - protein, 38 aa, Artificial Sequence
  Non-cyclic GFR-binding peptide
  MOD_RES (2)..(3)..(35)..(37): Xaa is C or S
TXXVPTRLSATSILYYDSANNVVLRKHRDMVVESXGXR

SEQ ID NO: 34013 - protein, 32 aa, Artificial Sequence
  Non-cyclic GFR-binding peptide
  MOD_RES (1)..(1): Xaa is C or S
XTPTKMSATSMLYYNDKQQIILRKHRGMVVDR

SEQ ID NO: 34014 - protein, 38 aa, Artificial Sequence
  Non-cyclic GFR-binding peptide
  MOD_RES (4)..(5): Xaa is C or S
  MOD_RES (19)..(20)..(21)..(22)..(23): Xaa is A or G
  MOD_RES (24)..(25)..(26)..(27): Xaa is A or G or absent
PEPXXVPEKMEPISILYLXXXXXXXXXKFKYENMTVES

SEQ ID NO: 34015 - protein, 34 aa, Artificial Sequence
  Non-cyclic GFR-binding peptide
  MOD_RES (1)..(32)..(34): Xaa is C or S
XVSQDLSPINILYFIGKTPKIYGKIPMIVKSXKX

SEQ ID NO: 34016 - protein, 37 aa, Artificial Sequence
  Non-cyclic GFR-binding peptide
  MOD_RES (5)..(6)..(37): Xaa is C or S
VPSTXXAPVKTSPISMLYKDNGRVLLLKYHYMIVEEX

SEQ ID NO: 34017 - protein, 38 aa, Artificial Sequence
  Non-cyclic GFR-binding peptide
  MOD_RES (5)..(6): Xaa is C or S
  MOD_RES (20)..(21)..(22)..(23)..(24): Xaa is A or G
  MOD_RES (25)..(26)..(27)..(28): Xaa is A or G or absent
VPSTXXAPVKTEPISMLYLXXXXXXXXXKFKYEMIVEE

SEQ ID NO: 34018 - protein, 37 aa, Artificial Sequence
  Non-cyclic GFR-binding peptide
  MOD_RES (2)..(3)..(35)..(37): Xaa is C or S
PXXTPTKMEPISMLYLNDKQQIIKFKYEGMVVDRXGX

SEQ ID NO: 34019 - protein, 40 aa, Artificial Sequence
  Non-cyclic GFR-binding peptide
  MOD_RES (4)..(5)..(38)..(40): Xaa is C or S
  MOD_RES (19)..(20)..(21)..(22)..(23): Xaa is A or G
  MOD_RES (24)..(25)..(26)..(27): Xaa is A or G or absent
PSTXXAPVKTSPISMLYKXXXXXXXXXLKYHYMIVEEXGX

SEQ ID NO: 34020 - protein, 36 aa, Artificial Sequence
  Non-cyclic GFR-binding peptide
  MOD_RES (3)..(4): Xaa is C or S
  MOD_RES (18)..(19)..(20)..(21)..(22): Xaa is A or G
  MOD_RES (23)..(24)..(25)..(26): Xaa is A or G or absent
KAXXVPTKLSATSILYYXXXXXXXXXLRKHRGMAVS

SEQ ID NO: 34021 - protein, 35 aa, Artificial Sequence
  Non-cyclic GFR-binding peptide
  MOD_RES (2)..(3)..(35): Xaa is C or S
PXXVPEKMSPINILYFDENKNVVYGKIPNMTVESX

SEQ ID NO: 34022 - protein, 38 aa, Artificial Sequence
  Non-cyclic GFR-binding peptide
  MOD_RES (1)..(2)..(36)..(38): Xaa is C or S
  MOD_RES (16)..(17)..(18)..(19)..(20): Xaa is A or G
  MOD_RES (21)..(22)..(23)..(24): Xaa is A or G or absent
XXVPARLSATSILYYXXXXXXXXXLRKHRDMVVEAXGX

SEQ ID NO: 34023 - protein, 38 aa, Artificial Sequence
  Non-cyclic GFR-binding peptide
  MOD_RES (5)..(6)..(37): Xaa is C or S
SASPXXVPQDLSPINILYFVGRTPKVYGKIPMVVKSXK

SEQ ID NO: 34024 - protein, 39 aa, Artificial Sequence
  Non-cyclic GFR-binding peptide
  MOD_RES (4)..(5)..(36)..(38): Xaa is C or S
ASPXXVPQDLSPINILYFVGRTPKVYGKIPMVVKSXKXS

SEQ ID NO: 34025 - protein, 42 aa, Artificial Sequence
  Non-cyclic GFR-binding peptide
  MOD_RES (5)..(6)..(40)..(42): Xaa is C or S
  MOD_RES (20)..(21)..(22)..(23)..(24): Xaa is A or G
  MOD_RES (25)..(26)..(27)..(28): Xaa is A or G or absent
IPEPXXVPEKMSATSILYYXXXXXXXXXLRKHRNMTVESXAX

SEQ ID NO: 34026 - protein, 33 aa, Artificial Sequence
  Non-cyclic GFR-binding peptide
  MOD_RES (1)..(2): Xaa is C or S
XXVPTRLEPISILYLDSANNVVKFKYEDMVVES

SEQ ID NO: 34027 - protein, 37 aa, Artificial Sequence
  Non-cyclic GFR-binding peptide
  MOD_RES (4)..(5)..(36): Xaa is C or S
AAPXXVPQALSPINILYFVGRKPKVYGKIPMIVRSXK

SEQ ID NO: 34028 - protein, 39 aa, Artificial Sequence
  Non-cyclic GFR-binding peptide
  MOD_RES (2)..(3)..(36)..(38): Xaa is C or S
  MOD_RES (17)..(18)..(19)..(20)..(21): Xaa is A or G
  MOD_RES (22)..(23)..(24)..(25): Xaa is A or G or absent
PXXVPQDLSPINILYFXXXXXXXXXYGKIPMVVKSXKXS

SEQ ID NO: 34029 - protein, 39 aa, Artificial Sequence
  Non-cyclic GFR-binding peptide
  MOD_RES (3)..(4)..(37)..(39): Xaa is C or S
  MOD_RES (18)..(19)..(20)..(21)..(22): Xaa is A or G
  MOD_RES (23)..(24)..(25)..(26): Xaa is A or G or absent
SPXXVSQDLSPINILYFXXXXXXXXXYGKIPMIVKSXKX

SEQ ID NO: 34030 - protein, 34 aa, Artificial Sequence
  Non-cyclic GFR-binding peptide
  MOD_RES (1)..(32)..(34): Xaa is C or S
XAPVKTSATSMLYYDNGRVLLLRKHRMIVEEXGX

SEQ ID NO: 34031 - protein, 31 aa, Artificial Sequence
  Non-cyclic GFR-binding peptide
VPTKLSATSILYYDKGVVTYLRKHRGMAVSE

SEQ ID NO: 34032 - protein, 39 aa, Artificial Sequence
  Non-cyclic GFR-binding peptide
  MOD_RES (3)..(4)..(36)..(38): Xaa is C or S
EPXXVPEKMSPISILYKDENKNVVLKYHYNMTVESXAXR

SEQ ID NO: 34033 - protein, 40 aa, Artificial Sequence
  Non-cyclic GFR-binding peptide
  MOD_RES (3)..(4)..(38)..(40): Xaa is C or S
  MOD_RES (18)..(19)..(20)..(21)..(22): Xaa is A or G
  MOD_RES (23)..(24)..(25)..(26): Xaa is A or G or absent
GPXXTPTKMSPISMLYKXXXXXXXXXLKYHYGMVVDRXGX

SEQ ID NO: 34034 - protein, 41 aa, Artificial Sequence
  Non-cyclic GFR-binding peptide
  MOD_RES (6)..(7)..(40): Xaa is C or S
  MOD_RES (21)..(22)..(23)..(24)..(25): Xaa is A or G
  MOD_RES (26)..(27)..(28)..(29): Xaa is A or G or absent
RVPSTXXAPVKTSPISMLYKXXXXXXXXXLKYHYMIVEEXG

SEQ ID NO: 34035 - protein, 34 aa, Artificial Sequence
  Non-cyclic GFR-binding peptide
  MOD_RES (1)..(1): Xaa is C or S
  MOD_RES (15)..(16)..(17)..(18)..(19): Xaa is A or G
  MOD_RES (20)..(21)..(22)..(23): Xaa is A or G or absent
XVPTKLSATSILYYXXXXXXXXXLRKHRGMAVSE

SEQ ID NO: 34036 - protein, 37 aa, Artificial Sequence
  Non-cyclic GFR-binding peptide
  MOD_RES (34)..(36): Xaa is C or S
  MOD_RES (14)..(15)..(16)..(17)..(18): Xaa is A or G
  MOD_RES (19)..(20)..(21)..(22): Xaa is A or G or absent
VPEKMEPISILYLXXXXXXXXXKFKYENMTVESXAXR

SEQ ID NO: 34037 - protein, 38 aa, Artificial Sequence
  Non-cyclic GFR-binding peptide
  MOD_RES (6)..(7): Xaa is C or S
GSAGPXXTPTKMEPISMLYLNDKQQIIKFKYEGMVVDR

SEQ ID NO: 34038 - protein, 35 aa, Artificial Sequence
  Non-cyclic GFR-binding peptide
  MOD_RES (1)..(34): Xaa is C or S
  MOD_RES (15)..(16)..(17)..(18)..(19): Xaa is A or G
  MOD_RES (20)..(21)..(22)..(23): Xaa is A or G or absent
XAPVKTEPISMLYLXXXXXXXXXKFKYEMIVEEXG

SEQ ID NO: 34039 - protein, 35 aa, Artificial Sequence
  Non-cyclic GFR-binding peptide
  MOD_RES (1)..(34): Xaa is C or S
  MOD_RES (15)..(16)..(17)..(18)..(19): Xaa is A or G
  MOD_RES (20)..(21)..(22)..(23): Xaa is A or G or absent
XVSQDLSPINILYFXXXXXXXXXYGKIPMIVKSXK

SEQ ID NO: 34040 - protein, 40 aa, Artificial Sequence
  Non-cyclic GFR-binding peptide
  MOD_RES (2)..(3)..(37)..(39): Xaa is C or S
  MOD_RES (17)..(18)..(19)..(20)..(21): Xaa is A or G
  MOD_RES (22)..(23)..(24)..(25): Xaa is A or G or absent
PXXVPEKMSATSILYYXXXXXXXXXLRKHRNMTVESXAXR

SEQ ID NO: 34041 - protein, 38 aa, Artificial Sequence
  Non-cyclic GFR-binding peptide
  MOD_RES (5)..(6): Xaa is C or S
  MOD_RES (20)..(21)..(22)..(23)..(24): Xaa is A or G
  MOD_RES (25)..(26)..(27)..(28): Xaa is A or G or absent
VPSTXXAPVKTSPISMLYKXXXXXXXXXLKYHYMIVEE

SEQ ID NO: 34042 - protein, 35 aa, Artificial Sequence
  Non-cyclic GFR-binding peptide
  MOD_RES (2)..(3): Xaa is C or S
  MOD_RES (17)..(18)..(19)..(20)..(21): Xaa is A or G
  MOD_RES (22)..(23)..(24)..(25): Xaa is A or G or absent
PXXVPEKMNAISILYFXXXXXXXXXLKKYRNMTVE

SEQ ID NO: 34043 - protein, 34 aa, Artificial Sequence
  Non-cyclic GFR-binding peptide
  MOD_RES (33)..(33): Xaa is C or S
  MOD_RES (14)..(15)..(16)..(17)..(18): Xaa is A or G
  MOD_RES (19)..(20)..(21)..(22): Xaa is A or G or absent
VSQDLSPINILYFXXXXXXXXXYGKIPMIVKSXK

SEQ ID NO: 34044 - protein, 30 aa, Artificial Sequence
  Non-cyclic GFR-binding peptide
APVKTEPISMLYLDNGRVLLKFKYEMIVEE

SEQ ID NO: 34045 - protein, 32 aa, Artificial Sequence
  Non-cyclic GFR-binding peptide
  MOD_RES (1)..(1): Xaa is C or S
XVPEKMSATSILYYDENKNVVLRKHRNMTVES

SEQ ID NO: 34046 - protein, 40 aa, Artificial Sequence
  Non-cyclic GFR-binding peptide
  MOD_RES (3)..(4)..(37)..(39): Xaa is C or S
  MOD_RES (18)..(19)..(20)..(21)..(22): Xaa is A or G
  MOD_RES (23)..(24)..(25)..(26): Xaa is A or G or absent
STXXAPVKTSATSMLYYXXXXXXXXXLRKHRMIVEEXGXL

SEQ ID NO: 34047 - protein, 35 aa, Artificial Sequence
  Non-cyclic GFR-binding peptide
  MOD_RES (4)..(5): Xaa is C or S
PSTXXAPVKTEPISMLYLDNGRVLLKFKYEMIVEE

SEQ ID NO: 34048 - protein, 39 aa, Artificial Sequence
  Non-cyclic GFR-binding peptide
  MOD_RES (6)..(7): Xaa is C or S
  MOD_RES (21)..(22)..(23)..(24)..(25): Xaa is A or G
  MOD_RES (26)..(27)..(28)..(29): Xaa is A or G or absent
STPPTXXVPTRLSATSILYYXXXXXXXXXLRKHRDMVVE

SEQ ID NO: 34049 - protein, 35 aa, Artificial Sequence
  Non-cyclic GFR-binding peptide
  MOD_RES (33)..(35): Xaa is C or S
  MOD_RES (14)..(15)..(16)..(17)..(18): Xaa is A or G
  MOD_RES (19)..(20)..(21)..(22): Xaa is A or G or absent
VSQDLSPINILYFXXXXXXXXXYGKIPMIVKSXKX

SEQ ID NO: 34050 - protein, 36 aa, Artificial Sequence
  Non-cyclic GFR-binding peptide
  MOD_RES (1)..(2)..(36): Xaa is C or S
  MOD_RES (16)..(17)..(18)..(19)..(20): Xaa is A or G
  MOD_RES (21)..(22)..(23)..(24): Xaa is A or G or absent
XXVPTKLSATSILYYXXXXXXXXXLRKHRGMAVSEX

SEQ ID NO: 34051 - protein, 43 aa, Artificial Sequence
  Non-cyclic GFR-binding peptide
  MOD_RES (5)..(6)..(40)..(42): Xaa is C or S
  MOD_RES (20)..(21)..(22)..(23)..(24): Xaa is A or G
  MOD_RES (25)..(26)..(27)..(28): Xaa is A or G or absent
APASXXVPARLSATSILYYXXXXXXXXXLRKHRDMVVEAXGXR

SEQ ID NO: 34052 - protein, 33 aa, Artificial Sequence
  Non-cyclic GFR-binding peptide
  MOD_RES (2)..(3): Xaa is C or S
PXXVPQALSPINILYFVGRKPKVYGKIPMIVRS

SEQ ID NO: 34053 - protein, 37 aa, Artificial Sequence
  Non-cyclic GFR-binding peptide
  MOD_RES (4)..(5)..(37): Xaa is C or S
PEPXXVPEKMEPISILYLDENKNVVKFKYENMTVESX

SEQ ID NO: 34054 - protein, 42 aa, Artificial Sequence
  Non-cyclic GFR-binding peptide
  MOD_RES (6)..(7)..(39)..(41): Xaa is C or S
GIPEPXXVPEKMSPINILYFDENKNVVYGKIPNMTVESXAXR

SEQ ID NO: 34055 - protein, 41 aa, Artificial Sequence
  Non-cyclic GFR-binding peptide
  MOD_RES (3)..(4)..(38)..(40): Xaa is C or S
  MOD_RES (18)..(19)..(20)..(21)..(22): Xaa is A or G
  MOD_RES (23)..(24)..(25)..(26): Xaa is A or G or absent
EPXXVPEKMSPISILYKXXXXXXXXXLKYHYNMTVESXAXR

SEQ ID NO: 34056 - protein, 37 aa, Artificial Sequence
  Non-cyclic GFR-binding peptide
  MOD_RES (4)..(5): Xaa is C or S
  MOD_RES (19)..(20)..(21)..(22)..(23): Xaa is A or G
  MOD_RES (24)..(25)..(26)..(27): Xaa is A or G or absent
ASPXXVPQDLSPINILYFXXXXXXXXXYGKIPMVVKS

SEQ ID NO: 34057 - protein, 30 aa, Artificial Sequence
  Non-cyclic GFR-binding peptide
VPEKMSATSILYYDENKNVVLRKHRNMTVE

SEQ ID NO: 34058 - protein, 38 aa, Artificial Sequence
  Non-cyclic GFR-binding peptide
  MOD_RES (4)..(5)..(36)..(38): Xaa is C or S
PSTXXAPVKTEPISMLYLDNGRVLLKFKYEMIVEEXGX

SEQ ID NO: 34059 - protein, 41 aa, Artificial Sequence
  Non-cyclic GFR-binding peptide
  MOD_RES (6)..(7)..(41): Xaa is C or S
  MOD_RES (21)..(22)..(23)..(24)..(25): Xaa is A or G
  MOD_RES (26)..(27)..(28)..(29): Xaa is A or G or absent
KASKAXXVPTKLSATSILYYXXXXXXXXXLRKHRGMAVSEX

SEQ ID NO: 34060 - protein, 32 aa, Artificial Sequence
  Non-cyclic GFR-binding peptide
  MOD_RES (31)..(31): Xaa is C or S
APVKTSPISMLYKDNGRVLLLKYHYMIVEEXG

SEQ ID NO: 34061 - protein, 37 aa, Artificial Sequence
  Non-cyclic GFR-binding peptide
  MOD_RES (2)..(3)..(35)..(37): Xaa is C or S
PXXTPTKMSPISMLYKNDKQQIILKYHYGMVVDRXGX

SEQ ID NO: 34062 - protein, 31 aa, Artificial Sequence
  Non-cyclic GFR-binding peptide
TPTKMSPISMLYKNDKQQIILKYHYGMVVDR

SEQ ID NO: 34063 - protein, 36 aa, Artificial Sequence
  Non-cyclic GFR-binding peptide
  MOD_RES (2)..(3): Xaa is C or S
  MOD_RES (17)..(18)..(19)..(20)..(21): Xaa is A or G
  MOD_RES (22)..(23)..(24)..(25): Xaa is A or G or absent
PXXVPEKMNAISILYFXXXXXXXXXLKKYRNMTVES

SEQ ID NO: 34064 - protein, 33 aa, Artificial Sequence
  Non-cyclic GFR-binding peptide
  MOD_RES (31)..(33): Xaa is C or S
VSQDLSPINILYFIGKTPKIYGKIPMIVKSXKX

SEQ ID NO: 34065 - protein, 36 aa, Artificial Sequence
  Non-cyclic GFR-binding peptide
  MOD_RES (33)..(35): Xaa is C or S
  MOD_RES (14)..(15)..(16)..(17)..(18): Xaa is A or G
  MOD_RES (19)..(20)..(21)..(22): Xaa is A or G or absent
VPQALSPINILYFXXXXXXXXXYGKIPMIVRSXKXS

SEQ ID NO: 34066 - protein, 37 aa, Artificial Sequence
  Non-cyclic GFR-binding peptide
  MOD_RES (6)..(7): Xaa is C or S
AAPASXXVPARLSATSILYYDAANNVVLRKHRDMVVE

SEQ ID NO: 34067 - protein, 38 aa, Artificial Sequence
  Non-cyclic GFR-binding peptide
  MOD_RES (5)..(6)..(37): Xaa is C or S
VPSTXXAPVKTSATSMLYYDNGRVLLLRKHRMIVEEXG

SEQ ID NO: 34068 - protein, 44 aa, Artificial Sequence
  Non-cyclic GFR-binding peptide
  MOD_RES (6)..(7)..(41)..(43): Xaa is C or S
  MOD_RES (21)..(22)..(23)..(24)..(25): Xaa is A or G
  MOD_RES (26)..(27)..(28)..(29): Xaa is A or G or absent
HVPKPXXAPTKLSATSVLYYXXXXXXXXXLRKHRNMVVRSXGXH

SEQ ID NO: 34069 - protein, 36 aa, Artificial Sequence
  Non-cyclic GFR-binding peptide
  MOD_RES (1)..(34)..(36): Xaa is C or S
  MOD_RES (15)..(16)..(17)..(18)..(19): Xaa is A or G
  MOD_RES (20)..(21)..(22)..(23): Xaa is A or G or absent
XVPQALSPINILYFXXXXXXXXXYGKIPMIVRSXKX

SEQ ID NO: 34070 - protein, 32 aa, Artificial Sequence
  Non-cyclic GFR-binding peptide
  MOD_RES (32)..(32): Xaa is C or S
VPTRLSATSILYYDSANNVVLRKHRDMVVESX

SEQ ID NO: 34071 - protein, 34 aa, Artificial Sequence
  Non-cyclic GFR-binding peptide
  MOD_RES (1)..(34): Xaa is C or S
  MOD_RES (15)..(16)..(17)..(18)..(19): Xaa is A or G
  MOD_RES (20)..(21)..(22)..(23): Xaa is A or G or absent
XVPQDLSPINILYFXXXXXXXXXYGKIPMVVKSX

SEQ ID NO: 34072 - protein, 43 aa, Artificial Sequence
  Non-cyclic GFR-binding peptide
  MOD_RES (6)..(7)..(41)..(43): Xaa is C or S
  MOD_RES (21)..(22)..(23)..(24)..(25): Xaa is A or G
  MOD_RES (26)..(27)..(28)..(29): Xaa is A or G or absent
STPPTXXVPTRLSATSILYYXXXXXXXXXLRKHRDMVVESXGX

SEQ ID NO: 34073 - protein, 35 aa, Artificial Sequence
  Non-cyclic GFR-binding peptide
  MOD_RES (1)..(2)..(34): Xaa is C or S
XXVPTKLSATSILYYDKGVVTYLRKHRGMAVSEXG

SEQ ID NO: 34074 - protein, 39 aa, Artificial Sequence
  Non-cyclic GFR-binding peptide
  MOD_RES (2)..(3)..(36)..(38): Xaa is C or S
  MOD_RES (17)..(18)..(19)..(20)..(21): Xaa is A or G
  MOD_RES (22)..(23)..(24)..(25): Xaa is A or G or absent
PXXVPQALSPINILYFXXXXXXXXXYGKIPMIVRSXKXS

SEQ ID NO: 34075 - protein, 41 aa, Artificial Sequence
  Non-cyclic GFR-binding peptide
  MOD_RES (6)..(7)..(41): Xaa is C or S
  MOD_RES (21)..(22)..(23)..(24)..(25): Xaa is A or G
  MOD_RES (26)..(27)..(28)..(29): Xaa is A or G or absent
GSAGPXXTPTKMSPISMLYKXXXXXXXXXLKYHYGMVVDRX

SEQ ID NO: 34076 - protein, 34 aa, Artificial Sequence
  Non-cyclic GFR-binding peptide
  MOD_RES (3)..(4): Xaa is C or S
STXXAPVKTSPISMLYKDNGRVLLLKYHYMIVEE

SEQ ID NO: 34077 - protein, 36 aa, Artificial Sequence
  Non-cyclic GFR-binding peptide
  MOD_RES (1)..(33)..(35): Xaa is C or S
XVPTRLSATSILYYDSANNVVLRKHRDMVVESXGXR

SEQ ID NO: 34078 - protein, 38 aa, Artificial Sequence
  Non-cyclic GFR-binding peptide
  MOD_RES (3)..(4)..(36)..(38): Xaa is C or S
GPXXTPTKMEPISMLYLNDKQQIIKFKYEGMVVDRXGX

SEQ ID NO: 34079 - protein, 43 aa, Artificial Sequence
  Non-cyclic GFR-binding peptide
  MOD_RES (6)..(7)..(41)..(43): Xaa is C or S
  MOD_RES (21)..(22)..(23)..(24)..(25): Xaa is A or G
  MOD_RES (26)..(27)..(28)..(29): Xaa is A or G or absent
STPPTXXVPTRLEPISILYLXXXXXXXXXKFKYEDMVVESXGX

SEQ ID NO: 34080 - protein, 37 aa, Artificial Sequence
  Non-cyclic GFR-binding peptide
  MOD_RES (4)..(5)..(37): Xaa is C or S
PEPXXVPEKMSATSILYYDENKNVVLRKHRNMTVESX

SEQ ID NO: 34081 - protein, 40 aa, Artificial Sequence
  Non-cyclic GFR-binding peptide
  MOD_RES (2)..(3)..(37)..(39): Xaa is C or S
  MOD_RES (17)..(18)..(19)..(20)..(21): Xaa is A or G
  MOD_RES (22)..(23)..(24)..(25): Xaa is A or G or absent
PXXTPTKMEPISMLYLXXXXXXXXXKFKYEGMVVDRXGXS

SEQ ID NO: 34082 - protein, 36 aa, Artificial Sequence
  Non-cyclic GFR-binding peptide
  MOD_RES (3)..(4)..(36): Xaa is C or S
EPXXVPEKMSATSILYYDENKNVVLRKHRNMTVESX

SEQ ID NO: 34083 - protein, 37 aa, Artificial Sequence
  Non-cyclic GFR-binding peptide
  MOD_RES (1)..(2)..(34)..(36): Xaa is C or S
XXTPTKMSPISMLYKNDKQQIILKYHYGMVVDRXGXS

SEQ ID NO: 34084 - protein, 39 aa, Artificial Sequence
  Non-cyclic GFR-binding peptide
  MOD_RES (6)..(7): Xaa is C or S
  MOD_RES (21)..(22)..(23)..(24)..(25): Xaa is A or G
  MOD_RES (26)..(27)..(28)..(29): Xaa is A or G or absent
ASASPXXVPQDLSPINILYFXXXXXXXXXYGKIPMVVKS

SEQ ID NO: 34085 - protein, 36 aa, Artificial Sequence
  Non-cyclic GFR-binding peptide
  MOD_RES (1)..(2)..(33)..(35): Xaa is C or S
XXAPVKTSPISMLYKDNGRVLLLKYHYMIVEEXGXL

SEQ ID NO: 34086 - protein, 39 aa, Artificial Sequence
  Non-cyclic GFR-binding peptide
  MOD_RES (5)..(6)..(37)..(39): Xaa is C or S
VPSTXXAPVKTEPISMLYLDNGRVLLKFKYEMIVEEXGX

SEQ ID NO: 34087 - protein, 39 aa, Artificial Sequence
  Non-cyclic GFR-binding peptide
  MOD_RES (3)..(4)..(36)..(38): Xaa is C or S
EPXXVPEKMEPISILYLDENKNVVKFKYENMTVESXAXR

SEQ ID NO: 34088 - protein, 36 aa, Artificial Sequence
  Non-cyclic GFR-binding peptide
  MOD_RES (1)..(35): Xaa is C or S
  MOD_RES (15)..(16)..(17)..(18)..(19): Xaa is A or G
  MOD_RES (20)..(21)..(22)..(23): Xaa is A or G or absent
XVPARLSATSILYYXXXXXXXXXLRKHRDMVVEAXG

SEQ ID NO: 34089 - protein, 35 aa, Artificial Sequence
  Non-cyclic GFR-binding peptide
  MOD_RES (3)..(4): Xaa is C or S
EPXXVPEKMNAISILYFDENKNVVLKKYRNMTVES

SEQ ID NO: 34090 - protein, 34 aa, Artificial Sequence
  Non-cyclic GFR-binding peptide
  MOD_RES (2)..(3): Xaa is C or S
TXXVPTRLSATSILYYDSANNVVLRKHRDMVVES

SEQ ID NO: 34091 - protein, 37 aa, Artificial Sequence
  Non-cyclic GFR-binding peptide
  MOD_RES (1)..(2)..(36): Xaa is C or S
  MOD_RES (16)..(17)..(18)..(19)..(20): Xaa is A or G
  MOD_RES (21)..(22)..(23)..(24): Xaa is A or G or absent
XXVPTKLSATSILYYXXXXXXXXXLRKHRGMAVSEXG

SEQ ID NO: 34092 - protein, 32 aa, Artificial Sequence
  Non-cyclic GFR-binding peptide
  MOD_RES (14)..(15)..(16)..(17)..(18): Xaa is A or G
  MOD_RES (19)..(20)..(21)..(22): Xaa is A or G or absent
VPEKMSATSILYYXXXXXXXXXLRKHRNMTVE

SEQ ID NO: 34093 - protein, 35 aa, Artificial Sequence
  Non-cyclic GFR-binding peptide
  MOD_RES (1)..(2)..(34): Xaa is C or S
XXVPARLSATSILYYDAANNVVLRKHRDMVVEAXG

SEQ ID NO: 34094 - protein, 38 aa, Artificial Sequence
  Non-cyclic GFR-binding peptide
  MOD_RES (3)..(4)..(37): Xaa is C or S
  MOD_RES (18)..(19)..(20)..(21)..(22): Xaa is A or G
  MOD_RES (23)..(24)..(25)..(26): Xaa is A or G or absent
SPXXVSQDLSPINILYFXXXXXXXXXYGKIPMIVKSXK

SEQ ID NO: 34095 - protein, 39 aa, Artificial Sequence
  Non-cyclic GFR-binding peptide
  MOD_RES (6)..(7): Xaa is C or S
  MOD_RES (21)..(22)..(23)..(24)..(25): Xaa is A or G
  MOD_RES (26)..(27)..(28)..(29): Xaa is A or G or absent
GIPEPXXVPEKMNAISILYFXXXXXXXXXLKKYRNMTVE

SEQ ID NO: 34096 - protein, 40 aa, Artificial Sequence
  Non-cyclic GFR-binding peptide
  MOD_RES (5)..(6)..(37)..(39): Xaa is C or S
VPSTXXAPVKTSPISMLYKDNGRVLLLKYHYMIVEEXGXL

SEQ ID NO: 34097 - protein, 38 aa, Artificial Sequence
  Non-cyclic GFR-binding peptide
  MOD_RES (3)..(4)..(38): Xaa is C or S
  MOD_RES (18)..(19)..(20)..(21)..(22): Xaa is A or G
  MOD_RES (23)..(24)..(25)..(26): Xaa is A or G or absent
EPXXVPEKMEPISILYLXXXXXXXXXKFKYENMTVESX

SEQ ID NO: 34098 - protein, 41 aa, Artificial Sequence
  Non-cyclic GFR-binding peptide
  MOD_RES (6)..(7)..(40): Xaa is C or S
  MOD_RES (21)..(22)..(23)..(24)..(25): Xaa is A or G
  MOD_RES (26)..(27)..(28)..(29): Xaa is A or G or absent
RVPSTXXAPVKTSATSMLYYXXXXXXXXXLRKHRMIVEEXG

SEQ ID NO: 34099 - protein, 36 aa, Artificial Sequence
  Non-cyclic GFR-binding peptide
  MOD_RES (1)..(33)..(35): Xaa is C or S
XVPARLSATSILYYDAANNVVLRKHRDMVVEAXGXR

SEQ ID NO: 34100 - protein, 35 aa, Artificial Sequence
  Non-cyclic GFR-binding peptide
  MOD_RES (2)..(3)..(35): Xaa is C or S
PXXVPEKMNAISILYFDENKNVVLKKYRNMTVESX

SEQ ID NO: 34101 - protein, 38 aa, Artificial Sequence
  Non-cyclic GFR-binding peptide
  MOD_RES (4)..(5)..(37): Xaa is C or S
PEPXXVPEKMSPINILYFDENKNVVYGKIPNMTVESXA

SEQ ID NO: 34102 - protein, 43 aa, Artificial Sequence
  Non-cyclic GFR-binding peptide
  MOD_RES (5)..(6)..(40)..(42): Xaa is C or S
  MOD_RES (20)..(21)..(22)..(23)..(24): Xaa is A or G
  MOD_RES (25)..(26)..(27)..(28): Xaa is A or G or absent
IPEPXXVPEKMNAISILYFXXXXXXXXXLKKYRNMTVESXAXR

SEQ ID NO: 34103 - protein, 36 aa, Artificial Sequence
  Non-cyclic GFR-binding peptide
  MOD_RES (3)..(4): Xaa is C or S
  MOD_RES (18)..(19)..(20)..(21)..(22): Xaa is A or G
  MOD_RES (23)..(24)..(25)..(26): Xaa is A or G or absent
STXXAPVKTSPISMLYKXXXXXXXXXLKYHYMIVEE

SEQ ID NO: 34104 - protein, 43 aa, Artificial Sequence
  Non-cyclic GFR-binding peptide
  MOD_RES (6)..(7)..(41)..(43): Xaa is C or S
  MOD_RES (21)..(22)..(23)..(24)..(25): Xaa is A or G
  MOD_RES (26)..(27)..(28)..(29): Xaa is A or G or absent
GIPEPXXVPEKMSPISILYKXXXXXXXXXLKYHYNMTVESXAX

SEQ ID NO: 34105 - protein, 39 aa, Artificial Sequence
  Non-cyclic GFR-binding peptide
  MOD_RES (5)..(6)..(39): Xaa is C or S
  MOD_RES (20)..(21)..(22)..(23)..(24): Xaa is A or G
  MOD_RES (25)..(26)..(27)..(28): Xaa is A or G or absent
VPSTXXAPVKTSATSMLYYXXXXXXXXXLRKHRMIVEEX

SEQ ID NO: 34106 - protein, 37 aa, Artificial Sequence
  Non-cyclic GFR-binding peptide
  MOD_RES (6)..(7): Xaa is C or S
STPPTXXVPTRLEPISILYLDSANNVVKFKYEDMVVE

SEQ ID NO: 34107 - protein, 37 aa, Artificial Sequence
  Non-cyclic GFR-binding peptide
  MOD_RES (1)..(35)..(37): Xaa is C or S
  MOD_RES (15)..(16)..(17)..(18)..(19): Xaa is A or G
  MOD_RES (20)..(21)..(22)..(23): Xaa is A or G or absent
XTPTKMSPISMLYKXXXXXXXXXLKYHYGMVVDRXGX

SEQ ID NO: 34108 - protein, 38 aa, Artificial Sequence
  Non-cyclic GFR-binding peptide
  MOD_RES (6)..(7): Xaa is C or S
STPPTXXVPTRLSATSILYYDSANNVVLRKHRDMVVES

SEQ ID NO: 34109 - protein, 36 aa, Artificial Sequence
  Non-cyclic GFR-binding peptide
  MOD_RES (2)..(3): Xaa is C or S
  MOD_RES (17)..(18)..(19)..(20)..(21): Xaa is A or G
  MOD_RES (22)..(23)..(24)..(25): Xaa is A or G or absent
TXXVPTRLSATSILYYXXXXXXXXXLRKHRDMVVES

SEQ ID NO: 34110 - protein, 32 aa, Artificial Sequence
  Non-cyclic GFR-binding peptide
  MOD_RES (32)..(32): Xaa is C or S
VPTRLEPISILYLDSANNVVKFKYEDMVVESX

SEQ ID NO: 34111 - protein, 40 aa, Artificial Sequence
  Non-cyclic GFR-binding peptide
  MOD_RES (5)..(6)..(38)..(40): Xaa is C or S
TPPTXXVPTRLSATSILYYDSANNVVLRKHRDMVVESXGX

SEQ ID NO: 34112 - protein, 35 aa, Artificial Sequence
  Non-cyclic GFR-binding peptide
  MOD_RES (2)..(3)..(34): Xaa is C or S
TXXAPVKTSATSMLYYDNGRVLLLRKHRMIVEEXG

SEQ ID NO: 34113 - protein, 39 aa, Artificial Sequence
  Non-cyclic GFR-binding peptide
  MOD_RES (4)..(5)..(39): Xaa is C or S
  MOD_RES (19)..(20)..(21)..(22)..(23): Xaa is A or G
  MOD_RES (24)..(25)..(26)..(27): Xaa is A or G or absent
PEPXXVPEKMSPISILYKXXXXXXXXXLKYHYNMTVESX

SEQ ID NO: 34114 - protein, 31 aa, Artificial Sequence
  Non-cyclic GFR-binding peptide
  MOD_RES (1)..(1): Xaa is C or S
XTPTKMEPISMLYLNDKQQIIKFKYEGMVVD

SEQ ID NO: 34115 - protein, 40 aa, Artificial Sequence
  Non-cyclic GFR-binding peptide
  MOD_RES (4)..(5)..(39): Xaa is C or S
  MOD_RES (19)..(20)..(21)..(22)..(23): Xaa is A or G
  MOD_RES (24)..(25)..(26)..(27): Xaa is A or G or absent
PPTXXVPTRLSATSILYYXXXXXXXXXLRKHRDMVVESXG

SEQ ID NO: 34116 - protein, 44 aa, Artificial Sequence
  Non-cyclic GFR-binding peptide
  MOD_RES (6)..(7)..(41)..(43): Xaa is C or S
  MOD_RES (21)..(22)..(23)..(24)..(25): Xaa is A or G
  MOD_RES (26)..(27)..(28)..(29): Xaa is A or G or absent
AAPASXXVPARLSATSILYYXXXXXXXXXLRKHRDMVVEAXGXR

SEQ ID NO: 34117 - protein, 36 aa, Artificial Sequence
  Non-cyclic GFR-binding peptide
  MOD_RES (34)..(36): Xaa is C or S
  MOD_RES (14)..(15)..(16)..(17)..(18): Xaa is A or G
  MOD_RES (19)..(20)..(21)..(22): Xaa is A or G or absent
VPARLSATSILYYXXXXXXXXXLRKHRDMVVEAXGX

SEQ ID NO: 34118 - protein, 32 aa, Artificial Sequence
  Non-cyclic GFR-binding peptide
  MOD_RES (31)..(31): Xaa is C or S
VPQDLSPINILYFVGRTPKVYGKIPMVVKSXK

SEQ ID NO: 34119 - protein, 30 aa, Artificial Sequence
  Non-cyclic GFR-binding peptide
APVKTSATSMLYYDNGRVLLLRKHRMIVEE

SEQ ID NO: 34120 - protein, 33 aa, Artificial Sequence
  Non-cyclic GFR-binding peptide
  MOD_RES (14)..(15)..(16)..(17)..(18): Xaa is A or G
  MOD_RES (19)..(20)..(21)..(22): Xaa is A or G or absent
VPARLSATSILYYXXXXXXXXXLRKHRDMVVEA

SEQ ID NO: 34121 - protein, 37 aa, Artificial Sequence
  Non-cyclic GFR-binding peptide
  MOD_RES (6)..(7): Xaa is C or S
GSAGPXXTPTKMSATSMLYYNDKQQIILRKHRGMVVD

SEQ ID NO: 34122 - protein, 38 aa, Artificial Sequence
  Non-cyclic GFR-binding peptide
  MOD_RES (1)..(35)..(37): Xaa is C or S
  MOD_RES (15)..(16)..(17)..(18)..(19): Xaa is A or G
  MOD_RES (20)..(21)..(22)..(23): Xaa is A or G or absent
XVPARLSATSILYYXXXXXXXXXLRKHRDMVVEAXGXR

SEQ ID NO: 34123 - protein, 34 aa, Artificial Sequence
  Non-cyclic GFR-binding peptide
  MOD_RES (32)..(34): Xaa is C or S
TPTKMEPISMLYLNDKQQIIKFKYEGMVVDRXGX

SEQ ID NO: 34124 - protein, 35 aa, Artificial Sequence
  Non-cyclic GFR-binding peptide
  MOD_RES (1)..(35): Xaa is C or S
  MOD_RES (15)..(16)..(17)..(18)..(19): Xaa is A or G
  MOD_RES (20)..(21)..(22)..(23): Xaa is A or G or absent
XVPARLSATSILYYXXXXXXXXXLRKHRDMVVEAX

SEQ ID NO: 34125 - protein, 41 aa, Artificial Sequence
  Non-cyclic GFR-binding peptide
  MOD_RES (3)..(4)..(38)..(40): Xaa is C or S
  MOD_RES (18)..(19)..(20)..(21)..(22): Xaa is A or G
  MOD_RES (23)..(24)..(25)..(26): Xaa is A or G or absent
GPXXTPTKMSPISMLYKXXXXXXXXXLKYHYGMVVDRXGXS

SEQ ID NO: 34126 - protein, 36 aa, Artificial Sequence
  Non-cyclic GFR-binding peptide
  MOD_RES (1)..(2)..(36): Xaa is C or S
  MOD_RES (16)..(17)..(18)..(19)..(20): Xaa is A or G
  MOD_RES (21)..(22)..(23)..(24): Xaa is A or G or absent
XXVPTRLSATSILYYXXXXXXXXXLRKHRDMVVESX

SEQ ID NO: 34127 - protein, 34 aa, Artificial Sequence
  Non-cyclic GFR-binding peptide
  MOD_RES (31)..(33): Xaa is C or S
APVKTSATSMLYYDNGRVLLLRKHRMIVEEXGXL

SEQ ID NO: 34128 - protein, 37 aa, Artificial Sequence
  Non-cyclic GFR-binding peptide
  MOD_RES (3)..(4)..(36): Xaa is C or S
GPXXTPTKMSPISMLYKNDKQQIILKYHYGMVVDRXG

SEQ ID NO: 34129 - protein, 41 aa, Artificial Sequence
  Non-cyclic GFR-binding peptide
  MOD_RES (6)..(7)..(41): Xaa is C or S
  MOD_RES (21)..(22)..(23)..(24)..(25): Xaa is A or G
  MOD_RES (26)..(27)..(28)..(29): Xaa is A or G or absent
STPPTXXVPTRLEPISILYLXXXXXXXXXKFKYEDMVVESX

SEQ ID NO: 34130 - protein, 39 aa, Artificial Sequence
  Non-cyclic GFR-binding peptide
  MOD_RES (1)..(2)..(36)..(38): Xaa is C or S
  MOD_RES (16)..(17)..(18)..(19)..(20): Xaa is A or G
  MOD_RES (21)..(22)..(23)..(24): Xaa is A or G or absent
XXVPEKMSPINILYFXXXXXXXXXYGKIPNMTVESXAXR

SEQ ID NO: 34131 - protein, 38 aa, Artificial Sequence
  Non-cyclic GFR-binding peptide
  MOD_RES (1)..(2)..(36)..(38): Xaa is C or S
  MOD_RES (16)..(17)..(18)..(19)..(20): Xaa is A or G
  MOD_RES (21)..(22)..(23)..(24): Xaa is A or G or absent
XXVPEKMSPISILYKXXXXXXXXXLKYHYNMTVESXAX

SEQ ID NO: 34132 - protein, 38 aa, Artificial Sequence
  Non-cyclic GFR-binding peptide
  MOD_RES (5)..(6): Xaa is C or S
  MOD_RES (20)..(21)..(22)..(23)..(24): Xaa is A or G
  MOD_RES (25)..(26)..(27)..(28): Xaa is A or G or absent
IPEPXXVPEKMSATSILYYXXXXXXXXXLRKHRNMTVE

SEQ ID NO: 34133 - protein, 35 aa, Artificial Sequence
  Non-cyclic GFR-binding peptide
  MOD_RES (3)..(4): Xaa is C or S
KAXXVPTKLSATSILYYDKGVVTYLRKHRGMAVSE

SEQ ID NO: 34134 - protein, 39 aa, Artificial Sequence
  Non-cyclic GFR-binding peptide
  MOD_RES (4)..(5)..(38): Xaa is C or S
  MOD_RES (19)..(20)..(21)..(22)..(23): Xaa is A or G
  MOD_RES (24)..(25)..(26)..(27): Xaa is A or G or absent
AAPXXVPQALSPINILYFXXXXXXXXXYGKIPMIVRSXK

SEQ ID NO: 34135 - protein, 36 aa, Artificial Sequence
  Non-cyclic GFR-binding peptide
  MOD_RES (4)..(5)..(36): Xaa is C or S
ASPXXVSQDLSPINILYFIGKTPKIYGKIPMIVKSX

SEQ ID NO: 34136 - protein, 32 aa, Artificial Sequence
  Non-cyclic GFR-binding peptide
  MOD_RES (1)..(1): Xaa is C or S
XVPTRLSPISILYKDSANNVVLKYHYDMVVES

SEQ ID NO: 34137 - protein, 34 aa, Artificial Sequence
  Non-cyclic GFR-binding peptide
  MOD_RES (33)..(33): Xaa is C or S
  MOD_RES (14)..(15)..(16)..(17)..(18): Xaa is A or G
  MOD_RES (19)..(20)..(21)..(22): Xaa is A or G or absent
APVKTEPISMLYLXXXXXXXXXKFKYEMIVEEXG

SEQ ID NO: 34138 - protein, 33 aa, Artificial Sequence
  Non-cyclic GFR-binding peptide
  MOD_RES (2)..(3): Xaa is C or S
TXXAPVKTSATSMLYYDNGRVLLLRKHRMIVEE

SEQ ID NO: 34139 - protein, 38 aa, Artificial Sequence
  Non-cyclic GFR-binding peptide
  MOD_RES (5)..(6): Xaa is C or S
  MOD_RES (20)..(21)..(22)..(23)..(24): Xaa is A or G
  MOD_RES (25)..(26)..(27)..(28): Xaa is A or G or absent
SAGPXXTPTKMSATSMLYYXXXXXXXXXLRKHRGMVVD

SEQ ID NO: 34140 - protein, 35 aa, Artificial Sequence
  Non-cyclic GFR-binding peptide
  MOD_RES (1)..(35): Xaa is C or S
  MOD_RES (15)..(16)..(17)..(18)..(19): Xaa is A or G
  MOD_RES (20)..(21)..(22)..(23): Xaa is A or G or absent
XTPTKMSATSMLYYXXXXXXXXXLRKHRGMVVDRX

SEQ ID NO: 34141 - protein, 37 aa, Artificial Sequence
  Non-cyclic GFR-binding peptide
  MOD_RES (3)..(4): Xaa is C or S
  MOD_RES (18)..(19)..(20)..(21)..(22): Xaa is A or G
  MOD_RES (23)..(24)..(25)..(26): Xaa is A or G or absent
EPXXVPEKMEPISILYLXXXXXXXXXKFKYENMTVES

SEQ ID NO: 34142 - protein, 39 aa, Artificial Sequence
  Non-cyclic GFR-binding peptide
  MOD_RES (5)..(6)..(38): Xaa is C or S
IPEPXXVPEKMNAISILYFDENKNVVLKKYRNMTVESXA

SEQ ID NO: 34143 - protein, 40 aa, Artificial Sequence
  Non-cyclic GFR-binding peptide
  MOD_RES (6)..(7): Xaa is C or S
  MOD_RES (21)..(22)..(23)..(24)..(25): Xaa is A or G
  MOD_RES (26)..(27)..(28)..(29): Xaa is A or G or absent
STPPTXXVPTRLSPISILYKXXXXXXXXXLKYHYDMVVES

SEQ ID NO: 34144 - protein, 40 aa, Artificial Sequence
  Non-cyclic GFR-binding peptide
  MOD_RES (6)..(7): Xaa is C or S
  MOD_RES (21)..(22)..(23)..(24)..(25): Xaa is A or G
  MOD_RES (26)..(27)..(28)..(29): Xaa is A or G or absent
GIPEPXXVPEKMSATSILYYXXXXXXXXXLRKHRNMTVES

SEQ ID NO: 34145 - protein, 36 aa, Artificial Sequence
  Non-cyclic GFR-binding peptide
  MOD_RES (1)..(2)..(35): Xaa is C or S
  MOD_RES (16)..(17)..(18)..(19)..(20): Xaa is A or G
  MOD_RES (21)..(22)..(23)..(24): Xaa is A or G or absent
XXAPVKTSPISMLYKXXXXXXXXXLKYHYMIVEEXG

SEQ ID NO: 34146 - protein, 38 aa, Artificial Sequence
  Non-cyclic GFR-binding peptide
  MOD_RES (5)..(6)..(38): Xaa is C or S
TPPTXXVPTRLSPISILYKDSANNVVLKYHYDMVVESX

SEQ ID NO: 34147 - protein, 36 aa, Artificial Sequence
  Non-cyclic GFR-binding peptide
  MOD_RES (1)..(35): Xaa is C or S
  MOD_RES (15)..(16)..(17)..(18)..(19): Xaa is A or G
  MOD_RES (20)..(21)..(22)..(23): Xaa is A or G or absent
XVPEKMNAISILYFXXXXXXXXXLKKYRNMTVESXA

SEQ ID NO: 34148 - protein, 33 aa, Artificial Sequence
  Non-cyclic GFR-binding peptide
  MOD_RES (1)..(32): Xaa is C or S
XVPQDLSPINILYFVGRTPKVYGKIPMVVKSXK

SEQ ID NO: 34149 - protein, 35 aa, Artificial Sequence
  Non-cyclic GFR-binding peptide
  MOD_RES (34)..(34): Xaa is C or S
  MOD_RES (14)..(15)..(16)..(17)..(18): Xaa is A or G
  MOD_RES (19)..(20)..(21)..(22): Xaa is A or G or absent
TPTKMSATSMLYYXXXXXXXXXLRKHRGMVVDRXG

SEQ ID NO: 34150 - protein, 36 aa, Artificial Sequence
  Non-cyclic GFR-binding peptide
  MOD_RES (3)..(4)..(36): Xaa is C or S
PTXXVPTRLSPISILYKDSANNVVLKYHYDMVVESX

SEQ ID NO: 34151 - protein, 41 aa, Artificial Sequence
  Non-cyclic GFR-binding peptide
  MOD_RES (6)..(7)..(38)..(40): Xaa is C or S
ASASPXXVPQDLSPINILYFVGRTPKVYGKIPMVVKSXKXS

SEQ ID NO: 34152 - protein, 34 aa, Artificial Sequence
  Non-cyclic GFR-binding peptide
  MOD_RES (3)..(4): Xaa is C or S
STXXAPVKTEPISMLYLDNGRVLLKFKYEMIVEE

SEQ ID NO: 34153 - protein, 39 aa, Artificial Sequence
  Non-cyclic GFR-binding peptide
  MOD_RES (5)..(6): Xaa is C or S
  MOD_RES (20)..(21)..(22)..(23)..(24): Xaa is A or G
  MOD_RES (25)..(26)..(27)..(28): Xaa is A or G or absent
IPEPXXVPEKMSPISILYKXXXXXXXXXLKYHYNMTVES

SEQ ID NO: 34154 - protein, 39 aa, Artificial Sequence
  Non-cyclic GFR-binding peptide
  MOD_RES (2)..(3)..(37)..(39): Xaa is C or S
  MOD_RES (17)..(18)..(19)..(20)..(21): Xaa is A or G
  MOD_RES (22)..(23)..(24)..(25): Xaa is A or G or absent
TXXVPTRLEPISILYLXXXXXXXXXKFKYEDMVVESXGX

SEQ ID NO: 34155 - protein, 40 aa, Artificial Sequence
  Non-cyclic GFR-binding peptide
  MOD_RES (5)..(6)..(38)..(40): Xaa is C or S
ASKAXXVPTKLSATSILYYDKGVVTYLRKHRGMAVSEXGX

SEQ ID NO: 34156 - protein, 38 aa, Artificial Sequence
  Non-cyclic GFR-binding peptide
  MOD_RES (5)..(6)..(37): Xaa is C or S
SASPXXVSQDLSPINILYFIGKTPKIYGKIPMIVKSXK

SEQ ID NO: 34157 - protein, 32 aa, Artificial Sequence
  Non-cyclic GFR-binding peptide
  MOD_RES (1)..(2): Xaa is C or S
XXTPTKMEPISMLYLNDKQQIIKFKYEGMVVD

SEQ ID NO: 34158 - protein, 34 aa, Artificial Sequence
  Non-cyclic GFR-binding peptide
  MOD_RES (1)..(1): Xaa is C or S
  MOD_RES (15)..(16)..(17)..(18)..(19): Xaa is A or G
  MOD_RES (20)..(21)..(22)..(23): Xaa is A or G or absent
XVPARLSATSILYYXXXXXXXXXLRKHRDMVVEA

SEQ ID NO: 34159 - protein, 37 aa, Artificial Sequence
  Non-cyclic GFR-binding peptide
  MOD_RES (4)..(5)..(37): Xaa is C or S
PPTXXVPTRLSPISILYKDSANNVVLKYHYDMVVESX

SEQ ID NO: 34160 - protein, 33 aa, Artificial Sequence
  Non-cyclic GFR-binding peptide
  MOD_RES (1)..(33): Xaa is C or S
XVPTRLSATSILYYDSANNVVLRKHRDMVVESX

SEQ ID NO: 34161 - protein, 42 aa, Artificial Sequence
  Non-cyclic GFR-binding peptide
  MOD_RES (6)..(7)..(40)..(42): Xaa is C or S
  MOD_RES (21)..(22)..(23)..(24)..(25): Xaa is A or G
  MOD_RES (26)..(27)..(28)..(29): Xaa is A or G or absent
ASASPXXVSQDLSPINILYFXXXXXXXXXYGKIPMIVKSXKX

SEQ ID NO: 34162 - protein, 36 aa, Artificial Sequence
  Non-cyclic GFR-binding peptide
  MOD_RES (34)..(36): Xaa is C or S
  MOD_RES (14)..(15)..(16)..(17)..(18): Xaa is A or G
  MOD_RES (19)..(20)..(21)..(22): Xaa is A or G or absent
VPEKMSPISILYKXXXXXXXXXLKYHYNMTVESXAX

SEQ ID NO: 34163 - protein, 34 aa, Artificial Sequence
  Non-cyclic GFR-binding peptide
  MOD_RES (1)..(2)..(34): Xaa is C or S
XXVPTRLSATSILYYDSANNVVLRKHRDMVVESX

SEQ ID NO: 34164 - protein, 30 aa, Artificial Sequence
  Non-cyclic GFR-binding peptide
APVKTSPISMLYKDNGRVLLLKYHYMIVEE

SEQ ID NO: 34165 - protein, 40 aa, Artificial Sequence
  Non-cyclic GFR-binding peptide
  MOD_RES (2)..(3)..(37)..(39): Xaa is C or S
  MOD_RES (17)..(18)..(19)..(20)..(21): Xaa is A or G
  MOD_RES (22)..(23)..(24)..(25): Xaa is A or G or absent
AXXVPTKLSATSILYYXXXXXXXXXLRKHRGMAVSEXGXR

SEQ ID NO: 34166 - protein, 36 aa, Artificial Sequence
  Non-cyclic GFR-binding peptide
  MOD_RES (3)..(4)..(36): Xaa is C or S
EPXXVPEKMEPISILYLDENKNVVKFKYENMTVESX

SEQ ID NO: 34167 - protein, 37 aa, Artificial Sequence
  Non-cyclic GFR-binding peptide
  MOD_RES (3)..(4)..(35)..(37): Xaa is C or S
STXXAPVKTSPISMLYKDNGRVLLLKYHYMIVEEXGX

SEQ ID NO: 34168 - protein, 40 aa, Artificial Sequence
  Non-cyclic GFR-binding peptide
  MOD_RES (4)..(5)..(38)..(40): Xaa is C or S
  MOD_RES (19)..(20)..(21)..(22)..(23): Xaa is A or G
  MOD_RES (24)..(25)..(26)..(27): Xaa is A or G or absent
ASPXXVSQDLSPINILYFXXXXXXXXXYGKIPMIVKSXKX

SEQ ID NO: 34169 - protein, 40 aa, Artificial Sequence
  Non-cyclic GFR-binding peptide
  MOD_RES (5)..(6)..(38)..(40): Xaa is C or S
IPEPXXVPEKMSATSILYYDENKNVVLRKHRNMTVESXAX

SEQ ID NO: 34170 - protein, 38 aa, Artificial Sequence
  Non-cyclic GFR-binding peptide
  MOD_RES (4)..(5): Xaa is C or S
  MOD_RES (19)..(20)..(21)..(22)..(23): Xaa is A or G
  MOD_RES (24)..(25)..(26)..(27): Xaa is A or G or absent
AGPXXTPTKMSATSMLYYXXXXXXXXXLRKHRGMVVDR

SEQ ID NO: 34171 - protein, 33 aa, Artificial Sequence
  Non-cyclic GFR-binding peptide
  MOD_RES (1)..(33): Xaa is C or S
XVPTRLEPISILYLDSANNVVKFKYEDMVVESX

SEQ ID NO: 34172 - protein, 42 aa, Artificial Sequence
  Non-cyclic GFR-binding peptide
  MOD_RES (5)..(6)..(39)..(41): Xaa is C or S
  MOD_RES (20)..(21)..(22)..(23)..(24): Xaa is A or G
  MOD_RES (25)..(26)..(27)..(28): Xaa is A or G or absent
VPSTXXAPVKTSATSMLYYXXXXXXXXXLRKHRMIVEEXGXL

SEQ ID NO: 34173 - protein, 39 aa, Artificial Sequence
  Non-cyclic GFR-binding peptide
  MOD_RES (3)..(4)..(38): Xaa is C or S
  MOD_RES (18)..(19)..(20)..(21)..(22): Xaa is A or G
  MOD_RES (23)..(24)..(25)..(26): Xaa is A or G or absent
GPXXTPTKMSATSMLYYXXXXXXXXXLRKHRGMVVDRXG

SEQ ID NO: 34174 - protein, 35 aa, Artificial Sequence
  Non-cyclic GFR-binding peptide
  MOD_RES (1)..(2): Xaa is C or S
  MOD_RES (16)..(17)..(18)..(19)..(20): Xaa is A or G
  MOD_RES (21)..(22)..(23)..(24): Xaa is A or G or absent
XXVPARLSATSILYYXXXXXXXXXLRKHRDMVVEA

SEQ ID NO: 34175 - protein, 39 aa, Artificial Sequence
  Non-cyclic GFR-binding peptide
  MOD_RES (5)..(6)..(38): Xaa is C or S
IPEPXXVPEKMSPINILYFDENKNVVYGKIPNMTVESXA

SEQ ID NO: 34176 - protein, 33 aa, Artificial Sequence
  Non-cyclic GFR-binding peptide
  MOD_RES (31)..(33): Xaa is C or S
APVKTEPISMLYLDNGRVLLKFKYEMIVEEXGX

SEQ ID NO: 34177 - protein, 33 aa, Artificial Sequence
  Non-cyclic GFR-binding peptide
  MOD_RES (31)..(33): Xaa is C or S
VPQALSPINILYFVGRKPKVYGKIPMIVRSXKX

SEQ ID NO: 34178 - protein, 37 aa, Artificial Sequence
  Non-cyclic GFR-binding peptide
  MOD_RES (2)..(3)..(35)..(37): Xaa is C or S
PXXVPEKMNAISILYFDENKNVVLKKYRNMTVESXAX

SEQ ID NO: 34179 - protein, 34 aa, Artificial Sequence
  Non-cyclic GFR-binding peptide
  MOD_RES (1)..(2)..(33): Xaa is C or S
XXVPQDLSPINILYFVGRTPKVYGKIPMVVKSXK

SEQ ID NO: 34180 - protein, 36 aa, Artificial Sequence
  Non-cyclic GFR-binding peptide
  MOD_RES (1)..(2)..(35): Xaa is C or S
  MOD_RES (16)..(17)..(18)..(19)..(20): Xaa is A or G
  MOD_RES (21)..(22)..(23)..(24): Xaa is A or G or absent
XXVPQALSPINILYFXXXXXXXXXYGKIPMIVRSXK

SEQ ID NO: 34181 - protein, 42 aa, Artificial Sequence
  Non-cyclic GFR-binding peptide
  MOD_RES (6)..(7)..(40)..(42): Xaa is C or S
  MOD_RES (21)..(22)..(23)..(24)..(25): Xaa is A or G
  MOD_RES (26)..(27)..(28)..(29): Xaa is A or G or absent
RVPSTXXAPVKTSATSMLYYXXXXXXXXXLRKHRMIVEEXGX

SEQ ID NO: 34182 - protein, 30 aa, Artificial Sequence
  Non-cyclic GFR-binding peptide
VPARLSATSILYYDAANNVVLRKHRDMVVE

SEQ ID NO: 34183 - protein, 38 aa, Artificial Sequence
  Non-cyclic GFR-binding peptide
  MOD_RES (6)..(7): Xaa is C or S
KASKAXXVPTKLSATSILYYDKGVVTYLRKHRGMAVSE

SEQ ID NO: 34184 - protein, 39 aa, Artificial Sequence
  Non-cyclic GFR-binding peptide
  MOD_RES (6)..(7)..(38): Xaa is C or S
RVPSTXXAPVKTSPISMLYKDNGRVLLLKYHYMIVEEXG

SEQ ID NO: 34185 - protein, 37 aa, Artificial Sequence
  Non-cyclic GFR-binding peptide
  MOD_RES (1)..(2)..(35)..(37): Xaa is C or S
  MOD_RES (16)..(17)..(18)..(19)..(20): Xaa is A or G
  MOD_RES (21)..(22)..(23)..(24): Xaa is A or G or absent
XXAPVKTSATSMLYYXXXXXXXXXLRKHRMIVEEXGX

SEQ ID NO: 34186 - protein, 41 aa, Artificial Sequence
  Non-cyclic GFR-binding peptide
  MOD_RES (5)..(6)..(40): Xaa is C or S
  MOD_RES (20)..(21)..(22)..(23)..(24): Xaa is A or G
  MOD_RES (25)..(26)..(27)..(28): Xaa is A or G or absent
SAGPXXTPTKMEPISMLYLXXXXXXXXXKFKYEGMVVDRXG

SEQ ID NO: 34187 - protein, 39 aa, Artificial Sequence
  Non-cyclic GFR-binding peptide
  MOD_RES (4)..(5)..(37)..(39): Xaa is C or S
SKAXXVPTKLSATSILYYDKGVVTYLRKHRGMAVSEXGX

SEQ ID NO: 34188 - protein, 39 aa, Artificial Sequence
  Non-cyclic GFR-binding peptide
  MOD_RES (2)..(3)..(37)..(39): Xaa is C or S
  MOD_RES (17)..(18)..(19)..(20)..(21): Xaa is A or G
  MOD_RES (22)..(23)..(24)..(25): Xaa is A or G or absent
PXXVPEKMSPISILYKXXXXXXXXXLKYHYNMTVESXAX

SEQ ID NO: 34189 - protein, 44 aa, Artificial Sequence
  Non-cyclic GFR-binding peptide
  MOD_RES (6)..(7)..(41)..(43): Xaa is C or S
  MOD_RES (21)..(22)..(23)..(24)..(25): Xaa is A or G
  MOD_RES (26)..(27)..(28)..(29): Xaa is A or G or absent
GIPEPXXVPEKMSPINILYFXXXXXXXXXYGKIPNMTVESXAXR

SEQ ID NO: 34190 - protein, 36 aa, Artificial Sequence
  Non-cyclic GFR-binding peptide
  MOD_RES (4)..(5): Xaa is C or S
PPTXXVPTRLSPISILYKDSANNVVLKYHYDMVVES

SEQ ID NO: 34191 - protein, 34 aa, Artificial Sequence
  Non-cyclic GFR-binding peptide
  MOD_RES (1)..(32)..(34): Xaa is C or S
XAPVKTEPISMLYLDNGRVLLKFKYEMIVEEXGX

SEQ ID NO: 34192 - protein, 39 aa, Artificial Sequence
  Non-cyclic GFR-binding peptide
  MOD_RES (1)..(2)..(36)..(38): Xaa is C or S
  MOD_RES (16)..(17)..(18)..(19)..(20): Xaa is A or G
  MOD_RES (21)..(22)..(23)..(24): Xaa is A or G or absent
XXVPTKLSATSILYYXXXXXXXXXLRKHRGMAVSEXGXR

SEQ ID NO: 34193 - protein, 42 aa, Artificial Sequence
  Non-cyclic GFR-binding peptide
  MOD_RES (6)..(7)..(39)..(41): Xaa is C or S
STPPTXXVPTRLSPISILYKDSANNVVLKYHYDMVVESXGXR

SEQ ID NO: 34194 - protein, 36 aa, Artificial Sequence
  Non-cyclic GFR-binding peptide
  MOD_RES (1)..(33)..(35): Xaa is C or S
XVPEKMSATSILYYDENKNVVLRKHRNMTVESXAXR

SEQ ID NO: 34195 - protein, 35 aa, Artificial Sequence
  Non-cyclic GFR-binding peptide
  MOD_RES (34)..(34): Xaa is C or S
  MOD_RES (14)..(15)..(16)..(17)..(18): Xaa is A or G
  MOD_RES (19)..(20)..(21)..(22): Xaa is A or G or absent
VPTRLSATSILYYXXXXXXXXXLRKHRDMVVESXG

SEQ ID NO: 34196 - protein, 35 aa, Artificial Sequence
  Non-cyclic GFR-binding peptide
  MOD_RES (1)..(33)..(35): Xaa is C or S
XVPTRLSATSILYYDSANNVVLRKHRDMVVESXGX

SEQ ID NO: 34197 - protein, 39 aa, Artificial Sequence
  Non-cyclic GFR-binding peptide
  MOD_RES (5)..(6)..(38): Xaa is C or S
SAGPXXTPTKMSPISMLYKNDKQQIILKYHYGMVVDRXG

SEQ ID NO: 34198 - protein, 40 aa, Artificial Sequence
  Non-cyclic GFR-binding peptide
  MOD_RES (5)..(6)..(38)..(40): Xaa is C or S
IPEPXXVPEKMSPINILYFDENKNVVYGKIPNMTVESXAX

SEQ ID NO: 34199 - protein, 41 aa, Artificial Sequence
  Non-cyclic GFR-binding peptide
  MOD_RES (4)..(5)..(39)..(41): Xaa is C or S
  MOD_RES (19)..(20)..(21)..(22)..(23): Xaa is A or G
  MOD_RES (24)..(25)..(26)..(27): Xaa is A or G or absent
PEPXXVPEKMEPISILYLXXXXXXXXXKFKYENMTVESXAX

SEQ ID NO: 34200 - protein, 35 aa, Artificial Sequence
  Non-cyclic GFR-binding peptide
  MOD_RES (3)..(4): Xaa is C or S
GPXXTPTKMSPISMLYKNDKQQIILKYHYGMVVDR

SEQ ID NO: 34201 - protein, 41 aa, Artificial Sequence
  Non-cyclic GFR-binding peptide
  MOD_RES (6)..(7)..(41): Xaa is C or S
  MOD_RES (21)..(22)..(23)..(24)..(25): Xaa is A or G
  MOD_RES (26)..(27)..(28)..(29): Xaa is A or G or absent
GSAGPXXTPTKMSATSMLYYXXXXXXXXXLRKHRGMVVDRX

SEQ ID NO: 34202 - protein, 34 aa, Artificial Sequence
  Non-cyclic GFR-binding peptide
  MOD_RES (34)..(34): Xaa is C or S
  MOD_RES (14)..(15)..(16)..(17)..(18): Xaa is A or G
  MOD_RES (19)..(20)..(21)..(22): Xaa is A or G or absent
VPEKMNAISILYFXXXXXXXXXLKKYRNMTVESX

SEQ ID NO: 34203 - protein, 37 aa, Artificial Sequence
  Non-cyclic GFR-binding peptide
  MOD_RES (2)..(3)..(36): Xaa is C or S
  MOD_RES (17)..(18)..(19)..(20)..(21): Xaa is A or G
  MOD_RES (22)..(23)..(24)..(25): Xaa is A or G or absent
PXXVPQALSPINILYFXXXXXXXXXYGKIPMIVRSXK

SEQ ID NO: 34204 - protein, 39 aa, Artificial Sequence
  Non-cyclic GFR-binding peptide
  MOD_RES (3)..(4)..(38): Xaa is C or S
  MOD_RES (18)..(19)..(20)..(21)..(22): Xaa is A or G
  MOD_RES (23)..(24)..(25)..(26): Xaa is A or G or absent
PTXXVPTRLSATSILYYXXXXXXXXXLRKHRDMVVESXG

SEQ ID NO: 34205 - protein, 34 aa, Artificial Sequence
  Non-cyclic GFR-binding peptide
  MOD_RES (1)..(34): Xaa is C or S
  MOD_RES (15)..(16)..(17)..(18)..(19): Xaa is A or G
  MOD_RES (20)..(21)..(22)..(23): Xaa is A or G or absent
XAPVKTEPISMLYLXXXXXXXXXKFKYEMIVEEX

SEQ ID NO: 34206 - protein, 36 aa, Artificial Sequence
  Non-cyclic GFR-binding peptide
  MOD_RES (3)..(4): Xaa is C or S
  MOD_RES (18)..(19)..(20)..(21)..(22): Xaa is A or G
  MOD_RES (23)..(24)..(25)..(26): Xaa is A or G or absent
EPXXVPEKMEPISILYLXXXXXXXXXKFKYENMTVE

SEQ ID NO: 34207 - protein, 32 aa, Artificial Sequence
  Non-cyclic GFR-binding peptide
  MOD_RES (1)..(2): Xaa is C or S
XXVPTRLSPISILYKDSANNVVLKYHYDMVVE

SEQ ID NO: 34208 - protein, 37 aa, Artificial Sequence
  Non-cyclic GFR-binding peptide
  MOD_RES (1)..(2)..(35)..(37): Xaa is C or S
  MOD_RES (16)..(17)..(18)..(19)..(20): Xaa is A or G
  MOD_RES (21)..(22)..(23)..(24): Xaa is A or G or absent
XXVPQDLSPINILYFXXXXXXXXXYGKIPMVVKSXKX

SEQ ID NO: 34209 - protein, 32 aa, Artificial Sequence
  Non-cyclic GFR-binding peptide
  MOD_RES (1)..(2): Xaa is C or S
XXVPEKMNAISILYFDENKNVVLKKYRNMTVE

SEQ ID NO: 34210 - protein, 35 aa, Artificial Sequence
  Non-cyclic GFR-binding peptide
  MOD_RES (1)..(35): Xaa is C or S
  MOD_RES (15)..(16)..(17)..(18)..(19): Xaa is A or G
  MOD_RES (20)..(21)..(22)..(23): Xaa is A or G or absent
XVPEKMNAISILYFXXXXXXXXXLKKYRNMTVESX

SEQ ID NO: 34211 - protein, 31 aa, Artificial Sequence
  Non-cyclic GFR-binding peptide
  MOD_RES (1)..(1): Xaa is C or S
XVPTRLSPISILYKDSANNVVLKYHYDMVVE

SEQ ID NO: 34212 - protein, 32 aa, Artificial Sequence
  Non-cyclic GFR-binding peptide
  MOD_RES (1)..(32): Xaa is C or S
XVPQDLSPINILYFVGRTPKVYGKIPMVVKSX

SEQ ID NO: 34213 - protein, 31 aa, Artificial Sequence
  Non-cyclic GFR-binding peptide
  MOD_RES (31)..(31): Xaa is C or S
VPQDLSPINILYFVGRTPKVYGKIPMVVKSX

SEQ ID NO: 34214 - protein, 38 aa, Artificial Sequence
  Non-cyclic GFR-binding peptide
  MOD_RES (3)..(4)..(38): Xaa is C or S
  MOD_RES (18)..(19)..(20)..(21)..(22): Xaa is A or G
  MOD_RES (23)..(24)..(25)..(26): Xaa is A or G or absent
PTXXVPTRLSATSILYYXXXXXXXXXLRKHRDMVVESX

SEQ ID NO: 34215 - protein, 36 aa, Artificial Sequence
  Non-cyclic GFR-binding peptide
  MOD_RES (1)..(2)..(34)..(36): Xaa is C or S
XXVPEKMSPISILYKDENKNVVLKYHYNMTVESXAX

SEQ ID NO: 34216 - protein, 36 aa, Artificial Sequence
  Non-cyclic GFR-binding peptide
  MOD_RES (34)..(36): Xaa is C or S
  MOD_RES (14)..(15)..(16)..(17)..(18): Xaa is A or G
  MOD_RES (19)..(20)..(21)..(22): Xaa is A or G or absent
VPEKMSATSILYYXXXXXXXXXLRKHRNMTVESXAX

SEQ ID NO: 34217 - protein, 31 aa, Artificial Sequence
  Non-cyclic GFR-binding peptide
  MOD_RES (1)..(1): Xaa is C or S
XVPEKMNAISILYFDENKNVVLKKYRNMTVE

SEQ ID NO: 34218 - protein, 38 aa, Artificial Sequence
  Non-cyclic GFR-binding peptide
  MOD_RES (4)..(5)..(36)..(38): Xaa is C or S
PSTXXAPVKTSATSMLYYDNGRVLLLRKHRMIVEEXGX

SEQ ID NO: 34219 - protein, 42 aa, Artificial Sequence
  Non-cyclic GFR-binding peptide
  MOD_RES (6)..(7)..(41): Xaa is C or S
  MOD_RES (21)..(22)..(23)..(24)..(25): Xaa is A or G
  MOD_RES (26)..(27)..(28)..(29): Xaa is A or G or absent
GSAGPXXTPTKMEPISMLYLXXXXXXXXXKFKYEGMVVDRXG

SEQ ID NO: 34220 - protein, 34 aa, Artificial Sequence
  Non-cyclic GFR-binding peptide
  MOD_RES (32)..(34): Xaa is C or S
VPEKMEPISILYLDENKNVVKFKYENMTVESXAX

SEQ ID NO: 34221 - protein, 40 aa, Artificial Sequence
  Non-cyclic GFR-binding peptide
  MOD_RES (6)..(7)..(38)..(40): Xaa is C or S
ASASPXXVSQDLSPINILYFIGKTPKIYGKIPMIVKSXKX

SEQ ID NO: 34222 - protein, 33 aa, Artificial Sequence
  Non-cyclic GFR-binding peptide
  MOD_RES (1)..(1): Xaa is C or S
  MOD_RES (15)..(16)..(17)..(18)..(19): Xaa is A or G
  MOD_RES (20)..(21)..(22)..(23): Xaa is A or G or absent
XAPVKTSPISMLYKXXXXXXXXXLKYHYMIVEE

SEQ ID NO: 34223 - protein, 37 aa, Artificial Sequence
  Non-cyclic GFR-binding peptide
  MOD_RES (1)..(2)..(34)..(36): Xaa is C or S
XXVPEKMSPISILYKDENKNVVLKYHYNMTVESXAXR

SEQ ID NO: 34224 - protein, 39 aa, Artificial Sequence
  Non-cyclic GFR-binding peptide
  MOD_RES (5)..(6)..(37)..(39): Xaa is C or S
SASPXXVPQDLSPINILYFVGRTPKVYGKIPMVVKSXKX

SEQ ID NO: 34225 - protein, 33 aa, Artificial Sequence
  Non-cyclic GFR-binding peptide
  MOD_RES (1)..(1): Xaa is C or S
  MOD_RES (15)..(16)..(17)..(18)..(19): Xaa is A or G
  MOD_RES (20)..(21)..(22)..(23): Xaa is A or G or absent
XAPVKTEPISMLYLXXXXXXXXXKFKYEMIVEE

SEQ ID NO: 34226 - protein, 40 aa, Artificial Sequence
  Non-cyclic GFR-binding peptide
  MOD_RES (3)..(4)..(37)..(39): Xaa is C or S
  MOD_RES (18)..(19)..(20)..(21)..(22): Xaa is A or G
  MOD_RES (23)..(24)..(25)..(26): Xaa is A or G or absent
STXXAPVKTSPISMLYKXXXXXXXXXLKYHYMIVEEXGXL

SEQ ID NO: 34227 - protein, 34 aa, Artificial Sequence
  Non-cyclic GFR-binding peptide
  MOD_RES (2)..(3): Xaa is C or S
SXXVPARLSATSILYYDAANNVVLRKHRDMVVEA

SEQ ID NO: 34228 - protein, 40 aa, Artificial Sequence
  Non-cyclic GFR-binding peptide
  MOD_RES (5)..(6)..(38)..(40): Xaa is C or S
IPEPXXVPEKMSPISILYKDENKNVVLKYHYNMTVESXAX

SEQ ID NO: 34229 - protein, 37 aa, Artificial Sequence
  Non-cyclic GFR-binding peptide
  MOD_RES (4)..(5)..(36): Xaa is C or S
ASPXXVSQDLSPINILYFIGKTPKIYGKIPMIVKSXK

SEQ ID NO: 34230 - protein, 33 aa, Artificial Sequence
  Non-cyclic GFR-binding peptide
  MOD_RES (1)..(1): Xaa is C or S
  MOD_RES (15)..(16)..(17)..(18)..(19): Xaa is A or G
  MOD_RES (20)..(21)..(22)..(23): Xaa is A or G or absent
XVPEKMSPISILYKXXXXXXXXXLKYHYNMTVE

SEQ ID NO: 34231 - protein, 32 aa, Artificial Sequence
  Non-cyclic GFR-binding peptide
  MOD_RES (1)..(2): Xaa is C or S
XXAPVKTEPISMLYLDNGRVLLKFKYEMIVEE

SEQ ID NO: 34232 - protein, 33 aa, Artificial Sequence
  Non-cyclic GFR-binding peptide
  MOD_RES (1)..(1): Xaa is C or S
  MOD_RES (15)..(16)..(17)..(18)..(19): Xaa is A or G
  MOD_RES (20)..(21)..(22)..(23): Xaa is A or G or absent
XVPEKMEPISILYLXXXXXXXXXKFKYENMTVE

SEQ ID NO: 34233 - protein, 35 aa, Artificial Sequence
  Non-cyclic GFR-binding peptide
  MOD_RES (1)..(2)..(34): Xaa is C or S
XXVPEKMSPINILYFDENKNVVYGKIPNMTVESXA

SEQ ID NO: 34234 - protein, 44 aa, Artificial Sequence
  Non-cyclic GFR-binding peptide
  MOD_RES (6)..(7)..(41)..(43): Xaa is C or S
  MOD_RES (21)..(22)..(23)..(24)..(25): Xaa is A or G
  MOD_RES (26)..(27)..(28)..(29): Xaa is A or G or absent
HVPKPXXAPTKLEPISVLYLXXXXXXXXXKFKYENMVVRSXGXH

SEQ ID NO: 34235 - protein, 39 aa, Artificial Sequence
  Non-cyclic GFR-binding peptide
  MOD_RES (4)..(5)..(37)..(39): Xaa is C or S
PASXXVPARLSATSILYYDAANNVVLRKHRDMVVEAXGX

SEQ ID NO: 34236 - protein, 39 aa, Artificial Sequence
  Non-cyclic GFR-binding peptide
  MOD_RES (1)..(2)..(36)..(38): Xaa is C or S
  MOD_RES (16)..(17)..(18)..(19)..(20): Xaa is A or G
  MOD_RES (21)..(22)..(23)..(24): Xaa is A or G or absent
XXVPARLSATSILYYXXXXXXXXXLRKHRDMVVEAXGXR

SEQ ID NO: 34237 - protein, 38 aa, Artificial Sequence
  Non-cyclic GFR-binding peptide
  MOD_RES (2)..(3)..(35)..(37): Xaa is C or S
PXXTPTKMSPISMLYKNDKQQIILKYHYGMVVDRXGXS

SEQ ID NO: 34238 - protein, 39 aa, Artificial Sequence
  Non-cyclic GFR-binding peptide
  MOD_RES (3)..(4)..(38): Xaa is C or S
  MOD_RES (18)..(19)..(20)..(21)..(22): Xaa is A or G
  MOD_RES (23)..(24)..(25)..(26): Xaa is A or G or absent
EPXXVPEKMNAISILYFXXXXXXXXXLKKYRNMTVESXA

SEQ ID NO: 34239 - protein, 35 aa, Artificial Sequence
  Non-cyclic GFR-binding peptide
  MOD_RES (34)..(34): Xaa is C or S
  MOD_RES (14)..(15)..(16)..(17)..(18): Xaa is A or G
  MOD_RES (19)..(20)..(21)..(22): Xaa is A or G or absent
VPEKMSPINILYFXXXXXXXXXYGKIPNMTVESXA

SEQ ID NO: 34240 - protein, 40 aa, Artificial Sequence
  Non-cyclic GFR-binding peptide
  MOD_RES (4)..(5)..(39): Xaa is C or S
  MOD_RES (19)..(20)..(21)..(22)..(23): Xaa is A or G
  MOD_RES (24)..(25)..(26)..(27): Xaa is A or G or absent
PPTXXVPTRLSPISILYKXXXXXXXXXLKYHYDMVVESXG

SEQ ID NO: 34241 - protein, 31 aa, Artificial Sequence
  Non-cyclic GFR-binding peptide
  MOD_RES (1)..(1): Xaa is C or S
XVPTRLEPISILYLDSANNVVKFKYEDMVVE

SEQ ID NO: 34242 - protein, 37 aa, Artificial Sequence
  Non-cyclic GFR-binding peptide
  MOD_RES (3)..(4)..(37): Xaa is C or S
  MOD_RES (18)..(19)..(20)..(21)..(22): Xaa is A or G
  MOD_RES (23)..(24)..(25)..(26): Xaa is A or G or absent
STXXAPVKTSATSMLYYXXXXXXXXXLRKHRMIVEEX

SEQ ID NO: 34243 - protein, 34 aa, Artificial Sequence
  Non-cyclic GFR-binding peptide
  MOD_RES (1)..(2): Xaa is C or S
  MOD_RES (16)..(17)..(18)..(19)..(20): Xaa is A or G
  MOD_RES (21)..(22)..(23)..(24): Xaa is A or G or absent
XXVPQALSPINILYFXXXXXXXXXYGKIPMIVRS

SEQ ID NO: 34244 - protein, 33 aa, Artificial Sequence
  Non-cyclic GFR-binding peptide
  MOD_RES (14)..(15)..(16)..(17)..(18): Xaa is A or G
  MOD_RES (19)..(20)..(21)..(22): Xaa is A or G or absent
VPEKMNAISILYFXXXXXXXXXLKKYRNMTVES

SEQ ID NO: 34245 - protein, 39 aa, Artificial Sequence
  Non-cyclic GFR-binding peptide
  MOD_RES (4)..(5)..(37)..(39): Xaa is C or S
AGPXXTPTKMSPISMLYKNDKQQIILKYHYGMVVDRXGX

SEQ ID NO: 34246 - protein, 41 aa, Artificial Sequence
  Non-cyclic GFR-binding peptide
  MOD_RES (6)..(7)..(40): Xaa is C or S
  MOD_RES (21)..(22)..(23)..(24)..(25): Xaa is A or G
  MOD_RES (26)..(27)..(28)..(29): Xaa is A or G or absent
RVPSTXXAPVKTEPISMLYLXXXXXXXXXKFKYEMIVEEXG

SEQ ID NO: 34247 - protein, 33 aa, Artificial Sequence
  Non-cyclic GFR-binding peptide
  MOD_RES (2)..(3): Xaa is C or S
TXXVPTRLSPISILYKDSANNVVLKYHYDMVVE

SEQ ID NO: 34248 - protein, 37 aa, Artificial Sequence
  Non-cyclic GFR-binding peptide
  MOD_RES (34)..(36): Xaa is C or S
  MOD_RES (14)..(15)..(16)..(17)..(18): Xaa is A or G
  MOD_RES (19)..(20)..(21)..(22): Xaa is A or G or absent
VPEKMSATSILYYXXXXXXXXXLRKHRNMTVESXAXR

SEQ ID NO: 34249 - protein, 39 aa, Artificial Sequence
  Non-cyclic GFR-binding peptide
  MOD_RES (3)..(4)..(36)..(38): Xaa is C or S
PTXXVPTRLSATSILYYDSANNVVLRKHRDMVVESXGXR

SEQ ID NO: 34250 - protein, 39 aa, Artificial Sequence
  Non-cyclic GFR-binding peptide
  MOD_RES (2)..(3)..(36)..(38): Xaa is C or S
  MOD_RES (17)..(18)..(19)..(20)..(21): Xaa is A or G
  MOD_RES (22)..(23)..(24)..(25): Xaa is A or G or absent
TXXAPVKTEPISMLYLXXXXXXXXXKFKYEMIVEEXGXL

SEQ ID NO: 34251 - protein, 39 aa, Artificial Sequence
  Non-cyclic GFR-binding peptide
  MOD_RES (2)..(3)..(37)..(39): Xaa is C or S
  MOD_RES (17)..(18)..(19)..(20)..(21): Xaa is A or G
  MOD_RES (22)..(23)..(24)..(25): Xaa is A or G or absent
AXXVPTKLSATSILYYXXXXXXXXXLRKHRGMAVSEXGX

SEQ ID NO: 34252 - protein, 43 aa, Artificial Sequence
  Non-cyclic GFR-binding peptide
  MOD_RES (6)..(7)..(41)..(43): Xaa is C or S
  MOD_RES (21)..(22)..(23)..(24)..(25): Xaa is A or G
  MOD_RES (26)..(27)..(28)..(29): Xaa is A or G or absent
GIPEPXXVPEKMNAISILYFXXXXXXXXXLKKYRNMTVESXAX

SEQ ID NO: 34253 - protein, 39 aa, Artificial Sequence
  Non-cyclic GFR-binding peptide
  MOD_RES (4)..(5)..(38): Xaa is C or S
  MOD_RES (19)..(20)..(21)..(22)..(23): Xaa is A or G
  MOD_RES (24)..(25)..(26)..(27): Xaa is A or G or absent
PSTXXAPVKTEPISMLYLXXXXXXXXXKFKYEMIVEEXG

SEQ ID NO: 34254 - protein, 37 aa, Artificial Sequence
  Non-cyclic GFR-binding peptide
  MOD_RES (3)..(4)..(36): Xaa is C or S
EPXXVPEKMSPISILYKDENKNVVLKYHYNMTVESXA

SEQ ID NO: 34255 - protein, 36 aa, Artificial Sequence
  Non-cyclic GFR-binding peptide
  MOD_RES (1)..(35): Xaa is C or S
  MOD_RES (15)..(16)..(17)..(18)..(19): Xaa is A or G
  MOD_RES (20)..(21)..(22)..(23): Xaa is A or G or absent
XVPTRLSATSILYYXXXXXXXXXLRKHRDMVVESXG

SEQ ID NO: 34256 - protein, 41 aa, Artificial Sequence
  Non-cyclic GFR-binding peptide
  MOD_RES (6)..(7)..(40): Xaa is C or S
  MOD_RES (21)..(22)..(23)..(24)..(25): Xaa is A or G
  MOD_RES (26)..(27)..(28)..(29): Xaa is A or G or absent
ASASPXXVSQDLSPINILYFXXXXXXXXXYGKIPMIVKSXK

SEQ ID NO: 34257 - protein, 37 aa, Artificial Sequence
  Non-cyclic GFR-binding peptide
  MOD_RES (5)..(6): Xaa is C or S
TPPTXXVPTRLSATSILYYDSANNVVLRKHRDMVVES

SEQ ID NO: 34258 - protein, 39 aa, Artificial Sequence
  Non-cyclic GFR-binding peptide
  MOD_RES (5)..(6): Xaa is C or S
  MOD_RES (20)..(21)..(22)..(23)..(24): Xaa is A or G
  MOD_RES (25)..(26)..(27)..(28): Xaa is A or G or absent
IPEPXXVPEKMEPISILYLXXXXXXXXXKFKYENMTVES

SEQ ID NO: 34259 - protein, 41 aa, Artificial Sequence
  Non-cyclic GFR-binding peptide
  MOD_RES (6)..(7)..(41): Xaa is C or S
  MOD_RES (21)..(22)..(23)..(24)..(25): Xaa is A or G
  MOD_RES (26)..(27)..(28)..(29): Xaa is A or G or absent
STPPTXXVPTRLSPISILYKXXXXXXXXXLKYHYDMVVESX

SEQ ID NO: 34260 - protein, 35 aa, Artificial Sequence
  Non-cyclic GFR-binding peptide
  MOD_RES (2)..(3): Xaa is C or S
  MOD_RES (17)..(18)..(19)..(20)..(21): Xaa is A or G
  MOD_RES (22)..(23)..(24)..(25): Xaa is A or G or absent
PXXVSQDLSPINILYFXXXXXXXXXYGKIPMIVKS

SEQ ID NO: 34261 - protein, 40 aa, Artificial Sequence
  Non-cyclic GFR-binding peptide
  MOD_RES (5)..(6)..(40): Xaa is C or S
  MOD_RES (20)..(21)..(22)..(23)..(24): Xaa is A or G
  MOD_RES (25)..(26)..(27)..(28): Xaa is A or G or absent
IPEPXXVPEKMSATSILYYXXXXXXXXXLRKHRNMTVESX

SEQ ID NO: 34262 - protein, 35 aa, Artificial Sequence
  Non-cyclic GFR-binding peptide
  MOD_RES (32)..(34): Xaa is C or S
VPEKMEPISILYLDENKNVVKFKYENMTVESXAXR

SEQ ID NO: 34263 - protein, 37 aa, Artificial Sequence
  Non-cyclic GFR-binding peptide
  MOD_RES (2)..(3)..(34)..(36): Xaa is C or S
TXXAPVKTEPISMLYLDNGRVLLKFKYEMIVEEXGXL

SEQ ID NO: 34264 - protein, 35 aa, Artificial Sequence
  Non-cyclic GFR-binding peptide
  MOD_RES (32)..(34): Xaa is C or S
TPTKMSATSMLYYNDKQQIILRKHRGMVVDRXGXS

SEQ ID NO: 34265 - protein, 41 aa, Artificial Sequence
  Non-cyclic GFR-binding peptide
  MOD_RES (5)..(6)..(38)..(40): Xaa is C or S
SAGPXXTPTKMSATSMLYYNDKQQIILRKHRGMVVDRXGXS

SEQ ID NO: 34266 - protein, 34 aa, Artificial Sequence
  Non-cyclic GFR-binding peptide
  MOD_RES (1)..(1): Xaa is C or S
  MOD_RES (15)..(16)..(17)..(18)..(19): Xaa is A or G
  MOD_RES (20)..(21)..(22)..(23): Xaa is A or G or absent
XVPEKMSPINILYFXXXXXXXXXYGKIPNMTVES

SEQ ID NO: 34267 - protein, 40 aa, Artificial Sequence
  Non-cyclic GFR-binding peptide
  MOD_RES (5)..(6)..(39): Xaa is C or S
  MOD_RES (20)..(21)..(22)..(23)..(24): Xaa is A or G
  MOD_RES (25)..(26)..(27)..(28): Xaa is A or G or absent
SAAPXXVPQALSPINILYFXXXXXXXXXYGKIPMIVRSXK

SEQ ID NO: 34268 - protein, 40 aa, Artificial Sequence
  Non-cyclic GFR-binding peptide
  MOD_RES (4)..(5)..(37)..(39): Xaa is C or S
PEPXXVPEKMEPISILYLDENKNVVKFKYENMTVESXAXR

SEQ ID NO: 34269 - protein, 33 aa, Artificial Sequence
  Non-cyclic GFR-binding peptide
  MOD_RES (1)..(32): Xaa is C or S
XAPVKTEPISMLYLDNGRVLLKFKYEMIVEEXG

SEQ ID NO: 34270 - protein, 43 aa, Artificial Sequence
  Non-cyclic GFR-binding peptide
  MOD_RES (6)..(7)..(41)..(43): Xaa is C or S
  MOD_RES (21)..(22)..(23)..(24)..(25): Xaa is A or G
  MOD_RES (26)..(27)..(28)..(29): Xaa is A or G or absent
HVPKPXXAPTKLEPISVLYLXXXXXXXXXKFKYENMVVRSXGX

SEQ ID NO: 34271 - protein, 35 aa, Artificial Sequence
  Non-cyclic GFR-binding peptide
  MOD_RES (2)..(3)..(35): Xaa is C or S
PXXVPEKMSATSILYYDENKNVVLRKHRNMTVESX

SEQ ID NO: 34272 - protein, 38 aa, Artificial Sequence
  Non-cyclic GFR-binding peptide
  MOD_RES (3)..(4)..(35)..(37): Xaa is C or S
STXXAPVKTSPISMLYKDNGRVLLLKYHYMIVEEXGXL

SEQ ID NO: 34273 - protein, 41 aa, Artificial Sequence
  Non-cyclic GFR-binding peptide
  MOD_RES (6)..(7)..(38)..(40): Xaa is C or S
ASASPXXVSQDLSPINILYFIGKTPKIYGKIPMIVKSXKXS

SEQ ID NO: 34274 - protein, 36 aa, Artificial Sequence
  Non-cyclic GFR-binding peptide
  MOD_RES (4)..(5): Xaa is C or S
PASXXVPARLSATSILYYDAANNVVLRKHRDMVVEA

SEQ ID NO: 34275 - protein, 38 aa, Artificial Sequence
  Non-cyclic GFR-binding peptide
  MOD_RES (6)..(7)..(38): Xaa is C or S
RVPSTXXAPVKTSPISMLYKDNGRVLLLKYHYMIVEEX

SEQ ID NO: 34276 - protein, 42 aa, Artificial Sequence
  Non-cyclic GFR-binding peptide
  MOD_RES (6)..(7)..(41): Xaa is C or S
  MOD_RES (21)..(22)..(23)..(24)..(25): Xaa is A or G
  MOD_RES (26)..(27)..(28)..(29): Xaa is A or G or absent
GIPEPXXVPEKMNAISILYFXXXXXXXXXLKKYRNMTVESXA

SEQ ID NO: 34277 - protein, 40 aa, Artificial Sequence
  Non-cyclic GFR-binding peptide
  MOD_RES (5)..(6)..(38)..(40): Xaa is C or S
TPPTXXVPTRLEPISILYLDSANNVVKFKYEDMVVESXGX

SEQ ID NO: 34278 - protein, 37 aa, Artificial Sequence
  Non-cyclic GFR-binding peptide
  MOD_RES (3)..(4): Xaa is C or S
  MOD_RES (18)..(19)..(20)..(21)..(22): Xaa is A or G
  MOD_RES (23)..(24)..(25)..(26): Xaa is A or G or absent
GPXXTPTKMSPISMLYKXXXXXXXXXLKYHYGMVVDR

SEQ ID NO: 34279 - protein, 38 aa, Artificial Sequence
  Non-cyclic GFR-binding peptide
  MOD_RES (5)..(6): Xaa is C or S
  MOD_RES (20)..(21)..(22)..(23)..(24): Xaa is A or G
  MOD_RES (25)..(26)..(27)..(28): Xaa is A or G or absent
IPEPXXVPEKMSPINILYFXXXXXXXXXYGKIPNMTVE

SEQ ID NO: 34280 - protein, 38 aa, Artificial Sequence
  Non-cyclic GFR-binding peptide
  MOD_RES (6)..(7)..(38): Xaa is C or S
ASASPXXVSQDLSPINILYFIGKTPKIYGKIPMIVKSX

SEQ ID NO: 34281 - protein, 36 aa, Artificial Sequence
  Non-cyclic GFR-binding peptide
  MOD_RES (1)..(2)..(36): Xaa is C or S
  MOD_RES (16)..(17)..(18)..(19)..(20): Xaa is A or G
  MOD_RES (21)..(22)..(23)..(24): Xaa is A or G or absent
XXVPEKMSATSILYYXXXXXXXXXLRKHRNMTVESX

SEQ ID NO: 34282 - protein, 32 aa, Artificial Sequence
  Non-cyclic GFR-binding peptide
  MOD_RES (32)..(32): Xaa is C or S
TPTKMSPISMLYKNDKQQIILKYHYGMVVDRX

SEQ ID NO: 34283 - protein, 40 aa, Artificial Sequence
  Non-cyclic GFR-binding peptide
  MOD_RES (6)..(7)..(38)..(40): Xaa is C or S
RVPSTXXAPVKTSATSMLYYDNGRVLLLRKHRMIVEEXGX

SEQ ID NO: 34284 - protein, 36 aa, Artificial Sequence
  Non-cyclic GFR-binding peptide
  MOD_RES (3)..(4)..(36): Xaa is C or S
GPXXTPTKMSPISMLYKNDKQQIILKYHYGMVVDRX

SEQ ID NO: 34285 - protein, 33 aa, Artificial Sequence
  Non-cyclic GFR-binding peptide
  MOD_RES (1)..(1): Xaa is C or S
  MOD_RES (15)..(16)..(17)..(18)..(19): Xaa is A or G
  MOD_RES (20)..(21)..(22)..(23): Xaa is A or G or absent
XVPEKMSATSILYYXXXXXXXXXLRKHRNMTVE

SEQ ID NO: 34286 - protein, 41 aa, Artificial Sequence
  Non-cyclic GFR-binding peptide
  MOD_RES (6)..(7)..(41): Xaa is C or S
  MOD_RES (21)..(22)..(23)..(24)..(25): Xaa is A or G
  MOD_RES (26)..(27)..(28)..(29): Xaa is A or G or absent
GIPEPXXVPEKMEPISILYLXXXXXXXXXKFKYENMTVESX

SEQ ID NO: 34287 - protein, 42 aa, Artificial Sequence
  Non-cyclic GFR-binding peptide
  MOD_RES (4)..(5)..(39)..(41): Xaa is C or S
  MOD_RES (19)..(20)..(21)..(22)..(23): Xaa is A or G
  MOD_RES (24)..(25)..(26)..(27): Xaa is A or G or absent
PEPXXVPEKMSPINILYFXXXXXXXXXYGKIPNMTVESXAXR

SEQ ID NO: 34288 - protein, 32 aa, Artificial Sequence
  Non-cyclic GFR-binding peptide
  MOD_RES (1)..(1): Xaa is C or S
XVPEKMNAISILYFDENKNVVLKKYRNMTVES

SEQ ID NO: 34289 - protein, 33 aa, Artificial Sequence
  Non-cyclic GFR-binding peptide
  MOD_RES (1)..(2)..(33): Xaa is C or S
XXVSQDLSPINILYFIGKTPKIYGKIPMIVKSX

SEQ ID NO: 34290 - protein, 32 aa, Artificial Sequence
  Non-cyclic GFR-binding peptide
  MOD_RES (1)..(2): Xaa is C or S
XXVPQDLSPINILYFVGRTPKVYGKIPMVVKS

SEQ ID NO: 34291 - protein, 38 aa, Artificial Sequence
  Non-cyclic GFR-binding peptide
  MOD_RES (1)..(2)..(35)..(37): Xaa is C or S
  MOD_RES (16)..(17)..(18)..(19)..(20): Xaa is A or G
  MOD_RES (21)..(22)..(23)..(24): Xaa is A or G or absent
XXVPQDLSPINILYFXXXXXXXXXYGKIPMVVKSXKXS

SEQ ID NO: 34292 - protein, 36 aa, Artificial Sequence
  Non-cyclic GFR-binding peptide
  MOD_RES (2)..(3)..(35): Xaa is C or S
PXXVPEKMEPISILYLDENKNVVKFKYENMTVESXA

SEQ ID NO: 34293 - protein, 38 aa, Artificial Sequence
  Non-cyclic GFR-binding peptide
  MOD_RES (1)..(35)..(37): Xaa is C or S
  MOD_RES (15)..(16)..(17)..(18)..(19): Xaa is A or G
  MOD_RES (20)..(21)..(22)..(23): Xaa is A or G or absent
XVPEKMSPISILYKXXXXXXXXXLKYHYNMTVESXAXR

SEQ ID NO: 34294 - protein, 38 aa, Artificial Sequence
  Non-cyclic GFR-binding peptide
  MOD_RES (2)..(3)..(35)..(37): Xaa is C or S
SXXVPARLSATSILYYDAANNVVLRKHRDMVVEAXGXR

SEQ ID NO: 34295 - protein, 37 aa, Artificial Sequence
  Non-cyclic GFR-binding peptide
  MOD_RES (6)..(7): Xaa is C or S
GIPEPXXVPEKMSPINILYFDENKNVVYGKIPNMTVE

SEQ ID NO: 34296 - protein, 42 aa, Artificial Sequence
  Non-cyclic GFR-binding peptide
  MOD_RES (5)..(6)..(39)..(41): Xaa is C or S
  MOD_RES (20)..(21)..(22)..(23)..(24): Xaa is A or G
  MOD_RES (25)..(26)..(27)..(28): Xaa is A or G or absent
SASPXXVSQDLSPINILYFXXXXXXXXXYGKIPMIVKSXKXS

SEQ ID NO: 34297 - protein, 33 aa, Artificial Sequence
  Non-cyclic GFR-binding peptide
  MOD_RES (1)..(2)..(33): Xaa is C or S
XXAPVKTEPISMLYLDNGRVLLKFKYEMIVEEX

SEQ ID NO: 34298 - protein, 38 aa, Artificial Sequence
  Non-cyclic GFR-binding peptide
  MOD_RES (1)..(2)..(36)..(38): Xaa is C or S
  MOD_RES (16)..(17)..(18)..(19)..(20): Xaa is A or G
  MOD_RES (21)..(22)..(23)..(24): Xaa is A or G or absent
XXVPEKMSATSILYYXXXXXXXXXLRKHRNMTVESXAX

SEQ ID NO: 34299 - protein, 38 aa, Artificial Sequence
  Non-cyclic GFR-binding peptide
  MOD_RES (6)..(7): Xaa is C or S
GIPEPXXVPEKMSATSILYYDENKNVVLRKHRNMTVES

SEQ ID NO: 34300 - protein, 39 aa, Artificial Sequence
  Non-cyclic GFR-binding peptide
  MOD_RES (4)..(5)..(36)..(38): Xaa is C or S
PSTXXAPVKTSATSMLYYDNGRVLLLRKHRMIVEEXGXL

SEQ ID NO: 34301 - protein, 38 aa, Artificial Sequence
  Non-cyclic GFR-binding peptide
  MOD_RES (4)..(5)..(37): Xaa is C or S
PEPXXVPEKMSPISILYKDENKNVVLKYHYNMTVESXA

SEQ ID NO: 34302 - protein, 38 aa, Artificial Sequence
  Non-cyclic GFR-binding peptide
  MOD_RES (2)..(3)..(36)..(38): Xaa is C or S
  MOD_RES (17)..(18)..(19)..(20)..(21): Xaa is A or G
  MOD_RES (22)..(23)..(24)..(25): Xaa is A or G or absent
PXXVSQDLSPINILYFXXXXXXXXXYGKIPMIVKSXKX

SEQ ID NO: 34303 - protein, 39 aa, Artificial Sequence
  Non-cyclic GFR-binding peptide
  MOD_RES (4)..(5)..(36)..(38): Xaa is C or S
AAPXXVPQALSPINILYFVGRKPKVYGKIPMIVRSXKXS

SEQ ID NO: 34304 - protein, 37 aa, Artificial Sequence
  Non-cyclic GFR-binding peptide
  MOD_RES (4)..(5)..(37): Xaa is C or S
SKAXXVPTKLSATSILYYDKGVVTYLRKHRGMAVSEX

SEQ ID NO: 34305 - protein, 36 aa, Artificial Sequence
  Non-cyclic GFR-binding peptide
  MOD_RES (2)..(3)..(35): Xaa is C or S
PXXTPTKMEPISMLYLNDKQQIIKFKYEGMVVDRXG

SEQ ID NO: 34306 - protein, 36 aa, Artificial Sequence
  Non-cyclic GFR-binding peptide
  MOD_RES (2)..(3): Xaa is C or S
  MOD_RES (17)..(18)..(19)..(20)..(21): Xaa is A or G
  MOD_RES (22)..(23)..(24)..(25): Xaa is A or G or absent
AXXVPTKLSATSILYYXXXXXXXXXLRKHRGMAVSE

SEQ ID NO: 34307 - protein, 34 aa, Artificial Sequence
  Non-cyclic GFR-binding peptide
  MOD_RES (1)..(33): Xaa is C or S
XVPEKMSPISILYKDENKNVVLKYHYNMTVESXA

SEQ ID NO: 34308 - protein, 31 aa, Artificial Sequence
  Non-cyclic GFR-binding peptide
  MOD_RES (1)..(1): Xaa is C or S
XVPTRLSATSILYYDSANNVVLRKHRDMVVE

SEQ ID NO: 34309 - protein, 33 aa, Artificial Sequence
  Non-cyclic GFR-binding peptide
  MOD_RES (14)..(15)..(16)..(17)..(18): Xaa is A or G
  MOD_RES (19)..(20)..(21)..(22): Xaa is A or G or absent
TPTKMSPISMLYKXXXXXXXXXLKYHYGMVVDR

SEQ ID NO: 34310 - protein, 38 aa, Artificial Sequence
  Non-cyclic GFR-binding peptide
  MOD_RES (5)..(6): Xaa is C or S
  MOD_RES (20)..(21)..(22)..(23)..(24): Xaa is A or G
  MOD_RES (25)..(26)..(27)..(28): Xaa is A or G or absent
TPPTXXVPTRLSATSILYYXXXXXXXXXLRKHRDMVVE

SEQ ID NO: 34311 - protein, 34 aa, Artificial Sequence
  Non-cyclic GFR-binding peptide
  MOD_RES (34)..(34): Xaa is C or S
  MOD_RES (14)..(15)..(16)..(17)..(18): Xaa is A or G
  MOD_RES (19)..(20)..(21)..(22): Xaa is A or G or absent
VPEKMSPISILYKXXXXXXXXXLKYHYNMTVESX

SEQ ID NO: 34312 - protein, 40 aa, Artificial Sequence
  Non-cyclic GFR-binding peptide
  MOD_RES (3)..(4)..(38)..(40): Xaa is C or S
  MOD_RES (18)..(19)..(20)..(21)..(22): Xaa is A or G
  MOD_RES (23)..(24)..(25)..(26): Xaa is A or G or absent
KAXXVPTKLSATSILYYXXXXXXXXXLRKHRGMAVSEXGX

SEQ ID NO: 34313 - protein, 41 aa, Artificial Sequence
  Non-cyclic GFR-binding peptide
  MOD_RES (4)..(5)..(39)..(41): Xaa is C or S
  MOD_RES (19)..(20)..(21)..(22)..(23): Xaa is A or G
  MOD_RES (24)..(25)..(26)..(27): Xaa is A or G or absent
PPTXXVPTRLSPISILYKXXXXXXXXXLKYHYDMVVESXGX

SEQ ID NO: 34314 - protein, 38 aa, Artificial Sequence
  Non-cyclic GFR-binding peptide
  MOD_RES (6)..(7): Xaa is C or S
GSAGPXXTPTKMSATSMLYYNDKQQIILRKHRGMVVDR

SEQ ID NO: 34315 - protein, 39 aa, Artificial Sequence
  Non-cyclic GFR-binding peptide
  MOD_RES (3)..(4)..(36)..(38): Xaa is C or S
EPXXVPEKMSATSILYYDENKNVVLRKHRNMTVESXAXR

SEQ ID NO: 34316 - protein, 35 aa, Artificial Sequence
  Non-cyclic GFR-binding peptide
  MOD_RES (1)..(35): Xaa is C or S
  MOD_RES (15)..(16)..(17)..(18)..(19): Xaa is A or G
  MOD_RES (20)..(21)..(22)..(23): Xaa is A or G or absent
XVPEKMSPISILYKXXXXXXXXXLKYHYNMTVESX

SEQ ID NO: 34317 - protein, 38 aa, Artificial Sequence
  Non-cyclic GFR-binding peptide
  MOD_RES (3)..(4)..(35)..(37): Xaa is C or S
SPXXVSQDLSPINILYFIGKTPKIYGKIPMIVKSXKXS

SEQ ID NO: 34318 - protein, 35 aa, Artificial Sequence
  Non-cyclic GFR-binding peptide
  MOD_RES (1)..(2): Xaa is C or S
  MOD_RES (16)..(17)..(18)..(19)..(20): Xaa is A or G
  MOD_RES (21)..(22)..(23)..(24): Xaa is A or G or absent
XXVPTRLEPISILYLXXXXXXXXXKFKYEDMVVES

SEQ ID NO: 34319 - protein, 38 aa, Artificial Sequence
  Non-cyclic GFR-binding peptide
  MOD_RES (4)..(5)..(38): Xaa is C or S
  MOD_RES (19)..(20)..(21)..(22)..(23): Xaa is A or G
  MOD_RES (24)..(25)..(26)..(27): Xaa is A or G or absent
PSTXXAPVKTSATSMLYYXXXXXXXXXLRKHRMIVEEX

SEQ ID NO: 34320 - protein, 40 aa, Artificial Sequence
  Non-cyclic GFR-binding peptide
  MOD_RES (3)..(4)..(37)..(39): Xaa is C or S
  MOD_RES (18)..(19)..(20)..(21)..(22): Xaa is A or G
  MOD_RES (23)..(24)..(25)..(26): Xaa is A or G or absent
APXXVPQALSPINILYFXXXXXXXXXYGKIPMIVRSXKXS

SEQ ID NO: 34321 - protein, 36 aa, Artificial Sequence
  Non-cyclic GFR-binding peptide
  MOD_RES (1)..(2)..(33)..(35): Xaa is C or S
XXAPVKTSATSMLYYDNGRVLLLRKHRMIVEEXGXL

SEQ ID NO: 34322 - protein, 38 aa, Artificial Sequence
  Non-cyclic GFR-binding peptide
  MOD_RES (1)..(2)..(35)..(37): Xaa is C or S
  MOD_RES (16)..(17)..(18)..(19)..(20): Xaa is A or G
  MOD_RES (21)..(22)..(23)..(24): Xaa is A or G or absent
XXVPQALSPINILYFXXXXXXXXXYGKIPMIVRSXKXS

SEQ ID NO: 34323 - protein, 39 aa, Artificial Sequence
  Non-cyclic GFR-binding peptide
  MOD_RES (1)..(2)..(36)..(38): Xaa is C or S
  MOD_RES (16)..(17)..(18)..(19)..(20): Xaa is A or G
  MOD_RES (21)..(22)..(23)..(24): Xaa is A or G or absent
XXTPTKMEPISMLYLXXXXXXXXXKFKYEGMVVDRXGXS

SEQ ID NO: 34324 - protein, 34 aa, Artificial Sequence
  Non-cyclic GFR-binding peptide
  MOD_RES (2)..(3): Xaa is C or S
PXXVPEKMSPISILYKDENKNVVLKYHYNMTVES

SEQ ID NO: 34325 - protein, 39 aa, Artificial Sequence
  Non-cyclic GFR-binding peptide
  MOD_RES (6)..(7)..(39): Xaa is C or S
GIPEPXXVPEKMSPINILYFDENKNVVYGKIPNMTVESX

SEQ ID NO: 34326 - protein, 40 aa, Artificial Sequence
  Non-cyclic GFR-binding peptide
  MOD_RES (5)..(6)..(38)..(40): Xaa is C or S
APASXXVPARLSATSILYYDAANNVVLRKHRDMVVEAXGX

SEQ ID NO: 34327 - protein, 34 aa, Artificial Sequence
  Non-cyclic GFR-binding peptide
  MOD_RES (1)..(33): Xaa is C or S
XTPTKMSPISMLYKNDKQQIILKYHYGMVVDRXG

SEQ ID NO: 34328 - protein, 32 aa, Artificial Sequence
  Non-cyclic GFR-binding peptide
  MOD_RES (1)..(2): Xaa is C or S
XXVPTKLSATSILYYDKGVVTYLRKHRGMAVS

SEQ ID NO: 34329 - protein, 35 aa, Artificial Sequence
  Non-cyclic GFR-binding peptide
  MOD_RES (2)..(3)..(35): Xaa is C or S
PXXTPTKMEPISMLYLNDKQQIIKFKYEGMVVDRX

SEQ ID NO: 34330 - protein, 39 aa, Artificial Sequence
  Non-cyclic GFR-binding peptide
  MOD_RES (5)..(6)..(38): Xaa is C or S
IPEPXXVPEKMEPISILYLDENKNVVKFKYENMTVESXA

SEQ ID NO: 34331 - protein, 34 aa, Artificial Sequence
  Non-cyclic GFR-binding peptide
  MOD_RES (3)..(4): Xaa is C or S
STXXAPVKTSATSMLYYDNGRVLLLRKHRMIVEE

SEQ ID NO: 34332 - protein, 32 aa, Artificial Sequence
  Non-cyclic GFR-binding peptide
  MOD_RES (31)..(31): Xaa is C or S
VPQALSPINILYFVGRKPKVYGKIPMIVRSXK

SEQ ID NO: 34333 - protein, 32 aa, Artificial Sequence
  Non-cyclic GFR-binding peptide
  MOD_RES (1)..(2): Xaa is C or S
XXAPVKTSPISMLYKDNGRVLLLKYHYMIVEE

SEQ ID NO: 34334 - protein, 38 aa, Artificial Sequence
  Non-cyclic GFR-binding peptide
  MOD_RES (3)..(4)..(38): Xaa is C or S
  MOD_RES (18)..(19)..(20)..(21)..(22): Xaa is A or G
  MOD_RES (23)..(24)..(25)..(26): Xaa is A or G or absent
PTXXVPTRLEPISILYLXXXXXXXXXKFKYEDMVVESX

SEQ ID NO: 34335 - protein, 35 aa, Artificial Sequence
  Non-cyclic GFR-binding peptide
  MOD_RES (1)..(2): Xaa is C or S
  MOD_RES (16)..(17)..(18)..(19)..(20): Xaa is A or G
  MOD_RES (21)..(22)..(23)..(24): Xaa is A or G or absent
XXVPTRLSPISILYKXXXXXXXXXLKYHYDMVVES

SEQ ID NO: 34336 - protein, 32 aa, Artificial Sequence
  Non-cyclic GFR-binding peptide
  MOD_RES (14)..(15)..(16)..(17)..(18): Xaa is A or G
  MOD_RES (19)..(20)..(21)..(22): Xaa is A or G or absent
VPQALSPINILYFXXXXXXXXXYGKIPMIVRS

SEQ ID NO: 34337 - protein, 41 aa, Artificial Sequence
  Non-cyclic GFR-binding peptide
  MOD_RES (5)..(6)..(38)..(40): Xaa is C or S
IPEPXXVPEKMSPISILYKDENKNVVLKYHYNMTVESXAXR

SEQ ID NO: 34338 - protein, 35 aa, Artificial Sequence
  Non-cyclic GFR-binding peptide
  MOD_RES (1)..(32)..(34): Xaa is C or S
XVPQALSPINILYFVGRKPKVYGKIPMIVRSXKXS

SEQ ID NO: 34339 - protein, 34 aa, Artificial Sequence
  Non-cyclic GFR-binding peptide
  MOD_RES (1)..(34): Xaa is C or S
  MOD_RES (15)..(16)..(17)..(18)..(19): Xaa is A or G
  MOD_RES (20)..(21)..(22)..(23): Xaa is A or G or absent
XAPVKTSPISMLYKXXXXXXXXXLKYHYMIVEEX

SEQ ID NO: 34340 - protein, 39 aa, Artificial Sequence
  Non-cyclic GFR-binding peptide
  MOD_RES (3)..(4)..(36)..(38): Xaa is C or S
GPXXTPTKMEPISMLYLNDKQQIIKFKYEGMVVDRXGXS

SEQ ID NO: 34341 - protein, 35 aa, Artificial Sequence
  Non-cyclic GFR-binding peptide
  MOD_RES (1)..(33)..(35): Xaa is C or S
XTPTKMSATSMLYYNDKQQIILRKHRGMVVDRXGX

SEQ ID NO: 34342 - protein, 36 aa, Artificial Sequence
  Non-cyclic GFR-binding peptide
  MOD_RES (3)..(4)..(36): Xaa is C or S
EPXXVPEKMNAISILYFDENKNVVLKKYRNMTVESX

SEQ ID NO: 34343 - protein, 33 aa, Artificial Sequence
  Non-cyclic GFR-binding peptide
  MOD_RES (32)..(32): Xaa is C or S
VPEKMEPISILYLDENKNVVKFKYENMTVESXA

SEQ ID NO: 34344 - protein, 41 aa, Artificial Sequence
  Non-cyclic GFR-binding peptide
  MOD_RES (3)..(4)..(38)..(40): Xaa is C or S
  MOD_RES (18)..(19)..(20)..(21)..(22): Xaa is A or G
  MOD_RES (23)..(24)..(25)..(26): Xaa is A or G or absent
PTXXVPTRLSATSILYYXXXXXXXXXLRKHRDMVVESXGXR

SEQ ID NO: 34345 - protein, 38 aa, Artificial Sequence
  Non-cyclic GFR-binding peptide
  MOD_RES (1)..(2)..(36)..(38): Xaa is C or S
  MOD_RES (16)..(17)..(18)..(19)..(20): Xaa is A or G
  MOD_RES (21)..(22)..(23)..(24): Xaa is A or G or absent
XXVPTRLSATSILYYXXXXXXXXXLRKHRDMVVESXGX

SEQ ID NO: 34346 - protein, 40 aa, Artificial Sequence
  Non-cyclic GFR-binding peptide
  MOD_RES (5)..(6)..(39): Xaa is C or S
  MOD_RES (20)..(21)..(22)..(23)..(24): Xaa is A or G
  MOD_RES (25)..(26)..(27)..(28): Xaa is A or G or absent
SASPXXVSQDLSPINILYFXXXXXXXXXYGKIPMIVKSXK

SEQ ID NO: 34347 - protein, 37 aa, Artificial Sequence
  Non-cyclic GFR-binding peptide
  MOD_RES (34)..(36): Xaa is C or S
  MOD_RES (14)..(15)..(16)..(17)..(18): Xaa is A or G
  MOD_RES (19)..(20)..(21)..(22): Xaa is A or G or absent
TPTKMSPISMLYKXXXXXXXXXLKYHYGMVVDRXGXS

SEQ ID NO: 34348 - protein, 33 aa, Artificial Sequence
  Non-cyclic GFR-binding peptide
  MOD_RES (2)..(3): Xaa is C or S
TXXVPTRLSATSILYYDSANNVVLRKHRDMVVE

SEQ ID NO: 34349 - protein, 33 aa, Artificial Sequence
  Non-cyclic GFR-binding peptide
  MOD_RES (1)..(2): Xaa is C or S
XXVPTKLSATSILYYDKGVVTYLRKHRGMAVSE

SEQ ID NO: 34350 - protein, 34 aa, Artificial Sequence
  Non-cyclic GFR-binding peptide
  MOD_RES (3)..(4): Xaa is C or S
EPXXVPEKMEPISILYLDENKNVVKFKYENMTVE

SEQ ID NO: 34351 - protein, 43 aa, Artificial Sequence
  Non-cyclic GFR-binding peptide
  MOD_RES (6)..(7)..(41)..(43): Xaa is C or S
  MOD_RES (21)..(22)..(23)..(24)..(25): Xaa is A or G
  MOD_RES (26)..(27)..(28)..(29): Xaa is A or G or absent
GSAGPXXTPTKMEPISMLYLXXXXXXXXXKFKYEGMVVDRXGX

SEQ ID NO: 34352 - protein, 38 aa, Artificial Sequence
  Non-cyclic GFR-binding peptide
  MOD_RES (6)..(7)..(38): Xaa is C or S
RVPSTXXAPVKTEPISMLYLDNGRVLLKFKYEMIVEEX

SEQ ID NO: 34353 - protein, 33 aa, Artificial Sequence
  Non-cyclic GFR-binding peptide
  MOD_RES (32)..(32): Xaa is C or S
VPTKLSATSILYYDKGVVTYLRKHRGMAVSEXG

SEQ ID NO: 34354 - protein, 33 aa, Artificial Sequence
  Non-cyclic GFR-binding peptide
  MOD_RES (14)..(15)..(16)..(17)..(18): Xaa is A or G
  MOD_RES (19)..(20)..(21)..(22): Xaa is A or G or absent
VPTRLSATSILYYXXXXXXXXXLRKHRDMVVES

SEQ ID NO: 34355 - protein, 37 aa, Artificial Sequence
  Non-cyclic GFR-binding peptide
  MOD_RES (4)..(5)..(36): Xaa is C or S
PSTXXAPVKTEPISMLYLDNGRVLLKFKYEMIVEEXG

SEQ ID NO: 34356 - protein, 40 aa, Artificial Sequence
  Non-cyclic GFR-binding peptide
  MOD_RES (3)..(4)..(38)..(40): Xaa is C or S
  MOD_RES (18)..(19)..(20)..(21)..(22): Xaa is A or G
  MOD_RES (23)..(24)..(25)..(26): Xaa is A or G or absent
EPXXVPEKMNAISILYFXXXXXXXXXLKKYRNMTVESXAX

SEQ ID NO: 34357 - protein, 38 aa, Artificial Sequence
  Non-cyclic GFR-binding peptide
  MOD_RES (1)..(2)..(35)..(37): Xaa is C or S
  MOD_RES (16)..(17)..(18)..(19)..(20): Xaa is A or G
  MOD_RES (21)..(22)..(23)..(24): Xaa is A or G or absent
XXAPVKTSATSMLYYXXXXXXXXXLRKHRMIVEEXGXL

SEQ ID NO: 34358 - protein, 31 aa, Artificial Sequence
  Non-cyclic GFR-binding peptide
  MOD_RES (31)..(31): Xaa is C or S
APVKTEPISMLYLDNGRVLLKFKYEMIVEEX

SEQ ID NO: 34359 - protein, 35 aa, Artificial Sequence
  Non-cyclic GFR-binding peptide
  MOD_RES (4)..(5): Xaa is C or S
ASPXXVSQDLSPINILYFIGKTPKIYGKIPMIVKS

SEQ ID NO: 34360 - protein, 32 aa, Artificial Sequence
  Non-cyclic GFR-binding peptide
  MOD_RES (1)..(1): Xaa is C or S
XVPEKMSPINILYFDENKNVVYGKIPNMTVES

SEQ ID NO: 34361 - protein, 40 aa, Artificial Sequence
  Non-cyclic GFR-binding peptide
  MOD_RES (6)..(7): Xaa is C or S
  MOD_RES (21)..(22)..(23)..(24)..(25): Xaa is A or G
  MOD_RES (26)..(27)..(28)..(29): Xaa is A or G or absent
KASKAXXVPTKLSATSILYYXXXXXXXXXLRKHRGMAVSE

SEQ ID NO: 34362 - protein, 40 aa, Artificial Sequence
  Non-cyclic GFR-binding peptide
  MOD_RES (6)..(7): Xaa is C or S
  MOD_RES (21)..(22)..(23)..(24)..(25): Xaa is A or G
  MOD_RES (26)..(27)..(28)..(29): Xaa is A or G or absent
STPPTXXVPTRLEPISILYLXXXXXXXXXKFKYEDMVVES

SEQ ID NO: 34363 - protein, 36 aa, Artificial Sequence
  Non-cyclic GFR-binding peptide
  MOD_RES (2)..(3): Xaa is C or S
  MOD_RES (17)..(18)..(19)..(20)..(21): Xaa is A or G
  MOD_RES (22)..(23)..(24)..(25): Xaa is A or G or absent
PXXVPEKMSPINILYFXXXXXXXXXYGKIPNMTVES

SEQ ID NO: 34364 - protein, 38 aa, Artificial Sequence
  Non-cyclic GFR-binding peptide
  MOD_RES (2)..(3)..(37): Xaa is C or S
  MOD_RES (17)..(18)..(19)..(20)..(21): Xaa is A or G
  MOD_RES (22)..(23)..(24)..(25): Xaa is A or G or absent
TXXVPTRLEPISILYLXXXXXXXXXKFKYEDMVVESXG

SEQ ID NO: 34365 - protein, 36 aa, Artificial Sequence
  Non-cyclic GFR-binding peptide
  MOD_RES (1)..(33)..(35): Xaa is C or S
XVPTRLSPISILYKDSANNVVLKYHYDMVVESXGXR

SEQ ID NO: 34366 - protein, 38 aa, Artificial Sequence
  Non-cyclic GFR-binding peptide
  MOD_RES (5)..(6): Xaa is C or S
  MOD_RES (20)..(21)..(22)..(23)..(24): Xaa is A or G
  MOD_RES (25)..(26)..(27)..(28): Xaa is A or G or absent
TPPTXXVPTRLEPISILYLXXXXXXXXXKFKYEDMVVE

SEQ ID NO: 34367 - protein, 33 aa, Artificial Sequence
  Non-cyclic GFR-binding peptide
  MOD_RES (32)..(32): Xaa is C or S
VPEKMNAISILYFDENKNVVLKKYRNMTVESXA

SEQ ID NO: 34368 - protein, 41 aa, Artificial Sequence
  Non-cyclic GFR-binding peptide
  MOD_RES (6)..(7)..(40): Xaa is C or S
  MOD_RES (21)..(22)..(23)..(24)..(25): Xaa is A or G
  MOD_RES (26)..(27)..(28)..(29): Xaa is A or G or absent
ASAAPXXVPQALSPINILYFXXXXXXXXXYGKIPMIVRSXK

SEQ ID NO: 34369 - protein, 42 aa, Artificial Sequence
  Non-cyclic GFR-binding peptide
  MOD_RES (6)..(7)..(40)..(42): Xaa is C or S
  MOD_RES (21)..(22)..(23)..(24)..(25): Xaa is A or G
  MOD_RES (26)..(27)..(28)..(29): Xaa is A or G or absent
RVPSTXXAPVKTEPISMLYLXXXXXXXXXKFKYEMIVEEXGX

SEQ ID NO: 34370 - protein, 31 aa, Artificial Sequence
  Non-cyclic GFR-binding peptide
VPEKMEPISILYLDENKNVVKFKYENMTVES

SEQ ID NO: 34371 - protein, 36 aa, Artificial Sequence
  Non-cyclic GFR-binding peptide
  MOD_RES (33)..(35): Xaa is C or S
  MOD_RES (14)..(15)..(16)..(17)..(18): Xaa is A or G
  MOD_RES (19)..(20)..(21)..(22): Xaa is A or G or absent
VPQDLSPINILYFXXXXXXXXXYGKIPMVVKSXKXS

SEQ ID NO: 34372 - protein, 38 aa, Artificial Sequence
  Non-cyclic GFR-binding peptide
  MOD_RES (2)..(3)..(35)..(37): Xaa is C or S
TXXVPTRLEPISILYLDSANNVVKFKYEDMVVESXGXR

SEQ ID NO: 34373 - protein, 38 aa, Artificial Sequence
  Non-cyclic GFR-binding peptide
  MOD_RES (5)..(6): Xaa is C or S
  MOD_RES (20)..(21)..(22)..(23)..(24): Xaa is A or G
  MOD_RES (25)..(26)..(27)..(28): Xaa is A or G or absent
TPPTXXVPTRLSPISILYKXXXXXXXXXLKYHYDMVVE

SEQ ID NO: 34374 - protein, 43 aa, Artificial Sequence
  Non-cyclic GFR-binding peptide
  MOD_RES (5)..(6)..(40)..(42): Xaa is C or S
  MOD_RES (20)..(21)..(22)..(23)..(24): Xaa is A or G
  MOD_RES (25)..(26)..(27)..(28): Xaa is A or G or absent
SAGPXXTPTKMEPISMLYLXXXXXXXXXKFKYEGMVVDRXGXS

SEQ ID NO: 34375 - protein, 37 aa, Artificial Sequence
  Non-cyclic GFR-binding peptide
  MOD_RES (3)..(4)..(37): Xaa is C or S
  MOD_RES (18)..(19)..(20)..(21)..(22): Xaa is A or G
  MOD_RES (23)..(24)..(25)..(26): Xaa is A or G or absent
APXXVPQALSPINILYFXXXXXXXXXYGKIPMIVRSX

SEQ ID NO: 34376 - protein, 37 aa, Artificial Sequence
  Non-cyclic GFR-binding peptide
  MOD_RES (1)..(2)..(34)..(36): Xaa is C or S
XXVPTRLEPISILYLDSANNVVKFKYEDMVVESXGXR

SEQ ID NO: 34377 - protein, 31 aa, Artificial Sequence
  Non-cyclic GFR-binding peptide
VPARLSATSILYYDAANNVVLRKHRDMVVEA

SEQ ID NO: 34378 - protein, 37 aa, Artificial Sequence
  Non-cyclic GFR-binding peptide
  MOD_RES (34)..(36): Xaa is C or S
  MOD_RES (14)..(15)..(16)..(17)..(18): Xaa is A or G
  MOD_RES (19)..(20)..(21)..(22): Xaa is A or G or absent
VPTRLEPISILYLXXXXXXXXXKFKYEDMVVESXGXR

SEQ ID NO: 34379 - protein, 35 aa, Artificial Sequence
  Non-cyclic GFR-binding peptide
  MOD_RES (4)..(5): Xaa is C or S
PEPXXVPEKMSPISILYKDENKNVVLKYHYNMTVE

SEQ ID NO: 34380 - protein, 34 aa, Artificial Sequence
  Non-cyclic GFR-binding peptide
  MOD_RES (3)..(4): Xaa is C or S
EPXXVPEKMSATSILYYDENKNVVLRKHRNMTVE

SEQ ID NO: 34381 - protein, 36 aa, Artificial Sequence
  Non-cyclic GFR-binding peptide
  MOD_RES (2)..(3)..(36): Xaa is C or S
  MOD_RES (17)..(18)..(19)..(20)..(21): Xaa is A or G
  MOD_RES (22)..(23)..(24)..(25): Xaa is A or G or absent
TXXAPVKTSPISMLYKXXXXXXXXXLKYHYMIVEEX

SEQ ID NO: 34382 - protein, 36 aa, Artificial Sequence
  Non-cyclic GFR-binding peptide
  MOD_RES (1)..(2)..(36): Xaa is C or S
  MOD_RES (16)..(17)..(18)..(19)..(20): Xaa is A or G
  MOD_RES (21)..(22)..(23)..(24): Xaa is A or G or absent
XXVPEKMSPISILYKXXXXXXXXXLKYHYNMTVESX

SEQ ID NO: 34383 - protein, 41 aa, Artificial Sequence
  Non-cyclic GFR-binding peptide
  MOD_RES (3)..(4)..(38)..(40): Xaa is C or S
  MOD_RES (18)..(19)..(20)..(21)..(22): Xaa is A or G
  MOD_RES (23)..(24)..(25)..(26): Xaa is A or G or absent
PTXXVPTRLEPISILYLXXXXXXXXXKFKYEDMVVESXGXR

SEQ ID NO: 34384 - protein, 40 aa, Artificial Sequence
  Non-cyclic GFR-binding peptide
  MOD_RES (4)..(5)..(37)..(39): Xaa is C or S
PPTXXVPTRLSATSILYYDSANNVVLRKHRDMVVESXGXR

SEQ ID NO: 34385 - protein, 40 aa, Artificial Sequence
  Non-cyclic GFR-binding peptide
  MOD_RES (5)..(6)..(37)..(39): Xaa is C or S
SASPXXVPQDLSPINILYFVGRTPKVYGKIPMVVKSXKXS

SEQ ID NO: 34386 - protein, 40 aa, Artificial Sequence
  Non-cyclic GFR-binding peptide
  MOD_RES (2)..(3)..(37)..(39): Xaa is C or S
  MOD_RES (17)..(18)..(19)..(20)..(21): Xaa is A or G
  MOD_RES (22)..(23)..(24)..(25): Xaa is A or G or absent
PXXVPEKMSPISILYKXXXXXXXXXLKYHYNMTVESXAXR

SEQ ID NO: 34387 - protein, 34 aa, Artificial Sequence
  Non-cyclic GFR-binding peptide
  MOD_RES (34)..(34): Xaa is C or S
  MOD_RES (14)..(15)..(16)..(17)..(18): Xaa is A or G
  MOD_RES (19)..(20)..(21)..(22): Xaa is A or G or absent
VPEKMSATSILYYXXXXXXXXXLRKHRNMTVESX

SEQ ID NO: 34388 - protein, 32 aa, Artificial Sequence
  Non-cyclic GFR-binding peptide
  MOD_RES (1)..(1): Xaa is C or S
XVPEKMEPISILYLDENKNVVKFKYENMTVES

SEQ ID NO: 34389 - protein, 40 aa, Artificial Sequence
  Non-cyclic GFR-binding peptide
  MOD_RES (4)..(5)..(39): Xaa is C or S
  MOD_RES (19)..(20)..(21)..(22)..(23): Xaa is A or G
  MOD_RES (24)..(25)..(26)..(27): Xaa is A or G or absent
AGPXXTPTKMSPISMLYKXXXXXXXXXLKYHYGMVVDRXG

SEQ ID NO: 34390 - protein, 37 aa, Artificial Sequence
  Non-cyclic GFR-binding peptide
  MOD_RES (3)..(4): Xaa is C or S
  MOD_RES (18)..(19)..(20)..(21)..(22): Xaa is A or G
  MOD_RES (23)..(24)..(25)..(26): Xaa is A or G or absent
EPXXVPEKMSPINILYFXXXXXXXXXYGKIPNMTVES

SEQ ID NO: 34391 - protein, 33 aa, Artificial Sequence
  Non-cyclic GFR-binding peptide
  MOD_RES (32)..(32): Xaa is C or S
VPARLSATSILYYDAANNVVLRKHRDMVVEAXG

SEQ ID NO: 34392 - protein, 38 aa, Artificial Sequence
  Non-cyclic GFR-binding peptide
  MOD_RES (4)..(5): Xaa is C or S
  MOD_RES (19)..(20)..(21)..(22)..(23): Xaa is A or G
  MOD_RES (24)..(25)..(26)..(27): Xaa is A or G or absent
PEPXXVPEKMSPINILYFXXXXXXXXXYGKIPNMTVES

SEQ ID NO: 34393 - protein, 37 aa, Artificial Sequence
  Non-cyclic GFR-binding peptide
  MOD_RES (2)..(3)..(35)..(37): Xaa is C or S
PXXVPEKMSPISILYKDENKNVVLKYHYNMTVESXAX

SEQ ID NO: 34394 - protein, 33 aa, Artificial Sequence
  Non-cyclic GFR-binding peptide
  MOD_RES (1)..(2)..(33): Xaa is C or S
XXAPVKTSATSMLYYDNGRVLLLRKHRMIVEEX

SEQ ID NO: 34395 - protein, 36 aa, Artificial Sequence
  Non-cyclic GFR-binding peptide
  MOD_RES (1)..(33)..(35): Xaa is C or S
XVPEKMEPISILYLDENKNVVKFKYENMTVESXAXR

SEQ ID NO: 34396 - protein, 41 aa, Artificial Sequence
  Non-cyclic GFR-binding peptide
  MOD_RES (6)..(7)..(41): Xaa is C or S
  MOD_RES (21)..(22)..(23)..(24)..(25): Xaa is A or G
  MOD_RES (26)..(27)..(28)..(29): Xaa is A or G or absent
STPPTXXVPTRLSATSILYYXXXXXXXXXLRKHRDMVVESX

SEQ ID NO: 34397 - protein, 37 aa, Artificial Sequence
  Non-cyclic GFR-binding peptide
  MOD_RES (2)..(3)..(37): Xaa is C or S
  MOD_RES (17)..(18)..(19)..(20)..(21): Xaa is A or G
  MOD_RES (22)..(23)..(24)..(25): Xaa is A or G or absent
TXXVPTRLEPISILYLXXXXXXXXXKFKYEDMVVESX

SEQ ID NO: 34398 - protein, 36 aa, Artificial Sequence
  Non-cyclic GFR-binding peptide
  MOD_RES (1)..(2)..(33)..(35): Xaa is C or S
XXAPVKTEPISMLYLDNGRVLLKFKYEMIVEEXGXL

SEQ ID NO: 34399 - protein, 35 aa, Artificial Sequence
  Non-cyclic GFR-binding peptide
  MOD_RES (1)..(2)..(34): Xaa is C or S
XXVPTRLSPISILYKDSANNVVLKYHYDMVVESXG

SEQ ID NO: 34400 - protein, 35 aa, Artificial Sequence
  Non-cyclic GFR-binding peptide
  MOD_RES (4)..(5): Xaa is C or S
PSTXXAPVKTSPISMLYKDNGRVLLLKYHYMIVEE

SEQ ID NO: 34401 - protein, 37 aa, Artificial Sequence
  Non-cyclic GFR-binding peptide
  MOD_RES (1)..(34)..(36): Xaa is C or S
  MOD_RES (15)..(16)..(17)..(18)..(19): Xaa is A or G
  MOD_RES (20)..(21)..(22)..(23): Xaa is A or G or absent
XVPQALSPINILYFXXXXXXXXXYGKIPMIVRSXKXS

SEQ ID NO: 34402 - protein, 32 aa, Artificial Sequence
  Non-cyclic GFR-binding peptide
  MOD_RES (1)..(2): Xaa is C or S
XXAPVKTSATSMLYYDNGRVLLLRKHRMIVEE

SEQ ID NO: 34403 - protein, 35 aa, Artificial Sequence
  Non-cyclic GFR-binding peptide
  MOD_RES (4)..(5): Xaa is C or S
PEPXXVPEKMSPINILYFDENKNVVYGKIPNMTVE

SEQ ID NO: 34404 - protein, 36 aa, Artificial Sequence
  Non-cyclic GFR-binding peptide
  MOD_RES (1)..(33)..(35): Xaa is C or S
XTPTKMSATSMLYYNDKQQIILRKHRGMVVDRXGXS

SEQ ID NO: 34405 - protein, 39 aa, Artificial Sequence
  Non-cyclic GFR-binding peptide
  MOD_RES (5)..(6)..(39): Xaa is C or S
  MOD_RES (20)..(21)..(22)..(23)..(24): Xaa is A or G
  MOD_RES (25)..(26)..(27)..(28): Xaa is A or G or absent
SAAPXXVPQALSPINILYFXXXXXXXXXYGKIPMIVRSX

SEQ ID NO: 34406 - protein, 40 aa, Artificial Sequence
  Non-cyclic GFR-binding peptide
  MOD_RES (5)..(6)..(39): Xaa is C or S
  MOD_RES (20)..(21)..(22)..(23)..(24): Xaa is A or G
  MOD_RES (25)..(26)..(27)..(28): Xaa is A or G or absent
SASPXXVPQDLSPINILYFXXXXXXXXXYGKIPMVVKSXK

SEQ ID NO: 34407 - protein, 37 aa, Artificial Sequence
  Non-cyclic GFR-binding peptide
  MOD_RES (4)..(5): Xaa is C or S
  MOD_RES (19)..(20)..(21)..(22)..(23): Xaa is A or G
  MOD_RES (24)..(25)..(26)..(27): Xaa is A or G or absent
AAPXXVPQALSPINILYFXXXXXXXXXYGKIPMIVRS

SEQ ID NO: 34408 - protein, 33 aa, Artificial Sequence
  Non-cyclic GFR-binding peptide
  MOD_RES (1)..(1): Xaa is C or S
  MOD_RES (15)..(16)..(17)..(18)..(19): Xaa is A or G
  MOD_RES (20)..(21)..(22)..(23): Xaa is A or G or absent
XAPVKTSATSMLYYXXXXXXXXXLRKHRMIVEE

SEQ ID NO: 34409 - protein, 37 aa, Artificial Sequence
  Non-cyclic GFR-binding peptide
  MOD_RES (2)..(3)..(35)..(37): Xaa is C or S
AXXVPTKLSATSILYYDKGVVTYLRKHRGMAVSEXGX

SEQ ID NO: 34410 - protein, 35 aa, Artificial Sequence
  Non-cyclic GFR-binding peptide
  MOD_RES (1)..(2)..(34): Xaa is C or S
XXVPEKMSATSILYYDENKNVVLRKHRNMTVESXA

SEQ ID NO: 34411 - protein, 42 aa, Artificial Sequence
  Non-cyclic GFR-binding peptide
  MOD_RES (6)..(7)..(40)..(42): Xaa is C or S
  MOD_RES (21)..(22)..(23)..(24)..(25): Xaa is A or G
  MOD_RES (26)..(27)..(28)..(29): Xaa is A or G or absent
RVPSTXXAPVKTSPISMLYKXXXXXXXXXLKYHYMIVEEXGX

SEQ ID NO: 34412 - protein, 35 aa, Artificial Sequence
  Non-cyclic GFR-binding peptide
  MOD_RES (32)..(34): Xaa is C or S
VPTRLSPISILYKDSANNVVLKYHYDMVVESXGXR

SEQ ID NO: 34413 - protein, 36 aa, Artificial Sequence
  Non-cyclic GFR-binding peptide
  MOD_RES (3)..(4): Xaa is C or S
  MOD_RES (18)..(19)..(20)..(21)..(22): Xaa is A or G
  MOD_RES (23)..(24)..(25)..(26): Xaa is A or G or absent
EPXXVPEKMNAISILYFXXXXXXXXXLKKYRNMTVE

SEQ ID NO: 34414 - protein, 35 aa, Artificial Sequence
  Non-cyclic GFR-binding peptide
  MOD_RES (4)..(5): Xaa is C or S
PPTXXVPTRLSPISILYKDSANNVVLKYHYDMVVE

SEQ ID NO: 34415 - protein, 36 aa, Artificial Sequence
  Non-cyclic GFR-binding peptide
  MOD_RES (4)..(5): Xaa is C or S
SKAXXVPTKLSATSILYYDKGVVTYLRKHRGMAVSE

SEQ ID NO: 34416 - protein, 33 aa, Artificial Sequence
  Non-cyclic GFR-binding peptide
  MOD_RES (1)..(2)..(33): Xaa is C or S
XXAPVKTSPISMLYKDNGRVLLLKYHYMIVEEX

SEQ ID NO: 34417 - protein, 37 aa, Artificial Sequence
  Non-cyclic GFR-binding peptide
  MOD_RES (1)..(2)..(36): Xaa is C or S
  MOD_RES (16)..(17)..(18)..(19)..(20): Xaa is A or G
  MOD_RES (21)..(22)..(23)..(24): Xaa is A or G or absent
XXVPTRLSPISILYKXXXXXXXXXLKYHYDMVVESXG

SEQ ID NO: 34418 - protein, 32 aa, Artificial Sequence
  Non-cyclic GFR-binding peptide
  MOD_RES (1)..(1): Xaa is C or S
XVPARLSATSILYYDAANNVVLRKHRDMVVEA

SEQ ID NO: 34419 - protein, 35 aa, Artificial Sequence
  Non-cyclic GFR-binding peptide
  MOD_RES (1)..(35): Xaa is C or S
  MOD_RES (15)..(16)..(17)..(18)..(19): Xaa is A or G
  MOD_RES (20)..(21)..(22)..(23): Xaa is A or G or absent
XVPEKMSATSILYYXXXXXXXXXLRKHRNMTVESX

SEQ ID NO: 34420 - protein, 34 aa, Artificial Sequence
  Non-cyclic GFR-binding peptide
  MOD_RES (3)..(4): Xaa is C or S
PTXXVPTRLSATSILYYDSANNVVLRKHRDMVVE

SEQ ID NO: 34421 - protein, 38 aa, Artificial Sequence
  Non-cyclic GFR-binding peptide
  MOD_RES (4)..(5): Xaa is C or S
  MOD_RES (19)..(20)..(21)..(22)..(23): Xaa is A or G
  MOD_RES (24)..(25)..(26)..(27): Xaa is A or G or absent
PEPXXVPEKMSATSILYYXXXXXXXXXLRKHRNMTVES

SEQ ID NO: 34422 - protein, 36 aa, Artificial Sequence
  Non-cyclic GFR-binding peptide
  MOD_RES (1)..(35): Xaa is C or S
  MOD_RES (15)..(16)..(17)..(18)..(19): Xaa is A or G
  MOD_RES (20)..(21)..(22)..(23): Xaa is A or G or absent
XVPTKLSATSILYYXXXXXXXXXLRKHRGMAVSEXG

SEQ ID NO: 34423 - protein, 38 aa, Artificial Sequence
  Non-cyclic GFR-binding peptide
  MOD_RES (2)..(3)..(37): Xaa is C or S
  MOD_RES (17)..(18)..(19)..(20)..(21): Xaa is A or G
  MOD_RES (22)..(23)..(24)..(25): Xaa is A or G or absent
TXXVPTRLSPISILYKXXXXXXXXXLKYHYDMVVESXG

SEQ ID NO: 34424 - protein, 38 aa, Artificial Sequence
  Non-cyclic GFR-binding peptide
  MOD_RES (3)..(4)..(38): Xaa is C or S
  MOD_RES (18)..(19)..(20)..(21)..(22): Xaa is A or G
  MOD_RES (23)..(24)..(25)..(26): Xaa is A or G or absent
GPXXTPTKMSPISMLYKXXXXXXXXXLKYHYGMVVDRX

SEQ ID NO: 34425 - protein, 37 aa, Artificial Sequence
  Non-cyclic GFR-binding peptide
  MOD_RES (5)..(6): Xaa is C or S
ASKAXXVPTKLSATSILYYDKGVVTYLRKHRGMAVSE

SEQ ID NO: 34426 - protein, 31 aa, Artificial Sequence
  Non-cyclic GFR-binding peptide
VPEKMSPINILYFDENKNVVYGKIPNMTVES

SEQ ID NO: 34427 - protein, 37 aa, Artificial Sequence
  Non-cyclic GFR-binding peptide
  MOD_RES (4)..(5): Xaa is C or S
  MOD_RES (19)..(20)..(21)..(22)..(23): Xaa is A or G
  MOD_RES (24)..(25)..(26)..(27): Xaa is A or G or absent
SKAXXVPTKLSATSILYYXXXXXXXXXLRKHRGMAVS

SEQ ID NO: 34428 - protein, 36 aa, Artificial Sequence
  Non-cyclic GFR-binding peptide
  MOD_RES (1)..(2)..(34)..(36): Xaa is C or S
XXTPTKMEPISMLYLNDKQQIIKFKYEGMVVDRXGX

SEQ ID NO: 34429 - protein, 36 aa, Artificial Sequence
  Non-cyclic GFR-binding peptide
  MOD_RES (34)..(36): Xaa is C or S
  MOD_RES (14)..(15)..(16)..(17)..(18): Xaa is A or G
  MOD_RES (19)..(20)..(21)..(22): Xaa is A or G or absent
VPTRLSATSILYYXXXXXXXXXLRKHRDMVVESXGX

SEQ ID NO: 34430 - protein, 33 aa, Artificial Sequence
  Non-cyclic GFR-binding peptide
  MOD_RES (1)..(33): Xaa is C or S
XVPEKMNAISILYFDENKNVVLKKYRNMTVESX

SEQ ID NO: 34431 - protein, 34 aa, Artificial Sequence
  Non-cyclic GFR-binding peptide
  MOD_RES (1)..(2)..(34): Xaa is C or S
XXVPEKMNAISILYFDENKNVVLKKYRNMTVESX

SEQ ID NO: 34432 - protein, 36 aa, Artificial Sequence
  Non-cyclic GFR-binding peptide
  MOD_RES (3)..(4): Xaa is C or S
  MOD_RES (18)..(19)..(20)..(21)..(22): Xaa is A or G
  MOD_RES (23)..(24)..(25)..(26): Xaa is A or G or absent
APXXVPQALSPINILYFXXXXXXXXXYGKIPMIVRS

SEQ ID NO: 34433 - protein, 36 aa, Artificial Sequence
  Non-cyclic GFR-binding peptide
  MOD_RES (1)..(2)..(34)..(36): Xaa is C or S
XXVPTKLSATSILYYDKGVVTYLRKHRGMAVSEXGX

SEQ ID NO: 34434 - protein, 42 aa, Artificial Sequence
  Non-cyclic GFR-binding peptide
  MOD_RES (6)..(7)..(41): Xaa is C or S
  MOD_RES (21)..(22)..(23)..(24)..(25): Xaa is A or G
  MOD_RES (26)..(27)..(28)..(29): Xaa is A or G or absent
GSAGPXXTPTKMSPISMLYKXXXXXXXXXLKYHYGMVVDRXG

SEQ ID NO: 34435 - protein, 39 aa, Artificial Sequence
  Non-cyclic GFR-binding peptide
  MOD_RES (5)..(6): Xaa is C or S
  MOD_RES (20)..(21)..(22)..(23)..(24): Xaa is A or G
  MOD_RES (25)..(26)..(27)..(28): Xaa is A or G or absent
SAGPXXTPTKMSATSMLYYXXXXXXXXXLRKHRGMVVDR

SEQ ID NO: 34436 - protein, 41 aa, Artificial Sequence
  Non-cyclic GFR-binding peptide
  MOD_RES (6)..(7)..(40): Xaa is C or S
  MOD_RES (21)..(22)..(23)..(24)..(25): Xaa is A or G
  MOD_RES (26)..(27)..(28)..(29): Xaa is A or G or absent
ASASPXXVPQDLSPINILYFXXXXXXXXXYGKIPMVVKSXK

SEQ ID NO: 34437 - protein, 33 aa, Artificial Sequence
  Non-cyclic GFR-binding peptide
  MOD_RES (1)..(2): Xaa is C or S
XXVPTRLSATSILYYDSANNVVLRKHRDMVVES

SEQ ID NO: 34438 - protein, 41 aa, Artificial Sequence
  Non-cyclic GFR-binding peptide
  MOD_RES (4)..(5)..(39)..(41): Xaa is C or S
  MOD_RES (19)..(20)..(21)..(22)..(23): Xaa is A or G
  MOD_RES (24)..(25)..(26)..(27): Xaa is A or G or absent
PEPXXVPEKMSATSILYYXXXXXXXXXLRKHRNMTVESXAX

SEQ ID NO: 34439 - protein, 40 aa, Artificial Sequence
  Non-cyclic GFR-binding peptide
  MOD_RES (3)..(4)..(38)..(40): Xaa is C or S
  MOD_RES (18)..(19)..(20)..(21)..(22): Xaa is A or G
  MOD_RES (23)..(24)..(25)..(26): Xaa is A or G or absent
PTXXVPTRLEPISILYLXXXXXXXXXKFKYEDMVVESXGX

SEQ ID NO: 34440 - protein, 38 aa, Artificial Sequence
  Non-cyclic GFR-binding peptide
  MOD_RES (3)..(4)..(38): Xaa is C or S
  MOD_RES (18)..(19)..(20)..(21)..(22): Xaa is A or G
  MOD_RES (23)..(24)..(25)..(26): Xaa is A or G or absent
EPXXVPEKMSATSILYYXXXXXXXXXLRKHRNMTVESX

SEQ ID NO: 34441 - protein, 37 aa, Artificial Sequence
  Non-cyclic GFR-binding peptide
  MOD_RES (4)..(5): Xaa is C or S
  MOD_RES (19)..(20)..(21)..(22)..(23): Xaa is A or G
  MOD_RES (24)..(25)..(26)..(27): Xaa is A or G or absent
PPTXXVPTRLEPISILYLXXXXXXXXXKFKYEDMVVE

SEQ ID NO: 34442 - protein, 41 aa, Artificial Sequence
  Non-cyclic GFR-binding peptide
  MOD_RES (4)..(5)..(39)..(41): Xaa is C or S
  MOD_RES (19)..(20)..(21)..(22)..(23): Xaa is A or G
  MOD_RES (24)..(25)..(26)..(27): Xaa is A or G or absent
PPTXXVPTRLEPISILYLXXXXXXXXXKFKYEDMVVESXGX

SEQ ID NO: 34443 - protein, 41 aa, Artificial Sequence
  Non-cyclic GFR-binding peptide
  MOD_RES (6)..(7)..(39)..(41): Xaa is C or S
HVPKPXXAPTKLSPISVLYKDDSSNVILKYHYNMVVRSXGX

SEQ ID NO: 34444 - protein, 44 aa, Artificial Sequence
  Non-cyclic GFR-binding peptide
  MOD_RES (6)..(7)..(41)..(43): Xaa is C or S
  MOD_RES (21)..(22)..(23)..(24)..(25): Xaa is A or G
  MOD_RES (26)..(27)..(28)..(29): Xaa is A or G or absent
STPPTXXVPTRLEPISILYLXXXXXXXXXKFKYEDMVVESXGXR

SEQ ID NO: 34445 - protein, 39 aa, Artificial Sequence
  Non-cyclic GFR-binding peptide
  MOD_RES (6)..(7): Xaa is C or S
  MOD_RES (21)..(22)..(23)..(24)..(25): Xaa is A or G
  MOD_RES (26)..(27)..(28)..(29): Xaa is A or G or absent
KASKAXXVPTKLSATSILYYXXXXXXXXXLRKHRGMAVS

SEQ ID NO: 34446 - protein, 36 aa, Artificial Sequence
  Non-cyclic GFR-binding peptide
  MOD_RES (34)..(36): Xaa is C or S
  MOD_RES (14)..(15)..(16)..(17)..(18): Xaa is A or G
  MOD_RES (19)..(20)..(21)..(22): Xaa is A or G or absent
TPTKMSPISMLYKXXXXXXXXXLKYHYGMVVDRXGX

SEQ ID NO: 34447 - protein, 36 aa, Artificial Sequence
  Non-cyclic GFR-binding peptide
  MOD_RES (5)..(6): Xaa is C or S
APASXXVPARLSATSILYYDAANNVVLRKHRDMVVE

SEQ ID NO: 34448 - protein, 37 aa, Artificial Sequence
  Non-cyclic GFR-binding peptide
  MOD_RES (3)..(4)..(36): Xaa is C or S
PTXXVPTRLSPISILYKDSANNVVLKYHYDMVVESXG

SEQ ID NO: 34449 - protein, 36 aa, Artificial Sequence
  Non-cyclic GFR-binding peptide
  MOD_RES (3)..(4): Xaa is C or S
  MOD_RES (18)..(19)..(20)..(21)..(22): Xaa is A or G
  MOD_RES (23)..(24)..(25)..(26): Xaa is A or G or absent
SPXXVPQDLSPINILYFXXXXXXXXXYGKIPMVVKS

SEQ ID NO: 34450 - protein, 37 aa, Artificial Sequence
  Non-cyclic GFR-binding peptide
  MOD_RES (6)..(7): Xaa is C or S
GIPEPXXVPEKMSPISILYKDENKNVVLKYHYNMTVE

SEQ ID NO: 34451 - protein, 36 aa, Artificial Sequence
  Non-cyclic GFR-binding peptide
  MOD_RES (1)..(33)..(35): Xaa is C or S
XTPTKMEPISMLYLNDKQQIIKFKYEGMVVDRXGXS

SEQ ID NO: 34452 - protein, 41 aa, Artificial Sequence
  Non-cyclic GFR-binding peptide
  MOD_RES (5)..(6)..(39)..(41): Xaa is C or S
  MOD_RES (20)..(21)..(22)..(23)..(24): Xaa is A or G
  MOD_RES (25)..(26)..(27)..(28): Xaa is A or G or absent
SASPXXVSQDLSPINILYFXXXXXXXXXYGKIPMIVKSXKX

SEQ ID NO: 34453 - protein, 37 aa, Artificial Sequence
  Non-cyclic GFR-binding peptide
  MOD_RES (34)..(36): Xaa is C or S
  MOD_RES (14)..(15)..(16)..(17)..(18): Xaa is A or G
  MOD_RES (19)..(20)..(21)..(22): Xaa is A or G or absent
VPEKMNAISILYFXXXXXXXXXLKKYRNMTVESXAXR

SEQ ID NO: 34454 - protein, 40 aa, Artificial Sequence
  Non-cyclic GFR-binding peptide
  MOD_RES (5)..(6)..(38)..(40): Xaa is C or S
SAGPXXTPTKMEPISMLYLNDKQQIIKFKYEGMVVDRXGX

SEQ ID NO: 34455 - protein, 42 aa, Artificial Sequence
  Non-cyclic GFR-binding peptide
  MOD_RES (5)..(6)..(40)..(42): Xaa is C or S
  MOD_RES (20)..(21)..(22)..(23)..(24): Xaa is A or G
  MOD_RES (25)..(26)..(27)..(28): Xaa is A or G or absent
IPEPXXVPEKMNAISILYFXXXXXXXXXLKKYRNMTVESXAX

SEQ ID NO: 34456 - protein, 40 aa, Artificial Sequence
  Non-cyclic GFR-binding peptide
  MOD_RES (6)..(7)..(39): Xaa is C or S
GSAGPXXTPTKMSATSMLYYNDKQQIILRKHRGMVVDRXG

SEQ ID NO: 34457 - protein, 40 aa, Artificial Sequence
  Non-cyclic GFR-binding peptide
  MOD_RES (3)..(4)..(38)..(40): Xaa is C or S
  MOD_RES (18)..(19)..(20)..(21)..(22): Xaa is A or G
  MOD_RES (23)..(24)..(25)..(26): Xaa is A or G or absent
EPXXVPEKMSPISILYKXXXXXXXXXLKYHYNMTVESXAX

SEQ ID NO: 34458 - protein, 37 aa, Artificial Sequence
  Non-cyclic GFR-binding peptide
  MOD_RES (4)..(5)..(37): Xaa is C or S
PEPXXVPEKMNAISILYFDENKNVVLKKYRNMTVESX

SEQ ID NO: 34459 - protein, 35 aa, Artificial Sequence
  Non-cyclic GFR-binding peptide
  MOD_RES (1)..(32)..(34): Xaa is C or S
XAPVKTSATSMLYYDNGRVLLLRKHRMIVEEXGXL

SEQ ID NO: 34460 - protein, 36 aa, Artificial Sequence
  Non-cyclic GFR-binding peptide
  MOD_RES (33)..(35): Xaa is C or S
  MOD_RES (14)..(15)..(16)..(17)..(18): Xaa is A or G
  MOD_RES (19)..(20)..(21)..(22): Xaa is A or G or absent
APVKTSATSMLYYXXXXXXXXXLRKHRMIVEEXGXL

SEQ ID NO: 34461 - protein, 34 aa, Artificial Sequence
  Non-cyclic GFR-binding peptide
  MOD_RES (1)..(1): Xaa is C or S
  MOD_RES (15)..(16)..(17)..(18)..(19): Xaa is A or G
  MOD_RES (20)..(21)..(22)..(23): Xaa is A or G or absent
XVPTRLSPISILYKXXXXXXXXXLKYHYDMVVES

SEQ ID NO: 34462 - protein, 41 aa, Artificial Sequence
  Non-cyclic GFR-binding peptide
  MOD_RES (6)..(7)..(39)..(41): Xaa is C or S
GSAGPXXTPTKMSPISMLYKNDKQQIILKYHYGMVVDRXGX

SEQ ID NO: 34463 - protein, 34 aa, Artificial Sequence
  Non-cyclic GFR-binding peptide
  MOD_RES (3)..(4): Xaa is C or S
KAXXVPTKLSATSILYYDKGVVTYLRKHRGMAVS

SEQ ID NO: 34464 - protein, 35 aa, Artificial Sequence
  Non-cyclic GFR-binding peptide
  MOD_RES (2)..(3)..(35): Xaa is C or S
PXXTPTKMSATSMLYYNDKQQIILRKHRGMVVDRX

SEQ ID NO: 34465 - protein, 40 aa, Artificial Sequence
  Non-cyclic GFR-binding peptide
  MOD_RES (5)..(6)..(38)..(40): Xaa is C or S
SAGPXXTPTKMSPISMLYKNDKQQIILKYHYGMVVDRXGX

SEQ ID NO: 34466 - protein, 36 aa, Artificial Sequence
  Non-cyclic GFR-binding peptide
  MOD_RES (2)..(3)..(35): Xaa is C or S
PXXTPTKMSATSMLYYNDKQQIILRKHRGMVVDRXG

SEQ ID NO: 34467 - protein, 40 aa, Artificial Sequence
  Non-cyclic GFR-binding peptide
  MOD_RES (5)..(6)..(38)..(40): Xaa is C or S
IPEPXXVPEKMNAISILYFDENKNVVLKKYRNMTVESXAX

SEQ ID NO: 34468 - protein, 33 aa, Artificial Sequence
  Non-cyclic GFR-binding peptide
  MOD_RES (32)..(32): Xaa is C or S
VPEKMSATSILYYDENKNVVLRKHRNMTVESXA

SEQ ID NO: 34469 - protein, 39 aa, Artificial Sequence
  Non-cyclic GFR-binding peptide
  MOD_RES (6)..(7): Xaa is C or S
  MOD_RES (21)..(22)..(23)..(24)..(25): Xaa is A or G
  MOD_RES (26)..(27)..(28)..(29): Xaa is A or G or absent
ASASPXXVSQDLSPINILYFXXXXXXXXXYGKIPMIVKS

SEQ ID NO: 34470 - protein, 37 aa, Artificial Sequence
  Non-cyclic GFR-binding peptide
  MOD_RES (4)..(5)..(37): Xaa is C or S
PEPXXVPEKMSPISILYKDENKNVVLKYHYNMTVESX

SEQ ID NO: 34471 - protein, 39 aa, Artificial Sequence
  Non-cyclic GFR-binding peptide
  MOD_RES (5)..(6)..(38): Xaa is C or S
TPPTXXVPTRLSPISILYKDSANNVVLKYHYDMVVESXG

SEQ ID NO: 34472 - protein, 36 aa, Artificial Sequence
  Non-cyclic GFR-binding peptide
  MOD_RES (1)..(2)..(33)..(35): Xaa is C or S
XXVPQALSPINILYFVGRKPKVYGKIPMIVRSXKXS

SEQ ID NO: 34473 - protein, 36 aa, Artificial Sequence
  Non-cyclic GFR-binding peptide
  MOD_RES (2)..(3)..(35): Xaa is C or S
PXXVPEKMSATSILYYDENKNVVLRKHRNMTVESXA

SEQ ID NO: 34474 - protein, 40 aa, Artificial Sequence
  Non-cyclic GFR-binding peptide
  MOD_RES (4)..(5)..(37)..(39): Xaa is C or S
AGPXXTPTKMEPISMLYLNDKQQIIKFKYEGMVVDRXGXS

SEQ ID NO: 34475 - protein, 35 aa, Artificial Sequence
  Non-cyclic GFR-binding peptide
  MOD_RES (4)..(5): Xaa is C or S
PEPXXVPEKMSATSILYYDENKNVVLRKHRNMTVE

SEQ ID NO: 34476 - protein, 39 aa, Artificial Sequence
  Non-cyclic GFR-binding peptide
  MOD_RES (3)..(4)..(38): Xaa is C or S
  MOD_RES (18)..(19)..(20)..(21)..(22): Xaa is A or G
  MOD_RES (23)..(24)..(25)..(26): Xaa is A or G or absent
PTXXVPTRLSPISILYKXXXXXXXXXLKYHYDMVVESXG

SEQ ID NO: 34477 - protein, 41 aa, Artificial Sequence
  Non-cyclic GFR-binding peptide
  MOD_RES (4)..(5)..(38)..(40): Xaa is C or S
  MOD_RES (19)..(20)..(21)..(22)..(23): Xaa is A or G
  MOD_RES (24)..(25)..(26)..(27): Xaa is A or G or absent
ASPXXVSQDLSPINILYFXXXXXXXXXYGKIPMIVKSXKXS

SEQ ID NO: 34478 - protein, 31 aa, Artificial Sequence
  Non-cyclic GFR-binding peptide
  MOD_RES (31)..(31): Xaa is C or S
APVKTSATSMLYYDNGRVLLLRKHRMIVEEX

SEQ ID NO: 34479 - protein, 41 aa, Artificial Sequence
  Non-cyclic GFR-binding peptide
  MOD_RES (5)..(6)..(38)..(40): Xaa is C or S
ASKAXXVPTKLSATSILYYDKGVVTYLRKHRGMAVSEXGXR

SEQ ID NO: 34480 - protein, 39 aa, Artificial Sequence
  Non-cyclic GFR-binding peptide
  MOD_RES (3)..(4)..(38): Xaa is C or S
  MOD_RES (18)..(19)..(20)..(21)..(22): Xaa is A or G
  MOD_RES (23)..(24)..(25)..(26): Xaa is A or G or absent
PTXXVPTRLEPISILYLXXXXXXXXXKFKYEDMVVESXG

SEQ ID NO: 34481 - protein, 40 aa, Artificial Sequence
  Non-cyclic GFR-binding peptide
  MOD_RES (5)..(6)..(40): Xaa is C or S
  MOD_RES (20)..(21)..(22)..(23)..(24): Xaa is A or G
  MOD_RES (25)..(26)..(27)..(28): Xaa is A or G or absent
IPEPXXVPEKMSPISILYKXXXXXXXXXLKYHYNMTVESX

SEQ ID NO: 34482 - protein, 35 aa, Artificial Sequence
  Non-cyclic GFR-binding peptide
  MOD_RES (1)..(2): Xaa is C or S
  MOD_RES (16)..(17)..(18)..(19)..(20): Xaa is A or G
  MOD_RES (21)..(22)..(23)..(24): Xaa is A or G or absent
XXTPTKMSATSMLYYXXXXXXXXXLRKHRGMVVDR

SEQ ID NO: 34483 - protein, 39 aa, Artificial Sequence
  Non-cyclic GFR-binding peptide
  MOD_RES (4)..(5)..(37)..(39): Xaa is C or S
AGPXXTPTKMSATSMLYYNDKQQIILRKHRGMVVDRXGX

SEQ ID NO: 34484 - protein, 39 aa, Artificial Sequence
  Non-cyclic GFR-binding peptide
  MOD_RES (5)..(6)..(38): Xaa is C or S
IPEPXXVPEKMSPISILYKDENKNVVLKYHYNMTVESXA

SEQ ID NO: 34485 - protein, 43 aa, Artificial Sequence
  Non-cyclic GFR-binding peptide
  MOD_RES (5)..(6)..(40)..(42): Xaa is C or S
  MOD_RES (20)..(21)..(22)..(23)..(24): Xaa is A or G
  MOD_RES (25)..(26)..(27)..(28): Xaa is A or G or absent
TPPTXXVPTRLEPISILYLXXXXXXXXXKFKYEDMVVESXGXR

SEQ ID NO: 34486 - protein, 33 aa, Artificial Sequence
  Non-cyclic GFR-binding peptide
  MOD_RES (2)..(3): Xaa is C or S
PXXTPTKMSPISMLYKNDKQQIILKYHYGMVVD

SEQ ID NO: 34487 - protein, 37 aa, Artificial Sequence
  Non-cyclic GFR-binding peptide
  MOD_RES (1)..(34)..(36): Xaa is C or S
  MOD_RES (15)..(16)..(17)..(18)..(19): Xaa is A or G
  MOD_RES (20)..(21)..(22)..(23): Xaa is A or G or absent
XVPQDLSPINILYFXXXXXXXXXYGKIPMVVKSXKXS

SEQ ID NO: 34488 - protein, 40 aa, Artificial Sequence
  Non-cyclic GFR-binding peptide
  MOD_RES (5)..(6)..(40): Xaa is C or S
  MOD_RES (20)..(21)..(22)..(23)..(24): Xaa is A or G
  MOD_RES (25)..(26)..(27)..(28): Xaa is A or G or absent
TPPTXXVPTRLSPISILYKXXXXXXXXXLKYHYDMVVESX

SEQ ID NO: 34489 - protein, 36 aa, Artificial Sequence
  Non-cyclic GFR-binding peptide
  MOD_RES (2)..(3): Xaa is C or S
  MOD_RES (17)..(18)..(19)..(20)..(21): Xaa is A or G
  MOD_RES (22)..(23)..(24)..(25): Xaa is A or G or absent
TXXVPTRLSPISILYKXXXXXXXXXLKYHYDMVVES

SEQ ID NO: 34490 - protein, 38 aa, Artificial Sequence
  Non-cyclic GFR-binding peptide
  MOD_RES (4)..(5)..(36)..(38): Xaa is C or S
PSTXXAPVKTSPISMLYKDNGRVLLLKYHYMIVEEXGX

SEQ ID NO: 34491 - protein, 33 aa, Artificial Sequence
  Non-cyclic GFR-binding peptide
  MOD_RES (33)..(33): Xaa is C or S
  MOD_RES (14)..(15)..(16)..(17)..(18): Xaa is A or G
  MOD_RES (19)..(20)..(21)..(22): Xaa is A or G or absent
VPQDLSPINILYFXXXXXXXXXYGKIPMVVKSX

SEQ ID NO: 34492 - protein, 36 aa, Artificial Sequence
  Non-cyclic GFR-binding peptide
  MOD_RES (3)..(4)..(35): Xaa is C or S
SPXXVSQDLSPINILYFIGKTPKIYGKIPMIVKSXK

SEQ ID NO: 34493 - protein, 37 aa, Artificial Sequence
  Non-cyclic GFR-binding peptide
  MOD_RES (4)..(5)..(37): Xaa is C or S
AGPXXTPTKMSPISMLYKNDKQQIILKYHYGMVVDRX

SEQ ID NO: 34494 - protein, 32 aa, Artificial Sequence
  Non-cyclic GFR-binding peptide
  MOD_RES (32)..(32): Xaa is C or S
VPTRLSPISILYKDSANNVVLKYHYDMVVESX

SEQ ID NO: 34495 - protein, 42 aa, Artificial Sequence
  Non-cyclic GFR-binding peptide
  MOD_RES (6)..(7)..(39)..(41): Xaa is C or S
HVPKPXXAPTKLSPISVLYKDDSSNVILKYHYNMVVRSXGXH

SEQ ID NO: 34496 - protein, 35 aa, Artificial Sequence
  Non-cyclic GFR-binding peptide
  MOD_RES (3)..(4): Xaa is C or S
ASXXVPARLSATSILYYDAANNVVLRKHRDMVVEA

SEQ ID NO: 34497 - protein, 36 aa, Artificial Sequence
  Non-cyclic GFR-binding peptide
  MOD_RES (5)..(6): Xaa is C or S
SAGPXXTPTKMEPISMLYLNDKQQIIKFKYEGMVVD

SEQ ID NO: 34498 - protein, 35 aa, Artificial Sequence
  Non-cyclic GFR-binding peptide
  MOD_RES (4)..(5): Xaa is C or S
PSTXXAPVKTSATSMLYYDNGRVLLLRKHRMIVEE

SEQ ID NO: 34499 - protein, 39 aa, Artificial Sequence
  Non-cyclic GFR-binding peptide
  MOD_RES (2)..(3)..(37)..(39): Xaa is C or S
  MOD_RES (17)..(18)..(19)..(20)..(21): Xaa is A or G
  MOD_RES (22)..(23)..(24)..(25): Xaa is A or G or absent
TXXVPTRLSPISILYKXXXXXXXXXLKYHYDMVVESXGX

SEQ ID NO: 34500 - protein, 33 aa, Artificial Sequence
  Non-cyclic GFR-binding peptide
  MOD_RES (1)..(1): Xaa is C or S
  MOD_RES (15)..(16)..(17)..(18)..(19): Xaa is A or G
  MOD_RES (20)..(21)..(22)..(23): Xaa is A or G or absent
XTPTKMSATSMLYYXXXXXXXXXLRKHRGMVVD

SEQ ID NO: 34501 - protein, 34 aa, Artificial Sequence
  Non-cyclic GFR-binding peptide
  MOD_RES (34)..(34): Xaa is C or S
  MOD_RES (14)..(15)..(16)..(17)..(18): Xaa is A or G
  MOD_RES (19)..(20)..(21)..(22): Xaa is A or G or absent
VPTKLSATSILYYXXXXXXXXXLRKHRGMAVSEX

SEQ ID NO: 34502 - protein, 37 aa, Artificial Sequence
  Non-cyclic GFR-binding peptide
  MOD_RES (5)..(6): Xaa is C or S
TPPTXXVPTRLEPISILYLDSANNVVKFKYEDMVVES

SEQ ID NO: 34503 - protein, 34 aa, Artificial Sequence
  Non-cyclic GFR-binding peptide
  MOD_RES (1)..(1): Xaa is C or S
  MOD_RES (15)..(16)..(17)..(18)..(19): Xaa is A or G
  MOD_RES (20)..(21)..(22)..(23): Xaa is A or G or absent
XVPTRLEPISILYLXXXXXXXXXKFKYEDMVVES

SEQ ID NO: 34504 - protein, 35 aa, Artificial Sequence
  Non-cyclic GFR-binding peptide
  MOD_RES (1)..(33)..(35): Xaa is C or S
XTPTKMEPISMLYLNDKQQIIKFKYEGMVVDRXGX

SEQ ID NO: 34505 - protein, 34 aa, Artificial Sequence
  Non-cyclic GFR-binding peptide
  MOD_RES (3)..(4): Xaa is C or S
ASXXVPARLSATSILYYDAANNVVLRKHRDMVVE

SEQ ID NO: 34506 - protein, 42 aa, Artificial Sequence
  Non-cyclic GFR-binding peptide
  MOD_RES (6)..(7)..(41): Xaa is C or S
  MOD_RES (21)..(22)..(23)..(24)..(25): Xaa is A or G
  MOD_RES (26)..(27)..(28)..(29): Xaa is A or G or absent
STPPTXXVPTRLEPISILYLXXXXXXXXXKFKYEDMVVESXG

SEQ ID NO: 34507 - protein, 41 aa, Artificial Sequence
  Non-cyclic GFR-binding peptide
  MOD_RES (3)..(4)..(38)..(40): Xaa is C or S
  MOD_RES (18)..(19)..(20)..(21)..(22): Xaa is A or G
  MOD_RES (23)..(24)..(25)..(26): Xaa is A or G or absent
EPXXVPEKMSPINILYFXXXXXXXXXYGKIPNMTVESXAXR

SEQ ID NO: 34508 - protein, 37 aa, Artificial Sequence
  Non-cyclic GFR-binding peptide
  MOD_RES (4)..(5): Xaa is C or S
  MOD_RES (19)..(20)..(21)..(22)..(23): Xaa is A or G
  MOD_RES (24)..(25)..(26)..(27): Xaa is A or G or absent
AGPXXTPTKMSATSMLYYXXXXXXXXXLRKHRGMVVD

SEQ ID NO: 34509 - protein, 33 aa, Artificial Sequence
  Non-cyclic GFR-binding peptide
  MOD_RES (2)..(3): Xaa is C or S
PXXVPQDLSPINILYFVGRTPKVYGKIPMVVKS

SEQ ID NO: 34510 - protein, 40 aa, Artificial Sequence
  Non-cyclic GFR-binding peptide
  MOD_RES (2)..(3)..(37)..(39): Xaa is C or S
  MOD_RES (17)..(18)..(19)..(20)..(21): Xaa is A or G
  MOD_RES (22)..(23)..(24)..(25): Xaa is A or G or absent
TXXVPTRLEPISILYLXXXXXXXXXKFKYEDMVVESXGXR

SEQ ID NO: 34511 - protein, 35 aa, Artificial Sequence
  Non-cyclic GFR-binding peptide
  MOD_RES (1)..(35): Xaa is C or S
  MOD_RES (15)..(16)..(17)..(18)..(19): Xaa is A or G
  MOD_RES (20)..(21)..(22)..(23): Xaa is A or G or absent
XVPTKLSATSILYYXXXXXXXXXLRKHRGMAVSEX

SEQ ID NO: 34512 - protein, 37 aa, Artificial Sequence
  Non-cyclic GFR-binding peptide
  MOD_RES (5)..(6)..(37): Xaa is C or S
SAAPXXVPQALSPINILYFVGRKPKVYGKIPMIVRSX

SEQ ID NO: 34513 - protein, 36 aa, Artificial Sequence
  Non-cyclic GFR-binding peptide
  MOD_RES (3)..(4): Xaa is C or S
  MOD_RES (18)..(19)..(20)..(21)..(22): Xaa is A or G
  MOD_RES (23)..(24)..(25)..(26): Xaa is A or G or absent
GPXXTPTKMEPISMLYLXXXXXXXXXKFKYEGMVVD

SEQ ID NO: 34514 - protein, 39 aa, Artificial Sequence
  Non-cyclic GFR-binding peptide
  MOD_RES (5)..(6)..(38): Xaa is C or S
ASKAXXVPTKLSATSILYYDKGVVTYLRKHRGMAVSEXG

SEQ ID NO: 34515 - protein, 38 aa, Artificial Sequence
  Non-cyclic GFR-binding peptide
  MOD_RES (4)..(5)..(37): Xaa is C or S
PPTXXVPTRLSPISILYKDSANNVVLKYHYDMVVESXG

SEQ ID NO: 34516 - protein, 34 aa, Artificial Sequence
  Non-cyclic GFR-binding peptide
  MOD_RES (1)..(2)..(33): Xaa is C or S
XXAPVKTSATSMLYYDNGRVLLLRKHRMIVEEXG

SEQ ID NO: 34517 - protein, 36 aa, Artificial Sequence
  Non-cyclic GFR-binding peptide
  MOD_RES (1)..(2)..(34)..(36): Xaa is C or S
XXVPEKMSATSILYYDENKNVVLRKHRNMTVESXAX

SEQ ID NO: 34518 - protein, 35 aa, Artificial Sequence
  Non-cyclic GFR-binding peptide
  MOD_RES (4)..(5): Xaa is C or S
PPTXXVPTRLSATSILYYDSANNVVLRKHRDMVVE

SEQ ID NO: 34519 - protein, 35 aa, Artificial Sequence
  Non-cyclic GFR-binding peptide
  MOD_RES (1)..(35): Xaa is C or S
  MOD_RES (15)..(16)..(17)..(18)..(19): Xaa is A or G
  MOD_RES (20)..(21)..(22)..(23): Xaa is A or G or absent
XVPTRLSATSILYYXXXXXXXXXLRKHRDMVVESX

SEQ ID NO: 34520 - protein, 42 aa, Artificial Sequence
  Non-cyclic GFR-binding peptide
  MOD_RES (6)..(7)..(41): Xaa is C or S
  MOD_RES (21)..(22)..(23)..(24)..(25): Xaa is A or G
  MOD_RES (26)..(27)..(28)..(29): Xaa is A or G or absent
STPPTXXVPTRLSPISILYKXXXXXXXXXLKYHYDMVVESXG

SEQ ID NO: 34521 - protein, 37 aa, Artificial Sequence
  Non-cyclic GFR-binding peptide
  MOD_RES (1)..(2)..(35)..(37): Xaa is C or S
  MOD_RES (16)..(17)..(18)..(19)..(20): Xaa is A or G
  MOD_RES (21)..(22)..(23)..(24): Xaa is A or G or absent
XXAPVKTEPISMLYLXXXXXXXXXKFKYEMIVEEXGX

SEQ ID NO: 34522 - protein, 33 aa, Artificial Sequence
  Non-cyclic GFR-binding peptide
  MOD_RES (1)..(32): Xaa is C or S
XAPVKTSATSMLYYDNGRVLLLRKHRMIVEEXG

SEQ ID NO: 34523 - protein, 37 aa, Artificial Sequence
  Non-cyclic GFR-binding peptide
  MOD_RES (4)..(5)..(36): Xaa is C or S
PSTXXAPVKTSATSMLYYDNGRVLLLRKHRMIVEEXG

SEQ ID NO: 34524 - protein, 35 aa, Artificial Sequence
  Non-cyclic GFR-binding peptide
  MOD_RES (2)..(3)..(35): Xaa is C or S
PXXVPEKMEPISILYLDENKNVVKFKYENMTVESX

SEQ ID NO: 34525 - protein, 39 aa, Artificial Sequence
  Non-cyclic GFR-binding peptide
  MOD_RES (4)..(5)..(39): Xaa is C or S
  MOD_RES (19)..(20)..(21)..(22)..(23): Xaa is A or G
  MOD_RES (24)..(25)..(26)..(27): Xaa is A or G or absent
PPTXXVPTRLEPISILYLXXXXXXXXXKFKYEDMVVESX

SEQ ID NO: 34526 - protein, 40 aa, Artificial Sequence
  Non-cyclic GFR-binding peptide
  MOD_RES (3)..(4)..(37)..(39): Xaa is C or S
  MOD_RES (18)..(19)..(20)..(21)..(22): Xaa is A or G
  MOD_RES (23)..(24)..(25)..(26): Xaa is A or G or absent
STXXAPVKTEPISMLYLXXXXXXXXXKFKYEMIVEEXGXL

SEQ ID NO: 34527 - protein, 37 aa, Artificial Sequence
  Non-cyclic GFR-binding peptide
  MOD_RES (2)..(3)..(37): Xaa is C or S
  MOD_RES (17)..(18)..(19)..(20)..(21): Xaa is A or G
  MOD_RES (22)..(23)..(24)..(25): Xaa is A or G or absent
PXXVPEKMSPISILYKXXXXXXXXXLKYHYNMTVESX

SEQ ID NO: 34528 - protein, 37 aa, Artificial Sequence
  Non-cyclic GFR-binding peptide
  MOD_RES (5)..(6)..(37): Xaa is C or S
SASPXXVSQDLSPINILYFIGKTPKIYGKIPMIVKSX

SEQ ID NO: 34529 - protein, 33 aa, Artificial Sequence
  Non-cyclic GFR-binding peptide
  MOD_RES (2)..(3): Xaa is C or S
TXXVPTRLEPISILYLDSANNVVKFKYEDMVVE

SEQ ID NO: 34530 - protein, 40 aa, Artificial Sequence
  Non-cyclic GFR-binding peptide
  MOD_RES (6)..(7)..(38)..(40): Xaa is C or S
RVPSTXXAPVKTSPISMLYKDNGRVLLLKYHYMIVEEXGX

SEQ ID NO: 34531 - protein, 38 aa, Artificial Sequence
  Non-cyclic GFR-binding peptide
  MOD_RES (1)..(2)..(36)..(38): Xaa is C or S
  MOD_RES (16)..(17)..(18)..(19)..(20): Xaa is A or G
  MOD_RES (21)..(22)..(23)..(24): Xaa is A or G or absent
XXTPTKMSPISMLYKXXXXXXXXXLKYHYGMVVDRXGX

SEQ ID NO: 34532 - protein, 33 aa, Artificial Sequence
  Non-cyclic GFR-binding peptide
  MOD_RES (1)..(1): Xaa is C or S
  MOD_RES (15)..(16)..(17)..(18)..(19): Xaa is A or G
  MOD_RES (20)..(21)..(22)..(23): Xaa is A or G or absent
XTPTKMSPISMLYKXXXXXXXXXLKYHYGMVVD

SEQ ID NO: 34533 - protein, 37 aa, Artificial Sequence
  Non-cyclic GFR-binding peptide
  MOD_RES (4)..(5): Xaa is C or S
  MOD_RES (19)..(20)..(21)..(22)..(23): Xaa is A or G
  MOD_RES (24)..(25)..(26)..(27): Xaa is A or G or absent
PEPXXVPEKMNAISILYFXXXXXXXXXLKKYRNMTVE

SEQ ID NO: 34534 - protein, 38 aa, Artificial Sequence
  Non-cyclic GFR-binding peptide
  MOD_RES (3)..(4)..(38): Xaa is C or S
  MOD_RES (18)..(19)..(20)..(21)..(22): Xaa is A or G
  MOD_RES (23)..(24)..(25)..(26): Xaa is A or G or absent
EPXXVPEKMSPISILYKXXXXXXXXXLKYHYNMTVESX

SEQ ID NO: 34535 - protein, 36 aa, Artificial Sequence
  Non-cyclic GFR-binding peptide
  MOD_RES (1)..(2)..(36): Xaa is C or S
  MOD_RES (16)..(17)..(18)..(19)..(20): Xaa is A or G
  MOD_RES (21)..(22)..(23)..(24): Xaa is A or G or absent
XXTPTKMSPISMLYKXXXXXXXXXLKYHYGMVVDRX

SEQ ID NO: 34536 - protein, 34 aa, Artificial Sequence
  Non-cyclic GFR-binding peptide
  MOD_RES (34)..(34): Xaa is C or S
  MOD_RES (14)..(15)..(16)..(17)..(18): Xaa is A or G
  MOD_RES (19)..(20)..(21)..(22): Xaa is A or G or absent
VPTRLSATSILYYXXXXXXXXXLRKHRDMVVESX

SEQ ID NO: 34537 - protein, 34 aa, Artificial Sequence
  Non-cyclic GFR-binding peptide
  MOD_RES (2)..(3)..(34): Xaa is C or S
TXXAPVKTEPISMLYLDNGRVLLKFKYEMIVEEX

SEQ ID NO: 34538 - protein, 38 aa, Artificial Sequence
  Non-cyclic GFR-binding peptide
  MOD_RES (6)..(7)..(38): Xaa is C or S
RVPSTXXAPVKTSATSMLYYDNGRVLLLRKHRMIVEEX

SEQ ID NO: 34539 - protein, 40 aa, Artificial Sequence
  Non-cyclic GFR-binding peptide
  MOD_RES (4)..(5)..(37)..(39): Xaa is C or S
PEPXXVPEKMSATSILYYDENKNVVLRKHRNMTVESXAXR

SEQ ID NO: 34540 - protein, 40 aa, Artificial Sequence
  Non-cyclic GFR-binding peptide
  MOD_RES (2)..(3)..(37)..(39): Xaa is C or S
  MOD_RES (17)..(18)..(19)..(20)..(21): Xaa is A or G
  MOD_RES (22)..(23)..(24)..(25): Xaa is A or G or absent
SXXVPARLSATSILYYXXXXXXXXXLRKHRDMVVEAXGXR

SEQ ID NO: 34541 - protein, 39 aa, Artificial Sequence
  Non-cyclic GFR-binding peptide
  MOD_RES (5)..(6)..(39): Xaa is C or S
  MOD_RES (20)..(21)..(22)..(23)..(24): Xaa is A or G
  MOD_RES (25)..(26)..(27)..(28): Xaa is A or G or absent
VPSTXXAPVKTSPISMLYKXXXXXXXXXLKYHYMIVEEX

SEQ ID NO: 34542 - protein, 38 aa, Artificial Sequence
  Non-cyclic GFR-binding peptide
  MOD_RES (3)..(4)..(36)..(38): Xaa is C or S
ASXXVPARLSATSILYYDAANNVVLRKHRDMVVEAXGX

SEQ ID NO: 34543 - protein, 42 aa, Artificial Sequence
  Non-cyclic GFR-binding peptide
  MOD_RES (6)..(7)..(39)..(41): Xaa is C or S
GSAGPXXTPTKMEPISMLYLNDKQQIIKFKYEGMVVDRXGXS

SEQ ID NO: 34544 - protein, 34 aa, Artificial Sequence
  Non-cyclic GFR-binding peptide
  MOD_RES (1)..(33): Xaa is C or S
XVPEKMNAISILYFDENKNVVLKKYRNMTVESXA

SEQ ID NO: 34545 - protein, 37 aa, Artificial Sequence
  Non-cyclic GFR-binding peptide
  MOD_RES (4)..(5): Xaa is C or S
  MOD_RES (19)..(20)..(21)..(22)..(23): Xaa is A or G
  MOD_RES (24)..(25)..(26)..(27): Xaa is A or G or absent
ASPXXVSQDLSPINILYFXXXXXXXXXYGKIPMIVKS

SEQ ID NO: 34546 - protein, 44 aa, Artificial Sequence
  Non-cyclic GFR-binding peptide
  MOD_RES (6)..(7)..(41)..(43): Xaa is C or S
  MOD_RES (21)..(22)..(23)..(24)..(25): Xaa is A or G
  MOD_RES (26)..(27)..(28)..(29): Xaa is A or G or absent
GSAGPXXTPTKMSPISMLYKXXXXXXXXXLKYHYGMVVDRXGXS

SEQ ID NO: 34547 - protein, 38 aa, Artificial Sequence
  Non-cyclic GFR-binding peptide
  MOD_RES (3)..(4)..(35)..(37): Xaa is C or S
STXXAPVKTSATSMLYYDNGRVLLLRKHRMIVEEXGXL

SEQ ID NO: 34548 - protein, 36 aa, Artificial Sequence
  Non-cyclic GFR-binding peptide
  MOD_RES (5)..(6): Xaa is C or S
SAGPXXTPTKMSPISMLYKNDKQQIILKYHYGMVVD

SEQ ID NO: 34549 - protein, 37 aa, Artificial Sequence
  Non-cyclic GFR-binding peptide
  MOD_RES (1)..(35)..(37): Xaa is C or S
  MOD_RES (15)..(16)..(17)..(18)..(19): Xaa is A or G
  MOD_RES (20)..(21)..(22)..(23): Xaa is A or G or absent
XVPTRLSATSILYYXXXXXXXXXLRKHRDMVVESXGX

SEQ ID NO: 34550 - protein, 43 aa, Artificial Sequence
  Non-cyclic GFR-binding peptide
  MOD_RES (6)..(7)..(41)..(43): Xaa is C or S
  MOD_RES (21)..(22)..(23)..(24)..(25): Xaa is A or G
  MOD_RES (26)..(27)..(28)..(29): Xaa is A or G or absent
HVPKPXXAPTKLSPISVLYKXXXXXXXXXLKYHYNMVVRSXGX

SEQ ID NO: 34551 - protein, 41 aa, Artificial Sequence
  Non-cyclic GFR-binding peptide
  MOD_RES (6)..(7)..(41): Xaa is C or S
  MOD_RES (21)..(22)..(23)..(24)..(25): Xaa is A or G
  MOD_RES (26)..(27)..(28)..(29): Xaa is A or G or absent
GSAGPXXTPTKMEPISMLYLXXXXXXXXXKFKYEGMVVDRX

SEQ ID NO: 34552 - protein, 39 aa, Artificial Sequence
  Non-cyclic GFR-binding peptide
  MOD_RES (5)..(6)..(39): Xaa is C or S
  MOD_RES (20)..(21)..(22)..(23)..(24): Xaa is A or G
  MOD_RES (25)..(26)..(27)..(28): Xaa is A or G or absent
VPSTXXAPVKTEPISMLYLXXXXXXXXXKFKYEMIVEEX

SEQ ID NO: 34553 - protein, 33 aa, Artificial Sequence
  Non-cyclic GFR-binding peptide
  MOD_RES (1)..(1): Xaa is C or S
  MOD_RES (15)..(16)..(17)..(18)..(19): Xaa is A or G
  MOD_RES (20)..(21)..(22)..(23): Xaa is A or G or absent
XVPTKLSATSILYYXXXXXXXXXLRKHRGMAVS

SEQ ID NO: 34554 - protein, 34 aa, Artificial Sequence
  Non-cyclic GFR-binding peptide
  MOD_RES (1)..(33): Xaa is C or S
XVPEKMEPISILYLDENKNVVKFKYENMTVESXA

SEQ ID NO: 34555 - protein, 34 aa, Artificial Sequence
  Non-cyclic GFR-binding peptide
  MOD_RES (1)..(2): Xaa is C or S
  MOD_RES (16)..(17)..(18)..(19)..(20): Xaa is A or G
  MOD_RES (21)..(22)..(23)..(24): Xaa is A or G or absent
XXVSQDLSPINILYFXXXXXXXXXYGKIPMIVKS

SEQ ID NO: 34556 - protein, 39 aa, Artificial Sequence
  Non-cyclic GFR-binding peptide
  MOD_RES (5)..(6)..(39): Xaa is C or S
  MOD_RES (20)..(21)..(22)..(23)..(24): Xaa is A or G
  MOD_RES (25)..(26)..(27)..(28): Xaa is A or G or absent
SASPXXVSQDLSPINILYFXXXXXXXXXYGKIPMIVKSX

SEQ ID NO: 34557 - protein, 38 aa, Artificial Sequence
  Non-cyclic GFR-binding peptide
  MOD_RES (2)..(3)..(35)..(37): Xaa is C or S
PXXVPEKMSATSILYYDENKNVVLRKHRNMTVESXAXR

SEQ ID NO: 34558 - protein, 38 aa, Artificial Sequence
  Non-cyclic GFR-binding peptide
  MOD_RES (3)..(4)..(38): Xaa is C or S
  MOD_RES (18)..(19)..(20)..(21)..(22): Xaa is A or G
  MOD_RES (23)..(24)..(25)..(26): Xaa is A or G or absent
EPXXVPEKMNAISILYFXXXXXXXXXLKKYRNMTVESX

SEQ ID NO: 34559 - protein, 40 aa, Artificial Sequence
  Non-cyclic GFR-binding peptide
  MOD_RES (5)..(6)..(40): Xaa is C or S
  MOD_RES (20)..(21)..(22)..(23)..(24): Xaa is A or G
  MOD_RES (25)..(26)..(27)..(28): Xaa is A or G or absent
IPEPXXVPEKMNAISILYFXXXXXXXXXLKKYRNMTVESX

SEQ ID NO: 34560 - protein, 35 aa, Artificial Sequence
  Non-cyclic GFR-binding peptide
  MOD_RES (1)..(32)..(34): Xaa is C or S
XVSQDLSPINILYFIGKTPKIYGKIPMIVKSXKXS

SEQ ID NO: 34561 - protein, 42 aa, Artificial Sequence
  Non-cyclic GFR-binding peptide
  MOD_RES (5)..(6)..(39)..(41): Xaa is C or S
  MOD_RES (20)..(21)..(22)..(23)..(24): Xaa is A or G
  MOD_RES (25)..(26)..(27)..(28): Xaa is A or G or absent
VPSTXXAPVKTSPISMLYKXXXXXXXXXLKYHYMIVEEXGXL

SEQ ID NO: 34562 - protein, 37 aa, Artificial Sequence
  Non-cyclic GFR-binding peptide
  MOD_RES (2)..(3)..(35)..(37): Xaa is C or S
PXXVPEKMSATSILYYDENKNVVLRKHRNMTVESXAX

SEQ ID NO: 34563 - protein, 33 aa, Artificial Sequence
  Non-cyclic GFR-binding peptide
  MOD_RES (32)..(32): Xaa is C or S
VPTRLSPISILYKDSANNVVLKYHYDMVVESXG

SEQ ID NO: 34564 - protein, 37 aa, Artificial Sequence
  Non-cyclic GFR-binding peptide
  MOD_RES (1)..(2)..(34)..(36): Xaa is C or S
XXVPTKLSATSILYYDKGVVTYLRKHRGMAVSEXGXR

SEQ ID NO: 34565 - protein, 35 aa, Artificial Sequence
  Non-cyclic GFR-binding peptide
  MOD_RES (1)..(33)..(35): Xaa is C or S
XVPEKMNAISILYFDENKNVVLKKYRNMTVESXAX

SEQ ID NO: 34566 - protein, 38 aa, Artificial Sequence
  Non-cyclic GFR-binding peptide
  MOD_RES (1)..(35)..(37): Xaa is C or S
  MOD_RES (15)..(16)..(17)..(18)..(19): Xaa is A or G
  MOD_RES (20)..(21)..(22)..(23): Xaa is A or G or absent
XTPTKMSATSMLYYXXXXXXXXXLRKHRGMVVDRXGXS

SEQ ID NO: 34567 - protein, 39 aa, Artificial Sequence
  Non-cyclic GFR-binding peptide
  MOD_RES (6)..(7)..(39): Xaa is C or S
HVPKPXXAPTKLSPISVLYKDDSSNVILKYHYNMVVRSX

SEQ ID NO: 34568 - protein, 39 aa, Artificial Sequence
  Non-cyclic GFR-binding peptide
  MOD_RES (5)..(6)..(37)..(39): Xaa is C or S
SASPXXVSQDLSPINILYFIGKTPKIYGKIPMIVKSXKX

SEQ ID NO: 34569 - protein, 34 aa, Artificial Sequence
  Non-cyclic GFR-binding peptide
  MOD_RES (32)..(34): Xaa is C or S
VPTKLSATSILYYDKGVVTYLRKHRGMAVSEXGX

SEQ ID NO: 34570 - protein, 38 aa, Artificial Sequence
  Non-cyclic GFR-binding peptide
  MOD_RES (6)..(7): Xaa is C or S
GIPEPXXVPEKMEPISILYLDENKNVVKFKYENMTVES

SEQ ID NO: 34571 - protein, 36 aa, Artificial Sequence
  Non-cyclic GFR-binding peptide
  MOD_RES (2)..(3)..(35): Xaa is C or S
AXXVPTKLSATSILYYDKGVVTYLRKHRGMAVSEXG

SEQ ID NO: 34572 - protein, 36 aa, Artificial Sequence
  Non-cyclic GFR-binding peptide
  MOD_RES (2)..(3)..(34)..(36): Xaa is C or S
PXXVSQDLSPINILYFIGKTPKIYGKIPMIVKSXKX

SEQ ID NO: 34573 - protein, 35 aa, Artificial Sequence
  Non-cyclic GFR-binding peptide
  MOD_RES (2)..(3): Xaa is C or S
  MOD_RES (17)..(18)..(19)..(20)..(21): Xaa is A or G
  MOD_RES (22)..(23)..(24)..(25): Xaa is A or G or absent
PXXVPQALSPINILYFXXXXXXXXXYGKIPMIVRS

SEQ ID NO: 34574 - protein, 39 aa, Artificial Sequence
  Non-cyclic GFR-binding peptide
  MOD_RES (2)..(3)..(37)..(39): Xaa is C or S
  MOD_RES (17)..(18)..(19)..(20)..(21): Xaa is A or G
  MOD_RES (22)..(23)..(24)..(25): Xaa is A or G or absent
PXXVPEKMSATSILYYXXXXXXXXXLRKHRNMTVESXAX

SEQ ID NO: 34575 - protein, 31 aa, Artificial Sequence
  Non-cyclic GFR-binding peptide
VPEKMNAISILYFDENKNVVLKKYRNMTVES

SEQ ID NO: 34576 - protein, 36 aa, Artificial Sequence
  Non-cyclic GFR-binding peptide
  MOD_RES (2)..(3)..(35): Xaa is C or S
SXXVPARLSATSILYYDAANNVVLRKHRDMVVEAXG

SEQ ID NO: 34577 - protein, 36 aa, Artificial Sequence
  Non-cyclic GFR-binding peptide
  MOD_RES (2)..(3)..(35): Xaa is C or S
PXXVPEKMNAISILYFDENKNVVLKKYRNMTVESXA

SEQ ID NO: 34578 - protein, 33 aa, Artificial Sequence
  Non-cyclic GFR-binding peptide
  MOD_RES (1)..(2): Xaa is C or S
XXVPEKMSPISILYKDENKNVVLKYHYNMTVES

SEQ ID NO: 34579 - protein, 34 aa, Artificial Sequence
  Non-cyclic GFR-binding peptide
  MOD_RES (1)..(2)..(33): Xaa is C or S
XXAPVKTEPISMLYLDNGRVLLKFKYEMIVEEXG

SEQ ID NO: 34580 - protein, 35 aa, Artificial Sequence
  Non-cyclic GFR-binding peptide
  MOD_RES (2)..(3): Xaa is C or S
  MOD_RES (17)..(18)..(19)..(20)..(21): Xaa is A or G
  MOD_RES (22)..(23)..(24)..(25): Xaa is A or G or absent
TXXVPTRLSATSILYYXXXXXXXXXLRKHRDMVVE

SEQ ID NO: 34581 - protein, 36 aa, Artificial Sequence
  Non-cyclic GFR-binding peptide
  MOD_RES (4)..(5): Xaa is C or S
PEPXXVPEKMSPINILYFDENKNVVYGKIPNMTVES

SEQ ID NO: 34582 - protein, 35 aa, Artificial Sequence
  Non-cyclic GFR-binding peptide
  MOD_RES (32)..(34): Xaa is C or S
VPEKMSATSILYYDENKNVVLRKHRNMTVESXAXR

SEQ ID NO: 34583 - protein, 40 aa, Artificial Sequence
  Non-cyclic GFR-binding peptide
  MOD_RES (6)..(7)..(38)..(40): Xaa is C or S
ASASPXXVPQDLSPINILYFVGRTPKVYGKIPMVVKSXKX

SEQ ID NO: 34584 - protein, 36 aa, Artificial Sequence
  Non-cyclic GFR-binding peptide
  MOD_RES (4)..(5): Xaa is C or S
PEPXXVPEKMSPISILYKDENKNVVLKYHYNMTVES

SEQ ID NO: 34585 - protein, 34 aa, Artificial Sequence
  Non-cyclic GFR-binding peptide
  MOD_RES (31)..(33): Xaa is C or S
VPQDLSPINILYFVGRTPKVYGKIPMVVKSXKXS

SEQ ID NO: 34586 - protein, 42 aa, Artificial Sequence
  Non-cyclic GFR-binding peptide
  MOD_RES (6)..(7)..(39)..(41): Xaa is C or S
GIPEPXXVPEKMSATSILYYDENKNVVLRKHRNMTVESXAXR

SEQ ID NO: 34587 - protein, 30 aa, Artificial Sequence
  Non-cyclic GFR-binding peptide
VPTKLSATSILYYDKGVVTYLRKHRGMAVS

SEQ ID NO: 34588 - protein, 38 aa, Artificial Sequence
  Non-cyclic GFR-binding peptide
  MOD_RES (1)..(35)..(37): Xaa is C or S
  MOD_RES (15)..(16)..(17)..(18)..(19): Xaa is A or G
  MOD_RES (20)..(21)..(22)..(23): Xaa is A or G or absent
XTPTKMEPISMLYLXXXXXXXXXKFKYEGMVVDRXGXS

SEQ ID NO: 34589 - protein, 35 aa, Artificial Sequence
  Non-cyclic GFR-binding peptide
  MOD_RES (34)..(34): Xaa is C or S
  MOD_RES (14)..(15)..(16)..(17)..(18): Xaa is A or G
  MOD_RES (19)..(20)..(21)..(22): Xaa is A or G or absent
VPTRLSPISILYKXXXXXXXXXLKYHYDMVVESXG

SEQ ID NO: 34590 - protein, 34 aa, Artificial Sequence
  Non-cyclic GFR-binding peptide
  MOD_RES (3)..(4): Xaa is C or S
APXXVPQALSPINILYFVGRKPKVYGKIPMIVRS

SEQ ID NO: 34591 - protein, 35 aa, Artificial Sequence
  Non-cyclic GFR-binding peptide
  MOD_RES (3)..(4): Xaa is C or S
EPXXVPEKMSPISILYKDENKNVVLKYHYNMTVES

SEQ ID NO: 34592 - protein, 34 aa, Artificial Sequence
  Non-cyclic GFR-binding peptide
  MOD_RES (2)..(3): Xaa is C or S
PXXVPEKMNAISILYFDENKNVVLKKYRNMTVES

SEQ ID NO: 34593 - protein, 36 aa, Artificial Sequence
  Non-cyclic GFR-binding peptide
  MOD_RES (2)..(3)..(34)..(36): Xaa is C or S
PXXVPQDLSPINILYFVGRTPKVYGKIPMVVKSXKX

SEQ ID NO: 34594 - protein, 36 aa, Artificial Sequence
  Non-cyclic GFR-binding peptide
  MOD_RES (2)..(3)..(34)..(36): Xaa is C or S
TXXAPVKTEPISMLYLDNGRVLLKFKYEMIVEEXGX

SEQ ID NO: 34595 - protein, 41 aa, Artificial Sequence
  Non-cyclic GFR-binding peptide
  MOD_RES (4)..(5)..(38)..(40): Xaa is C or S
  MOD_RES (19)..(20)..(21)..(22)..(23): Xaa is A or G
  MOD_RES (24)..(25)..(26)..(27): Xaa is A or G or absent
PSTXXAPVKTSPISMLYKXXXXXXXXXLKYHYMIVEEXGXL

SEQ ID NO: 34596 - protein, 35 aa, Artificial Sequence
  Non-cyclic GFR-binding peptide
  MOD_RES (1)..(32)..(34): Xaa is C or S
XAPVKTSPISMLYKDNGRVLLLKYHYMIVEEXGXL

SEQ ID NO: 34597 - protein, 32 aa, Artificial Sequence
  Non-cyclic GFR-binding peptide
  MOD_RES (14)..(15)..(16)..(17)..(18): Xaa is A or G
  MOD_RES (19)..(20)..(21)..(22): Xaa is A or G or absent
VPTKLSATSILYYXXXXXXXXXLRKHRGMAVS

SEQ ID NO: 34598 - protein, 34 aa, Artificial Sequence
  Non-cyclic GFR-binding peptide
  MOD_RES (1)..(2)..(34): Xaa is C or S
XXVPEKMSATSILYYDENKNVVLRKHRNMTVESX

SEQ ID NO: 34599 - protein, 31 aa, Artificial Sequence
  Non-cyclic GFR-binding peptide
  MOD_RES (31)..(31): Xaa is C or S
APVKTSPISMLYKDNGRVLLLKYHYMIVEEX

SEQ ID NO: 34600 - protein, 43 aa, Artificial Sequence
  Non-cyclic GFR-binding peptide
  MOD_RES (6)..(7)..(41)..(43): Xaa is C or S
  MOD_RES (21)..(22)..(23)..(24)..(25): Xaa is A or G
  MOD_RES (26)..(27)..(28)..(29): Xaa is A or G or absent
GIPEPXXVPEKMSATSILYYXXXXXXXXXLRKHRNMTVESXAX

SEQ ID NO: 34601 - protein, 38 aa, Artificial Sequence
  Non-cyclic GFR-binding peptide
  MOD_RES (3)..(4)..(37): Xaa is C or S
  MOD_RES (18)..(19)..(20)..(21)..(22): Xaa is A or G
  MOD_RES (23)..(24)..(25)..(26): Xaa is A or G or absent
SPXXVPQDLSPINILYFXXXXXXXXXYGKIPMVVKSXK

SEQ ID NO: 34602 - protein, 40 aa, Artificial Sequence
  Non-cyclic GFR-binding peptide
  MOD_RES (6)..(7): Xaa is C or S
  MOD_RES (21)..(22)..(23)..(24)..(25): Xaa is A or G
  MOD_RES (26)..(27)..(28)..(29): Xaa is A or G or absent
GSAGPXXTPTKMSATSMLYYXXXXXXXXXLRKHRGMVVDR

SEQ ID NO: 34603 - protein, 39 aa, Artificial Sequence
  Non-cyclic GFR-binding peptide
  MOD_RES (6)..(7): Xaa is C or S
  MOD_RES (21)..(22)..(23)..(24)..(25): Xaa is A or G
  MOD_RES (26)..(27)..(28)..(29): Xaa is A or G or absent
RVPSTXXAPVKTEPISMLYLXXXXXXXXXKFKYEMIVEE

SEQ ID NO: 34604 - protein, 38 aa, Artificial Sequence
  Non-cyclic GFR-binding peptide
  MOD_RES (3)..(4)..(36)..(38): Xaa is C or S
EPXXVPEKMNAISILYFDENKNVVLKKYRNMTVESXAX

SEQ ID NO: 34605 - protein, 35 aa, Artificial Sequence
  Non-cyclic GFR-binding peptide
  MOD_RES (1)..(2)..(35): Xaa is C or S
  MOD_RES (16)..(17)..(18)..(19)..(20): Xaa is A or G
  MOD_RES (21)..(22)..(23)..(24): Xaa is A or G or absent
XXVPQALSPINILYFXXXXXXXXXYGKIPMIVRSX

SEQ ID NO: 34606 - protein, 40 aa, Artificial Sequence
  Non-cyclic GFR-binding peptide
  MOD_RES (6)..(7): Xaa is C or S
  MOD_RES (21)..(22)..(23)..(24)..(25): Xaa is A or G
  MOD_RES (26)..(27)..(28)..(29): Xaa is A or G or absent
GIPEPXXVPEKMNAISILYFXXXXXXXXXLKKYRNMTVES

SEQ ID NO: 34607 - protein, 37 aa, Artificial Sequence
  Non-cyclic GFR-binding peptide
  MOD_RES (3)..(4)..(37): Xaa is C or S
  MOD_RES (18)..(19)..(20)..(21)..(22): Xaa is A or G
  MOD_RES (23)..(24)..(25)..(26): Xaa is A or G or absent
SPXXVSQDLSPINILYFXXXXXXXXXYGKIPMIVKSX

SEQ ID NO: 34608 - protein, 36 aa, Artificial Sequence
  Non-cyclic GFR-binding peptide
  MOD_RES (1)..(33)..(35): Xaa is C or S
XVPEKMNAISILYFDENKNVVLKKYRNMTVESXAXR

SEQ ID NO: 34609 - protein, 32 aa, Artificial Sequence
  Non-cyclic GFR-binding peptide
  MOD_RES (1)..(1): Xaa is C or S
XTPTKMSPISMLYKNDKQQIILKYHYGMVVDR

SEQ ID NO: 34610 - protein, 32 aa, Artificial Sequence
  Non-cyclic GFR-binding peptide
  MOD_RES (1)..(1): Xaa is C or S
XVPEKMSPISILYKDENKNVVLKYHYNMTVES

SEQ ID NO: 34611 - protein, 37 aa, Artificial Sequence
  Non-cyclic GFR-binding peptide
  MOD_RES (6)..(7): Xaa is C or S
GIPEPXXVPEKMSATSILYYDENKNVVLRKHRNMTVE

SEQ ID NO: 34612 - protein, 35 aa, Artificial Sequence
  Non-cyclic GFR-binding peptide
  MOD_RES (1)..(33)..(35): Xaa is C or S
XTPTKMSPISMLYKNDKQQIILKYHYGMVVDRXGX

SEQ ID NO: 34613 - protein, 39 aa, Artificial Sequence
  Non-cyclic GFR-binding peptide
  MOD_RES (4)..(5)..(37)..(39): Xaa is C or S
PEPXXVPEKMNAISILYFDENKNVVLKKYRNMTVESXAX

SEQ ID NO: 34614 - protein, 34 aa, Artificial Sequence
  Non-cyclic GFR-binding peptide
  MOD_RES (1)..(2)..(34): Xaa is C or S
XXVPEKMEPISILYLDENKNVVKFKYENMTVESX

SEQ ID NO: 34615 - protein, 33 aa, Artificial Sequence
  Non-cyclic GFR-binding peptide
  MOD_RES (2)..(3): Xaa is C or S
PXXTPTKMEPISMLYLNDKQQIIKFKYEGMVVD

SEQ ID NO: 34616 - protein, 36 aa, Artificial Sequence
  Non-cyclic GFR-binding peptide
  MOD_RES (3)..(4): Xaa is C or S
  MOD_RES (18)..(19)..(20)..(21)..(22): Xaa is A or G
  MOD_RES (23)..(24)..(25)..(26): Xaa is A or G or absent
EPXXVPEKMSPINILYFXXXXXXXXXYGKIPNMTVE

SEQ ID NO: 34617 - protein, 39 aa, Artificial Sequence
  Non-cyclic GFR-binding peptide
  MOD_RES (1)..(2)..(36)..(38): Xaa is C or S
  MOD_RES (16)..(17)..(18)..(19)..(20): Xaa is A or G
  MOD_RES (21)..(22)..(23)..(24): Xaa is A or G or absent
XXVPEKMSPISILYKXXXXXXXXXLKYHYNMTVESXAXR

SEQ ID NO: 34618 - protein, 35 aa, Artificial Sequence
  Non-cyclic GFR-binding peptide
  MOD_RES (1)..(34): Xaa is C or S
  MOD_RES (15)..(16)..(17)..(18)..(19): Xaa is A or G
  MOD_RES (20)..(21)..(22)..(23): Xaa is A or G or absent
XVPQALSPINILYFXXXXXXXXXYGKIPMIVRSXK

SEQ ID NO: 34619 - protein, 37 aa, Artificial Sequence
  Non-cyclic GFR-binding peptide
  MOD_RES (1)..(35)..(37): Xaa is C or S
  MOD_RES (15)..(16)..(17)..(18)..(19): Xaa is A or G
  MOD_RES (20)..(21)..(22)..(23): Xaa is A or G or absent
XTPTKMSATSMLYYXXXXXXXXXLRKHRGMVVDRXGX

SEQ ID NO: 34620 - protein, 40 aa, Artificial Sequence
  Non-cyclic GFR-binding peptide
  MOD_RES (5)..(6)..(38)..(40): Xaa is C or S
SAGPXXTPTKMSATSMLYYNDKQQIILRKHRGMVVDRXGX

SEQ ID NO: 34621 - protein, 35 aa, Artificial Sequence
  Non-cyclic GFR-binding peptide
  MOD_RES (34)..(34): Xaa is C or S
  MOD_RES (14)..(15)..(16)..(17)..(18): Xaa is A or G
  MOD_RES (19)..(20)..(21)..(22): Xaa is A or G or absent
VPTRLEPISILYLXXXXXXXXXKFKYEDMVVESXG

SEQ ID NO: 34622 - protein, 33 aa, Artificial Sequence
  Non-cyclic GFR-binding peptide
  MOD_RES (1)..(33): Xaa is C or S
XVPEKMSATSILYYDENKNVVLRKHRNMTVESX

SEQ ID NO: 34623 - protein, 33 aa, Artificial Sequence
  Non-cyclic GFR-binding peptide
  MOD_RES (1)..(33): Xaa is C or S
XVPEKMEPISILYLDENKNVVKFKYENMTVESX

SEQ ID NO: 34624 - protein, 36 aa, Artificial Sequence
  Non-cyclic GFR-binding peptide
  MOD_RES (1)..(2)..(36): Xaa is C or S
  MOD_RES (16)..(17)..(18)..(19)..(20): Xaa is A or G
  MOD_RES (21)..(22)..(23)..(24): Xaa is A or G or absent
XXTPTKMSATSMLYYXXXXXXXXXLRKHRGMVVDRX

SEQ ID NO: 34625 - protein, 35 aa, Artificial Sequence
  Non-cyclic GFR-binding peptide
  MOD_RES (33)..(35): Xaa is C or S
  MOD_RES (14)..(15)..(16)..(17)..(18): Xaa is A or G
  MOD_RES (19)..(20)..(21)..(22): Xaa is A or G or absent
APVKTSPISMLYKXXXXXXXXXLKYHYMIVEEXGX

SEQ ID NO: 34626 - protein, 36 aa, Artificial Sequence
  Non-cyclic GFR-binding peptide
  MOD_RES (5)..(6): Xaa is C or S
SAGPXXTPTKMSATSMLYYNDKQQIILRKHRGMVVD

SEQ ID NO: 34627 - protein, 37 aa, Artificial Sequence
  Non-cyclic GFR-binding peptide
  MOD_RES (1)..(2)..(36): Xaa is C or S
  MOD_RES (16)..(17)..(18)..(19)..(20): Xaa is A or G
  MOD_RES (21)..(22)..(23)..(24): Xaa is A or G or absent
XXVPARLSATSILYYXXXXXXXXXLRKHRDMVVEAXG

SEQ ID NO: 34628 - protein, 41 aa, Artificial Sequence
  Non-cyclic GFR-binding peptide
  MOD_RES (6)..(7)..(41): Xaa is C or S
  MOD_RES (21)..(22)..(23)..(24)..(25): Xaa is A or G
  MOD_RES (26)..(27)..(28)..(29): Xaa is A or G or absent
GIPEPXXVPEKMSPINILYFXXXXXXXXXYGKIPNMTVESX

SEQ ID NO: 34629 - protein, 33 aa, Artificial Sequence
  Non-cyclic GFR-binding peptide
  MOD_RES (1)..(1): Xaa is C or S
  MOD_RES (15)..(16)..(17)..(18)..(19): Xaa is A or G
  MOD_RES (20)..(21)..(22)..(23): Xaa is A or G or absent
XVPARLSATSILYYXXXXXXXXXLRKHRDMVVE

SEQ ID NO: 34630 - protein, 39 aa, Artificial Sequence
  Non-cyclic GFR-binding peptide
  MOD_RES (1)..(2)..(36)..(38): Xaa is C or S
  MOD_RES (16)..(17)..(18)..(19)..(20): Xaa is A or G
  MOD_RES (21)..(22)..(23)..(24): Xaa is A or G or absent
XXVPTRLSPISILYKXXXXXXXXXLKYHYDMVVESXGXR

SEQ ID NO: 34631 - protein, 40 aa, Artificial Sequence
  Non-cyclic GFR-binding peptide
  MOD_RES (4)..(5)..(39): Xaa is C or S
  MOD_RES (19)..(20)..(21)..(22)..(23): Xaa is A or G
  MOD_RES (24)..(25)..(26)..(27): Xaa is A or G or absent
PPTXXVPTRLEPISILYLXXXXXXXXXKFKYEDMVVESXG

SEQ ID NO: 34632 - protein, 37 aa, Artificial Sequence
  Non-cyclic GFR-binding peptide
  MOD_RES (5)..(6): Xaa is C or S
SAGPXXTPTKMSPISMLYKNDKQQIILKYHYGMVVDR

SEQ ID NO: 34633 - protein, 40 aa, Artificial Sequence
  Non-cyclic GFR-binding peptide
  MOD_RES (6)..(7)..(39): Xaa is C or S
STPPTXXVPTRLEPISILYLDSANNVVKFKYEDMVVESXG

SEQ ID NO: 34634 - protein, 34 aa, Artificial Sequence
  Non-cyclic GFR-binding peptide
  MOD_RES (32)..(34): Xaa is C or S
VPARLSATSILYYDAANNVVLRKHRDMVVEAXGX

SEQ ID NO: 34635 - protein, 40 aa, Artificial Sequence
  Non-cyclic GFR-binding peptide
  MOD_RES (3)..(4)..(38)..(40): Xaa is C or S
  MOD_RES (18)..(19)..(20)..(21)..(22): Xaa is A or G
  MOD_RES (23)..(24)..(25)..(26): Xaa is A or G or absent
EPXXVPEKMSPINILYFXXXXXXXXXYGKIPNMTVESXAX

SEQ ID NO: 34636 - protein, 41 aa, Artificial Sequence
  Non-cyclic GFR-binding peptide
  MOD_RES (6)..(7)..(38)..(40): Xaa is C or S
RVPSTXXAPVKTEPISMLYLDNGRVLLKFKYEMIVEEXGXL

SEQ ID NO: 34637 - protein, 40 aa, Artificial Sequence
  Non-cyclic GFR-binding peptide
  MOD_RES (6)..(7)..(39): Xaa is C or S
HVPKPXXAPTKLSATSVLYYDDSSNVILRKHRNMVVRSXG

SEQ ID NO: 34638 - protein, 42 aa, Artificial Sequence
  Non-cyclic GFR-binding peptide
  MOD_RES (5)..(6)..(40)..(42): Xaa is C or S
  MOD_RES (20)..(21)..(22)..(23)..(24): Xaa is A or G
  MOD_RES (25)..(26)..(27)..(28): Xaa is A or G or absent
SAGPXXTPTKMSPISMLYKXXXXXXXXXLKYHYGMVVDRXGX

SEQ ID NO: 34639 - protein, 35 aa, Artificial Sequence
  Non-cyclic GFR-binding peptide
  MOD_RES (4)..(5): Xaa is C or S
PASXXVPARLSATSILYYDAANNVVLRKHRDMVVE

SEQ ID NO: 34640 - protein, 33 aa, Artificial Sequence
  Non-cyclic GFR-binding peptide
  MOD_RES (14)..(15)..(16)..(17)..(18): Xaa is A or G
  MOD_RES (19)..(20)..(21)..(22): Xaa is A or G or absent
TPTKMEPISMLYLXXXXXXXXXKFKYEGMVVDR

SEQ ID NO: 34641 - protein, 38 aa, Artificial Sequence
  Non-cyclic GFR-binding peptide
  MOD_RES (4)..(5)..(36)..(38): Xaa is C or S
AAPXXVPQALSPINILYFVGRKPKVYGKIPMIVRSXKX

SEQ ID NO: 34642 - protein, 41 aa, Artificial Sequence
  Non-cyclic GFR-binding peptide
  MOD_RES (4)..(5)..(39)..(41): Xaa is C or S
  MOD_RES (19)..(20)..(21)..(22)..(23): Xaa is A or G
  MOD_RES (24)..(25)..(26)..(27): Xaa is A or G or absent
PEPXXVPEKMNAISILYFXXXXXXXXXLKKYRNMTVESXAX

SEQ ID NO: 34643 - protein, 35 aa, Artificial Sequence
  Non-cyclic GFR-binding peptide
  MOD_RES (34)..(34): Xaa is C or S
  MOD_RES (14)..(15)..(16)..(17)..(18): Xaa is A or G
  MOD_RES (19)..(20)..(21)..(22): Xaa is A or G or absent
VPEKMEPISILYLXXXXXXXXXKFKYENMTVESXA

SEQ ID NO: 34644 - protein, 40 aa, Artificial Sequence
  Non-cyclic GFR-binding peptide
  MOD_RES (6)..(7)..(39): Xaa is C or S
STPPTXXVPTRLSATSILYYDSANNVVLRKHRDMVVESXG

SEQ ID NO: 34645 - protein, 33 aa, Artificial Sequence
  Non-cyclic GFR-binding peptide
  MOD_RES (1)..(1): Xaa is C or S
  MOD_RES (15)..(16)..(17)..(18)..(19): Xaa is A or G
  MOD_RES (20)..(21)..(22)..(23): Xaa is A or G or absent
XTPTKMEPISMLYLXXXXXXXXXKFKYEGMVVD

SEQ ID NO: 34646 - protein, 41 aa, Artificial Sequence
  Non-cyclic GFR-binding peptide
  MOD_RES (4)..(5)..(38)..(40): Xaa is C or S
  MOD_RES (19)..(20)..(21)..(22)..(23): Xaa is A or G
  MOD_RES (24)..(25)..(26)..(27): Xaa is A or G or absent
PSTXXAPVKTSATSMLYYXXXXXXXXXLRKHRMIVEEXGXL

SEQ ID NO: 34647 - protein, 34 aa, Artificial Sequence
  Non-cyclic GFR-binding peptide
  MOD_RES (32)..(34): Xaa is C or S
VPEKMSPINILYFDENKNVVYGKIPNMTVESXAX

SEQ ID NO: 34648 - protein, 34 aa, Artificial Sequence
  Non-cyclic GFR-binding peptide
  MOD_RES (1)..(2): Xaa is C or S
  MOD_RES (16)..(17)..(18)..(19)..(20): Xaa is A or G
  MOD_RES (21)..(22)..(23)..(24): Xaa is A or G or absent
XXVPEKMSPISILYKXXXXXXXXXLKYHYNMTVE

SEQ ID NO: 34649 - protein, 42 aa, Artificial Sequence
  Non-cyclic GFR-binding peptide
  MOD_RES (4)..(5)..(39)..(41): Xaa is C or S
  MOD_RES (19)..(20)..(21)..(22)..(23): Xaa is A or G
  MOD_RES (24)..(25)..(26)..(27): Xaa is A or G or absent
PPTXXVPTRLSATSILYYXXXXXXXXXLRKHRDMVVESXGXR

SEQ ID NO: 34650 - protein, 38 aa, Artificial Sequence
  Non-cyclic GFR-binding peptide
  MOD_RES (6)..(7): Xaa is C or S
STPPTXXVPTRLSPISILYKDSANNVVLKYHYDMVVES

SEQ ID NO: 34651 - protein, 34 aa, Artificial Sequence
  Non-cyclic GFR-binding peptide
  MOD_RES (1)..(2): Xaa is C or S
  MOD_RES (16)..(17)..(18)..(19)..(20): Xaa is A or G
  MOD_RES (21)..(22)..(23)..(24): Xaa is A or G or absent
XXVPEKMEPISILYLXXXXXXXXXKFKYENMTVE

SEQ ID NO: 34652 - protein, 39 aa, Artificial Sequence
  Non-cyclic GFR-binding peptide
  MOD_RES (5)..(6): Xaa is C or S
  MOD_RES (20)..(21)..(22)..(23)..(24): Xaa is A or G
  MOD_RES (25)..(26)..(27)..(28): Xaa is A or G or absent
IPEPXXVPEKMSPINILYFXXXXXXXXXYGKIPNMTVES

SEQ ID NO: 34653 - protein, 33 aa, Artificial Sequence
  Non-cyclic GFR-binding peptide
  MOD_RES (33)..(33): Xaa is C or S
  MOD_RES (14)..(15)..(16)..(17)..(18): Xaa is A or G
  MOD_RES (19)..(20)..(21)..(22): Xaa is A or G or absent
APVKTSATSMLYYXXXXXXXXXLRKHRMIVEEX

SEQ ID NO: 34654 - protein, 37 aa, Artificial Sequence
  Non-cyclic GFR-binding peptide
  MOD_RES (2)..(3)..(36): Xaa is C or S
  MOD_RES (17)..(18)..(19)..(20)..(21): Xaa is A or G
  MOD_RES (22)..(23)..(24)..(25): Xaa is A or G or absent
PXXVPQDLSPINILYFXXXXXXXXXYGKIPMVVKSXK

SEQ ID NO: 34655 - protein, 41 aa, Artificial Sequence
  Non-cyclic GFR-binding peptide
  MOD_RES (4)..(5)..(39)..(41): Xaa is C or S
  MOD_RES (19)..(20)..(21)..(22)..(23): Xaa is A or G
  MOD_RES (24)..(25)..(26)..(27): Xaa is A or G or absent
AGPXXTPTKMSATSMLYYXXXXXXXXXLRKHRGMVVDRXGX

SEQ ID NO: 34656 - protein, 42 aa, Artificial Sequence
  Non-cyclic GFR-binding peptide
  MOD_RES (6)..(7)..(41): Xaa is C or S
  MOD_RES (21)..(22)..(23)..(24)..(25): Xaa is A or G
  MOD_RES (26)..(27)..(28)..(29): Xaa is A or G or absent
AAPASXXVPARLSATSILYYXXXXXXXXXLRKHRDMVVEAXG

SEQ ID NO: 34657 - protein, 44 aa, Artificial Sequence
  Non-cyclic GFR-binding peptide
  MOD_RES (6)..(7)..(41)..(43): Xaa is C or S
  MOD_RES (21)..(22)..(23)..(24)..(25): Xaa is A or G
  MOD_RES (26)..(27)..(28)..(29): Xaa is A or G or absent
STPPTXXVPTRLSATSILYYXXXXXXXXXLRKHRDMVVESXGXR

SEQ ID NO: 34658 - protein, 41 aa, Artificial Sequence
  Non-cyclic GFR-binding peptide
  MOD_RES (4)..(5)..(39)..(41): Xaa is C or S
  MOD_RES (19)..(20)..(21)..(22)..(23): Xaa is A or G
  MOD_RES (24)..(25)..(26)..(27): Xaa is A or G or absent
SKAXXVPTKLSATSILYYXXXXXXXXXLRKHRGMAVSEXGX

SEQ ID NO: 34659 - protein, 36 aa, Artificial Sequence
  Non-cyclic GFR-binding peptide
  MOD_RES (1)..(35): Xaa is C or S
  MOD_RES (15)..(16)..(17)..(18)..(19): Xaa is A or G
  MOD_RES (20)..(21)..(22)..(23): Xaa is A or G or absent
XVPTRLEPISILYLXXXXXXXXXKFKYEDMVVESXG

SEQ ID NO: 34660 - protein, 38 aa, Artificial Sequence
  Non-cyclic GFR-binding peptide
  MOD_RES (4)..(5)..(38): Xaa is C or S
  MOD_RES (19)..(20)..(21)..(22)..(23): Xaa is A or G
  MOD_RES (24)..(25)..(26)..(27): Xaa is A or G or absent
PSTXXAPVKTEPISMLYLXXXXXXXXXKFKYEMIVEEX

SEQ ID NO: 34661 - protein, 36 aa, Artificial Sequence
  Non-cyclic GFR-binding peptide
  MOD_RES (5)..(6): Xaa is C or S
TPPTXXVPTRLSATSILYYDSANNVVLRKHRDMVVE

SEQ ID NO: 34662 - protein, 37 aa, Artificial Sequence
  Non-cyclic GFR-binding peptide
  MOD_RES (6)..(7): Xaa is C or S
ASAAPXXVPQALSPINILYFVGRKPKVYGKIPMIVRS

SEQ ID NO: 34663 - protein, 37 aa, Artificial Sequence
  Non-cyclic GFR-binding peptide
  MOD_RES (3)..(4): Xaa is C or S
  MOD_RES (18)..(19)..(20)..(21)..(22): Xaa is A or G
  MOD_RES (23)..(24)..(25)..(26): Xaa is A or G or absent
PTXXVPTRLSATSILYYXXXXXXXXXLRKHRDMVVES

SEQ ID NO: 34664 - protein, 41 aa, Artificial Sequence
  Non-cyclic GFR-binding peptide
  MOD_RES (4)..(5)..(39)..(41): Xaa is C or S
  MOD_RES (19)..(20)..(21)..(22)..(23): Xaa is A or G
  MOD_RES (24)..(25)..(26)..(27): Xaa is A or G or absent
PEPXXVPEKMSPINILYFXXXXXXXXXYGKIPNMTVESXAX

SEQ ID NO: 34665 - protein, 41 aa, Artificial Sequence
  Non-cyclic GFR-binding peptide
  MOD_RES (6)..(7)..(38)..(40): Xaa is C or S
RVPSTXXAPVKTSATSMLYYDNGRVLLLRKHRMIVEEXGXL

SEQ ID NO: 34666 - protein, 40 aa, Artificial Sequence
  Non-cyclic GFR-binding peptide
  MOD_RES (4)..(5)..(37)..(39): Xaa is C or S
AGPXXTPTKMSATSMLYYNDKQQIILRKHRGMVVDRXGXS

SEQ ID NO: 34667 - protein, 36 aa, Artificial Sequence
  Non-cyclic GFR-binding peptide
  MOD_RES (1)..(34)..(36): Xaa is C or S
  MOD_RES (15)..(16)..(17)..(18)..(19): Xaa is A or G
  MOD_RES (20)..(21)..(22)..(23): Xaa is A or G or absent
XAPVKTSPISMLYKXXXXXXXXXLKYHYMIVEEXGX

SEQ ID NO: 34668 - protein, 36 aa, Artificial Sequence
  Non-cyclic GFR-binding peptide
  MOD_RES (2)..(3): Xaa is C or S
  MOD_RES (17)..(18)..(19)..(20)..(21): Xaa is A or G
  MOD_RES (22)..(23)..(24)..(25): Xaa is A or G or absent
PXXTPTKMSATSMLYYXXXXXXXXXLRKHRGMVVDR

SEQ ID NO: 34669 - protein, 35 aa, Artificial Sequence
  Non-cyclic GFR-binding peptide
  MOD_RES (4)..(5): Xaa is C or S
AGPXXTPTKMSATSMLYYNDKQQIILRKHRGMVVD

SEQ ID NO: 34670 - protein, 38 aa, Artificial Sequence
  Non-cyclic GFR-binding peptide
  MOD_RES (2)..(3)..(36)..(38): Xaa is C or S
  MOD_RES (17)..(18)..(19)..(20)..(21): Xaa is A or G
  MOD_RES (22)..(23)..(24)..(25): Xaa is A or G or absent
TXXAPVKTSPISMLYKXXXXXXXXXLKYHYMIVEEXGX

SEQ ID NO: 34671 - protein, 35 aa, Artificial Sequence
  Non-cyclic GFR-binding peptide
  MOD_RES (34)..(34): Xaa is C or S
  MOD_RES (14)..(15)..(16)..(17)..(18): Xaa is A or G
  MOD_RES (19)..(20)..(21)..(22): Xaa is A or G or absent
VPEKMSPISILYKXXXXXXXXXLKYHYNMTVESXA

SEQ ID NO: 34672 - protein, 35 aa, Artificial Sequence
  Non-cyclic GFR-binding peptide
  MOD_RES (1)..(33)..(35): Xaa is C or S
XVPEKMSATSILYYDENKNVVLRKHRNMTVESXAX

SEQ ID NO: 34673 - protein, 37 aa, Artificial Sequence
  Non-cyclic GFR-binding peptide
  MOD_RES (4)..(5): Xaa is C or S
  MOD_RES (19)..(20)..(21)..(22)..(23): Xaa is A or G
  MOD_RES (24)..(25)..(26)..(27): Xaa is A or G or absent
PSTXXAPVKTSPISMLYKXXXXXXXXXLKYHYMIVEE

SEQ ID NO: 34674 - protein, 35 aa, Artificial Sequence
  Non-cyclic GFR-binding peptide
  MOD_RES (1)..(2)..(34): Xaa is C or S
XXVPEKMNAISILYFDENKNVVLKKYRNMTVESXA

SEQ ID NO: 34675 - protein, 38 aa, Artificial Sequence
  Non-cyclic GFR-binding peptide
  MOD_RES (3)..(4)..(36)..(38): Xaa is C or S
EPXXVPEKMSPINILYFDENKNVVYGKIPNMTVESXAX

SEQ ID NO: 34676 - protein, 40 aa, Artificial Sequence
  Non-cyclic GFR-binding peptide
  MOD_RES (5)..(6)..(38)..(40): Xaa is C or S
TPPTXXVPTRLSPISILYKDSANNVVLKYHYDMVVESXGX

SEQ ID NO: 34677 - protein, 39 aa, Artificial Sequence
  Non-cyclic GFR-binding peptide
  MOD_RES (4)..(5)..(39): Xaa is C or S
  MOD_RES (19)..(20)..(21)..(22)..(23): Xaa is A or G
  MOD_RES (24)..(25)..(26)..(27): Xaa is A or G or absent
PPTXXVPTRLSATSILYYXXXXXXXXXLRKHRDMVVESX

SEQ ID NO: 34678 - protein, 39 aa, Artificial Sequence
  Non-cyclic GFR-binding peptide
  MOD_RES (6)..(7)..(39): Xaa is C or S
HVPKPXXAPTKLEPISVLYLDDSSNVIKFKYENMVVRSX

SEQ ID NO: 34679 - protein, 40 aa, Artificial Sequence
  Non-cyclic GFR-binding peptide
  MOD_RES (6)..(7): Xaa is C or S
  MOD_RES (21)..(22)..(23)..(24)..(25): Xaa is A or G
  MOD_RES (26)..(27)..(28)..(29): Xaa is A or G or absent
GIPEPXXVPEKMEPISILYLXXXXXXXXXKFKYENMTVES

SEQ ID NO: 34680 - protein, 35 aa, Artificial Sequence
  Non-cyclic GFR-binding peptide
  MOD_RES (3)..(4)..(35): Xaa is C or S
STXXAPVKTEPISMLYLDNGRVLLKFKYEMIVEEX

SEQ ID NO: 34681 - protein, 38 aa, Artificial Sequence
  Non-cyclic GFR-binding peptide
  MOD_RES (3)..(4)..(35)..(37): Xaa is C or S
STXXAPVKTEPISMLYLDNGRVLLKFKYEMIVEEXGXL

SEQ ID NO: 34682 - protein, 33 aa, Artificial Sequence
  Non-cyclic GFR-binding peptide
  MOD_RES (2)..(3): Xaa is C or S
PXXVPEKMSPINILYFDENKNVVYGKIPNMTVE

SEQ ID NO: 34683 - protein, 37 aa, Artificial Sequence
  Non-cyclic GFR-binding peptide
  MOD_RES (2)..(3)..(37): Xaa is C or S
  MOD_RES (17)..(18)..(19)..(20)..(21): Xaa is A or G
  MOD_RES (22)..(23)..(24)..(25): Xaa is A or G or absent
PXXVPEKMSATSILYYXXXXXXXXXLRKHRNMTVESX

SEQ ID NO: 34684 - protein, 37 aa, Artificial Sequence
  Non-cyclic GFR-binding peptide
  MOD_RES (34)..(36): Xaa is C or S
  MOD_RES (14)..(15)..(16)..(17)..(18): Xaa is A or G
  MOD_RES (19)..(20)..(21)..(22): Xaa is A or G or absent
VPEKMSPINILYFXXXXXXXXXYGKIPNMTVESXAXR

SEQ ID NO: 34685 - protein, 36 aa, Artificial Sequence
  Non-cyclic GFR-binding peptide
  MOD_RES (34)..(36): Xaa is C or S
  MOD_RES (14)..(15)..(16)..(17)..(18): Xaa is A or G
  MOD_RES (19)..(20)..(21)..(22): Xaa is A or G or absent
VPEKMNAISILYFXXXXXXXXXLKKYRNMTVESXAX

SEQ ID NO: 34686 - protein, 37 aa, Artificial Sequence
  Non-cyclic GFR-binding peptide
  MOD_RES (2)..(3)..(35)..(37): Xaa is C or S
PXXTPTKMSATSMLYYNDKQQIILRKHRGMVVDRXGX

SEQ ID NO: 34687 - protein, 39 aa, Artificial Sequence
  Non-cyclic GFR-binding peptide
  MOD_RES (3)..(4)..(38): Xaa is C or S
  MOD_RES (18)..(19)..(20)..(21)..(22): Xaa is A or G
  MOD_RES (23)..(24)..(25)..(26): Xaa is A or G or absent
EPXXVPEKMSPISILYKXXXXXXXXXLKYHYNMTVESXA

SEQ ID NO: 34688 - protein, 35 aa, Artificial Sequence
  Non-cyclic GFR-binding peptide
  MOD_RES (2)..(3)..(34): Xaa is C or S
PXXVPQALSPINILYFVGRKPKVYGKIPMIVRSXK

SEQ ID NO: 34689 - protein, 39 aa, Artificial Sequence
  Non-cyclic GFR-binding peptide
  MOD_RES (5)..(6)..(38): Xaa is C or S
APASXXVPARLSATSILYYDAANNVVLRKHRDMVVEAXG

SEQ ID NO: 34690 - protein, 39 aa, Artificial Sequence
  Non-cyclic GFR-binding peptide
  MOD_RES (6)..(7)..(38): Xaa is C or S
RVPSTXXAPVKTSATSMLYYDNGRVLLLRKHRMIVEEXG

SEQ ID NO: 34691 - protein, 40 aa, Artificial Sequence
  Non-cyclic GFR-binding peptide
  MOD_RES (3)..(4)..(37)..(39): Xaa is C or S
  MOD_RES (18)..(19)..(20)..(21)..(22): Xaa is A or G
  MOD_RES (23)..(24)..(25)..(26): Xaa is A or G or absent
SPXXVPQDLSPINILYFXXXXXXXXXYGKIPMVVKSXKXS

SEQ ID NO: 34692 - protein, 36 aa, Artificial Sequence
  Non-cyclic GFR-binding peptide
  MOD_RES (2)..(3): Xaa is C or S
  MOD_RES (17)..(18)..(19)..(20)..(21): Xaa is A or G
  MOD_RES (22)..(23)..(24)..(25): Xaa is A or G or absent
SXXVPARLSATSILYYXXXXXXXXXLRKHRDMVVEA

SEQ ID NO: 34693 - protein, 40 aa, Artificial Sequence
  Non-cyclic GFR-binding peptide
  MOD_RES (5)..(6)..(38)..(40): Xaa is C or S
IPEPXXVPEKMEPISILYLDENKNVVKFKYENMTVESXAX

SEQ ID NO: 34694 - protein, 39 aa, Artificial Sequence
  Non-cyclic GFR-binding peptide
  MOD_RES (6)..(7): Xaa is C or S
  MOD_RES (21)..(22)..(23)..(24)..(25): Xaa is A or G
  MOD_RES (26)..(27)..(28)..(29): Xaa is A or G or absent
GIPEPXXVPEKMSPINILYFXXXXXXXXXYGKIPNMTVE

SEQ ID NO: 34695 - protein, 38 aa, Artificial Sequence
  Non-cyclic GFR-binding peptide
  MOD_RES (5)..(6)..(38): Xaa is C or S
SAGPXXTPTKMSATSMLYYNDKQQIILRKHRGMVVDRX

SEQ ID NO: 34696 - protein, 40 aa, Artificial Sequence
  Non-cyclic GFR-binding peptide
  MOD_RES (3)..(4)..(38)..(40): Xaa is C or S
  MOD_RES (18)..(19)..(20)..(21)..(22): Xaa is A or G
  MOD_RES (23)..(24)..(25)..(26): Xaa is A or G or absent
EPXXVPEKMEPISILYLXXXXXXXXXKFKYENMTVESXAX

SEQ ID NO: 34697 - protein, 37 aa, Artificial Sequence
  Non-cyclic GFR-binding peptide
  MOD_RES (1)..(2)..(36): Xaa is C or S
  MOD_RES (16)..(17)..(18)..(19)..(20): Xaa is A or G
  MOD_RES (21)..(22)..(23)..(24): Xaa is A or G or absent
XXTPTKMSATSMLYYXXXXXXXXXLRKHRGMVVDRXG

SEQ ID NO: 34698 - protein, 36 aa, Artificial Sequence
  Non-cyclic GFR-binding peptide
  MOD_RES (3)..(4)..(35): Xaa is C or S
STXXAPVKTEPISMLYLDNGRVLLKFKYEMIVEEXG

SEQ ID NO: 34699 - protein, 37 aa, Artificial Sequence
  Non-cyclic GFR-binding peptide
  MOD_RES (6)..(7): Xaa is C or S
ASASPXXVPQDLSPINILYFVGRTPKVYGKIPMVVKS

SEQ ID NO: 34700 - protein, 38 aa, Artificial Sequence
  Non-cyclic GFR-binding peptide
  MOD_RES (1)..(2)..(36)..(38): Xaa is C or S
  MOD_RES (16)..(17)..(18)..(19)..(20): Xaa is A or G
  MOD_RES (21)..(22)..(23)..(24): Xaa is A or G or absent
XXTPTKMSATSMLYYXXXXXXXXXLRKHRGMVVDRXGX

SEQ ID NO: 34701 - protein, 39 aa, Artificial Sequence
  Non-cyclic GFR-binding peptide
  MOD_RES (4)..(5)..(37)..(39): Xaa is C or S
PPTXXVPTRLSPISILYKDSANNVVLKYHYDMVVESXGX

SEQ ID NO: 34702 - protein, 35 aa, Artificial Sequence
  Non-cyclic GFR-binding peptide
  MOD_RES (1)..(32)..(34): Xaa is C or S
XAPVKTEPISMLYLDNGRVLLKFKYEMIVEEXGXL

SEQ ID NO: 34703 - protein, 42 aa, Artificial Sequence
  Non-cyclic GFR-binding peptide
  MOD_RES (6)..(7)..(41): Xaa is C or S
  MOD_RES (21)..(22)..(23)..(24)..(25): Xaa is A or G
  MOD_RES (26)..(27)..(28)..(29): Xaa is A or G or absent
GIPEPXXVPEKMEPISILYLXXXXXXXXXKFKYENMTVESXA

SEQ ID NO: 34704 - protein, 36 aa, Artificial Sequence
  Non-cyclic GFR-binding peptide
  MOD_RES (1)..(2)..(34)..(36): Xaa is C or S
XXVPEKMEPISILYLDENKNVVKFKYENMTVESXAX

SEQ ID NO: 34705 - protein, 31 aa, Artificial Sequence
  Non-cyclic GFR-binding peptide
  MOD_RES (1)..(1): Xaa is C or S
XAPVKTEPISMLYLDNGRVLLKFKYEMIVEE

SEQ ID NO: 34706 - protein, 34 aa, Artificial Sequence
  Non-cyclic GFR-binding peptide
  MOD_RES (2)..(3): Xaa is C or S
PXXTPTKMSPISMLYKNDKQQIILKYHYGMVVDR

SEQ ID NO: 34707 - protein, 40 aa, Artificial Sequence
  Non-cyclic GFR-binding peptide
  MOD_RES (6)..(7): Xaa is C or S
  MOD_RES (21)..(22)..(23)..(24)..(25): Xaa is A or G
  MOD_RES (26)..(27)..(28)..(29): Xaa is A or G or absent
AAPASXXVPARLSATSILYYXXXXXXXXXLRKHRDMVVEA

SEQ ID NO: 34708 - protein, 35 aa, Artificial Sequence
  Non-cyclic GFR-binding peptide
  MOD_RES (2)..(3)..(35): Xaa is C or S
TXXVPTRLSPISILYKDSANNVVLKYHYDMVVESX

SEQ ID NO: 34709 - protein, 42 aa, Artificial Sequence
  Non-cyclic GFR-binding peptide
  MOD_RES (5)..(6)..(40)..(42): Xaa is C or S
  MOD_RES (20)..(21)..(22)..(23)..(24): Xaa is A or G
  MOD_RES (25)..(26)..(27)..(28): Xaa is A or G or absent
ASKAXXVPTKLSATSILYYXXXXXXXXXLRKHRGMAVSEXGX

SEQ ID NO: 34710 - protein, 40 aa, Artificial Sequence
  Non-cyclic GFR-binding peptide
  MOD_RES (3)..(4)..(38)..(40): Xaa is C or S
  MOD_RES (18)..(19)..(20)..(21)..(22): Xaa is A or G
  MOD_RES (23)..(24)..(25)..(26): Xaa is A or G or absent
EPXXVPEKMSATSILYYXXXXXXXXXLRKHRNMTVESXAX

SEQ ID NO: 34711 - protein, 32 aa, Artificial Sequence
  Non-cyclic GFR-binding peptide
  MOD_RES (14)..(15)..(16)..(17)..(18): Xaa is A or G
  MOD_RES (19)..(20)..(21)..(22): Xaa is A or G or absent
APVKTEPISMLYLXXXXXXXXXKFKYEMIVEE

SEQ ID NO: 34712 - protein, 39 aa, Artificial Sequence
  Non-cyclic GFR-binding peptide
  MOD_RES (5)..(6)..(37)..(39): Xaa is C or S
SAAPXXVPQALSPINILYFVGRKPKVYGKIPMIVRSXKX

SEQ ID NO: 34713 - protein, 39 aa, Artificial Sequence
  Non-cyclic GFR-binding peptide
  MOD_RES (6)..(7): Xaa is C or S
  MOD_RES (21)..(22)..(23)..(24)..(25): Xaa is A or G
  MOD_RES (26)..(27)..(28)..(29): Xaa is A or G or absent
RVPSTXXAPVKTSPISMLYKXXXXXXXXXLKYHYMIVEE

SEQ ID NO: 34714 - protein, 42 aa, Artificial Sequence
  Non-cyclic GFR-binding peptide
  MOD_RES (4)..(5)..(39)..(41): Xaa is C or S
  MOD_RES (19)..(20)..(21)..(22)..(23): Xaa is A or G
  MOD_RES (24)..(25)..(26)..(27): Xaa is A or G or absent
AGPXXTPTKMEPISMLYLXXXXXXXXXKFKYEGMVVDRXGXS

SEQ ID NO: 34715 - protein, 41 aa, Artificial Sequence
  Non-cyclic GFR-binding peptide
  MOD_RES (5)..(6)..(38)..(40): Xaa is C or S
IPEPXXVPEKMNAISILYFDENKNVVLKKYRNMTVESXAXR

SEQ ID NO: 34716 - protein, 36 aa, Artificial Sequence
  Non-cyclic GFR-binding peptide
  MOD_RES (34)..(36): Xaa is C or S
  MOD_RES (14)..(15)..(16)..(17)..(18): Xaa is A or G
  MOD_RES (19)..(20)..(21)..(22): Xaa is A or G or absent
TPTKMEPISMLYLXXXXXXXXXKFKYEGMVVDRXGX

SEQ ID NO: 34717 - protein, 38 aa, Artificial Sequence
  Non-cyclic GFR-binding peptide
  MOD_RES (1)..(2)..(36)..(38): Xaa is C or S
  MOD_RES (16)..(17)..(18)..(19)..(20): Xaa is A or G
  MOD_RES (21)..(22)..(23)..(24): Xaa is A or G or absent
XXVPEKMNAISILYFXXXXXXXXXLKKYRNMTVESXAX

SEQ ID NO: 34718 - protein, 39 aa, Artificial Sequence
  Non-cyclic GFR-binding peptide
  MOD_RES (5)..(6)..(38): Xaa is C or S
SAGPXXTPTKMEPISMLYLNDKQQIIKFKYEGMVVDRXG

SEQ ID NO: 34719 - protein, 37 aa, Artificial Sequence
  Non-cyclic GFR-binding peptide
  MOD_RES (2)..(3)..(37): Xaa is C or S
  MOD_RES (17)..(18)..(19)..(20)..(21): Xaa is A or G
  MOD_RES (22)..(23)..(24)..(25): Xaa is A or G or absent
PXXTPTKMEPISMLYLXXXXXXXXXKFKYEGMVVDRX

SEQ ID NO: 34720 - protein, 35 aa, Artificial Sequence
  Non-cyclic GFR-binding peptide
  MOD_RES (1)..(33)..(35): Xaa is C or S
XVPTRLEPISILYLDSANNVVKFKYEDMVVESXGX

SEQ ID NO: 34721 - protein, 38 aa, Artificial Sequence
  Non-cyclic GFR-binding peptide
  MOD_RES (2)..(3)..(37): Xaa is C or S
  MOD_RES (17)..(18)..(19)..(20)..(21): Xaa is A or G
  MOD_RES (22)..(23)..(24)..(25): Xaa is A or G or absent
PXXVPEKMSPINILYFXXXXXXXXXYGKIPNMTVESXA

SEQ ID NO: 34722 - protein, 33 aa, Artificial Sequence
  Non-cyclic GFR-binding peptide
  MOD_RES (32)..(32): Xaa is C or S
VPEKMSPISILYKDENKNVVLKYHYNMTVESXA

SEQ ID NO: 34723 - protein, 37 aa, Artificial Sequence
  Non-cyclic GFR-binding peptide
  MOD_RES (2)..(3)..(34)..(36): Xaa is C or S
PXXVSQDLSPINILYFIGKTPKIYGKIPMIVKSXKXS

SEQ ID NO: 34724 - protein, 36 aa, Artificial Sequence
  Non-cyclic GFR-binding peptide
  MOD_RES (34)..(36): Xaa is C or S
  MOD_RES (14)..(15)..(16)..(17)..(18): Xaa is A or G
  MOD_RES (19)..(20)..(21)..(22): Xaa is A or G or absent
TPTKMSATSMLYYXXXXXXXXXLRKHRGMVVDRXGX

SEQ ID NO: 34725 - protein, 34 aa, Artificial Sequence
  Non-cyclic GFR-binding peptide
  MOD_RES (2)..(3): Xaa is C or S
PXXVPEKMEPISILYLDENKNVVKFKYENMTVES

SEQ ID NO: 34726 - protein, 36 aa, Artificial Sequence
  Non-cyclic GFR-binding peptide
  MOD_RES (2)..(3)..(36): Xaa is C or S
  MOD_RES (17)..(18)..(19)..(20)..(21): Xaa is A or G
  MOD_RES (22)..(23)..(24)..(25): Xaa is A or G or absent
PXXVPQALSPINILYFXXXXXXXXXYGKIPMIVRSX

SEQ ID NO: 34727 - protein, 41 aa, Artificial Sequence
  Non-cyclic GFR-binding peptide
  MOD_RES (5)..(6)..(38)..(40): Xaa is C or S
TPPTXXVPTRLEPISILYLDSANNVVKFKYEDMVVESXGXR

SEQ ID NO: 34728 - protein, 36 aa, Artificial Sequence
  Non-cyclic GFR-binding peptide
  MOD_RES (33)..(35): Xaa is C or S
  MOD_RES (14)..(15)..(16)..(17)..(18): Xaa is A or G
  MOD_RES (19)..(20)..(21)..(22): Xaa is A or G or absent
VSQDLSPINILYFXXXXXXXXXYGKIPMIVKSXKXS

SEQ ID NO: 34729 - protein, 33 aa, Artificial Sequence
  Non-cyclic GFR-binding peptide
  MOD_RES (2)..(3): Xaa is C or S
PXXVSQDLSPINILYFIGKTPKIYGKIPMIVKS

SEQ ID NO: 34730 - protein, 40 aa, Artificial Sequence
  Non-cyclic GFR-binding peptide
  MOD_RES (4)..(5)..(37)..(39): Xaa is C or S
PEPXXVPEKMNAISILYFDENKNVVLKKYRNMTVESXAXR

SEQ ID NO: 34731 - protein, 39 aa, Artificial Sequence
  Non-cyclic GFR-binding peptide
  MOD_RES (6)..(7): Xaa is C or S
  MOD_RES (21)..(22)..(23)..(24)..(25): Xaa is A or G
  MOD_RES (26)..(27)..(28)..(29): Xaa is A or G or absent
HVPKPXXAPTKLSPISVLYKXXXXXXXXXLKYHYNMVVR

SEQ ID NO: 34732 - protein, 44 aa, Artificial Sequence
  Non-cyclic GFR-binding peptide
  MOD_RES (6)..(7)..(41)..(43): Xaa is C or S
  MOD_RES (21)..(22)..(23)..(24)..(25): Xaa is A or G
  MOD_RES (26)..(27)..(28)..(29): Xaa is A or G or absent
STPPTXXVPTRLSPISILYKXXXXXXXXXLKYHYDMVVESXGXR

SEQ ID NO: 34733 - protein, 35 aa, Artificial Sequence
  Non-cyclic GFR-binding peptide
  MOD_RES (3)..(4)..(35): Xaa is C or S
SPXXVSQDLSPINILYFIGKTPKIYGKIPMIVKSX

SEQ ID NO: 34734 - protein, 38 aa, Artificial Sequence
  Non-cyclic GFR-binding peptide
  MOD_RES (5)..(6)..(38): Xaa is C or S
SAGPXXTPTKMEPISMLYLNDKQQIIKFKYEGMVVDRX

SEQ ID NO: 34735 - protein, 41 aa, Artificial Sequence
  Non-cyclic GFR-binding peptide
  MOD_RES (5)..(6)..(40): Xaa is C or S
  MOD_RES (20)..(21)..(22)..(23)..(24): Xaa is A or G
  MOD_RES (25)..(26)..(27)..(28): Xaa is A or G or absent
SAGPXXTPTKMSPISMLYKXXXXXXXXXLKYHYGMVVDRXG

SEQ ID NO: 34736 - protein, 35 aa, Artificial Sequence
  Non-cyclic GFR-binding peptide
  MOD_RES (3)..(4): Xaa is C or S
GPXXTPTKMSATSMLYYNDKQQIILRKHRGMVVDR

SEQ ID NO: 34737 - protein, 37 aa, Artificial Sequence
  Non-cyclic GFR-binding peptide
  MOD_RES (4)..(5): Xaa is C or S
  MOD_RES (19)..(20)..(21)..(22)..(23): Xaa is A or G
  MOD_RES (24)..(25)..(26)..(27): Xaa is A or G or absent
PEPXXVPEKMEPISILYLXXXXXXXXXKFKYENMTVE

SEQ ID NO: 34738 - protein, 41 aa, Artificial Sequence
  Non-cyclic GFR-binding peptide
  MOD_RES (6)..(7)..(39)..(41): Xaa is C or S
GIPEPXXVPEKMSPINILYFDENKNVVYGKIPNMTVESXAX

SEQ ID NO: 34739 - protein, 34 aa, Artificial Sequence
  Non-cyclic GFR-binding peptide
  MOD_RES (1)..(1): Xaa is C or S
  MOD_RES (15)..(16)..(17)..(18)..(19): Xaa is A or G
  MOD_RES (20)..(21)..(22)..(23): Xaa is A or G or absent
XVPEKMEPISILYLXXXXXXXXXKFKYENMTVES

SEQ ID NO: 34740 - protein, 33 aa, Artificial Sequence
  Non-cyclic GFR-binding peptide
  MOD_RES (1)..(33): Xaa is C or S
XTPTKMSATSMLYYNDKQQIILRKHRGMVVDRX

SEQ ID NO: 34741 - protein, 37 aa, Artificial Sequence
  Non-cyclic GFR-binding peptide
  MOD_RES (3)..(4)..(36): Xaa is C or S
KAXXVPTKLSATSILYYDKGVVTYLRKHRGMAVSEXG

SEQ ID NO: 34742 - protein, 38 aa, Artificial Sequence
  Non-cyclic GFR-binding peptide
  MOD_RES (6)..(7)..(38): Xaa is C or S
ASAAPXXVPQALSPINILYFVGRKPKVYGKIPMIVRSX

SEQ ID NO: 34743 - protein, 41 aa, Artificial Sequence
  Non-cyclic GFR-binding peptide
  MOD_RES (6)..(7)..(39)..(41): Xaa is C or S
GSAGPXXTPTKMSATSMLYYNDKQQIILRKHRGMVVDRXGX

SEQ ID NO: 34744 - protein, 39 aa, Artificial Sequence
  Non-cyclic GFR-binding peptide
  MOD_RES (3)..(4)..(36)..(38): Xaa is C or S
GPXXTPTKMSATSMLYYNDKQQIILRKHRGMVVDRXGXS

SEQ ID NO: 34745 - protein, 41 aa, Artificial Sequence
  Non-cyclic GFR-binding peptide
  MOD_RES (6)..(7)..(39)..(41): Xaa is C or S
HVPKPXXAPTKLSATSVLYYDDSSNVILRKHRNMVVRSXGX

SEQ ID NO: 34746 - protein, 34 aa, Artificial Sequence
  Non-cyclic GFR-binding peptide
  MOD_RES (1)..(1): Xaa is C or S
  MOD_RES (15)..(16)..(17)..(18)..(19): Xaa is A or G
  MOD_RES (20)..(21)..(22)..(23): Xaa is A or G or absent
XVPEKMSATSILYYXXXXXXXXXLRKHRNMTVES

SEQ ID NO: 34747 - protein, 34 aa, Artificial Sequence
  Non-cyclic GFR-binding peptide
  MOD_RES (1)..(2)..(34): Xaa is C or S
XXTPTKMSATSMLYYNDKQQIILRKHRGMVVDRX

SEQ ID NO: 34748 - protein, 31 aa, Artificial Sequence
  Non-cyclic GFR-binding peptide
  MOD_RES (1)..(1): Xaa is C or S
XVPEKMEPISILYLDENKNVVKFKYENMTVE

SEQ ID NO: 34749 - protein, 40 aa, Artificial Sequence
  Non-cyclic GFR-binding peptide
  MOD_RES (3)..(4)..(38)..(40): Xaa is C or S
  MOD_RES (18)..(19)..(20)..(21)..(22): Xaa is A or G
  MOD_RES (23)..(24)..(25)..(26): Xaa is A or G or absent
GPXXTPTKMSATSMLYYXXXXXXXXXLRKHRGMVVDRXGX

SEQ ID NO: 34750 - protein, 43 aa, Artificial Sequence
  Non-cyclic GFR-binding peptide
  MOD_RES (5)..(6)..(40)..(42): Xaa is C or S
  MOD_RES (20)..(21)..(22)..(23)..(24): Xaa is A or G
  MOD_RES (25)..(26)..(27)..(28): Xaa is A or G or absent
TPPTXXVPTRLSPISILYKXXXXXXXXXLKYHYDMVVESXGXR

SEQ ID NO: 34751 - protein, 32 aa, Artificial Sequence
  Non-cyclic GFR-binding peptide
  MOD_RES (32)..(32): Xaa is C or S
TPTKMEPISMLYLNDKQQIIKFKYEGMVVDRX

SEQ ID NO: 34752 - protein, 34 aa, Artificial Sequence
  Non-cyclic GFR-binding peptide
  MOD_RES (3)..(4): Xaa is C or S
EPXXVPEKMSPINILYFDENKNVVYGKIPNMTVE

SEQ ID NO: 34753 - protein, 36 aa, Artificial Sequence
  Non-cyclic GFR-binding peptide
  MOD_RES (5)..(6): Xaa is C or S
TPPTXXVPTRLSPISILYKDSANNVVLKYHYDMVVE

SEQ ID NO: 34754 - protein, 35 aa, Artificial Sequence
  Non-cyclic GFR-binding peptide
  MOD_RES (1)..(33)..(35): Xaa is C or S
XVPTKLSATSILYYDKGVVTYLRKHRGMAVSEXGX

SEQ ID NO: 34755 - protein, 38 aa, Artificial Sequence
  Non-cyclic GFR-binding peptide
  MOD_RES (2)..(3)..(37): Xaa is C or S
  MOD_RES (17)..(18)..(19)..(20)..(21): Xaa is A or G
  MOD_RES (22)..(23)..(24)..(25): Xaa is A or G or absent
AXXVPTKLSATSILYYXXXXXXXXXLRKHRGMAVSEXG

SEQ ID NO: 34756 - protein, 38 aa, Artificial Sequence
  Non-cyclic GFR-binding peptide
  MOD_RES (5)..(6): Xaa is C or S
  MOD_RES (20)..(21)..(22)..(23)..(24): Xaa is A or G
  MOD_RES (25)..(26)..(27)..(28): Xaa is A or G or absent
IPEPXXVPEKMNAISILYFXXXXXXXXXLKKYRNMTVE

SEQ ID NO: 34757 - protein, 35 aa, Artificial Sequence
  Non-cyclic GFR-binding peptide
  MOD_RES (1)..(2): Xaa is C or S
  MOD_RES (16)..(17)..(18)..(19)..(20): Xaa is A or G
  MOD_RES (21)..(22)..(23)..(24): Xaa is A or G or absent
XXVPEKMSATSILYYXXXXXXXXXLRKHRNMTVES

SEQ ID NO: 34758 - protein, 42 aa, Artificial Sequence
  Non-cyclic GFR-binding peptide
  MOD_RES (6)..(7)..(39)..(41): Xaa is C or S
GIPEPXXVPEKMEPISILYLDENKNVVKFKYENMTVESXAXR

SEQ ID NO: 34759 - protein, 36 aa, Artificial Sequence
  Non-cyclic GFR-binding peptide
  MOD_RES (1)..(2)..(33)..(35): Xaa is C or S
XXVPQDLSPINILYFVGRTPKVYGKIPMVVKSXKXS

SEQ ID NO: 34760 - protein, 36 aa, Artificial Sequence
  Non-cyclic GFR-binding peptide
  MOD_RES (1)..(33)..(35): Xaa is C or S
XVPTKLSATSILYYDKGVVTYLRKHRGMAVSEXGXR

SEQ ID NO: 34761 - protein, 37 aa, Artificial Sequence
  Non-cyclic GFR-binding peptide
  MOD_RES (6)..(7): Xaa is C or S
RVPSTXXAPVKTSATSMLYYDNGRVLLLRKHRMIVEE

SEQ ID NO: 34762 - protein, 36 aa, Artificial Sequence
  Non-cyclic GFR-binding peptide
  MOD_RES (3)..(4): Xaa is C or S
  MOD_RES (18)..(19)..(20)..(21)..(22): Xaa is A or G
  MOD_RES (23)..(24)..(25)..(26): Xaa is A or G or absent
PTXXVPTRLSPISILYKXXXXXXXXXLKYHYDMVVE

SEQ ID NO: 34763 - protein, 38 aa, Artificial Sequence
  Non-cyclic GFR-binding peptide
  MOD_RES (5)..(6)..(38): Xaa is C or S
IPEPXXVPEKMSPINILYFDENKNVVYGKIPNMTVESX

SEQ ID NO: 34764 - protein, 40 aa, Artificial Sequence
  Non-cyclic GFR-binding peptide
  MOD_RES (2)..(3)..(37)..(39): Xaa is C or S
  MOD_RES (17)..(18)..(19)..(20)..(21): Xaa is A or G
  MOD_RES (22)..(23)..(24)..(25): Xaa is A or G or absent
PXXTPTKMSPISMLYKXXXXXXXXXLKYHYGMVVDRXGXS

SEQ ID NO: 34765 - protein, 32 aa, Artificial Sequence
  Non-cyclic GFR-binding peptide
  MOD_RES (32)..(32): Xaa is C or S
TPTKMSATSMLYYNDKQQIILRKHRGMVVDRX

SEQ ID NO: 34766 - protein, 34 aa, Artificial Sequence
  Non-cyclic GFR-binding peptide
  MOD_RES (1)..(2)..(34): Xaa is C or S
XXVPEKMSPISILYKDENKNVVLKYHYNMTVESX

SEQ ID NO: 34767 - protein, 41 aa, Artificial Sequence
  Non-cyclic GFR-binding peptide
  MOD_RES (5)..(6)..(38)..(40): Xaa is C or S
APASXXVPARLSATSILYYDAANNVVLRKHRDMVVEAXGXR

SEQ ID NO: 34768 - protein, 31 aa, Artificial Sequence
  Non-cyclic GFR-binding peptide
  MOD_RES (1)..(1): Xaa is C or S
XAPVKTSATSMLYYDNGRVLLLRKHRMIVEE

SEQ ID NO: 34769 - protein, 33 aa, Artificial Sequence
  Non-cyclic GFR-binding peptide
  MOD_RES (1)..(2): Xaa is C or S
XXVPEKMSPINILYFDENKNVVYGKIPNMTVES

SEQ ID NO: 34770 - protein, 37 aa, Artificial Sequence
  Non-cyclic GFR-binding peptide
  MOD_RES (2)..(3)..(37): Xaa is C or S
  MOD_RES (17)..(18)..(19)..(20)..(21): Xaa is A or G
  MOD_RES (22)..(23)..(24)..(25): Xaa is A or G or absent
PXXTPTKMSPISMLYKXXXXXXXXXLKYHYGMVVDRX

SEQ ID NO: 34771 - protein, 37 aa, Artificial Sequence
  Non-cyclic GFR-binding peptide
  MOD_RES (3)..(4): Xaa is C or S
  MOD_RES (18)..(19)..(20)..(21)..(22): Xaa is A or G
  MOD_RES (23)..(24)..(25)..(26): Xaa is A or G or absent
EPXXVPEKMSPISILYKXXXXXXXXXLKYHYNMTVES

SEQ ID NO: 34772 - protein, 37 aa, Artificial Sequence
  Non-cyclic GFR-binding peptide
  MOD_RES (3)..(4)..(36): Xaa is C or S
EPXXVPEKMEPISILYLDENKNVVKFKYENMTVESXA

SEQ ID NO: 34773 - protein, 34 aa, Artificial Sequence
  Non-cyclic GFR-binding peptide
  MOD_RES (2)..(3)..(34): Xaa is C or S
PXXVPQALSPINILYFVGRKPKVYGKIPMIVRSX

SEQ ID NO: 34774 - protein, 41 aa, Artificial Sequence
  Non-cyclic GFR-binding peptide
  MOD_RES (6)..(7)..(39)..(41): Xaa is C or S
STPPTXXVPTRLEPISILYLDSANNVVKFKYEDMVVESXGX

SEQ ID NO: 34775 - protein, 38 aa, Artificial Sequence
  Non-cyclic GFR-binding peptide
  MOD_RES (5)..(6)..(38): Xaa is C or S
IPEPXXVPEKMEPISILYLDENKNVVKFKYENMTVESX

SEQ ID NO: 34776 - protein, 36 aa, Artificial Sequence
  Non-cyclic GFR-binding peptide
  MOD_RES (3)..(4): Xaa is C or S
  MOD_RES (18)..(19)..(20)..(21)..(22): Xaa is A or G
  MOD_RES (23)..(24)..(25)..(26): Xaa is A or G or absent
GPXXTPTKMSATSMLYYXXXXXXXXXLRKHRGMVVD

SEQ ID NO: 34777 - protein, 36 aa, Artificial Sequence
  Non-cyclic GFR-binding peptide
  MOD_RES (3)..(4)..(36): Xaa is C or S
PTXXVPTRLSATSILYYDSANNVVLRKHRDMVVESX

SEQ ID NO: 34778 - protein, 35 aa, Artificial Sequence
  Non-cyclic GFR-binding peptide
  MOD_RES (1)..(2): Xaa is C or S
  MOD_RES (16)..(17)..(18)..(19)..(20): Xaa is A or G
  MOD_RES (21)..(22)..(23)..(24): Xaa is A or G or absent
XXVPEKMEPISILYLXXXXXXXXXKFKYENMTVES

SEQ ID NO: 34779 - protein, 41 aa, Artificial Sequence
  Non-cyclic GFR-binding peptide
  MOD_RES (6)..(7)..(39)..(41): Xaa is C or S
GIPEPXXVPEKMSATSILYYDENKNVVLRKHRNMTVESXAX

SEQ ID NO: 34780 - protein, 39 aa, Artificial Sequence
  Non-cyclic GFR-binding peptide
  MOD_RES (4)..(5)..(39): Xaa is C or S
  MOD_RES (19)..(20)..(21)..(22)..(23): Xaa is A or G
  MOD_RES (24)..(25)..(26)..(27): Xaa is A or G or absent
PPTXXVPTRLSPISILYKXXXXXXXXXLKYHYDMVVESX

SEQ ID NO: 34781 - protein, 35 aa, Artificial Sequence
  Non-cyclic GFR-binding peptide
  MOD_RES (3)..(4): Xaa is C or S
EPXXVPEKMSPINILYFDENKNVVYGKIPNMTVES

SEQ ID NO: 34782 - protein, 40 aa, Artificial Sequence
  Non-cyclic GFR-binding peptide
  MOD_RES (6)..(7)..(39): Xaa is C or S
GIPEPXXVPEKMSPISILYKDENKNVVLKYHYNMTVESXA

SEQ ID NO: 34783 - protein, 34 aa, Artificial Sequence
  Non-cyclic GFR-binding peptide
  MOD_RES (1)..(2): Xaa is C or S
  MOD_RES (16)..(17)..(18)..(19)..(20): Xaa is A or G
  MOD_RES (21)..(22)..(23)..(24): Xaa is A or G or absent
XXVPTKLSATSILYYXXXXXXXXXLRKHRGMAVS

SEQ ID NO: 34784 - protein, 37 aa, Artificial Sequence
  Non-cyclic GFR-binding peptide
  MOD_RES (34)..(36): Xaa is C or S
  MOD_RES (14)..(15)..(16)..(17)..(18): Xaa is A or G
  MOD_RES (19)..(20)..(21)..(22): Xaa is A or G or absent
VPTRLSATSILYYXXXXXXXXXLRKHRDMVVESXGXR

SEQ ID NO: 34785 - protein, 39 aa, Artificial Sequence
  Non-cyclic GFR-binding peptide
  MOD_RES (3)..(4)..(37)..(39): Xaa is C or S
  MOD_RES (18)..(19)..(20)..(21)..(22): Xaa is A or G
  MOD_RES (23)..(24)..(25)..(26): Xaa is A or G or absent
STXXAPVKTSATSMLYYXXXXXXXXXLRKHRMIVEEXGX

SEQ ID NO: 34786 - protein, 36 aa, Artificial Sequence
  Non-cyclic GFR-binding peptide
  MOD_RES (5)..(6): Xaa is C or S
SASPXXVSQDLSPINILYFIGKTPKIYGKIPMIVKS

SEQ ID NO: 34787 - protein, 34 aa, Artificial Sequence
  Non-cyclic GFR-binding peptide
  MOD_RES (1)..(33): Xaa is C or S
XVPTRLSATSILYYDSANNVVLRKHRDMVVESXG

SEQ ID NO: 34788 - protein, 33 aa, Artificial Sequence
  Non-cyclic GFR-binding peptide
  MOD_RES (2)..(3): Xaa is C or S
AXXVPTKLSATSILYYDKGVVTYLRKHRGMAVS

SEQ ID NO: 34789 - protein, 38 aa, Artificial Sequence
  Non-cyclic GFR-binding peptide
  MOD_RES (2)..(3)..(37): Xaa is C or S
  MOD_RES (17)..(18)..(19)..(20)..(21): Xaa is A or G
  MOD_RES (22)..(23)..(24)..(25): Xaa is A or G or absent
PXXVPEKMSATSILYYXXXXXXXXXLRKHRNMTVESXA

SEQ ID NO: 34790 - protein, 37 aa, Artificial Sequence
  Non-cyclic GFR-binding peptide
  MOD_RES (2)..(3)..(34)..(36): Xaa is C or S
TXXAPVKTSATSMLYYDNGRVLLLRKHRMIVEEXGXL

SEQ ID NO: 34791 - protein, 39 aa, Artificial Sequence
  Non-cyclic GFR-binding peptide
  MOD_RES (6)..(7)..(38): Xaa is C or S
ASAAPXXVPQALSPINILYFVGRKPKVYGKIPMIVRSXK

SEQ ID NO: 34792 - protein, 36 aa, Artificial Sequence
  Non-cyclic GFR-binding peptide
  MOD_RES (1)..(2)..(34)..(36): Xaa is C or S
XXTPTKMSPISMLYKNDKQQIILKYHYGMVVDRXGX

SEQ ID NO: 34793 - protein, 41 aa, Artificial Sequence
  Non-cyclic GFR-binding peptide
  MOD_RES (4)..(5)..(39)..(41): Xaa is C or S
  MOD_RES (19)..(20)..(21)..(22)..(23): Xaa is A or G
  MOD_RES (24)..(25)..(26)..(27): Xaa is A or G or absent
AGPXXTPTKMEPISMLYLXXXXXXXXXKFKYEGMVVDRXGX

SEQ ID NO: 34794 - protein, 32 aa, Artificial Sequence
  Non-cyclic GFR-binding peptide
  MOD_RES (31)..(31): Xaa is C or S
APVKTSATSMLYYDNGRVLLLRKHRMIVEEXG

SEQ ID NO: 34795 - protein, 38 aa, Artificial Sequence
  Non-cyclic GFR-binding peptide
  MOD_RES (2)..(3)..(35)..(37): Xaa is C or S
PXXTPTKMSATSMLYYNDKQQIILRKHRGMVVDRXGXS

SEQ ID NO: 34796 - protein, 37 aa, Artificial Sequence
  Non-cyclic GFR-binding peptide
  MOD_RES (1)..(2)..(36): Xaa is C or S
  MOD_RES (16)..(17)..(18)..(19)..(20): Xaa is A or G
  MOD_RES (21)..(22)..(23)..(24): Xaa is A or G or absent
XXVPTRLSATSILYYXXXXXXXXXLRKHRDMVVESXG

SEQ ID NO: 34797 - protein, 34 aa, Artificial Sequence
  Non-cyclic GFR-binding peptide
  MOD_RES (3)..(4): Xaa is C or S
EPXXVPEKMNAISILYFDENKNVVLKKYRNMTVE

SEQ ID NO: 34798 - protein, 38 aa, Artificial Sequence
  Non-cyclic GFR-binding peptide
  MOD_RES (2)..(3)..(37): Xaa is C or S
  MOD_RES (17)..(18)..(19)..(20)..(21): Xaa is A or G
  MOD_RES (22)..(23)..(24)..(25): Xaa is A or G or absent
TXXVPTRLSATSILYYXXXXXXXXXLRKHRDMVVESXG

SEQ ID NO: 34799 - protein, 37 aa, Artificial Sequence
  Non-cyclic GFR-binding peptide
  MOD_RES (1)..(35)..(37): Xaa is C or S
  MOD_RES (15)..(16)..(17)..(18)..(19): Xaa is A or G
  MOD_RES (20)..(21)..(22)..(23): Xaa is A or G or absent
XVPTKLSATSILYYXXXXXXXXXLRKHRGMAVSEXGX

SEQ ID NO: 34800 - protein, 37 aa, Artificial Sequence
  Non-cyclic GFR-binding peptide
  MOD_RES (3)..(4)..(36): Xaa is C or S
ASXXVPARLSATSILYYDAANNVVLRKHRDMVVEAXG

SEQ ID NO: 34801 - protein, 38 aa, Artificial Sequence
  Non-cyclic GFR-binding peptide
  MOD_RES (1)..(2)..(36)..(38): Xaa is C or S
  MOD_RES (16)..(17)..(18)..(19)..(20): Xaa is A or G
  MOD_RES (21)..(22)..(23)..(24): Xaa is A or G or absent
XXTPTKMEPISMLYLXXXXXXXXXKFKYEGMVVDRXGX

SEQ ID NO: 34802 - protein, 41 aa, Artificial Sequence
  Non-cyclic GFR-binding peptide
  MOD_RES (4)..(5)..(38)..(40): Xaa is C or S
  MOD_RES (19)..(20)..(21)..(22)..(23): Xaa is A or G
  MOD_RES (24)..(25)..(26)..(27): Xaa is A or G or absent
PSTXXAPVKTEPISMLYLXXXXXXXXXKFKYEMIVEEXGXL

SEQ ID NO: 34803 - protein, 32 aa, Artificial Sequence
  Non-cyclic GFR-binding peptide
  MOD_RES (14)..(15)..(16)..(17)..(18): Xaa is A or G
  MOD_RES (19)..(20)..(21)..(22): Xaa is A or G or absent
VPEKMSPISILYKXXXXXXXXXLKYHYNMTVE

SEQ ID NO: 34804 - protein, 36 aa, Artificial Sequence
  Non-cyclic GFR-binding peptide
  MOD_RES (1)..(2)..(36): Xaa is C or S
  MOD_RES (16)..(17)..(18)..(19)..(20): Xaa is A or G
  MOD_RES (21)..(22)..(23)..(24): Xaa is A or G or absent
XXVPTRLEPISILYLXXXXXXXXXKFKYEDMVVESX

SEQ ID NO: 34805 - protein, 41 aa, Artificial Sequence
  Non-cyclic GFR-binding peptide
  MOD_RES (6)..(7)..(41): Xaa is C or S
  MOD_RES (21)..(22)..(23)..(24)..(25): Xaa is A or G
  MOD_RES (26)..(27)..(28)..(29): Xaa is A or G or absent
GIPEPXXVPEKMNAISILYFXXXXXXXXXLKKYRNMTVESX

SEQ ID NO: 34806 - protein, 34 aa, Artificial Sequence
  Non-cyclic GFR-binding peptide
  MOD_RES (1)..(33): Xaa is C or S
XTPTKMEPISMLYLNDKQQIIKFKYEGMVVDRXG

SEQ ID NO: 34807 - protein, 33 aa, Artificial Sequence
  Non-cyclic GFR-binding peptide
  MOD_RES (1)..(1): Xaa is C or S
  MOD_RES (15)..(16)..(17)..(18)..(19): Xaa is A or G
  MOD_RES (20)..(21)..(22)..(23): Xaa is A or G or absent
XVPTRLSATSILYYXXXXXXXXXLRKHRDMVVE

SEQ ID NO: 34808 - protein, 30 aa, Artificial Sequence
  Non-cyclic GFR-binding peptide
VPTRLSPISILYKDSANNVVLKYHYDMVVE

SEQ ID NO: 34809 - protein, 39 aa, Artificial Sequence
  Non-cyclic GFR-binding peptide
  MOD_RES (4)..(5)..(38): Xaa is C or S
  MOD_RES (19)..(20)..(21)..(22)..(23): Xaa is A or G
  MOD_RES (24)..(25)..(26)..(27): Xaa is A or G or absent
PSTXXAPVKTSATSMLYYXXXXXXXXXLRKHRMIVEEXG

SEQ ID NO: 34810 - protein, 32 aa, Artificial Sequence
  Non-cyclic GFR-binding peptide
  MOD_RES (14)..(15)..(16)..(17)..(18): Xaa is A or G
  MOD_RES (19)..(20)..(21)..(22): Xaa is A or G or absent
APVKTSPISMLYKXXXXXXXXXLKYHYMIVEE

SEQ ID NO: 34811 - protein, 33 aa, Artificial Sequence
  Non-cyclic GFR-binding peptide
  MOD_RES (14)..(15)..(16)..(17)..(18): Xaa is A or G
  MOD_RES (19)..(20)..(21)..(22): Xaa is A or G or absent
VPEKMSATSILYYXXXXXXXXXLRKHRNMTVES

SEQ ID NO: 34812 - protein, 42 aa, Artificial Sequence
  Non-cyclic GFR-binding peptide
  MOD_RES (6)..(7)..(39)..(41): Xaa is C or S
GSAGPXXTPTKMSPISMLYKNDKQQIILKYHYGMVVDRXGXS

SEQ ID NO: 34813 - protein, 34 aa, Artificial Sequence
  Non-cyclic GFR-binding peptide
  MOD_RES (34)..(34): Xaa is C or S
  MOD_RES (14)..(15)..(16)..(17)..(18): Xaa is A or G
  MOD_RES (19)..(20)..(21)..(22): Xaa is A or G or absent
VPEKMSPINILYFXXXXXXXXXYGKIPNMTVESX

SEQ ID NO: 34814 - protein, 37 aa, Artificial Sequence
  Non-cyclic GFR-binding peptide
  MOD_RES (3)..(4)..(36): Xaa is C or S
EPXXVPEKMNAISILYFDENKNVVLKKYRNMTVESXA

SEQ ID NO: 34815 - protein, 36 aa, Artificial Sequence
  Non-cyclic GFR-binding peptide
  MOD_RES (3)..(4)..(36): Xaa is C or S
EPXXVPEKMSPISILYKDENKNVVLKYHYNMTVESX

SEQ ID NO: 34816 - protein, 42 aa, Artificial Sequence
  Non-cyclic GFR-binding peptide
  MOD_RES (5)..(6)..(40)..(42): Xaa is C or S
  MOD_RES (20)..(21)..(22)..(23)..(24): Xaa is A or G
  MOD_RES (25)..(26)..(27)..(28): Xaa is A or G or absent
SAGPXXTPTKMEPISMLYLXXXXXXXXXKFKYEGMVVDRXGX

SEQ ID NO: 34817 - protein, 34 aa, Artificial Sequence
  Non-cyclic GFR-binding peptide
  MOD_RES (32)..(34): Xaa is C or S
VPEKMSATSILYYDENKNVVLRKHRNMTVESXAX

SEQ ID NO: 34818 - protein, 37 aa, Artificial Sequence
  Non-cyclic GFR-binding peptide
  MOD_RES (1)..(2)..(34)..(36): Xaa is C or S
XXVPEKMSATSILYYDENKNVVLRKHRNMTVESXAXR

SEQ ID NO: 34819 - protein, 38 aa, Artificial Sequence
  Non-cyclic GFR-binding peptide
  MOD_RES (3)..(4)..(38): Xaa is C or S
  MOD_RES (18)..(19)..(20)..(21)..(22): Xaa is A or G
  MOD_RES (23)..(24)..(25)..(26): Xaa is A or G or absent
KAXXVPTKLSATSILYYXXXXXXXXXLRKHRGMAVSEX

SEQ ID NO: 34820 - protein, 36 aa, Artificial Sequence
  Non-cyclic GFR-binding peptide
  MOD_RES (5)..(6): Xaa is C or S
SAAPXXVPQALSPINILYFVGRKPKVYGKIPMIVRS

SEQ ID NO: 34821 - protein, 38 aa, Artificial Sequence
  Non-cyclic GFR-binding peptide
  MOD_RES (2)..(3)..(36)..(38): Xaa is C or S
  MOD_RES (17)..(18)..(19)..(20)..(21): Xaa is A or G
  MOD_RES (22)..(23)..(24)..(25): Xaa is A or G or absent
TXXAPVKTEPISMLYLXXXXXXXXXKFKYEMIVEEXGX

SEQ ID NO: 34822 - protein, 37 aa, Artificial Sequence
  Non-cyclic GFR-binding peptide
  MOD_RES (3)..(4): Xaa is C or S
  MOD_RES (18)..(19)..(20)..(21)..(22): Xaa is A or G
  MOD_RES (23)..(24)..(25)..(26): Xaa is A or G or absent
EPXXVPEKMSATSILYYXXXXXXXXXLRKHRNMTVES

SEQ ID NO: 34823 - protein, 38 aa, Artificial Sequence
  Non-cyclic GFR-binding peptide
  MOD_RES (2)..(3)..(36)..(38): Xaa is C or S
  MOD_RES (17)..(18)..(19)..(20)..(21): Xaa is A or G
  MOD_RES (22)..(23)..(24)..(25): Xaa is A or G or absent
PXXVPQDLSPINILYFXXXXXXXXXYGKIPMVVKSXKX

SEQ ID NO: 34824 - protein, 43 aa, Artificial Sequence
  Non-cyclic GFR-binding peptide
  MOD_RES (5)..(6)..(40)..(42): Xaa is C or S
  MOD_RES (20)..(21)..(22)..(23)..(24): Xaa is A or G
  MOD_RES (25)..(26)..(27)..(28): Xaa is A or G or absent
SAGPXXTPTKMSATSMLYYXXXXXXXXXLRKHRGMVVDRXGXS

SEQ ID NO: 34825 - protein, 36 aa, Artificial Sequence
  Non-cyclic GFR-binding peptide
  MOD_RES (33)..(35): Xaa is C or S
  MOD_RES (14)..(15)..(16)..(17)..(18): Xaa is A or G
  MOD_RES (19)..(20)..(21)..(22): Xaa is A or G or absent
APVKTSPISMLYKXXXXXXXXXLKYHYMIVEEXGXL

SEQ ID NO: 34826 - protein, 44 aa, Artificial Sequence
  Non-cyclic GFR-binding peptide
  MOD_RES (6)..(7)..(41)..(43): Xaa is C or S
  MOD_RES (21)..(22)..(23)..(24)..(25): Xaa is A or G
  MOD_RES (26)..(27)..(28)..(29): Xaa is A or G or absent
GIPEPXXVPEKMNAISILYFXXXXXXXXXLKKYRNMTVESXAXR

SEQ ID NO: 34827 - protein, 40 aa, Artificial Sequence
  Non-cyclic GFR-binding peptide
  MOD_RES (6)..(7): Xaa is C or S
  MOD_RES (21)..(22)..(23)..(24)..(25): Xaa is A or G
  MOD_RES (26)..(27)..(28)..(29): Xaa is A or G or absent
HVPKPXXAPTKLEPISVLYLXXXXXXXXXKFKYENMVVRS

SEQ ID NO: 34828 - protein, 34 aa, Artificial Sequence
  Non-cyclic GFR-binding peptide
  MOD_RES (2)..(3): Xaa is C or S
TXXVPTRLSPISILYKDSANNVVLKYHYDMVVES

SEQ ID NO: 34829 - protein, 35 aa, Artificial Sequence
  Non-cyclic GFR-binding peptide
  MOD_RES (33)..(35): Xaa is C or S
  MOD_RES (14)..(15)..(16)..(17)..(18): Xaa is A or G
  MOD_RES (19)..(20)..(21)..(22): Xaa is A or G or absent
VPQDLSPINILYFXXXXXXXXXYGKIPMVVKSXKX

SEQ ID NO: 34830 - protein, 40 aa, Artificial Sequence
  Non-cyclic GFR-binding peptide
  MOD_RES (4)..(5)..(39): Xaa is C or S
  MOD_RES (19)..(20)..(21)..(22)..(23): Xaa is A or G
  MOD_RES (24)..(25)..(26)..(27): Xaa is A or G or absent
PEPXXVPEKMSATSILYYXXXXXXXXXLRKHRNMTVESXA

SEQ ID NO: 34831 - protein, 33 aa, Artificial Sequence
  Non-cyclic GFR-binding peptide
  MOD_RES (1)..(1): Xaa is C or S
  MOD_RES (15)..(16)..(17)..(18)..(19): Xaa is A or G
  MOD_RES (20)..(21)..(22)..(23): Xaa is A or G or absent
XVPQALSPINILYFXXXXXXXXXYGKIPMIVRS

SEQ ID NO: 34832 - protein, 31 aa, Artificial Sequence
  Non-cyclic GFR-binding peptide
VPTRLSATSILYYDSANNVVLRKHRDMVVES

SEQ ID NO: 34833 - protein, 39 aa, Artificial Sequence
  Non-cyclic GFR-binding peptide
  MOD_RES (4)..(5)..(39): Xaa is C or S
  MOD_RES (19)..(20)..(21)..(22)..(23): Xaa is A or G
  MOD_RES (24)..(25)..(26)..(27): Xaa is A or G or absent
PEPXXVPEKMNAISILYFXXXXXXXXXLKKYRNMTVESX

SEQ ID NO: 34834 - protein, 36 aa, Artificial Sequence
  Non-cyclic GFR-binding peptide
  MOD_RES (1)..(35): Xaa is C or S
  MOD_RES (15)..(16)..(17)..(18)..(19): Xaa is A or G
  MOD_RES (20)..(21)..(22)..(23): Xaa is A or G or absent
XTPTKMEPISMLYLXXXXXXXXXKFKYEGMVVDRXG

SEQ ID NO: 34835 - protein, 43 aa, Artificial Sequence
  Non-cyclic GFR-binding peptide
  MOD_RES (6)..(7)..(40)..(42): Xaa is C or S
  MOD_RES (21)..(22)..(23)..(24)..(25): Xaa is A or G
  MOD_RES (26)..(27)..(28)..(29): Xaa is A or G or absent
RVPSTXXAPVKTEPISMLYLXXXXXXXXXKFKYEMIVEEXGXL

SEQ ID NO: 34836 - protein, 32 aa, Artificial Sequence
  Non-cyclic GFR-binding peptide
  MOD_RES (14)..(15)..(16)..(17)..(18): Xaa is A or G
  MOD_RES (19)..(20)..(21)..(22): Xaa is A or G or absent
VPEKMSPINILYFXXXXXXXXXYGKIPNMTVE

SEQ ID NO: 34837 - protein, 39 aa, Artificial Sequence
  Non-cyclic GFR-binding peptide
  MOD_RES (6)..(7)..(38): Xaa is C or S
RVPSTXXAPVKTEPISMLYLDNGRVLLKFKYEMIVEEXG

SEQ ID NO: 34838 - protein, 38 aa, Artificial Sequence
  Non-cyclic GFR-binding peptide
  MOD_RES (5)..(6)..(38): Xaa is C or S
IPEPXXVPEKMSATSILYYDENKNVVLRKHRNMTVESX

SEQ ID NO: 34839 - protein, 30 aa, Artificial Sequence; identical to SEQ ID NO: 886
  Non-cyclic GFR-binding peptide

SEQ ID NO: 34840 - protein, 38 aa, Artificial Sequence
  Non-cyclic GFR-binding peptide
  MOD_RES (2)..(3)..(35)..(37): Xaa is C or S
PXXVPEKMEPISILYLDENKNVVKFKYENMTVESXAXR

SEQ ID NO: 34841 - protein, 38 aa, Artificial Sequence
  Non-cyclic GFR-binding peptide
  MOD_RES (1)..(2)..(35)..(37): Xaa is C or S
  MOD_RES (16)..(17)..(18)..(19)..(20): Xaa is A or G
  MOD_RES (21)..(22)..(23)..(24): Xaa is A or G or absent
XXAPVKTSPISMLYKXXXXXXXXXLKYHYMIVEEXGXL

SEQ ID NO: 34842 - protein, 32 aa, Artificial Sequence
  Non-cyclic GFR-binding peptide
  MOD_RES (14)..(15)..(16)..(17)..(18): Xaa is A or G
  MOD_RES (19)..(20)..(21)..(22): Xaa is A or G or absent
VPEKMEPISILYLXXXXXXXXXKFKYENMTVE

SEQ ID NO: 34843 - protein, 37 aa, Artificial Sequence
  Non-cyclic GFR-binding peptide
  MOD_RES (3)..(4): Xaa is C or S
  MOD_RES (18)..(19)..(20)..(21)..(22): Xaa is A or G
  MOD_RES (23)..(24)..(25)..(26): Xaa is A or G or absent
ASXXVPARLSATSILYYXXXXXXXXXLRKHRDMVVEA

SEQ ID NO: 34844 - protein, 33 aa, Artificial Sequence
  Non-cyclic GFR-binding peptide
  MOD_RES (1)..(1): Xaa is C or S
  MOD_RES (15)..(16)..(17)..(18)..(19): Xaa is A or G
  MOD_RES (20)..(21)..(22)..(23): Xaa is A or G or absent
XVPQDLSPINILYFXXXXXXXXXYGKIPMVVKS

SEQ ID NO: 34845 - protein, 38 aa, Artificial Sequence
  Non-cyclic GFR-binding peptide
  MOD_RES (4)..(5)..(37): Xaa is C or S
PPTXXVPTRLEPISILYLDSANNVVKFKYEDMVVESXG

SEQ ID NO: 34846 - protein, 35 aa, Artificial Sequence
  Non-cyclic GFR-binding peptide
  MOD_RES (1)..(2)..(34): Xaa is C or S
XXVPEKMEPISILYLDENKNVVKFKYENMTVESXA

SEQ ID NO: 34847 - protein, 32 aa, Artificial Sequence
  Non-cyclic GFR-binding peptide
  MOD_RES (1)..(1): Xaa is C or S
XTPTKMEPISMLYLNDKQQIIKFKYEGMVVDR

SEQ ID NO: 34848 - protein, 32 aa, Artificial Sequence
  Non-cyclic GFR-binding peptide
  MOD_RES (14)..(15)..(16)..(17)..(18): Xaa is A or G
  MOD_RES (19)..(20)..(21)..(22): Xaa is A or G or absent
VSQDLSPINILYFXXXXXXXXXYGKIPMIVKS

SEQ ID NO: 34849 - protein, 38 aa, Artificial Sequence
  Non-cyclic GFR-binding peptide
  MOD_RES (4)..(5): Xaa is C or S
  MOD_RES (19)..(20)..(21)..(22)..(23): Xaa is A or G
  MOD_RES (24)..(25)..(26)..(27): Xaa is A or G or absent
AGPXXTPTKMEPISMLYLXXXXXXXXXKFKYEGMVVDR

SEQ ID NO: 34850 - protein, 34 aa, Artificial Sequence
  Non-cyclic GFR-binding peptide
  MOD_RES (2)..(3)..(34): Xaa is C or S
PXXVSQDLSPINILYFIGKTPKIYGKIPMIVKSX

SEQ ID NO: 34851 - protein, 38 aa, Artificial Sequence
  Non-cyclic GFR-binding peptide
  MOD_RES (6)..(7): Xaa is C or S
GIPEPXXVPEKMSPISILYKDENKNVVLKYHYNMTVES

SEQ ID NO: 34852 - protein, 33 aa, Artificial Sequence
  Non-cyclic GFR-binding peptide
  MOD_RES (1)..(33): Xaa is C or S
XVPEKMSPISILYKDENKNVVLKYHYNMTVESX

SEQ ID NO: 34853 - protein, 38 aa, Artificial Sequence
  Non-cyclic GFR-binding peptide
  MOD_RES (3)..(4)..(37): Xaa is C or S
  MOD_RES (18)..(19)..(20)..(21)..(22): Xaa is A or G
  MOD_RES (23)..(24)..(25)..(26): Xaa is A or G or absent
STXXAPVKTEPISMLYLXXXXXXXXXKFKYEMIVEEXG

SEQ ID NO: 34854 - protein, 40 aa, Artificial Sequence
  Non-cyclic GFR-binding peptide
  MOD_RES (6)..(7)..(39): Xaa is C or S
KASKAXXVPTKLSATSILYYDKGVVTYLRKHRGMAVSEXG

SEQ ID NO: 34855 - protein, 31 aa, Artificial Sequence
  Non-cyclic GFR-binding peptide
VPEKMSATSILYYDENKNVVLRKHRNMTVES

SEQ ID NO: 34856 - protein, 39 aa, Artificial Sequence
  Non-cyclic GFR-binding peptide
  MOD_RES (6)..(7)..(39): Xaa is C or S
HVPKPXXAPTKLSATSVLYYDDSSNVILRKHRNMVVRSX

SEQ ID NO: 34857 - protein, 36 aa, Artificial Sequence
  Non-cyclic GFR-binding peptide
  MOD_RES (1)..(33)..(35): Xaa is C or S
XVPEKMSPINILYFDENKNVVYGKIPNMTVESXAXR

SEQ ID NO: 34858 - protein, 39 aa, Artificial Sequence
  Non-cyclic GFR-binding peptide
  MOD_RES (4)..(5)..(37)..(39): Xaa is C or S
AGPXXTPTKMEPISMLYLNDKQQIIKFKYEGMVVDRXGX

SEQ ID NO: 34859 - protein, 37 aa, Artificial Sequence
  Non-cyclic GFR-binding peptide
  MOD_RES (4)..(5): Xaa is C or S
  MOD_RES (19)..(20)..(21)..(22)..(23): Xaa is A or G
  MOD_RES (24)..(25)..(26)..(27): Xaa is A or G or absent
PEPXXVPEKMSPISILYKXXXXXXXXXLKYHYNMTVE

SEQ ID NO: 34860 - protein, 33 aa, Artificial Sequence
  Non-cyclic GFR-binding peptide
  MOD_RES (1)..(1): Xaa is C or S
  MOD_RES (15)..(16)..(17)..(18)..(19): Xaa is A or G
  MOD_RES (20)..(21)..(22)..(23): Xaa is A or G or absent
XVPEKMSPINILYFXXXXXXXXXYGKIPNMTVE

SEQ ID NO: 34861 - protein, 40 aa, Artificial Sequence
  Non-cyclic GFR-binding peptide
  MOD_RES (5)..(6)..(37)..(39): Xaa is C or S
SAAPXXVPQALSPINILYFVGRKPKVYGKIPMIVRSXKXS

SEQ ID NO: 34862 - protein, 39 aa, Artificial Sequence
  Non-cyclic GFR-binding peptide
  MOD_RES (6)..(7): Xaa is C or S
  MOD_RES (21)..(22)..(23)..(24)..(25): Xaa is A or G
  MOD_RES (26)..(27)..(28)..(29): Xaa is A or G or absent
HVPKPXXAPTKLEPISVLYLXXXXXXXXXKFKYENMVVR

SEQ ID NO: 34863 - protein, 37 aa, Artificial Sequence
  Non-cyclic GFR-binding peptide
  MOD_RES (3)..(4)..(35)..(37): Xaa is C or S
SPXXVPQDLSPINILYFVGRTPKVYGKIPMVVKSXKX

SEQ ID NO: 34864 - protein, 36 aa, Artificial Sequence
  Non-cyclic GFR-binding peptide
  MOD_RES (5)..(6): Xaa is C or S
ASKAXXVPTKLSATSILYYDKGVVTYLRKHRGMAVS

SEQ ID NO: 34865 - protein, 35 aa, Artificial Sequence
  Non-cyclic GFR-binding peptide
  MOD_RES (33)..(35): Xaa is C or S
  MOD_RES (14)..(15)..(16)..(17)..(18): Xaa is A or G
  MOD_RES (19)..(20)..(21)..(22): Xaa is A or G or absent
APVKTSATSMLYYXXXXXXXXXLRKHRMIVEEXGX

SEQ ID NO: 34866 - protein, 38 aa, Artificial Sequence
  Non-cyclic GFR-binding peptide
  MOD_RES (4)..(5)..(38): Xaa is C or S
  MOD_RES (19)..(20)..(21)..(22)..(23): Xaa is A or G
  MOD_RES (24)..(25)..(26)..(27): Xaa is A or G or absent
ASPXXVPQDLSPINILYFXXXXXXXXXYGKIPMVVKSX

SEQ ID NO: 34867 - protein, 36 aa, Artificial Sequence
  Non-cyclic GFR-binding peptide
  MOD_RES (4)..(5): Xaa is C or S
PEPXXVPEKMSATSILYYDENKNVVLRKHRNMTVES

SEQ ID NO: 34868 - protein, 36 aa, Artificial Sequence
  Non-cyclic GFR-binding peptide
  MOD_RES (2)..(3): Xaa is C or S
  MOD_RES (17)..(18)..(19)..(20)..(21): Xaa is A or G
  MOD_RES (22)..(23)..(24)..(25): Xaa is A or G or absent
TXXVPTRLEPISILYLXXXXXXXXXKFKYEDMVVES

SEQ ID NO: 34869 - protein, 34 aa, Artificial Sequence
  Non-cyclic GFR-binding peptide
  MOD_RES (32)..(34): Xaa is C or S
VPTRLSPISILYKDSANNVVLKYHYDMVVESXGX

SEQ ID NO: 34870 - protein, 35 aa, Artificial Sequence
  Non-cyclic GFR-binding peptide
  MOD_RES (1)..(35): Xaa is C or S
  MOD_RES (15)..(16)..(17)..(18)..(19): Xaa is A or G
  MOD_RES (20)..(21)..(22)..(23): Xaa is A or G or absent
XVPEKMSPINILYFXXXXXXXXXYGKIPNMTVESX

SEQ ID NO: 34871 - protein, 36 aa, Artificial Sequence
  Non-cyclic GFR-binding peptide
  MOD_RES (4)..(5)..(36): Xaa is C or S
ASPXXVPQDLSPINILYFVGRTPKVYGKIPMVVKSX

SEQ ID NO: 34872 - protein, 38 aa, Artificial Sequence
  Non-cyclic GFR-binding peptide
  MOD_RES (5)..(6): Xaa is C or S
  MOD_RES (20)..(21)..(22)..(23)..(24): Xaa is A or G
  MOD_RES (25)..(26)..(27)..(28): Xaa is A or G or absent
VPSTXXAPVKTSATSMLYYXXXXXXXXXLRKHRMIVEE

SEQ ID NO: 34873 - protein, 36 aa, Artificial Sequence
  Non-cyclic GFR-binding peptide
  MOD_RES (1)..(2)..(34)..(36): Xaa is C or S
XXVPEKMNAISILYFDENKNVVLKKYRNMTVESXAX

SEQ ID NO: 34874 - protein, 37 aa, Artificial Sequence
  Non-cyclic GFR-binding peptide
  MOD_RES (6)..(7): Xaa is C or S
HVPKPXXAPTKLSPISVLYKDDSSNVILKYHYNMVVR

SEQ ID NO: 34875 - protein, 34 aa, Artificial Sequence
  Non-cyclic GFR-binding peptide
  MOD_RES (32)..(34): Xaa is C or S
VPTRLEPISILYLDSANNVVKFKYEDMVVESXGX

SEQ ID NO: 34876 - protein, 37 aa, Artificial Sequence
  Non-cyclic GFR-binding peptide
  MOD_RES (34)..(36): Xaa is C or S
  MOD_RES (14)..(15)..(16)..(17)..(18): Xaa is A or G
  MOD_RES (19)..(20)..(21)..(22): Xaa is A or G or absent
VPTKLSATSILYYXXXXXXXXXLRKHRGMAVSEXGXR

SEQ ID NO: 34877 - protein, 30 aa, Artificial Sequence
  Non-cyclic GFR-binding peptide
VPEKMNAISILYFDENKNVVLKKYRNMTVE

SEQ ID NO: 34878 - protein, 36 aa, Artificial Sequence
  Non-cyclic GFR-binding peptide
  MOD_RES (2)..(3)..(36): Xaa is C or S
  MOD_RES (17)..(18)..(19)..(20)..(21): Xaa is A or G
  MOD_RES (22)..(23)..(24)..(25): Xaa is A or G or absent
TXXAPVKTEPISMLYLXXXXXXXXXKFKYEMIVEEX

SEQ ID NO: 34879 - protein, 35 aa, Artificial Sequence
  Non-cyclic GFR-binding peptide
  MOD_RES (2)..(3)..(34): Xaa is C or S
PXXVSQDLSPINILYFIGKTPKIYGKIPMIVKSXK

SEQ ID NO: 34880 - protein, 42 aa, Artificial Sequence
  Non-cyclic GFR-binding peptide
  MOD_RES (6)..(7)..(41): Xaa is C or S
  MOD_RES (21)..(22)..(23)..(24)..(25): Xaa is A or G
  MOD_RES (26)..(27)..(28)..(29): Xaa is A or G or absent
KASKAXXVPTKLSATSILYYXXXXXXXXXLRKHRGMAVSEXG

SEQ ID NO: 34881 - protein, 31 aa, Artificial Sequence
  Non-cyclic GFR-binding peptide
  MOD_RES (1)..(1): Xaa is C or S
XVSQDLSPINILYFIGKTPKIYGKIPMIVKS

SEQ ID NO: 34882 - protein, 33 aa, Artificial Sequence
  Non-cyclic GFR-binding peptide
  MOD_RES (32)..(32): Xaa is C or S
VPTRLEPISILYLDSANNVVKFKYEDMVVESXG

SEQ ID NO: 34883 - protein, 34 aa, Artificial Sequence
  Non-cyclic GFR-binding peptide
  MOD_RES (1)..(2)..(34): Xaa is C or S
XXVPTKLSATSILYYDKGVVTYLRKHRGMAVSEX

SEQ ID NO: 34884 - protein, 33 aa, Artificial Sequence
  Non-cyclic GFR-binding peptide
  MOD_RES (14)..(15)..(16)..(17)..(18): Xaa is A or G
  MOD_RES (19)..(20)..(21)..(22): Xaa is A or G or absent
VPEKMSPINILYFXXXXXXXXXYGKIPNMTVES

SEQ ID NO: 34885 - protein, 38 aa, Artificial Sequence
  Non-cyclic GFR-binding peptide
  MOD_RES (5)..(6)..(38): Xaa is C or S
TPPTXXVPTRLSATSILYYDSANNVVLRKHRDMVVESX

SEQ ID NO: 34886 - protein, 35 aa, Artificial Sequence
  Non-cyclic GFR-binding peptide
  MOD_RES (32)..(34): Xaa is C or S
TPTKMEPISMLYLNDKQQIIKFKYEGMVVDRXGXS

SEQ ID NO: 34887 - protein, 40 aa, Artificial Sequence
  Non-cyclic GFR-binding peptide
  MOD_RES (5)..(6)..(40): Xaa is C or S
  MOD_RES (20)..(21)..(22)..(23)..(24): Xaa is A or G
  MOD_RES (25)..(26)..(27)..(28): Xaa is A or G or absent
APASXXVPARLSATSILYYXXXXXXXXXLRKHRDMVVEAX

SEQ ID NO: 34888 - protein, 40 aa, Artificial Sequence
  Non-cyclic GFR-binding peptide
  MOD_RES (4)..(5)..(39): Xaa is C or S
  MOD_RES (19)..(20)..(21)..(22)..(23): Xaa is A or G
  MOD_RES (24)..(25)..(26)..(27): Xaa is A or G or absent
PEPXXVPEKMSPISILYKXXXXXXXXXLKYHYNMTVESXA

SEQ ID NO: 34889 - protein, 41 aa, Artificial Sequence
  Non-cyclic GFR-binding peptide
  MOD_RES (5)..(6)..(38)..(40): Xaa is C or S
TPPTXXVPTRLSATSILYYDSANNVVLRKHRDMVVESXGXR

SEQ ID NO: 34890 - protein, 35 aa, Artificial Sequence
  Non-cyclic GFR-binding peptide
  MOD_RES (32)..(34): Xaa is C or S
TPTKMSPISMLYKNDKQQIILKYHYGMVVDRXGXS

SEQ ID NO: 34891 - protein, 39 aa, Artificial Sequence
  Non-cyclic GFR-binding peptide
  MOD_RES (3)..(4)..(37)..(39): Xaa is C or S
  MOD_RES (18)..(19)..(20)..(21)..(22): Xaa is A or G
  MOD_RES (23)..(24)..(25)..(26): Xaa is A or G or absent
APXXVPQALSPINILYFXXXXXXXXXYGKIPMIVRSXKX

SEQ ID NO: 34892 - protein, 39 aa, Artificial Sequence
  Non-cyclic GFR-binding peptide
  MOD_RES (5)..(6)..(37)..(39): Xaa is C or S
VPSTXXAPVKTSPISMLYKDNGRVLLLKYHYMIVEEXGX

SEQ ID NO: 34893 - protein, 31 aa, Artificial Sequence
  Non-cyclic GFR-binding peptide
  MOD_RES (1)..(1): Xaa is C or S
XVPARLSATSILYYDAANNVVLRKHRDMVVE

SEQ ID NO: 34894 - protein, 42 aa, Artificial Sequence
  Non-cyclic GFR-binding peptide
  MOD_RES (4)..(5)..(39)..(41): Xaa is C or S
  MOD_RES (19)..(20)..(21)..(22)..(23): Xaa is A or G
  MOD_RES (24)..(25)..(26)..(27): Xaa is A or G or absent
PPTXXVPTRLEPISILYLXXXXXXXXXKFKYEDMVVESXGXR

SEQ ID NO: 34895 - protein, 38 aa, Artificial Sequence
  Non-cyclic GFR-binding peptide
  MOD_RES (3)..(4)..(36)..(38): Xaa is C or S
PTXXVPTRLEPISILYLDSANNVVKFKYEDMVVESXGX

SEQ ID NO: 34896 - protein, 36 aa, Artificial Sequence
  Non-cyclic GFR-binding peptide
  MOD_RES (1)..(34)..(36): Xaa is C or S
  MOD_RES (15)..(16)..(17)..(18)..(19): Xaa is A or G
  MOD_RES (20)..(21)..(22)..(23): Xaa is A or G or absent
XVPQDLSPINILYFXXXXXXXXXYGKIPMVVKSXKX

SEQ ID NO: 34897 - protein, 35 aa, Artificial Sequence
  Non-cyclic GFR-binding peptide
  MOD_RES (2)..(3)..(35): Xaa is C or S
AXXVPTKLSATSILYYDKGVVTYLRKHRGMAVSEX

SEQ ID NO: 34898 - protein, 42 aa, Artificial Sequence
  Non-cyclic GFR-binding peptide
  MOD_RES (5)..(6)..(40)..(42): Xaa is C or S
  MOD_RES (20)..(21)..(22)..(23)..(24): Xaa is A or G
  MOD_RES (25)..(26)..(27)..(28): Xaa is A or G or absent
SAGPXXTPTKMSATSMLYYXXXXXXXXXLRKHRGMVVDRXGX

SEQ ID NO: 34899 - protein, 38 aa, Artificial Sequence
  Non-cyclic GFR-binding peptide
  MOD_RES (4)..(5): Xaa is C or S
  MOD_RES (19)..(20)..(21)..(22)..(23): Xaa is A or G
  MOD_RES (24)..(25)..(26)..(27): Xaa is A or G or absent
SKAXXVPTKLSATSILYYXXXXXXXXXLRKHRGMAVSE

SEQ ID NO: 34900 - protein, 37 aa, Artificial Sequence
  Non-cyclic GFR-binding peptide
  MOD_RES (2)..(3)..(34)..(36): Xaa is C or S
PXXVPQALSPINILYFVGRKPKVYGKIPMIVRSXKXS

SEQ ID NO: 34901 - protein, 34 aa, Artificial Sequence
  Non-cyclic GFR-binding peptide
  MOD_RES (31)..(33): Xaa is C or S
APVKTSPISMLYKDNGRVLLLKYHYMIVEEXGXL

SEQ ID NO: 34902 - protein, 39 aa, Artificial Sequence
  Non-cyclic GFR-binding peptide
  MOD_RES (4)..(5)..(37)..(39): Xaa is C or S
PEPXXVPEKMSPINILYFDENKNVVYGKIPNMTVESXAX

SEQ ID NO: 34903 - protein, 38 aa, Artificial Sequence
  Non-cyclic GFR-binding peptide
  MOD_RES (3)..(4)..(36)..(38): Xaa is C or S
EPXXVPEKMSATSILYYDENKNVVLRKHRNMTVESXAX

SEQ ID NO: 34904 - protein, 41 aa, Artificial Sequence
  Non-cyclic GFR-binding peptide
  MOD_RES (5)..(6)..(40): Xaa is C or S
  MOD_RES (20)..(21)..(22)..(23)..(24): Xaa is A or G
  MOD_RES (25)..(26)..(27)..(28): Xaa is A or G or absent
ASKAXXVPTKLSATSILYYXXXXXXXXXLRKHRGMAVSEXG

SEQ ID NO: 34905 - protein, 37 aa, Artificial Sequence
  Non-cyclic GFR-binding peptide
  MOD_RES (6)..(7): Xaa is C or S
RVPSTXXAPVKTSPISMLYKDNGRVLLLKYHYMIVEE

SEQ ID NO: 34906 - protein, 33 aa, Artificial Sequence
  Non-cyclic GFR-binding peptide
  MOD_RES (1)..(33): Xaa is C or S
XTPTKMEPISMLYLNDKQQIIKFKYEGMVVDRX

SEQ ID NO: 34907 - protein, 32 aa, Artificial Sequence
  Non-cyclic GFR-binding peptide
  MOD_RES (32)..(32): Xaa is C or S
VPEKMSPISILYKDENKNVVLKYHYNMTVESX

SEQ ID NO: 34908 - protein, 35 aa, Artificial Sequence
  Non-cyclic GFR-binding peptide
  MOD_RES (4)..(5): Xaa is C or S
PPTXXVPTRLEPISILYLDSANNVVKFKYEDMVVE

SEQ ID NO: 34909 - protein, 37 aa, Artificial Sequence
  Non-cyclic GFR-binding peptide
  MOD_RES (4)..(5): Xaa is C or S
  MOD_RES (19)..(20)..(21)..(22)..(23): Xaa is A or G
  MOD_RES (24)..(25)..(26)..(27): Xaa is A or G or absent
PPTXXVPTRLSATSILYYXXXXXXXXXLRKHRDMVVE

SEQ ID NO: 34910 - protein, 43 aa, Artificial Sequence
  Non-cyclic GFR-binding peptide
  MOD_RES (5)..(6)..(40)..(42): Xaa is C or S
  MOD_RES (20)..(21)..(22)..(23)..(24): Xaa is A or G
  MOD_RES (25)..(26)..(27)..(28): Xaa is A or G or absent
ASKAXXVPTKLSATSILYYXXXXXXXXXLRKHRGMAVSEXGXR

SEQ ID NO: 34911 - protein, 36 aa, Artificial Sequence
  Non-cyclic GFR-binding peptide
  MOD_RES (34)..(36): Xaa is C or S
  MOD_RES (14)..(15)..(16)..(17)..(18): Xaa is A or G
  MOD_RES (19)..(20)..(21)..(22): Xaa is A or G or absent
VPTKLSATSILYYXXXXXXXXXLRKHRGMAVSEXGX

SEQ ID NO: 34912 - protein, 41 aa, Artificial Sequence
  Non-cyclic GFR-binding peptide
  MOD_RES (5)..(6)..(38)..(40): Xaa is C or S
IPEPXXVPEKMSATSILYYDENKNVVLRKHRNMTVESXAXR

SEQ ID NO: 34913 - protein, 39 aa, Artificial Sequence
  Non-cyclic GFR-binding peptide
  MOD_RES (4)..(5)..(39): Xaa is C or S
  MOD_RES (19)..(20)..(21)..(22)..(23): Xaa is A or G
  MOD_RES (24)..(25)..(26)..(27): Xaa is A or G or absent
AGPXXTPTKMEPISMLYLXXXXXXXXXKFKYEGMVVDRX

SEQ ID NO: 34914 - protein, 38 aa, Artificial Sequence
  Non-cyclic GFR-binding peptide
  MOD_RES (6)..(7): Xaa is C or S
AAPASXXVPARLSATSILYYDAANNVVLRKHRDMVVEA

SEQ ID NO: 34915 - protein, 37 aa, Artificial Sequence
  Non-cyclic GFR-binding peptide
  MOD_RES (2)..(3)..(37): Xaa is C or S
  MOD_RES (17)..(18)..(19)..(20)..(21): Xaa is A or G
  MOD_RES (22)..(23)..(24)..(25): Xaa is A or G or absent
TXXVPTRLSATSILYYXXXXXXXXXLRKHRDMVVESX

SEQ ID NO: 34916 - protein, 36 aa, Artificial Sequence
  Non-cyclic GFR-binding peptide
  MOD_RES (1)..(34)..(36): Xaa is C or S
  MOD_RES (15)..(16)..(17)..(18)..(19): Xaa is A or G
  MOD_RES (20)..(21)..(22)..(23): Xaa is A or G or absent
XAPVKTSATSMLYYXXXXXXXXXLRKHRMIVEEXGX

SEQ ID NO: 34917 - protein, 38 aa, Artificial Sequence
  Non-cyclic GFR-binding peptide
  MOD_RES (4)..(5): Xaa is C or S
  MOD_RES (19)..(20)..(21)..(22)..(23): Xaa is A or G
  MOD_RES (24)..(25)..(26)..(27): Xaa is A or G or absent
PPTXXVPTRLSPISILYKXXXXXXXXXLKYHYDMVVES

SEQ ID NO: 34918 - protein, 39 aa, Artificial Sequence
  Non-cyclic GFR-binding peptide
  MOD_RES (3)..(4)..(37)..(39): Xaa is C or S
  MOD_RES (18)..(19)..(20)..(21)..(22): Xaa is A or G
  MOD_RES (23)..(24)..(25)..(26): Xaa is A or G or absent
SPXXVPQDLSPINILYFXXXXXXXXXYGKIPMVVKSXKX

SEQ ID NO: 34919 - protein, 39 aa, Artificial Sequence
  Non-cyclic GFR-binding peptide
  MOD_RES (4)..(5)..(38): Xaa is C or S
  MOD_RES (19)..(20)..(21)..(22)..(23): Xaa is A or G
  MOD_RES (24)..(25)..(26)..(27): Xaa is A or G or absent
ASPXXVSQDLSPINILYFXXXXXXXXXYGKIPMIVKSXK

SEQ ID NO: 34920 - protein, 36 aa, Artificial Sequence
  Non-cyclic GFR-binding peptide
  MOD_RES (2)..(3)..(36): Xaa is C or S
  MOD_RES (17)..(18)..(19)..(20)..(21): Xaa is A or G
  MOD_RES (22)..(23)..(24)..(25): Xaa is A or G or absent
PXXVPQDLSPINILYFXXXXXXXXXYGKIPMVVKSX

SEQ ID NO: 34921 - protein, 39 aa, Artificial Sequence
  Non-cyclic GFR-binding peptide
  MOD_RES (6)..(7)..(39): Xaa is C or S
KASKAXXVPTKLSATSILYYDKGVVTYLRKHRGMAVSEX

SEQ ID NO: 34922 - protein, 40 aa, Artificial Sequence
  Non-cyclic GFR-binding peptide
  MOD_RES (2)..(3)..(37)..(39): Xaa is C or S
  MOD_RES (17)..(18)..(19)..(20)..(21): Xaa is A or G
  MOD_RES (22)..(23)..(24)..(25): Xaa is A or G or absent
PXXVPEKMSPINILYFXXXXXXXXXYGKIPNMTVESXAXR

SEQ ID NO: 34923 - protein, 39 aa, Artificial Sequence
  Non-cyclic GFR-binding peptide
  MOD_RES (4)..(5)..(36)..(38): Xaa is C or S
PSTXXAPVKTEPISMLYLDNGRVLLKFKYEMIVEEXGXL

SEQ ID NO: 34924 - protein, 40 aa, Artificial Sequence
  Non-cyclic GFR-binding peptide
  MOD_RES (4)..(5)..(37)..(39): Xaa is C or S
PPTXXVPTRLEPISILYLDSANNVVKFKYEDMVVESXGXR

SEQ ID NO: 34925 - protein, 32 aa, Artificial Sequence
  Non-cyclic GFR-binding peptide
  MOD_RES (32)..(32): Xaa is C or S
VPEKMNAISILYFDENKNVVLKKYRNMTVESX

SEQ ID NO: 34926 - protein, 34 aa, Artificial Sequence
  Non-cyclic GFR-binding peptide
  MOD_RES (1)..(32)..(34): Xaa is C or S
XVPQDLSPINILYFVGRTPKVYGKIPMVVKSXKX

SEQ ID NO: 34927 - protein, 39 aa, Artificial Sequence
  Non-cyclic GFR-binding peptide
  MOD_RES (6)..(7)..(38): Xaa is C or S
ASASPXXVSQDLSPINILYFIGKTPKIYGKIPMIVKSXK

SEQ ID NO: 34928 - protein, 37 aa, Artificial Sequence
  Non-cyclic GFR-binding peptide
  MOD_RES (1)..(2)..(34)..(36): Xaa is C or S
XXVPTRLSATSILYYDSANNVVLRKHRDMVVESXGXR

SEQ ID NO: 34929 - protein, 42 aa, Artificial Sequence
  Non-cyclic GFR-binding peptide
  MOD_RES (4)..(5)..(39)..(41): Xaa is C or S
  MOD_RES (19)..(20)..(21)..(22)..(23): Xaa is A or G
  MOD_RES (24)..(25)..(26)..(27): Xaa is A or G or absent
AGPXXTPTKMSATSMLYYXXXXXXXXXLRKHRGMVVDRXGXS

SEQ ID NO: 34930 - protein, 38 aa, Artificial Sequence
  Non-cyclic GFR-binding peptide
  MOD_RES (2)..(3)..(35)..(37): Xaa is C or S
PXXVPEKMSPISILYKDENKNVVLKYHYNMTVESXAXR

SEQ ID NO: 34931 - protein, 39 aa, Artificial Sequence
  Non-cyclic GFR-binding peptide
  MOD_RES (2)..(3)..(37)..(39): Xaa is C or S
  MOD_RES (17)..(18)..(19)..(20)..(21): Xaa is A or G
  MOD_RES (22)..(23)..(24)..(25): Xaa is A or G or absent
PXXVPEKMNAISILYFXXXXXXXXXLKKYRNMTVESXAX

SEQ ID NO: 34932 - protein, 33 aa, Artificial Sequence
  Non-cyclic GFR-binding peptide
  MOD_RES (32)..(32): Xaa is C or S
VPEKMSPINILYFDENKNVVYGKIPNMTVESXA

SEQ ID NO: 34933 - protein, 37 aa, Artificial Sequence
  Non-cyclic GFR-binding peptide
  MOD_RES (5)..(6)..(37): Xaa is C or S
VPSTXXAPVKTEPISMLYLDNGRVLLKFKYEMIVEEX

SEQ ID NO: 34934 - protein, 40 aa, Artificial Sequence
  Non-cyclic GFR-binding peptide
  MOD_RES (4)..(5)..(38)..(40): Xaa is C or S
  MOD_RES (19)..(20)..(21)..(22)..(23): Xaa is A or G
  MOD_RES (24)..(25)..(26)..(27): Xaa is A or G or absent
ASPXXVPQDLSPINILYFXXXXXXXXXYGKIPMVVKSXKX

SEQ ID NO: 34935 - protein, 36 aa, Artificial Sequence
  Non-cyclic GFR-binding peptide
  MOD_RES (1)..(34)..(36): Xaa is C or S
  MOD_RES (15)..(16)..(17)..(18)..(19): Xaa is A or G
  MOD_RES (20)..(21)..(22)..(23): Xaa is A or G or absent
XAPVKTEPISMLYLXXXXXXXXXKFKYEMIVEEXGX

SEQ ID NO: 34936 - protein, 40 aa, Artificial Sequence
  Non-cyclic GFR-binding peptide
  MOD_RES (4)..(5)..(39): Xaa is C or S
  MOD_RES (19)..(20)..(21)..(22)..(23): Xaa is A or G
  MOD_RES (24)..(25)..(26)..(27): Xaa is A or G or absent
SKAXXVPTKLSATSILYYXXXXXXXXXLRKHRGMAVSEXG

SEQ ID NO: 34937 - protein, 34 aa, Artificial Sequence
  Non-cyclic GFR-binding peptide
  MOD_RES (1)..(34): Xaa is C or S
  MOD_RES (15)..(16)..(17)..(18)..(19): Xaa is A or G
  MOD_RES (20)..(21)..(22)..(23): Xaa is A or G or absent
XVSQDLSPINILYFXXXXXXXXXYGKIPMIVKSX

SEQ ID NO: 34938 - protein, 32 aa, Artificial Sequence
  Non-cyclic GFR-binding peptide
  MOD_RES (1)..(2): Xaa is C or S
XXVPARLSATSILYYDAANNVVLRKHRDMVVE

SEQ ID NO: 34939 - protein, 31 aa, Artificial Sequence
  Non-cyclic GFR-binding peptide
  MOD_RES (1)..(1): Xaa is C or S
XAPVKTSPISMLYKDNGRVLLLKYHYMIVEE

SEQ ID NO: 34940 - protein, 37 aa, Artificial Sequence
  Non-cyclic GFR-binding peptide
  MOD_RES (3)..(4)..(36): Xaa is C or S
EPXXVPEKMSPINILYFDENKNVVYGKIPNMTVESXA

SEQ ID NO: 34941 - protein, 41 aa, Artificial Sequence
  Non-cyclic GFR-binding peptide
  MOD_RES (4)..(5)..(39)..(41): Xaa is C or S
  MOD_RES (19)..(20)..(21)..(22)..(23): Xaa is A or G
  MOD_RES (24)..(25)..(26)..(27): Xaa is A or G or absent
AGPXXTPTKMSPISMLYKXXXXXXXXXLKYHYGMVVDRXGX

SEQ ID NO: 34942 - protein, 36 aa, Artificial Sequence
  Non-cyclic GFR-binding peptide
  MOD_RES (3)..(4): Xaa is C or S
  MOD_RES (18)..(19)..(20)..(21)..(22): Xaa is A or G
  MOD_RES (23)..(24)..(25)..(26): Xaa is A or G or absent
SPXXVSQDLSPINILYFXXXXXXXXXYGKIPMIVKS

SEQ ID NO: 34943 - protein, 37 aa, Artificial Sequence
  Non-cyclic GFR-binding peptide
  MOD_RES (4)..(5): Xaa is C or S
  MOD_RES (19)..(20)..(21)..(22)..(23): Xaa is A or G
  MOD_RES (24)..(25)..(26)..(27): Xaa is A or G or absent
PEPXXVPEKMSPINILYFXXXXXXXXXYGKIPNMTVE

SEQ ID NO: 34944 - protein, 38 aa, Artificial Sequence
  Non-cyclic GFR-binding peptide
  MOD_RES (1)..(2)..(36)..(38): Xaa is C or S
  MOD_RES (16)..(17)..(18)..(19)..(20): Xaa is A or G
  MOD_RES (21)..(22)..(23)..(24): Xaa is A or G or absent
XXVPTKLSATSILYYXXXXXXXXXLRKHRGMAVSEXGX

SEQ ID NO: 34945 - protein, 38 aa, Artificial Sequence
  Non-cyclic GFR-binding peptide
  MOD_RES (3)..(4)..(36)..(38): Xaa is C or S
PTXXVPTRLSPISILYKDSANNVVLKYHYDMVVESXGX

SEQ ID NO: 34946 - protein, 35 aa, Artificial Sequence
  Non-cyclic GFR-binding peptide
  MOD_RES (1)..(2): Xaa is C or S
  MOD_RES (16)..(17)..(18)..(19)..(20): Xaa is A or G
  MOD_RES (21)..(22)..(23)..(24): Xaa is A or G or absent
XXVPEKMSPINILYFXXXXXXXXXYGKIPNMTVES

SEQ ID NO: 34947 - protein, 38 aa, Artificial Sequence
  Non-cyclic GFR-binding peptide
  MOD_RES (3)..(4)..(38): Xaa is C or S
  MOD_RES (18)..(19)..(20)..(21)..(22): Xaa is A or G
  MOD_RES (23)..(24)..(25)..(26): Xaa is A or G or absent
GPXXTPTKMSATSMLYYXXXXXXXXXLRKHRGMVVDRX

SEQ ID NO: 34948 - protein, 39 aa, Artificial Sequence
  Non-cyclic GFR-binding peptide
  MOD_RES (2)..(3)..(37)..(39): Xaa is C or S
  MOD_RES (17)..(18)..(19)..(20)..(21): Xaa is A or G
  MOD_RES (22)..(23)..(24)..(25): Xaa is A or G or absent
PXXTPTKMSATSMLYYXXXXXXXXXLRKHRGMVVDRXGX

SEQ ID NO: 34949 - protein, 35 aa, Artificial Sequence
  Non-cyclic GFR-binding peptide
  MOD_RES (1)..(2)..(35): Xaa is C or S
  MOD_RES (16)..(17)..(18)..(19)..(20): Xaa is A or G
  MOD_RES (21)..(22)..(23)..(24): Xaa is A or G or absent
XXAPVKTSATSMLYYXXXXXXXXXLRKHRMIVEEX

SEQ ID NO: 34950 - protein, 32 aa, Artificial Sequence
  Non-cyclic GFR-binding peptide
  MOD_RES (1)..(2): Xaa is C or S
XXVSQDLSPINILYFIGKTPKIYGKIPMIVKS

SEQ ID NO: 34951 - protein, 34 aa, Artificial Sequence
  Non-cyclic GFR-binding peptide
  MOD_RES (3)..(4): Xaa is C or S
SPXXVSQDLSPINILYFIGKTPKIYGKIPMIVKS

SEQ ID NO: 34952 - protein, 32 aa, Artificial Sequence
  Non-cyclic GFR-binding peptide
  MOD_RES (32)..(32): Xaa is C or S
VPTKLSATSILYYDKGVVTYLRKHRGMAVSEX

SEQ ID NO: 34953 - protein, 30 aa, Artificial Sequence
  Non-cyclic GFR-binding peptide
TPTKMSPISMLYKNDKQQIILKYHYGMVVD

SEQ ID NO: 34954 - protein, 39 aa, Artificial Sequence
  Non-cyclic GFR-binding peptide
  MOD_RES (1)..(2)..(36)..(38): Xaa is C or S
  MOD_RES (16)..(17)..(18)..(19)..(20): Xaa is A or G
  MOD_RES (21)..(22)..(23)..(24): Xaa is A or G or absent
XXTPTKMSATSMLYYXXXXXXXXXLRKHRGMVVDRXGXS

SEQ ID NO: 34955 - protein, 35 aa, Artificial Sequence
  Non-cyclic GFR-binding peptide
  MOD_RES (3)..(4): Xaa is C or S
PTXXVPTRLEPISILYLDSANNVVKFKYEDMVVES

SEQ ID NO: 34956 - protein, 36 aa, Artificial Sequence
  Non-cyclic GFR-binding peptide
  MOD_RES (1)..(35): Xaa is C or S
  MOD_RES (15)..(16)..(17)..(18)..(19): Xaa is A or G
  MOD_RES (20)..(21)..(22)..(23): Xaa is A or G or absent
XVPEKMSPISILYKXXXXXXXXXLKYHYNMTVESXA

SEQ ID NO: 34957 - protein, 33 aa, Artificial Sequence
  Non-cyclic GFR-binding peptide
  MOD_RES (32)..(32): Xaa is C or S
TPTKMEPISMLYLNDKQQIIKFKYEGMVVDRXG

SEQ ID NO: 34958 - protein, 37 aa, Artificial Sequence
  Non-cyclic GFR-binding peptide
  MOD_RES (2)..(3)..(36): Xaa is C or S
  MOD_RES (17)..(18)..(19)..(20)..(21): Xaa is A or G
  MOD_RES (22)..(23)..(24)..(25): Xaa is A or G or absent
TXXAPVKTSATSMLYYXXXXXXXXXLRKHRMIVEEXG

SEQ ID NO: 34959 - protein, 35 aa, Artificial Sequence
  Non-cyclic GFR-binding peptide
  MOD_RES (2)..(3): Xaa is C or S
  MOD_RES (17)..(18)..(19)..(20)..(21): Xaa is A or G
  MOD_RES (22)..(23)..(24)..(25): Xaa is A or G or absent
AXXVPTKLSATSILYYXXXXXXXXXLRKHRGMAVS

SEQ ID NO: 34960 - protein, 41 aa, Artificial Sequence
  Non-cyclic GFR-binding peptide
  MOD_RES (5)..(6)..(38)..(40): Xaa is C or S
SAGPXXTPTKMEPISMLYLNDKQQIIKFKYEGMVVDRXGXS

SEQ ID NO: 34961 - protein, 35 aa, Artificial Sequence
  Non-cyclic GFR-binding peptide
  MOD_RES (2)..(3)..(34): Xaa is C or S
PXXVPQDLSPINILYFVGRTPKVYGKIPMVVKSXK

SEQ ID NO: 34962 - protein, 33 aa, Artificial Sequence
  Non-cyclic GFR-binding peptide
  MOD_RES (32)..(32): Xaa is C or S
TPTKMSATSMLYYNDKQQIILRKHRGMVVDRXG

SEQ ID NO: 34963 - protein, 37 aa, Artificial Sequence
  Non-cyclic GFR-binding peptide
  MOD_RES (1)..(2)..(36): Xaa is C or S
  MOD_RES (16)..(17)..(18)..(19)..(20): Xaa is A or G
  MOD_RES (21)..(22)..(23)..(24): Xaa is A or G or absent
XXVPTRLEPISILYLXXXXXXXXXKFKYEDMVVESXG

SEQ ID NO: 34964 - protein, 37 aa, Artificial Sequence
  Non-cyclic GFR-binding peptide
  MOD_RES (1)..(2)..(35)..(37): Xaa is C or S
  MOD_RES (16)..(17)..(18)..(19)..(20): Xaa is A or G
  MOD_RES (21)..(22)..(23)..(24): Xaa is A or G or absent
XXVSQDLSPINILYFXXXXXXXXXYGKIPMIVKSXKX

SEQ ID NO: 34965 - protein, 38 aa, Artificial Sequence
  Non-cyclic GFR-binding peptide
  MOD_RES (4)..(5): Xaa is C or S
  MOD_RES (19)..(20)..(21)..(22)..(23): Xaa is A or G
  MOD_RES (24)..(25)..(26)..(27): Xaa is A or G or absent
PEPXXVPEKMSPISILYKXXXXXXXXXLKYHYNMTVES

SEQ ID NO: 34966 - protein, 40 aa, Artificial Sequence
  Non-cyclic GFR-binding peptide
  MOD_RES (4)..(5)..(37)..(39): Xaa is C or S
PPTXXVPTRLSPISILYKDSANNVVLKYHYDMVVESXGXR

SEQ ID NO: 34967 - protein, 42 aa, Artificial Sequence
  Non-cyclic GFR-binding peptide
  MOD_RES (6)..(7)..(40)..(42): Xaa is C or S
  MOD_RES (21)..(22)..(23)..(24)..(25): Xaa is A or G
  MOD_RES (26)..(27)..(28)..(29): Xaa is A or G or absent
ASASPXXVPQDLSPINILYFXXXXXXXXXYGKIPMVVKSXKX

SEQ ID NO: 34968 - protein, 37 aa, Artificial Sequence
  Non-cyclic GFR-binding peptide
  MOD_RES (6)..(7): Xaa is C or S
HVPKPXXAPTKLSATSVLYYDDSSNVILRKHRNMVVR

SEQ ID NO: 34969 - protein, 38 aa, Artificial Sequence
  Non-cyclic GFR-binding peptide
  MOD_RES (5)..(6): Xaa is C or S
  MOD_RES (20)..(21)..(22)..(23)..(24): Xaa is A or G
  MOD_RES (25)..(26)..(27)..(28): Xaa is A or G or absent
IPEPXXVPEKMEPISILYLXXXXXXXXXKFKYENMTVE

SEQ ID NO: 34970 - protein, 39 aa, Artificial Sequence
  Non-cyclic GFR-binding peptide
  MOD_RES (4)..(5)..(36)..(38): Xaa is C or S
PSTXXAPVKTSPISMLYKDNGRVLLLKYHYMIVEEXGXL

SEQ ID NO: 34971 - protein, 40 aa, Artificial Sequence
  Non-cyclic GFR-binding peptide
  MOD_RES (4)..(5)..(39): Xaa is C or S
  MOD_RES (19)..(20)..(21)..(22)..(23): Xaa is A or G
  MOD_RES (24)..(25)..(26)..(27): Xaa is A or G or absent
AGPXXTPTKMEPISMLYLXXXXXXXXXKFKYEGMVVDRXG

SEQ ID NO: 34972 - protein, 34 aa, Artificial Sequence
  Non-cyclic GFR-binding peptide
  MOD_RES (31)..(33): Xaa is C or S
APVKTEPISMLYLDNGRVLLKFKYEMIVEEXGXL

SEQ ID NO: 34973 - protein, 35 aa, Artificial Sequence
  Non-cyclic GFR-binding peptide
  MOD_RES (1)..(32)..(34): Xaa is C or S
XVPQDLSPINILYFVGRTPKVYGKIPMVVKSXKXS

SEQ ID NO: 34974 - protein, 40 aa, Artificial Sequence
  Non-cyclic GFR-binding peptide
  MOD_RES (6)..(7)..(40): Xaa is C or S
  MOD_RES (21)..(22)..(23)..(24)..(25): Xaa is A or G
  MOD_RES (26)..(27)..(28)..(29): Xaa is A or G or absent
ASASPXXVSQDLSPINILYFXXXXXXXXXYGKIPMIVKSX

SEQ ID NO: 34975 - protein, 37 aa, Artificial Sequence
  Non-cyclic GFR-binding peptide
  MOD_RES (1)..(2)..(34)..(36): Xaa is C or S
XXVPARLSATSILYYDAANNVVLRKHRDMVVEAXGXR

SEQ ID NO: 34976 - protein, 38 aa, Artificial Sequence
  Non-cyclic GFR-binding peptide
  MOD_RES (2)..(3)..(36)..(38): Xaa is C or S
  MOD_RES (17)..(18)..(19)..(20)..(21): Xaa is A or G
  MOD_RES (22)..(23)..(24)..(25): Xaa is A or G or absent
TXXAPVKTSATSMLYYXXXXXXXXXLRKHRMIVEEXGX

SEQ ID NO: 34977 - protein, 41 aa, Artificial Sequence
  Non-cyclic GFR-binding peptide
  MOD_RES (6)..(7)..(41): Xaa is C or S
  MOD_RES (21)..(22)..(23)..(24)..(25): Xaa is A or G
  MOD_RES (26)..(27)..(28)..(29): Xaa is A or G or absent
AAPASXXVPARLSATSILYYXXXXXXXXXLRKHRDMVVEAX

SEQ ID NO: 34978 - protein, 34 aa, Artificial Sequence
  Non-cyclic GFR-binding peptide
  MOD_RES (3)..(4): Xaa is C or S
PTXXVPTRLSPISILYKDSANNVVLKYHYDMVVE

SEQ ID NO: 34979 - protein, 36 aa, Artificial Sequence
  Non-cyclic GFR-binding peptide
  MOD_RES (3)..(4): Xaa is C or S
  MOD_RES (18)..(19)..(20)..(21)..(22): Xaa is A or G
  MOD_RES (23)..(24)..(25)..(26): Xaa is A or G or absent
PTXXVPTRLEPISILYLXXXXXXXXXKFKYEDMVVE

SEQ ID NO: 34980 - protein, 40 aa, Artificial Sequence
  Non-cyclic GFR-binding peptide
  MOD_RES (5)..(6)..(40): Xaa is C or S
  MOD_RES (20)..(21)..(22)..(23)..(24): Xaa is A or G
  MOD_RES (25)..(26)..(27)..(28): Xaa is A or G or absent
SAGPXXTPTKMEPISMLYLXXXXXXXXXKFKYEGMVVDRX

SEQ ID NO: 34981 - protein, 38 aa, Artificial Sequence
  Non-cyclic GFR-binding peptide
  MOD_RES (2)..(3)..(35)..(37): Xaa is C or S
PXXVPEKMNAISILYFDENKNVVLKKYRNMTVESXAXR

SEQ ID NO: 34982 - protein, 33 aa, Artificial Sequence
  Non-cyclic GFR-binding peptide
  MOD_RES (1)..(33): Xaa is C or S
XVPTKLSATSILYYDKGVVTYLRKHRGMAVSEX

SEQ ID NO: 34983 - protein, 41 aa, Artificial Sequence
  Non-cyclic GFR-binding peptide
  MOD_RES (5)..(6)..(38)..(40): Xaa is C or S
SAGPXXTPTKMSPISMLYKNDKQQIILKYHYGMVVDRXGXS

SEQ ID NO: 34984 - protein, 43 aa, Artificial Sequence
  Non-cyclic GFR-binding peptide
  MOD_RES (6)..(7)..(40)..(42): Xaa is C or S
  MOD_RES (21)..(22)..(23)..(24)..(25): Xaa is A or G
  MOD_RES (26)..(27)..(28)..(29): Xaa is A or G or absent
ASASPXXVPQDLSPINILYFXXXXXXXXXYGKIPMVVKSXKXS

SEQ ID NO: 34985 - protein, 35 aa, Artificial Sequence
  Non-cyclic GFR-binding peptide
  MOD_RES (4)..(5): Xaa is C or S
SKAXXVPTKLSATSILYYDKGVVTYLRKHRGMAVS

SEQ ID NO: 34986 - protein, 40 aa, Artificial Sequence
  Non-cyclic GFR-binding peptide
  MOD_RES (6)..(7): Xaa is C or S
  MOD_RES (21)..(22)..(23)..(24)..(25): Xaa is A or G
  MOD_RES (26)..(27)..(28)..(29): Xaa is A or G or absent
GSAGPXXTPTKMSPISMLYKXXXXXXXXXLKYHYGMVVDR

SEQ ID NO: 34987 - protein, 38 aa, Artificial Sequence
  Non-cyclic GFR-binding peptide
  MOD_RES (6)..(7): Xaa is C or S
GIPEPXXVPEKMNAISILYFDENKNVVLKKYRNMTVES

SEQ ID NO: 34988 - protein, 38 aa, Artificial Sequence
  Non-cyclic GFR-binding peptide
  MOD_RES (5)..(6)..(38): Xaa is C or S
ASKAXXVPTKLSATSILYYDKGVVTYLRKHRGMAVSEX

SEQ ID NO: 34989 - protein, 38 aa, Artificial Sequence
  Non-cyclic GFR-binding peptide
  MOD_RES (4)..(5)..(38): Xaa is C or S
  MOD_RES (19)..(20)..(21)..(22)..(23): Xaa is A or G
  MOD_RES (24)..(25)..(26)..(27): Xaa is A or G or absent
PSTXXAPVKTSPISMLYKXXXXXXXXXLKYHYMIVEEX

SEQ ID NO: 34990 - protein, 36 aa, Artificial Sequence
  Non-cyclic GFR-binding peptide
  MOD_RES (33)..(35): Xaa is C or S
  MOD_RES (14)..(15)..(16)..(17)..(18): Xaa is A or G
  MOD_RES (19)..(20)..(21)..(22): Xaa is A or G or absent
APVKTEPISMLYLXXXXXXXXXKFKYEMIVEEXGXL

SEQ ID NO: 34991 - protein, 38 aa, Artificial Sequence
  Non-cyclic GFR-binding peptide
  MOD_RES (6)..(7): Xaa is C or S
STPPTXXVPTRLEPISILYLDSANNVVKFKYEDMVVES

SEQ ID NO: 34992 - protein, 31 aa, Artificial Sequence
  Non-cyclic GFR-binding peptide
  MOD_RES (31)..(31): Xaa is C or S
VSQDLSPINILYFIGKTPKIYGKIPMIVKSX

SEQ ID NO: 34993 - protein, 39 aa, Artificial Sequence
  Non-cyclic GFR-binding peptide
  MOD_RES (1)..(2)..(36)..(38): Xaa is C or S
  MOD_RES (16)..(17)..(18)..(19)..(20): Xaa is A or G
  MOD_RES (21)..(22)..(23)..(24): Xaa is A or G or absent
XXVPEKMEPISILYLXXXXXXXXXKFKYENMTVESXAXR

SEQ ID NO: 34994 - protein, 40 aa, Artificial Sequence
  Non-cyclic GFR-binding peptide
  MOD_RES (6)..(7)..(40): Xaa is C or S
  MOD_RES (21)..(22)..(23)..(24)..(25): Xaa is A or G
  MOD_RES (26)..(27)..(28)..(29): Xaa is A or G or absent
RVPSTXXAPVKTSPISMLYKXXXXXXXXXLKYHYMIVEEX

SEQ ID NO: 34995 - protein, 42 aa, Artificial Sequence
  Non-cyclic GFR-binding peptide
  MOD_RES (6)..(7)..(41): Xaa is C or S
  MOD_RES (21)..(22)..(23)..(24)..(25): Xaa is A or G
  MOD_RES (26)..(27)..(28)..(29): Xaa is A or G or absent
GIPEPXXVPEKMSATSILYYXXXXXXXXXLRKHRNMTVESXA

SEQ ID NO: 34996 - protein, 38 aa, Artificial Sequence
  Non-cyclic GFR-binding peptide
  MOD_RES (1)..(2)..(36)..(38): Xaa is C or S
  MOD_RES (16)..(17)..(18)..(19)..(20): Xaa is A or G
  MOD_RES (21)..(22)..(23)..(24): Xaa is A or G or absent
XXVPEKMSPINILYFXXXXXXXXXYGKIPNMTVESXAX

SEQ ID NO: 34997 - protein, 37 aa, Artificial Sequence
  Non-cyclic GFR-binding peptide
  MOD_RES (1)..(2)..(35)..(37): Xaa is C or S
  MOD_RES (16)..(17)..(18)..(19)..(20): Xaa is A or G
  MOD_RES (21)..(22)..(23)..(24): Xaa is A or G or absent
XXVPQALSPINILYFXXXXXXXXXYGKIPMIVRSXKX

SEQ ID NO: 34998 - protein, 42 aa, Artificial Sequence
  Non-cyclic GFR-binding peptide
  MOD_RES (5)..(6)..(40)..(42): Xaa is C or S
  MOD_RES (20)..(21)..(22)..(23)..(24): Xaa is A or G
  MOD_RES (25)..(26)..(27)..(28): Xaa is A or G or absent
APASXXVPARLSATSILYYXXXXXXXXXLRKHRDMVVEAXGX

SEQ ID NO: 34999 - protein, 33 aa, Artificial Sequence
  Non-cyclic GFR-binding peptide
  MOD_RES (32)..(32): Xaa is C or S
VPTRLSATSILYYDSANNVVLRKHRDMVVESXG

SEQ ID NO: 35000 - protein, 30 aa, Artificial Sequence
  Non-cyclic GFR-binding peptide
VPQDLSPINILYFVGRTPKVYGKIPMVVKS

SEQ ID NO: 35001 - protein, 39 aa, Artificial Sequence
  Non-cyclic GFR-binding peptide
  MOD_RES (6)..(7): Xaa is C or S
  MOD_RES (21)..(22)..(23)..(24)..(25): Xaa is A or G
  MOD_RES (26)..(27)..(28)..(29): Xaa is A or G or absent
STPPTXXVPTRLSPISILYKXXXXXXXXXLKYHYDMVVE

SEQ ID NO: 35002 - protein, 39 aa, Artificial Sequence
  Non-cyclic GFR-binding peptide
  MOD_RES (3)..(4)..(36)..(38): Xaa is C or S
EPXXVPEKMSPINILYFDENKNVVYGKIPNMTVESXAXR

SEQ ID NO: 35003 - protein, 38 aa, Artificial Sequence
  Non-cyclic GFR-binding peptide
  MOD_RES (5)..(6): Xaa is C or S
  MOD_RES (20)..(21)..(22)..(23)..(24): Xaa is A or G
  MOD_RES (25)..(26)..(27)..(28): Xaa is A or G or absent
IPEPXXVPEKMSPISILYKXXXXXXXXXLKYHYNMTVE

SEQ ID NO: 35004 - protein, 39 aa, Artificial Sequence
  Non-cyclic GFR-binding peptide
  MOD_RES (6)..(7)..(39): Xaa is C or S
AAPASXXVPARLSATSILYYDAANNVVLRKHRDMVVEAX

SEQ ID NO: 35005 - protein, 39 aa, Artificial Sequence
  Non-cyclic GFR-binding peptide
  MOD_RES (1)..(2)..(36)..(38): Xaa is C or S
  MOD_RES (16)..(17)..(18)..(19)..(20): Xaa is A or G
  MOD_RES (21)..(22)..(23)..(24): Xaa is A or G or absent
XXVPEKMSATSILYYXXXXXXXXXLRKHRNMTVESXAXR

SEQ ID NO: 35006 - protein, 30 aa, Artificial Sequence
  Non-cyclic GFR-binding peptide
VPTRLSATSILYYDSANNVVLRKHRDMVVE

SEQ ID NO: 35007 - protein, 39 aa, Artificial Sequence
  Non-cyclic GFR-binding peptide
  MOD_RES (3)..(4)..(37)..(39): Xaa is C or S
  MOD_RES (18)..(19)..(20)..(21)..(22): Xaa is A or G
  MOD_RES (23)..(24)..(25)..(26): Xaa is A or G or absent
STXXAPVKTSPISMLYKXXXXXXXXXLKYHYMIVEEXGX

SEQ ID NO: 35008 - protein, 39 aa, Artificial Sequence
  Non-cyclic GFR-binding peptide
  MOD_RES (6)..(7)..(39): Xaa is C or S
GSAGPXXTPTKMSATSMLYYNDKQQIILRKHRGMVVDRX

SEQ ID NO: 35009 - protein, 42 aa, Artificial Sequence
  Non-cyclic GFR-binding peptide
  MOD_RES (6)..(7)..(39)..(41): Xaa is C or S
GIPEPXXVPEKMNAISILYFDENKNVVLKKYRNMTVESXAXR

SEQ ID NO: 35010 - protein, 34 aa, Artificial Sequence
  Non-cyclic GFR-binding peptide
  MOD_RES (3)..(4): Xaa is C or S
PTXXVPTRLEPISILYLDSANNVVKFKYEDMVVE

SEQ ID NO: 35011 - protein, 32 aa, Artificial Sequence
  Non-cyclic GFR-binding peptide
  MOD_RES (1)..(2): Xaa is C or S
XXVPEKMSPISILYKDENKNVVLKYHYNMTVE

SEQ ID NO: 35012 - protein, 38 aa, Artificial Sequence
  Non-cyclic GFR-binding peptide
  MOD_RES (4)..(5)..(37): Xaa is C or S
AGPXXTPTKMSPISMLYKNDKQQIILKYHYGMVVDRXG

SEQ ID NO: 35013 - protein, 42 aa, Artificial Sequence
  Non-cyclic GFR-binding peptide
  MOD_RES (6)..(7)..(41): Xaa is C or S
  MOD_RES (21)..(22)..(23)..(24)..(25): Xaa is A or G
  MOD_RES (26)..(27)..(28)..(29): Xaa is A or G or absent
HVPKPXXAPTKLSATSVLYYXXXXXXXXXLRKHRNMVVRSXG

SEQ ID NO: 35014 - protein, 31 aa, Artificial Sequence
  Non-cyclic GFR-binding peptide
  MOD_RES (1)..(1): Xaa is C or S
XVPEKMSPISILYKDENKNVVLKYHYNMTVE

SEQ ID NO: 35015 - protein, 34 aa, Artificial Sequence
  Non-cyclic GFR-binding peptide
  MOD_RES (1)..(2): Xaa is C or S
  MOD_RES (16)..(17)..(18)..(19)..(20): Xaa is A or G
  MOD_RES (21)..(22)..(23)..(24): Xaa is A or G or absent
XXVPQDLSPINILYFXXXXXXXXXYGKIPMVVKS

SEQ ID NO: 35016 - protein, 35 aa, Artificial Sequence
  Non-cyclic GFR-binding peptide
  MOD_RES (32)..(34): Xaa is C or S
VPEKMNAISILYFDENKNVVLKKYRNMTVESXAXR

SEQ ID NO: 35017 - protein, 41 aa, Artificial Sequence
  Non-cyclic GFR-binding peptide
  MOD_RES (5)..(6)..(38)..(40): Xaa is C or S
IPEPXXVPEKMEPISILYLDENKNVVKFKYENMTVESXAXR

SEQ ID NO: 35018 - protein, 33 aa, Artificial Sequence
  Non-cyclic GFR-binding peptide
  MOD_RES (31)..(33): Xaa is C or S
VPQDLSPINILYFVGRTPKVYGKIPMVVKSXKX

SEQ ID NO: 35019 - protein, 34 aa, Artificial Sequence
  Non-cyclic GFR-binding peptide
  MOD_RES (2)..(3)..(34): Xaa is C or S
TXXAPVKTSPISMLYKDNGRVLLLKYHYMIVEEX

SEQ ID NO: 35020 - protein, 37 aa, Artificial Sequence
  Non-cyclic GFR-binding peptide
  MOD_RES (1)..(34)..(36): Xaa is C or S
  MOD_RES (15)..(16)..(17)..(18)..(19): Xaa is A or G
  MOD_RES (20)..(21)..(22)..(23): Xaa is A or G or absent
XAPVKTSATSMLYYXXXXXXXXXLRKHRMIVEEXGXL

SEQ ID NO: 35021 - protein, 43 aa, Artificial Sequence
  Non-cyclic GFR-binding peptide
  MOD_RES (5)..(6)..(40)..(42): Xaa is C or S
  MOD_RES (20)..(21)..(22)..(23)..(24): Xaa is A or G
  MOD_RES (25)..(26)..(27)..(28): Xaa is A or G or absent
IPEPXXVPEKMSPISILYKXXXXXXXXXLKYHYNMTVESXAXR

SEQ ID NO: 35022 - protein, 37 aa, Artificial Sequence
  Non-cyclic GFR-binding peptide
  MOD_RES (5)..(6): Xaa is C or S
APASXXVPARLSATSILYYDAANNVVLRKHRDMVVEA

SEQ ID NO: 35023 - protein, 40 aa, Artificial Sequence
  Non-cyclic GFR-binding peptide
  MOD_RES (3)..(4)..(38)..(40): Xaa is C or S
  MOD_RES (18)..(19)..(20)..(21)..(22): Xaa is A or G
  MOD_RES (23)..(24)..(25)..(26): Xaa is A or G or absent
PTXXVPTRLSPISILYKXXXXXXXXXLKYHYDMVVESXGX

SEQ ID NO: 35024 - protein, 40 aa, Artificial Sequence
  Non-cyclic GFR-binding peptide
  MOD_RES (5)..(6)..(40): Xaa is C or S
  MOD_RES (20)..(21)..(22)..(23)..(24): Xaa is A or G
  MOD_RES (25)..(26)..(27)..(28): Xaa is A or G or absent
IPEPXXVPEKMEPISILYLXXXXXXXXXKFKYENMTVESX

SEQ ID NO: 35025 - protein, 33 aa, Artificial Sequence
  Non-cyclic GFR-binding peptide
  MOD_RES (1)..(33): Xaa is C or S
XVPEKMSPINILYFDENKNVVYGKIPNMTVESX

SEQ ID NO: 35026 - protein, 36 aa, Artificial Sequence
  Non-cyclic GFR-binding peptide
  MOD_RES (3)..(4)..(36): Xaa is C or S
ASXXVPARLSATSILYYDAANNVVLRKHRDMVVEAX

SEQ ID NO: 35027 - protein, 38 aa, Artificial Sequence
  Non-cyclic GFR-binding peptide
  MOD_RES (6)..(7): Xaa is C or S
HVPKPXXAPTKLSATSVLYYDDSSNVILRKHRNMVVRS

SEQ ID NO: 35028 - protein, 34 aa, Artificial Sequence
  Non-cyclic GFR-binding peptide
  MOD_RES (1)..(2)..(34): Xaa is C or S
XXTPTKMEPISMLYLNDKQQIIKFKYEGMVVDRX

SEQ ID NO: 35029 - protein, 38 aa, Artificial Sequence
  Non-cyclic GFR-binding peptide
  MOD_RES (3)..(4)..(36)..(38): Xaa is C or S
GPXXTPTKMSATSMLYYNDKQQIILRKHRGMVVDRXGX

SEQ ID NO: 35030 - protein, 34 aa, Artificial Sequence
  Non-cyclic GFR-binding peptide
  MOD_RES (1)..(2): Xaa is C or S
  MOD_RES (16)..(17)..(18)..(19)..(20): Xaa is A or G
  MOD_RES (21)..(22)..(23)..(24): Xaa is A or G or absent
XXVPEKMSPINILYFXXXXXXXXXYGKIPNMTVE

SEQ ID NO: 35031 - protein, 35 aa, Artificial Sequence
  Non-cyclic GFR-binding peptide
  MOD_RES (1)..(2)..(34): Xaa is C or S
XXVPTRLSATSILYYDSANNVVLRKHRDMVVESXG

SEQ ID NO: 35032 - protein, 37 aa, Artificial Sequence
  Non-cyclic GFR-binding peptide
  MOD_RES (3)..(4)..(35)..(37): Xaa is C or S
STXXAPVKTSATSMLYYDNGRVLLLRKHRMIVEEXGX

SEQ ID NO: 35033 - protein, 33 aa, Artificial Sequence
  Non-cyclic GFR-binding peptide
  MOD_RES (33)..(33): Xaa is C or S
  MOD_RES (14)..(15)..(16)..(17)..(18): Xaa is A or G
  MOD_RES (19)..(20)..(21)..(22): Xaa is A or G or absent
VSQDLSPINILYFXXXXXXXXXYGKIPMIVKSX

SEQ ID NO: 35034 - protein, 35 aa, Artificial Sequence
  Non-cyclic GFR-binding peptide
  MOD_RES (2)..(3): Xaa is C or S
  MOD_RES (17)..(18)..(19)..(20)..(21): Xaa is A or G
  MOD_RES (22)..(23)..(24)..(25): Xaa is A or G or absent
PXXVPEKMSPINILYFXXXXXXXXXYGKIPNMTVE

SEQ ID NO: 35035 - protein, 35 aa, Artificial Sequence
  Non-cyclic GFR-binding peptide
  MOD_RES (4)..(5): Xaa is C or S
AGPXXTPTKMSPISMLYKNDKQQIILKYHYGMVVD

SEQ ID NO: 35036 - protein, 30 aa, Artificial Sequence
  Non-cyclic GFR-binding peptide
TPTKMSATSMLYYNDKQQIILRKHRGMVVD

SEQ ID NO: 35037 - protein, 35 aa, Artificial Sequence
  Non-cyclic GFR-binding peptide
  MOD_RES (1)..(2): Xaa is C or S
  MOD_RES (16)..(17)..(18)..(19)..(20): Xaa is A or G
  MOD_RES (21)..(22)..(23)..(24): Xaa is A or G or absent
XXVPEKMNAISILYFXXXXXXXXXLKKYRNMTVES

SEQ ID NO: 35038 - protein, 38 aa, Artificial Sequence
  Non-cyclic GFR-binding peptide
  MOD_RES (5)..(6): Xaa is C or S
  MOD_RES (20)..(21)..(22)..(23)..(24): Xaa is A or G
  MOD_RES (25)..(26)..(27)..(28): Xaa is A or G or absent
SAGPXXTPTKMSPISMLYKXXXXXXXXXLKYHYGMVVD

SEQ ID NO: 35039 - protein, 39 aa, Artificial Sequence
  Non-cyclic GFR-binding peptide
  MOD_RES (3)..(4)..(38): Xaa is C or S
  MOD_RES (18)..(19)..(20)..(21)..(22): Xaa is A or G
  MOD_RES (23)..(24)..(25)..(26): Xaa is A or G or absent
KAXXVPTKLSATSILYYXXXXXXXXXLRKHRGMAVSEXG

SEQ ID NO: 35040 - protein, 42 aa, Artificial Sequence
  Non-cyclic GFR-binding peptide
  MOD_RES (6)..(7)..(39)..(41): Xaa is C or S
AAPASXXVPARLSATSILYYDAANNVVLRKHRDMVVEAXGXR

SEQ ID NO: 35041 - protein, 35 aa, Artificial Sequence
  Non-cyclic GFR-binding peptide
  MOD_RES (1)..(2)..(34): Xaa is C or S
XXVPTRLEPISILYLDSANNVVKFKYEDMVVESXG

SEQ ID NO: 35042 - protein, 37 aa, Artificial Sequence
  Non-cyclic GFR-binding peptide
  MOD_RES (1)..(34)..(36): Xaa is C or S
  MOD_RES (15)..(16)..(17)..(18)..(19): Xaa is A or G
  MOD_RES (20)..(21)..(22)..(23): Xaa is A or G or absent
XVSQDLSPINILYFXXXXXXXXXYGKIPMIVKSXKXS

SEQ ID NO: 35043 - protein, 41 aa, Artificial Sequence
  Non-cyclic GFR-binding peptide
  MOD_RES (4)..(5)..(38)..(40): Xaa is C or S
  MOD_RES (19)..(20)..(21)..(22)..(23): Xaa is A or G
  MOD_RES (24)..(25)..(26)..(27): Xaa is A or G or absent
AAPXXVPQALSPINILYFXXXXXXXXXYGKIPMIVRSXKXS

SEQ ID NO: 35044 - protein, 37 aa, Artificial Sequence
  Non-cyclic GFR-binding peptide
  MOD_RES (6)..(7): Xaa is C or S
RVPSTXXAPVKTEPISMLYLDNGRVLLKFKYEMIVEE

SEQ ID NO: 35045 - protein, 35 aa, Artificial Sequence
  Non-cyclic GFR-binding peptide
  MOD_RES (4)..(5): Xaa is C or S
AGPXXTPTKMEPISMLYLNDKQQIIKFKYEGMVVD

SEQ ID NO: 35046 - protein, 39 aa, Artificial Sequence
  Non-cyclic GFR-binding peptide
  MOD_RES (6)..(7)..(39): Xaa is C or S
GIPEPXXVPEKMSATSILYYDENKNVVLRKHRNMTVESX

SEQ ID NO: 35047 - protein, 34 aa, Artificial Sequence
  Non-cyclic GFR-binding peptide
  MOD_RES (1)..(1): Xaa is C or S
  MOD_RES (15)..(16)..(17)..(18)..(19): Xaa is A or G
  MOD_RES (20)..(21)..(22)..(23): Xaa is A or G or absent
XVPEKMNAISILYFXXXXXXXXXLKKYRNMTVES

SEQ ID NO: 35048 - protein, 42 aa, Artificial Sequence
  Non-cyclic GFR-binding peptide
  MOD_RES (6)..(7)..(39)..(41): Xaa is C or S
KASKAXXVPTKLSATSILYYDKGVVTYLRKHRGMAVSEXGXR

SEQ ID NO: 35049 - protein, 34 aa, Artificial Sequence
  Non-cyclic GFR-binding peptide
  MOD_RES (31)..(33): Xaa is C or S
VPQALSPINILYFVGRKPKVYGKIPMIVRSXKXS

SEQ ID NO: 35050 - protein, 38 aa, Artificial Sequence
  Non-cyclic GFR-binding peptide
  MOD_RES (5)..(6): Xaa is C or S
  MOD_RES (20)..(21)..(22)..(23)..(24): Xaa is A or G
  MOD_RES (25)..(26)..(27)..(28): Xaa is A or G or absent
ASKAXXVPTKLSATSILYYXXXXXXXXXLRKHRGMAVS

SEQ ID NO: 35051 - protein, 42 aa, Artificial Sequence
  Non-cyclic GFR-binding peptide
  MOD_RES (6)..(7)..(40)..(42): Xaa is C or S
  MOD_RES (21)..(22)..(23)..(24)..(25): Xaa is A or G
  MOD_RES (26)..(27)..(28)..(29): Xaa is A or G or absent
ASAAPXXVPQALSPINILYFXXXXXXXXXYGKIPMIVRSXKX

SEQ ID NO: 35052 - protein, 38 aa, Artificial Sequence
  Non-cyclic GFR-binding peptide
  MOD_RES (2)..(3)..(35)..(37): Xaa is C or S
PXXTPTKMEPISMLYLNDKQQIIKFKYEGMVVDRXGXS

SEQ ID NO: 35053 - protein, 35 aa, Artificial Sequence
  Non-cyclic GFR-binding peptide
  MOD_RES (2)..(3): Xaa is C or S
  MOD_RES (17)..(18)..(19)..(20)..(21): Xaa is A or G
  MOD_RES (22)..(23)..(24)..(25): Xaa is A or G or absent
PXXVPQDLSPINILYFXXXXXXXXXYGKIPMVVKS

SEQ ID NO: 35054 - protein, 36 aa, Artificial Sequence
  Non-cyclic GFR-binding peptide
  MOD_RES (3)..(4): Xaa is C or S
  MOD_RES (18)..(19)..(20)..(21)..(22): Xaa is A or G
  MOD_RES (23)..(24)..(25)..(26): Xaa is A or G or absent
STXXAPVKTSATSMLYYXXXXXXXXXLRKHRMIVEE

SEQ ID NO: 35055 - protein, 43 aa, Artificial Sequence
  Non-cyclic GFR-binding peptide
  MOD_RES (6)..(7)..(41)..(43): Xaa is C or S
  MOD_RES (21)..(22)..(23)..(24)..(25): Xaa is A or G
  MOD_RES (26)..(27)..(28)..(29): Xaa is A or G or absent
GSAGPXXTPTKMSPISMLYKXXXXXXXXXLKYHYGMVVDRXGX

SEQ ID NO: 35056 - protein, 31 aa, Artificial Sequence
  Non-cyclic GFR-binding peptide
  MOD_RES (1)..(1): Xaa is C or S
XVPEKMSATSILYYDENKNVVLRKHRNMTVE

SEQ ID NO: 35057 - protein, 37 aa, Artificial Sequence
  Non-cyclic GFR-binding peptide
  MOD_RES (2)..(3)..(36): Xaa is C or S
  MOD_RES (17)..(18)..(19)..(20)..(21): Xaa is A or G
  MOD_RES (22)..(23)..(24)..(25): Xaa is A or G or absent
TXXAPVKTSPISMLYKXXXXXXXXXLKYHYMIVEEXG

SEQ ID NO: 35058 - protein, 41 aa, Artificial Sequence
  Non-cyclic GFR-binding peptide
  MOD_RES (5)..(6)..(40): Xaa is C or S
  MOD_RES (20)..(21)..(22)..(23)..(24): Xaa is A or G
  MOD_RES (25)..(26)..(27)..(28): Xaa is A or G or absent
IPEPXXVPEKMNAISILYFXXXXXXXXXLKKYRNMTVESXA

SEQ ID NO: 35059 - protein, 39 aa, Artificial Sequence
  Non-cyclic GFR-binding peptide
  MOD_RES (6)..(7)..(39): Xaa is C or S
STPPTXXVPTRLSPISILYKDSANNVVLKYHYDMVVESX

SEQ ID NO: 35060 - protein, 37 aa, Artificial Sequence
  Non-cyclic GFR-binding peptide
  MOD_RES (3)..(4): Xaa is C or S
  MOD_RES (18)..(19)..(20)..(21)..(22): Xaa is A or G
  MOD_RES (23)..(24)..(25)..(26): Xaa is A or G or absent
PTXXVPTRLSPISILYKXXXXXXXXXLKYHYDMVVES

SEQ ID NO: 35061 - protein, 37 aa, Artificial Sequence
  Non-cyclic GFR-binding peptide
  MOD_RES (4)..(5)..(37): Xaa is C or S
PASXXVPARLSATSILYYDAANNVVLRKHRDMVVEAX

SEQ ID NO: 35062 - protein, 35 aa, Artificial Sequence
  Non-cyclic GFR-binding peptide
  MOD_RES (34)..(34): Xaa is C or S
  MOD_RES (14)..(15)..(16)..(17)..(18): Xaa is A or G
  MOD_RES (19)..(20)..(21)..(22): Xaa is A or G or absent
VPEKMSATSILYYXXXXXXXXXLRKHRNMTVESXA

SEQ ID NO: 35063 - protein, 34 aa, Artificial Sequence
  Non-cyclic GFR-binding peptide
  MOD_RES (2)..(3)..(34): Xaa is C or S
TXXAPVKTSATSMLYYDNGRVLLLRKHRMIVEEX

SEQ ID NO: 35064 - protein, 32 aa, Artificial Sequence
  Non-cyclic GFR-binding peptide
  MOD_RES (1)..(32): Xaa is C or S
XVSQDLSPINILYFIGKTPKIYGKIPMIVKSX

SEQ ID NO: 35065 - protein, 39 aa, Artificial Sequence
  Non-cyclic GFR-binding peptide
  MOD_RES (5)..(6): Xaa is C or S
  MOD_RES (20)..(21)..(22)..(23)..(24): Xaa is A or G
  MOD_RES (25)..(26)..(27)..(28): Xaa is A or G or absent
TPPTXXVPTRLSPISILYKXXXXXXXXXLKYHYDMVVES

SEQ ID NO: 35066 - protein, 33 aa, Artificial Sequence
  Non-cyclic GFR-binding peptide
  MOD_RES (2)..(3): Xaa is C or S
SXXVPARLSATSILYYDAANNVVLRKHRDMVVE

SEQ ID NO: 35067 - protein, 43 aa, Artificial Sequence
  Non-cyclic GFR-binding peptide
  MOD_RES (6)..(7)..(41)..(43): Xaa is C or S
  MOD_RES (21)..(22)..(23)..(24)..(25): Xaa is A or G
  MOD_RES (26)..(27)..(28)..(29): Xaa is A or G or absent
GIPEPXXVPEKMSPINILYFXXXXXXXXXYGKIPNMTVESXAX

SEQ ID NO: 35068 - protein, 44 aa, Artificial Sequence
  Non-cyclic GFR-binding peptide
  MOD_RES (6)..(7)..(41)..(43): Xaa is C or S
  MOD_RES (21)..(22)..(23)..(24)..(25): Xaa is A or G
  MOD_RES (26)..(27)..(28)..(29): Xaa is A or G or absent
GIPEPXXVPEKMSATSILYYXXXXXXXXXLRKHRNMTVESXAXR

SEQ ID NO: 35069 - protein, 42 aa, Artificial Sequence
  Non-cyclic GFR-binding peptide
  MOD_RES (6)..(7)..(39)..(41): Xaa is C or S
GIPEPXXVPEKMSPISILYKDENKNVVLKYHYNMTVESXAXR

SEQ ID NO: 35070 - protein, 35 aa, Artificial Sequence
  Non-cyclic GFR-binding peptide
  MOD_RES (1)..(33)..(35): Xaa is C or S
XVPEKMSPINILYFDENKNVVYGKIPNMTVESXAX

SEQ ID NO: 35071 - protein, 43 aa, Artificial Sequence
  Non-cyclic GFR-binding peptide
  MOD_RES (6)..(7)..(40)..(42): Xaa is C or S
  MOD_RES (21)..(22)..(23)..(24)..(25): Xaa is A or G
  MOD_RES (26)..(27)..(28)..(29): Xaa is A or G or absent
RVPSTXXAPVKTSATSMLYYXXXXXXXXXLRKHRMIVEEXGXL

SEQ ID NO: 35072 - protein, 44 aa, Artificial Sequence
  Non-cyclic GFR-binding peptide
  MOD_RES (6)..(7)..(41)..(43): Xaa is C or S
  MOD_RES (21)..(22)..(23)..(24)..(25): Xaa is A or G
  MOD_RES (26)..(27)..(28)..(29): Xaa is A or G or absent
GIPEPXXVPEKMEPISILYLXXXXXXXXXKFKYENMTVESXAXR

SEQ ID NO: 35073 - protein, 37 aa, Artificial Sequence
  Non-cyclic GFR-binding peptide
  MOD_RES (5)..(6): Xaa is C or S
IPEPXXVPEKMSPISILYKDENKNVVLKYHYNMTVES

SEQ ID NO: 35074 - protein, 39 aa, Artificial Sequence
  Non-cyclic GFR-binding peptide
  MOD_RES (4)..(5)..(37)..(39): Xaa is C or S
PEPXXVPEKMSATSILYYDENKNVVLRKHRNMTVESXAX

SEQ ID NO: 35075 - protein, 32 aa, Artificial Sequence
  Non-cyclic GFR-binding peptide
  MOD_RES (32)..(32): Xaa is C or S
VPEKMSPINILYFDENKNVVYGKIPNMTVESX

SEQ ID NO: 35076 - protein, 35 aa, Artificial Sequence
  Non-cyclic GFR-binding peptide
  MOD_RES (1)..(2)..(34): Xaa is C or S
XXTPTKMSATSMLYYNDKQQIILRKHRGMVVDRXG

SEQ ID NO: 35077 - protein, 39 aa, Artificial Sequence
  Non-cyclic GFR-binding peptide
  MOD_RES (2)..(3)..(37)..(39): Xaa is C or S
  MOD_RES (17)..(18)..(19)..(20)..(21): Xaa is A or G
  MOD_RES (22)..(23)..(24)..(25): Xaa is A or G or absent
PXXVPEKMSPINILYFXXXXXXXXXYGKIPNMTVESXAX

SEQ ID NO: 35078 - protein, 37 aa, Artificial Sequence
  Non-cyclic GFR-binding peptide
  MOD_RES (3)..(4): Xaa is C or S
  MOD_RES (18)..(19)..(20)..(21)..(22): Xaa is A or G
  MOD_RES (23)..(24)..(25)..(26): Xaa is A or G or absent
GPXXTPTKMEPISMLYLXXXXXXXXXKFKYEGMVVDR

SEQ ID NO: 35079 - protein, 40 aa, Artificial Sequence
  Non-cyclic GFR-binding peptide
  MOD_RES (4)..(5)..(38)..(40): Xaa is C or S
  MOD_RES (19)..(20)..(21)..(22)..(23): Xaa is A or G
  MOD_RES (24)..(25)..(26)..(27): Xaa is A or G or absent
AAPXXVPQALSPINILYFXXXXXXXXXYGKIPMIVRSXKX

SEQ ID NO: 35080 - protein, 36 aa, Artificial Sequence
  Non-cyclic GFR-binding peptide
  MOD_RES (34)..(36): Xaa is C or S
  MOD_RES (14)..(15)..(16)..(17)..(18): Xaa is A or G
  MOD_RES (19)..(20)..(21)..(22): Xaa is A or G or absent
VPEKMSPINILYFXXXXXXXXXYGKIPNMTVESXAX

SEQ ID NO: 35081 - protein, 39 aa, Artificial Sequence
  Non-cyclic GFR-binding peptide
  MOD_RES (6)..(7): Xaa is C or S
  MOD_RES (21)..(22)..(23)..(24)..(25): Xaa is A or G
  MOD_RES (26)..(27)..(28)..(29): Xaa is A or G or absent
STPPTXXVPTRLEPISILYLXXXXXXXXXKFKYEDMVVE

SEQ ID NO: 35082 - protein, 39 aa, Artificial Sequence
  Non-cyclic GFR-binding peptide
  MOD_RES (6)..(7)..(38): Xaa is C or S
ASASPXXVPQDLSPINILYFVGRTPKVYGKIPMVVKSXK

SEQ ID NO: 35083 - protein, 35 aa, Artificial Sequence
  Non-cyclic GFR-binding peptide
  MOD_RES (1)..(2)..(34): Xaa is C or S
XXTPTKMEPISMLYLNDKQQIIKFKYEGMVVDRXG

SEQ ID NO: 35084 - protein, 36 aa, Artificial Sequence
  Non-cyclic GFR-binding peptide
  MOD_RES (5)..(6): Xaa is C or S
IPEPXXVPEKMSPISILYKDENKNVVLKYHYNMTVE

SEQ ID NO: 35085 - protein, 38 aa, Artificial Sequence
  Non-cyclic GFR-binding peptide
  MOD_RES (3)..(4)..(37): Xaa is C or S
  MOD_RES (18)..(19)..(20)..(21)..(22): Xaa is A or G
  MOD_RES (23)..(24)..(25)..(26): Xaa is A or G or absent
APXXVPQALSPINILYFXXXXXXXXXYGKIPMIVRSXK

SEQ ID NO: 35086 - protein, 36 aa, Artificial Sequence
  Non-cyclic GFR-binding peptide
  MOD_RES (1)..(3)..(36): Xaa is C or S
  MOD_RES (14)..(15)..(16)..(17)..(18): Xaa is A or G
  MOD_RES (19)..(20)..(21)..(22): Xaa is A or G or absent
XKXSKVIMSMEGLXXXXXXXXXMIQITINSLDQSVX

SEQ ID NO: 35087 - protein, 35 aa, Artificial Sequence
  Non-cyclic GFR-binding peptide
  MOD_RES (31)..(32): Xaa is C or S
EVVMDSMEGIVVNNASDMIQITINSLRTPVXXTPP

SEQ ID NO: 35088 - protein, 40 aa, Artificial Sequence
  Non-cyclic GFR-binding peptide
  MOD_RES (1)..(3)..(36)..(37): Xaa is C or S
  MOD_RES (14)..(15)..(16)..(17)..(18): Xaa is A or G
  MOD_RES (19)..(20)..(21)..(22): Xaa is A or G or absent
XKXSKVVMSMEGLXXXXXXXXXMIQITINSLDQPVXXPSA

SEQ ID NO: 35089 - protein, 37 aa, Artificial Sequence
  Non-cyclic GFR-binding peptide
  MOD_RES (32)..(33): Xaa is C or S
AEVVMDSMEGLVVNNAADMIQITINSLRAPVXXSAPA

SEQ ID NO: 35090 - protein, 40 aa, Artificial Sequence
  Non-cyclic GFR-binding peptide
  MOD_RES (2)..(4)..(37)..(38): Xaa is C or S
  MOD_RES (15)..(16)..(17)..(18)..(19): Xaa is A or G
  MOD_RES (20)..(21)..(22)..(23): Xaa is A or G or absent
SXKXSKVVMSMEGLXXXXXXXXXMIQITINSLDQPVXXPS

SEQ ID NO: 35091 - protein, 38 aa, Artificial Sequence
  Non-cyclic GFR-binding peptide
  MOD_RES (1)..(3)..(37)..(38): Xaa is C or S
  MOD_RES (15)..(16)..(17)..(18)..(19): Xaa is A or G
  MOD_RES (20)..(21)..(22)..(23): Xaa is A or G or absent
XGXAEVVMDSMEGLXXXXXXXXXMIQITINSLRAPVXX

SEQ ID NO: 35092 - protein, 37 aa, Artificial Sequence
  Non-cyclic GFR-binding peptide
  MOD_RES (31)..(32): Xaa is C or S
EEVIMSMEGLLLVRGNDMIQMTINSTKVPAXXTSPVR

SEQ ID NO: 35093 - protein, 43 aa, Artificial Sequence
  Non-cyclic GFR-binding peptide
  MOD_RES (2)..(4)..(38)..(39): Xaa is C or S
  MOD_RES (16)..(17)..(18)..(19)..(20): Xaa is A or G
  MOD_RES (21)..(22)..(23)..(24): Xaa is A or G or absent
RXGXAEVVMDSMEGIXXXXXXXXXMIQITINSLRAPVXXSAPA

SEQ ID NO: 35094 - protein, 41 aa, Artificial Sequence
  Non-cyclic GFR-binding peptide
  MOD_RES (2)..(4)..(37)..(38): Xaa is C or S
  MOD_RES (15)..(16)..(17)..(18)..(19): Xaa is A or G
  MOD_RES (20)..(21)..(22)..(23): Xaa is A or G or absent
SXKXSKVVMSMEGLXXXXXXXXXMIQITINSLDQPVXXPSA

SEQ ID NO: 35095 - protein, 34 aa, Artificial Sequence
  Non-cyclic GFR-binding peptide
  MOD_RES (31)..(32): Xaa is C or S
EEVIMSMEGLLLVRGNDMIQMTINSTKVPAXXTS

SEQ ID NO: 35096 - protein, 38 aa, Artificial Sequence
  Non-cyclic GFR-binding peptide
  MOD_RES (33)..(34): Xaa is C or S
  MOD_RES (11)..(12)..(13)..(14)..(15): Xaa is A or G
  MOD_RES (16)..(17)..(18)..(19): Xaa is A or G or absent
EVVMDSMEGIXXXXXXXXXMIQITINSLRTPVXXTPPT

SEQ ID NO: 35097 - protein, 38 aa, Artificial Sequence
  Non-cyclic GFR-binding peptide
  MOD_RES (2)..(35)..(36): Xaa is C or S
  MOD_RES (13)..(14)..(15)..(16)..(17): Xaa is A or G
  MOD_RES (18)..(19)..(20)..(21): Xaa is A or G or absent
KXSKVVMSMEGLXXXXXXXXXMIQITINSLDQPVXXPS

SEQ ID NO: 35098 - protein, 43 aa, Artificial Sequence
  Non-cyclic GFR-binding peptide
  MOD_RES (1)..(3)..(37)..(38): Xaa is C or S
  MOD_RES (15)..(16)..(17)..(18)..(19): Xaa is A or G
  MOD_RES (20)..(21)..(22)..(23): Xaa is A or G or absent
XGXSEVVMDSMEGLXXXXXXXXXMIQITINSLRTPVXXTPPTS

SEQ ID NO: 35099 - protein, 39 aa, Artificial Sequence
  Non-cyclic GFR-binding peptide
  MOD_RES (33)..(34): Xaa is C or S
  MOD_RES (11)..(12)..(13)..(14)..(15): Xaa is A or G
  MOD_RES (16)..(17)..(18)..(19): Xaa is A or G or absent
EVVMDSMEGLXXXXXXXXXMIQITINSLRTPVXXTPPTS

SEQ ID NO: 35100 - protein, 35 aa, Artificial Sequence
  Non-cyclic GFR-binding peptide
  MOD_RES (32)..(33): Xaa is C or S
AEVVMDSMEGIVVNNAADMIQITINSLRAPVXXSA

SEQ ID NO: 35101 - protein, 31 aa, Artificial Sequence
  Non-cyclic GFR-binding peptide
AEVVMDSMEGLVVNNAADMIQITINSLRAPV

SEQ ID NO: 35102 - protein, 39 aa, Artificial Sequence
  Non-cyclic GFR-binding peptide
  MOD_RES (2)..(36)..(37): Xaa is C or S
  MOD_RES (14)..(15)..(16)..(17)..(18): Xaa is A or G
  MOD_RES (19)..(20)..(21)..(22): Xaa is A or G or absent
GXRDVVMGSMEGIXXXXXXXXXMIQMTINSMKTPTXXPG

SEQ ID NO: 35103 - protein, 31 aa, Artificial Sequence
  Non-cyclic GFR-binding peptide
  MOD_RES (31)..(31): Xaa is C or S
EEVIMSMEGLLLVRGNDMIQMTINSTKVPAX

SEQ ID NO: 35104 - protein, 39 aa, Artificial Sequence
  Non-cyclic GFR-binding peptide
  MOD_RES (2)..(4)..(35)..(36): Xaa is C or S
SXKXSKVVMSMEGLVKPTRGVMIQITINSLDQPVXXPSA

SEQ ID NO: 35105 - protein, 30 aa, Artificial Sequence
  Non-cyclic GFR-binding peptide
EVVMDSMEGIVVNNASDMIQITINSLRTPV

SEQ ID NO: 35106 - protein, 36 aa, Artificial Sequence
  Non-cyclic GFR-binding peptide
  MOD_RES (2)..(4)..(35)..(36): Xaa is C or S
LXGXEEVIMSMEGLLLVRGNDMIQMTINSTKVPAXX

SEQ ID NO: 35107 - protein, 35 aa, Artificial Sequence
  Non-cyclic GFR-binding peptide
  MOD_RES (1)..(32)..(33): Xaa is C or S
XSKVVMSMEGLVKPTRGVMIQITINSLDQPVXXPS

SEQ ID NO: 35108 - protein, 34 aa, Artificial Sequence
  Non-cyclic GFR-binding peptide
  MOD_RES (1)..(3): Xaa is C or S
XGXRDVVMGSMEGIIIQQKDNMIQMTINSMKTPT

SEQ ID NO: 35109 - protein, 42 aa, Artificial Sequence
  Non-cyclic GFR-binding peptide
  MOD_RES (2)..(4)..(38)..(39): Xaa is C or S
  MOD_RES (16)..(17)..(18)..(19)..(20): Xaa is A or G
  MOD_RES (21)..(22)..(23)..(24): Xaa is A or G or absent
HXGXSRVVMNSMEGLXXXXXXXXXMIQVTINSLKTPAXXPKP

SEQ ID NO: 35110 - protein, 37 aa, Artificial Sequence
  Non-cyclic GFR-binding peptide
  MOD_RES (34)..(35): Xaa is C or S
  MOD_RES (12)..(13)..(14)..(15)..(16): Xaa is A or G
  MOD_RES (17)..(18)..(19)..(20): Xaa is A or G or absent
RDVVMGSMEGLXXXXXXXXXMIQMTINSMKTPTXXPG

SEQ ID NO: 35111 - protein, 32 aa, Artificial Sequence
  Non-cyclic GFR-binding peptide
  MOD_RES (1)..(1): Xaa is C or S
XRDVVMGSMEGIIIQQKDNMIQMTINSMKTPT

SEQ ID NO: 35112 - protein, 35 aa, Artificial Sequence
  Non-cyclic GFR-binding peptide
  MOD_RES (1)..(3)..(34)..(35): Xaa is C or S
XGXEEVIMSMEGLLLVRGNDMIQMTINSTKVPAXX

SEQ ID NO: 35113 - protein, 41 aa, Artificial Sequence
  Non-cyclic GFR-binding peptide
  MOD_RES (1)..(3)..(35)..(36): Xaa is C or S
XGXRDVVMGSMEGLIIQQKDNMIQMTINSMKTPTXXPGASG

SEQ ID NO: 35114 - protein, 36 aa, Artificial Sequence
  Non-cyclic GFR-binding peptide
  MOD_RES (1)..(3)..(35)..(36): Xaa is C or S
XGXSEVVMDSMEGLVVNNASDMIQITINSLRTPVXX

SEQ ID NO: 35115 - protein, 39 aa, Artificial Sequence
  Non-cyclic GFR-binding peptide
  MOD_RES (1)..(3)..(37)..(38): Xaa is C or S
  MOD_RES (15)..(16)..(17)..(18)..(19): Xaa is A or G
  MOD_RES (20)..(21)..(22)..(23): Xaa is A or G or absent
XGXAEVVMDSMEGIXXXXXXXXXMIQITINSLRAPVXXS

SEQ ID NO: 35116 - protein, 42 aa, Artificial Sequence
  Non-cyclic GFR-binding peptide
  MOD_RES (2)..(36)..(37): Xaa is C or S
  MOD_RES (14)..(15)..(16)..(17)..(18): Xaa is A or G
  MOD_RES (19)..(20)..(21)..(22): Xaa is A or G or absent
GXRDVVMGSMEGIXXXXXXXXXMIQMTINSMKTPTXXPGASG

SEQ ID NO: 35117 - protein, 37 aa, Artificial Sequence
  Non-cyclic GFR-binding peptide
  MOD_RES (2)..(4)..(35)..(36): Xaa is C or S
SXKXSRVIMSMEGLVKPKRGVMIQITINSLAQPVXXP

SEQ ID NO: 35118 - protein, 40 aa, Artificial Sequence
  Non-cyclic GFR-binding peptide
  MOD_RES (34)..(35): Xaa is C or S
  MOD_RES (12)..(13)..(14)..(15)..(16): Xaa is A or G
  MOD_RES (17)..(18)..(19)..(20): Xaa is A or G or absent
SRVVMNSMEGIXXXXXXXXXMIQVTINSLKTPAXXPKPVH

SEQ ID NO: 35119 - protein, 38 aa, Artificial Sequence
  Non-cyclic GFR-binding peptide
  MOD_RES (2)..(33)..(34): Xaa is C or S
KXSKVIMSMEGLIKPTKGIMIQITINSLDQSVXXPSAS

SEQ ID NO: 35120 - protein, 33 aa, Artificial Sequence
  Non-cyclic GFR-binding peptide
  MOD_RES (12)..(13)..(14)..(15)..(16): Xaa is A or G
  MOD_RES (17)..(18)..(19)..(20): Xaa is A or G or absent
AEVVMDSMEGLXXXXXXXXXMIQITINSLRAPV

SEQ ID NO: 35121 - protein, 41 aa, Artificial Sequence
  Non-cyclic GFR-binding peptide
  MOD_RES (2)..(35)..(36): Xaa is C or S
  MOD_RES (13)..(14)..(15)..(16)..(17): Xaa is A or G
  MOD_RES (18)..(19)..(20)..(21): Xaa is A or G or absent
GXEEVIMSMEGIXXXXXXXXXMIQMTINSTKVPAXXTSPVR

SEQ ID NO: 35122 - protein, 34 aa, Artificial Sequence
  Non-cyclic GFR-binding peptide
  MOD_RES (33)..(34): Xaa is C or S
  MOD_RES (11)..(12)..(13)..(14)..(15): Xaa is A or G
  MOD_RES (16)..(17)..(18)..(19): Xaa is A or G or absent
DVVMGSMEGLXXXXXXXXXMIQMTINSMKTPTXX

SEQ ID NO: 35123 - protein, 35 aa, Artificial Sequence
  Non-cyclic GFR-binding peptide
  MOD_RES (2)..(35): Xaa is C or S
  MOD_RES (13)..(14)..(15)..(16)..(17): Xaa is A or G
  MOD_RES (18)..(19)..(20)..(21): Xaa is A or G or absent
GXEEVIMSMEGLXXXXXXXXXMIQMTINSTKVPAX

SEQ ID NO: 35124 - protein, 40 aa, Artificial Sequence
  Non-cyclic GFR-binding peptide
  MOD_RES (2)..(36)..(37): Xaa is C or S
  MOD_RES (14)..(15)..(16)..(17)..(18): Xaa is A or G
  MOD_RES (19)..(20)..(21)..(22): Xaa is A or G or absent
GXRDVVMGSMEGLXXXXXXXXXMIQMTINSMKTPTXXPGA

SEQ ID NO: 35125 - protein, 34 aa, Artificial Sequence
  Non-cyclic GFR-binding peptide
  MOD_RES (1)..(3)..(34): Xaa is C or S
XGXEEVIMSMEGILLVRGNDMIQMTINSTKVPAX

SEQ ID NO: 35126 - protein, 35 aa, Artificial Sequence
  Non-cyclic GFR-binding peptide
  MOD_RES (1)..(3): Xaa is C or S
  MOD_RES (14)..(15)..(16)..(17)..(18): Xaa is A or G
  MOD_RES (19)..(20)..(21)..(22): Xaa is A or G or absent
XKXSKVVMSMEGLXXXXXXXXXMIQITINSLDQPV

SEQ ID NO: 35127 - protein, 41 aa, Artificial Sequence
  Non-cyclic GFR-binding peptide
  MOD_RES (2)..(4)..(36)..(37): Xaa is C or S
SXGXRDVVMGSMEGIIIQQKDNMIQMTINSMKTPTXXPGAS

SEQ ID NO: 35128 - protein, 35 aa, Artificial Sequence
  Non-cyclic GFR-binding peptide
  MOD_RES (1)..(3)..(34)..(35): Xaa is C or S
XGXEEVIMSMEGILLVRGNDMIQMTINSTKVPAXX

SEQ ID NO: 35129 - protein, 36 aa, Artificial Sequence
  Non-cyclic GFR-binding peptide
  MOD_RES (31)..(32): Xaa is C or S
EEVIMSMEGLLLVRGNDMIQMTINSTKVPAXXTSPV

SEQ ID NO: 35130 - protein, 35 aa, Artificial Sequence
  Non-cyclic GFR-binding peptide
  MOD_RES (1)..(32)..(33): Xaa is C or S
XEEVIMSMEGLLLVRGNDMIQMTINSTKVPAXXTS

SEQ ID NO: 35131 - protein, 32 aa, Artificial Sequence
  Non-cyclic GFR-binding peptide
  MOD_RES (11)..(12)..(13)..(14)..(15): Xaa is A or G
  MOD_RES (16)..(17)..(18)..(19): Xaa is A or G or absent
EVVMDSMEGIXXXXXXXXXMIQITINSLRAPV

SEQ ID NO: 35132 - protein, 35 aa, Artificial Sequence
  Non-cyclic GFR-binding peptide
  MOD_RES (1)..(3)..(35): Xaa is C or S
XGXRDVVMGSMEGLIIQQKDNMIQMTINSMKTPTX

SEQ ID NO: 35133 - protein, 40 aa, Artificial Sequence
  Non-cyclic GFR-binding peptide
  MOD_RES (34)..(35): Xaa is C or S
  MOD_RES (12)..(13)..(14)..(15)..(16): Xaa is A or G
  MOD_RES (17)..(18)..(19)..(20): Xaa is A or G or absent
AEVVMDSMEGIXXXXXXXXXMIQITINSLRAPVXXSAPAA

SEQ ID NO: 35134 - protein, 33 aa, Artificial Sequence
  Non-cyclic GFR-binding peptide
  MOD_RES (33)..(33): Xaa is C or S
  MOD_RES (11)..(12)..(13)..(14)..(15): Xaa is A or G
  MOD_RES (16)..(17)..(18)..(19): Xaa is A or G or absent
DVVMGSMEGLXXXXXXXXXMIQMTINSMKTPTX

SEQ ID NO: 35135 - protein, 36 aa, Artificial Sequence
  Non-cyclic GFR-binding peptide
  MOD_RES (1)..(35)..(36): Xaa is C or S
  MOD_RES (13)..(14)..(15)..(16)..(17): Xaa is A or G
  MOD_RES (18)..(19)..(20)..(21): Xaa is A or G or absent
XAEVVMDSMEGLXXXXXXXXXMIQITINSLRAPVXX

SEQ ID NO: 35136 - protein, 34 aa, Artificial Sequence
  Non-cyclic GFR-binding peptide
  MOD_RES (33)..(34): Xaa is C or S
  MOD_RES (11)..(12)..(13)..(14)..(15): Xaa is A or G
  MOD_RES (16)..(17)..(18)..(19): Xaa is A or G or absent
SKVVMSMEGLXXXXXXXXXMIQITINSLDQPVXX

SEQ ID NO: 35137 - protein, 41 aa, Artificial Sequence
  Non-cyclic GFR-binding peptide
  MOD_RES (2)..(36)..(37): Xaa is C or S
  MOD_RES (14)..(15)..(16)..(17)..(18): Xaa is A or G
  MOD_RES (19)..(20)..(21)..(22): Xaa is A or G or absent
GXRDVVMGSMEGIXXXXXXXXXMIQMTINSMKTPTXXPGAS

SEQ ID NO: 35138 - protein, 32 aa, Artificial Sequence
  Non-cyclic GFR-binding peptide
  MOD_RES (11)..(12)..(13)..(14)..(15): Xaa is A or G
  MOD_RES (16)..(17)..(18)..(19): Xaa is A or G or absent
EVVMDSMEGIXXXXXXXXXMIQITINSLRTPV

SEQ ID NO: 35139 - protein, 37 aa, Artificial Sequence
  Non-cyclic GFR-binding peptide
  MOD_RES (1)..(3)..(36)..(37): Xaa is C or S
  MOD_RES (14)..(15)..(16)..(17)..(18): Xaa is A or G
  MOD_RES (19)..(20)..(21)..(22): Xaa is A or G or absent
XKXSKVIMSMEGLXXXXXXXXXMIQITINSLDQSVXX

SEQ ID NO: 35140 - protein, 36 aa, Artificial Sequence
  Non-cyclic GFR-binding peptide
  MOD_RES (2)..(35)..(36): Xaa is C or S
  MOD_RES (13)..(14)..(15)..(16)..(17): Xaa is A or G
  MOD_RES (18)..(19)..(20)..(21): Xaa is A or G or absent
GXEEVIMSMEGLXXXXXXXXXMIQMTINSTKVPAXX

SEQ ID NO: 35141 - protein, 35 aa, Artificial Sequence
  Non-cyclic GFR-binding peptide
  MOD_RES (1)..(35): Xaa is C or S
  MOD_RES (13)..(14)..(15)..(16)..(17): Xaa is A or G
  MOD_RES (18)..(19)..(20)..(21): Xaa is A or G or absent
XAEVVMDSMEGLXXXXXXXXXMIQITINSLRAPVX

SEQ ID NO: 35142 - protein, 33 aa, Artificial Sequence
  Non-cyclic GFR-binding peptide
  MOD_RES (33)..(33): Xaa is C or S
  MOD_RES (11)..(12)..(13)..(14)..(15): Xaa is A or G
  MOD_RES (16)..(17)..(18)..(19): Xaa is A or G or absent
SKVVMSMEGLXXXXXXXXXMIQITINSLDQPVX

SEQ ID NO: 35143 - protein, 36 aa, Artificial Sequence
  Non-cyclic GFR-binding peptide
  MOD_RES (2)..(36): Xaa is C or S
  MOD_RES (14)..(15)..(16)..(17)..(18): Xaa is A or G
  MOD_RES (19)..(20)..(21)..(22): Xaa is A or G or absent
GXSEVVMDSMEGIXXXXXXXXXMIQITINSLRTPVX

SEQ ID NO: 35144 - protein, 36 aa, Artificial Sequence
  Non-cyclic GFR-binding peptide
  MOD_RES (2)..(34)..(35): Xaa is C or S
GXRDVVMGSMEGLIIQQKDNMIQMTINSMKTPTXXP

SEQ ID NO: 35145 - protein, 39 aa, Artificial Sequence
  Non-cyclic GFR-binding peptide
  MOD_RES (34)..(35): Xaa is C or S
  MOD_RES (12)..(13)..(14)..(15)..(16): Xaa is A or G
  MOD_RES (17)..(18)..(19)..(20): Xaa is A or G or absent
SEVVMDSMEGLXXXXXXXXXMIQITINSLRTPVXXTPPT

SEQ ID NO: 35146 - protein, 36 aa, Artificial Sequence
  Non-cyclic GFR-binding peptide
  MOD_RES (2)..(4): Xaa is C or S
  MOD_RES (15)..(16)..(17)..(18)..(19): Xaa is A or G
  MOD_RES (20)..(21)..(22)..(23): Xaa is A or G or absent
LXGXEEVIMSMEGLXXXXXXXXXMIQMTINSTKVPA

SEQ ID NO: 35147 - protein, 39 aa, Artificial Sequence
  Non-cyclic GFR-binding peptide
  MOD_RES (2)..(34)..(35): Xaa is C or S
GXSEVVMDSMEGIVVNNASDMIQITINSLRTPVXXTPPT

SEQ ID NO: 35148 - protein, 35 aa, Artificial Sequence
  Non-cyclic GFR-binding peptide
  MOD_RES (1)..(3)..(35): Xaa is C or S
XGXAEVVMDSMEGLVVNNAADMIQITINSLRAPVX

SEQ ID NO: 35149 - protein, 39 aa, Artificial Sequence
  Non-cyclic GFR-binding peptide
  MOD_RES (2)..(34)..(35): Xaa is C or S
GXRDVVMGSMEGLIIQQKDNMIQMTINSMKTPTXXPGAS

SEQ ID NO: 35150 - protein, 33 aa, Artificial Sequence
  Non-cyclic GFR-binding peptide
  MOD_RES (31)..(32): Xaa is C or S
EVVMDSMEGIVVNNAADMIQITINSLRAPVXXS

SEQ ID NO: 35151 - protein, 40 aa, Artificial Sequence
  Non-cyclic GFR-binding peptide
  MOD_RES (1)..(3)..(35)..(36): Xaa is C or S
XGXAEVVMDSMEGIVVNNAADMIQITINSLRAPVXXSAPA

SEQ ID NO: 35152 - protein, 30 aa, Artificial Sequence
  Non-cyclic GFR-binding peptide
SKVVMSMEGLVKPTRGVMIQITINSLDQPV

SEQ ID NO: 35153 - protein, 34 aa, Artificial Sequence
  Non-cyclic GFR-binding peptide
  MOD_RES (2)..(2): Xaa is C or S
  MOD_RES (13)..(14)..(15)..(16)..(17): Xaa is A or G
  MOD_RES (18)..(19)..(20)..(21): Xaa is A or G or absent
KXSKVIMSMEGLXXXXXXXXXMIQITINSLDQSV

SEQ ID NO: 35154 - protein, 35 aa, Artificial Sequence
  Non-cyclic GFR-binding peptide
  MOD_RES (2)..(34)..(35): Xaa is C or S
GXSEVVMDSMEGLVVNNASDMIQITINSLRTPVXX

SEQ ID NO: 35155 - protein, 38 aa, Artificial Sequence
  Non-cyclic GFR-binding peptide
  MOD_RES (2)..(4)..(37)..(38): Xaa is C or S
  MOD_RES (15)..(16)..(17)..(18)..(19): Xaa is A or G
  MOD_RES (20)..(21)..(22)..(23): Xaa is A or G or absent
SXKXSKVVMSMEGLXXXXXXXXXMIQITINSLDQPVXX

SEQ ID NO: 35156 - protein, 35 aa, Artificial Sequence
  Non-cyclic GFR-binding peptide
  MOD_RES (1)..(35): Xaa is C or S
  MOD_RES (13)..(14)..(15)..(16)..(17): Xaa is A or G
  MOD_RES (18)..(19)..(20)..(21): Xaa is A or G or absent
XRDVVMGSMEGIXXXXXXXXXMIQMTINSMKTPTX

SEQ ID NO: 35157 - protein, 37 aa, Artificial Sequence
  Non-cyclic GFR-binding peptide
  MOD_RES (1)..(34)..(35): Xaa is C or S
  MOD_RES (12)..(13)..(14)..(15)..(16): Xaa is A or G
  MOD_RES (17)..(18)..(19)..(20): Xaa is A or G or absent
XSKVVMSMEGLXXXXXXXXXMIQITINSLDQPVXXPS

SEQ ID NO: 35158 - protein, 35 aa, Artificial Sequence
  Non-cyclic GFR-binding peptide
  MOD_RES (33)..(34): Xaa is C or S
  MOD_RES (11)..(12)..(13)..(14)..(15): Xaa is A or G
  MOD_RES (16)..(17)..(18)..(19): Xaa is A or G or absent
EVVMDSMEGIXXXXXXXXXMIQITINSLRTPVXXT

SEQ ID NO: 35159 - protein, 32 aa, Artificial Sequence
  Non-cyclic GFR-binding peptide
  MOD_RES (31)..(32): Xaa is C or S
SRVIMSMEGLVKPKRGVMIQITINSLAQPVXX

SEQ ID NO: 35160 - protein, 33 aa, Artificial Sequence
  Non-cyclic GFR-binding peptide
  MOD_RES (12)..(13)..(14)..(15)..(16): Xaa is A or G
  MOD_RES (17)..(18)..(19)..(20): Xaa is A or G or absent
SEVVMDSMEGLXXXXXXXXXMIQITINSLRTPV

SEQ ID NO: 35161 - protein, 38 aa, Artificial Sequence
  Non-cyclic GFR-binding peptide
  MOD_RES (2)..(4)..(36)..(37): Xaa is C or S
RXGXAEVVMDSMEGIVVNNAADMIQITINSLRAPVXXS

SEQ ID NO: 35162 - protein, 38 aa, Artificial Sequence
  Non-cyclic GFR-binding peptide
  MOD_RES (32)..(33): Xaa is C or S
SEVVMDSMEGLVVNNASDMIQITINSLRTPVXXTPPTS

SEQ ID NO: 35163 - protein, 41 aa, Artificial Sequence
  Non-cyclic GFR-binding peptide
  MOD_RES (1)..(3)..(35)..(36): Xaa is C or S
XGXSRVVMNSMEGLIVNSSDDMIQVTINSLKTPAXXPKPVH

SEQ ID NO: 35164 - protein, 38 aa, Artificial Sequence
  Non-cyclic GFR-binding peptide
  MOD_RES (33)..(34): Xaa is C or S
  MOD_RES (11)..(12)..(13)..(14)..(15): Xaa is A or G
  MOD_RES (16)..(17)..(18)..(19): Xaa is A or G or absent
RVVMNSMEGLXXXXXXXXXMIQVTINSLKTPAXXPKPV

SEQ ID NO: 35165 - protein, 34 aa, Artificial Sequence
  Non-cyclic GFR-binding peptide
  MOD_RES (1)..(3)..(34): Xaa is C or S
XGXEEVIMSMEGLLLVRGNDMIQMTINSTKVPAX

SEQ ID NO: 35166 - protein, 40 aa, Artificial Sequence
  Non-cyclic GFR-binding peptide
  MOD_RES (1)..(3)..(36)..(37): Xaa is C or S
  MOD_RES (14)..(15)..(16)..(17)..(18): Xaa is A or G
  MOD_RES (19)..(20)..(21)..(22): Xaa is A or G or absent
XGXEEVIMSMEGIXXXXXXXXXMIQMTINSTKVPAXXTSP

SEQ ID NO: 35167 - protein, 37 aa, Artificial Sequence
  Non-cyclic GFR-binding peptide
  MOD_RES (2)..(36)..(37): Xaa is C or S
  MOD_RES (14)..(15)..(16)..(17)..(18): Xaa is A or G
  MOD_RES (19)..(20)..(21)..(22): Xaa is A or G or absent
GXAEVVMDSMEGIXXXXXXXXXMIQITINSLRAPVXX

SEQ ID NO: 35168 - protein, 34 aa, Artificial Sequence
  Non-cyclic GFR-binding peptide
  MOD_RES (1)..(1): Xaa is C or S
  MOD_RES (13)..(14)..(15)..(16)..(17): Xaa is A or G
  MOD_RES (18)..(19)..(20)..(21): Xaa is A or G or absent
XSRVVMNSMEGLXXXXXXXXXMIQVTINSLKTPA

SEQ ID NO: 35169 - protein, 34 aa, Artificial Sequence
  Non-cyclic GFR-binding peptide
  MOD_RES (1)..(3): Xaa is C or S
XGXSEVVMDSMEGLVVNNASDMIQITINSLRTPV

SEQ ID NO: 35170 - protein, 37 aa, Artificial Sequence
  Non-cyclic GFR-binding peptide
  MOD_RES (2)..(35)..(36): Xaa is C or S
  MOD_RES (13)..(14)..(15)..(16)..(17): Xaa is A or G
  MOD_RES (18)..(19)..(20)..(21): Xaa is A or G or absent
KXSRVIMSMEGLXXXXXXXXXMIQITINSLAQPVXXP

SEQ ID NO: 35171 - protein, 32 aa, Artificial Sequence
  Non-cyclic GFR-binding peptide
  MOD_RES (1)..(1): Xaa is C or S
XSRVVMNSMEGLIVNSSDDMIQVTINSLKTPA

SEQ ID NO: 35172 - protein, 36 aa, Artificial Sequence
  Non-cyclic GFR-binding peptide
  MOD_RES (1)..(33)..(34): Xaa is C or S
XSEVVMDSMEGLVVNNASDMIQITINSLRTPVXXTP

SEQ ID NO: 35173 - protein, 38 aa, Artificial Sequence
  Non-cyclic GFR-binding peptide
  MOD_RES (1)..(3)..(35)..(36): Xaa is C or S
XGXRDVVMGSMEGLIIQQKDNMIQMTINSMKTPTXXPG

SEQ ID NO: 35174 - protein, 40 aa, Artificial Sequence
  Non-cyclic GFR-binding peptide
  MOD_RES (1)..(3)..(35)..(36): Xaa is C or S
XGXRDVVMGSMEGLIIQQKDNMIQMTINSMKTPTXXPGAS

SEQ ID NO: 35175 - protein, 38 aa, Artificial Sequence
  Non-cyclic GFR-binding peptide
  MOD_RES (2)..(34)..(35): Xaa is C or S
GXSEVVMDSMEGIVVNNASDMIQITINSLRTPVXXTPP

SEQ ID NO: 35176 - protein, 35 aa, Artificial Sequence
  Non-cyclic GFR-binding peptide
  MOD_RES (1)..(3)..(35): Xaa is C or S
XGXSRVVMNSMEGLIVNSSDDMIQVTINSLKTPAX

SEQ ID NO: 35177 - protein, 36 aa, Artificial Sequence
  Non-cyclic GFR-binding peptide
  MOD_RES (2)..(4)..(36): Xaa is C or S
RXGXSEVVMDSMEGLVVNNASDMIQITINSLRTPVX

SEQ ID NO: 35178 - protein, 35 aa, Artificial Sequence
  Non-cyclic GFR-binding peptide
  MOD_RES (33)..(34): Xaa is C or S
  MOD_RES (11)..(12)..(13)..(14)..(15): Xaa is A or G
  MOD_RES (16)..(17)..(18)..(19): Xaa is A or G or absent
EVVMDSMEGIXXXXXXXXXMIQITINSLRAPVXXS

SEQ ID NO: 35179 - protein, 41 aa, Artificial Sequence
  Non-cyclic GFR-binding peptide
  MOD_RES (1)..(3)..(36)..(37): Xaa is C or S
  MOD_RES (14)..(15)..(16)..(17)..(18): Xaa is A or G
  MOD_RES (19)..(20)..(21)..(22): Xaa is A or G or absent
XKXSRVIMSMEGLXXXXXXXXXMIQITINSLAQPVXXPAAS

SEQ ID NO: 35180 - protein, 35 aa, Artificial Sequence
  Non-cyclic GFR-binding peptide
  MOD_RES (2)..(4): Xaa is C or S
RXGXAEVVMDSMEGIVVNNAADMIQITINSLRAPV

SEQ ID NO: 35181 - protein, 42 aa, Artificial Sequence
  Non-cyclic GFR-binding peptide
  MOD_RES (2)..(36)..(37): Xaa is C or S
  MOD_RES (14)..(15)..(16)..(17)..(18): Xaa is A or G
  MOD_RES (19)..(20)..(21)..(22): Xaa is A or G or absent
GXAEVVMDSMEGIXXXXXXXXXMIQITINSLRAPVXXSAPAA

SEQ ID NO: 35182 - protein, 36 aa, Artificial Sequence
  Non-cyclic GFR-binding peptide
  MOD_RES (33)..(34): Xaa is C or S
  MOD_RES (11)..(12)..(13)..(14)..(15): Xaa is A or G
  MOD_RES (16)..(17)..(18)..(19): Xaa is A or G or absent
SKVIMSMEGLXXXXXXXXXMIQITINSLDQSVXXPS

SEQ ID NO: 35183 - protein, 41 aa, Artificial Sequence
  Non-cyclic GFR-binding peptide
  MOD_RES (1)..(3)..(35)..(36): Xaa is C or S
XGXAEVVMDSMEGIVVNNAADMIQITINSLRAPVXXSAPAA

SEQ ID NO: 35184 - protein, 37 aa, Artificial Sequence
  Non-cyclic GFR-binding peptide
  MOD_RES (2)..(4)..(37): Xaa is C or S
  MOD_RES (15)..(16)..(17)..(18)..(19): Xaa is A or G
  MOD_RES (20)..(21)..(22)..(23): Xaa is A or G or absent
SXKXSKVIMSMEGLXXXXXXXXXMIQITINSLDQSVX

SEQ ID NO: 35185 - protein, 40 aa, Artificial Sequence
  Non-cyclic GFR-binding peptide
  MOD_RES (2)..(35)..(36): Xaa is C or S
  MOD_RES (13)..(14)..(15)..(16)..(17): Xaa is A or G
  MOD_RES (18)..(19)..(20)..(21): Xaa is A or G or absent
GXEEVIMSMEGIXXXXXXXXXMIQMTINSTKVPAXXTSPV

SEQ ID NO: 35186 - protein, 39 aa, Artificial Sequence
  Non-cyclic GFR-binding peptide
  MOD_RES (1)..(33)..(34): Xaa is C or S
XSEVVMDSMEGIVVNNASDMIQITINSLRTPVXXTPPTS

SEQ ID NO: 35187 - protein, 36 aa, Artificial Sequence
  Non-cyclic GFR-binding peptide
  MOD_RES (1)..(35)..(36): Xaa is C or S
  MOD_RES (13)..(14)..(15)..(16)..(17): Xaa is A or G
  MOD_RES (18)..(19)..(20)..(21): Xaa is A or G or absent
XSEVVMDSMEGLXXXXXXXXXMIQITINSLRTPVXX

SEQ ID NO: 35188 - protein, 36 aa, Artificial Sequence
  Non-cyclic GFR-binding peptide
  MOD_RES (1)..(33)..(34): Xaa is C or S
XRDVVMGSMEGIIIQQKDNMIQMTINSMKTPTXXPG

SEQ ID NO: 35189 - protein, 37 aa, Artificial Sequence
  Non-cyclic GFR-binding peptide
  MOD_RES (1)..(32)..(33): Xaa is C or S
XEEVIMSMEGILLVRGNDMIQMTINSTKVPAXXTSPV

SEQ ID NO: 35190 - protein, 35 aa, Artificial Sequence
  Non-cyclic GFR-binding peptide
  MOD_RES (2)..(2): Xaa is C or S
  MOD_RES (14)..(15)..(16)..(17)..(18): Xaa is A or G
  MOD_RES (19)..(20)..(21)..(22): Xaa is A or G or absent
GXSRVVMNSMEGLXXXXXXXXXMIQVTINSLKTPA

SEQ ID NO: 35191 - protein, 41 aa, Artificial Sequence
  Non-cyclic GFR-binding peptide
  MOD_RES (1)..(3)..(36)..(37): Xaa is C or S
  MOD_RES (14)..(15)..(16)..(17)..(18): Xaa is A or G
  MOD_RES (19)..(20)..(21)..(22): Xaa is A or G or absent
XKXSKVIMSMEGLXXXXXXXXXMIQITINSLDQSVXXPSAS

SEQ ID NO: 35192 - protein, 35 aa, Artificial Sequence
  Non-cyclic GFR-binding peptide
  MOD_RES (32)..(33): Xaa is C or S
SEVVMDSMEGLVVNNASDMIQITINSLRTPVXXTP

SEQ ID NO: 35193 - protein, 37 aa, Artificial Sequence
  Non-cyclic GFR-binding peptide
  MOD_RES (31)..(32): Xaa is C or S
RVVMNSMEGLIVNSSDDMIQVTINSLKTPAXXPKPVH

SEQ ID NO: 35194 - protein, 39 aa, Artificial Sequence
  Non-cyclic GFR-binding peptide
  MOD_RES (2)..(4)..(38)..(39): Xaa is C or S
  MOD_RES (16)..(17)..(18)..(19)..(20): Xaa is A or G
  MOD_RES (21)..(22)..(23)..(24): Xaa is A or G or absent
HXGXSRVVMNSMEGLXXXXXXXXXMIQVTINSLKTPAXX

SEQ ID NO: 35195 - protein, 35 aa, Artificial Sequence
  Non-cyclic GFR-binding peptide
  MOD_RES (1)..(3): Xaa is C or S
  MOD_RES (14)..(15)..(16)..(17)..(18): Xaa is A or G
  MOD_RES (19)..(20)..(21)..(22): Xaa is A or G or absent
XKXSKVIMSMEGLXXXXXXXXXMIQITINSLDQSV

SEQ ID NO: 35196 - protein, 34 aa, Artificial Sequence
  Non-cyclic GFR-binding peptide
  MOD_RES (34)..(34): Xaa is C or S
  MOD_RES (12)..(13)..(14)..(15)..(16): Xaa is A or G
  MOD_RES (17)..(18)..(19)..(20): Xaa is A or G or absent
RDVVMGSMEGIXXXXXXXXXMIQMTINSMKTPTX

SEQ ID NO: 35197 - protein, 33 aa, Artificial Sequence
  Non-cyclic GFR-binding peptide
  MOD_RES (33)..(33): Xaa is C or S
  MOD_RES (11)..(12)..(13)..(14)..(15): Xaa is A or G
  MOD_RES (16)..(17)..(18)..(19): Xaa is A or G or absent
SKVIMSMEGLXXXXXXXXXMIQITINSLDQSVX

SEQ ID NO: 35198 - protein, 37 aa, Artificial Sequence
  Non-cyclic GFR-binding peptide
  MOD_RES (1)..(34)..(35): Xaa is C or S
  MOD_RES (12)..(13)..(14)..(15)..(16): Xaa is A or G
  MOD_RES (17)..(18)..(19)..(20): Xaa is A or G or absent
XSKVIMSMEGLXXXXXXXXXMIQITINSLDQSVXXPS

SEQ ID NO: 35199 - protein, 39 aa, Artificial Sequence
  Non-cyclic GFR-binding peptide
  MOD_RES (2)..(4)..(36)..(37): Xaa is C or S
SXGXRDVVMGSMEGIIIQQKDNMIQMTINSMKTPTXXPG

SEQ ID NO: 35200 - protein, 40 aa, Artificial Sequence
  Non-cyclic GFR-binding peptide
  MOD_RES (2)..(35)..(36): Xaa is C or S
  MOD_RES (13)..(14)..(15)..(16)..(17): Xaa is A or G
  MOD_RES (18)..(19)..(20)..(21): Xaa is A or G or absent
KXSKVVMSMEGLXXXXXXXXXMIQITINSLDQPVXXPSAS

SEQ ID NO: 35201 - protein, 42 aa, Artificial Sequence
  Non-cyclic GFR-binding peptide
  MOD_RES (1)..(3)..(37)..(38): Xaa is C or S
  MOD_RES (15)..(16)..(17)..(18)..(19): Xaa is A or G
  MOD_RES (20)..(21)..(22)..(23): Xaa is A or G or absent
XGXRDVVMGSMEGLXXXXXXXXXMIQMTINSMKTPTXXPGAS

SEQ ID NO: 35202 - protein, 38 aa, Artificial Sequence
  Non-cyclic GFR-binding peptide
  MOD_RES (33)..(34): Xaa is C or S
  MOD_RES (11)..(12)..(13)..(14)..(15): Xaa is A or G
  MOD_RES (16)..(17)..(18)..(19): Xaa is A or G or absent
SRVIMSMEGLXXXXXXXXXMIQITINSLAQPVXXPAAS

SEQ ID NO: 35203 - protein, 40 aa, Artificial Sequence
  Non-cyclic GFR-binding peptide
  MOD_RES (2)..(34)..(35): Xaa is C or S
GXAEVVMDSMEGLVVNNAADMIQITINSLRAPVXXSAPAA

SEQ ID NO: 35204 - protein, 39 aa, Artificial Sequence
  Non-cyclic GFR-binding peptide
  MOD_RES (1)..(33)..(34): Xaa is C or S
XAEVVMDSMEGLVVNNAADMIQITINSLRAPVXXSAPAA

SEQ ID NO: 35205 - protein, 38 aa, Artificial Sequence
  Non-cyclic GFR-binding peptide
  MOD_RES (1)..(35)..(36): Xaa is C or S
  MOD_RES (13)..(14)..(15)..(16)..(17): Xaa is A or G
  MOD_RES (18)..(19)..(20)..(21): Xaa is A or G or absent
XAEVVMDSMEGLXXXXXXXXXMIQITINSLRAPVXXSA

SEQ ID NO: 35206 - protein, 38 aa, Artificial Sequence
  Non-cyclic GFR-binding peptide
  MOD_RES (1)..(3)..(34)..(35): Xaa is C or S
XKXSKVIMSMEGLIKPTKGIMIQITINSLDQSVXXPSA

SEQ ID NO: 35207 - protein, 36 aa, Artificial Sequence
  Non-cyclic GFR-binding peptide
  MOD_RES (1)..(3)..(35)..(36): Xaa is C or S
XGXAEVVMDSMEGIVVNNAADMIQITINSLRAPVXX

SEQ ID NO: 35208 - protein, 36 aa, Artificial Sequence
  Non-cyclic GFR-binding peptide
  MOD_RES (1)..(33)..(34): Xaa is C or S
XAEVVMDSMEGLVVNNAADMIQITINSLRAPVXXSA

SEQ ID NO: 35209 - protein, 35 aa, Artificial Sequence
  Non-cyclic GFR-binding peptide
  MOD_RES (31)..(32): Xaa is C or S
SKVIMSMEGLIKPTKGIMIQITINSLDQSVXXPSA

SEQ ID NO: 35210 - protein, 37 aa, Artificial Sequence
  Non-cyclic GFR-binding peptide
  MOD_RES (1)..(3)..(35)..(36): Xaa is C or S
XGXAEVVMDSMEGLVVNNAADMIQITINSLRAPVXXS

SEQ ID NO: 35211 - protein, 42 aa, Artificial Sequence
  Non-cyclic GFR-binding peptide
  MOD_RES (2)..(4)..(38)..(39): Xaa is C or S
  MOD_RES (16)..(17)..(18)..(19)..(20): Xaa is A or G
  MOD_RES (21)..(22)..(23)..(24): Xaa is A or G or absent
RXGXSEVVMDSMEGLXXXXXXXXXMIQITINSLRTPVXXTPP

SEQ ID NO: 35212 - protein, 35 aa, Artificial Sequence
  Non-cyclic GFR-binding peptide
  MOD_RES (31)..(32): Xaa is C or S
EVVMDSMEGIVVNNAADMIQITINSLRAPVXXSAP

SEQ ID NO: 35213 - protein, 38 aa, Artificial Sequence
  Non-cyclic GFR-binding peptide
  MOD_RES (2)..(4)..(36)..(37): Xaa is C or S
HXGXSRVVMNSMEGLIVNSSDDMIQVTINSLKTPAXXP

SEQ ID NO: 35214 - protein, 38 aa, Artificial Sequence
  Non-cyclic GFR-binding peptide
  MOD_RES (1)..(32)..(33): Xaa is C or S
XSKVVMSMEGLVKPTRGVMIQITINSLDQPVXXPSASA

SEQ ID NO: 35215 - protein, 36 aa, Artificial Sequence
  Non-cyclic GFR-binding peptide
  MOD_RES (33)..(34): Xaa is C or S
  MOD_RES (11)..(12)..(13)..(14)..(15): Xaa is A or G
  MOD_RES (16)..(17)..(18)..(19): Xaa is A or G or absent
EVVMDSMEGLXXXXXXXXXMIQITINSLRTPVXXTP

SEQ ID NO: 35216 - protein, 44 aa, Artificial Sequence
  Non-cyclic GFR-binding peptide
  MOD_RES (2)..(4)..(38)..(39): Xaa is C or S
  MOD_RES (16)..(17)..(18)..(19)..(20): Xaa is A or G
  MOD_RES (21)..(22)..(23)..(24): Xaa is A or G or absent
HXGXSRVVMNSMEGIXXXXXXXXXMIQVTINSLKTPAXXPKPVH

SEQ ID NO: 35217 - protein, 40 aa, Artificial Sequence
  Non-cyclic GFR-binding peptide
  MOD_RES (2)..(36)..(37): Xaa is C or S
  MOD_RES (14)..(15)..(16)..(17)..(18): Xaa is A or G
  MOD_RES (19)..(20)..(21)..(22): Xaa is A or G or absent
GXAEVVMDSMEGIXXXXXXXXXMIQITINSLRAPVXXSAP

SEQ ID NO: 35218 - protein, 41 aa, Artificial Sequence
  Non-cyclic GFR-binding peptide
  MOD_RES (1)..(3)..(35)..(36): Xaa is C or S
XGXSEVVMDSMEGIVVNNASDMIQITINSLRTPVXXTPPTS

SEQ ID NO: 35219 - protein, 34 aa, Artificial Sequence
  Non-cyclic GFR-binding peptide
  MOD_RES (1)..(3)..(34): Xaa is C or S
XKXSKVIMSMEGLIKPTKGIMIQITINSLDQSVX

SEQ ID NO: 35220 - protein, 36 aa, Artificial Sequence
  Non-cyclic GFR-binding peptide
  MOD_RES (33)..(34): Xaa is C or S
  MOD_RES (11)..(12)..(13)..(14)..(15): Xaa is A or G
  MOD_RES (16)..(17)..(18)..(19): Xaa is A or G or absent
EEVIMSMEGIXXXXXXXXXMIQMTINSTKVPAXXTS

SEQ ID NO: 35221 - protein, 34 aa, Artificial Sequence
  Non-cyclic GFR-binding peptide
  MOD_RES (2)..(4): Xaa is C or S
LXGXEEVIMSMEGLLLVRGNDMIQMTINSTKVPA

SEQ ID NO: 35222 - protein, 42 aa, Artificial Sequence
  Non-cyclic GFR-binding peptide
  MOD_RES (1)..(3)..(37)..(38): Xaa is C or S
  MOD_RES (15)..(16)..(17)..(18)..(19): Xaa is A or G
  MOD_RES (20)..(21)..(22)..(23): Xaa is A or G or absent
XGXSEVVMDSMEGLXXXXXXXXXMIQITINSLRTPVXXTPPT

SEQ ID NO: 35223 - protein, 37 aa, Artificial Sequence
  Non-cyclic GFR-binding peptide
  MOD_RES (32)..(33): Xaa is C or S
RDVVMGSMEGLIIQQKDNMIQMTINSMKTPTXXPGAS

SEQ ID NO: 35224 - protein, 38 aa, Artificial Sequence
  Non-cyclic GFR-binding peptide
  MOD_RES (2)..(36)..(37): Xaa is C or S
  MOD_RES (14)..(15)..(16)..(17)..(18): Xaa is A or G
  MOD_RES (19)..(20)..(21)..(22): Xaa is A or G or absent
GXAEVVMDSMEGLXXXXXXXXXMIQITINSLRAPVXXS

SEQ ID NO: 35225 - protein, 42 aa, Artificial Sequence
  Non-cyclic GFR-binding peptide
  MOD_RES (2)..(4)..(36)..(37): Xaa is C or S
SXGXRDVVMGSMEGLIIQQKDNMIQMTINSMKTPTXXPGASG

SEQ ID NO: 35226 - protein, 38 aa, Artificial Sequence
  Non-cyclic GFR-binding peptide
  MOD_RES (1)..(35)..(36): Xaa is C or S
  MOD_RES (13)..(14)..(15)..(16)..(17): Xaa is A or G
  MOD_RES (18)..(19)..(20)..(21): Xaa is A or G or absent
XSRVVMNSMEGLXXXXXXXXXMIQVTINSLKTPAXXPK

SEQ ID NO: 35227 - protein, 32 aa, Artificial Sequence
  Non-cyclic GFR-binding peptide
  MOD_RES (31)..(32): Xaa is C or S
RVVMNSMEGLIVNSSDDMIQVTINSLKTPAXX

SEQ ID NO: 35228 - protein, 36 aa, Artificial Sequence
  Non-cyclic GFR-binding peptide
  MOD_RES (34)..(35): Xaa is C or S
  MOD_RES (12)..(13)..(14)..(15)..(16): Xaa is A or G
  MOD_RES (17)..(18)..(19)..(20): Xaa is A or G or absent
SEVVMDSMEGIXXXXXXXXXMIQITINSLRTPVXXT

SEQ ID NO: 35229 - protein, 37 aa, Artificial Sequence
  Non-cyclic GFR-binding peptide
  MOD_RES (1)..(3)..(35)..(36): Xaa is C or S
XGXSRVVMNSMEGLIVNSSDDMIQVTINSLKTPAXXP

SEQ ID NO: 35230 - protein, 37 aa, Artificial Sequence
  Non-cyclic GFR-binding peptide
  MOD_RES (1)..(34)..(35): Xaa is C or S
  MOD_RES (12)..(13)..(14)..(15)..(16): Xaa is A or G
  MOD_RES (17)..(18)..(19)..(20): Xaa is A or G or absent
XEEVIMSMEGIXXXXXXXXXMIQMTINSTKVPAXXTS

SEQ ID NO: 35231 - protein, 37 aa, Artificial Sequence
  Non-cyclic GFR-binding peptide
  MOD_RES (1)..(32)..(33): Xaa is C or S
XSKVIMSMEGLIKPTKGIMIQITINSLDQSVXXPSAS

SEQ ID NO: 35232 - protein, 39 aa, Artificial Sequence
  Non-cyclic GFR-binding peptide
  MOD_RES (1)..(35)..(36): Xaa is C or S
  MOD_RES (13)..(14)..(15)..(16)..(17): Xaa is A or G
  MOD_RES (18)..(19)..(20)..(21): Xaa is A or G or absent
XRDVVMGSMEGLXXXXXXXXXMIQMTINSMKTPTXXPGA

SEQ ID NO: 35233 - protein, 41 aa, Artificial Sequence
  Non-cyclic GFR-binding peptide
  MOD_RES (2)..(4)..(36)..(37): Xaa is C or S
RXGXAEVVMDSMEGIVVNNAADMIQITINSLRAPVXXSAPA

SEQ ID NO: 35234 - protein, 37 aa, Artificial Sequence
  Non-cyclic GFR-binding peptide
  MOD_RES (1)..(35)..(36): Xaa is C or S
  MOD_RES (13)..(14)..(15)..(16)..(17): Xaa is A or G
  MOD_RES (18)..(19)..(20)..(21): Xaa is A or G or absent
XAEVVMDSMEGIXXXXXXXXXMIQITINSLRAPVXXS

SEQ ID NO: 35235 - protein, 36 aa, Artificial Sequence
  Non-cyclic GFR-binding peptide
  MOD_RES (1)..(3): Xaa is C or S
  MOD_RES (15)..(16)..(17)..(18)..(19): Xaa is A or G
  MOD_RES (20)..(21)..(22)..(23): Xaa is A or G or absent
XGXSEVVMDSMEGLXXXXXXXXXMIQITINSLRTPV

SEQ ID NO: 35236 - protein, 39 aa, Artificial Sequence
  Non-cyclic GFR-binding peptide
  MOD_RES (1)..(3)..(35)..(36): Xaa is C or S
XGXAEVVMDSMEGIVVNNAADMIQITINSLRAPVXXSAP

SEQ ID NO: 35237 - protein, 44 aa, Artificial Sequence
  Non-cyclic GFR-binding peptide
  MOD_RES (2)..(4)..(38)..(39): Xaa is C or S
  MOD_RES (16)..(17)..(18)..(19)..(20): Xaa is A or G
  MOD_RES (21)..(22)..(23)..(24): Xaa is A or G or absent
SXGXRDVVMGSMEGIXXXXXXXXXMIQMTINSMKTPTXXPGASG

SEQ ID NO: 35238 - protein, 39 aa, Artificial Sequence
  Non-cyclic GFR-binding peptide
  MOD_RES (1)..(3)..(36)..(37): Xaa is C or S
  MOD_RES (14)..(15)..(16)..(17)..(18): Xaa is A or G
  MOD_RES (19)..(20)..(21)..(22): Xaa is A or G or absent
XKXSRVIMSMEGLXXXXXXXXXMIQITINSLAQPVXXPA

SEQ ID NO: 35239 - protein, 34 aa, Artificial Sequence
  Non-cyclic GFR-binding peptide
  MOD_RES (1)..(33)..(34): Xaa is C or S
XSEVVMDSMEGIVVNNASDMIQITINSLRTPVXX

SEQ ID NO: 35240 - protein, 35 aa, Artificial Sequence
  Non-cyclic GFR-binding peptide
  MOD_RES (1)..(34)..(35): Xaa is C or S
  MOD_RES (12)..(13)..(14)..(15)..(16): Xaa is A or G
  MOD_RES (17)..(18)..(19)..(20): Xaa is A or G or absent
XSRVIMSMEGLXXXXXXXXXMIQITINSLAQPVXX

SEQ ID NO: 35241 - protein, 40 aa, Artificial Sequence
  Non-cyclic GFR-binding peptide
  MOD_RES (2)..(4)..(36)..(37): Xaa is C or S
RXGXAEVVMDSMEGIVVNNAADMIQITINSLRAPVXXSAP

SEQ ID NO: 35242 - protein, 32 aa, Artificial Sequence
  Non-cyclic GFR-binding peptide
  MOD_RES (32)..(32): Xaa is C or S
SEVVMDSMEGIVVNNASDMIQITINSLRTPVX

SEQ ID NO: 35243 - protein, 37 aa, Artificial Sequence
  Non-cyclic GFR-binding peptide
  MOD_RES (1)..(33)..(34): Xaa is C or S
XAEVVMDSMEGLVVNNAADMIQITINSLRAPVXXSAP

SEQ ID NO: 35244 - protein, 38 aa, Artificial Sequence
  Non-cyclic GFR-binding peptide
  MOD_RES (1)..(3)..(37)..(38): Xaa is C or S
  MOD_RES (15)..(16)..(17)..(18)..(19): Xaa is A or G
  MOD_RES (20)..(21)..(22)..(23): Xaa is A or G or absent
XGXSRVVMNSMEGLXXXXXXXXXMIQVTINSLKTPAXX

SEQ ID NO: 35245 - protein, 41 aa, Artificial Sequence
  Non-cyclic GFR-binding peptide
  MOD_RES (2)..(4)..(35)..(36): Xaa is C or S
LXGXEEVIMSMEGILLVRGNDMIQMTINSTKVPAXXTSPVR

SEQ ID NO: 35246 - protein, 34 aa, Artificial Sequence
  Non-cyclic GFR-binding peptide
  MOD_RES (2)..(2): Xaa is C or S
  MOD_RES (13)..(14)..(15)..(16)..(17): Xaa is A or G
  MOD_RES (18)..(19)..(20)..(21): Xaa is A or G or absent
KXSKVVMSMEGLXXXXXXXXXMIQITINSLDQPV

SEQ ID NO: 35247 - protein, 39 aa, Artificial Sequence
  Non-cyclic GFR-binding peptide
  MOD_RES (2)..(4)..(38)..(39): Xaa is C or S
  MOD_RES (16)..(17)..(18)..(19)..(20): Xaa is A or G
  MOD_RES (21)..(22)..(23)..(24): Xaa is A or G or absent
RXGXSEVVMDSMEGLXXXXXXXXXMIQITINSLRTPVXX

SEQ ID NO: 35248 - protein, 38 aa, Artificial Sequence
  Non-cyclic GFR-binding peptide
  MOD_RES (2)..(4)..(38): Xaa is C or S
  MOD_RES (16)..(17)..(18)..(19)..(20): Xaa is A or G
  MOD_RES (21)..(22)..(23)..(24): Xaa is A or G or absent
SXGXRDVVMGSMEGIXXXXXXXXXMIQMTINSMKTPTX

SEQ ID NO: 35249 - protein, 37 aa, Artificial Sequence
  Non-cyclic GFR-binding peptide
  MOD_RES (1)..(3)..(35)..(36): Xaa is C or S
XGXRDVVMGSMEGLIIQQKDNMIQMTINSMKTPTXXP

SEQ ID NO: 35250 - protein, 35 aa, Artificial Sequence
  Non-cyclic GFR-binding peptide
  MOD_RES (2)..(34)..(35): Xaa is C or S
GXAEVVMDSMEGIVVNNAADMIQITINSLRAPVXX

SEQ ID NO: 35251 - protein, 38 aa, Artificial Sequence
  Non-cyclic GFR-binding peptide
  MOD_RES (2)..(4)..(38): Xaa is C or S
  MOD_RES (16)..(17)..(18)..(19)..(20): Xaa is A or G
  MOD_RES (21)..(22)..(23)..(24): Xaa is A or G or absent
RXGXAEVVMDSMEGLXXXXXXXXXMIQITINSLRAPVX

SEQ ID NO: 35252 - protein, 35 aa, Artificial Sequence
  Non-cyclic GFR-binding peptide
  MOD_RES (2)..(4)..(35): Xaa is C or S
SXKXSRVIMSMEGLVKPKRGVMIQITINSLAQPVX

SEQ ID NO: 35253 - protein, 33 aa, Artificial Sequence
  Non-cyclic GFR-binding peptide
  MOD_RES (33)..(33): Xaa is C or S
  MOD_RES (11)..(12)..(13)..(14)..(15): Xaa is A or G
  MOD_RES (16)..(17)..(18)..(19): Xaa is A or G or absent
EVVMDSMEGIXXXXXXXXXMIQITINSLRAPVX

SEQ ID NO: 35254 - protein, 33 aa, Artificial Sequence
  Non-cyclic GFR-binding peptide
  MOD_RES (32)..(33): Xaa is C or S
SEVVMDSMEGLVVNNASDMIQITINSLRTPVXX

SEQ ID NO: 35255 - protein, 34 aa, Artificial Sequence
  Non-cyclic GFR-binding peptide
  MOD_RES (31)..(32): Xaa is C or S
EVVMDSMEGLVVNNAADMIQITINSLRAPVXXSA

SEQ ID NO: 35256 - protein, 40 aa, Artificial Sequence
  Non-cyclic GFR-binding peptide
  MOD_RES (34)..(35): Xaa is C or S
  MOD_RES (12)..(13)..(14)..(15)..(16): Xaa is A or G
  MOD_RES (17)..(18)..(19)..(20): Xaa is A or G or absent
RDVVMGSMEGLXXXXXXXXXMIQMTINSMKTPTXXPGASG

SEQ ID NO: 35257 - protein, 39 aa, Artificial Sequence
  Non-cyclic GFR-binding peptide
  MOD_RES (2)..(4)..(35)..(36): Xaa is C or S
LXGXEEVIMSMEGILLVRGNDMIQMTINSTKVPAXXTSP

SEQ ID NO: 35258 - protein, 32 aa, Artificial Sequence
  Non-cyclic GFR-binding peptide
  MOD_RES (11)..(12)..(13)..(14)..(15): Xaa is A or G
  MOD_RES (16)..(17)..(18)..(19): Xaa is A or G or absent
EEVIMSMEGLXXXXXXXXXMIQMTINSTKVPA

SEQ ID NO: 35259 - protein, 36 aa, Artificial Sequence
  Non-cyclic GFR-binding peptide
  MOD_RES (1)..(34)..(35): Xaa is C or S
  MOD_RES (12)..(13)..(14)..(15)..(16): Xaa is A or G
  MOD_RES (17)..(18)..(19)..(20): Xaa is A or G or absent
XEEVIMSMEGLXXXXXXXXXMIQMTINSTKVPAXXT

SEQ ID NO: 35260 - protein, 39 aa, Artificial Sequence
  Non-cyclic GFR-binding peptide
  MOD_RES (33)..(34): Xaa is C or S
  MOD_RES (11)..(12)..(13)..(14)..(15): Xaa is A or G
  MOD_RES (16)..(17)..(18)..(19): Xaa is A or G or absent
EEVIMSMEGLXXXXXXXXXMIQMTINSTKVPAXXTSPVR

SEQ ID NO: 35261 - protein, 33 aa, Artificial Sequence
  Non-cyclic GFR-binding peptide
  MOD_RES (2)..(2): Xaa is C or S
GXSEVVMDSMEGIVVNNASDMIQITINSLRTPV

SEQ ID NO: 35262 - protein, 36 aa, Artificial Sequence
  Non-cyclic GFR-binding peptide
  MOD_RES (2)..(4)..(36): Xaa is C or S
RXGXAEVVMDSMEGIVVNNAADMIQITINSLRAPVX

SEQ ID NO: 35263 - protein, 32 aa, Artificial Sequence
  Non-cyclic GFR-binding peptide
  MOD_RES (31)..(32): Xaa is C or S
EVVMDSMEGLVVNNAADMIQITINSLRAPVXX

SEQ ID NO: 35264 - protein, 42 aa, Artificial Sequence
  Non-cyclic GFR-binding peptide
  MOD_RES (2)..(4)..(37)..(38): Xaa is C or S
  MOD_RES (15)..(16)..(17)..(18)..(19): Xaa is A or G
  MOD_RES (20)..(21)..(22)..(23): Xaa is A or G or absent
SXKXSKVIMSMEGLXXXXXXXXXMIQITINSLDQSVXXPSAS

SEQ ID NO: 35265 - protein, 38 aa, Artificial Sequence
  Non-cyclic GFR-binding peptide
  MOD_RES (1)..(35)..(36): Xaa is C or S
  MOD_RES (13)..(14)..(15)..(16)..(17): Xaa is A or G
  MOD_RES (18)..(19)..(20)..(21): Xaa is A or G or absent
XSEVVMDSMEGLXXXXXXXXXMIQITINSLRTPVXXTP

SEQ ID NO: 35266 - protein, 37 aa, Artificial Sequence
  Non-cyclic GFR-binding peptide
  MOD_RES (31)..(32): Xaa is C or S
EVVMDSMEGLVVNNAADMIQITINSLRAPVXXSAPAA

SEQ ID NO: 35267 - protein, 43 aa, Artificial Sequence
  Non-cyclic GFR-binding peptide
  MOD_RES (1)..(3)..(37)..(38): Xaa is C or S
  MOD_RES (15)..(16)..(17)..(18)..(19): Xaa is A or G
  MOD_RES (20)..(21)..(22)..(23): Xaa is A or G or absent
XGXRDVVMGSMEGIXXXXXXXXXMIQMTINSMKTPTXXPGASG

SEQ ID NO: 35268 - protein, 36 aa, Artificial Sequence
  Non-cyclic GFR-binding peptide
  MOD_RES (31)..(32): Xaa is C or S
DVVMGSMEGIIIQQKDNMIQMTINSMKTPTXXPGAS

SEQ ID NO: 35269 - protein, 36 aa, Artificial Sequence
  Non-cyclic GFR-binding peptide
  MOD_RES (1)..(32)..(33): Xaa is C or S
XSKVVMSMEGLVKPTRGVMIQITINSLDQPVXXPSA

SEQ ID NO: 35270 - protein, 41 aa, Artificial Sequence
  Non-cyclic GFR-binding peptide
  MOD_RES (2)..(4)..(37)..(38): Xaa is C or S
  MOD_RES (15)..(16)..(17)..(18)..(19): Xaa is A or G
  MOD_RES (20)..(21)..(22)..(23): Xaa is A or G or absent
LXGXEEVIMSMEGIXXXXXXXXXMIQMTINSTKVPAXXTSP

SEQ ID NO: 35271 - protein, 37 aa, Artificial Sequence
  Non-cyclic GFR-binding peptide
  MOD_RES (1)..(3)..(37): Xaa is C or S
  MOD_RES (15)..(16)..(17)..(18)..(19): Xaa is A or G
  MOD_RES (20)..(21)..(22)..(23): Xaa is A or G or absent
XGXRDVVMGSMEGLXXXXXXXXXMIQMTINSMKTPTX

SEQ ID NO: 35272 - protein, 36 aa, Artificial Sequence
  Non-cyclic GFR-binding peptide
  MOD_RES (32)..(33): Xaa is C or S
AEVVMDSMEGLVVNNAADMIQITINSLRAPVXXSAP

SEQ ID NO: 35273 - protein, 41 aa, Artificial Sequence
  Non-cyclic GFR-binding peptide
  MOD_RES (1)..(3)..(36)..(37): Xaa is C or S
  MOD_RES (14)..(15)..(16)..(17)..(18): Xaa is A or G
  MOD_RES (19)..(20)..(21)..(22): Xaa is A or G or absent
XKXSKVVMSMEGLXXXXXXXXXMIQITINSLDQPVXXPSAS

SEQ ID NO: 35274 - protein, 33 aa, Artificial Sequence
  Non-cyclic GFR-binding peptide
  MOD_RES (2)..(2): Xaa is C or S
GXRDVVMGSMEGLIIQQKDNMIQMTINSMKTPT

SEQ ID NO: 35275 - protein, 32 aa, Artificial Sequence
  Non-cyclic GFR-binding peptide
  MOD_RES (2)..(2): Xaa is C or S
GXEEVIMSMEGLLLVRGNDMIQMTINSTKVPA

SEQ ID NO: 35276 - protein, 34 aa, Artificial Sequence
  Non-cyclic GFR-binding peptide
  MOD_RES (31)..(32): Xaa is C or S
EVVMDSMEGLVVNNASDMIQITINSLRTPVXXTP

SEQ ID NO: 35277 - protein, 41 aa, Artificial Sequence
  Non-cyclic GFR-binding peptide
  MOD_RES (2)..(4)..(37)..(38): Xaa is C or S
  MOD_RES (15)..(16)..(17)..(18)..(19): Xaa is A or G
  MOD_RES (20)..(21)..(22)..(23): Xaa is A or G or absent
SXKXSRVIMSMEGLXXXXXXXXXMIQITINSLAQPVXXPAA

SEQ ID NO: 35278 - protein, 35 aa, Artificial Sequence
  Non-cyclic GFR-binding peptide
  MOD_RES (2)..(34)..(35): Xaa is C or S
GXSRVVMNSMEGLIVNSSDDMIQVTINSLKTPAXX

SEQ ID NO: 35279 - protein, 38 aa, Artificial Sequence
  Non-cyclic GFR-binding peptide
  MOD_RES (34)..(35): Xaa is C or S
  MOD_RES (12)..(13)..(14)..(15)..(16): Xaa is A or G
  MOD_RES (17)..(18)..(19)..(20): Xaa is A or G or absent
AEVVMDSMEGIXXXXXXXXXMIQITINSLRAPVXXSAP

SEQ ID NO: 35280 - protein, 32 aa, Artificial Sequence
  Non-cyclic GFR-binding peptide
  MOD_RES (11)..(12)..(13)..(14)..(15): Xaa is A or G
  MOD_RES (16)..(17)..(18)..(19): Xaa is A or G or absent
SKVVMSMEGLXXXXXXXXXMIQITINSLDQPV

SEQ ID NO: 35281 - protein, 39 aa, Artificial Sequence
  Non-cyclic GFR-binding peptide
  MOD_RES (1)..(34)..(35): Xaa is C or S
  MOD_RES (12)..(13)..(14)..(15)..(16): Xaa is A or G
  MOD_RES (17)..(18)..(19)..(20): Xaa is A or G or absent
XEEVIMSMEGLXXXXXXXXXMIQMTINSTKVPAXXTSPV

SEQ ID NO: 35282 - protein, 33 aa, Artificial Sequence
  Non-cyclic GFR-binding peptide
  MOD_RES (1)..(1): Xaa is C or S
  MOD_RES (12)..(13)..(14)..(15)..(16): Xaa is A or G
  MOD_RES (17)..(18)..(19)..(20): Xaa is A or G or absent
XEEVIMSMEGIXXXXXXXXXMIQMTINSTKVPA

SEQ ID NO: 35283 - protein, 38 aa, Artificial Sequence
  Non-cyclic GFR-binding peptide
  MOD_RES (2)..(4)..(36)..(37): Xaa is C or S
SXGXRDVVMGSMEGIIIQQKDNMIQMTINSMKTPTXXP

SEQ ID NO: 35284 - protein, 31 aa, Artificial Sequence
  Non-cyclic GFR-binding peptide
SRVVMNSMEGLIVNSSDDMIQVTINSLKTPA

SEQ ID NO: 35285 - protein, 36 aa, Artificial Sequence
  Non-cyclic GFR-binding peptide
  MOD_RES (32)..(33): Xaa is C or S
SEVVMDSMEGIVVNNASDMIQITINSLRTPVXXTPP

SEQ ID NO: 35286 - protein, 40 aa, Artificial Sequence
  Non-cyclic GFR-binding peptide
  MOD_RES (1)..(3)..(36)..(37): Xaa is C or S
  MOD_RES (14)..(15)..(16)..(17)..(18): Xaa is A or G
  MOD_RES (19)..(20)..(21)..(22): Xaa is A or G or absent
XGXEEVIMSMEGLXXXXXXXXXMIQMTINSTKVPAXXTSP

SEQ ID NO: 35287 - protein, 37 aa, Artificial Sequence
  Non-cyclic GFR-binding peptide
  MOD_RES (1)..(32)..(33): Xaa is C or S
XSRVIMSMEGLVKPKRGVMIQITINSLAQPVXXPAAS

SEQ ID NO: 35288 - protein, 41 aa, Artificial Sequence
  Non-cyclic GFR-binding peptide
  MOD_RES (2)..(4)..(38)..(39): Xaa is C or S
  MOD_RES (16)..(17)..(18)..(19)..(20): Xaa is A or G
  MOD_RES (21)..(22)..(23)..(24): Xaa is A or G or absent
RXGXSEVVMDSMEGIXXXXXXXXXMIQITINSLRTPVXXTP

SEQ ID NO: 35289 - protein, 36 aa, Artificial Sequence
  Non-cyclic GFR-binding peptide
  MOD_RES (1)..(3): Xaa is C or S
  MOD_RES (15)..(16)..(17)..(18)..(19): Xaa is A or G
  MOD_RES (20)..(21)..(22)..(23): Xaa is A or G or absent
XGXAEVVMDSMEGIXXXXXXXXXMIQITINSLRAPV

SEQ ID NO: 35290 - protein, 38 aa, Artificial Sequence
  Non-cyclic GFR-binding peptide
  MOD_RES (1)..(3)..(35)..(36): Xaa is C or S
XGXSEVVMDSMEGLVVNNASDMIQITINSLRTPVXXTP

SEQ ID NO: 35291 - protein, 34 aa, Artificial Sequence
  Non-cyclic GFR-binding peptide
  MOD_RES (2)..(2): Xaa is C or S
  MOD_RES (13)..(14)..(15)..(16)..(17): Xaa is A or G
  MOD_RES (18)..(19)..(20)..(21): Xaa is A or G or absent
GXEEVIMSMEGLXXXXXXXXXMIQMTINSTKVPA

SEQ ID NO: 35292 - protein, 31 aa, Artificial Sequence
  Non-cyclic GFR-binding peptide
  MOD_RES (31)..(31): Xaa is C or S
EVVMDSMEGIVVNNAADMIQITINSLRAPVX

SEQ ID NO: 35293 - protein, 37 aa, Artificial Sequence
  Non-cyclic GFR-binding peptide
  MOD_RES (31)..(32): Xaa is C or S
DVVMGSMEGIIIQQKDNMIQMTINSMKTPTXXPGASG

SEQ ID NO: 35294 - protein, 39 aa, Artificial Sequence
  Non-cyclic GFR-binding peptide
  MOD_RES (1)..(33)..(34): Xaa is C or S
XSRVVMNSMEGIIVNSSDDMIQVTINSLKTPAXXPKPVH

SEQ ID NO: 35295 - protein, 32 aa, Artificial Sequence
  Non-cyclic GFR-binding peptide
  MOD_RES (11)..(12)..(13)..(14)..(15): Xaa is A or G
  MOD_RES (16)..(17)..(18)..(19): Xaa is A or G or absent
DVVMGSMEGLXXXXXXXXXMIQMTINSMKTPT

SEQ ID NO: 35296 - protein, 35 aa, Artificial Sequence
  Non-cyclic GFR-binding peptide
  MOD_RES (34)..(35): Xaa is C or S
  MOD_RES (12)..(13)..(14)..(15)..(16): Xaa is A or G
  MOD_RES (17)..(18)..(19)..(20): Xaa is A or G or absent
AEVVMDSMEGLXXXXXXXXXMIQITINSLRAPVXX

SEQ ID NO: 35297 - protein, 39 aa, Artificial Sequence
  Non-cyclic GFR-binding peptide
  MOD_RES (1)..(3)..(36)..(37): Xaa is C or S
  MOD_RES (14)..(15)..(16)..(17)..(18): Xaa is A or G
  MOD_RES (19)..(20)..(21)..(22): Xaa is A or G or absent
XKXSKVIMSMEGLXXXXXXXXXMIQITINSLDQSVXXPS

SEQ ID NO: 35298 - protein, 41 aa, Artificial Sequence
  Non-cyclic GFR-binding peptide
  MOD_RES (2)..(36)..(37): Xaa is C or S
  MOD_RES (14)..(15)..(16)..(17)..(18): Xaa is A or G
  MOD_RES (19)..(20)..(21)..(22): Xaa is A or G or absent
GXAEVVMDSMEGIXXXXXXXXXMIQITINSLRAPVXXSAPA

SEQ ID NO: 35299 - protein, 41 aa, Artificial Sequence
  Non-cyclic GFR-binding peptide
  MOD_RES (1)..(35)..(36): Xaa is C or S
  MOD_RES (13)..(14)..(15)..(16)..(17): Xaa is A or G
  MOD_RES (18)..(19)..(20)..(21): Xaa is A or G or absent
XSRVVMNSMEGIXXXXXXXXXMIQVTINSLKTPAXXPKPVH

SEQ ID NO: 35300 - protein, 40 aa, Artificial Sequence
  Non-cyclic GFR-binding peptide
  MOD_RES (2)..(35)..(36): Xaa is C or S
  MOD_RES (13)..(14)..(15)..(16)..(17): Xaa is A or G
  MOD_RES (18)..(19)..(20)..(21): Xaa is A or G or absent
KXSKVIMSMEGLXXXXXXXXXMIQITINSLDQSVXXPSAS

SEQ ID NO: 35301 - protein, 37 aa, Artificial Sequence
  Non-cyclic GFR-binding peptide
  MOD_RES (2)..(36)..(37): Xaa is C or S
  MOD_RES (14)..(15)..(16)..(17)..(18): Xaa is A or G
  MOD_RES (19)..(20)..(21)..(22): Xaa is A or G or absent
GXRDVVMGSMEGIXXXXXXXXXMIQMTINSMKTPTXX

SEQ ID NO: 35302 - protein, 32 aa, Artificial Sequence
  Non-cyclic GFR-binding peptide
  MOD_RES (32)..(32): Xaa is C or S
RDVVMGSMEGIIIQQKDNMIQMTINSMKTPTX

SEQ ID NO: 35303 - protein, 36 aa, Artificial Sequence
  Non-cyclic GFR-binding peptide
  MOD_RES (34)..(35): Xaa is C or S
  MOD_RES (12)..(13)..(14)..(15)..(16): Xaa is A or G
  MOD_RES (17)..(18)..(19)..(20): Xaa is A or G or absent
AEVVMDSMEGIXXXXXXXXXMIQITINSLRAPVXXS

SEQ ID NO: 35304 - protein, 34 aa, Artificial Sequence
  Non-cyclic GFR-binding peptide
  MOD_RES (33)..(34): Xaa is C or S
  MOD_RES (11)..(12)..(13)..(14)..(15): Xaa is A or G
  MOD_RES (16)..(17)..(18)..(19): Xaa is A or G or absent
SKVIMSMEGLXXXXXXXXXMIQITINSLDQSVXX

SEQ ID NO: 35305 - protein, 32 aa, Artificial Sequence
  Non-cyclic GFR-binding peptide
  MOD_RES (2)..(2): Xaa is C or S
KXSKVIMSMEGLIKPTKGIMIQITINSLDQSV

SEQ ID NO: 35306 - protein, 37 aa, Artificial Sequence
  Non-cyclic GFR-binding peptide
  MOD_RES (2)..(4): Xaa is C or S
  MOD_RES (16)..(17)..(18)..(19)..(20): Xaa is A or G
  MOD_RES (21)..(22)..(23)..(24): Xaa is A or G or absent
SXGXRDVVMGSMEGIXXXXXXXXXMIQMTINSMKTPT

SEQ ID NO: 35307 - protein, 36 aa, Artificial Sequence
  Non-cyclic GFR-binding peptide
  MOD_RES (1)..(3): Xaa is C or S
  MOD_RES (15)..(16)..(17)..(18)..(19): Xaa is A or G
  MOD_RES (20)..(21)..(22)..(23): Xaa is A or G or absent
XGXSRVVMNSMEGLXXXXXXXXXMIQVTINSLKTPA

SEQ ID NO: 35308 - protein, 35 aa, Artificial Sequence
  Non-cyclic GFR-binding peptide
  MOD_RES (2)..(33)..(34): Xaa is C or S
GXEEVIMSMEGILLVRGNDMIQMTINSTKVPAXXT

SEQ ID NO: 35309 - protein, 33 aa, Artificial Sequence
  Non-cyclic GFR-binding peptide
  MOD_RES (31)..(32): Xaa is C or S
EEVIMSMEGILLVRGNDMIQMTINSTKVPAXXT

SEQ ID NO: 35310 - protein, 38 aa, Artificial Sequence
  Non-cyclic GFR-binding peptide
  MOD_RES (34)..(35): Xaa is C or S
  MOD_RES (12)..(13)..(14)..(15)..(16): Xaa is A or G
  MOD_RES (17)..(18)..(19)..(20): Xaa is A or G or absent
RDVVMGSMEGIXXXXXXXXXMIQMTINSMKTPTXXPGA

SEQ ID NO: 35311 - protein, 37 aa, Artificial Sequence
  Non-cyclic GFR-binding peptide
  MOD_RES (1)..(33)..(34): Xaa is C or S
XRDVVMGSMEGLIIQQKDNMIQMTINSMKTPTXXPGA

SEQ ID NO: 35312 - protein, 34 aa, Artificial Sequence
  Non-cyclic GFR-binding peptide
  MOD_RES (2)..(34): Xaa is C or S
GXSEVVMDSMEGIVVNNASDMIQITINSLRTPVX

SEQ ID NO: 35313 - protein, 36 aa, Artificial Sequence
  Non-cyclic GFR-binding peptide
  MOD_RES (1)..(3): Xaa is C or S
  MOD_RES (15)..(16)..(17)..(18)..(19): Xaa is A or G
  MOD_RES (20)..(21)..(22)..(23): Xaa is A or G or absent
XGXAEVVMDSMEGLXXXXXXXXXMIQITINSLRAPV

SEQ ID NO: 35314 - protein, 37 aa, Artificial Sequence
  Non-cyclic GFR-binding peptide
  MOD_RES (2)..(34)..(35): Xaa is C or S
GXSEVVMDSMEGIVVNNASDMIQITINSLRTPVXXTP

SEQ ID NO: 35315 - protein, 42 aa, Artificial Sequence
  Non-cyclic GFR-binding peptide
  MOD_RES (2)..(36)..(37): Xaa is C or S
  MOD_RES (14)..(15)..(16)..(17)..(18): Xaa is A or G
  MOD_RES (19)..(20)..(21)..(22): Xaa is A or G or absent
GXSEVVMDSMEGLXXXXXXXXXMIQITINSLRTPVXXTPPTS

SEQ ID NO: 35316 - protein, 33 aa, Artificial Sequence
  Non-cyclic GFR-binding peptide
  MOD_RES (2)..(33): Xaa is C or S
KXSRVIMSMEGLVKPKRGVMIQITINSLAQPVX

SEQ ID NO: 35317 - protein, 35 aa, Artificial Sequence
  Non-cyclic GFR-binding peptide
  MOD_RES (1)..(33)..(34): Xaa is C or S
XRDVVMGSMEGLIIQQKDNMIQMTINSMKTPTXXP

SEQ ID NO: 35318 - protein, 36 aa, Artificial Sequence
  Non-cyclic GFR-binding peptide
  MOD_RES (1)..(3)..(36): Xaa is C or S
  MOD_RES (14)..(15)..(16)..(17)..(18): Xaa is A or G
  MOD_RES (19)..(20)..(21)..(22): Xaa is A or G or absent
XKXSKVVMSMEGLXXXXXXXXXMIQITINSLDQPVX

SEQ ID NO: 35319 - protein, 34 aa, Artificial Sequence
  Non-cyclic GFR-binding peptide
  MOD_RES (1)..(32)..(33): Xaa is C or S
XEEVIMSMEGILLVRGNDMIQMTINSTKVPAXXT

SEQ ID NO: 35320 - protein, 33 aa, Artificial Sequence
  Non-cyclic GFR-binding peptide
  MOD_RES (32)..(33): Xaa is C or S
RDVVMGSMEGLIIQQKDNMIQMTINSMKTPTXX

SEQ ID NO: 35321 - protein, 39 aa, Artificial Sequence
  Non-cyclic GFR-binding peptide
  MOD_RES (2)..(4)..(36)..(37): Xaa is C or S
RXGXSEVVMDSMEGIVVNNASDMIQITINSLRTPVXXTP

SEQ ID NO: 35322 - protein, 40 aa, Artificial Sequence
  Non-cyclic GFR-binding peptide
  MOD_RES (2)..(4)..(38)..(39): Xaa is C or S
  MOD_RES (16)..(17)..(18)..(19)..(20): Xaa is A or G
  MOD_RES (21)..(22)..(23)..(24): Xaa is A or G or absent
RXGXSEVVMDSMEGLXXXXXXXXXMIQITINSLRTPVXXT

SEQ ID NO: 35323 - protein, 36 aa, Artificial Sequence
  Non-cyclic GFR-binding peptide
  MOD_RES (32)..(33): Xaa is C or S
RDVVMGSMEGLIIQQKDNMIQMTINSMKTPTXXPGA

SEQ ID NO: 35324 - protein, 37 aa, Artificial Sequence
  Non-cyclic GFR-binding peptide
  MOD_RES (2)..(4)..(36)..(37): Xaa is C or S
SXGXRDVVMGSMEGIIIQQKDNMIQMTINSMKTPTXX

SEQ ID NO: 35325 - protein, 38 aa, Artificial Sequence
  Non-cyclic GFR-binding peptide
  MOD_RES (2)..(33)..(34): Xaa is C or S
KXSKVVMSMEGLVKPTRGVMIQITINSLDQPVXXPSAS

SEQ ID NO: 35326 - protein, 33 aa, Artificial Sequence
  Non-cyclic GFR-binding peptide
  MOD_RES (12)..(13)..(14)..(15)..(16): Xaa is A or G
  MOD_RES (17)..(18)..(19)..(20): Xaa is A or G or absent
RDVVMGSMEGLXXXXXXXXXMIQMTINSMKTPT

SEQ ID NO: 35327 - protein, 40 aa, Artificial Sequence
  Non-cyclic GFR-binding peptide
  MOD_RES (1)..(34)..(35): Xaa is C or S
  MOD_RES (12)..(13)..(14)..(15)..(16): Xaa is A or G
  MOD_RES (17)..(18)..(19)..(20): Xaa is A or G or absent
XSRVIMSMEGLXXXXXXXXXMIQITINSLAQPVXXPAASA

SEQ ID NO: 35328 - protein, 40 aa, Artificial Sequence
  Non-cyclic GFR-binding peptide
  MOD_RES (1)..(3)..(36)..(37): Xaa is C or S
  MOD_RES (14)..(15)..(16)..(17)..(18): Xaa is A or G
  MOD_RES (19)..(20)..(21)..(22): Xaa is A or G or absent
XKXSRVIMSMEGLXXXXXXXXXMIQITINSLAQPVXXPAA

SEQ ID NO: 35329 - protein, 41 aa, Artificial Sequence
  Non-cyclic GFR-binding peptide
  MOD_RES (2)..(4)..(36)..(37): Xaa is C or S
HXGXSRVVMNSMEGLIVNSSDDMIQVTINSLKTPAXXPKPV

SEQ ID NO: 35330 - protein, 33 aa, Artificial Sequence
  Non-cyclic GFR-binding peptide
  MOD_RES (1)..(33): Xaa is C or S
XSEVVMDSMEGIVVNNASDMIQITINSLRTPVX

SEQ ID NO: 35331 - protein, 39 aa, Artificial Sequence
  Non-cyclic GFR-binding peptide
  MOD_RES (2)..(4)..(35)..(36): Xaa is C or S
LXGXEEVIMSMEGLLLVRGNDMIQMTINSTKVPAXXTSP

SEQ ID NO: 35332 - protein, 35 aa, Artificial Sequence
  Non-cyclic GFR-binding peptide
  MOD_RES (1)..(33)..(34): Xaa is C or S
XSRVVMNSMEGLIVNSSDDMIQVTINSLKTPAXXP

SEQ ID NO: 35333 - protein, 39 aa, Artificial Sequence
  Non-cyclic GFR-binding peptide
  MOD_RES (1)..(3)..(36)..(37): Xaa is C or S
  MOD_RES (14)..(15)..(16)..(17)..(18): Xaa is A or G
  MOD_RES (19)..(20)..(21)..(22): Xaa is A or G or absent
XGXEEVIMSMEGLXXXXXXXXXMIQMTINSTKVPAXXTS

SEQ ID NO: 35334 - protein, 39 aa, Artificial Sequence
  Non-cyclic GFR-binding peptide
  MOD_RES (1)..(35)..(36): Xaa is C or S
  MOD_RES (13)..(14)..(15)..(16)..(17): Xaa is A or G
  MOD_RES (18)..(19)..(20)..(21): Xaa is A or G or absent
XAEVVMDSMEGIXXXXXXXXXMIQITINSLRAPVXXSAP

SEQ ID NO: 35335 - protein, 37 aa, Artificial Sequence
  Non-cyclic GFR-binding peptide
  MOD_RES (2)..(4)..(36)..(37): Xaa is C or S
RXGXSEVVMDSMEGLVVNNASDMIQITINSLRTPVXX

SEQ ID NO: 35336 - protein, 37 aa, Artificial Sequence
  Non-cyclic GFR-binding peptide
  MOD_RES (1)..(3)..(36)..(37): Xaa is C or S
  MOD_RES (14)..(15)..(16)..(17)..(18): Xaa is A or G
  MOD_RES (19)..(20)..(21)..(22): Xaa is A or G or absent
XKXSKVVMSMEGLXXXXXXXXXMIQITINSLDQPVXX

SEQ ID NO: 35337 - protein, 39 aa, Artificial Sequence
  Non-cyclic GFR-binding peptide
  MOD_RES (1)..(35)..(36): Xaa is C or S
  MOD_RES (13)..(14)..(15)..(16)..(17): Xaa is A or G
  MOD_RES (18)..(19)..(20)..(21): Xaa is A or G or absent
XSEVVMDSMEGLXXXXXXXXXMIQITINSLRTPVXXTPP

SEQ ID NO: 35338 - protein, 37 aa, Artificial Sequence
  Non-cyclic GFR-binding peptide
  MOD_RES (2)..(4): Xaa is C or S
  MOD_RES (16)..(17)..(18)..(19)..(20): Xaa is A or G
  MOD_RES (21)..(22)..(23)..(24): Xaa is A or G or absent
RXGXAEVVMDSMEGLXXXXXXXXXMIQITINSLRAPV

SEQ ID NO: 35339 - protein, 40 aa, Artificial Sequence
  Non-cyclic GFR-binding peptide
  MOD_RES (1)..(3)..(37)..(38): Xaa is C or S
  MOD_RES (15)..(16)..(17)..(18)..(19): Xaa is A or G
  MOD_RES (20)..(21)..(22)..(23): Xaa is A or G or absent
XGXSEVVMDSMEGLXXXXXXXXXMIQITINSLRTPVXXTP

SEQ ID NO: 35340 - protein, 40 aa, Artificial Sequence
  Non-cyclic GFR-binding peptide
  MOD_RES (2)..(4)..(38)..(39): Xaa is C or S
  MOD_RES (16)..(17)..(18)..(19)..(20): Xaa is A or G
  MOD_RES (21)..(22)..(23)..(24): Xaa is A or G or absent
SXGXRDVVMGSMEGLXXXXXXXXXMIQMTINSMKTPTXXP

SEQ ID NO: 35341 - protein, 36 aa, Artificial Sequence
  Non-cyclic GFR-binding peptide
  MOD_RES (31)..(32): Xaa is C or S
RVVMNSMEGLIVNSSDDMIQVTINSLKTPAXXPKPV

SEQ ID NO: 35342 - protein, 39 aa, Artificial Sequence
  Non-cyclic GFR-binding peptide
  MOD_RES (2)..(36)..(37): Xaa is C or S
  MOD_RES (14)..(15)..(16)..(17)..(18): Xaa is A or G
  MOD_RES (19)..(20)..(21)..(22): Xaa is A or G or absent
GXSRVVMNSMEGLXXXXXXXXXMIQVTINSLKTPAXXPK

SEQ ID NO: 35343 - protein, 38 aa, Artificial Sequence
  Non-cyclic GFR-binding peptide
  MOD_RES (32)..(33): Xaa is C or S
AEVVMDSMEGIVVNNAADMIQITINSLRAPVXXSAPAA

SEQ ID NO: 35344 - protein, 36 aa, Artificial Sequence
  Non-cyclic GFR-binding peptide
  MOD_RES (31)..(32): Xaa is C or S
EVVMDSMEGIVVNNAADMIQITINSLRAPVXXSAPA

SEQ ID NO: 35345 - protein, 33 aa, Artificial Sequence
  Non-cyclic GFR-binding peptide
  MOD_RES (32)..(33): Xaa is C or S
SRVVMNSMEGLIVNSSDDMIQVTINSLKTPAXX

SEQ ID NO: 35346 - protein, 40 aa, Artificial Sequence
  Non-cyclic GFR-binding peptide
  MOD_RES (1)..(3)..(34)..(35): Xaa is C or S
XKXSRVIMSMEGLVKPKRGVMIQITINSLAQPVXXPAASA

SEQ ID NO: 35347 - protein, 35 aa, Artificial Sequence
  Non-cyclic GFR-binding peptide
  MOD_RES (2)..(4): Xaa is C or S
RXGXSEVVMDSMEGLVVNNASDMIQITINSLRTPV

SEQ ID NO: 35348 - protein, 33 aa, Artificial Sequence
  Non-cyclic GFR-binding peptide
  MOD_RES (31)..(32): Xaa is C or S
DVVMGSMEGLIIQQKDNMIQMTINSMKTPTXXP

SEQ ID NO: 35349 - protein, 37 aa, Artificial Sequence
  Non-cyclic GFR-binding peptide
  MOD_RES (34)..(35): Xaa is C or S
  MOD_RES (12)..(13)..(14)..(15)..(16): Xaa is A or G
  MOD_RES (17)..(18)..(19)..(20): Xaa is A or G or absent
AEVVMDSMEGIXXXXXXXXXMIQITINSLRAPVXXSA

SEQ ID NO: 35350 - protein, 36 aa, Artificial Sequence
  Non-cyclic GFR-binding peptide
  MOD_RES (33)..(34): Xaa is C or S
  MOD_RES (11)..(12)..(13)..(14)..(15): Xaa is A or G
  MOD_RES (16)..(17)..(18)..(19): Xaa is A or G or absent
EVVMDSMEGIXXXXXXXXXMIQITINSLRAPVXXSA

SEQ ID NO: 35351 - protein, 39 aa, Artificial Sequence
  Non-cyclic GFR-binding peptide
  MOD_RES (1)..(3)..(35)..(36): Xaa is C or S
XGXAEVVMDSMEGLVVNNAADMIQITINSLRAPVXXSAP

SEQ ID NO: 35352 - protein, 34 aa, Artificial Sequence
  Non-cyclic GFR-binding peptide
  MOD_RES (31)..(32): Xaa is C or S
DVVMGSMEGIIIQQKDNMIQMTINSMKTPTXXPG

SEQ ID NO: 35353 - protein, 36 aa, Artificial Sequence
  Non-cyclic GFR-binding peptide
  MOD_RES (34)..(35): Xaa is C or S
  MOD_RES (12)..(13)..(14)..(15)..(16): Xaa is A or G
  MOD_RES (17)..(18)..(19)..(20): Xaa is A or G or absent
SRVVMNSMEGLXXXXXXXXXMIQVTINSLKTPAXXP

SEQ ID NO: 35354 - protein, 40 aa, Artificial Sequence
  Non-cyclic GFR-binding peptide
  MOD_RES (1)..(3)..(36)..(37): Xaa is C or S
  MOD_RES (14)..(15)..(16)..(17)..(18): Xaa is A or G
  MOD_RES (19)..(20)..(21)..(22): Xaa is A or G or absent
XKXSKVIMSMEGLXXXXXXXXXMIQITINSLDQSVXXPSA

SEQ ID NO: 35355 - protein, 40 aa, Artificial Sequence
  Non-cyclic GFR-binding peptide
  MOD_RES (1)..(34)..(35): Xaa is C or S
  MOD_RES (12)..(13)..(14)..(15)..(16): Xaa is A or G
  MOD_RES (17)..(18)..(19)..(20): Xaa is A or G or absent
XEEVIMSMEGLXXXXXXXXXMIQMTINSTKVPAXXTSPVR

SEQ ID NO: 35356 - protein, 39 aa, Artificial Sequence
  Non-cyclic GFR-binding peptide
  MOD_RES (34)..(35): Xaa is C or S
  MOD_RES (12)..(13)..(14)..(15)..(16): Xaa is A or G
  MOD_RES (17)..(18)..(19)..(20): Xaa is A or G or absent
RDVVMGSMEGLXXXXXXXXXMIQMTINSMKTPTXXPGAS

SEQ ID NO: 35357 - protein, 32 aa, Artificial Sequence
  Non-cyclic GFR-binding peptide
  MOD_RES (31)..(32): Xaa is C or S
DVVMGSMEGIIIQQKDNMIQMTINSMKTPTXX

SEQ ID NO: 35358 - protein, 34 aa, Artificial Sequence
  Non-cyclic GFR-binding peptide
  MOD_RES (2)..(33)..(34): Xaa is C or S
KXSRVIMSMEGLVKPKRGVMIQITINSLAQPVXX

SEQ ID NO: 35359 - protein, 36 aa, Artificial Sequence
  Non-cyclic GFR-binding peptide
  MOD_RES (1)..(3)..(35)..(36): Xaa is C or S
XGXRDVVMGSMEGIIIQQKDNMIQMTINSMKTPTXX

SEQ ID NO: 35360 - protein, 31 aa, Artificial Sequence
  Non-cyclic GFR-binding peptide
  MOD_RES (31)..(31): Xaa is C or S
DVVMGSMEGIIIQQKDNMIQMTINSMKTPTX

SEQ ID NO: 35361 - protein, 35 aa, Artificial Sequence
  Non-cyclic GFR-binding peptide
  MOD_RES (2)..(4)..(35): Xaa is C or S
SXKXSKVVMSMEGLVKPTRGVMIQITINSLDQPVX

SEQ ID NO: 35362 - protein, 36 aa, Artificial Sequence
  Non-cyclic GFR-binding peptide
  MOD_RES (1)..(35)..(36): Xaa is C or S
  MOD_RES (13)..(14)..(15)..(16)..(17): Xaa is A or G
  MOD_RES (18)..(19)..(20)..(21): Xaa is A or G or absent
XRDVVMGSMEGIXXXXXXXXXMIQMTINSMKTPTXX

SEQ ID NO: 35363 - protein, 36 aa, Artificial Sequence
  Non-cyclic GFR-binding peptide
  MOD_RES (2)..(4): Xaa is C or S
  MOD_RES (15)..(16)..(17)..(18)..(19): Xaa is A or G
  MOD_RES (20)..(21)..(22)..(23): Xaa is A or G or absent
SXKXSKVVMSMEGLXXXXXXXXXMIQITINSLDQPV

SEQ ID NO: 35364 - protein, 36 aa, Artificial Sequence
  Non-cyclic GFR-binding peptide
  MOD_RES (2)..(4)..(36): Xaa is C or S
SXGXRDVVMGSMEGLIIQQKDNMIQMTINSMKTPTX

SEQ ID NO: 35365 - protein, 36 aa, Artificial Sequence
  Non-cyclic GFR-binding peptide
  MOD_RES (1)..(3)..(35)..(36): Xaa is C or S
XGXRDVVMGSMEGLIIQQKDNMIQMTINSMKTPTXX

SEQ ID NO: 35366 - protein, 36 aa, Artificial Sequence
  Non-cyclic GFR-binding peptide
  MOD_RES (2)..(33)..(34): Xaa is C or S
KXSRVIMSMEGLVKPKRGVMIQITINSLAQPVXXPA

SEQ ID NO: 35367 - protein, 38 aa, Artificial Sequence
  Non-cyclic GFR-binding peptide
  MOD_RES (33)..(34): Xaa is C or S
  MOD_RES (11)..(12)..(13)..(14)..(15): Xaa is A or G
  MOD_RES (16)..(17)..(18)..(19): Xaa is A or G or absent
EVVMDSMEGLXXXXXXXXXMIQITINSLRAPVXXSAPA

SEQ ID NO: 35368 - protein, 36 aa, Artificial Sequence
  Non-cyclic GFR-binding peptide
  MOD_RES (1)..(3): Xaa is C or S
  MOD_RES (15)..(16)..(17)..(18)..(19): Xaa is A or G
  MOD_RES (20)..(21)..(22)..(23): Xaa is A or G or absent
XGXRDVVMGSMEGIXXXXXXXXXMIQMTINSMKTPT

SEQ ID NO: 35369 - protein, 35 aa, Artificial Sequence
  Non-cyclic GFR-binding peptide
  MOD_RES (1)..(3)..(35): Xaa is C or S
XGXSEVVMDSMEGLVVNNASDMIQITINSLRTPVX

SEQ ID NO: 35370 - protein, 35 aa, Artificial Sequence
  Non-cyclic GFR-binding peptide
  MOD_RES (1)..(34)..(35): Xaa is C or S
  MOD_RES (12)..(13)..(14)..(15)..(16): Xaa is A or G
  MOD_RES (17)..(18)..(19)..(20): Xaa is A or G or absent
XSKVIMSMEGLXXXXXXXXXMIQITINSLDQSVXX

SEQ ID NO: 35371 - protein, 36 aa, Artificial Sequence
  Non-cyclic GFR-binding peptide
  MOD_RES (1)..(3)..(34)..(35): Xaa is C or S
XKXSKVIMSMEGLIKPTKGIMIQITINSLDQSVXXP

SEQ ID NO: 35372 - protein, 38 aa, Artificial Sequence
  Non-cyclic GFR-binding peptide
  MOD_RES (2)..(34)..(35): Xaa is C or S
GXAEVVMDSMEGLVVNNAADMIQITINSLRAPVXXSAP

SEQ ID NO: 35373 - protein, 33 aa, Artificial Sequence
  Non-cyclic GFR-binding peptide
  MOD_RES (1)..(3): Xaa is C or S
XGXEEVIMSMEGLLLVRGNDMIQMTINSTKVPA

SEQ ID NO: 35374 - protein, 36 aa, Artificial Sequence
  Non-cyclic GFR-binding peptide
  MOD_RES (31)..(32): Xaa is C or S
SKVVMSMEGLVKPTRGVMIQITINSLDQPVXXPSAS

SEQ ID NO: 35375 - protein, 32 aa, Artificial Sequence
  Non-cyclic GFR-binding peptide
  MOD_RES (11)..(12)..(13)..(14)..(15): Xaa is A or G
  MOD_RES (16)..(17)..(18)..(19): Xaa is A or G or absent
DVVMGSMEGIXXXXXXXXXMIQMTINSMKTPT

SEQ ID NO: 35376 - protein, 40 aa, Artificial Sequence
  Non-cyclic GFR-binding peptide
  MOD_RES (1)..(35)..(36): Xaa is C or S
  MOD_RES (13)..(14)..(15)..(16)..(17): Xaa is A or G
  MOD_RES (18)..(19)..(20)..(21): Xaa is A or G or absent
XAEVVMDSMEGLXXXXXXXXXMIQITINSLRAPVXXSAPA

SEQ ID NO: 35377 - protein, 34 aa, Artificial Sequence
  Non-cyclic GFR-binding peptide
  MOD_RES (33)..(34): Xaa is C or S
  MOD_RES (11)..(12)..(13)..(14)..(15): Xaa is A or G
  MOD_RES (16)..(17)..(18)..(19): Xaa is A or G or absent
EEVIMSMEGIXXXXXXXXXMIQMTINSTKVPAXX

SEQ ID NO: 35378 - protein, 40 aa, Artificial Sequence
  Non-cyclic GFR-binding peptide
  MOD_RES (1)..(35)..(36): Xaa is C or S
  MOD_RES (13)..(14)..(15)..(16)..(17): Xaa is A or G
  MOD_RES (18)..(19)..(20)..(21): Xaa is A or G or absent
XAEVVMDSMEGIXXXXXXXXXMIQITINSLRAPVXXSAPA

SEQ ID NO: 35379 - protein, 39 aa, Artificial Sequence
  Non-cyclic GFR-binding peptide
  MOD_RES (33)..(34): Xaa is C or S
  MOD_RES (11)..(12)..(13)..(14)..(15): Xaa is A or G
  MOD_RES (16)..(17)..(18)..(19): Xaa is A or G or absent
DVVMGSMEGIXXXXXXXXXMIQMTINSMKTPTXXPGASG

SEQ ID NO: 35380 - protein, 42 aa, Artificial Sequence
  Non-cyclic GFR-binding peptide
  MOD_RES (2)..(36)..(37): Xaa is C or S
  MOD_RES (14)..(15)..(16)..(17)..(18): Xaa is A or G
  MOD_RES (19)..(20)..(21)..(22): Xaa is A or G or absent
GXSRVVMNSMEGLXXXXXXXXXMIQVTINSLKTPAXXPKPVH

SEQ ID NO: 35381 - protein, 35 aa, Artificial Sequence
  Non-cyclic GFR-binding peptide
  MOD_RES (31)..(32): Xaa is C or S
RVVMNSMEGLIVNSSDDMIQVTINSLKTPAXXPKP

SEQ ID NO: 35382 - protein, 40 aa, Artificial Sequence
  Non-cyclic GFR-binding peptide
  MOD_RES (2)..(34)..(35): Xaa is C or S
GXSEVVMDSMEGLVVNNASDMIQITINSLRTPVXXTPPTS

SEQ ID NO: 35383 - protein, 42 aa, Artificial Sequence
  Non-cyclic GFR-binding peptide
  MOD_RES (2)..(4)..(38)..(39): Xaa is C or S
  MOD_RES (16)..(17)..(18)..(19)..(20): Xaa is A or G
  MOD_RES (21)..(22)..(23)..(24): Xaa is A or G or absent
SXGXRDVVMGSMEGLXXXXXXXXXMIQMTINSMKTPTXXPGA

SEQ ID NO: 35384 - protein, 34 aa, Artificial Sequence
  Non-cyclic GFR-binding peptide
  MOD_RES (34)..(34): Xaa is C or S
  MOD_RES (12)..(13)..(14)..(15)..(16): Xaa is A or G
  MOD_RES (17)..(18)..(19)..(20): Xaa is A or G or absent
SRVVMNSMEGLXXXXXXXXXMIQVTINSLKTPAX

SEQ ID NO: 35385 - protein, 39 aa, Artificial Sequence
  Non-cyclic GFR-binding peptide
  MOD_RES (2)..(33)..(34): Xaa is C or S
GXEEVIMSMEGLLLVRGNDMIQMTINSTKVPAXXTSPVR

SEQ ID NO: 35386 - protein, 37 aa, Artificial Sequence
  Non-cyclic GFR-binding peptide
  MOD_RES (31)..(32): Xaa is C or S
SRVIMSMEGLVKPKRGVMIQITINSLAQPVXXPAASA

SEQ ID NO: 35387 - protein, 35 aa, Artificial Sequence
  Non-cyclic GFR-binding peptide
  MOD_RES (33)..(34): Xaa is C or S
  MOD_RES (11)..(12)..(13)..(14)..(15): Xaa is A or G
  MOD_RES (16)..(17)..(18)..(19): Xaa is A or G or absent
SKVVMSMEGLXXXXXXXXXMIQITINSLDQPVXXP

SEQ ID NO: 35388 - protein, 36 aa, Artificial Sequence
  Non-cyclic GFR-binding peptide
  MOD_RES (1)..(3)..(35)..(36): Xaa is C or S
XGXSEVVMDSMEGIVVNNASDMIQITINSLRTPVXX

SEQ ID NO: 35389 - protein, 34 aa, Artificial Sequence
  Non-cyclic GFR-binding peptide
  MOD_RES (31)..(32): Xaa is C or S
EVVMDSMEGIVVNNASDMIQITINSLRTPVXXTP

SEQ ID NO: 35390 - protein, 42 aa, Artificial Sequence
  Non-cyclic GFR-binding peptide
  MOD_RES (2)..(4)..(36)..(37): Xaa is C or S
RXGXAEVVMDSMEGIVVNNAADMIQITINSLRAPVXXSAPAA

SEQ ID NO: 35391 - protein, 39 aa, Artificial Sequence
  Non-cyclic GFR-binding peptide
  MOD_RES (2)..(33)..(34): Xaa is C or S
GXEEVIMSMEGILLVRGNDMIQMTINSTKVPAXXTSPVR

SEQ ID NO: 35392 - protein, 39 aa, Artificial Sequence
  Non-cyclic GFR-binding peptide
  MOD_RES (33)..(34): Xaa is C or S
  MOD_RES (11)..(12)..(13)..(14)..(15): Xaa is A or G
  MOD_RES (16)..(17)..(18)..(19): Xaa is A or G or absent
SKVVMSMEGLXXXXXXXXXMIQITINSLDQPVXXPSASA

SEQ ID NO: 35393 - protein, 37 aa, Artificial Sequence
  Non-cyclic GFR-binding peptide
  MOD_RES (32)..(33): Xaa is C or S
SEVVMDSMEGIVVNNASDMIQITINSLRTPVXXTPPT

SEQ ID NO: 35394 - protein, 37 aa, Artificial Sequence
  Non-cyclic GFR-binding peptide
  MOD_RES (2)..(4)..(37): Xaa is C or S
  MOD_RES (15)..(16)..(17)..(18)..(19): Xaa is A or G
  MOD_RES (20)..(21)..(22)..(23): Xaa is A or G or absent
LXGXEEVIMSMEGLXXXXXXXXXMIQMTINSTKVPAX

SEQ ID NO: 35395 - protein, 36 aa, Artificial Sequence
  Non-cyclic GFR-binding peptide
  MOD_RES (2)..(34)..(35): Xaa is C or S
GXAEVVMDSMEGLVVNNAADMIQITINSLRAPVXXS

SEQ ID NO: 35396 - protein, 35 aa, Artificial Sequence
  Non-cyclic GFR-binding peptide
  MOD_RES (1)..(35): Xaa is C or S
  MOD_RES (13)..(14)..(15)..(16)..(17): Xaa is A or G
  MOD_RES (18)..(19)..(20)..(21): Xaa is A or G or absent
XSRVVMNSMEGLXXXXXXXXXMIQVTINSLKTPAX

SEQ ID NO: 35397 - protein, 38 aa, Artificial Sequence
  Non-cyclic GFR-binding peptide
  MOD_RES (1)..(34)..(35): Xaa is C or S
  MOD_RES (12)..(13)..(14)..(15)..(16): Xaa is A or G
  MOD_RES (17)..(18)..(19)..(20): Xaa is A or G or absent
XEEVIMSMEGIXXXXXXXXXMIQMTINSTKVPAXXTSP

SEQ ID NO: 35398 - protein, 42 aa, Artificial Sequence
  Non-cyclic GFR-binding peptide
  MOD_RES (2)..(4)..(38)..(39): Xaa is C or S
  MOD_RES (16)..(17)..(18)..(19)..(20): Xaa is A or G
  MOD_RES (21)..(22)..(23)..(24): Xaa is A or G or absent
SXGXRDVVMGSMEGIXXXXXXXXXMIQMTINSMKTPTXXPGA

SEQ ID NO: 35399 - protein, 31 aa, Artificial Sequence
  Non-cyclic GFR-binding peptide
  MOD_RES (31)..(31): Xaa is C or S
RVVMNSMEGLIVNSSDDMIQVTINSLKTPAX

SEQ ID NO: 35400 - protein, 38 aa, Artificial Sequence
  Non-cyclic GFR-binding peptide
  MOD_RES (33)..(34): Xaa is C or S
  MOD_RES (11)..(12)..(13)..(14)..(15): Xaa is A or G
  MOD_RES (16)..(17)..(18)..(19): Xaa is A or G or absent
EEVIMSMEGIXXXXXXXXXMIQMTINSTKVPAXXTSPV

SEQ ID NO: 35401 - protein, 39 aa, Artificial Sequence
  Non-cyclic GFR-binding peptide
  MOD_RES (33)..(34): Xaa is C or S
  MOD_RES (11)..(12)..(13)..(14)..(15): Xaa is A or G
  MOD_RES (16)..(17)..(18)..(19): Xaa is A or G or absent
EVVMDSMEGIXXXXXXXXXMIQITINSLRAPVXXSAPAA

SEQ ID NO: 35402 - protein, 35 aa, Artificial Sequence
  Non-cyclic GFR-binding peptide
  MOD_RES (2)..(2): Xaa is C or S
  MOD_RES (14)..(15)..(16)..(17)..(18): Xaa is A or G
  MOD_RES (19)..(20)..(21)..(22): Xaa is A or G or absent
GXRDVVMGSMEGIXXXXXXXXXMIQMTINSMKTPT

SEQ ID NO: 35403 - protein, 42 aa, Artificial Sequence
  Non-cyclic GFR-binding peptide
  MOD_RES (1)..(3)..(36)..(37): Xaa is C or S
  MOD_RES (14)..(15)..(16)..(17)..(18): Xaa is A or G
  MOD_RES (19)..(20)..(21)..(22): Xaa is A or G or absent
XKXSKVIMSMEGLXXXXXXXXXMIQITINSLDQSVXXPSASA

SEQ ID NO: 35404 - protein, 36 aa, Artificial Sequence
  Non-cyclic GFR-binding peptide
  MOD_RES (31)..(32): Xaa is C or S
EVVMDSMEGLVVNNASDMIQITINSLRTPVXXTPPT

SEQ ID NO: 35405 - protein, 32 aa, Artificial Sequence
  Non-cyclic GFR-binding peptide
  MOD_RES (32)..(32): Xaa is C or S
RDVVMGSMEGLIIQQKDNMIQMTINSMKTPTX

SEQ ID NO: 35406 - protein, 34 aa, Artificial Sequence
  Non-cyclic GFR-binding peptide
  MOD_RES (1)..(3): Xaa is C or S
XGXRDVVMGSMEGLIIQQKDNMIQMTINSMKTPT

SEQ ID NO: 35407 - protein, 41 aa, Artificial Sequence
  Non-cyclic GFR-binding peptide
  MOD_RES (2)..(35)..(36): Xaa is C or S
  MOD_RES (13)..(14)..(15)..(16)..(17): Xaa is A or G
  MOD_RES (18)..(19)..(20)..(21): Xaa is A or G or absent
KXSRVIMSMEGLXXXXXXXXXMIQITINSLAQPVXXPAASA

SEQ ID NO: 35408 - protein, 42 aa, Artificial Sequence
  Non-cyclic GFR-binding peptide
  MOD_RES (1)..(3)..(37)..(38): Xaa is C or S
  MOD_RES (15)..(16)..(17)..(18)..(19): Xaa is A or G
  MOD_RES (20)..(21)..(22)..(23): Xaa is A or G or absent
XGXAEVVMDSMEGLXXXXXXXXXMIQITINSLRAPVXXSAPA

SEQ ID NO: 35409 - protein, 37 aa, Artificial Sequence
  Non-cyclic GFR-binding peptide
  MOD_RES (1)..(3)..(35)..(36): Xaa is C or S
XGXSEVVMDSMEGIVVNNASDMIQITINSLRTPVXXT

SEQ ID NO: 35410 - protein, 38 aa, Artificial Sequence
  Non-cyclic GFR-binding peptide
  MOD_RES (1)..(33)..(34): Xaa is C or S
XAEVVMDSMEGLVVNNAADMIQITINSLRAPVXXSAPA

SEQ ID NO: 35411 - protein, 34 aa, Artificial Sequence
  Non-cyclic GFR-binding peptide
  MOD_RES (31)..(32): Xaa is C or S
EVVMDSMEGIVVNNAADMIQITINSLRAPVXXSA

SEQ ID NO: 35412 - protein, 38 aa, Artificial Sequence
  Non-cyclic GFR-binding peptide
  MOD_RES (1)..(33)..(34): Xaa is C or S
XSEVVMDSMEGLVVNNASDMIQITINSLRTPVXXTPPT

SEQ ID NO: 35413 - protein, 36 aa, Artificial Sequence
  Non-cyclic GFR-binding peptide
  MOD_RES (2)..(36): Xaa is C or S
  MOD_RES (14)..(15)..(16)..(17)..(18): Xaa is A or G
  MOD_RES (19)..(20)..(21)..(22): Xaa is A or G or absent
GXAEVVMDSMEGIXXXXXXXXXMIQITINSLRAPVX

SEQ ID NO: 35414 - protein, 40 aa, Artificial Sequence
  Non-cyclic GFR-binding peptide
  MOD_RES (2)..(4)..(37)..(38): Xaa is C or S
  MOD_RES (15)..(16)..(17)..(18)..(19): Xaa is A or G
  MOD_RES (20)..(21)..(22)..(23): Xaa is A or G or absent
LXGXEEVIMSMEGIXXXXXXXXXMIQMTINSTKVPAXXTS

SEQ ID NO: 35415 - protein, 41 aa, Artificial Sequence
  Non-cyclic GFR-binding peptide
  MOD_RES (2)..(35)..(36): Xaa is C or S
  MOD_RES (13)..(14)..(15)..(16)..(17): Xaa is A or G
  MOD_RES (18)..(19)..(20)..(21): Xaa is A or G or absent
KXSKVVMSMEGLXXXXXXXXXMIQITINSLDQPVXXPSASA

SEQ ID NO: 35416 - protein, 39 aa, Artificial Sequence
  Non-cyclic GFR-binding peptide
  MOD_RES (2)..(4)..(35)..(36): Xaa is C or S
SXKXSKVIMSMEGLIKPTKGIMIQITINSLDQSVXXPSA

SEQ ID NO: 35417 - protein, 40 aa, Artificial Sequence
  Non-cyclic GFR-binding peptide
  MOD_RES (1)..(34)..(35): Xaa is C or S
  MOD_RES (12)..(13)..(14)..(15)..(16): Xaa is A or G
  MOD_RES (17)..(18)..(19)..(20): Xaa is A or G or absent
XEEVIMSMEGIXXXXXXXXXMIQMTINSTKVPAXXTSPVR

SEQ ID NO: 35418 - protein, 36 aa, Artificial Sequence
  Non-cyclic GFR-binding peptide
  MOD_RES (2)..(35)..(36): Xaa is C or S
  MOD_RES (13)..(14)..(15)..(16)..(17): Xaa is A or G
  MOD_RES (18)..(19)..(20)..(21): Xaa is A or G or absent
KXSKVIMSMEGLXXXXXXXXXMIQITINSLDQSVXX

SEQ ID NO: 35419 - protein, 30 aa, Artificial Sequence
  Non-cyclic GFR-binding peptide
RVVMNSMEGLIVNSSDDMIQVTINSLKTPA

SEQ ID NO: 35420 - protein, 37 aa, Artificial Sequence
  Non-cyclic GFR-binding peptide
  MOD_RES (1)..(33)..(34): Xaa is C or S
XSEVVMDSMEGIVVNNASDMIQITINSLRTPVXXTPP

SEQ ID NO: 35421 - protein, 37 aa, Artificial Sequence
  Non-cyclic GFR-binding peptide
  MOD_RES (33)..(34): Xaa is C or S
  MOD_RES (11)..(12)..(13)..(14)..(15): Xaa is A or G
  MOD_RES (16)..(17)..(18)..(19): Xaa is A or G or absent
EEVIMSMEGLXXXXXXXXXMIQMTINSTKVPAXXTSP

SEQ ID NO: 35422 - protein, 41 aa, Artificial Sequence
  Non-cyclic GFR-binding peptide
  MOD_RES (2)..(4)..(35)..(36): Xaa is C or S
SXKXSKVIMSMEGLIKPTKGIMIQITINSLDQSVXXPSASA

SEQ ID NO: 35423 - protein, 43 aa, Artificial Sequence
  Non-cyclic GFR-binding peptide
  MOD_RES (2)..(4)..(37)..(38): Xaa is C or S
  MOD_RES (15)..(16)..(17)..(18)..(19): Xaa is A or G
  MOD_RES (20)..(21)..(22)..(23): Xaa is A or G or absent
LXGXEEVIMSMEGLXXXXXXXXXMIQMTINSTKVPAXXTSPVR

SEQ ID NO: 35424 - protein, 39 aa, Artificial Sequence
  Non-cyclic GFR-binding peptide
  MOD_RES (1)..(3)..(34)..(35): Xaa is C or S
XKXSRVIMSMEGLVKPKRGVMIQITINSLAQPVXXPAAS

SEQ ID NO: 35425 - protein, 35 aa, Artificial Sequence
  Non-cyclic GFR-binding peptide
  MOD_RES (1)..(33)..(34): Xaa is C or S
XSEVVMDSMEGIVVNNASDMIQITINSLRTPVXXT

SEQ ID NO: 35426 - protein, 39 aa, Artificial Sequence
  Non-cyclic GFR-binding peptide
  MOD_RES (34)..(35): Xaa is C or S
  MOD_RES (12)..(13)..(14)..(15)..(16): Xaa is A or G
  MOD_RES (17)..(18)..(19)..(20): Xaa is A or G or absent
AEVVMDSMEGIXXXXXXXXXMIQITINSLRAPVXXSAPA

SEQ ID NO: 35427 - protein, 40 aa, Artificial Sequence
  Non-cyclic GFR-binding peptide
  MOD_RES (2)..(4)..(35)..(36): Xaa is C or S
SXKXSKVIMSMEGLIKPTKGIMIQITINSLDQSVXXPSAS

SEQ ID NO: 35428 - protein, 43 aa, Artificial Sequence
  Non-cyclic GFR-binding peptide
  MOD_RES (2)..(4)..(38)..(39): Xaa is C or S
  MOD_RES (16)..(17)..(18)..(19)..(20): Xaa is A or G
  MOD_RES (21)..(22)..(23)..(24): Xaa is A or G or absent
SXGXRDVVMGSMEGIXXXXXXXXXMIQMTINSMKTPTXXPGAS

SEQ ID NO: 35429 - protein, 36 aa, Artificial Sequence
  Non-cyclic GFR-binding peptide
  MOD_RES (2)..(4): Xaa is C or S
  MOD_RES (15)..(16)..(17)..(18)..(19): Xaa is A or G
  MOD_RES (20)..(21)..(22)..(23): Xaa is A or G or absent
SXKXSKVIMSMEGLXXXXXXXXXMIQITINSLDQSV

SEQ ID NO: 35430 - protein, 34 aa, Artificial Sequence
  Non-cyclic GFR-binding peptide
  MOD_RES (2)..(34): Xaa is C or S
GXSRVVMNSMEGLIVNSSDDMIQVTINSLKTPAX

SEQ ID NO: 35431 - protein, 36 aa, Artificial Sequence
  Non-cyclic GFR-binding peptide
  MOD_RES (1)..(3)..(34)..(35): Xaa is C or S
XKXSRVIMSMEGLVKPKRGVMIQITINSLAQPVXXP

SEQ ID NO: 35432 - protein, 34 aa, Artificial Sequence
  Non-cyclic GFR-binding peptide
  MOD_RES (32)..(33): Xaa is C or S
RDVVMGSMEGIIIQQKDNMIQMTINSMKTPTXXP

SEQ ID NO: 35433 - protein, 35 aa, Artificial Sequence
  Non-cyclic GFR-binding peptide
  MOD_RES (2)..(4): Xaa is C or S
SXGXRDVVMGSMEGIIIQQKDNMIQMTINSMKTPT

SEQ ID NO: 35434 - protein, 35 aa, Artificial Sequence
  Non-cyclic GFR-binding peptide
  MOD_RES (2)..(4): Xaa is C or S
SXGXRDVVMGSMEGLIIQQKDNMIQMTINSMKTPT

SEQ ID NO: 35435 - protein, 34 aa, Artificial Sequence
  Non-cyclic GFR-binding peptide
  MOD_RES (1)..(33)..(34): Xaa is C or S
XSRVVMNSMEGLIVNSSDDMIQVTINSLKTPAXX

SEQ ID NO: 35436 - protein, 39 aa, Artificial Sequence
  Non-cyclic GFR-binding peptide
  MOD_RES (1)..(34)..(35): Xaa is C or S
  MOD_RES (12)..(13)..(14)..(15)..(16): Xaa is A or G
  MOD_RES (17)..(18)..(19)..(20): Xaa is A or G or absent
XSKVIMSMEGLXXXXXXXXXMIQITINSLDQSVXXPSAS

SEQ ID NO: 35437 - protein, 31 aa, Artificial Sequence
  Non-cyclic GFR-binding peptide
  MOD_RES (31)..(31): Xaa is C or S
SKVIMSMEGLIKPTKGIMIQITINSLDQSVX

SEQ ID NO: 35438 - protein, 35 aa, Artificial Sequence
  Non-cyclic GFR-binding peptide
  MOD_RES (1)..(33)..(34): Xaa is C or S
XAEVVMDSMEGLVVNNAADMIQITINSLRAPVXXS

SEQ ID NO: 35439 - protein, 38 aa, Artificial Sequence
  Non-cyclic GFR-binding peptide
  MOD_RES (1)..(3)..(35)..(36): Xaa is C or S
XGXRDVVMGSMEGIIIQQKDNMIQMTINSMKTPTXXPG

SEQ ID NO: 35440 - protein, 34 aa, Artificial Sequence
  Non-cyclic GFR-binding peptide
  MOD_RES (1)..(32)..(33): Xaa is C or S
XSRVIMSMEGLVKPKRGVMIQITINSLAQPVXXP

SEQ ID NO: 35441 - protein, 34 aa, Artificial Sequence
  Non-cyclic GFR-binding peptide
  MOD_RES (33)..(34): Xaa is C or S
  MOD_RES (11)..(12)..(13)..(14)..(15): Xaa is A or G
  MOD_RES (16)..(17)..(18)..(19): Xaa is A or G or absent
EVVMDSMEGLXXXXXXXXXMIQITINSLRTPVXX

SEQ ID NO: 35442 - protein, 33 aa, Artificial Sequence
  Non-cyclic GFR-binding peptide
  MOD_RES (12)..(13)..(14)..(15)..(16): Xaa is A or G
  MOD_RES (17)..(18)..(19)..(20): Xaa is A or G or absent
SRVVMNSMEGLXXXXXXXXXMIQVTINSLKTPA

SEQ ID NO: 35443 - protein, 41 aa, Artificial Sequence
  Non-cyclic GFR-binding peptide
  MOD_RES (2)..(36)..(37): Xaa is C or S
  MOD_RES (14)..(15)..(16)..(17)..(18): Xaa is A or G
  MOD_RES (19)..(20)..(21)..(22): Xaa is A or G or absent
GXSRVVMNSMEGLXXXXXXXXXMIQVTINSLKTPAXXPKPV

SEQ ID NO: 35444 - protein, 36 aa, Artificial Sequence
  Non-cyclic GFR-binding peptide
  MOD_RES (31)..(32): Xaa is C or S
EVVMDSMEGIVVNNASDMIQITINSLRTPVXXTPPT

SEQ ID NO: 35445 - protein, 37 aa, Artificial Sequence
  Non-cyclic GFR-binding peptide
  MOD_RES (31)..(32): Xaa is C or S
RVVMNSMEGIIVNSSDDMIQVTINSLKTPAXXPKPVH

SEQ ID NO: 35446 - protein, 34 aa, Artificial Sequence
  Non-cyclic GFR-binding peptide
  MOD_RES (32)..(33): Xaa is C or S
SEVVMDSMEGIVVNNASDMIQITINSLRTPVXXT

SEQ ID NO: 35447 - protein, 35 aa, Artificial Sequence
  Non-cyclic GFR-binding peptide
  MOD_RES (2)..(34)..(35): Xaa is C or S
GXAEVVMDSMEGLVVNNAADMIQITINSLRAPVXX

SEQ ID NO: 35448 - protein, 42 aa, Artificial Sequence
  Non-cyclic GFR-binding peptide
  MOD_RES (1)..(3)..(36)..(37): Xaa is C or S
  MOD_RES (14)..(15)..(16)..(17)..(18): Xaa is A or G
  MOD_RES (19)..(20)..(21)..(22): Xaa is A or G or absent
XGXEEVIMSMEGIXXXXXXXXXMIQMTINSTKVPAXXTSPVR

SEQ ID NO: 35449 - protein, 34 aa, Artificial Sequence
  Non-cyclic GFR-binding peptide
  MOD_RES (2)..(2): Xaa is C or S
  MOD_RES (13)..(14)..(15)..(16)..(17): Xaa is A or G
  MOD_RES (18)..(19)..(20)..(21): Xaa is A or G or absent
GXEEVIMSMEGIXXXXXXXXXMIQMTINSTKVPA

SEQ ID NO: 35450 - protein, 32 aa, Artificial Sequence
  Non-cyclic GFR-binding peptide
  MOD_RES (32)..(32): Xaa is C or S
AEVVMDSMEGIVVNNAADMIQITINSLRAPVX

SEQ ID NO: 35451 - protein, 34 aa, Artificial Sequence
  Non-cyclic GFR-binding peptide
  MOD_RES (1)..(3)..(34): Xaa is C or S
XKXSKVVMSMEGLVKPTRGVMIQITINSLDQPVX

SEQ ID NO: 35452 - protein, 39 aa, Artificial Sequence
  Non-cyclic GFR-binding peptide
  MOD_RES (33)..(34): Xaa is C or S
  MOD_RES (11)..(12)..(13)..(14)..(15): Xaa is A or G
  MOD_RES (16)..(17)..(18)..(19): Xaa is A or G or absent
SKVIMSMEGLXXXXXXXXXMIQITINSLDQSVXXPSASA

SEQ ID NO: 35453 - protein, 36 aa, Artificial Sequence
  Non-cyclic GFR-binding peptide
  MOD_RES (34)..(35): Xaa is C or S
  MOD_RES (12)..(13)..(14)..(15)..(16): Xaa is A or G
  MOD_RES (17)..(18)..(19)..(20): Xaa is A or G or absent
RDVVMGSMEGIXXXXXXXXXMIQMTINSMKTPTXXP

SEQ ID NO: 35454 - protein, 35 aa, Artificial Sequence
  Non-cyclic GFR-binding peptide
  MOD_RES (2)..(2): Xaa is C or S
  MOD_RES (14)..(15)..(16)..(17)..(18): Xaa is A or G
  MOD_RES (19)..(20)..(21)..(22): Xaa is A or G or absent
GXRDVVMGSMEGLXXXXXXXXXMIQMTINSMKTPT

SEQ ID NO: 35455 - protein, 38 aa, Artificial Sequence
  Non-cyclic GFR-binding peptide
  MOD_RES (33)..(34): Xaa is C or S
  MOD_RES (11)..(12)..(13)..(14)..(15): Xaa is A or G
  MOD_RES (16)..(17)..(18)..(19): Xaa is A or G or absent
SKVVMSMEGLXXXXXXXXXMIQITINSLDQPVXXPSAS

SEQ ID NO: 35456 - protein, 34 aa, Artificial Sequence
  Non-cyclic GFR-binding peptide
  MOD_RES (1)..(34): Xaa is C or S
  MOD_RES (12)..(13)..(14)..(15)..(16): Xaa is A or G
  MOD_RES (17)..(18)..(19)..(20): Xaa is A or G or absent
XSRVIMSMEGLXXXXXXXXXMIQITINSLAQPVX

SEQ ID NO: 35457 - protein, 35 aa, Artificial Sequence
  Non-cyclic GFR-binding peptide
  MOD_RES (2)..(35): Xaa is C or S
  MOD_RES (13)..(14)..(15)..(16)..(17): Xaa is A or G
  MOD_RES (18)..(19)..(20)..(21): Xaa is A or G or absent
KXSKVVMSMEGLXXXXXXXXXMIQITINSLDQPVX

SEQ ID NO: 35458 - protein, 41 aa, Artificial Sequence
  Non-cyclic GFR-binding peptide
  MOD_RES (2)..(4)..(35)..(36): Xaa is C or S
SXKXSRVIMSMEGLVKPKRGVMIQITINSLAQPVXXPAASA

SEQ ID NO: 35459 - protein, 44 aa, Artificial Sequence
  Non-cyclic GFR-binding peptide
  MOD_RES (2)..(4)..(38)..(39): Xaa is C or S
  MOD_RES (16)..(17)..(18)..(19)..(20): Xaa is A or G
  MOD_RES (21)..(22)..(23)..(24): Xaa is A or G or absent
RXGXAEVVMDSMEGLXXXXXXXXXMIQITINSLRAPVXXSAPAA

SEQ ID NO: 35460 - protein, 38 aa, Artificial Sequence
  Non-cyclic GFR-binding peptide
  MOD_RES (2)..(4)..(38): Xaa is C or S
  MOD_RES (16)..(17)..(18)..(19)..(20): Xaa is A or G
  MOD_RES (21)..(22)..(23)..(24): Xaa is A or G or absent
RXGXSEVVMDSMEGLXXXXXXXXXMIQITINSLRTPVX

SEQ ID NO: 35461 - protein, 38 aa, Artificial Sequence
  Non-cyclic GFR-binding peptide
  MOD_RES (2)..(4)..(38): Xaa is C or S
  MOD_RES (16)..(17)..(18)..(19)..(20): Xaa is A or G
  MOD_RES (21)..(22)..(23)..(24): Xaa is A or G or absent
RXGXSEVVMDSMEGIXXXXXXXXXMIQITINSLRTPVX

SEQ ID NO: 35462 - protein, 42 aa, Artificial Sequence
  Non-cyclic GFR-binding peptide
  MOD_RES (2)..(36)..(37): Xaa is C or S
  MOD_RES (14)..(15)..(16)..(17)..(18): Xaa is A or G
  MOD_RES (19)..(20)..(21)..(22): Xaa is A or G or absent
GXSRVVMNSMEGIXXXXXXXXXMIQVTINSLKTPAXXPKPVH

SEQ ID NO: 35463 - protein, 35 aa, Artificial Sequence
  Non-cyclic GFR-binding peptide
  MOD_RES (34)..(35): Xaa is C or S
  MOD_RES (12)..(13)..(14)..(15)..(16): Xaa is A or G
  MOD_RES (17)..(18)..(19)..(20): Xaa is A or G or absent
RDVVMGSMEGLXXXXXXXXXMIQMTINSMKTPTXX

SEQ ID NO: 35464 - protein, 33 aa, Artificial Sequence
  Non-cyclic GFR-binding peptide
  MOD_RES (2)..(2): Xaa is C or S
GXSEVVMDSMEGLVVNNASDMIQITINSLRTPV

SEQ ID NO: 35465 - protein, 40 aa, Artificial Sequence
  Non-cyclic GFR-binding peptide
  MOD_RES (1)..(34)..(35): Xaa is C or S
  MOD_RES (12)..(13)..(14)..(15)..(16): Xaa is A or G
  MOD_RES (17)..(18)..(19)..(20): Xaa is A or G or absent
XSKVIMSMEGLXXXXXXXXXMIQITINSLDQSVXXPSASA

SEQ ID NO: 35466 - protein, 40 aa, Artificial Sequence
  Non-cyclic GFR-binding peptide
  MOD_RES (2)..(4)..(38)..(39): Xaa is C or S
  MOD_RES (16)..(17)..(18)..(19)..(20): Xaa is A or G
  MOD_RES (21)..(22)..(23)..(24): Xaa is A or G or absent
HXGXSRVVMNSMEGLXXXXXXXXXMIQVTINSLKTPAXXP

SEQ ID NO: 35467 - protein, 32 aa, Artificial Sequence
  Non-cyclic GFR-binding peptide
  MOD_RES (31)..(32): Xaa is C or S
EEVIMSMEGLLLVRGNDMIQMTINSTKVPAXX

SEQ ID NO: 35468 - protein, 37 aa, Artificial Sequence
  Non-cyclic GFR-binding peptide
  MOD_RES (33)..(34): Xaa is C or S
  MOD_RES (11)..(12)..(13)..(14)..(15): Xaa is A or G
  MOD_RES (16)..(17)..(18)..(19): Xaa is A or G or absent
EEVIMSMEGIXXXXXXXXXMIQMTINSTKVPAXXTSP

SEQ ID NO: 35469 - protein, 34 aa, Artificial Sequence
  Non-cyclic GFR-binding peptide
  MOD_RES (2)..(4): Xaa is C or S
SXKXSRVIMSMEGLVKPKRGVMIQITINSLAQPV

SEQ ID NO: 35470 - protein, 33 aa, Artificial Sequence
  Non-cyclic GFR-binding peptide
  MOD_RES (31)..(32): Xaa is C or S
RVVMNSMEGLIVNSSDDMIQVTINSLKTPAXXP

SEQ ID NO: 35471 - protein, 43 aa, Artificial Sequence
  Non-cyclic GFR-binding peptide
  MOD_RES (2)..(4)..(38)..(39): Xaa is C or S
  MOD_RES (16)..(17)..(18)..(19)..(20): Xaa is A or G
  MOD_RES (21)..(22)..(23)..(24): Xaa is A or G or absent
HXGXSRVVMNSMEGLXXXXXXXXXMIQVTINSLKTPAXXPKPV

SEQ ID NO: 35472 - protein, 33 aa, Artificial Sequence
  Non-cyclic GFR-binding peptide
  MOD_RES (33)..(33): Xaa is C or S
  MOD_RES (11)..(12)..(13)..(14)..(15): Xaa is A or G
  MOD_RES (16)..(17)..(18)..(19): Xaa is A or G or absent
EVVMDSMEGLXXXXXXXXXMIQITINSLRAPVX

SEQ ID NO: 35473 - protein, 38 aa, Artificial Sequence
  Non-cyclic GFR-binding peptide
  MOD_RES (2)..(36)..(37): Xaa is C or S
  MOD_RES (14)..(15)..(16)..(17)..(18): Xaa is A or G
  MOD_RES (19)..(20)..(21)..(22): Xaa is A or G or absent
GXSRVVMNSMEGLXXXXXXXXXMIQVTINSLKTPAXXP

SEQ ID NO: 35474 - protein, 40 aa, Artificial Sequence
  Non-cyclic GFR-binding peptide
  MOD_RES (2)..(34)..(35): Xaa is C or S
GXSRVVMNSMEGIIVNSSDDMIQVTINSLKTPAXXPKPVH

SEQ ID NO: 35475 - protein, 40 aa, Artificial Sequence
  Non-cyclic GFR-binding peptide
  MOD_RES (2)..(36)..(37): Xaa is C or S
  MOD_RES (14)..(15)..(16)..(17)..(18): Xaa is A or G
  MOD_RES (19)..(20)..(21)..(22): Xaa is A or G or absent
GXSEVVMDSMEGLXXXXXXXXXMIQITINSLRTPVXXTPP

SEQ ID NO: 35476 - protein, 38 aa, Artificial Sequence
  Non-cyclic GFR-binding peptide
  MOD_RES (33)..(34): Xaa is C or S
  MOD_RES (11)..(12)..(13)..(14)..(15): Xaa is A or G
  MOD_RES (16)..(17)..(18)..(19): Xaa is A or G or absent
EEVIMSMEGLXXXXXXXXXMIQMTINSTKVPAXXTSPV

SEQ ID NO: 35477 - protein, 34 aa, Artificial Sequence
  Non-cyclic GFR-binding peptide
  MOD_RES (34)..(34): Xaa is C or S
  MOD_RES (12)..(13)..(14)..(15)..(16): Xaa is A or G
  MOD_RES (17)..(18)..(19)..(20): Xaa is A or G or absent
AEVVMDSMEGIXXXXXXXXXMIQITINSLRAPVX

SEQ ID NO: 35478 - protein, 33 aa, Artificial Sequence
  Non-cyclic GFR-binding peptide
  MOD_RES (1)..(3): Xaa is C or S
XKXSRVIMSMEGLVKPKRGVMIQITINSLAQPV

SEQ ID NO: 35479 - protein, 42 aa, Artificial Sequence
  Non-cyclic GFR-binding peptide
  MOD_RES (2)..(4)..(36)..(37): Xaa is C or S
HXGXSRVVMNSMEGLIVNSSDDMIQVTINSLKTPAXXPKPVH

SEQ ID NO: 35480 - protein, 33 aa, Artificial Sequence
  Non-cyclic GFR-binding peptide
  MOD_RES (1)..(3): Xaa is C or S
XKXSKVIMSMEGLIKPTKGIMIQITINSLDQSV

SEQ ID NO: 35481 - protein, 37 aa, Artificial Sequence
  Non-cyclic GFR-binding peptide
  MOD_RES (1)..(3)..(37): Xaa is C or S
  MOD_RES (15)..(16)..(17)..(18)..(19): Xaa is A or G
  MOD_RES (20)..(21)..(22)..(23): Xaa is A or G or absent
XGXSEVVMDSMEGIXXXXXXXXXMIQITINSLRTPVX

SEQ ID NO: 35482 - protein, 39 aa, Artificial Sequence
  Non-cyclic GFR-binding peptide
  MOD_RES (2)..(33)..(34): Xaa is C or S
KXSRVIMSMEGLVKPKRGVMIQITINSLAQPVXXPAASA

SEQ ID NO: 35483 - protein, 38 aa, Artificial Sequence
  Non-cyclic GFR-binding peptide
  MOD_RES (1)..(33)..(34): Xaa is C or S
XAEVVMDSMEGIVVNNAADMIQITINSLRAPVXXSAPA

SEQ ID NO: 35484 - protein, 35 aa, Artificial Sequence
  Non-cyclic GFR-binding peptide
  MOD_RES (1)..(3): Xaa is C or S
  MOD_RES (14)..(15)..(16)..(17)..(18): Xaa is A or G
  MOD_RES (19)..(20)..(21)..(22): Xaa is A or G or absent
XKXSRVIMSMEGLXXXXXXXXXMIQITINSLAQPV

SEQ ID NO: 35485 - protein, 37 aa, Artificial Sequence
  Non-cyclic GFR-binding peptide
  MOD_RES (2)..(35)..(36): Xaa is C or S
  MOD_RES (13)..(14)..(15)..(16)..(17): Xaa is A or G
  MOD_RES (18)..(19)..(20)..(21): Xaa is A or G or absent
GXEEVIMSMEGLXXXXXXXXXMIQMTINSTKVPAXXT

SEQ ID NO: 35486 - protein, 32 aa, Artificial Sequence
  Non-cyclic GFR-binding peptide
  MOD_RES (2)..(2): Xaa is C or S
KXSRVIMSMEGLVKPKRGVMIQITINSLAQPV

SEQ ID NO: 35487 - protein, 42 aa, Artificial Sequence
  Non-cyclic GFR-binding peptide
  MOD_RES (2)..(4)..(38)..(39): Xaa is C or S
  MOD_RES (16)..(17)..(18)..(19)..(20): Xaa is A or G
  MOD_RES (21)..(22)..(23)..(24): Xaa is A or G or absent
RXGXAEVVMDSMEGLXXXXXXXXXMIQITINSLRAPVXXSAP

SEQ ID NO: 35488 - protein, 31 aa, Artificial Sequence
  Non-cyclic GFR-binding peptide
  MOD_RES (31)..(31): Xaa is C or S
SRVIMSMEGLVKPKRGVMIQITINSLAQPVX

SEQ ID NO: 35489 - protein, 35 aa, Artificial Sequence
  Non-cyclic GFR-binding peptide
  MOD_RES (2)..(2): Xaa is C or S
  MOD_RES (14)..(15)..(16)..(17)..(18): Xaa is A or G
  MOD_RES (19)..(20)..(21)..(22): Xaa is A or G or absent
GXSEVVMDSMEGLXXXXXXXXXMIQITINSLRTPV

SEQ ID NO: 35490 - protein, 34 aa, Artificial Sequence
  Non-cyclic GFR-binding peptide
  MOD_RES (1)..(34): Xaa is C or S
  MOD_RES (12)..(13)..(14)..(15)..(16): Xaa is A or G
  MOD_RES (17)..(18)..(19)..(20): Xaa is A or G or absent
XEEVIMSMEGLXXXXXXXXXMIQMTINSTKVPAX

SEQ ID NO: 35491 - protein, 34 aa, Artificial Sequence
  Non-cyclic GFR-binding peptide
  MOD_RES (32)..(33): Xaa is C or S
AEVVMDSMEGLVVNNAADMIQITINSLRAPVXXS

SEQ ID NO: 35492 - protein, 31 aa, Artificial Sequence
  Non-cyclic GFR-binding peptide
RDVVMGSMEGIIIQQKDNMIQMTINSMKTPT

SEQ ID NO: 35493 - protein, 39 aa, Artificial Sequence
  Non-cyclic GFR-binding peptide
  MOD_RES (2)..(4)..(36)..(37): Xaa is C or S
RXGXAEVVMDSMEGLVVNNAADMIQITINSLRAPVXXSA

SEQ ID NO: 35494 - protein, 40 aa, Artificial Sequence
  Non-cyclic GFR-binding peptide
  MOD_RES (2)..(34)..(35): Xaa is C or S
GXSEVVMDSMEGIVVNNASDMIQITINSLRTPVXXTPPTS

SEQ ID NO: 35495 - protein, 37 aa, Artificial Sequence
  Non-cyclic GFR-binding peptide
  MOD_RES (1)..(33)..(34): Xaa is C or S
XSEVVMDSMEGLVVNNASDMIQITINSLRTPVXXTPP

SEQ ID NO: 35496 - protein, 35 aa, Artificial Sequence
  Non-cyclic GFR-binding peptide
  MOD_RES (32)..(33): Xaa is C or S
RDVVMGSMEGLIIQQKDNMIQMTINSMKTPTXXPG

SEQ ID NO: 35497 - protein, 36 aa, Artificial Sequence
  Non-cyclic GFR-binding peptide
  MOD_RES (1)..(3)..(34)..(35): Xaa is C or S
XGXEEVIMSMEGILLVRGNDMIQMTINSTKVPAXXT

SEQ ID NO: 35498 - protein, 38 aa, Artificial Sequence
  Non-cyclic GFR-binding peptide
  MOD_RES (32)..(33): Xaa is C or S
RDVVMGSMEGIIIQQKDNMIQMTINSMKTPTXXPGASG

SEQ ID NO: 35499 - protein, 37 aa, Artificial Sequence
  Non-cyclic GFR-binding peptide
  MOD_RES (2)..(4)..(36)..(37): Xaa is C or S
RXGXAEVVMDSMEGIVVNNAADMIQITINSLRAPVXX

SEQ ID NO: 35500 - protein, 37 aa, Artificial Sequence
  Non-cyclic GFR-binding peptide
  MOD_RES (2)..(4)..(36)..(37): Xaa is C or S
RXGXAEVVMDSMEGLVVNNAADMIQITINSLRAPVXX

SEQ ID NO: 35501 - protein, 35 aa, Artificial Sequence
  Non-cyclic GFR-binding peptide
  MOD_RES (1)..(33)..(34): Xaa is C or S
XAEVVMDSMEGIVVNNAADMIQITINSLRAPVXXS

SEQ ID NO: 35502 - protein, 38 aa, Artificial Sequence
  Non-cyclic GFR-binding peptide
  MOD_RES (2)..(4)..(37)..(38): Xaa is C or S
  MOD_RES (15)..(16)..(17)..(18)..(19): Xaa is A or G
  MOD_RES (20)..(21)..(22)..(23): Xaa is A or G or absent
LXGXEEVIMSMEGLXXXXXXXXXMIQMTINSTKVPAXX

SEQ ID NO: 35503 - protein, 36 aa, Artificial Sequence
  Non-cyclic GFR-binding peptide
  MOD_RES (1)..(32)..(33): Xaa is C or S
XEEVIMSMEGLLLVRGNDMIQMTINSTKVPAXXTSP

SEQ ID NO: 35504 - protein, 40 aa, Artificial Sequence
  Non-cyclic GFR-binding peptide
  MOD_RES (1)..(35)..(36): Xaa is C or S
  MOD_RES (13)..(14)..(15)..(16)..(17): Xaa is A or G
  MOD_RES (18)..(19)..(20)..(21): Xaa is A or G or absent
XRDVVMGSMEGLXXXXXXXXXMIQMTINSMKTPTXXPGAS

SEQ ID NO: 35505 - protein, 42 aa, Artificial Sequence
  Non-cyclic GFR-binding peptide
  MOD_RES (1)..(3)..(36)..(37): Xaa is C or S
  MOD_RES (14)..(15)..(16)..(17)..(18): Xaa is A or G
  MOD_RES (19)..(20)..(21)..(22): Xaa is A or G or absent
XKXSRVIMSMEGLXXXXXXXXXMIQITINSLAQPVXXPAASA

SEQ ID NO: 35506 - protein, 35 aa, Artificial Sequence
  Non-cyclic GFR-binding peptide
  MOD_RES (1)..(33)..(34): Xaa is C or S
XSEVVMDSMEGLVVNNASDMIQITINSLRTPVXXT

SEQ ID NO: 35507 - protein, 37 aa, Artificial Sequence
  Non-cyclic GFR-binding peptide
  MOD_RES (31)..(32): Xaa is C or S
SKVVMSMEGLVKPTRGVMIQITINSLDQPVXXPSASA

SEQ ID NO: 35508 - protein, 35 aa, Artificial Sequence
  Non-cyclic GFR-binding peptide
  MOD_RES (2)..(34)..(35): Xaa is C or S
GXRDVVMGSMEGIIIQQKDNMIQMTINSMKTPTXX

SEQ ID NO: 35509 - protein, 36 aa, Artificial Sequence
  Non-cyclic GFR-binding peptide
  MOD_RES (1)..(3)..(34)..(35): Xaa is C or S
XGXEEVIMSMEGLLLVRGNDMIQMTINSTKVPAXXT

SEQ ID NO: 35510 - protein, 40 aa, Artificial Sequence
  Non-cyclic GFR-binding peptide
  MOD_RES (1)..(3)..(34)..(35): Xaa is C or S
XKXSKVVMSMEGLVKPTRGVMIQITINSLDQPVXXPSASA

SEQ ID NO: 35511 - protein, 39 aa, Artificial Sequence
  Non-cyclic GFR-binding peptide
  MOD_RES (1)..(3)..(35)..(36): Xaa is C or S
XGXRDVVMGSMEGLIIQQKDNMIQMTINSMKTPTXXPGA

SEQ ID NO: 35512 - protein, 34 aa, Artificial Sequence
  Non-cyclic GFR-binding peptide
  MOD_RES (1)..(32)..(33): Xaa is C or S
XSKVIMSMEGLIKPTKGIMIQITINSLDQSVXXP

SEQ ID NO: 35513 - protein, 38 aa, Artificial Sequence
  Non-cyclic GFR-binding peptide
  MOD_RES (1)..(3)..(37)..(38): Xaa is C or S
  MOD_RES (15)..(16)..(17)..(18)..(19): Xaa is A or G
  MOD_RES (20)..(21)..(22)..(23): Xaa is A or G or absent
XGXRDVVMGSMEGLXXXXXXXXXMIQMTINSMKTPTXX

SEQ ID NO: 35514 - protein, 33 aa, Artificial Sequence
  Non-cyclic GFR-binding peptide
  MOD_RES (31)..(32): Xaa is C or S
SKVIMSMEGLIKPTKGIMIQITINSLDQSVXXP

SEQ ID NO: 35515 - protein, 39 aa, Artificial Sequence
  Non-cyclic GFR-binding peptide
  MOD_RES (2)..(35)..(36): Xaa is C or S
  MOD_RES (13)..(14)..(15)..(16)..(17): Xaa is A or G
  MOD_RES (18)..(19)..(20)..(21): Xaa is A or G or absent
GXEEVIMSMEGLXXXXXXXXXMIQMTINSTKVPAXXTSP

SEQ ID NO: 35516 - protein, 37 aa, Artificial Sequence
  Non-cyclic GFR-binding peptide
  MOD_RES (34)..(35): Xaa is C or S
  MOD_RES (12)..(13)..(14)..(15)..(16): Xaa is A or G
  MOD_RES (17)..(18)..(19)..(20): Xaa is A or G or absent
SEVVMDSMEGIXXXXXXXXXMIQITINSLRTPVXXTP

SEQ ID NO: 35517 - protein, 39 aa, Artificial Sequence
  Non-cyclic GFR-binding peptide
  MOD_RES (34)..(35): Xaa is C or S
  MOD_RES (12)..(13)..(14)..(15)..(16): Xaa is A or G
  MOD_RES (17)..(18)..(19)..(20): Xaa is A or G or absent
SEVVMDSMEGIXXXXXXXXXMIQITINSLRTPVXXTPPT

SEQ ID NO: 35518 - protein, 39 aa, Artificial Sequence
  Non-cyclic GFR-binding peptide
  MOD_RES (2)..(35)..(36): Xaa is C or S
  MOD_RES (13)..(14)..(15)..(16)..(17): Xaa is A or G
  MOD_RES (18)..(19)..(20)..(21): Xaa is A or G or absent
GXEEVIMSMEGIXXXXXXXXXMIQMTINSTKVPAXXTSP

SEQ ID NO: 35519 - protein, 39 aa, Artificial Sequence
  Non-cyclic GFR-binding peptide
  MOD_RES (34)..(35): Xaa is C or S
  MOD_RES (12)..(13)..(14)..(15)..(16): Xaa is A or G
  MOD_RES (17)..(18)..(19)..(20): Xaa is A or G or absent
SRVVMNSMEGLXXXXXXXXXMIQVTINSLKTPAXXPKPV

SEQ ID NO: 35520 - protein, 35 aa, Artificial Sequence
  Non-cyclic GFR-binding peptide
  MOD_RES (33)..(34): Xaa is C or S
  MOD_RES (11)..(12)..(13)..(14)..(15): Xaa is A or G
  MOD_RES (16)..(17)..(18)..(19): Xaa is A or G or absent
SRVIMSMEGLXXXXXXXXXMIQITINSLAQPVXXP

SEQ ID NO: 35521 - protein, 34 aa, Artificial Sequence
  Non-cyclic GFR-binding peptide
  MOD_RES (1)..(3): Xaa is C or S
XGXAEVVMDSMEGLVVNNAADMIQITINSLRAPV

SEQ ID NO: 35522 - protein, 37 aa, Artificial Sequence
  Non-cyclic GFR-binding peptide
  MOD_RES (2)..(33)..(34): Xaa is C or S
GXEEVIMSMEGLLLVRGNDMIQMTINSTKVPAXXTSP

SEQ ID NO: 35523 - protein, 39 aa, Artificial Sequence
  Non-cyclic GFR-binding peptide
  MOD_RES (1)..(3)..(37)..(38): Xaa is C or S
  MOD_RES (15)..(16)..(17)..(18)..(19): Xaa is A or G
  MOD_RES (20)..(21)..(22)..(23): Xaa is A or G or absent
XGXRDVVMGSMEGLXXXXXXXXXMIQMTINSMKTPTXXP

SEQ ID NO: 35524 - protein, 36 aa, Artificial Sequence
  Non-cyclic GFR-binding peptide
  MOD_RES (1)..(34)..(35): Xaa is C or S
  MOD_RES (12)..(13)..(14)..(15)..(16): Xaa is A or G
  MOD_RES (17)..(18)..(19)..(20): Xaa is A or G or absent
XSRVIMSMEGLXXXXXXXXXMIQITINSLAQPVXXP

SEQ ID NO: 35525 - protein, 41 aa, Artificial Sequence
  Non-cyclic GFR-binding peptide
  MOD_RES (2)..(4)..(36)..(37): Xaa is C or S
RXGXAEVVMDSMEGLVVNNAADMIQITINSLRAPVXXSAPA

SEQ ID NO: 35526 - protein, 35 aa, Artificial Sequence
  Non-cyclic GFR-binding peptide
  MOD_RES (32)..(33): Xaa is C or S
AEVVMDSMEGLVVNNAADMIQITINSLRAPVXXSA

SEQ ID NO: 35527 - protein, 35 aa, Artificial Sequence
  Non-cyclic GFR-binding peptide
  MOD_RES (2)..(33)..(34): Xaa is C or S
KXSRVIMSMEGLVKPKRGVMIQITINSLAQPVXXP

SEQ ID NO: 35528 - protein, 38 aa, Artificial Sequence
  Non-cyclic GFR-binding peptide
  MOD_RES (2)..(4)..(38): Xaa is C or S
  MOD_RES (16)..(17)..(18)..(19)..(20): Xaa is A or G
  MOD_RES (21)..(22)..(23)..(24): Xaa is A or G or absent
SXGXRDVVMGSMEGLXXXXXXXXXMIQMTINSMKTPTX

SEQ ID NO: 35529 - protein, 40 aa, Artificial Sequence
  Non-cyclic GFR-binding peptide
  MOD_RES (2)..(36)..(37): Xaa is C or S
  MOD_RES (14)..(15)..(16)..(17)..(18): Xaa is A or G
  MOD_RES (19)..(20)..(21)..(22): Xaa is A or G or absent
GXSEVVMDSMEGIXXXXXXXXXMIQITINSLRTPVXXTPP

SEQ ID NO: 35530 - protein, 35 aa, Artificial Sequence
  Non-cyclic GFR-binding peptide
  MOD_RES (32)..(33): Xaa is C or S
SRVVMNSMEGLIVNSSDDMIQVTINSLKTPAXXPK

SEQ ID NO: 35531 - protein, 41 aa, Artificial Sequence
  Non-cyclic GFR-binding peptide
  MOD_RES (1)..(3)..(37)..(38): Xaa is C or S
  MOD_RES (15)..(16)..(17)..(18)..(19): Xaa is A or G
  MOD_RES (20)..(21)..(22)..(23): Xaa is A or G or absent
XGXAEVVMDSMEGLXXXXXXXXXMIQITINSLRAPVXXSAP

SEQ ID NO: 35532 - protein, 38 aa, Artificial Sequence
  Non-cyclic GFR-binding peptide
  MOD_RES (32)..(33): Xaa is C or S
SRVVMNSMEGLIVNSSDDMIQVTINSLKTPAXXPKPVH

SEQ ID NO: 35533 - protein, 41 aa, Artificial Sequence
  Non-cyclic GFR-binding peptide
  MOD_RES (1)..(35)..(36): Xaa is C or S
  MOD_RES (13)..(14)..(15)..(16)..(17): Xaa is A or G
  MOD_RES (18)..(19)..(20)..(21): Xaa is A or G or absent
XSEVVMDSMEGLXXXXXXXXXMIQITINSLRTPVXXTPPTS

SEQ ID NO: 35534 - protein, 37 aa, Artificial Sequence
  Non-cyclic GFR-binding peptide
  MOD_RES (1)..(3)..(37): Xaa is C or S
  MOD_RES (15)..(16)..(17)..(18)..(19): Xaa is A or G
  MOD_RES (20)..(21)..(22)..(23): Xaa is A or G or absent
XGXSRVVMNSMEGLXXXXXXXXXMIQVTINSLKTPAX

SEQ ID NO: 35535 - protein, 39 aa, Artificial Sequence
  Non-cyclic GFR-binding peptide
  MOD_RES (2)..(4)..(37)..(38): Xaa is C or S
  MOD_RES (15)..(16)..(17)..(18)..(19): Xaa is A or G
  MOD_RES (20)..(21)..(22)..(23): Xaa is A or G or absent
SXKXSKVIMSMEGLXXXXXXXXXMIQITINSLDQSVXXP

SEQ ID NO: 35536 - protein, 35 aa, Artificial Sequence
  Non-cyclic GFR-binding peptide
  MOD_RES (31)..(32): Xaa is C or S
EVVMDSMEGLVVNNASDMIQITINSLRTPVXXTPP

SEQ ID NO: 35537 - protein, 36 aa, Artificial Sequence
  Non-cyclic GFR-binding peptide
  MOD_RES (2)..(35)..(36): Xaa is C or S
  MOD_RES (13)..(14)..(15)..(16)..(17): Xaa is A or G
  MOD_RES (18)..(19)..(20)..(21): Xaa is A or G or absent
KXSKVVMSMEGLXXXXXXXXXMIQITINSLDQPVXX

SEQ ID NO: 35538 - protein, 38 aa, Artificial Sequence
  Non-cyclic GFR-binding peptide
  MOD_RES (1)..(32)..(33): Xaa is C or S
XEEVIMSMEGLLLVRGNDMIQMTINSTKVPAXXTSPVR

SEQ ID NO: 35539 - protein, 37 aa, Artificial Sequence
  Non-cyclic GFR-binding peptide
  MOD_RES (1)..(3)..(35)..(36): Xaa is C or S
XGXAEVVMDSMEGIVVNNAADMIQITINSLRAPVXXS

SEQ ID NO: 35540 - protein, 35 aa, Artificial Sequence
  Non-cyclic GFR-binding peptide
  MOD_RES (2)..(33)..(34): Xaa is C or S
KXSKVIMSMEGLIKPTKGIMIQITINSLDQSVXXP

SEQ ID NO: 35541 - protein, 36 aa, Artificial Sequence
  Non-cyclic GFR-binding peptide
  MOD_RES (1)..(33)..(34): Xaa is C or S
XAEVVMDSMEGIVVNNAADMIQITINSLRAPVXXSA

SEQ ID NO: 35542 - protein, 31 aa, Artificial Sequence
  Non-cyclic GFR-binding peptide
AEVVMDSMEGIVVNNAADMIQITINSLRAPV

SEQ ID NO: 35543 - protein, 44 aa, Artificial Sequence
  Non-cyclic GFR-binding peptide
  MOD_RES (2)..(4)..(38)..(39): Xaa is C or S
  MOD_RES (16)..(17)..(18)..(19)..(20): Xaa is A or G
  MOD_RES (21)..(22)..(23)..(24): Xaa is A or G or absent
RXGXSEVVMDSMEGLXXXXXXXXXMIQITINSLRTPVXXTPPTS

SEQ ID NO: 35544 - protein, 36 aa, Artificial Sequence
  Non-cyclic GFR-binding peptide
  MOD_RES (2)..(34)..(35): Xaa is C or S
GXSRVVMNSMEGLIVNSSDDMIQVTINSLKTPAXXP

SEQ ID NO: 35545 - protein, 38 aa, Artificial Sequence
  Non-cyclic GFR-binding peptide
  MOD_RES (33)..(34): Xaa is C or S
  MOD_RES (11)..(12)..(13)..(14)..(15): Xaa is A or G
  MOD_RES (16)..(17)..(18)..(19): Xaa is A or G or absent
DVVMGSMEGLXXXXXXXXXMIQMTINSMKTPTXXPGAS

SEQ ID NO: 35546 - protein, 34 aa, Artificial Sequence
  Non-cyclic GFR-binding peptide
  MOD_RES (33)..(34): Xaa is C or S
  MOD_RES (11)..(12)..(13)..(14)..(15): Xaa is A or G
  MOD_RES (16)..(17)..(18)..(19): Xaa is A or G or absent
EEVIMSMEGLXXXXXXXXXMIQMTINSTKVPAXX

SEQ ID NO: 35547 - protein, 39 aa, Artificial Sequence
  Non-cyclic GFR-binding peptide
  MOD_RES (2)..(36)..(37): Xaa is C or S
  MOD_RES (14)..(15)..(16)..(17)..(18): Xaa is A or G
  MOD_RES (19)..(20)..(21)..(22): Xaa is A or G or absent
GXSEVVMDSMEGLXXXXXXXXXMIQITINSLRTPVXXTP

SEQ ID NO: 35548 - protein, 31 aa, Artificial Sequence
  Non-cyclic GFR-binding peptide
  MOD_RES (1)..(1): Xaa is C or S
XEEVIMSMEGLLLVRGNDMIQMTINSTKVPA

SEQ ID NO: 35549 - protein, 38 aa, Artificial Sequence
  Non-cyclic GFR-binding peptide
  MOD_RES (2)..(33)..(34): Xaa is C or S
GXEEVIMSMEGLLLVRGNDMIQMTINSTKVPAXXTSPV

SEQ ID NO: 35550 - protein, 39 aa, Artificial Sequence
  Non-cyclic GFR-binding peptide
  MOD_RES (2)..(36)..(37): Xaa is C or S
  MOD_RES (14)..(15)..(16)..(17)..(18): Xaa is A or G
  MOD_RES (19)..(20)..(21)..(22): Xaa is A or G or absent
GXSEVVMDSMEGIXXXXXXXXXMIQITINSLRTPVXXTP

SEQ ID NO: 35551 - protein, 33 aa, Artificial Sequence
  Non-cyclic GFR-binding peptide
  MOD_RES (31)..(32): Xaa is C or S
SKVVMSMEGLVKPTRGVMIQITINSLDQPVXXP

SEQ ID NO: 35552 - protein, 37 aa, Artificial Sequence
  Non-cyclic GFR-binding peptide
  MOD_RES (1)..(33)..(34): Xaa is C or S
XSRVVMNSMEGLIVNSSDDMIQVTINSLKTPAXXPKP

SEQ ID NO: 35553 - protein, 38 aa, Artificial Sequence
  Non-cyclic GFR-binding peptide
  MOD_RES (34)..(35): Xaa is C or S
  MOD_RES (12)..(13)..(14)..(15)..(16): Xaa is A or G
  MOD_RES (17)..(18)..(19)..(20): Xaa is A or G or absent
SEVVMDSMEGIXXXXXXXXXMIQITINSLRTPVXXTPP

SEQ ID NO: 35554 - protein, 34 aa, Artificial Sequence
  Non-cyclic GFR-binding peptide
  MOD_RES (33)..(34): Xaa is C or S
  MOD_RES (11)..(12)..(13)..(14)..(15): Xaa is A or G
  MOD_RES (16)..(17)..(18)..(19): Xaa is A or G or absent
EVVMDSMEGIXXXXXXXXXMIQITINSLRTPVXX

SEQ ID NO: 35555 - protein, 41 aa, Artificial Sequence
  Non-cyclic GFR-binding peptide
  MOD_RES (2)..(4)..(36)..(37): Xaa is C or S
RXGXSEVVMDSMEGLVVNNASDMIQITINSLRTPVXXTPPT

SEQ ID NO: 35556 - protein, 35 aa, Artificial Sequence
  Non-cyclic GFR-binding peptide
  MOD_RES (34)..(35): Xaa is C or S
  MOD_RES (12)..(13)..(14)..(15)..(16): Xaa is A or G
  MOD_RES (17)..(18)..(19)..(20): Xaa is A or G or absent
SEVVMDSMEGLXXXXXXXXXMIQITINSLRTPVXX

SEQ ID NO: 35557 - protein, 41 aa, Artificial Sequence
  Non-cyclic GFR-binding peptide
  MOD_RES (2)..(4)..(38)..(39): Xaa is C or S
  MOD_RES (16)..(17)..(18)..(19)..(20): Xaa is A or G
  MOD_RES (21)..(22)..(23)..(24): Xaa is A or G or absent
SXGXRDVVMGSMEGLXXXXXXXXXMIQMTINSMKTPTXXPG

SEQ ID NO: 35558 - protein, 40 aa, Artificial Sequence
  Non-cyclic GFR-binding peptide
  MOD_RES (2)..(4)..(36)..(37): Xaa is C or S
SXGXRDVVMGSMEGIIIQQKDNMIQMTINSMKTPTXXPGA

SEQ ID NO: 35559 - protein, 34 aa, Artificial Sequence
  Non-cyclic GFR-binding peptide
  MOD_RES (34)..(34): Xaa is C or S
  MOD_RES (12)..(13)..(14)..(15)..(16): Xaa is A or G
  MOD_RES (17)..(18)..(19)..(20): Xaa is A or G or absent
SEVVMDSMEGLXXXXXXXXXMIQITINSLRTPVX

SEQ ID NO: 35560 - protein, 40 aa, Artificial Sequence
  Non-cyclic GFR-binding peptide
  MOD_RES (2)..(4)..(37)..(38): Xaa is C or S
  MOD_RES (15)..(16)..(17)..(18)..(19): Xaa is A or G
  MOD_RES (20)..(21)..(22)..(23): Xaa is A or G or absent
LXGXEEVIMSMEGLXXXXXXXXXMIQMTINSTKVPAXXTS

SEQ ID NO: 35561 - protein, 41 aa, Artificial Sequence
  Non-cyclic GFR-binding peptide
  MOD_RES (2)..(4)..(38)..(39): Xaa is C or S
  MOD_RES (16)..(17)..(18)..(19)..(20): Xaa is A or G
  MOD_RES (21)..(22)..(23)..(24): Xaa is A or G or absent
RXGXAEVVMDSMEGIXXXXXXXXXMIQITINSLRAPVXXSA

SEQ ID NO: 35562 - protein, 33 aa, Artificial Sequence
  Non-cyclic GFR-binding peptide
  MOD_RES (1)..(1): Xaa is C or S
  MOD_RES (12)..(13)..(14)..(15)..(16): Xaa is A or G
  MOD_RES (17)..(18)..(19)..(20): Xaa is A or G or absent
XSKVIMSMEGLXXXXXXXXXMIQITINSLDQSV

SEQ ID NO: 35563 - protein, 33 aa, Artificial Sequence
  Non-cyclic GFR-binding peptide
  MOD_RES (31)..(32): Xaa is C or S
EVVMDSMEGIVVNNASDMIQITINSLRTPVXXT

SEQ ID NO: 35564 - protein, 41 aa, Artificial Sequence
  Non-cyclic GFR-binding peptide
  MOD_RES (1)..(3)..(35)..(36): Xaa is C or S
XGXAEVVMDSMEGLVVNNAADMIQITINSLRAPVXXSAPAA

SEQ ID NO: 35565 - protein, 37 aa, Artificial Sequence
  Non-cyclic GFR-binding peptide
  MOD_RES (2)..(35)..(36): Xaa is C or S
  MOD_RES (13)..(14)..(15)..(16)..(17): Xaa is A or G
  MOD_RES (18)..(19)..(20)..(21): Xaa is A or G or absent
GXEEVIMSMEGIXXXXXXXXXMIQMTINSTKVPAXXT

SEQ ID NO: 35566 - protein, 38 aa, Artificial Sequence
  Non-cyclic GFR-binding peptide
  MOD_RES (1)..(33)..(34): Xaa is C or S
XSRVVMNSMEGLIVNSSDDMIQVTINSLKTPAXXPKPV

SEQ ID NO: 35567 - protein, 40 aa, Artificial Sequence
  Non-cyclic GFR-binding peptide
  MOD_RES (34)..(35): Xaa is C or S
  MOD_RES (12)..(13)..(14)..(15)..(16): Xaa is A or G
  MOD_RES (17)..(18)..(19)..(20): Xaa is A or G or absent
SEVVMDSMEGIXXXXXXXXXMIQITINSLRTPVXXTPPTS

SEQ ID NO: 35568 - protein, 42 aa, Artificial Sequence
  Non-cyclic GFR-binding peptide
  MOD_RES (1)..(3)..(37)..(38): Xaa is C or S
  MOD_RES (15)..(16)..(17)..(18)..(19): Xaa is A or G
  MOD_RES (20)..(21)..(22)..(23): Xaa is A or G or absent
XGXAEVVMDSMEGIXXXXXXXXXMIQITINSLRAPVXXSAPA

SEQ ID NO: 35569 - protein, 32 aa, Artificial Sequence
  Non-cyclic GFR-binding peptide
  MOD_RES (31)..(32): Xaa is C or S
SKVIMSMEGLIKPTKGIMIQITINSLDQSVXX

SEQ ID NO: 35570 - protein, 36 aa, Artificial Sequence
  Non-cyclic GFR-binding peptide
  MOD_RES (2)..(33)..(34): Xaa is C or S
GXEEVIMSMEGILLVRGNDMIQMTINSTKVPAXXTS

SEQ ID NO: 35571 - protein, 38 aa, Artificial Sequence
  Non-cyclic GFR-binding peptide
  MOD_RES (2)..(4)..(36)..(37): Xaa is C or S
SXGXRDVVMGSMEGLIIQQKDNMIQMTINSMKTPTXXP

SEQ ID NO: 35572 - protein, 35 aa, Artificial Sequence
  Non-cyclic GFR-binding peptide
  MOD_RES (1)..(3)..(35): Xaa is C or S
XGXSEVVMDSMEGIVVNNASDMIQITINSLRTPVX

SEQ ID NO: 35573 - protein, 41 aa, Artificial Sequence
  Non-cyclic GFR-binding peptide
  MOD_RES (1)..(35)..(36): Xaa is C or S
  MOD_RES (13)..(14)..(15)..(16)..(17): Xaa is A or G
  MOD_RES (18)..(19)..(20)..(21): Xaa is A or G or absent
XAEVVMDSMEGIXXXXXXXXXMIQITINSLRAPVXXSAPAA

SEQ ID NO: 35574 - protein, 36 aa, Artificial Sequence
  Non-cyclic GFR-binding peptide
  MOD_RES (1)..(3): Xaa is C or S
  MOD_RES (15)..(16)..(17)..(18)..(19): Xaa is A or G
  MOD_RES (20)..(21)..(22)..(23): Xaa is A or G or absent
XGXRDVVMGSMEGLXXXXXXXXXMIQMTINSMKTPT

SEQ ID NO: 35575 - protein, 34 aa, Artificial Sequence
  Non-cyclic GFR-binding peptide
  MOD_RES (2)..(34): Xaa is C or S
GXAEVVMDSMEGIVVNNAADMIQITINSLRAPVX

SEQ ID NO: 35576 - protein, 35 aa, Artificial Sequence
  Non-cyclic GFR-binding peptide
  MOD_RES (2)..(4)..(35): Xaa is C or S
SXKXSKVIMSMEGLIKPTKGIMIQITINSLDQSVX

SEQ ID NO: 35577 - protein, 34 aa, Artificial Sequence
  Non-cyclic GFR-binding peptide
  MOD_RES (1)..(3): Xaa is C or S
XGXAEVVMDSMEGIVVNNAADMIQITINSLRAPV

SEQ ID NO: 35578 - protein, 37 aa, Artificial Sequence
  Non-cyclic GFR-binding peptide
  MOD_RES (2)..(36)..(37): Xaa is C or S
  MOD_RES (14)..(15)..(16)..(17)..(18): Xaa is A or G
  MOD_RES (19)..(20)..(21)..(22): Xaa is A or G or absent
GXSRVVMNSMEGLXXXXXXXXXMIQVTINSLKTPAXX

SEQ ID NO: 35579 - protein, 40 aa, Artificial Sequence
  Non-cyclic GFR-binding peptide
  MOD_RES (1)..(3)..(35)..(36): Xaa is C or S
XGXSEVVMDSMEGIVVNNASDMIQITINSLRTPVXXTPPT

SEQ ID NO: 35580 - protein, 35 aa, Artificial Sequence
  Non-cyclic GFR-binding peptide
  MOD_RES (32)..(33): Xaa is C or S
SEVVMDSMEGIVVNNASDMIQITINSLRTPVXXTP

SEQ ID NO: 35581 - protein, 38 aa, Artificial Sequence
  Non-cyclic GFR-binding peptide
  MOD_RES (33)..(34): Xaa is C or S
  MOD_RES (11)..(12)..(13)..(14)..(15): Xaa is A or G
  MOD_RES (16)..(17)..(18)..(19): Xaa is A or G or absent
DVVMGSMEGIXXXXXXXXXMIQMTINSMKTPTXXPGAS

SEQ ID NO: 35582 - protein, 38 aa, Artificial Sequence
  Non-cyclic GFR-binding peptide
  MOD_RES (1)..(3)..(34)..(35): Xaa is C or S
XKXSRVIMSMEGLVKPKRGVMIQITINSLAQPVXXPAA

SEQ ID NO: 35583 - protein, 39 aa, Artificial Sequence
  Non-cyclic GFR-binding peptide
  MOD_RES (2)..(4)..(37)..(38): Xaa is C or S
  MOD_RES (15)..(16)..(17)..(18)..(19): Xaa is A or G
  MOD_RES (20)..(21)..(22)..(23): Xaa is A or G or absent
SXKXSKVVMSMEGLXXXXXXXXXMIQITINSLDQPVXXP

SEQ ID NO: 35584 - protein, 40 aa, Artificial Sequence
  Non-cyclic GFR-binding peptide
  MOD_RES (2)..(4)..(36)..(37): Xaa is C or S
RXGXSEVVMDSMEGLVVNNASDMIQITINSLRTPVXXTPP

SEQ ID NO: 35585 - protein, 38 aa, Artificial Sequence
  Non-cyclic GFR-binding peptide
  MOD_RES (1)..(3)..(37)..(38): Xaa is C or S
  MOD_RES (15)..(16)..(17)..(18)..(19): Xaa is A or G
  MOD_RES (20)..(21)..(22)..(23): Xaa is A or G or absent
XGXRDVVMGSMEGIXXXXXXXXXMIQMTINSMKTPTXX

SEQ ID NO: 35586 - protein, 37 aa, Artificial Sequence
  Non-cyclic GFR-binding peptide
  MOD_RES (2)..(4)..(37): Xaa is C or S
  MOD_RES (15)..(16)..(17)..(18)..(19): Xaa is A or G
  MOD_RES (20)..(21)..(22)..(23): Xaa is A or G or absent
LXGXEEVIMSMEGIXXXXXXXXXMIQMTINSTKVPAX

SEQ ID NO: 35587 - protein, 35 aa, Artificial Sequence
  Non-cyclic GFR-binding peptide
  MOD_RES (2)..(35): Xaa is C or S
  MOD_RES (13)..(14)..(15)..(16)..(17): Xaa is A or G
  MOD_RES (18)..(19)..(20)..(21): Xaa is A or G or absent
KXSKVIMSMEGLXXXXXXXXXMIQITINSLDQSVX

SEQ ID NO: 35588 - protein, 35 aa, Artificial Sequence
  Non-cyclic GFR-binding peptide
  MOD_RES (33)..(34): Xaa is C or S
  MOD_RES (11)..(12)..(13)..(14)..(15): Xaa is A or G
  MOD_RES (16)..(17)..(18)..(19): Xaa is A or G or absent
SKVIMSMEGLXXXXXXXXXMIQITINSLDQSVXXP

SEQ ID NO: 35589 - protein, 32 aa, Artificial Sequence
  Non-cyclic GFR-binding peptide
  MOD_RES (31)..(32): Xaa is C or S
SKVVMSMEGLVKPTRGVMIQITINSLDQPVXX

SEQ ID NO: 35590 - protein, 35 aa, Artificial Sequence
  Non-cyclic GFR-binding peptide
  MOD_RES (2)..(2): Xaa is C or S
  MOD_RES (14)..(15)..(16)..(17)..(18): Xaa is A or G
  MOD_RES (19)..(20)..(21)..(22): Xaa is A or G or absent
GXSEVVMDSMEGIXXXXXXXXXMIQITINSLRTPV

SEQ ID NO: 35591 - protein, 36 aa, Artificial Sequence
  Non-cyclic GFR-binding peptide
  MOD_RES (1)..(3)..(34)..(35): Xaa is C or S
XKXSKVVMSMEGLVKPTRGVMIQITINSLDQPVXXP

SEQ ID NO: 35592 - protein, 37 aa, Artificial Sequence
  Non-cyclic GFR-binding peptide
  MOD_RES (2)..(35)..(36): Xaa is C or S
  MOD_RES (13)..(14)..(15)..(16)..(17): Xaa is A or G
  MOD_RES (18)..(19)..(20)..(21): Xaa is A or G or absent
KXSKVIMSMEGLXXXXXXXXXMIQITINSLDQSVXXP

SEQ ID NO: 35593 - protein, 36 aa, Artificial Sequence
  Non-cyclic GFR-binding peptide
  MOD_RES (1)..(33)..(34): Xaa is C or S
XSRVVMNSMEGLIVNSSDDMIQVTINSLKTPAXXPK

SEQ ID NO: 35594 - protein, 39 aa, Artificial Sequence
  Non-cyclic GFR-binding peptide
  MOD_RES (2)..(34)..(35): Xaa is C or S
GXSRVVMNSMEGLIVNSSDDMIQVTINSLKTPAXXPKPV

SEQ ID NO: 35595 - protein, 32 aa, Artificial Sequence
  Non-cyclic GFR-binding peptide
  MOD_RES (1)..(32): Xaa is C or S
XEEVIMSMEGLLLVRGNDMIQMTINSTKVPAX

SEQ ID NO: 35596 - protein, 40 aa, Artificial Sequence
  Non-cyclic GFR-binding peptide
  MOD_RES (2)..(4)..(38)..(39): Xaa is C or S
  MOD_RES (16)..(17)..(18)..(19)..(20): Xaa is A or G
  MOD_RES (21)..(22)..(23)..(24): Xaa is A or G or absent
RXGXSEVVMDSMEGIXXXXXXXXXMIQITINSLRTPVXXT

SEQ ID NO: 35597 - protein, 33 aa, Artificial Sequence
  Non-cyclic GFR-binding peptide
  MOD_RES (1)..(32)..(33): Xaa is C or S
XSKVVMSMEGLVKPTRGVMIQITINSLDQPVXX

SEQ ID NO: 35598 - protein, 31 aa, Artificial Sequence
  Non-cyclic GFR-binding peptide
SEVVMDSMEGIVVNNASDMIQITINSLRTPV

SEQ ID NO: 35599 - protein, 34 aa, Artificial Sequence
  Non-cyclic GFR-binding peptide
  MOD_RES (2)..(4): Xaa is C or S
LXGXEEVIMSMEGILLVRGNDMIQMTINSTKVPA

SEQ ID NO: 35600 - protein, 39 aa, Artificial Sequence
  Non-cyclic GFR-binding peptide
  MOD_RES (1)..(33)..(34): Xaa is C or S
XRDVVMGSMEGIIIQQKDNMIQMTINSMKTPTXXPGASG

SEQ ID NO: 35601 - protein, 38 aa, Artificial Sequence
  Non-cyclic GFR-binding peptide
  MOD_RES (1)..(3)..(34)..(35): Xaa is C or S
XGXEEVIMSMEGLLLVRGNDMIQMTINSTKVPAXXTSP

SEQ ID NO: 35602 - protein, 36 aa, Artificial Sequence
  Non-cyclic GFR-binding peptide
  MOD_RES (1)..(3)..(36): Xaa is C or S
  MOD_RES (14)..(15)..(16)..(17)..(18): Xaa is A or G
  MOD_RES (19)..(20)..(21)..(22): Xaa is A or G or absent
XKXSRVIMSMEGLXXXXXXXXXMIQITINSLAQPVX

SEQ ID NO: 35603 - protein, 35 aa, Artificial Sequence
  Non-cyclic GFR-binding peptide
  MOD_RES (2)..(34)..(35): Xaa is C or S
GXRDVVMGSMEGLIIQQKDNMIQMTINSMKTPTXX

SEQ ID NO: 35604 - protein, 41 aa, Artificial Sequence
  Non-cyclic GFR-binding peptide
  MOD_RES (2)..(4)..(37)..(38): Xaa is C or S
  MOD_RES (15)..(16)..(17)..(18)..(19): Xaa is A or G
  MOD_RES (20)..(21)..(22)..(23): Xaa is A or G or absent
SXKXSKVIMSMEGLXXXXXXXXXMIQITINSLDQSVXXPSA

SEQ ID NO: 35605 - protein, 33 aa, Artificial Sequence
  Non-cyclic GFR-binding peptide
  MOD_RES (1)..(3): Xaa is C or S
XGXEEVIMSMEGILLVRGNDMIQMTINSTKVPA

SEQ ID NO: 35606 - protein, 36 aa, Artificial Sequence
  Non-cyclic GFR-binding peptide
  MOD_RES (1)..(35)..(36): Xaa is C or S
  MOD_RES (13)..(14)..(15)..(16)..(17): Xaa is A or G
  MOD_RES (18)..(19)..(20)..(21): Xaa is A or G or absent
XSRVVMNSMEGLXXXXXXXXXMIQVTINSLKTPAXX

SEQ ID NO: 35607 - protein, 41 aa, Artificial Sequence
  Non-cyclic GFR-binding peptide
  MOD_RES (2)..(4)..(35)..(36): Xaa is C or S
SXKXSKVVMSMEGLVKPTRGVMIQITINSLDQPVXXPSASA

SEQ ID NO: 35608 - protein, 41 aa, Artificial Sequence
  Non-cyclic GFR-binding peptide
  MOD_RES (1)..(3)..(37)..(38): Xaa is C or S
  MOD_RES (15)..(16)..(17)..(18)..(19): Xaa is A or G
  MOD_RES (20)..(21)..(22)..(23): Xaa is A or G or absent
XGXRDVVMGSMEGIXXXXXXXXXMIQMTINSMKTPTXXPGA

SEQ ID NO: 35609 - protein, 42 aa, Artificial Sequence
  Non-cyclic GFR-binding peptide
  MOD_RES (2)..(4)..(36)..(37): Xaa is C or S
RXGXSEVVMDSMEGIVVNNASDMIQITINSLRTPVXXTPPTS

SEQ ID NO: 35610 - protein, 37 aa, Artificial Sequence
  Non-cyclic GFR-binding peptide
  MOD_RES (34)..(35): Xaa is C or S
  MOD_RES (12)..(13)..(14)..(15)..(16): Xaa is A or G
  MOD_RES (17)..(18)..(19)..(20): Xaa is A or G or absent
SRVVMNSMEGLXXXXXXXXXMIQVTINSLKTPAXXPK

SEQ ID NO: 35611 - protein, 34 aa, Artificial Sequence
  Non-cyclic GFR-binding peptide
  MOD_RES (33)..(34): Xaa is C or S
  MOD_RES (11)..(12)..(13)..(14)..(15): Xaa is A or G
  MOD_RES (16)..(17)..(18)..(19): Xaa is A or G or absent
RVVMNSMEGLXXXXXXXXXMIQVTINSLKTPAXX

SEQ ID NO: 35612 - protein, 35 aa, Artificial Sequence
  Non-cyclic GFR-binding peptide
  MOD_RES (1)..(34)..(35): Xaa is C or S
  MOD_RES (12)..(13)..(14)..(15)..(16): Xaa is A or G
  MOD_RES (17)..(18)..(19)..(20): Xaa is A or G or absent
XEEVIMSMEGIXXXXXXXXXMIQMTINSTKVPAXX

SEQ ID NO: 35613 - protein, 37 aa, Artificial Sequence
  Non-cyclic GFR-binding peptide
  MOD_RES (31)..(32): Xaa is C or S
SKVIMSMEGLIKPTKGIMIQITINSLDQSVXXPSASA

SEQ ID NO: 35614 - protein, 37 aa, Artificial Sequence
  Non-cyclic GFR-binding peptide
  MOD_RES (32)..(33): Xaa is C or S
SRVVMNSMEGLIVNSSDDMIQVTINSLKTPAXXPKPV

SEQ ID NO: 35615 - protein, 37 aa, Artificial Sequence
  Non-cyclic GFR-binding peptide
  MOD_RES (2)..(4): Xaa is C or S
  MOD_RES (16)..(17)..(18)..(19)..(20): Xaa is A or G
  MOD_RES (21)..(22)..(23)..(24): Xaa is A or G or absent
RXGXAEVVMDSMEGIXXXXXXXXXMIQITINSLRAPV

SEQ ID NO: 35616 - protein, 37 aa, Artificial Sequence
  Non-cyclic GFR-binding peptide
  MOD_RES (2)..(4)..(36)..(37): Xaa is C or S
RXGXSEVVMDSMEGIVVNNASDMIQITINSLRTPVXX

SEQ ID NO: 35617 - protein, 38 aa, Artificial Sequence
  Non-cyclic GFR-binding peptide
  MOD_RES (1)..(3)..(36)..(37): Xaa is C or S
  MOD_RES (14)..(15)..(16)..(17)..(18): Xaa is A or G
  MOD_RES (19)..(20)..(21)..(22): Xaa is A or G or absent
XKXSRVIMSMEGLXXXXXXXXXMIQITINSLAQPVXXP

SEQ ID NO: 35618 - protein, 37 aa, Artificial Sequence
  Non-cyclic GFR-binding peptide
  MOD_RES (1)..(3)..(37): Xaa is C or S
  MOD_RES (15)..(16)..(17)..(18)..(19): Xaa is A or G
  MOD_RES (20)..(21)..(22)..(23): Xaa is A or G or absent
XGXSEVVMDSMEGLXXXXXXXXXMIQITINSLRTPVX

SEQ ID NO: 35619 - protein, 36 aa, Artificial Sequence
  Non-cyclic GFR-binding peptide
  MOD_RES (2)..(34)..(35): Xaa is C or S
GXAEVVMDSMEGIVVNNAADMIQITINSLRAPVXXS

SEQ ID NO: 35620 - protein, 38 aa, Artificial Sequence
  Non-cyclic GFR-binding peptide
  MOD_RES (33)..(34): Xaa is C or S
  MOD_RES (11)..(12)..(13)..(14)..(15): Xaa is A or G
  MOD_RES (16)..(17)..(18)..(19): Xaa is A or G or absent
EVVMDSMEGIXXXXXXXXXMIQITINSLRAPVXXSAPA

SEQ ID NO: 35621 - protein, 41 aa, Artificial Sequence
  Non-cyclic GFR-binding peptide
  MOD_RES (1)..(3)..(35)..(36): Xaa is C or S
XGXSEVVMDSMEGLVVNNASDMIQITINSLRTPVXXTPPTS

SEQ ID NO: 35622 - protein, 40 aa, Artificial Sequence
  Non-cyclic GFR-binding peptide
  MOD_RES (2)..(4)..(38)..(39): Xaa is C or S
  MOD_RES (16)..(17)..(18)..(19)..(20): Xaa is A or G
  MOD_RES (21)..(22)..(23)..(24): Xaa is A or G or absent
SXGXRDVVMGSMEGIXXXXXXXXXMIQMTINSMKTPTXXP

SEQ ID NO: 35623 - protein, 39 aa, Artificial Sequence
  Non-cyclic GFR-binding peptide
  MOD_RES (33)..(34): Xaa is C or S
  MOD_RES (11)..(12)..(13)..(14)..(15): Xaa is A or G
  MOD_RES (16)..(17)..(18)..(19): Xaa is A or G or absent
EVVMDSMEGLXXXXXXXXXMIQITINSLRAPVXXSAPAA

SEQ ID NO: 35624 - protein, 38 aa, Artificial Sequence
  Non-cyclic GFR-binding peptide
  MOD_RES (2)..(33)..(34): Xaa is C or S
GXEEVIMSMEGILLVRGNDMIQMTINSTKVPAXXTSPV

SEQ ID NO: 35625 - protein, 35 aa, Artificial Sequence
  Non-cyclic GFR-binding peptide
  MOD_RES (31)..(32): Xaa is C or S
EEVIMSMEGILLVRGNDMIQMTINSTKVPAXXTSP

SEQ ID NO: 35626 - protein, 35 aa, Artificial Sequence
  Non-cyclic GFR-binding peptide
  MOD_RES (1)..(3)..(34)..(35): Xaa is C or S
XKXSKVVMSMEGLVKPTRGVMIQITINSLDQPVXX

SEQ ID NO: 35627 - protein, 36 aa, Artificial Sequence
  Non-cyclic GFR-binding peptide
  MOD_RES (2)..(35)..(36): Xaa is C or S
  MOD_RES (13)..(14)..(15)..(16)..(17): Xaa is A or G
  MOD_RES (18)..(19)..(20)..(21): Xaa is A or G or absent
GXEEVIMSMEGIXXXXXXXXXMIQMTINSTKVPAXX

SEQ ID NO: 35628 - protein, 36 aa, Artificial Sequence
  Non-cyclic GFR-binding peptide
  MOD_RES (2)..(33)..(34): Xaa is C or S
GXEEVIMSMEGLLLVRGNDMIQMTINSTKVPAXXTS

SEQ ID NO: 35629 - protein, 33 aa, Artificial Sequence
  Non-cyclic GFR-binding peptide
  MOD_RES (32)..(33): Xaa is C or S
AEVVMDSMEGIVVNNAADMIQITINSLRAPVXX

SEQ ID NO: 35630 - protein, 35 aa, Artificial Sequence
  Non-cyclic GFR-binding peptide
  MOD_RES (1)..(3)..(34)..(35): Xaa is C or S
XKXSKVIMSMEGLIKPTKGIMIQITINSLDQSVXX

SEQ ID NO: 35631 - protein, 35 aa, Artificial Sequence
  Non-cyclic GFR-binding peptide
  MOD_RES (31)..(32): Xaa is C or S
EEVIMSMEGLLLVRGNDMIQMTINSTKVPAXXTSP

SEQ ID NO: 35632 - protein, 37 aa, Artificial Sequence
  Non-cyclic GFR-binding peptide
  MOD_RES (2)..(33)..(34): Xaa is C or S
GXEEVIMSMEGILLVRGNDMIQMTINSTKVPAXXTSP

SEQ ID NO: 35633 - protein, 38 aa, Artificial Sequence
  Non-cyclic GFR-binding peptide
  MOD_RES (2)..(4)..(38): Xaa is C or S
  MOD_RES (16)..(17)..(18)..(19)..(20): Xaa is A or G
  MOD_RES (21)..(22)..(23)..(24): Xaa is A or G or absent
HXGXSRVVMNSMEGLXXXXXXXXXMIQVTINSLKTPAX

SEQ ID NO: 35634 - protein, 40 aa, Artificial Sequence
  Non-cyclic GFR-binding peptide
  MOD_RES (1)..(3)..(35)..(36): Xaa is C or S
XGXRDVVMGSMEGIIIQQKDNMIQMTINSMKTPTXXPGAS

SEQ ID NO: 35635 - protein, 40 aa, Artificial Sequence
  Non-cyclic GFR-binding peptide
  MOD_RES (2)..(34)..(35): Xaa is C or S
GXSRVVMNSMEGLIVNSSDDMIQVTINSLKTPAXXPKPVH

SEQ ID NO: 35636 - protein, 36 aa, Artificial Sequence
  Non-cyclic GFR-binding peptide
  MOD_RES (1)..(34)..(35): Xaa is C or S
  MOD_RES (12)..(13)..(14)..(15)..(16): Xaa is A or G
  MOD_RES (17)..(18)..(19)..(20): Xaa is A or G or absent
XSKVVMSMEGLXXXXXXXXXMIQITINSLDQPVXXP

SEQ ID NO: 35637 - protein, 34 aa, Artificial Sequence
  Non-cyclic GFR-binding peptide
  MOD_RES (31)..(32): Xaa is C or S
RVVMNSMEGLIVNSSDDMIQVTINSLKTPAXXPK

SEQ ID NO: 35638 - protein, 37 aa, Artificial Sequence
  Non-cyclic GFR-binding peptide
  MOD_RES (1)..(3)..(36)..(37): Xaa is C or S
  MOD_RES (14)..(15)..(16)..(17)..(18): Xaa is A or G
  MOD_RES (19)..(20)..(21)..(22): Xaa is A or G or absent
XGXEEVIMSMEGIXXXXXXXXXMIQMTINSTKVPAXX

SEQ ID NO: 35639 - protein, 34 aa, Artificial Sequence
  Non-cyclic GFR-binding peptide
  MOD_RES (34)..(34): Xaa is C or S
  MOD_RES (12)..(13)..(14)..(15)..(16): Xaa is A or G
  MOD_RES (17)..(18)..(19)..(20): Xaa is A or G or absent
RDVVMGSMEGLXXXXXXXXXMIQMTINSMKTPTX

SEQ ID NO: 35640 - protein, 43 aa, Artificial Sequence
  Non-cyclic GFR-binding peptide
  MOD_RES (2)..(4)..(38)..(39): Xaa is C or S
  MOD_RES (16)..(17)..(18)..(19)..(20): Xaa is A or G
  MOD_RES (21)..(22)..(23)..(24): Xaa is A or G or absent
RXGXAEVVMDSMEGLXXXXXXXXXMIQITINSLRAPVXXSAPA

SEQ ID NO: 35641 - protein, 38 aa, Artificial Sequence
  Non-cyclic GFR-binding peptide
  MOD_RES (34)..(35): Xaa is C or S
  MOD_RES (12)..(13)..(14)..(15)..(16): Xaa is A or G
  MOD_RES (17)..(18)..(19)..(20): Xaa is A or G or absent
SEVVMDSMEGLXXXXXXXXXMIQITINSLRTPVXXTPP

SEQ ID NO: 35642 - protein, 36 aa, Artificial Sequence
  Non-cyclic GFR-binding peptide
  MOD_RES (1)..(34)..(35): Xaa is C or S
  MOD_RES (12)..(13)..(14)..(15)..(16): Xaa is A or G
  MOD_RES (17)..(18)..(19)..(20): Xaa is A or G or absent
XSKVIMSMEGLXXXXXXXXXMIQITINSLDQSVXXP

SEQ ID NO: 35643 - protein, 32 aa, Artificial Sequence
  Non-cyclic GFR-binding peptide
  MOD_RES (31)..(32): Xaa is C or S
DVVMGSMEGLIIQQKDNMIQMTINSMKTPTXX

SEQ ID NO: 35644 - protein, 37 aa, Artificial Sequence
  Non-cyclic GFR-binding peptide
  MOD_RES (2)..(4)..(35)..(36): Xaa is C or S
SXKXSKVIMSMEGLIKPTKGIMIQITINSLDQSVXXP

SEQ ID NO: 35645 - protein, 37 aa, Artificial Sequence
  Non-cyclic GFR-binding peptide
  MOD_RES (2)..(36)..(37): Xaa is C or S
  MOD_RES (14)..(15)..(16)..(17)..(18): Xaa is A or G
  MOD_RES (19)..(20)..(21)..(22): Xaa is A or G or absent
GXAEVVMDSMEGLXXXXXXXXXMIQITINSLRAPVXX

SEQ ID NO: 35646 - protein, 36 aa, Artificial Sequence
  Non-cyclic GFR-binding peptide
  MOD_RES (32)..(33): Xaa is C or S
AEVVMDSMEGIVVNNAADMIQITINSLRAPVXXSAP

SEQ ID NO: 35647 - protein, 39 aa, Artificial Sequence
  Non-cyclic GFR-binding peptide
  MOD_RES (2)..(34)..(35): Xaa is C or S
GXRDVVMGSMEGIIIQQKDNMIQMTINSMKTPTXXPGAS

SEQ ID NO: 35648 - protein, 35 aa, Artificial Sequence
  Non-cyclic GFR-binding peptide
  MOD_RES (2)..(34)..(35): Xaa is C or S
GXSEVVMDSMEGIVVNNASDMIQITINSLRTPVXX

SEQ ID NO: 35649 - protein, 40 aa, Artificial Sequence
  Non-cyclic GFR-binding peptide
  MOD_RES (2)..(35)..(36): Xaa is C or S
  MOD_RES (13)..(14)..(15)..(16)..(17): Xaa is A or G
  MOD_RES (18)..(19)..(20)..(21): Xaa is A or G or absent
KXSRVIMSMEGLXXXXXXXXXMIQITINSLAQPVXXPAAS

SEQ ID NO: 35650 - protein, 30 aa, Artificial Sequence; identical to SEQ ID NO: 2183
  Non-cyclic GFR-binding peptide

SEQ ID NO: 35651 - protein, 39 aa, Artificial Sequence
  Non-cyclic GFR-binding peptide
  MOD_RES (2)..(34)..(35): Xaa is C or S
GXAEVVMDSMEGLVVNNAADMIQITINSLRAPVXXSAPA

SEQ ID NO: 35652 - protein, 32 aa, Artificial Sequence
  Non-cyclic GFR-binding peptide
  MOD_RES (1)..(32): Xaa is C or S
XSRVIMSMEGLVKPKRGVMIQITINSLAQPVX

SEQ ID NO: 35653 - protein, 39 aa, Artificial Sequence
  Non-cyclic GFR-binding peptide
  MOD_RES (2)..(4)..(36)..(37): Xaa is C or S
HXGXSRVVMNSMEGLIVNSSDDMIQVTINSLKTPAXXPK

SEQ ID NO: 35654 - protein, 31 aa, Artificial Sequence
  Non-cyclic GFR-binding peptide
  MOD_RES (31)..(31): Xaa is C or S
EVVMDSMEGIVVNNASDMIQITINSLRTPVX

SEQ ID NO: 35655 - protein, 32 aa, Artificial Sequence
  Non-cyclic GFR-binding peptide
  MOD_RES (1)..(1): Xaa is C or S
XRDVVMGSMEGLIIQQKDNMIQMTINSMKTPT

SEQ ID NO: 35656 - protein, 40 aa, Artificial Sequence
  Non-cyclic GFR-binding peptide
  MOD_RES (1)..(3)..(35)..(36): Xaa is C or S
XGXSEVVMDSMEGLVVNNASDMIQITINSLRTPVXXTPPT

SEQ ID NO: 35657 - protein, 37 aa, Artificial Sequence
  Non-cyclic GFR-binding peptide
  MOD_RES (1)..(3)..(35)..(36): Xaa is C or S
XGXSEVVMDSMEGLVVNNASDMIQITINSLRTPVXXT

SEQ ID NO: 35658 - protein, 39 aa, Artificial Sequence
  Non-cyclic GFR-binding peptide
  MOD_RES (2)..(4)..(36)..(37): Xaa is C or S
SXGXRDVVMGSMEGLIIQQKDNMIQMTINSMKTPTXXPG

SEQ ID NO: 35659 - protein, 34 aa, Artificial Sequence
  Non-cyclic GFR-binding peptide
  MOD_RES (31)..(32): Xaa is C or S
SKVIMSMEGLIKPTKGIMIQITINSLDQSVXXPS

SEQ ID NO: 35660 - protein, 35 aa, Artificial Sequence
  Non-cyclic GFR-binding peptide
  MOD_RES (33)..(34): Xaa is C or S
  MOD_RES (11)..(12)..(13)..(14)..(15): Xaa is A or G
  MOD_RES (16)..(17)..(18)..(19): Xaa is A or G or absent
EVVMDSMEGLXXXXXXXXXMIQITINSLRAPVXXS

SEQ ID NO: 35661 - protein, 41 aa, Artificial Sequence
  Non-cyclic GFR-binding peptide
  MOD_RES (1)..(3)..(36)..(37): Xaa is C or S
  MOD_RES (14)..(15)..(16)..(17)..(18): Xaa is A or G
  MOD_RES (19)..(20)..(21)..(22): Xaa is A or G or absent
XGXEEVIMSMEGLXXXXXXXXXMIQMTINSTKVPAXXTSPV

SEQ ID NO: 35662 - protein, 33 aa, Artificial Sequence
  Non-cyclic GFR-binding peptide
  MOD_RES (1)..(33): Xaa is C or S
XSRVVMNSMEGLIVNSSDDMIQVTINSLKTPAX

SEQ ID NO: 35663 - protein, 39 aa, Artificial Sequence
  Non-cyclic GFR-binding peptide
  MOD_RES (1)..(3)..(34)..(35): Xaa is C or S
XGXEEVIMSMEGLLLVRGNDMIQMTINSTKVPAXXTSPV

SEQ ID NO: 35664 - protein, 39 aa, Artificial Sequence
  Non-cyclic GFR-binding peptide
  MOD_RES (2)..(34)..(35): Xaa is C or S
GXSEVVMDSMEGLVVNNASDMIQITINSLRTPVXXTPPT

SEQ ID NO: 35665 - protein, 33 aa, Artificial Sequence
  Non-cyclic GFR-binding peptide
  MOD_RES (12)..(13)..(14)..(15)..(16): Xaa is A or G
  MOD_RES (17)..(18)..(19)..(20): Xaa is A or G or absent
RDVVMGSMEGIXXXXXXXXXMIQMTINSMKTPT

SEQ ID NO: 35666 - protein, 36 aa, Artificial Sequence
  Non-cyclic GFR-binding peptide
  MOD_RES (34)..(35): Xaa is C or S
  MOD_RES (12)..(13)..(14)..(15)..(16): Xaa is A or G
  MOD_RES (17)..(18)..(19)..(20): Xaa is A or G or absent
SEVVMDSMEGLXXXXXXXXXMIQITINSLRTPVXXT

SEQ ID NO: 35667 - protein, 37 aa, Artificial Sequence
  Non-cyclic GFR-binding peptide
  MOD_RES (1)..(35)..(36): Xaa is C or S
  MOD_RES (13)..(14)..(15)..(16)..(17): Xaa is A or G
  MOD_RES (18)..(19)..(20)..(21): Xaa is A or G or absent
XSRVVMNSMEGLXXXXXXXXXMIQVTINSLKTPAXXP

SEQ ID NO: 35668 - protein, 37 aa, Artificial Sequence
  Non-cyclic GFR-binding peptide
  MOD_RES (1)..(3)..(34)..(35): Xaa is C or S
XKXSKVVMSMEGLVKPTRGVMIQITINSLDQPVXXPS

SEQ ID NO: 35669 - protein, 38 aa, Artificial Sequence
  Non-cyclic GFR-binding peptide
  MOD_RES (1)..(3)..(35)..(36): Xaa is C or S
XGXSRVVMNSMEGLIVNSSDDMIQVTINSLKTPAXXPK

SEQ ID NO: 35670 - protein, 43 aa, Artificial Sequence
  Non-cyclic GFR-binding peptide
  MOD_RES (1)..(3)..(37)..(38): Xaa is C or S
  MOD_RES (15)..(16)..(17)..(18)..(19): Xaa is A or G
  MOD_RES (20)..(21)..(22)..(23): Xaa is A or G or absent
XGXRDVVMGSMEGLXXXXXXXXXMIQMTINSMKTPTXXPGASG

SEQ ID NO: 35671 - protein, 35 aa, Artificial Sequence
  Non-cyclic GFR-binding peptide
  MOD_RES (34)..(35): Xaa is C or S
  MOD_RES (12)..(13)..(14)..(15)..(16): Xaa is A or G
  MOD_RES (17)..(18)..(19)..(20): Xaa is A or G or absent
SRVVMNSMEGLXXXXXXXXXMIQVTINSLKTPAXX

SEQ ID NO: 35672 - protein, 38 aa, Artificial Sequence
  Non-cyclic GFR-binding peptide
  MOD_RES (1)..(3)..(36)..(37): Xaa is C or S
  MOD_RES (14)..(15)..(16)..(17)..(18): Xaa is A or G
  MOD_RES (19)..(20)..(21)..(22): Xaa is A or G or absent
XKXSKVVMSMEGLXXXXXXXXXMIQITINSLDQPVXXP

SEQ ID NO: 35673 - protein, 38 aa, Artificial Sequence
  Non-cyclic GFR-binding peptide
  MOD_RES (1)..(34)..(35): Xaa is C or S
  MOD_RES (12)..(13)..(14)..(15)..(16): Xaa is A or G
  MOD_RES (17)..(18)..(19)..(20): Xaa is A or G or absent
XSKVVMSMEGLXXXXXXXXXMIQITINSLDQPVXXPSA

SEQ ID NO: 35674 - protein, 33 aa, Artificial Sequence
  Non-cyclic GFR-binding peptide
  MOD_RES (32)..(33): Xaa is C or S
SEVVMDSMEGIVVNNASDMIQITINSLRTPVXX

SEQ ID NO: 35675 - protein, 33 aa, Artificial Sequence
  Non-cyclic GFR-binding peptide
  MOD_RES (31)..(32): Xaa is C or S
EVVMDSMEGLVVNNASDMIQITINSLRTPVXXT

SEQ ID NO: 35676 - protein, 43 aa, Artificial Sequence
  Non-cyclic GFR-binding peptide
  MOD_RES (2)..(4)..(37)..(38): Xaa is C or S
  MOD_RES (15)..(16)..(17)..(18)..(19): Xaa is A or G
  MOD_RES (20)..(21)..(22)..(23): Xaa is A or G or absent
LXGXEEVIMSMEGIXXXXXXXXXMIQMTINSTKVPAXXTSPVR

SEQ ID NO: 35677 - protein, 37 aa, Artificial Sequence
  Non-cyclic GFR-binding peptide
  MOD_RES (2)..(4)..(37): Xaa is C or S
  MOD_RES (15)..(16)..(17)..(18)..(19): Xaa is A or G
  MOD_RES (20)..(21)..(22)..(23): Xaa is A or G or absent
SXKXSKVVMSMEGLXXXXXXXXXMIQITINSLDQPVX

SEQ ID NO: 35678 - protein, 31 aa, Artificial Sequence
  Non-cyclic GFR-binding peptide
  MOD_RES (31)..(31): Xaa is C or S
SKVVMSMEGLVKPTRGVMIQITINSLDQPVX

SEQ ID NO: 35679 - protein, 40 aa, Artificial Sequence
  Non-cyclic GFR-binding peptide
  MOD_RES (1)..(3)..(34)..(35): Xaa is C or S
XGXEEVIMSMEGILLVRGNDMIQMTINSTKVPAXXTSPVR

SEQ ID NO: 35680 - protein, 39 aa, Artificial Sequence
  Non-cyclic GFR-binding peptide
  MOD_RES (1)..(33)..(34): Xaa is C or S
XAEVVMDSMEGIVVNNAADMIQITINSLRAPVXXSAPAA

SEQ ID NO: 35681 - protein, 37 aa, Artificial Sequence
  Non-cyclic GFR-binding peptide
  MOD_RES (1)..(3)..(37): Xaa is C or S
  MOD_RES (15)..(16)..(17)..(18)..(19): Xaa is A or G
  MOD_RES (20)..(21)..(22)..(23): Xaa is A or G or absent
XGXAEVVMDSMEGLXXXXXXXXXMIQITINSLRAPVX

SEQ ID NO: 35682 - protein, 38 aa, Artificial Sequence
  Non-cyclic GFR-binding peptide
  MOD_RES (2)..(33)..(34): Xaa is C or S
KXSRVIMSMEGLVKPKRGVMIQITINSLAQPVXXPAAS

SEQ ID NO: 35683 - protein, 41 aa, Artificial Sequence
  Non-cyclic GFR-binding peptide
  MOD_RES (2)..(36)..(37): Xaa is C or S
  MOD_RES (14)..(15)..(16)..(17)..(18): Xaa is A or G
  MOD_RES (19)..(20)..(21)..(22): Xaa is A or G or absent
GXRDVVMGSMEGLXXXXXXXXXMIQMTINSMKTPTXXPGAS

SEQ ID NO: 35684 - protein, 33 aa, Artificial Sequence
  Non-cyclic GFR-binding peptide
  MOD_RES (1)..(32)..(33): Xaa is C or S
XSKVIMSMEGLIKPTKGIMIQITINSLDQSVXX

SEQ ID NO: 35685 - protein, 41 aa, Artificial Sequence
  Non-cyclic GFR-binding peptide
  MOD_RES (2)..(4)..(36)..(37): Xaa is C or S
SXGXRDVVMGSMEGLIIQQKDNMIQMTINSMKTPTXXPGAS

SEQ ID NO: 35686 - protein, 38 aa, Artificial Sequence
  Non-cyclic GFR-binding peptide
  MOD_RES (1)..(35)..(36): Xaa is C or S
  MOD_RES (13)..(14)..(15)..(16)..(17): Xaa is A or G
  MOD_RES (18)..(19)..(20)..(21): Xaa is A or G or absent
XAEVVMDSMEGIXXXXXXXXXMIQITINSLRAPVXXSA

SEQ ID NO: 35687 - protein, 36 aa, Artificial Sequence
  Non-cyclic GFR-binding peptide
  MOD_RES (31)..(32): Xaa is C or S
SKVIMSMEGLIKPTKGIMIQITINSLDQSVXXPSAS

SEQ ID NO: 35688 - protein, 38 aa, Artificial Sequence
  Non-cyclic GFR-binding peptide
  MOD_RES (2)..(35)..(36): Xaa is C or S
  MOD_RES (13)..(14)..(15)..(16)..(17): Xaa is A or G
  MOD_RES (18)..(19)..(20)..(21): Xaa is A or G or absent
KXSRVIMSMEGLXXXXXXXXXMIQITINSLAQPVXXPA

SEQ ID NO: 35689 - protein, 32 aa, Artificial Sequence
  Non-cyclic GFR-binding peptide
  MOD_RES (11)..(12)..(13)..(14)..(15): Xaa is A or G
  MOD_RES (16)..(17)..(18)..(19): Xaa is A or G or absent
EVVMDSMEGLXXXXXXXXXMIQITINSLRTPV

SEQ ID NO: 35690 - protein, 42 aa, Artificial Sequence
  Non-cyclic GFR-binding peptide
  MOD_RES (2)..(4)..(37)..(38): Xaa is C or S
  MOD_RES (15)..(16)..(17)..(18)..(19): Xaa is A or G
  MOD_RES (20)..(21)..(22)..(23): Xaa is A or G or absent
LXGXEEVIMSMEGIXXXXXXXXXMIQMTINSTKVPAXXTSPV

SEQ ID NO: 35691 - protein, 38 aa, Artificial Sequence
  Non-cyclic GFR-binding peptide
  MOD_RES (1)..(32)..(33): Xaa is C or S
XSRVIMSMEGLVKPKRGVMIQITINSLAQPVXXPAASA

SEQ ID NO: 35692 - protein, 40 aa, Artificial Sequence
  Non-cyclic GFR-binding peptide
  MOD_RES (2)..(4)..(35)..(36): Xaa is C or S
LXGXEEVIMSMEGILLVRGNDMIQMTINSTKVPAXXTSPV

SEQ ID NO: 35693 - protein, 42 aa, Artificial Sequence
  Non-cyclic GFR-binding peptide
  MOD_RES (2)..(36)..(37): Xaa is C or S
  MOD_RES (14)..(15)..(16)..(17)..(18): Xaa is A or G
  MOD_RES (19)..(20)..(21)..(22): Xaa is A or G or absent
GXAEVVMDSMEGLXXXXXXXXXMIQITINSLRAPVXXSAPAA

SEQ ID NO: 35694 - protein, 36 aa, Artificial Sequence
  Non-cyclic GFR-binding peptide
  MOD_RES (1)..(35)..(36): Xaa is C or S
  MOD_RES (13)..(14)..(15)..(16)..(17): Xaa is A or G
  MOD_RES (18)..(19)..(20)..(21): Xaa is A or G or absent
XRDVVMGSMEGLXXXXXXXXXMIQMTINSMKTPTXX

SEQ ID NO: 35695 - protein, 36 aa, Artificial Sequence
  Non-cyclic GFR-binding peptide
  MOD_RES (31)..(32): Xaa is C or S
EEVIMSMEGILLVRGNDMIQMTINSTKVPAXXTSPV

SEQ ID NO: 35696 - protein, 37 aa, Artificial Sequence
  Non-cyclic GFR-binding peptide
  MOD_RES (1)..(3)..(37): Xaa is C or S
  MOD_RES (15)..(16)..(17)..(18)..(19): Xaa is A or G
  MOD_RES (20)..(21)..(22)..(23): Xaa is A or G or absent
XGXRDVVMGSMEGIXXXXXXXXXMIQMTINSMKTPTX

SEQ ID NO: 35697 - protein, 40 aa, Artificial Sequence
  Non-cyclic GFR-binding peptide
  MOD_RES (2)..(4)..(37)..(38): Xaa is C or S
  MOD_RES (15)..(16)..(17)..(18)..(19): Xaa is A or G
  MOD_RES (20)..(21)..(22)..(23): Xaa is A or G or absent
SXKXSKVIMSMEGLXXXXXXXXXMIQITINSLDQSVXXPS

SEQ ID NO: 35698 - protein, 39 aa, Artificial Sequence
  Non-cyclic GFR-binding peptide
  MOD_RES (1)..(3)..(34)..(35): Xaa is C or S
XKXSKVVMSMEGLVKPTRGVMIQITINSLDQPVXXPSAS

SEQ ID NO: 35699 - protein, 39 aa, Artificial Sequence
  Non-cyclic GFR-binding peptide
  MOD_RES (1)..(3)..(37)..(38): Xaa is C or S
  MOD_RES (15)..(16)..(17)..(18)..(19): Xaa is A or G
  MOD_RES (20)..(21)..(22)..(23): Xaa is A or G or absent
XGXRDVVMGSMEGIXXXXXXXXXMIQMTINSMKTPTXXP

SEQ ID NO: 35700 - protein, 39 aa, Artificial Sequence
  Non-cyclic GFR-binding peptide
  MOD_RES (2)..(36)..(37): Xaa is C or S
  MOD_RES (14)..(15)..(16)..(17)..(18): Xaa is A or G
  MOD_RES (19)..(20)..(21)..(22): Xaa is A or G or absent
GXRDVVMGSMEGLXXXXXXXXXMIQMTINSMKTPTXXPG

SEQ ID NO: 35701 - protein, 38 aa, Artificial Sequence
  Non-cyclic GFR-binding peptide
  MOD_RES (2)..(4)..(36)..(37): Xaa is C or S
RXGXAEVVMDSMEGLVVNNAADMIQITINSLRAPVXXS

SEQ ID NO: 35702 - protein, 35 aa, Artificial Sequence
  Non-cyclic GFR-binding peptide
  MOD_RES (2)..(33)..(34): Xaa is C or S
GXEEVIMSMEGLLLVRGNDMIQMTINSTKVPAXXT

SEQ ID NO: 35703 - protein, 39 aa, Artificial Sequence
  Non-cyclic GFR-binding peptide
  MOD_RES (33)..(34): Xaa is C or S
  MOD_RES (11)..(12)..(13)..(14)..(15): Xaa is A or G
  MOD_RES (16)..(17)..(18)..(19): Xaa is A or G or absent
SRVIMSMEGLXXXXXXXXXMIQITINSLAQPVXXPAASA

SEQ ID NO: 35704 - protein, 37 aa, Artificial Sequence
  Non-cyclic GFR-binding peptide
  MOD_RES (2)..(33)..(34): Xaa is C or S
KXSKVIMSMEGLIKPTKGIMIQITINSLDQSVXXPSA

SEQ ID NO: 35705 - protein, 35 aa, Artificial Sequence
  Non-cyclic GFR-binding peptide
  MOD_RES (1)..(35): Xaa is C or S
  MOD_RES (13)..(14)..(15)..(16)..(17): Xaa is A or G
  MOD_RES (18)..(19)..(20)..(21): Xaa is A or G or absent
XRDVVMGSMEGLXXXXXXXXXMIQMTINSMKTPTX

SEQ ID NO: 35706 - protein, 32 aa, Artificial Sequence
  Non-cyclic GFR-binding peptide
  MOD_RES (32)..(32): Xaa is C or S
SRVVMNSMEGLIVNSSDDMIQVTINSLKTPAX

SEQ ID NO: 35707 - protein, 39 aa, Artificial Sequence
  Non-cyclic GFR-binding peptide
  MOD_RES (1)..(3)..(34)..(35): Xaa is C or S
XGXEEVIMSMEGILLVRGNDMIQMTINSTKVPAXXTSPV

SEQ ID NO: 35708 - protein, 41 aa, Artificial Sequence
  Non-cyclic GFR-binding peptide
  MOD_RES (1)..(35)..(36): Xaa is C or S
  MOD_RES (13)..(14)..(15)..(16)..(17): Xaa is A or G
  MOD_RES (18)..(19)..(20)..(21): Xaa is A or G or absent
XAEVVMDSMEGLXXXXXXXXXMIQITINSLRAPVXXSAPAA

SEQ ID NO: 35709 - protein, 44 aa, Artificial Sequence
  Non-cyclic GFR-binding peptide
  MOD_RES (2)..(4)..(38)..(39): Xaa is C or S
  MOD_RES (16)..(17)..(18)..(19)..(20): Xaa is A or G
  MOD_RES (21)..(22)..(23)..(24): Xaa is A or G or absent
HXGXSRVVMNSMEGLXXXXXXXXXMIQVTINSLKTPAXXPKPVH

SEQ ID NO: 35710 - protein, 35 aa, Artificial Sequence
  Non-cyclic GFR-binding peptide
  MOD_RES (1)..(3): Xaa is C or S
  MOD_RES (14)..(15)..(16)..(17)..(18): Xaa is A or G
  MOD_RES (19)..(20)..(21)..(22): Xaa is A or G or absent
XGXEEVIMSMEGIXXXXXXXXXMIQMTINSTKVPA

SEQ ID NO: 35711 - protein, 32 aa, Artificial Sequence
  Non-cyclic GFR-binding peptide
  MOD_RES (11)..(12)..(13)..(14)..(15): Xaa is A or G
  MOD_RES (16)..(17)..(18)..(19): Xaa is A or G or absent
EEVIMSMEGIXXXXXXXXXMIQMTINSTKVPA

SEQ ID NO: 35712 - protein, 36 aa, Artificial Sequence
  Non-cyclic GFR-binding peptide
  MOD_RES (33)..(34): Xaa is C or S
  MOD_RES (11)..(12)..(13)..(14)..(15): Xaa is A or G
  MOD_RES (16)..(17)..(18)..(19): Xaa is A or G or absent
EVVMDSMEGIXXXXXXXXXMIQITINSLRTPVXXTP

SEQ ID NO: 35713 - protein, 37 aa, Artificial Sequence
  Non-cyclic GFR-binding peptide
  MOD_RES (31)..(32): Xaa is C or S
DVVMGSMEGLIIQQKDNMIQMTINSMKTPTXXPGASG

SEQ ID NO: 35714 - protein, 39 aa, Artificial Sequence
  Non-cyclic GFR-binding peptide
  MOD_RES (1)..(33)..(34): Xaa is C or S
XRDVVMGSMEGLIIQQKDNMIQMTINSMKTPTXXPGASG

SEQ ID NO: 35715 - protein, 37 aa, Artificial Sequence
  Non-cyclic GFR-binding peptide
  MOD_RES (1)..(33)..(34): Xaa is C or S
XRDVVMGSMEGIIIQQKDNMIQMTINSMKTPTXXPGA

SEQ ID NO: 35716 - protein, 42 aa, Artificial Sequence
  Non-cyclic GFR-binding peptide
  MOD_RES (2)..(4)..(37)..(38): Xaa is C or S
  MOD_RES (15)..(16)..(17)..(18)..(19): Xaa is A or G
  MOD_RES (20)..(21)..(22)..(23): Xaa is A or G or absent
SXKXSKVVMSMEGLXXXXXXXXXMIQITINSLDQPVXXPSAS

SEQ ID NO: 35717 - protein, 31 aa, Artificial Sequence
  Non-cyclic GFR-binding peptide
  MOD_RES (31)..(31): Xaa is C or S
EEVIMSMEGILLVRGNDMIQMTINSTKVPAX

SEQ ID NO: 35718 - protein, 36 aa, Artificial Sequence
  Non-cyclic GFR-binding peptide
  MOD_RES (32)..(33): Xaa is C or S
RDVVMGSMEGIIIQQKDNMIQMTINSMKTPTXXPGA

SEQ ID NO: 35719 - protein, 40 aa, Artificial Sequence
  Non-cyclic GFR-binding peptide
  MOD_RES (34)..(35): Xaa is C or S
  MOD_RES (12)..(13)..(14)..(15)..(16): Xaa is A or G
  MOD_RES (17)..(18)..(19)..(20): Xaa is A or G or absent
RDVVMGSMEGIXXXXXXXXXMIQMTINSMKTPTXXPGASG

SEQ ID NO: 35720 - protein, 36 aa, Artificial Sequence
  Non-cyclic GFR-binding peptide
  MOD_RES (2)..(4)..(36): Xaa is C or S
RXGXSEVVMDSMEGIVVNNASDMIQITINSLRTPVX

SEQ ID NO: 35721 - protein, 40 aa, Artificial Sequence
  Non-cyclic GFR-binding peptide
  MOD_RES (1)..(3)..(34)..(35): Xaa is C or S
XKXSKVIMSMEGLIKPTKGIMIQITINSLDQSVXXPSASA

SEQ ID NO: 35722 - protein, 41 aa, Artificial Sequence
  Non-cyclic GFR-binding peptide
  MOD_RES (2)..(4)..(37)..(38): Xaa is C or S
  MOD_RES (15)..(16)..(17)..(18)..(19): Xaa is A or G
  MOD_RES (20)..(21)..(22)..(23): Xaa is A or G or absent
LXGXEEVIMSMEGLXXXXXXXXXMIQMTINSTKVPAXXTSP

SEQ ID NO: 35723 - protein, 32 aa, Artificial Sequence
  Non-cyclic GFR-binding peptide
  MOD_RES (31)..(32): Xaa is C or S
EEVIMSMEGILLVRGNDMIQMTINSTKVPAXX

SEQ ID NO: 35724 - protein, 36 aa, Artificial Sequence
  Non-cyclic GFR-binding peptide
  MOD_RES (1)..(33)..(34): Xaa is C or S
XRDVVMGSMEGLIIQQKDNMIQMTINSMKTPTXXPG

SEQ ID NO: 35725 - protein, 40 aa, Artificial Sequence
  Non-cyclic GFR-binding peptide
  MOD_RES (1)..(3)..(34)..(35): Xaa is C or S
XGXEEVIMSMEGLLLVRGNDMIQMTINSTKVPAXXTSPVR

SEQ ID NO: 35726 - protein, 40 aa, Artificial Sequence
  Non-cyclic GFR-binding peptide
  MOD_RES (2)..(35)..(36): Xaa is C or S
  MOD_RES (13)..(14)..(15)..(16)..(17): Xaa is A or G
  MOD_RES (18)..(19)..(20)..(21): Xaa is A or G or absent
GXEEVIMSMEGLXXXXXXXXXMIQMTINSTKVPAXXTSPV

SEQ ID NO: 35727 - protein, 35 aa, Artificial Sequence
  Non-cyclic GFR-binding peptide
  MOD_RES (2)..(4): Xaa is C or S
RXGXAEVVMDSMEGLVVNNAADMIQITINSLRAPV

SEQ ID NO: 35728 - protein, 33 aa, Artificial Sequence
  Non-cyclic GFR-binding peptide
  MOD_RES (33)..(33): Xaa is C or S
  MOD_RES (11)..(12)..(13)..(14)..(15): Xaa is A or G
  MOD_RES (16)..(17)..(18)..(19): Xaa is A or G or absent
SRVIMSMEGLXXXXXXXXXMIQITINSLAQPVX

SEQ ID NO: 35729 - protein, 34 aa, Artificial Sequence
  Non-cyclic GFR-binding peptide
  MOD_RES (1)..(34): Xaa is C or S
  MOD_RES (12)..(13)..(14)..(15)..(16): Xaa is A or G
  MOD_RES (17)..(18)..(19)..(20): Xaa is A or G or absent
XSKVVMSMEGLXXXXXXXXXMIQITINSLDQPVX

SEQ ID NO: 35730 - protein, 36 aa, Artificial Sequence
  Non-cyclic GFR-binding peptide
  MOD_RES (2)..(34)..(35): Xaa is C or S
GXRDVVMGSMEGIIIQQKDNMIQMTINSMKTPTXXP

SEQ ID NO: 35731 - protein, 33 aa, Artificial Sequence
  Non-cyclic GFR-binding peptide
  MOD_RES (1)..(33): Xaa is C or S
XSEVVMDSMEGLVVNNASDMIQITINSLRTPVX

SEQ ID NO: 35732 - protein, 38 aa, Artificial Sequence
  Non-cyclic GFR-binding peptide
  MOD_RES (33)..(34): Xaa is C or S
  MOD_RES (11)..(12)..(13)..(14)..(15): Xaa is A or G
  MOD_RES (16)..(17)..(18)..(19): Xaa is A or G or absent
EVVMDSMEGLXXXXXXXXXMIQITINSLRTPVXXTPPT

SEQ ID NO: 35733 - protein, 39 aa, Artificial Sequence
  Non-cyclic GFR-binding peptide
  MOD_RES (1)..(33)..(34): Xaa is C or S
XSEVVMDSMEGLVVNNASDMIQITINSLRTPVXXTPPTS

SEQ ID NO: 35734 - protein, 43 aa, Artificial Sequence
  Non-cyclic GFR-binding peptide
  MOD_RES (1)..(3)..(37)..(38): Xaa is C or S
  MOD_RES (15)..(16)..(17)..(18)..(19): Xaa is A or G
  MOD_RES (20)..(21)..(22)..(23): Xaa is A or G or absent
XGXAEVVMDSMEGIXXXXXXXXXMIQITINSLRAPVXXSAPAA

SEQ ID NO: 35735 - protein, 38 aa, Artificial Sequence
  Non-cyclic GFR-binding peptide
  MOD_RES (1)..(3)..(36)..(37): Xaa is C or S
  MOD_RES (14)..(15)..(16)..(17)..(18): Xaa is A or G
  MOD_RES (19)..(20)..(21)..(22): Xaa is A or G or absent
XGXEEVIMSMEGIXXXXXXXXXMIQMTINSTKVPAXXT

SEQ ID NO: 35736 - protein, 37 aa, Artificial Sequence
  Non-cyclic GFR-binding peptide
  MOD_RES (2)..(35)..(36): Xaa is C or S
  MOD_RES (13)..(14)..(15)..(16)..(17): Xaa is A or G
  MOD_RES (18)..(19)..(20)..(21): Xaa is A or G or absent
KXSKVVMSMEGLXXXXXXXXXMIQITINSLDQPVXXP

SEQ ID NO: 35737 - protein, 36 aa, Artificial Sequence
  Non-cyclic GFR-binding peptide
  MOD_RES (1)..(3): Xaa is C or S
  MOD_RES (15)..(16)..(17)..(18)..(19): Xaa is A or G
  MOD_RES (20)..(21)..(22)..(23): Xaa is A or G or absent
XGXSEVVMDSMEGIXXXXXXXXXMIQITINSLRTPV

SEQ ID NO: 35738 - protein, 36 aa, Artificial Sequence
  Non-cyclic GFR-binding peptide
  MOD_RES (1)..(35)..(36): Xaa is C or S
  MOD_RES (13)..(14)..(15)..(16)..(17): Xaa is A or G
  MOD_RES (18)..(19)..(20)..(21): Xaa is A or G or absent
XSEVVMDSMEGIXXXXXXXXXMIQITINSLRTPVXX

SEQ ID NO: 35739 - protein, 32 aa, Artificial Sequence
  Non-cyclic GFR-binding peptide
  MOD_RES (11)..(12)..(13)..(14)..(15): Xaa is A or G
  MOD_RES (16)..(17)..(18)..(19): Xaa is A or G or absent
SRVIMSMEGLXXXXXXXXXMIQITINSLAQPV

SEQ ID NO: 35740 - protein, 38 aa, Artificial Sequence
  Non-cyclic GFR-binding peptide
  MOD_RES (34)..(35): Xaa is C or S
  MOD_RES (12)..(13)..(14)..(15)..(16): Xaa is A or G
  MOD_RES (17)..(18)..(19)..(20): Xaa is A or G or absent
SRVVMNSMEGLXXXXXXXXXMIQVTINSLKTPAXXPKP

SEQ ID NO: 35741 - protein, 32 aa, Artificial Sequence
  Non-cyclic GFR-binding peptide
  MOD_RES (11)..(12)..(13)..(14)..(15): Xaa is A or G
  MOD_RES (16)..(17)..(18)..(19): Xaa is A or G or absent
EVVMDSMEGLXXXXXXXXXMIQITINSLRAPV

SEQ ID NO: 35742 - protein, 38 aa, Artificial Sequence
  Non-cyclic GFR-binding peptide
  MOD_RES (2)..(36)..(37): Xaa is C or S
  MOD_RES (14)..(15)..(16)..(17)..(18): Xaa is A or G
  MOD_RES (19)..(20)..(21)..(22): Xaa is A or G or absent
GXRDVVMGSMEGLXXXXXXXXXMIQMTINSMKTPTXXP

SEQ ID NO: 35743 - protein, 36 aa, Artificial Sequence
  Non-cyclic GFR-binding peptide
  MOD_RES (33)..(34): Xaa is C or S
  MOD_RES (11)..(12)..(13)..(14)..(15): Xaa is A or G
  MOD_RES (16)..(17)..(18)..(19): Xaa is A or G or absent
SRVIMSMEGLXXXXXXXXXMIQITINSLAQPVXXPA

SEQ ID NO: 35744 - protein, 40 aa, Artificial Sequence
  Non-cyclic GFR-binding peptide
  MOD_RES (1)..(3)..(37)..(38): Xaa is C or S
  MOD_RES (15)..(16)..(17)..(18)..(19): Xaa is A or G
  MOD_RES (20)..(21)..(22)..(23): Xaa is A or G or absent
XGXAEVVMDSMEGLXXXXXXXXXMIQITINSLRAPVXXSA

SEQ ID NO: 35745 - protein, 33 aa, Artificial Sequence
  Non-cyclic GFR-binding peptide
  MOD_RES (2)..(33): Xaa is C or S
KXSKVVMSMEGLVKPTRGVMIQITINSLDQPVX

SEQ ID NO: 35746 - protein, 42 aa, Artificial Sequence
  Non-cyclic GFR-binding peptide
  MOD_RES (2)..(36)..(37): Xaa is C or S
  MOD_RES (14)..(15)..(16)..(17)..(18): Xaa is A or G
  MOD_RES (19)..(20)..(21)..(22): Xaa is A or G or absent
GXSEVVMDSMEGIXXXXXXXXXMIQITINSLRTPVXXTPPTS

SEQ ID NO: 35747 - protein, 34 aa, Artificial Sequence
  Non-cyclic GFR-binding peptide
  MOD_RES (32)..(33): Xaa is C or S
SRVVMNSMEGLIVNSSDDMIQVTINSLKTPAXXP

SEQ ID NO: 35748 - protein, 32 aa, Artificial Sequence
  Non-cyclic GFR-binding peptide
  MOD_RES (2)..(2): Xaa is C or S
GXEEVIMSMEGILLVRGNDMIQMTINSTKVPA

SEQ ID NO: 35749 - protein, 35 aa, Artificial Sequence
  Non-cyclic GFR-binding peptide
  MOD_RES (33)..(34): Xaa is C or S
  MOD_RES (11)..(12)..(13)..(14)..(15): Xaa is A or G
  MOD_RES (16)..(17)..(18)..(19): Xaa is A or G or absent
EVVMDSMEGLXXXXXXXXXMIQITINSLRTPVXXT

SEQ ID NO: 35750 - protein, 41 aa, Artificial Sequence
  Non-cyclic GFR-binding peptide
  MOD_RES (1)..(35)..(36): Xaa is C or S
  MOD_RES (13)..(14)..(15)..(16)..(17): Xaa is A or G
  MOD_RES (18)..(19)..(20)..(21): Xaa is A or G or absent
XSEVVMDSMEGIXXXXXXXXXMIQITINSLRTPVXXTPPTS

SEQ ID NO: 35751 - protein, 40 aa, Artificial Sequence
  Non-cyclic GFR-binding peptide
  MOD_RES (1)..(3)..(37)..(38): Xaa is C or S
  MOD_RES (15)..(16)..(17)..(18)..(19): Xaa is A or G
  MOD_RES (20)..(21)..(22)..(23): Xaa is A or G or absent
XGXSRVVMNSMEGLXXXXXXXXXMIQVTINSLKTPAXXPK

SEQ ID NO: 35752 - protein, 35 aa, Artificial Sequence
  Non-cyclic GFR-binding peptide
  MOD_RES (2)..(35): Xaa is C or S
  MOD_RES (13)..(14)..(15)..(16)..(17): Xaa is A or G
  MOD_RES (18)..(19)..(20)..(21): Xaa is A or G or absent
GXEEVIMSMEGIXXXXXXXXXMIQMTINSTKVPAX

SEQ ID NO: 35753 - protein, 36 aa, Artificial Sequence
  Non-cyclic GFR-binding peptide
  MOD_RES (33)..(34): Xaa is C or S
  MOD_RES (11)..(12)..(13)..(14)..(15): Xaa is A or G
  MOD_RES (16)..(17)..(18)..(19): Xaa is A or G or absent
EEVIMSMEGLXXXXXXXXXMIQMTINSTKVPAXXTS

SEQ ID NO: 35754 - protein, 36 aa, Artificial Sequence
  Non-cyclic GFR-binding peptide
  MOD_RES (32)..(33): Xaa is C or S
SEVVMDSMEGLVVNNASDMIQITINSLRTPVXXTPP

SEQ ID NO: 35755 - protein, 41 aa, Artificial Sequence
  Non-cyclic GFR-binding peptide
  MOD_RES (1)..(3)..(37)..(38): Xaa is C or S
  MOD_RES (15)..(16)..(17)..(18)..(19): Xaa is A or G
  MOD_RES (20)..(21)..(22)..(23): Xaa is A or G or absent
XGXRDVVMGSMEGLXXXXXXXXXMIQMTINSMKTPTXXPGA

SEQ ID NO: 35756 - protein, 41 aa, Artificial Sequence
  Non-cyclic GFR-binding peptide
  MOD_RES (2)..(35)..(36): Xaa is C or S
  MOD_RES (13)..(14)..(15)..(16)..(17): Xaa is A or G
  MOD_RES (18)..(19)..(20)..(21): Xaa is A or G or absent
GXEEVIMSMEGLXXXXXXXXXMIQMTINSTKVPAXXTSPVR

SEQ ID NO: 35757 - protein, 33 aa, Artificial Sequence
  Non-cyclic GFR-binding peptide
  MOD_RES (2)..(33): Xaa is C or S
KXSKVIMSMEGLIKPTKGIMIQITINSLDQSVX

SEQ ID NO: 35758 - protein, 41 aa, Artificial Sequence
  Non-cyclic GFR-binding peptide
  MOD_RES (1)..(3)..(37)..(38): Xaa is C or S
  MOD_RES (15)..(16)..(17)..(18)..(19): Xaa is A or G
  MOD_RES (20)..(21)..(22)..(23): Xaa is A or G or absent
XGXAEVVMDSMEGIXXXXXXXXXMIQITINSLRAPVXXSAP

SEQ ID NO: 35759 - protein, 38 aa, Artificial Sequence
  Non-cyclic GFR-binding peptide
  MOD_RES (2)..(4)..(37)..(38): Xaa is C or S
  MOD_RES (15)..(16)..(17)..(18)..(19): Xaa is A or G
  MOD_RES (20)..(21)..(22)..(23): Xaa is A or G or absent
SXKXSKVIMSMEGLXXXXXXXXXMIQITINSLDQSVXX

SEQ ID NO: 35760 - protein, 33 aa, Artificial Sequence
  Non-cyclic GFR-binding peptide
  MOD_RES (31)..(32): Xaa is C or S
SRVIMSMEGLVKPKRGVMIQITINSLAQPVXXP

SEQ ID NO: 35761 - protein, 40 aa, Artificial Sequence
  Non-cyclic GFR-binding peptide
  MOD_RES (1)..(3)..(37)..(38): Xaa is C or S
  MOD_RES (15)..(16)..(17)..(18)..(19): Xaa is A or G
  MOD_RES (20)..(21)..(22)..(23): Xaa is A or G or absent
XGXSEVVMDSMEGIXXXXXXXXXMIQITINSLRTPVXXTP

SEQ ID NO: 35762 - protein, 37 aa, Artificial Sequence
  Non-cyclic GFR-binding peptide
  MOD_RES (2)..(34)..(35): Xaa is C or S
GXSEVVMDSMEGLVVNNASDMIQITINSLRTPVXXTP

SEQ ID NO: 35763 - protein, 36 aa, Artificial Sequence
  Non-cyclic GFR-binding peptide
  MOD_RES (2)..(4)..(36): Xaa is C or S
HXGXSRVVMNSMEGLIVNSSDDMIQVTINSLKTPAX

SEQ ID NO: 35764 - protein, 37 aa, Artificial Sequence
  Non-cyclic GFR-binding peptide
  MOD_RES (1)..(32)..(33): Xaa is C or S
XSKVVMSMEGLVKPTRGVMIQITINSLDQPVXXPSAS

SEQ ID NO: 35765 - protein, 38 aa, Artificial Sequence
  Non-cyclic GFR-binding peptide
  MOD_RES (34)..(35): Xaa is C or S
  MOD_RES (12)..(13)..(14)..(15)..(16): Xaa is A or G
  MOD_RES (17)..(18)..(19)..(20): Xaa is A or G or absent
AEVVMDSMEGLXXXXXXXXXMIQITINSLRAPVXXSAP

SEQ ID NO: 35766 - protein, 42 aa, Artificial Sequence
  Non-cyclic GFR-binding peptide
  MOD_RES (2)..(4)..(38)..(39): Xaa is C or S
  MOD_RES (16)..(17)..(18)..(19)..(20): Xaa is A or G
  MOD_RES (21)..(22)..(23)..(24): Xaa is A or G or absent
RXGXSEVVMDSMEGIXXXXXXXXXMIQITINSLRTPVXXTPP

SEQ ID NO: 35767 - protein, 34 aa, Artificial Sequence
  Non-cyclic GFR-binding peptide
  MOD_RES (1)..(3)..(34): Xaa is C or S
XKXSRVIMSMEGLVKPKRGVMIQITINSLAQPVX

SEQ ID NO: 35768 - protein, 38 aa, Artificial Sequence
  Non-cyclic GFR-binding peptide
  MOD_RES (1)..(34)..(35): Xaa is C or S
  MOD_RES (12)..(13)..(14)..(15)..(16): Xaa is A or G
  MOD_RES (17)..(18)..(19)..(20): Xaa is A or G or absent
XSKVIMSMEGLXXXXXXXXXMIQITINSLDQSVXXPSA

SEQ ID NO: 35769 - protein, 37 aa, Artificial Sequence
  Non-cyclic GFR-binding peptide
  MOD_RES (1)..(35)..(36): Xaa is C or S
  MOD_RES (13)..(14)..(15)..(16)..(17): Xaa is A or G
  MOD_RES (18)..(19)..(20)..(21): Xaa is A or G or absent
XAEVVMDSMEGLXXXXXXXXXMIQITINSLRAPVXXS

SEQ ID NO: 35770 - protein, 35 aa, Artificial Sequence
  Non-cyclic GFR-binding peptide
  MOD_RES (1)..(35): Xaa is C or S
  MOD_RES (13)..(14)..(15)..(16)..(17): Xaa is A or G
  MOD_RES (18)..(19)..(20)..(21): Xaa is A or G or absent
XAEVVMDSMEGIXXXXXXXXXMIQITINSLRAPVX

SEQ ID NO: 35771 - protein, 35 aa, Artificial Sequence
  Non-cyclic GFR-binding peptide
  MOD_RES (34)..(35): Xaa is C or S
  MOD_RES (12)..(13)..(14)..(15)..(16): Xaa is A or G
  MOD_RES (17)..(18)..(19)..(20): Xaa is A or G or absent
AEVVMDSMEGIXXXXXXXXXMIQITINSLRAPVXX

SEQ ID NO: 35772 - protein, 40 aa, Artificial Sequence
  Non-cyclic GFR-binding peptide
  MOD_RES (2)..(4)..(35)..(36): Xaa is C or S
SXKXSKVVMSMEGLVKPTRGVMIQITINSLDQPVXXPSAS

SEQ ID NO: 35773 - protein, 33 aa, Artificial Sequence
  Non-cyclic GFR-binding peptide
  MOD_RES (1)..(3): Xaa is C or S
XKXSKVVMSMEGLVKPTRGVMIQITINSLDQPV

SEQ ID NO: 35774 - protein, 35 aa, Artificial Sequence
  Non-cyclic GFR-binding peptide
  MOD_RES (1)..(32)..(33): Xaa is C or S
XEEVIMSMEGILLVRGNDMIQMTINSTKVPAXXTS

SEQ ID NO: 35775 - protein, 41 aa, Artificial Sequence
  Non-cyclic GFR-binding peptide
  MOD_RES (1)..(35)..(36): Xaa is C or S
  MOD_RES (13)..(14)..(15)..(16)..(17): Xaa is A or G
  MOD_RES (18)..(19)..(20)..(21): Xaa is A or G or absent
XSRVVMNSMEGLXXXXXXXXXMIQVTINSLKTPAXXPKPVH

SEQ ID NO: 35776 - protein, 36 aa, Artificial Sequence
  Non-cyclic GFR-binding peptide
  MOD_RES (33)..(34): Xaa is C or S
  MOD_RES (11)..(12)..(13)..(14)..(15): Xaa is A or G
  MOD_RES (16)..(17)..(18)..(19): Xaa is A or G or absent
RVVMNSMEGLXXXXXXXXXMIQVTINSLKTPAXXPK

SEQ ID NO: 35777 - protein, 43 aa, Artificial Sequence
  Non-cyclic GFR-binding peptide
  MOD_RES (2)..(4)..(37)..(38): Xaa is C or S
  MOD_RES (15)..(16)..(17)..(18)..(19): Xaa is A or G
  MOD_RES (20)..(21)..(22)..(23): Xaa is A or G or absent
SXKXSRVIMSMEGLXXXXXXXXXMIQITINSLAQPVXXPAASA

SEQ ID NO: 35778 - protein, 42 aa, Artificial Sequence
  Non-cyclic GFR-binding peptide
  MOD_RES (2)..(4)..(36)..(37): Xaa is C or S
SXGXRDVVMGSMEGIIIQQKDNMIQMTINSMKTPTXXPGASG

SEQ ID NO: 35779 - protein, 34 aa, Artificial Sequence
  Non-cyclic GFR-binding peptide
  MOD_RES (2)..(33)..(34): Xaa is C or S
KXSKVIMSMEGLIKPTKGIMIQITINSLDQSVXX

SEQ ID NO: 35780 - protein, 37 aa, Artificial Sequence
  Non-cyclic GFR-binding peptide
  MOD_RES (32)..(33): Xaa is C or S
RDVVMGSMEGIIIQQKDNMIQMTINSMKTPTXXPGAS

SEQ ID NO: 35781 - protein, 37 aa, Artificial Sequence
  Non-cyclic GFR-binding peptide
  MOD_RES (2)..(4)..(37): Xaa is C or S
  MOD_RES (15)..(16)..(17)..(18)..(19): Xaa is A or G
  MOD_RES (20)..(21)..(22)..(23): Xaa is A or G or absent
SXKXSRVIMSMEGLXXXXXXXXXMIQITINSLAQPVX

SEQ ID NO: 35782 - protein, 38 aa, Artificial Sequence
  Non-cyclic GFR-binding peptide
  MOD_RES (1)..(3)..(35)..(36): Xaa is C or S
XGXAEVVMDSMEGIVVNNAADMIQITINSLRAPVXXSA

SEQ ID NO: 35783 - protein, 38 aa, Artificial Sequence
  Non-cyclic GFR-binding peptide
  MOD_RES (1)..(3)..(37)..(38): Xaa is C or S
  MOD_RES (15)..(16)..(17)..(18)..(19): Xaa is A or G
  MOD_RES (20)..(21)..(22)..(23): Xaa is A or G or absent
XGXSEVVMDSMEGIXXXXXXXXXMIQITINSLRTPVXX

SEQ ID NO: 35784 - protein, 32 aa, Artificial Sequence
  Non-cyclic GFR-binding peptide
  MOD_RES (1)..(1): Xaa is C or S
XAEVVMDSMEGLVVNNAADMIQITINSLRAPV

SEQ ID NO: 35785 - protein, 36 aa, Artificial Sequence
  Non-cyclic GFR-binding peptide
  MOD_RES (33)..(34): Xaa is C or S
  MOD_RES (11)..(12)..(13)..(14)..(15): Xaa is A or G
  MOD_RES (16)..(17)..(18)..(19): Xaa is A or G or absent
EVVMDSMEGLXXXXXXXXXMIQITINSLRAPVXXSA

SEQ ID NO: 35786 - protein, 38 aa, Artificial Sequence
  Non-cyclic GFR-binding peptide
  MOD_RES (32)..(33): Xaa is C or S
AEVVMDSMEGLVVNNAADMIQITINSLRAPVXXSAPAA

SEQ ID NO: 35787 - protein, 39 aa, Artificial Sequence
  Non-cyclic GFR-binding peptide
  MOD_RES (2)..(4)..(37)..(38): Xaa is C or S
  MOD_RES (15)..(16)..(17)..(18)..(19): Xaa is A or G
  MOD_RES (20)..(21)..(22)..(23): Xaa is A or G or absent
LXGXEEVIMSMEGLXXXXXXXXXMIQMTINSTKVPAXXT

SEQ ID NO: 35788 - protein, 36 aa, Artificial Sequence
  Non-cyclic GFR-binding peptide
  MOD_RES (1)..(3)..(36): Xaa is C or S
  MOD_RES (14)..(15)..(16)..(17)..(18): Xaa is A or G
  MOD_RES (19)..(20)..(21)..(22): Xaa is A or G or absent
XGXEEVIMSMEGLXXXXXXXXXMIQMTINSTKVPAX

SEQ ID NO: 35789 - protein, 33 aa, Artificial Sequence
  Non-cyclic GFR-binding peptide
  MOD_RES (31)..(32): Xaa is C or S
DVVMGSMEGIIIQQKDNMIQMTINSMKTPTXXP

SEQ ID NO: 35790 - protein, 37 aa, Artificial Sequence
  Non-cyclic GFR-binding peptide
  MOD_RES (2)..(33)..(34): Xaa is C or S
KXSKVVMSMEGLVKPTRGVMIQITINSLDQPVXXPSA

SEQ ID NO: 35791 - protein, 37 aa, Artificial Sequence
  Non-cyclic GFR-binding peptide
  MOD_RES (2)..(4): Xaa is C or S
  MOD_RES (16)..(17)..(18)..(19)..(20): Xaa is A or G
  MOD_RES (21)..(22)..(23)..(24): Xaa is A or G or absent
RXGXSEVVMDSMEGIXXXXXXXXXMIQITINSLRTPV

SEQ ID NO: 35792 - protein, 36 aa, Artificial Sequence
  Non-cyclic GFR-binding peptide
  MOD_RES (32)..(33): Xaa is C or S
SRVVMNSMEGLIVNSSDDMIQVTINSLKTPAXXPKP

SEQ ID NO: 35793 - protein, 34 aa, Artificial Sequence
  Non-cyclic GFR-binding peptide
  MOD_RES (2)..(4): Xaa is C or S
SXKXSKVVMSMEGLVKPTRGVMIQITINSLDQPV

SEQ ID NO: 35794 - protein, 40 aa, Artificial Sequence
  Non-cyclic GFR-binding peptide
  MOD_RES (2)..(34)..(35): Xaa is C or S
GXRDVVMGSMEGIIIQQKDNMIQMTINSMKTPTXXPGASG

SEQ ID NO: 35795 - protein, 38 aa, Artificial Sequence
  Non-cyclic GFR-binding peptide
  MOD_RES (1)..(3)..(34)..(35): Xaa is C or S
XGXEEVIMSMEGILLVRGNDMIQMTINSTKVPAXXTSP

SEQ ID NO: 35796 - protein, 40 aa, Artificial Sequence
  Non-cyclic GFR-binding peptide
  MOD_RES (1)..(3)..(35)..(36): Xaa is C or S
XGXAEVVMDSMEGLVVNNAADMIQITINSLRAPVXXSAPA

SEQ ID NO: 35797 - protein, 35 aa, Artificial Sequence
  Non-cyclic GFR-binding peptide
  MOD_RES (1)..(32)..(33): Xaa is C or S
XSKVIMSMEGLIKPTKGIMIQITINSLDQSVXXPS

SEQ ID NO: 35798 - protein, 39 aa, Artificial Sequence
  Non-cyclic GFR-binding peptide
  MOD_RES (2)..(4)..(38)..(39): Xaa is C or S
  MOD_RES (16)..(17)..(18)..(19)..(20): Xaa is A or G
  MOD_RES (21)..(22)..(23)..(24): Xaa is A or G or absent
RXGXAEVVMDSMEGIXXXXXXXXXMIQITINSLRAPVXX

SEQ ID NO: 35799 - protein, 31 aa, Artificial Sequence
  Non-cyclic GFR-binding peptide
RDVVMGSMEGLIIQQKDNMIQMTINSMKTPT

SEQ ID NO: 35800 - protein, 31 aa, Artificial Sequence
  Non-cyclic GFR-binding peptide
  MOD_RES (31)..(31): Xaa is C or S
DVVMGSMEGLIIQQKDNMIQMTINSMKTPTX

SEQ ID NO: 35801 - protein, 37 aa, Artificial Sequence
  Non-cyclic GFR-binding peptide
  MOD_RES (1)..(33)..(34): Xaa is C or S
XAEVVMDSMEGIVVNNAADMIQITINSLRAPVXXSAP

SEQ ID NO: 35802 - protein, 34 aa, Artificial Sequence
  Non-cyclic GFR-binding peptide
  MOD_RES (34)..(34): Xaa is C or S
  MOD_RES (12)..(13)..(14)..(15)..(16): Xaa is A or G
  MOD_RES (17)..(18)..(19)..(20): Xaa is A or G or absent
AEVVMDSMEGLXXXXXXXXXMIQITINSLRAPVX

SEQ ID NO: 35803 - protein, 37 aa, Artificial Sequence
  Non-cyclic GFR-binding peptide
  MOD_RES (2)..(4)..(36)..(37): Xaa is C or S
HXGXSRVVMNSMEGLIVNSSDDMIQVTINSLKTPAXX

SEQ ID NO: 35804 - protein, 34 aa, Artificial Sequence
  Non-cyclic GFR-binding peptide
  MOD_RES (33)..(34): Xaa is C or S
  MOD_RES (11)..(12)..(13)..(14)..(15): Xaa is A or G
  MOD_RES (16)..(17)..(18)..(19): Xaa is A or G or absent
SRVIMSMEGLXXXXXXXXXMIQITINSLAQPVXX

SEQ ID NO: 35805 - protein, 34 aa, Artificial Sequence
  Non-cyclic GFR-binding peptide
  MOD_RES (2)..(34): Xaa is C or S
GXAEVVMDSMEGLVVNNAADMIQITINSLRAPVX

SEQ ID NO: 35806 - protein, 35 aa, Artificial Sequence
  Non-cyclic GFR-binding peptide
  MOD_RES (1)..(3): Xaa is C or S
  MOD_RES (14)..(15)..(16)..(17)..(18): Xaa is A or G
  MOD_RES (19)..(20)..(21)..(22): Xaa is A or G or absent
XGXEEVIMSMEGLXXXXXXXXXMIQMTINSTKVPA

SEQ ID NO: 35807 - protein, 39 aa, Artificial Sequence
  Non-cyclic GFR-binding peptide
  MOD_RES (1)..(3)..(35)..(36): Xaa is C or S
XGXSEVVMDSMEGLVVNNASDMIQITINSLRTPVXXTPP

SEQ ID NO: 35808 - protein, 34 aa, Artificial Sequence
  Non-cyclic GFR-binding peptide
  MOD_RES (2)..(4): Xaa is C or S
SXKXSKVIMSMEGLIKPTKGIMIQITINSLDQSV

SEQ ID NO: 35809 - protein, 33 aa, Artificial Sequence
  Non-cyclic GFR-binding peptide
  MOD_RES (32)..(33): Xaa is C or S
RDVVMGSMEGIIIQQKDNMIQMTINSMKTPTXX

SEQ ID NO: 35810 - protein, 36 aa, Artificial Sequence
  Non-cyclic GFR-binding peptide
  MOD_RES (2)..(4): Xaa is C or S
  MOD_RES (15)..(16)..(17)..(18)..(19): Xaa is A or G
  MOD_RES (20)..(21)..(22)..(23): Xaa is A or G or absent
LXGXEEVIMSMEGIXXXXXXXXXMIQMTINSTKVPA

SEQ ID NO: 35811 - protein, 32 aa, Artificial Sequence
  Non-cyclic GFR-binding peptide
  MOD_RES (11)..(12)..(13)..(14)..(15): Xaa is A or G
  MOD_RES (16)..(17)..(18)..(19): Xaa is A or G or absent
RVVMNSMEGLXXXXXXXXXMIQVTINSLKTPA

SEQ ID NO: 35812 - protein, 31 aa, Artificial Sequence
  Non-cyclic GFR-binding peptide
  MOD_RES (1)..(1): Xaa is C or S
XSRVIMSMEGLVKPKRGVMIQITINSLAQPV

SEQ ID NO: 35813 - protein, 39 aa, Artificial Sequence
  Non-cyclic GFR-binding peptide
  MOD_RES (2)..(4)..(35)..(36): Xaa is C or S
SXKXSRVIMSMEGLVKPKRGVMIQITINSLAQPVXXPAA

SEQ ID NO: 35814 - protein, 36 aa, Artificial Sequence
  Non-cyclic GFR-binding peptide
  MOD_RES (2)..(36): Xaa is C or S
  MOD_RES (14)..(15)..(16)..(17)..(18): Xaa is A or G
  MOD_RES (19)..(20)..(21)..(22): Xaa is A or G or absent
GXRDVVMGSMEGLXXXXXXXXXMIQMTINSMKTPTX

SEQ ID NO: 35815 - protein, 39 aa, Artificial Sequence
  Non-cyclic GFR-binding peptide
  MOD_RES (1)..(3)..(34)..(35): Xaa is C or S
XKXSKVIMSMEGLIKPTKGIMIQITINSLDQSVXXPSAS

SEQ ID NO: 35816 - protein, 39 aa, Artificial Sequence
  Non-cyclic GFR-binding peptide
  MOD_RES (33)..(34): Xaa is C or S
  MOD_RES (11)..(12)..(13)..(14)..(15): Xaa is A or G
  MOD_RES (16)..(17)..(18)..(19): Xaa is A or G or absent
EVVMDSMEGIXXXXXXXXXMIQITINSLRTPVXXTPPTS

SEQ ID NO: 35817 - protein, 36 aa, Artificial Sequence
  Non-cyclic GFR-binding peptide
  MOD_RES (2)..(36): Xaa is C or S
  MOD_RES (14)..(15)..(16)..(17)..(18): Xaa is A or G
  MOD_RES (19)..(20)..(21)..(22): Xaa is A or G or absent
GXSRVVMNSMEGLXXXXXXXXXMIQVTINSLKTPAX

SEQ ID NO: 35818 - protein, 39 aa, Artificial Sequence
  Non-cyclic GFR-binding peptide
  MOD_RES (1)..(3)..(37)..(38): Xaa is C or S
  MOD_RES (15)..(16)..(17)..(18)..(19): Xaa is A or G
  MOD_RES (20)..(21)..(22)..(23): Xaa is A or G or absent
XGXSRVVMNSMEGLXXXXXXXXXMIQVTINSLKTPAXXP

SEQ ID NO: 35819 - protein, 39 aa, Artificial Sequence
  Non-cyclic GFR-binding peptide
  MOD_RES (1)..(35)..(36): Xaa is C or S
  MOD_RES (13)..(14)..(15)..(16)..(17): Xaa is A or G
  MOD_RES (18)..(19)..(20)..(21): Xaa is A or G or absent
XAEVVMDSMEGLXXXXXXXXXMIQITINSLRAPVXXSAP

SEQ ID NO: 35820 - protein, 39 aa, Artificial Sequence
  Non-cyclic GFR-binding peptide
  MOD_RES (2)..(36)..(37): Xaa is C or S
  MOD_RES (14)..(15)..(16)..(17)..(18): Xaa is A or G
  MOD_RES (19)..(20)..(21)..(22): Xaa is A or G or absent
GXAEVVMDSMEGIXXXXXXXXXMIQITINSLRAPVXXSA

SEQ ID NO: 35821 - protein, 38 aa, Artificial Sequence
  Non-cyclic GFR-binding peptide
  MOD_RES (33)..(34): Xaa is C or S
  MOD_RES (11)..(12)..(13)..(14)..(15): Xaa is A or G
  MOD_RES (16)..(17)..(18)..(19): Xaa is A or G or absent
SKVIMSMEGLXXXXXXXXXMIQITINSLDQSVXXPSAS

SEQ ID NO: 35822 - protein, 40 aa, Artificial Sequence
  Non-cyclic GFR-binding peptide
  MOD_RES (2)..(36)..(37): Xaa is C or S
  MOD_RES (14)..(15)..(16)..(17)..(18): Xaa is A or G
  MOD_RES (19)..(20)..(21)..(22): Xaa is A or G or absent
GXSRVVMNSMEGLXXXXXXXXXMIQVTINSLKTPAXXPKP

SEQ ID NO: 35823 - protein, 44 aa, Artificial Sequence
  Non-cyclic GFR-binding peptide
  MOD_RES (2)..(4)..(38)..(39): Xaa is C or S
  MOD_RES (16)..(17)..(18)..(19)..(20): Xaa is A or G
  MOD_RES (21)..(22)..(23)..(24): Xaa is A or G or absent
RXGXSEVVMDSMEGIXXXXXXXXXMIQITINSLRTPVXXTPPTS

SEQ ID NO: 35824 - protein, 36 aa, Artificial Sequence
  Non-cyclic GFR-binding peptide
  MOD_RES (31)..(32): Xaa is C or S
SRVIMSMEGLVKPKRGVMIQITINSLAQPVXXPAAS

SEQ ID NO: 35825 - protein, 38 aa, Artificial Sequence
  Non-cyclic GFR-binding peptide
  MOD_RES (34)..(35): Xaa is C or S
  MOD_RES (12)..(13)..(14)..(15)..(16): Xaa is A or G
  MOD_RES (17)..(18)..(19)..(20): Xaa is A or G or absent
RDVVMGSMEGLXXXXXXXXXMIQMTINSMKTPTXXPGA

SEQ ID NO: 35826 - protein, 37 aa, Artificial Sequence
  Non-cyclic GFR-binding peptide
  MOD_RES (1)..(32)..(33): Xaa is C or S
XEEVIMSMEGLLLVRGNDMIQMTINSTKVPAXXTSPV

SEQ ID NO: 35827 - protein, 35 aa, Artificial Sequence
  Non-cyclic GFR-binding peptide
  MOD_RES (1)..(32)..(33): Xaa is C or S
XSRVIMSMEGLVKPKRGVMIQITINSLAQPVXXPA

SEQ ID NO: 35828 - protein, 30 aa, Artificial Sequence
  Non-cyclic GFR-binding peptide
EVVMDSMEGIVVNNAADMIQITINSLRAPV

SEQ ID NO: 35829 - protein, 33 aa, Artificial Sequence
  Non-cyclic GFR-binding peptide
  MOD_RES (1)..(32)..(33): Xaa is C or S
XEEVIMSMEGILLVRGNDMIQMTINSTKVPAXX

SEQ ID NO: 35830 - protein, 34 aa, Artificial Sequence
  Non-cyclic GFR-binding peptide
  MOD_RES (31)..(32): Xaa is C or S
EEVIMSMEGILLVRGNDMIQMTINSTKVPAXXTS

SEQ ID NO: 35831 - protein, 38 aa, Artificial Sequence
  Non-cyclic GFR-binding peptide
  MOD_RES (2)..(4)..(35)..(36): Xaa is C or S
LXGXEEVIMSMEGLLLVRGNDMIQMTINSTKVPAXXTS

SEQ ID NO: 35832 - protein, 39 aa, Artificial Sequence
  Non-cyclic GFR-binding peptide
  MOD_RES (33)..(34): Xaa is C or S
  MOD_RES (11)..(12)..(13)..(14)..(15): Xaa is A or G
  MOD_RES (16)..(17)..(18)..(19): Xaa is A or G or absent
RVVMNSMEGIXXXXXXXXXMIQVTINSLKTPAXXPKPVH

SEQ ID NO: 35833 - protein, 41 aa, Artificial Sequence
  Non-cyclic GFR-binding peptide
  MOD_RES (2)..(4)..(36)..(37): Xaa is C or S
RXGXSEVVMDSMEGIVVNNASDMIQITINSLRTPVXXTPPT

SEQ ID NO: 35834 - protein, 41 aa, Artificial Sequence
  Non-cyclic GFR-binding peptide
  MOD_RES (2)..(4)..(38)..(39): Xaa is C or S
  MOD_RES (16)..(17)..(18)..(19)..(20): Xaa is A or G
  MOD_RES (21)..(22)..(23)..(24): Xaa is A or G or absent
SXGXRDVVMGSMEGIXXXXXXXXXMIQMTINSMKTPTXXPG

SEQ ID NO: 35835 - protein, 40 aa, Artificial Sequence
  Non-cyclic GFR-binding peptide
  MOD_RES (2)..(4)..(38)..(39): Xaa is C or S
  MOD_RES (16)..(17)..(18)..(19)..(20): Xaa is A or G
  MOD_RES (21)..(22)..(23)..(24): Xaa is A or G or absent
RXGXAEVVMDSMEGLXXXXXXXXXMIQITINSLRAPVXXS

SEQ ID NO: 35836 - protein, 33 aa, Artificial Sequence
  Non-cyclic GFR-binding peptide
  MOD_RES (33)..(33): Xaa is C or S
  MOD_RES (11)..(12)..(13)..(14)..(15): Xaa is A or G
  MOD_RES (16)..(17)..(18)..(19): Xaa is A or G or absent
DVVMGSMEGIXXXXXXXXXMIQMTINSMKTPTX

SEQ ID NO: 35837 - protein, 39 aa, Artificial Sequence
  Non-cyclic GFR-binding peptide
  MOD_RES (34)..(35): Xaa is C or S
  MOD_RES (12)..(13)..(14)..(15)..(16): Xaa is A or G
  MOD_RES (17)..(18)..(19)..(20): Xaa is A or G or absent
RDVVMGSMEGIXXXXXXXXXMIQMTINSMKTPTXXPGAS

SEQ ID NO: 35838 - protein, 40 aa, Artificial Sequence
  Non-cyclic GFR-binding peptide
  MOD_RES (2)..(4)..(36)..(37): Xaa is C or S
SXGXRDVVMGSMEGLIIQQKDNMIQMTINSMKTPTXXPGA

SEQ ID NO: 35839 - protein, 37 aa, Artificial Sequence
  Non-cyclic GFR-binding peptide
  MOD_RES (33)..(34): Xaa is C or S
  MOD_RES (11)..(12)..(13)..(14)..(15): Xaa is A or G
  MOD_RES (16)..(17)..(18)..(19): Xaa is A or G or absent
SRVIMSMEGLXXXXXXXXXMIQITINSLAQPVXXPAA

SEQ ID NO: 35840 - protein, 38 aa, Artificial Sequence
  Non-cyclic GFR-binding peptide
  MOD_RES (2)..(4)..(35)..(36): Xaa is C or S
LXGXEEVIMSMEGILLVRGNDMIQMTINSTKVPAXXTS

SEQ ID NO: 35841 - protein, 36 aa, Artificial Sequence
  Non-cyclic GFR-binding peptide
  MOD_RES (2)..(4)..(35)..(36): Xaa is C or S
LXGXEEVIMSMEGILLVRGNDMIQMTINSTKVPAXX

SEQ ID NO: 35842 - protein, 39 aa, Artificial Sequence
  Non-cyclic GFR-binding peptide
  MOD_RES (2)..(4)..(38)..(39): Xaa is C or S
  MOD_RES (16)..(17)..(18)..(19)..(20): Xaa is A or G
  MOD_RES (21)..(22)..(23)..(24): Xaa is A or G or absent
SXGXRDVVMGSMEGLXXXXXXXXXMIQMTINSMKTPTXX

SEQ ID NO: 35843 - protein, 37 aa, Artificial Sequence
  Non-cyclic GFR-binding peptide
  MOD_RES (1)..(3)..(34)..(35): Xaa is C or S
XKXSRVIMSMEGLVKPKRGVMIQITINSLAQPVXXPA

SEQ ID NO: 35844 - protein, 41 aa, Artificial Sequence
  Non-cyclic GFR-binding peptide
  MOD_RES (2)..(4)..(38)..(39): Xaa is C or S
  MOD_RES (16)..(17)..(18)..(19)..(20): Xaa is A or G
  MOD_RES (21)..(22)..(23)..(24): Xaa is A or G or absent
RXGXAEVVMDSMEGLXXXXXXXXXMIQITINSLRAPVXXSA

SEQ ID NO: 35845 - protein, 32 aa, Artificial Sequence
  Non-cyclic GFR-binding peptide
  MOD_RES (32)..(32): Xaa is C or S
AEVVMDSMEGLVVNNAADMIQITINSLRAPVX

SEQ ID NO: 35846 - protein, 36 aa, Artificial Sequence
  Non-cyclic GFR-binding peptide
  MOD_RES (2)..(4)..(35)..(36): Xaa is C or S
SXKXSKVIMSMEGLIKPTKGIMIQITINSLDQSVXX

SEQ ID NO: 35847 - protein, 34 aa, Artificial Sequence
  Non-cyclic GFR-binding peptide
  MOD_RES (1)..(33)..(34): Xaa is C or S
XSEVVMDSMEGLVVNNASDMIQITINSLRTPVXX

SEQ ID NO: 35848 - protein, 40 aa, Artificial Sequence
  Non-cyclic GFR-binding peptide
  MOD_RES (1)..(35)..(36): Xaa is C or S
  MOD_RES (13)..(14)..(15)..(16)..(17): Xaa is A or G
  MOD_RES (18)..(19)..(20)..(21): Xaa is A or G or absent
XRDVVMGSMEGIXXXXXXXXXMIQMTINSMKTPTXXPGAS

SEQ ID NO: 35849 - protein, 39 aa, Artificial Sequence
  Non-cyclic GFR-binding peptide
  MOD_RES (33)..(34): Xaa is C or S
  MOD_RES (11)..(12)..(13)..(14)..(15): Xaa is A or G
  MOD_RES (16)..(17)..(18)..(19): Xaa is A or G or absent
DVVMGSMEGLXXXXXXXXXMIQMTINSMKTPTXXPGASG

SEQ ID NO: 35850 - protein, 36 aa, Artificial Sequence
  Non-cyclic GFR-binding peptide
  MOD_RES (31)..(32): Xaa is C or S
DVVMGSMEGLIIQQKDNMIQMTINSMKTPTXXPGAS

SEQ ID NO: 35851 - protein, 34 aa, Artificial Sequence
  Non-cyclic GFR-binding peptide
  MOD_RES (1)..(32)..(33): Xaa is C or S
XSKVVMSMEGLVKPTRGVMIQITINSLDQPVXXP

SEQ ID NO: 35852 - protein, 41 aa, Artificial Sequence
  Non-cyclic GFR-binding peptide
  MOD_RES (2)..(35)..(36): Xaa is C or S
  MOD_RES (13)..(14)..(15)..(16)..(17): Xaa is A or G
  MOD_RES (18)..(19)..(20)..(21): Xaa is A or G or absent
KXSKVIMSMEGLXXXXXXXXXMIQITINSLDQSVXXPSASA

SEQ ID NO: 35853 - protein, 40 aa, Artificial Sequence
  Non-cyclic GFR-binding peptide
  MOD_RES (1)..(35)..(36): Xaa is C or S
  MOD_RES (13)..(14)..(15)..(16)..(17): Xaa is A or G
  MOD_RES (18)..(19)..(20)..(21): Xaa is A or G or absent
XSEVVMDSMEGLXXXXXXXXXMIQITINSLRTPVXXTPPT

SEQ ID NO: 35854 - protein, 37 aa, Artificial Sequence
  Non-cyclic GFR-binding peptide
  MOD_RES (32)..(33): Xaa is C or S
AEVVMDSMEGIVVNNAADMIQITINSLRAPVXXSAPA

SEQ ID NO: 35855 - protein, 39 aa, Artificial Sequence
  Non-cyclic GFR-binding peptide
  MOD_RES (33)..(34): Xaa is C or S
  MOD_RES (11)..(12)..(13)..(14)..(15): Xaa is A or G
  MOD_RES (16)..(17)..(18)..(19): Xaa is A or G or absent
EEVIMSMEGIXXXXXXXXXMIQMTINSTKVPAXXTSPVR

SEQ ID NO: 35856 - protein, 43 aa, Artificial Sequence
  Non-cyclic GFR-binding peptide
  MOD_RES (2)..(4)..(38)..(39): Xaa is C or S
  MOD_RES (16)..(17)..(18)..(19)..(20): Xaa is A or G
  MOD_RES (21)..(22)..(23)..(24): Xaa is A or G or absent
RXGXSEVVMDSMEGIXXXXXXXXXMIQITINSLRTPVXXTPPT

SEQ ID NO: 35857 - protein, 40 aa, Artificial Sequence
  Non-cyclic GFR-binding peptide
  MOD_RES (1)..(35)..(36): Xaa is C or S
  MOD_RES (13)..(14)..(15)..(16)..(17): Xaa is A or G
  MOD_RES (18)..(19)..(20)..(21): Xaa is A or G or absent
XSRVVMNSMEGLXXXXXXXXXMIQVTINSLKTPAXXPKPV

SEQ ID NO: 35858 - protein, 40 aa, Artificial Sequence
  Non-cyclic GFR-binding peptide
  MOD_RES (2)..(4)..(36)..(37): Xaa is C or S
RXGXSEVVMDSMEGIVVNNASDMIQITINSLRTPVXXTPP

SEQ ID NO: 35859 - protein, 38 aa, Artificial Sequence
  Non-cyclic GFR-binding peptide
  MOD_RES (1)..(3)..(35)..(36): Xaa is C or S
XGXAEVVMDSMEGLVVNNAADMIQITINSLRAPVXXSA

SEQ ID NO: 35860 - protein, 37 aa, Artificial Sequence
  Non-cyclic GFR-binding peptide
  MOD_RES (1)..(34)..(35): Xaa is C or S
  MOD_RES (12)..(13)..(14)..(15)..(16): Xaa is A or G
  MOD_RES (17)..(18)..(19)..(20): Xaa is A or G or absent
XEEVIMSMEGLXXXXXXXXXMIQMTINSTKVPAXXTS

SEQ ID NO: 35861 - protein, 37 aa, Artificial Sequence
  Non-cyclic GFR-binding peptide
  MOD_RES (34)..(35): Xaa is C or S
  MOD_RES (12)..(13)..(14)..(15)..(16): Xaa is A or G
  MOD_RES (17)..(18)..(19)..(20): Xaa is A or G or absent
AEVVMDSMEGLXXXXXXXXXMIQITINSLRAPVXXSA

SEQ ID NO: 35862 - protein, 35 aa, Artificial Sequence
  Non-cyclic GFR-binding peptide
  MOD_RES (2)..(4): Xaa is C or S
HXGXSRVVMNSMEGLIVNSSDDMIQVTINSLKTPA

SEQ ID NO: 35863 - protein, 35 aa, Artificial Sequence
  Non-cyclic GFR-binding peptide
  MOD_RES (1)..(33)..(34): Xaa is C or S
XRDVVMGSMEGIIIQQKDNMIQMTINSMKTPTXXP

SEQ ID NO: 35864 - protein, 38 aa, Artificial Sequence
  Non-cyclic GFR-binding peptide
  MOD_RES (1)..(3)..(37)..(38): Xaa is C or S
  MOD_RES (15)..(16)..(17)..(18)..(19): Xaa is A or G
  MOD_RES (20)..(21)..(22)..(23): Xaa is A or G or absent
XGXSEVVMDSMEGLXXXXXXXXXMIQITINSLRTPVXX

SEQ ID NO: 35865 - protein, 39 aa, Artificial Sequence
  Non-cyclic GFR-binding peptide
  MOD_RES (2)..(4)..(37)..(38): Xaa is C or S
  MOD_RES (15)..(16)..(17)..(18)..(19): Xaa is A or G
  MOD_RES (20)..(21)..(22)..(23): Xaa is A or G or absent
LXGXEEVIMSMEGIXXXXXXXXXMIQMTINSTKVPAXXT

SEQ ID NO: 35866 - protein, 38 aa, Artificial Sequence
  Non-cyclic GFR-binding peptide
  MOD_RES (1)..(3)..(37)..(38): Xaa is C or S
  MOD_RES (15)..(16)..(17)..(18)..(19): Xaa is A or G
  MOD_RES (20)..(21)..(22)..(23): Xaa is A or G or absent
XGXAEVVMDSMEGIXXXXXXXXXMIQITINSLRAPVXX

SEQ ID NO: 35867 - protein, 33 aa, Artificial Sequence
  Non-cyclic GFR-binding peptide
  MOD_RES (1)..(32)..(33): Xaa is C or S
XSRVIMSMEGLVKPKRGVMIQITINSLAQPVXX

SEQ ID NO: 35868 - protein, 35 aa, Artificial Sequence
  Non-cyclic GFR-binding peptide
  MOD_RES (2)..(2): Xaa is C or S
  MOD_RES (14)..(15)..(16)..(17)..(18): Xaa is A or G
  MOD_RES (19)..(20)..(21)..(22): Xaa is A or G or absent
GXAEVVMDSMEGLXXXXXXXXXMIQITINSLRAPV

SEQ ID NO: 35869 - protein, 36 aa, Artificial Sequence
  Non-cyclic GFR-binding peptide
  MOD_RES (1)..(33)..(34): Xaa is C or S
XSEVVMDSMEGIVVNNASDMIQITINSLRTPVXXTP

SEQ ID NO: 35870 - protein, 39 aa, Artificial Sequence
  Non-cyclic GFR-binding peptide
  MOD_RES (1)..(3)..(37)..(38): Xaa is C or S
  MOD_RES (15)..(16)..(17)..(18)..(19): Xaa is A or G
  MOD_RES (20)..(21)..(22)..(23): Xaa is A or G or absent
XGXSEVVMDSMEGLXXXXXXXXXMIQITINSLRTPVXXT

SEQ ID NO: 35871 - protein, 37 aa, Artificial Sequence
  Non-cyclic GFR-binding peptide
  MOD_RES (1)..(3)..(36)..(37): Xaa is C or S
  MOD_RES (14)..(15)..(16)..(17)..(18): Xaa is A or G
  MOD_RES (19)..(20)..(21)..(22): Xaa is A or G or absent
XGXEEVIMSMEGLXXXXXXXXXMIQMTINSTKVPAXX

SEQ ID NO: 35872 - protein, 40 aa, Artificial Sequence
  Non-cyclic GFR-binding peptide
  MOD_RES (2)..(36)..(37): Xaa is C or S
  MOD_RES (14)..(15)..(16)..(17)..(18): Xaa is A or G
  MOD_RES (19)..(20)..(21)..(22): Xaa is A or G or absent
GXRDVVMGSMEGIXXXXXXXXXMIQMTINSMKTPTXXPGA

SEQ ID NO: 35873 - protein, 35 aa, Artificial Sequence
  Non-cyclic GFR-binding peptide
  MOD_RES (32)..(33): Xaa is C or S
RDVVMGSMEGIIIQQKDNMIQMTINSMKTPTXXPG

SEQ ID NO: 35874 - protein, 38 aa, Artificial Sequence
  Non-cyclic GFR-binding peptide
  MOD_RES (1)..(33)..(34): Xaa is C or S
XSEVVMDSMEGIVVNNASDMIQITINSLRTPVXXTPPT

SEQ ID NO: 35875 - protein, 39 aa, Artificial Sequence
  Non-cyclic GFR-binding peptide
  MOD_RES (1)..(3)..(35)..(36): Xaa is C or S
XGXRDVVMGSMEGIIIQQKDNMIQMTINSMKTPTXXPGA

SEQ ID NO: 35876 - protein, 30 aa, Artificial Sequence
  Non-cyclic GFR-binding peptide
EVVMDSMEGLVVNNASDMIQITINSLRTPV

SEQ ID NO: 35877 - protein, 34 aa, Artificial Sequence
  Non-cyclic GFR-binding peptide
  MOD_RES (33)..(34): Xaa is C or S
  MOD_RES (11)..(12)..(13)..(14)..(15): Xaa is A or G
  MOD_RES (16)..(17)..(18)..(19): Xaa is A or G or absent
DVVMGSMEGIXXXXXXXXXMIQMTINSMKTPTXX

SEQ ID NO: 35878 - protein, 36 aa, Artificial Sequence
  Non-cyclic GFR-binding peptide
  MOD_RES (1)..(3)..(35)..(36): Xaa is C or S
XGXAEVVMDSMEGLVVNNAADMIQITINSLRAPVXX

SEQ ID NO: 35879 - protein, 36 aa, Artificial Sequence
  Non-cyclic GFR-binding peptide
  MOD_RES (2)..(36): Xaa is C or S
  MOD_RES (14)..(15)..(16)..(17)..(18): Xaa is A or G
  MOD_RES (19)..(20)..(21)..(22): Xaa is A or G or absent
GXSEVVMDSMEGLXXXXXXXXXMIQITINSLRTPVX

SEQ ID NO: 35880 - protein, 37 aa, Artificial Sequence
  Non-cyclic GFR-binding peptide
  MOD_RES (34)..(35): Xaa is C or S
  MOD_RES (12)..(13)..(14)..(15)..(16): Xaa is A or G
  MOD_RES (17)..(18)..(19)..(20): Xaa is A or G or absent
RDVVMGSMEGIXXXXXXXXXMIQMTINSMKTPTXXPG

SEQ ID NO: 35881 - protein, 38 aa, Artificial Sequence
  Non-cyclic GFR-binding peptide
  MOD_RES (2)..(4)..(37)..(38): Xaa is C or S
  MOD_RES (15)..(16)..(17)..(18)..(19): Xaa is A or G
  MOD_RES (20)..(21)..(22)..(23): Xaa is A or G or absent
LXGXEEVIMSMEGIXXXXXXXXXMIQMTINSTKVPAXX

SEQ ID NO: 35882 - protein, 42 aa, Artificial Sequence
  Non-cyclic GFR-binding peptide
  MOD_RES (1)..(3)..(37)..(38): Xaa is C or S
  MOD_RES (15)..(16)..(17)..(18)..(19): Xaa is A or G
  MOD_RES (20)..(21)..(22)..(23): Xaa is A or G or absent
XGXRDVVMGSMEGIXXXXXXXXXMIQMTINSMKTPTXXPGAS

SEQ ID NO: 35883 - protein, 42 aa, Artificial Sequence
  Non-cyclic GFR-binding peptide
  MOD_RES (2)..(4)..(36)..(37): Xaa is C or S
RXGXSEVVMDSMEGLVVNNASDMIQITINSLRTPVXXTPPTS

SEQ ID NO: 35884 - protein, 38 aa, Artificial Sequence
  Non-cyclic GFR-binding peptide
  MOD_RES (1)..(35)..(36): Xaa is C or S
  MOD_RES (13)..(14)..(15)..(16)..(17): Xaa is A or G
  MOD_RES (18)..(19)..(20)..(21): Xaa is A or G or absent
XSEVVMDSMEGIXXXXXXXXXMIQITINSLRTPVXXTP

SEQ ID NO: 35885 - protein, 40 aa, Artificial Sequence
  Non-cyclic GFR-binding peptide
  MOD_RES (2)..(34)..(35): Xaa is C or S
GXAEVVMDSMEGIVVNNAADMIQITINSLRAPVXXSAPAA

SEQ ID NO: 35886 - protein, 34 aa, Artificial Sequence
  Non-cyclic GFR-binding peptide
  MOD_RES (2)..(34): Xaa is C or S
GXRDVVMGSMEGIIIQQKDNMIQMTINSMKTPTX

SEQ ID NO: 35887 - protein, 37 aa, Artificial Sequence
  Non-cyclic GFR-binding peptide
  MOD_RES (2)..(4)..(35)..(36): Xaa is C or S
LXGXEEVIMSMEGLLLVRGNDMIQMTINSTKVPAXXT

SEQ ID NO: 35888 - protein, 37 aa, Artificial Sequence
  Non-cyclic GFR-binding peptide
  MOD_RES (31)..(32): Xaa is C or S
EEVIMSMEGILLVRGNDMIQMTINSTKVPAXXTSPVR

SEQ ID NO: 35889 - protein, 38 aa, Artificial Sequence
  Non-cyclic GFR-binding peptide
  MOD_RES (2)..(4)..(36)..(37): Xaa is C or S
RXGXSEVVMDSMEGIVVNNASDMIQITINSLRTPVXXT

SEQ ID NO: 35890 - protein, 42 aa, Artificial Sequence
  Non-cyclic GFR-binding peptide
  MOD_RES (1)..(3)..(37)..(38): Xaa is C or S
  MOD_RES (15)..(16)..(17)..(18)..(19): Xaa is A or G
  MOD_RES (20)..(21)..(22)..(23): Xaa is A or G or absent
XGXSEVVMDSMEGIXXXXXXXXXMIQITINSLRTPVXXTPPT

SEQ ID NO: 35891 - protein, 32 aa, Artificial Sequence
  Non-cyclic GFR-binding peptide
  MOD_RES (32)..(32): Xaa is C or S
SEVVMDSMEGLVVNNASDMIQITINSLRTPVX

SEQ ID NO: 35892 - protein, 35 aa, Artificial Sequence
  Non-cyclic GFR-binding peptide
  MOD_RES (33)..(34): Xaa is C or S
  MOD_RES (11)..(12)..(13)..(14)..(15): Xaa is A or G
  MOD_RES (16)..(17)..(18)..(19): Xaa is A or G or absent
RVVMNSMEGLXXXXXXXXXMIQVTINSLKTPAXXP

SEQ ID NO: 35893 - protein, 36 aa, Artificial Sequence
  Non-cyclic GFR-binding peptide
  MOD_RES (2)..(34)..(35): Xaa is C or S
GXSEVVMDSMEGIVVNNASDMIQITINSLRTPVXXT

SEQ ID NO: 35894 - protein, 36 aa, Artificial Sequence
  Non-cyclic GFR-binding peptide
  MOD_RES (1)..(35)..(36): Xaa is C or S
  MOD_RES (13)..(14)..(15)..(16)..(17): Xaa is A or G
  MOD_RES (18)..(19)..(20)..(21): Xaa is A or G or absent
XAEVVMDSMEGIXXXXXXXXXMIQITINSLRAPVXX

SEQ ID NO: 35895 - protein, 37 aa, Artificial Sequence
  Non-cyclic GFR-binding peptide
  MOD_RES (2)..(34)..(35): Xaa is C or S
GXRDVVMGSMEGLIIQQKDNMIQMTINSMKTPTXXPG

SEQ ID NO: 35896 - protein, 39 aa, Artificial Sequence
  Non-cyclic GFR-binding peptide
  MOD_RES (1)..(34)..(35): Xaa is C or S
  MOD_RES (12)..(13)..(14)..(15)..(16): Xaa is A or G
  MOD_RES (17)..(18)..(19)..(20): Xaa is A or G or absent
XEEVIMSMEGIXXXXXXXXXMIQMTINSTKVPAXXTSPV

SEQ ID NO: 35897 - protein, 34 aa, Artificial Sequence
  Non-cyclic GFR-binding peptide
  MOD_RES (31)..(32): Xaa is C or S
DVVMGSMEGLIIQQKDNMIQMTINSMKTPTXXPG

SEQ ID NO: 35898 - protein, 35 aa, Artificial Sequence
  Non-cyclic GFR-binding peptide
  MOD_RES (1)..(3)..(34)..(35): Xaa is C or S
XKXSRVIMSMEGLVKPKRGVMIQITINSLAQPVXX

SEQ ID NO: 35899 - protein, 40 aa, Artificial Sequence
  Non-cyclic GFR-binding peptide
  MOD_RES (34)..(35): Xaa is C or S
  MOD_RES (12)..(13)..(14)..(15)..(16): Xaa is A or G
  MOD_RES (17)..(18)..(19)..(20): Xaa is A or G or absent
SRVVMNSMEGLXXXXXXXXXMIQVTINSLKTPAXXPKPVH

SEQ ID NO: 35900 - protein, 36 aa, Artificial Sequence
  Non-cyclic GFR-binding peptide
  MOD_RES (1)..(32)..(33): Xaa is C or S
XSRVIMSMEGLVKPKRGVMIQITINSLAQPVXXPAA

SEQ ID NO: 35901 - protein, 38 aa, Artificial Sequence
  Non-cyclic GFR-binding peptide
  MOD_RES (2)..(4)..(35)..(36): Xaa is C or S
SXKXSKVIMSMEGLIKPTKGIMIQITINSLDQSVXXPS

SEQ ID NO: 35902 - protein, 38 aa, Artificial Sequence
  Non-cyclic GFR-binding peptide
  MOD_RES (2)..(34)..(35): Xaa is C or S
GXRDVVMGSMEGLIIQQKDNMIQMTINSMKTPTXXPGA

SEQ ID NO: 35903 - protein, 39 aa, Artificial Sequence
  Non-cyclic GFR-binding peptide
  MOD_RES (1)..(33)..(34): Xaa is C or S
XSRVVMNSMEGLIVNSSDDMIQVTINSLKTPAXXPKPVH

SEQ ID NO: 35904 - protein, 41 aa, Artificial Sequence
  Non-cyclic GFR-binding peptide
  MOD_RES (1)..(35)..(36): Xaa is C or S
  MOD_RES (13)..(14)..(15)..(16)..(17): Xaa is A or G
  MOD_RES (18)..(19)..(20)..(21): Xaa is A or G or absent
XRDVVMGSMEGIXXXXXXXXXMIQMTINSMKTPTXXPGASG

SEQ ID NO: 35905 - protein, 34 aa, Artificial Sequence
  Non-cyclic GFR-binding peptide
  MOD_RES (1)..(32)..(33): Xaa is C or S
XEEVIMSMEGLLLVRGNDMIQMTINSTKVPAXXT

SEQ ID NO: 35906 - protein, 33 aa, Artificial Sequence
  Non-cyclic GFR-binding peptide
  MOD_RES (31)..(32): Xaa is C or S
EEVIMSMEGLLLVRGNDMIQMTINSTKVPAXXT

SEQ ID NO: 35907 - protein, 36 aa, Artificial Sequence
  Non-cyclic GFR-binding peptide
  MOD_RES (1)..(32)..(33): Xaa is C or S
XSKVIMSMEGLIKPTKGIMIQITINSLDQSVXXPSA

SEQ ID NO: 35908 - protein, 33 aa, Artificial Sequence
  Non-cyclic GFR-binding peptide
  MOD_RES (12)..(13)..(14)..(15)..(16): Xaa is A or G
  MOD_RES (17)..(18)..(19)..(20): Xaa is A or G or absent
AEVVMDSMEGIXXXXXXXXXMIQITINSLRAPV

SEQ ID NO: 35909 - protein, 39 aa, Artificial Sequence
  Non-cyclic GFR-binding peptide
  MOD_RES (1)..(35)..(36): Xaa is C or S
  MOD_RES (13)..(14)..(15)..(16)..(17): Xaa is A or G
  MOD_RES (18)..(19)..(20)..(21): Xaa is A or G or absent
XSRVVMNSMEGLXXXXXXXXXMIQVTINSLKTPAXXPKP

SEQ ID NO: 35910 - protein, 33 aa, Artificial Sequence
  Non-cyclic GFR-binding peptide
  MOD_RES (1)..(1): Xaa is C or S
  MOD_RES (12)..(13)..(14)..(15)..(16): Xaa is A or G
  MOD_RES (17)..(18)..(19)..(20): Xaa is A or G or absent
XEEVIMSMEGLXXXXXXXXXMIQMTINSTKVPA

SEQ ID NO: 35911 - protein, 38 aa, Artificial Sequence
  Non-cyclic GFR-binding peptide
  MOD_RES (2)..(35)..(36): Xaa is C or S
  MOD_RES (13)..(14)..(15)..(16)..(17): Xaa is A or G
  MOD_RES (18)..(19)..(20)..(21): Xaa is A or G or absent
GXEEVIMSMEGIXXXXXXXXXMIQMTINSTKVPAXXTS

SEQ ID NO: 35912 - protein, 40 aa, Artificial Sequence
  Non-cyclic GFR-binding peptide
  MOD_RES (2)..(4)..(36)..(37): Xaa is C or S
HXGXSRVVMNSMEGLIVNSSDDMIQVTINSLKTPAXXPKP

SEQ ID NO: 35913 - protein, 36 aa, Artificial Sequence
  Non-cyclic GFR-binding peptide
  MOD_RES (2)..(34)..(35): Xaa is C or S
GXSEVVMDSMEGLVVNNASDMIQITINSLRTPVXXT

SEQ ID NO: 35914 - protein, 32 aa, Artificial Sequence
  Non-cyclic GFR-binding peptide
  MOD_RES (31)..(32): Xaa is C or S
EVVMDSMEGIVVNNAADMIQITINSLRAPVXX

SEQ ID NO: 35915 - protein, 32 aa, Artificial Sequence
  Non-cyclic GFR-binding peptide
  MOD_RES (11)..(12)..(13)..(14)..(15): Xaa is A or G
  MOD_RES (16)..(17)..(18)..(19): Xaa is A or G or absent
SKVIMSMEGLXXXXXXXXXMIQITINSLDQSV

SEQ ID NO: 35916 - protein, 37 aa, Artificial Sequence
  Non-cyclic GFR-binding peptide
  MOD_RES (33)..(34): Xaa is C or S
  MOD_RES (11)..(12)..(13)..(14)..(15): Xaa is A or G
  MOD_RES (16)..(17)..(18)..(19): Xaa is A or G or absent
DVVMGSMEGLXXXXXXXXXMIQMTINSMKTPTXXPGA

SEQ ID NO: 35917 - protein, 43 aa, Artificial Sequence
  Non-cyclic GFR-binding peptide
  MOD_RES (2)..(4)..(37)..(38): Xaa is C or S
  MOD_RES (15)..(16)..(17)..(18)..(19): Xaa is A or G
  MOD_RES (20)..(21)..(22)..(23): Xaa is A or G or absent
SXKXSKVIMSMEGLXXXXXXXXXMIQITINSLDQSVXXPSASA

SEQ ID NO: 35918 - protein, 36 aa, Artificial Sequence
  Non-cyclic GFR-binding peptide
  MOD_RES (2)..(4)..(36): Xaa is C or S
SXGXRDVVMGSMEGIIIQQKDNMIQMTINSMKTPTX

SEQ ID NO: 35919 - protein, 38 aa, Artificial Sequence
  Non-cyclic GFR-binding peptide
  MOD_RES (2)..(35)..(36): Xaa is C or S
  MOD_RES (13)..(14)..(15)..(16)..(17): Xaa is A or G
  MOD_RES (18)..(19)..(20)..(21): Xaa is A or G or absent
GXEEVIMSMEGLXXXXXXXXXMIQMTINSTKVPAXXTS

SEQ ID NO: 35920 - protein, 34 aa, Artificial Sequence
  Non-cyclic GFR-binding peptide
  MOD_RES (31)..(32): Xaa is C or S
SKVVMSMEGLVKPTRGVMIQITINSLDQPVXXPS

SEQ ID NO: 35921 - protein, 34 aa, Artificial Sequence
  Non-cyclic GFR-binding peptide
  MOD_RES (1)..(1): Xaa is C or S
  MOD_RES (13)..(14)..(15)..(16)..(17): Xaa is A or G
  MOD_RES (18)..(19)..(20)..(21): Xaa is A or G or absent
XAEVVMDSMEGLXXXXXXXXXMIQITINSLRAPV

SEQ ID NO: 35922 - protein, 38 aa, Artificial Sequence
  Non-cyclic GFR-binding peptide
  MOD_RES (32)..(33): Xaa is C or S
RDVVMGSMEGLIIQQKDNMIQMTINSMKTPTXXPGASG

SEQ ID NO: 35923 - protein, 30 aa, Artificial Sequence
  Non-cyclic GFR-binding peptide
SKVIMSMEGLIKPTKGIMIQITINSLDQSV

SEQ ID NO: 35924 - protein, 39 aa, Artificial Sequence
  Non-cyclic GFR-binding peptide
  MOD_RES (1)..(3)..(37)..(38): Xaa is C or S
  MOD_RES (15)..(16)..(17)..(18)..(19): Xaa is A or G
  MOD_RES (20)..(21)..(22)..(23): Xaa is A or G or absent
XGXSEVVMDSMEGIXXXXXXXXXMIQITINSLRTPVXXT

SEQ ID NO: 35925 - protein, 34 aa, Artificial Sequence
  Non-cyclic GFR-binding peptide
  MOD_RES (2)..(34): Xaa is C or S
GXSEVVMDSMEGLVVNNASDMIQITINSLRTPVX

SEQ ID NO: 35926 - protein, 39 aa, Artificial Sequence
  Non-cyclic GFR-binding peptide
  MOD_RES (2)..(35)..(36): Xaa is C or S
  MOD_RES (13)..(14)..(15)..(16)..(17): Xaa is A or G
  MOD_RES (18)..(19)..(20)..(21): Xaa is A or G or absent
KXSRVIMSMEGLXXXXXXXXXMIQITINSLAQPVXXPAA

SEQ ID NO: 35927 - protein, 35 aa, Artificial Sequence
  Non-cyclic GFR-binding peptide
  MOD_RES (31)..(32): Xaa is C or S
SRVIMSMEGLVKPKRGVMIQITINSLAQPVXXPAA

SEQ ID NO: 35928 - protein, 38 aa, Artificial Sequence
  Non-cyclic GFR-binding peptide
  MOD_RES (32)..(33): Xaa is C or S
SRVVMNSMEGIIVNSSDDMIQVTINSLKTPAXXPKPVH

SEQ ID NO: 35929 - protein, 30 aa, Artificial Sequence; identical to SEQ ID NO: 2161
  Non-cyclic GFR-binding peptide

SEQ ID NO: 35930 - protein, 42 aa, Artificial Sequence
  Non-cyclic GFR-binding peptide
  MOD_RES (1)..(3)..(36)..(37): Xaa is C or S
  MOD_RES (14)..(15)..(16)..(17)..(18): Xaa is A or G
  MOD_RES (19)..(20)..(21)..(22): Xaa is A or G or absent
XGXEEVIMSMEGLXXXXXXXXXMIQMTINSTKVPAXXTSPVR

SEQ ID NO: 35931 - protein, 40 aa, Artificial Sequence
  Non-cyclic GFR-binding peptide
  MOD_RES (1)..(34)..(35): Xaa is C or S
  MOD_RES (12)..(13)..(14)..(15)..(16): Xaa is A or G
  MOD_RES (17)..(18)..(19)..(20): Xaa is A or G or absent
XSKVVMSMEGLXXXXXXXXXMIQITINSLDQPVXXPSASA

SEQ ID NO: 35932 - protein, 39 aa, Artificial Sequence
  Non-cyclic GFR-binding peptide
  MOD_RES (2)..(35)..(36): Xaa is C or S
  MOD_RES (13)..(14)..(15)..(16)..(17): Xaa is A or G
  MOD_RES (18)..(19)..(20)..(21): Xaa is A or G or absent
KXSKVVMSMEGLXXXXXXXXXMIQITINSLDQPVXXPSA

SEQ ID NO: 35933 - protein, 37 aa, Artificial Sequence
  Non-cyclic GFR-binding peptide
  MOD_RES (1)..(35)..(36): Xaa is C or S
  MOD_RES (13)..(14)..(15)..(16)..(17): Xaa is A or G
  MOD_RES (18)..(19)..(20)..(21): Xaa is A or G or absent
XSEVVMDSMEGIXXXXXXXXXMIQITINSLRTPVXXT

SEQ ID NO: 35934 - protein, 35 aa, Artificial Sequence
  Non-cyclic GFR-binding peptide
  MOD_RES (1)..(3)..(35): Xaa is C or S
XGXAEVVMDSMEGIVVNNAADMIQITINSLRAPVX

SEQ ID NO: 35935 - protein, 41 aa, Artificial Sequence
  Non-cyclic GFR-binding peptide
  MOD_RES (2)..(36)..(37): Xaa is C or S
  MOD_RES (14)..(15)..(16)..(17)..(18): Xaa is A or G
  MOD_RES (19)..(20)..(21)..(22): Xaa is A or G or absent
GXSEVVMDSMEGIXXXXXXXXXMIQITINSLRTPVXXTPPT

SEQ ID NO: 35936 - protein, 34 aa, Artificial Sequence
  Non-cyclic GFR-binding peptide
  MOD_RES (33)..(34): Xaa is C or S
  MOD_RES (11)..(12)..(13)..(14)..(15): Xaa is A or G
  MOD_RES (16)..(17)..(18)..(19): Xaa is A or G or absent
EVVMDSMEGLXXXXXXXXXMIQITINSLRAPVXX

SEQ ID NO: 35937 - protein, 37 aa, Artificial Sequence
  Non-cyclic GFR-binding peptide
  MOD_RES (33)..(34): Xaa is C or S
  MOD_RES (11)..(12)..(13)..(14)..(15): Xaa is A or G
  MOD_RES (16)..(17)..(18)..(19): Xaa is A or G or absent
SKVVMSMEGLXXXXXXXXXMIQITINSLDQPVXXPSA

SEQ ID NO: 35938 - protein, 33 aa, Artificial Sequence
  Non-cyclic GFR-binding peptide
  MOD_RES (1)..(1): Xaa is C or S
  MOD_RES (12)..(13)..(14)..(15)..(16): Xaa is A or G
  MOD_RES (17)..(18)..(19)..(20): Xaa is A or G or absent
XSRVIMSMEGLXXXXXXXXXMIQITINSLAQPV

SEQ ID NO: 35939 - protein, 36 aa, Artificial Sequence
  Non-cyclic GFR-binding peptide
  MOD_RES (31)..(32): Xaa is C or S
EVVMDSMEGLVVNNAADMIQITINSLRAPVXXSAPA

SEQ ID NO: 35940 - protein, 42 aa, Artificial Sequence
  Non-cyclic GFR-binding peptide
  MOD_RES (2)..(4)..(36)..(37): Xaa is C or S
RXGXAEVVMDSMEGLVVNNAADMIQITINSLRAPVXXSAPAA

SEQ ID NO: 35941 - protein, 34 aa, Artificial Sequence
  Non-cyclic GFR-binding peptide
  MOD_RES (1)..(1): Xaa is C or S
  MOD_RES (13)..(14)..(15)..(16)..(17): Xaa is A or G
  MOD_RES (18)..(19)..(20)..(21): Xaa is A or G or absent
XAEVVMDSMEGIXXXXXXXXXMIQITINSLRAPV

SEQ ID NO: 35942 - protein, 41 aa, Artificial Sequence
  Non-cyclic GFR-binding peptide
  MOD_RES (1)..(3)..(35)..(36): Xaa is C or S
XGXRDVVMGSMEGIIIQQKDNMIQMTINSMKTPTXXPGASG

SEQ ID NO: 35943 - protein, 38 aa, Artificial Sequence
  Non-cyclic GFR-binding peptide
  MOD_RES (2)..(36)..(37): Xaa is C or S
  MOD_RES (14)..(15)..(16)..(17)..(18): Xaa is A or G
  MOD_RES (19)..(20)..(21)..(22): Xaa is A or G or absent
GXSEVVMDSMEGIXXXXXXXXXMIQITINSLRTPVXXT

SEQ ID NO: 35944 - protein, 42 aa, Artificial Sequence
  Non-cyclic GFR-binding peptide
  MOD_RES (1)..(3)..(36)..(37): Xaa is C or S
  MOD_RES (14)..(15)..(16)..(17)..(18): Xaa is A or G
  MOD_RES (19)..(20)..(21)..(22): Xaa is A or G or absent
XKXSKVVMSMEGLXXXXXXXXXMIQITINSLDQPVXXPSASA

SEQ ID NO: 35945 - protein, 41 aa, Artificial Sequence
  Non-cyclic GFR-binding peptide
  MOD_RES (2)..(4)..(38)..(39): Xaa is C or S
  MOD_RES (16)..(17)..(18)..(19)..(20): Xaa is A or G
  MOD_RES (21)..(22)..(23)..(24): Xaa is A or G or absent
HXGXSRVVMNSMEGLXXXXXXXXXMIQVTINSLKTPAXXPK

SEQ ID NO: 35946 - protein, 37 aa, Artificial Sequence
  Non-cyclic GFR-binding peptide
  MOD_RES (1)..(35)..(36): Xaa is C or S
  MOD_RES (13)..(14)..(15)..(16)..(17): Xaa is A or G
  MOD_RES (18)..(19)..(20)..(21): Xaa is A or G or absent
XSEVVMDSMEGLXXXXXXXXXMIQITINSLRTPVXXT

SEQ ID NO: 35947 - protein, 34 aa, Artificial Sequence
  Non-cyclic GFR-binding peptide
  MOD_RES (1)..(1): Xaa is C or S
  MOD_RES (13)..(14)..(15)..(16)..(17): Xaa is A or G
  MOD_RES (18)..(19)..(20)..(21): Xaa is A or G or absent
XSEVVMDSMEGLXXXXXXXXXMIQITINSLRTPV

SEQ ID NO: 35948 - protein, 39 aa, Artificial Sequence
  Non-cyclic GFR-binding peptide
  MOD_RES (2)..(33)..(34): Xaa is C or S
KXSKVVMSMEGLVKPTRGVMIQITINSLDQPVXXPSASA

SEQ ID NO: 35949 - protein, 37 aa, Artificial Sequence
  Non-cyclic GFR-binding peptide
  MOD_RES (2)..(36)..(37): Xaa is C or S
  MOD_RES (14)..(15)..(16)..(17)..(18): Xaa is A or G
  MOD_RES (19)..(20)..(21)..(22): Xaa is A or G or absent
GXSEVVMDSMEGIXXXXXXXXXMIQITINSLRTPVXX

SEQ ID NO: 35950 - protein, 42 aa, Artificial Sequence
  Non-cyclic GFR-binding peptide
  MOD_RES (2)..(4)..(37)..(38): Xaa is C or S
  MOD_RES (15)..(16)..(17)..(18)..(19): Xaa is A or G
  MOD_RES (20)..(21)..(22)..(23): Xaa is A or G or absent
LXGXEEVIMSMEGLXXXXXXXXXMIQMTINSTKVPAXXTSPV

SEQ ID NO: 35951 - protein, 38 aa, Artificial Sequence
  Non-cyclic GFR-binding peptide
  MOD_RES (1)..(32)..(33): Xaa is C or S
XEEVIMSMEGILLVRGNDMIQMTINSTKVPAXXTSPVR

SEQ ID NO: 35952 - protein, 30 aa, Artificial Sequence
  Non-cyclic GFR-binding peptide
SRVIMSMEGLVKPKRGVMIQITINSLAQPV

SEQ ID NO: 35953 - protein, 35 aa, Artificial Sequence
  Non-cyclic GFR-binding peptide
  MOD_RES (1)..(34)..(35): Xaa is C or S
  MOD_RES (12)..(13)..(14)..(15)..(16): Xaa is A or G
  MOD_RES (17)..(18)..(19)..(20): Xaa is A or G or absent
XSKVVMSMEGLXXXXXXXXXMIQITINSLDQPVXX

SEQ ID NO: 35954 - protein, 31 aa, Artificial Sequence
  Non-cyclic GFR-binding peptide
  MOD_RES (1)..(1): Xaa is C or S
XSKVIMSMEGLIKPTKGIMIQITINSLDQSV

SEQ ID NO: 35955 - protein, 39 aa, Artificial Sequence
  Non-cyclic GFR-binding peptide
  MOD_RES (1)..(35)..(36): Xaa is C or S
  MOD_RES (13)..(14)..(15)..(16)..(17): Xaa is A or G
  MOD_RES (18)..(19)..(20)..(21): Xaa is A or G or absent
XSEVVMDSMEGIXXXXXXXXXMIQITINSLRTPVXXTPP

SEQ ID NO: 35956 - protein, 39 aa, Artificial Sequence
  Non-cyclic GFR-binding peptide
  MOD_RES (1)..(3)..(37)..(38): Xaa is C or S
  MOD_RES (15)..(16)..(17)..(18)..(19): Xaa is A or G
  MOD_RES (20)..(21)..(22)..(23): Xaa is A or G or absent
XGXAEVVMDSMEGLXXXXXXXXXMIQITINSLRAPVXXS

SEQ ID NO: 35957 - protein, 37 aa, Artificial Sequence
  Non-cyclic GFR-binding peptide
  MOD_RES (34)..(35): Xaa is C or S
  MOD_RES (12)..(13)..(14)..(15)..(16): Xaa is A or G
  MOD_RES (17)..(18)..(19)..(20): Xaa is A or G or absent
SEVVMDSMEGLXXXXXXXXXMIQITINSLRTPVXXTP

SEQ ID NO: 35958 - protein, 32 aa, Artificial Sequence
  Non-cyclic GFR-binding peptide
  MOD_RES (31)..(32): Xaa is C or S
EVVMDSMEGLVVNNASDMIQITINSLRTPVXX

SEQ ID NO: 35959 - protein, 34 aa, Artificial Sequence
  Non-cyclic GFR-binding peptide
  MOD_RES (1)..(34): Xaa is C or S
  MOD_RES (12)..(13)..(14)..(15)..(16): Xaa is A or G
  MOD_RES (17)..(18)..(19)..(20): Xaa is A or G or absent
XEEVIMSMEGIXXXXXXXXXMIQMTINSTKVPAX

SEQ ID NO: 35960 - protein, 38 aa, Artificial Sequence
  Non-cyclic GFR-binding peptide
  MOD_RES (2)..(34)..(35): Xaa is C or S
GXSRVVMNSMEGLIVNSSDDMIQVTINSLKTPAXXPKP

SEQ ID NO: 35961 - protein, 36 aa, Artificial Sequence
  Non-cyclic GFR-binding peptide
  MOD_RES (2)..(36): Xaa is C or S
  MOD_RES (14)..(15)..(16)..(17)..(18): Xaa is A or G
  MOD_RES (19)..(20)..(21)..(22): Xaa is A or G or absent
GXAEVVMDSMEGLXXXXXXXXXMIQITINSLRAPVX

SEQ ID NO: 35962 - protein, 34 aa, Artificial Sequence
  Non-cyclic GFR-binding peptide
  MOD_RES (1)..(3): Xaa is C or S
XGXSRVVMNSMEGLIVNSSDDMIQVTINSLKTPA

SEQ ID NO: 35963 - protein, 38 aa, Artificial Sequence
  Non-cyclic GFR-binding peptide
  MOD_RES (2)..(4)..(35)..(36): Xaa is C or S
SXKXSRVIMSMEGLVKPKRGVMIQITINSLAQPVXXPA

SEQ ID NO: 35964 - protein, 34 aa, Artificial Sequence
  Non-cyclic GFR-binding peptide
  MOD_RES (1)..(1): Xaa is C or S
  MOD_RES (13)..(14)..(15)..(16)..(17): Xaa is A or G
  MOD_RES (18)..(19)..(20)..(21): Xaa is A or G or absent
XRDVVMGSMEGLXXXXXXXXXMIQMTINSMKTPT

SEQ ID NO: 35965 - protein, 43 aa, Artificial Sequence
  Non-cyclic GFR-binding peptide
  MOD_RES (2)..(4)..(38)..(39): Xaa is C or S
  MOD_RES (16)..(17)..(18)..(19)..(20): Xaa is A or G
  MOD_RES (21)..(22)..(23)..(24): Xaa is A or G or absent
SXGXRDVVMGSMEGLXXXXXXXXXMIQMTINSMKTPTXXPGAS

SEQ ID NO: 35966 - protein, 36 aa, Artificial Sequence
  Non-cyclic GFR-binding peptide
  MOD_RES (34)..(35): Xaa is C or S
  MOD_RES (12)..(13)..(14)..(15)..(16): Xaa is A or G
  MOD_RES (17)..(18)..(19)..(20): Xaa is A or G or absent
RDVVMGSMEGLXXXXXXXXXMIQMTINSMKTPTXXP

SEQ ID NO: 35967 - protein, 37 aa, Artificial Sequence
  Non-cyclic GFR-binding peptide
  MOD_RES (2)..(36)..(37): Xaa is C or S
  MOD_RES (14)..(15)..(16)..(17)..(18): Xaa is A or G
  MOD_RES (19)..(20)..(21)..(22): Xaa is A or G or absent
GXSEVVMDSMEGLXXXXXXXXXMIQITINSLRTPVXX

SEQ ID NO: 35968 - protein, 36 aa, Artificial Sequence
  Non-cyclic GFR-binding peptide
  MOD_RES (2)..(33)..(34): Xaa is C or S
KXSKVVMSMEGLVKPTRGVMIQITINSLDQPVXXPS

SEQ ID NO: 35969 - protein, 37 aa, Artificial Sequence
  Non-cyclic GFR-binding peptide
  MOD_RES (31)..(32): Xaa is C or S
EVVMDSMEGIVVNNAADMIQITINSLRAPVXXSAPAA

SEQ ID NO: 35970 - protein, 33 aa, Artificial Sequence
  Non-cyclic GFR-binding peptide
  MOD_RES (2)..(2): Xaa is C or S
GXSRVVMNSMEGLIVNSSDDMIQVTINSLKTPA

SEQ ID NO: 35971 - protein, 30 aa, Artificial Sequence
  Non-cyclic GFR-binding peptide
EVVMDSMEGLVVNNAADMIQITINSLRAPV

SEQ ID NO: 35972 - protein, 41 aa, Artificial Sequence
  Non-cyclic GFR-binding peptide
  MOD_RES (1)..(35)..(36): Xaa is C or S
  MOD_RES (13)..(14)..(15)..(16)..(17): Xaa is A or G
  MOD_RES (18)..(19)..(20)..(21): Xaa is A or G or absent
XRDVVMGSMEGLXXXXXXXXXMIQMTINSMKTPTXXPGASG

SEQ ID NO: 35973 - protein, 34 aa, Artificial Sequence
  Non-cyclic GFR-binding peptide
  MOD_RES (1)..(3): Xaa is C or S
XGXSEVVMDSMEGIVVNNASDMIQITINSLRTPV

SEQ ID NO: 35974 - protein, 39 aa, Artificial Sequence
  Non-cyclic GFR-binding peptide
  MOD_RES (2)..(33)..(34): Xaa is C or S
KXSKVIMSMEGLIKPTKGIMIQITINSLDQSVXXPSASA

SEQ ID NO: 35975 - protein, 37 aa, Artificial Sequence
  Non-cyclic GFR-binding peptide
  MOD_RES (1)..(35)..(36): Xaa is C or S
  MOD_RES (13)..(14)..(15)..(16)..(17): Xaa is A or G
  MOD_RES (18)..(19)..(20)..(21): Xaa is A or G or absent
XRDVVMGSMEGIXXXXXXXXXMIQMTINSMKTPTXXP

SEQ ID NO: 35976 - protein, 39 aa, Artificial Sequence
  Non-cyclic GFR-binding peptide
  MOD_RES (33)..(34): Xaa is C or S
  MOD_RES (11)..(12)..(13)..(14)..(15): Xaa is A or G
  MOD_RES (16)..(17)..(18)..(19): Xaa is A or G or absent
RVVMNSMEGLXXXXXXXXXMIQVTINSLKTPAXXPKPVH

SEQ ID NO: 35977 - protein, 38 aa, Artificial Sequence
  Non-cyclic GFR-binding peptide
  MOD_RES (1)..(32)..(33): Xaa is C or S
XSKVIMSMEGLIKPTKGIMIQITINSLDQSVXXPSASA

SEQ ID NO: 35978 - protein, 37 aa, Artificial Sequence
  Non-cyclic GFR-binding peptide
  MOD_RES (1)..(3)..(34)..(35): Xaa is C or S
XGXEEVIMSMEGILLVRGNDMIQMTINSTKVPAXXTS

SEQ ID NO: 35979 - protein, 33 aa, Artificial Sequence
  Non-cyclic GFR-binding peptide
  MOD_RES (2)..(2): Xaa is C or S
GXAEVVMDSMEGIVVNNAADMIQITINSLRAPV

SEQ ID NO: 35980 - protein, 35 aa, Artificial Sequence
  Non-cyclic GFR-binding peptide
  MOD_RES (33)..(34): Xaa is C or S
  MOD_RES (11)..(12)..(13)..(14)..(15): Xaa is A or G
  MOD_RES (16)..(17)..(18)..(19): Xaa is A or G or absent
DVVMGSMEGIXXXXXXXXXMIQMTINSMKTPTXXP

SEQ ID NO: 35981 - protein, 36 aa, Artificial Sequence
  Non-cyclic GFR-binding peptide
  MOD_RES (2)..(33)..(34): Xaa is C or S
KXSKVIMSMEGLIKPTKGIMIQITINSLDQSVXXPS

SEQ ID NO: 35982 - protein, 37 aa, Artificial Sequence
  Non-cyclic GFR-binding peptide
  MOD_RES (1)..(35)..(36): Xaa is C or S
  MOD_RES (13)..(14)..(15)..(16)..(17): Xaa is A or G
  MOD_RES (18)..(19)..(20)..(21): Xaa is A or G or absent
XRDVVMGSMEGLXXXXXXXXXMIQMTINSMKTPTXXP

SEQ ID NO: 35983 - protein, 35 aa, Artificial Sequence
  Non-cyclic GFR-binding peptide
  MOD_RES (31)..(32): Xaa is C or S
DVVMGSMEGIIIQQKDNMIQMTINSMKTPTXXPGA

SEQ ID NO: 35984 - protein, 31 aa, Artificial Sequence
  Non-cyclic GFR-binding peptide
SEVVMDSMEGLVVNNASDMIQITINSLRTPV

SEQ ID NO: 35985 - protein, 39 aa, Artificial Sequence
  Non-cyclic GFR-binding peptide
  MOD_RES (1)..(3)..(36)..(37): Xaa is C or S
  MOD_RES (14)..(15)..(16)..(17)..(18): Xaa is A or G
  MOD_RES (19)..(20)..(21)..(22): Xaa is A or G or absent
XKXSKVVMSMEGLXXXXXXXXXMIQITINSLDQPVXXPS

SEQ ID NO: 35986 - protein, 38 aa, Artificial Sequence
  Non-cyclic GFR-binding peptide
  MOD_RES (2)..(34)..(35): Xaa is C or S
GXAEVVMDSMEGIVVNNAADMIQITINSLRAPVXXSAP

SEQ ID NO: 35987 - protein, 37 aa, Artificial Sequence
  Non-cyclic GFR-binding peptide
  MOD_RES (33)..(34): Xaa is C or S
  MOD_RES (11)..(12)..(13)..(14)..(15): Xaa is A or G
  MOD_RES (16)..(17)..(18)..(19): Xaa is A or G or absent
SKVIMSMEGLXXXXXXXXXMIQITINSLDQSVXXPSA

SEQ ID NO: 35988 - protein, 37 aa, Artificial Sequence
  Non-cyclic GFR-binding peptide
  MOD_RES (33)..(34): Xaa is C or S
  MOD_RES (11)..(12)..(13)..(14)..(15): Xaa is A or G
  MOD_RES (16)..(17)..(18)..(19): Xaa is A or G or absent
EVVMDSMEGIXXXXXXXXXMIQITINSLRTPVXXTPP

SEQ ID NO: 35989 - protein, 41 aa, Artificial Sequence
  Non-cyclic GFR-binding peptide
  MOD_RES (2)..(36)..(37): Xaa is C or S
  MOD_RES (14)..(15)..(16)..(17)..(18): Xaa is A or G
  MOD_RES (19)..(20)..(21)..(22): Xaa is A or G or absent
GXSEVVMDSMEGLXXXXXXXXXMIQITINSLRTPVXXTPPT

SEQ ID NO: 35990 - protein, 31 aa, Artificial Sequence
  Non-cyclic GFR-binding peptide
  MOD_RES (31)..(31): Xaa is C or S
EVVMDSMEGLVVNNAADMIQITINSLRAPVX

SEQ ID NO: 35991 - protein, 33 aa, Artificial Sequence
  Non-cyclic GFR-binding peptide
  MOD_RES (2)..(2): Xaa is C or S
GXRDVVMGSMEGIIIQQKDNMIQMTINSMKTPT

SEQ ID NO: 35992 - protein, 39 aa, Artificial Sequence
  Non-cyclic GFR-binding peptide
  MOD_RES (1)..(34)..(35): Xaa is C or S
  MOD_RES (12)..(13)..(14)..(15)..(16): Xaa is A or G
  MOD_RES (17)..(18)..(19)..(20): Xaa is A or G or absent
XSKVVMSMEGLXXXXXXXXXMIQITINSLDQPVXXPSAS

SEQ ID NO: 35993 - protein, 36 aa, Artificial Sequence
  Non-cyclic GFR-binding peptide
  MOD_RES (2)..(35)..(36): Xaa is C or S
  MOD_RES (13)..(14)..(15)..(16)..(17): Xaa is A or G
  MOD_RES (18)..(19)..(20)..(21): Xaa is A or G or absent
KXSRVIMSMEGLXXXXXXXXXMIQITINSLAQPVXX

SEQ ID NO: 35994 - protein, 40 aa, Artificial Sequence
  Non-cyclic GFR-binding peptide
  MOD_RES (2)..(4)..(35)..(36): Xaa is C or S
LXGXEEVIMSMEGLLLVRGNDMIQMTINSTKVPAXXTSPV

SEQ ID NO: 35995 - protein, 32 aa, Artificial Sequence
  Non-cyclic GFR-binding peptide
  MOD_RES (1)..(1): Xaa is C or S
XSEVVMDSMEGIVVNNASDMIQITINSLRTPV

SEQ ID NO: 35996 - protein, 33 aa, Artificial Sequence
  Non-cyclic GFR-binding peptide
  MOD_RES (33)..(33): Xaa is C or S
  MOD_RES (11)..(12)..(13)..(14)..(15): Xaa is A or G
  MOD_RES (16)..(17)..(18)..(19): Xaa is A or G or absent
EEVIMSMEGLXXXXXXXXXMIQMTINSTKVPAX

SEQ ID NO: 35997 - protein, 35 aa, Artificial Sequence
  Non-cyclic GFR-binding peptide
  MOD_RES (34)..(35): Xaa is C or S
  MOD_RES (12)..(13)..(14)..(15)..(16): Xaa is A or G
  MOD_RES (17)..(18)..(19)..(20): Xaa is A or G or absent
RDVVMGSMEGIXXXXXXXXXMIQMTINSMKTPTXX

SEQ ID NO: 35998 - protein, 44 aa, Artificial Sequence
  Non-cyclic GFR-binding peptide
  MOD_RES (2)..(4)..(38)..(39): Xaa is C or S
  MOD_RES (16)..(17)..(18)..(19)..(20): Xaa is A or G
  MOD_RES (21)..(22)..(23)..(24): Xaa is A or G or absent
RXGXAEVVMDSMEGIXXXXXXXXXMIQITINSLRAPVXXSAPAA

SEQ ID NO: 35999 - protein, 37 aa, Artificial Sequence
  Non-cyclic GFR-binding peptide
  MOD_RES (1)..(3)..(35)..(36): Xaa is C or S
XGXRDVVMGSMEGIIIQQKDNMIQMTINSMKTPTXXP

SEQ ID NO: 36000 - protein, 33 aa, Artificial Sequence
  Non-cyclic GFR-binding peptide
  MOD_RES (33)..(33): Xaa is C or S
  MOD_RES (11)..(12)..(13)..(14)..(15): Xaa is A or G
  MOD_RES (16)..(17)..(18)..(19): Xaa is A or G or absent
EEVIMSMEGIXXXXXXXXXMIQMTINSTKVPAX

SEQ ID NO: 36001 - protein, 43 aa, Artificial Sequence
  Non-cyclic GFR-binding peptide
  MOD_RES (1)..(3)..(37)..(38): Xaa is C or S
  MOD_RES (15)..(16)..(17)..(18)..(19): Xaa is A or G
  MOD_RES (20)..(21)..(22)..(23): Xaa is A or G or absent
XGXSRVVMNSMEGLXXXXXXXXXMIQVTINSLKTPAXXPKPVH

SEQ ID NO: 36002 - protein, 35 aa, Artificial Sequence
  Non-cyclic GFR-binding peptide
  MOD_RES (2)..(33)..(34): Xaa is C or S
KXSKVVMSMEGLVKPTRGVMIQITINSLDQPVXXP

SEQ ID NO: 36003 - protein, 36 aa, Artificial Sequence
  Non-cyclic GFR-binding peptide
  MOD_RES (34)..(35): Xaa is C or S
  MOD_RES (12)..(13)..(14)..(15)..(16): Xaa is A or G
  MOD_RES (17)..(18)..(19)..(20): Xaa is A or G or absent
AEVVMDSMEGLXXXXXXXXXMIQITINSLRAPVXXS

SEQ ID NO: 36004 - protein, 43 aa, Artificial Sequence
  Non-cyclic GFR-binding peptide
  MOD_RES (1)..(3)..(37)..(38): Xaa is C or S
  MOD_RES (15)..(16)..(17)..(18)..(19): Xaa is A or G
  MOD_RES (20)..(21)..(22)..(23): Xaa is A or G or absent
XGXSEVVMDSMEGIXXXXXXXXXMIQITINSLRTPVXXTPPTS

SEQ ID NO: 36005 - protein, 34 aa, Artificial Sequence
  Non-cyclic GFR-binding peptide
  MOD_RES (32)..(33): Xaa is C or S
SEVVMDSMEGLVVNNASDMIQITINSLRTPVXXT

SEQ ID NO: 36006 - protein, 33 aa, Artificial Sequence
  Non-cyclic GFR-binding peptide
  MOD_RES (2)..(2): Xaa is C or S
GXAEVVMDSMEGLVVNNAADMIQITINSLRAPV

SEQ ID NO: 36007 - protein, 33 aa, Artificial Sequence
  Non-cyclic GFR-binding peptide
  MOD_RES (1)..(32)..(33): Xaa is C or S
XEEVIMSMEGLLLVRGNDMIQMTINSTKVPAXX

SEQ ID NO: 36008 - protein, 35 aa, Artificial Sequence
  Non-cyclic GFR-binding peptide
  MOD_RES (31)..(32): Xaa is C or S
DVVMGSMEGLIIQQKDNMIQMTINSMKTPTXXPGA

SEQ ID NO: 36009 - protein, 37 aa, Artificial Sequence
  Non-cyclic GFR-binding peptide
  MOD_RES (33)..(34): Xaa is C or S
  MOD_RES (11)..(12)..(13)..(14)..(15): Xaa is A or G
  MOD_RES (16)..(17)..(18)..(19): Xaa is A or G or absent
EVVMDSMEGLXXXXXXXXXMIQITINSLRTPVXXTPP

SEQ ID NO: 36010 - protein, 31 aa, Artificial Sequence
  Non-cyclic GFR-binding peptide
  MOD_RES (1)..(1): Xaa is C or S
XEEVIMSMEGILLVRGNDMIQMTINSTKVPA

SEQ ID NO: 36011 - protein, 32 aa, Artificial Sequence
  Non-cyclic GFR-binding peptide
  MOD_RES (1)..(32): Xaa is C or S
XSKVVMSMEGLVKPTRGVMIQITINSLDQPVX

SEQ ID NO: 36012 - protein, 35 aa, Artificial Sequence
  Non-cyclic GFR-binding peptide
  MOD_RES (33)..(34): Xaa is C or S
  MOD_RES (11)..(12)..(13)..(14)..(15): Xaa is A or G
  MOD_RES (16)..(17)..(18)..(19): Xaa is A or G or absent
DVVMGSMEGLXXXXXXXXXMIQMTINSMKTPTXXP

SEQ ID NO: 36013 - protein, 38 aa, Artificial Sequence
  Non-cyclic GFR-binding peptide
  MOD_RES (2)..(34)..(35): Xaa is C or S
GXRDVVMGSMEGIIIQQKDNMIQMTINSMKTPTXXPGA

SEQ ID NO: 36014 - protein, 37 aa, Artificial Sequence
  Non-cyclic GFR-binding peptide
  MOD_RES (2)..(4)..(35)..(36): Xaa is C or S
LXGXEEVIMSMEGILLVRGNDMIQMTINSTKVPAXXT

SEQ ID NO: 36015 - protein, 33 aa, Artificial Sequence
  Non-cyclic GFR-binding peptide
  MOD_RES (33)..(33): Xaa is C or S
  MOD_RES (11)..(12)..(13)..(14)..(15): Xaa is A or G
  MOD_RES (16)..(17)..(18)..(19): Xaa is A or G or absent
RVVMNSMEGLXXXXXXXXXMIQVTINSLKTPAX

SEQ ID NO: 36016 - protein, 36 aa, Artificial Sequence
  Non-cyclic GFR-binding peptide
  MOD_RES (1)..(34)..(35): Xaa is C or S
  MOD_RES (12)..(13)..(14)..(15)..(16): Xaa is A or G
  MOD_RES (17)..(18)..(19)..(20): Xaa is A or G or absent
XEEVIMSMEGIXXXXXXXXXMIQMTINSTKVPAXXT

SEQ ID NO: 36017 - protein, 42 aa, Artificial Sequence
  Non-cyclic GFR-binding peptide
  MOD_RES (2)..(4)..(38)..(39): Xaa is C or S
  MOD_RES (16)..(17)..(18)..(19)..(20): Xaa is A or G
  MOD_RES (21)..(22)..(23)..(24): Xaa is A or G or absent
RXGXAEVVMDSMEGIXXXXXXXXXMIQITINSLRAPVXXSAP

SEQ ID NO: 36018 - protein, 33 aa, Artificial Sequence
  Non-cyclic GFR-binding peptide
  MOD_RES (12)..(13)..(14)..(15)..(16): Xaa is A or G
  MOD_RES (17)..(18)..(19)..(20): Xaa is A or G or absent
SEVVMDSMEGIXXXXXXXXXMIQITINSLRTPV

SEQ ID NO: 36019 - protein, 37 aa, Artificial Sequence
  Non-cyclic GFR-binding peptide
  MOD_RES (1)..(3)..(36)..(37): Xaa is C or S
  MOD_RES (14)..(15)..(16)..(17)..(18): Xaa is A or G
  MOD_RES (19)..(20)..(21)..(22): Xaa is A or G or absent
XKXSRVIMSMEGLXXXXXXXXXMIQITINSLAQPVXX

SEQ ID NO: 36020 - protein, 42 aa, Artificial Sequence
  Non-cyclic GFR-binding peptide
  MOD_RES (2)..(4)..(36)..(37): Xaa is C or S
HXGXSRVVMNSMEGIIVNSSDDMIQVTINSLKTPAXXPKPVH

SEQ ID NO: 36021 - protein, 40 aa, Artificial Sequence
  Non-cyclic GFR-binding peptide
  MOD_RES (2)..(4)..(37)..(38): Xaa is C or S
  MOD_RES (15)..(16)..(17)..(18)..(19): Xaa is A or G
  MOD_RES (20)..(21)..(22)..(23): Xaa is A or G or absent
SXKXSRVIMSMEGLXXXXXXXXXMIQITINSLAQPVXXPA

SEQ ID NO: 36022 - protein, 39 aa, Artificial Sequence
  Non-cyclic GFR-binding peptide
  MOD_RES (2)..(4)..(36)..(37): Xaa is C or S
RXGXAEVVMDSMEGIVVNNAADMIQITINSLRAPVXXSA

SEQ ID NO: 36023 - protein, 38 aa, Artificial Sequence
  Non-cyclic GFR-binding peptide
  MOD_RES (2)..(4)..(37)..(38): Xaa is C or S
  MOD_RES (15)..(16)..(17)..(18)..(19): Xaa is A or G
  MOD_RES (20)..(21)..(22)..(23): Xaa is A or G or absent
SXKXSRVIMSMEGLXXXXXXXXXMIQITINSLAQPVXX

SEQ ID NO: 36024 - protein, 42 aa, Artificial Sequence
  Non-cyclic GFR-binding peptide
  MOD_RES (1)..(3)..(37)..(38): Xaa is C or S
  MOD_RES (15)..(16)..(17)..(18)..(19): Xaa is A or G
  MOD_RES (20)..(21)..(22)..(23): Xaa is A or G or absent
XGXSRVVMNSMEGLXXXXXXXXXMIQVTINSLKTPAXXPKPV

SEQ ID NO: 36025 - protein, 40 aa, Artificial Sequence
  Non-cyclic GFR-binding peptide
  MOD_RES (1)..(3)..(37)..(38): Xaa is C or S
  MOD_RES (15)..(16)..(17)..(18)..(19): Xaa is A or G
  MOD_RES (20)..(21)..(22)..(23): Xaa is A or G or absent
XGXRDVVMGSMEGIXXXXXXXXXMIQMTINSMKTPTXXPG

SEQ ID NO: 36026 - protein, 34 aa, Artificial Sequence
  Non-cyclic GFR-binding peptide
  MOD_RES (1)..(1): Xaa is C or S
  MOD_RES (13)..(14)..(15)..(16)..(17): Xaa is A or G
  MOD_RES (18)..(19)..(20)..(21): Xaa is A or G or absent
XRDVVMGSMEGIXXXXXXXXXMIQMTINSMKTPT

SEQ ID NO: 36027 - protein, 35 aa, Artificial Sequence
  Non-cyclic GFR-binding peptide
  MOD_RES (31)..(32): Xaa is C or S
EVVMDSMEGLVVNNAADMIQITINSLRAPVXXSAP

SEQ ID NO: 36028 - protein, 30 aa, Artificial Sequence; identical to SEQ ID NO: 2180
  Non-cyclic GFR-binding peptide

SEQ ID NO: 36029 - protein, 34 aa, Artificial Sequence
  Non-cyclic GFR-binding peptide
  MOD_RES (2)..(33)..(34): Xaa is C or S
KXSKVVMSMEGLVKPTRGVMIQITINSLDQPVXX

SEQ ID NO: 36030 - protein, 36 aa, Artificial Sequence
  Non-cyclic GFR-binding peptide
  MOD_RES (1)..(3)..(35)..(36): Xaa is C or S
XGXSRVVMNSMEGLIVNSSDDMIQVTINSLKTPAXX

SEQ ID NO: 36031 - protein, 39 aa, Artificial Sequence
  Non-cyclic GFR-binding peptide
  MOD_RES (34)..(35): Xaa is C or S
  MOD_RES (12)..(13)..(14)..(15)..(16): Xaa is A or G
  MOD_RES (17)..(18)..(19)..(20): Xaa is A or G or absent
AEVVMDSMEGLXXXXXXXXXMIQITINSLRAPVXXSAPA

SEQ ID NO: 36032 - protein, 40 aa, Artificial Sequence
  Non-cyclic GFR-binding peptide
  MOD_RES (34)..(35): Xaa is C or S
  MOD_RES (12)..(13)..(14)..(15)..(16): Xaa is A or G
  MOD_RES (17)..(18)..(19)..(20): Xaa is A or G or absent
SEVVMDSMEGLXXXXXXXXXMIQITINSLRTPVXXTPPTS

SEQ ID NO: 36033 - protein, 38 aa, Artificial Sequence
  Non-cyclic GFR-binding peptide
  MOD_RES (1)..(3)..(34)..(35): Xaa is C or S
XKXSKVVMSMEGLVKPTRGVMIQITINSLDQPVXXPSA

SEQ ID NO: 36034 - protein, 37 aa, Artificial Sequence
  Non-cyclic GFR-binding peptide
  MOD_RES (2)..(4)..(35)..(36): Xaa is C or S
SXKXSKVVMSMEGLVKPTRGVMIQITINSLDQPVXXP

SEQ ID NO: 36035 - protein, 34 aa, Artificial Sequence
  Non-cyclic GFR-binding peptide
  MOD_RES (31)..(32): Xaa is C or S
SRVIMSMEGLVKPKRGVMIQITINSLAQPVXXPA

SEQ ID NO: 36036 - protein, 41 aa, Artificial Sequence
  Non-cyclic GFR-binding peptide
  MOD_RES (2)..(4)..(35)..(36): Xaa is C or S
LXGXEEVIMSMEGLLLVRGNDMIQMTINSTKVPAXXTSPVR

SEQ ID NO: 36037 - protein, 40 aa, Artificial Sequence
  Non-cyclic GFR-binding peptide
  MOD_RES (1)..(35)..(36): Xaa is C or S
  MOD_RES (13)..(14)..(15)..(16)..(17): Xaa is A or G
  MOD_RES (18)..(19)..(20)..(21): Xaa is A or G or absent
XSEVVMDSMEGIXXXXXXXXXMIQITINSLRTPVXXTPPT

SEQ ID NO: 36038 - protein, 34 aa, Artificial Sequence
  Non-cyclic GFR-binding peptide
  MOD_RES (32)..(33): Xaa is C or S
RDVVMGSMEGLIIQQKDNMIQMTINSMKTPTXXP

SEQ ID NO: 36039 - protein, 38 aa, Artificial Sequence
  Non-cyclic GFR-binding peptide
  MOD_RES (1)..(33)..(34): Xaa is C or S
XRDVVMGSMEGLIIQQKDNMIQMTINSMKTPTXXPGAS

SEQ ID NO: 36040 - protein, 37 aa, Artificial Sequence
  Non-cyclic GFR-binding peptide
  MOD_RES (33)..(34): Xaa is C or S
  MOD_RES (11)..(12)..(13)..(14)..(15): Xaa is A or G
  MOD_RES (16)..(17)..(18)..(19): Xaa is A or G or absent
EVVMDSMEGLXXXXXXXXXMIQITINSLRAPVXXSAP

SEQ ID NO: 36041 - protein, 40 aa, Artificial Sequence
  Non-cyclic GFR-binding peptide
  MOD_RES (34)..(35): Xaa is C or S
  MOD_RES (12)..(13)..(14)..(15)..(16): Xaa is A or G
  MOD_RES (17)..(18)..(19)..(20): Xaa is A or G or absent
AEVVMDSMEGLXXXXXXXXXMIQITINSLRAPVXXSAPAA

SEQ ID NO: 36042 - protein, 39 aa, Artificial Sequence
  Non-cyclic GFR-binding peptide
  MOD_RES (1)..(35)..(36): Xaa is C or S
  MOD_RES (13)..(14)..(15)..(16)..(17): Xaa is A or G
  MOD_RES (18)..(19)..(20)..(21): Xaa is A or G or absent
XRDVVMGSMEGIXXXXXXXXXMIQMTINSMKTPTXXPGA

SEQ ID NO: 36043 - protein, 39 aa, Artificial Sequence
  Non-cyclic GFR-binding peptide
  MOD_RES (1)..(34)..(35): Xaa is C or S
  MOD_RES (12)..(13)..(14)..(15)..(16): Xaa is A or G
  MOD_RES (17)..(18)..(19)..(20): Xaa is A or G or absent
XSRVIMSMEGLXXXXXXXXXMIQITINSLAQPVXXPAAS

SEQ ID NO: 36044 - protein, 34 aa, Artificial Sequence
  Non-cyclic GFR-binding peptide
  MOD_RES (2)..(33)..(34): Xaa is C or S
GXEEVIMSMEGLLLVRGNDMIQMTINSTKVPAXX

SEQ ID NO: 36045 - protein, 32 aa, Artificial Sequence
  Non-cyclic GFR-binding peptide
  MOD_RES (1)..(1): Xaa is C or S
XAEVVMDSMEGIVVNNAADMIQITINSLRAPV

SEQ ID NO: 36046 - protein, 32 aa, Artificial Sequence
  Non-cyclic GFR-binding peptide
  MOD_RES (31)..(32): Xaa is C or S
EVVMDSMEGIVVNNASDMIQITINSLRTPVXX

SEQ ID NO: 36047 - protein, 34 aa, Artificial Sequence
  Non-cyclic GFR-binding peptide
  MOD_RES (32)..(33): Xaa is C or S
AEVVMDSMEGIVVNNAADMIQITINSLRAPVXXS

SEQ ID NO: 36048 - protein, 34 aa, Artificial Sequence
  Non-cyclic GFR-binding peptide
  MOD_RES (2)..(33)..(34): Xaa is C or S
GXEEVIMSMEGILLVRGNDMIQMTINSTKVPAXX

SEQ ID NO: 36049 - protein, 37 aa, Artificial Sequence
  Non-cyclic GFR-binding peptide
  MOD_RES (2)..(4): Xaa is C or S
  MOD_RES (16)..(17)..(18)..(19)..(20): Xaa is A or G
  MOD_RES (21)..(22)..(23)..(24): Xaa is A or G or absent
RXGXSEVVMDSMEGLXXXXXXXXXMIQITINSLRTPV

SEQ ID NO: 36050 - protein, 38 aa, Artificial Sequence
  Non-cyclic GFR-binding peptide
  MOD_RES (1)..(3)..(36)..(37): Xaa is C or S
  MOD_RES (14)..(15)..(16)..(17)..(18): Xaa is A or G
  MOD_RES (19)..(20)..(21)..(22): Xaa is A or G or absent
XGXEEVIMSMEGLXXXXXXXXXMIQMTINSTKVPAXXT

SEQ ID NO: 36051 - protein, 37 aa, Artificial Sequence
  Non-cyclic GFR-binding peptide
  MOD_RES (33)..(34): Xaa is C or S
  MOD_RES (11)..(12)..(13)..(14)..(15): Xaa is A or G
  MOD_RES (16)..(17)..(18)..(19): Xaa is A or G or absent
RVVMNSMEGLXXXXXXXXXMIQVTINSLKTPAXXPKP

SEQ ID NO: 36052 - protein, 35 aa, Artificial Sequence
  Non-cyclic GFR-binding peptide
  MOD_RES (33)..(34): Xaa is C or S
  MOD_RES (11)..(12)..(13)..(14)..(15): Xaa is A or G
  MOD_RES (16)..(17)..(18)..(19): Xaa is A or G or absent
EEVIMSMEGLXXXXXXXXXMIQMTINSTKVPAXXT

SEQ ID NO: 36053 - protein, 44 aa, Artificial Sequence
  Non-cyclic GFR-binding peptide
  MOD_RES (2)..(4)..(38)..(39): Xaa is C or S
  MOD_RES (16)..(17)..(18)..(19)..(20): Xaa is A or G
  MOD_RES (21)..(22)..(23)..(24): Xaa is A or G or absent
SXGXRDVVMGSMEGLXXXXXXXXXMIQMTINSMKTPTXXPGASG

SEQ ID NO: 36054 - protein, 43 aa, Artificial Sequence
  Non-cyclic GFR-binding peptide
  MOD_RES (1)..(3)..(37)..(38): Xaa is C or S
  MOD_RES (15)..(16)..(17)..(18)..(19): Xaa is A or G
  MOD_RES (20)..(21)..(22)..(23): Xaa is A or G or absent
XGXAEVVMDSMEGLXXXXXXXXXMIQITINSLRAPVXXSAPAA

SEQ ID NO: 36055 - protein, 37 aa, Artificial Sequence
  Non-cyclic GFR-binding peptide
  MOD_RES (2)..(34)..(35): Xaa is C or S
GXRDVVMGSMEGIIIQQKDNMIQMTINSMKTPTXXPG

SEQ ID NO: 36056 - protein, 33 aa, Artificial Sequence
  Non-cyclic GFR-binding peptide
  MOD_RES (31)..(32): Xaa is C or S
EVVMDSMEGLVVNNAADMIQITINSLRAPVXXS

SEQ ID NO: 36057 - protein, 38 aa, Artificial Sequence
  Non-cyclic GFR-binding peptide
  MOD_RES (1)..(35)..(36): Xaa is C or S
  MOD_RES (13)..(14)..(15)..(16)..(17): Xaa is A or G
  MOD_RES (18)..(19)..(20)..(21): Xaa is A or G or absent
XRDVVMGSMEGIXXXXXXXXXMIQMTINSMKTPTXXPG

SEQ ID NO: 36058 - protein, 37 aa, Artificial Sequence
  Non-cyclic GFR-binding peptide
  MOD_RES (2)..(34)..(35): Xaa is C or S
GXAEVVMDSMEGLVVNNAADMIQITINSLRAPVXXSA

SEQ ID NO: 36059 - protein, 40 aa, Artificial Sequence
  Non-cyclic GFR-binding peptide
  MOD_RES (2)..(4)..(36)..(37): Xaa is C or S
RXGXAEVVMDSMEGLVVNNAADMIQITINSLRAPVXXSAP

SEQ ID NO: 36060 - protein, 39 aa, Artificial Sequence
  Non-cyclic GFR-binding peptide
  MOD_RES (2)..(4)..(37)..(38): Xaa is C or S
  MOD_RES (15)..(16)..(17)..(18)..(19): Xaa is A or G
  MOD_RES (20)..(21)..(22)..(23): Xaa is A or G or absent
SXKXSRVIMSMEGLXXXXXXXXXMIQITINSLAQPVXXP

SEQ ID NO: 36061 - protein, 32 aa, Artificial Sequence
  Non-cyclic GFR-binding peptide
  MOD_RES (1)..(32): Xaa is C or S
XEEVIMSMEGILLVRGNDMIQMTINSTKVPAX

SEQ ID NO: 36062 - protein, 39 aa, Artificial Sequence
  Non-cyclic GFR-binding peptide
  MOD_RES (2)..(36)..(37): Xaa is C or S
  MOD_RES (14)..(15)..(16)..(17)..(18): Xaa is A or G
  MOD_RES (19)..(20)..(21)..(22): Xaa is A or G or absent
GXAEVVMDSMEGLXXXXXXXXXMIQITINSLRAPVXXSA

SEQ ID NO: 36063 - protein, 41 aa, Artificial Sequence
  Non-cyclic GFR-binding peptide
  MOD_RES (1)..(3)..(37)..(38): Xaa is C or S
  MOD_RES (15)..(16)..(17)..(18)..(19): Xaa is A or G
  MOD_RES (20)..(21)..(22)..(23): Xaa is A or G or absent
XGXSEVVMDSMEGIXXXXXXXXXMIQITINSLRTPVXXTPP

SEQ ID NO: 36064 - protein, 31 aa, Artificial Sequence
  Non-cyclic GFR-binding peptide
  MOD_RES (1)..(1): Xaa is C or S
XSKVVMSMEGLVKPTRGVMIQITINSLDQPV

SEQ ID NO: 36065 - protein, 36 aa, Artificial Sequence
  Non-cyclic GFR-binding peptide
  MOD_RES (33)..(34): Xaa is C or S
  MOD_RES (11)..(12)..(13)..(14)..(15): Xaa is A or G
  MOD_RES (16)..(17)..(18)..(19): Xaa is A or G or absent
DVVMGSMEGLXXXXXXXXXMIQMTINSMKTPTXXPG

SEQ ID NO: 36066 - protein, 39 aa, Artificial Sequence
  Non-cyclic GFR-binding peptide
  MOD_RES (2)..(4)..(38)..(39): Xaa is C or S
  MOD_RES (16)..(17)..(18)..(19)..(20): Xaa is A or G
  MOD_RES (21)..(22)..(23)..(24): Xaa is A or G or absent
RXGXSEVVMDSMEGIXXXXXXXXXMIQITINSLRTPVXX

SEQ ID NO: 36067 - protein, 40 aa, Artificial Sequence
  Non-cyclic GFR-binding peptide
  MOD_RES (1)..(3)..(35)..(36): Xaa is C or S
XGXSRVVMNSMEGLIVNSSDDMIQVTINSLKTPAXXPKPV

SEQ ID NO: 36068 - protein, 38 aa, Artificial Sequence
  Non-cyclic GFR-binding peptide
  MOD_RES (2)..(4)..(38): Xaa is C or S
  MOD_RES (16)..(17)..(18)..(19)..(20): Xaa is A or G
  MOD_RES (21)..(22)..(23)..(24): Xaa is A or G or absent
RXGXAEVVMDSMEGIXXXXXXXXXMIQITINSLRAPVX

SEQ ID NO: 36069 - protein, 37 aa, Artificial Sequence
  Non-cyclic GFR-binding peptide
  MOD_RES (2)..(34)..(35): Xaa is C or S
GXSRVVMNSMEGLIVNSSDDMIQVTINSLKTPAXXPK

SEQ ID NO: 36070 - protein, 34 aa, Artificial Sequence
  Non-cyclic GFR-binding peptide
  MOD_RES (2)..(34): Xaa is C or S
GXRDVVMGSMEGLIIQQKDNMIQMTINSMKTPTX

SEQ ID NO: 36071 - protein, 42 aa, Artificial Sequence
  Non-cyclic GFR-binding peptide
  MOD_RES (2)..(4)..(37)..(38): Xaa is C or S
  MOD_RES (15)..(16)..(17)..(18)..(19): Xaa is A or G
  MOD_RES (20)..(21)..(22)..(23): Xaa is A or G or absent
SXKXSRVIMSMEGLXXXXXXXXXMIQITINSLAQPVXXPAAS

SEQ ID NO: 36072 - protein, 38 aa, Artificial Sequence
  Non-cyclic GFR-binding peptide
  MOD_RES (2)..(35)..(36): Xaa is C or S
  MOD_RES (13)..(14)..(15)..(16)..(17): Xaa is A or G
  MOD_RES (18)..(19)..(20)..(21): Xaa is A or G or absent
KXSKVIMSMEGLXXXXXXXXXMIQITINSLDQSVXXPS

SEQ ID NO: 36073 - protein, 38 aa, Artificial Sequence
  Non-cyclic GFR-binding peptide
  MOD_RES (2)..(36)..(37): Xaa is C or S
  MOD_RES (14)..(15)..(16)..(17)..(18): Xaa is A or G
  MOD_RES (19)..(20)..(21)..(22): Xaa is A or G or absent
GXAEVVMDSMEGIXXXXXXXXXMIQITINSLRAPVXXS

SEQ ID NO: 36074 - protein, 37 aa, Artificial Sequence
  Non-cyclic GFR-binding peptide
  MOD_RES (2)..(33)..(34): Xaa is C or S
KXSRVIMSMEGLVKPKRGVMIQITINSLAQPVXXPAA

SEQ ID NO: 36075 - protein, 35 aa, Artificial Sequence
  Non-cyclic GFR-binding peptide
  MOD_RES (2)..(4)..(35): Xaa is C or S
LXGXEEVIMSMEGILLVRGNDMIQMTINSTKVPAX

SEQ ID NO: 36076 - protein, 33 aa, Artificial Sequence
  Non-cyclic GFR-binding peptide
  MOD_RES (1)..(33): Xaa is C or S
XRDVVMGSMEGLIIQQKDNMIQMTINSMKTPTX

SEQ ID NO: 36077 - protein, 35 aa, Artificial Sequence
  Non-cyclic GFR-binding peptide
  MOD_RES (2)..(2): Xaa is C or S
  MOD_RES (14)..(15)..(16)..(17)..(18): Xaa is A or G
  MOD_RES (19)..(20)..(21)..(22): Xaa is A or G or absent
GXAEVVMDSMEGIXXXXXXXXXMIQITINSLRAPV

SEQ ID NO: 36078 - protein, 38 aa, Artificial Sequence
  Non-cyclic GFR-binding peptide
  MOD_RES (1)..(3)..(35)..(36): Xaa is C or S
XGXSEVVMDSMEGIVVNNASDMIQITINSLRTPVXXTP

SEQ ID NO: 36079 - protein, 34 aa, Artificial Sequence
  Non-cyclic GFR-binding peptide
  MOD_RES (1)..(33)..(34): Xaa is C or S
XAEVVMDSMEGIVVNNAADMIQITINSLRAPVXX

SEQ ID NO: 36080 - protein, 36 aa, Artificial Sequence
  Non-cyclic GFR-binding peptide
  MOD_RES (2)..(4)..(36): Xaa is C or S
RXGXAEVVMDSMEGLVVNNAADMIQITINSLRAPVX

SEQ ID NO: 36081 - protein, 36 aa, Artificial Sequence
  Non-cyclic GFR-binding peptide
  MOD_RES (33)..(34): Xaa is C or S
  MOD_RES (11)..(12)..(13)..(14)..(15): Xaa is A or G
  MOD_RES (16)..(17)..(18)..(19): Xaa is A or G or absent
SKVVMSMEGLXXXXXXXXXMIQITINSLDQPVXXPS

SEQ ID NO: 36082 - protein, 41 aa, Artificial Sequence
  Non-cyclic GFR-binding peptide
  MOD_RES (2)..(4)..(38)..(39): Xaa is C or S
  MOD_RES (16)..(17)..(18)..(19)..(20): Xaa is A or G
  MOD_RES (21)..(22)..(23)..(24): Xaa is A or G or absent
RXGXSEVVMDSMEGLXXXXXXXXXMIQITINSLRTPVXXTP

SEQ ID NO: 36083 - protein, 41 aa, Artificial Sequence
  Non-cyclic GFR-binding peptide
  MOD_RES (1)..(3)..(37)..(38): Xaa is C or S
  MOD_RES (15)..(16)..(17)..(18)..(19): Xaa is A or G
  MOD_RES (20)..(21)..(22)..(23): Xaa is A or G or absent
XGXSEVVMDSMEGLXXXXXXXXXMIQITINSLRTPVXXTPP

SEQ ID NO: 36084 - protein, 36 aa, Artificial Sequence
  Non-cyclic GFR-binding peptide
  MOD_RES (1)..(32)..(33): Xaa is C or S
XEEVIMSMEGILLVRGNDMIQMTINSTKVPAXXTSP

SEQ ID NO: 36085 - protein, 37 aa, Artificial Sequence
  Non-cyclic GFR-binding peptide
  MOD_RES (2)..(34)..(35): Xaa is C or S
GXAEVVMDSMEGIVVNNAADMIQITINSLRAPVXXSA

SEQ ID NO: 36086 - protein, 40 aa, Artificial Sequence
  Non-cyclic GFR-binding peptide
  MOD_RES (2)..(4)..(38)..(39): Xaa is C or S
  MOD_RES (16)..(17)..(18)..(19)..(20): Xaa is A or G
  MOD_RES (21)..(22)..(23)..(24): Xaa is A or G or absent
RXGXAEVVMDSMEGIXXXXXXXXXMIQITINSLRAPVXXS

SEQ ID NO: 36087 - protein, 38 aa, Artificial Sequence
  Non-cyclic GFR-binding peptide
  MOD_RES (1)..(34)..(35): Xaa is C or S
  MOD_RES (12)..(13)..(14)..(15)..(16): Xaa is A or G
  MOD_RES (17)..(18)..(19)..(20): Xaa is A or G or absent
XEEVIMSMEGLXXXXXXXXXMIQMTINSTKVPAXXTSP

SEQ ID NO: 36088 - protein, 39 aa, Artificial Sequence
  Non-cyclic GFR-binding peptide
  MOD_RES (1)..(3)..(36)..(37): Xaa is C or S
  MOD_RES (14)..(15)..(16)..(17)..(18): Xaa is A or G
  MOD_RES (19)..(20)..(21)..(22): Xaa is A or G or absent
XGXEEVIMSMEGIXXXXXXXXXMIQMTINSTKVPAXXTS

SEQ ID NO: 36089 - protein, 38 aa, Artificial Sequence
  Non-cyclic GFR-binding peptide
  MOD_RES (2)..(36)..(37): Xaa is C or S
  MOD_RES (14)..(15)..(16)..(17)..(18): Xaa is A or G
  MOD_RES (19)..(20)..(21)..(22): Xaa is A or G or absent
GXRDVVMGSMEGIXXXXXXXXXMIQMTINSMKTPTXXP

SEQ ID NO: 36090 - protein, 39 aa, Artificial Sequence
  Non-cyclic GFR-binding peptide
  MOD_RES (2)..(4)..(38)..(39): Xaa is C or S
  MOD_RES (16)..(17)..(18)..(19)..(20): Xaa is A or G
  MOD_RES (21)..(22)..(23)..(24): Xaa is A or G or absent
RXGXAEVVMDSMEGLXXXXXXXXXMIQITINSLRAPVXX

SEQ ID NO: 36091 - protein, 39 aa, Artificial Sequence
  Non-cyclic GFR-binding peptide
  MOD_RES (2)..(4)..(38)..(39): Xaa is C or S
  MOD_RES (16)..(17)..(18)..(19)..(20): Xaa is A or G
  MOD_RES (21)..(22)..(23)..(24): Xaa is A or G or absent
SXGXRDVVMGSMEGIXXXXXXXXXMIQMTINSMKTPTXX

SEQ ID NO: 36092 - protein, 37 aa, Artificial Sequence
  Non-cyclic GFR-binding peptide
  MOD_RES (2)..(36)..(37): Xaa is C or S
  MOD_RES (14)..(15)..(16)..(17)..(18): Xaa is A or G
  MOD_RES (19)..(20)..(21)..(22): Xaa is A or G or absent
GXRDVVMGSMEGLXXXXXXXXXMIQMTINSMKTPTXX

SEQ ID NO: 36093 - protein, 31 aa, Artificial Sequence
  Non-cyclic GFR-binding peptide
  MOD_RES (31)..(31): Xaa is C or S
EVVMDSMEGLVVNNASDMIQITINSLRTPVX

SEQ ID NO: 36094 - protein, 34 aa, Artificial Sequence
  Non-cyclic GFR-binding peptide
  MOD_RES (33)..(34): Xaa is C or S
  MOD_RES (11)..(12)..(13)..(14)..(15): Xaa is A or G
  MOD_RES (16)..(17)..(18)..(19): Xaa is A or G or absent
EVVMDSMEGIXXXXXXXXXMIQITINSLRAPVXX

SEQ ID NO: 36095 - protein, 30 aa, Artificial Sequence; identical to SEQ ID NO: 2164
  Non-cyclic GFR-binding peptide

SEQ ID NO: 36096 - protein, 33 aa, Artificial Sequence
  Non-cyclic GFR-binding peptide
  MOD_RES (2)..(33): Xaa is C or S
GXEEVIMSMEGLLLVRGNDMIQMTINSTKVPAX

SEQ ID NO: 36097 - protein, 36 aa, Artificial Sequence
  Non-cyclic GFR-binding peptide
  MOD_RES (2)..(36): Xaa is C or S
  MOD_RES (14)..(15)..(16)..(17)..(18): Xaa is A or G
  MOD_RES (19)..(20)..(21)..(22): Xaa is A or G or absent
GXRDVVMGSMEGIXXXXXXXXXMIQMTINSMKTPTX

SEQ ID NO: 36098 - protein, 39 aa, Artificial Sequence
  Non-cyclic GFR-binding peptide
  MOD_RES (2)..(35)..(36): Xaa is C or S
  MOD_RES (13)..(14)..(15)..(16)..(17): Xaa is A or G
  MOD_RES (18)..(19)..(20)..(21): Xaa is A or G or absent
KXSKVIMSMEGLXXXXXXXXXMIQITINSLDQSVXXPSA

SEQ ID NO: 36099 - protein, 36 aa, Artificial Sequence
  Non-cyclic GFR-binding peptide
  MOD_RES (2)..(4): Xaa is C or S
  MOD_RES (15)..(16)..(17)..(18)..(19): Xaa is A or G
  MOD_RES (20)..(21)..(22)..(23): Xaa is A or G or absent
SXKXSRVIMSMEGLXXXXXXXXXMIQITINSLAQPV

SEQ ID NO: 36100 - protein, 33 aa, Artificial Sequence
  Non-cyclic GFR-binding peptide
  MOD_RES (32)..(33): Xaa is C or S
AEVVMDSMEGLVVNNAADMIQITINSLRAPVXX

SEQ ID NO: 36101 - protein, 37 aa, Artificial Sequence
  Non-cyclic GFR-binding peptide
  MOD_RES (2)..(4): Xaa is C or S
  MOD_RES (16)..(17)..(18)..(19)..(20): Xaa is A or G
  MOD_RES (21)..(22)..(23)..(24): Xaa is A or G or absent
HXGXSRVVMNSMEGLXXXXXXXXXMIQVTINSLKTPA

SEQ ID NO: 36102 - protein, 38 aa, Artificial Sequence
  Non-cyclic GFR-binding peptide
  MOD_RES (1)..(33)..(34): Xaa is C or S
XRDVVMGSMEGIIIQQKDNMIQMTINSMKTPTXXPGAS

SEQ ID NO: 36103 - protein, 33 aa, Artificial Sequence
  Non-cyclic GFR-binding peptide
  MOD_RES (33)..(33): Xaa is C or S
  MOD_RES (11)..(12)..(13)..(14)..(15): Xaa is A or G
  MOD_RES (16)..(17)..(18)..(19): Xaa is A or G or absent
EVVMDSMEGIXXXXXXXXXMIQITINSLRTPVX

SEQ ID NO: 36104 - protein, 36 aa, Artificial Sequence
  Non-cyclic GFR-binding peptide
  MOD_RES (2)..(4)..(35)..(36): Xaa is C or S
SXKXSRVIMSMEGLVKPKRGVMIQITINSLAQPVXX

SEQ ID NO: 36105 - protein, 35 aa, Artificial Sequence
  Non-cyclic GFR-binding peptide
  MOD_RES (2)..(4)..(35): Xaa is C or S
LXGXEEVIMSMEGLLLVRGNDMIQMTINSTKVPAX

SEQ ID NO: 36106 - protein, 43 aa, Artificial Sequence
  Non-cyclic GFR-binding peptide
  MOD_RES (2)..(4)..(38)..(39): Xaa is C or S
  MOD_RES (16)..(17)..(18)..(19)..(20): Xaa is A or G
  MOD_RES (21)..(22)..(23)..(24): Xaa is A or G or absent
RXGXSEVVMDSMEGLXXXXXXXXXMIQITINSLRTPVXXTPPT

SEQ ID NO: 36107 - protein, 37 aa, Artificial Sequence
  Non-cyclic GFR-binding peptide
  MOD_RES (2)..(4): Xaa is C or S
  MOD_RES (16)..(17)..(18)..(19)..(20): Xaa is A or G
  MOD_RES (21)..(22)..(23)..(24): Xaa is A or G or absent
SXGXRDVVMGSMEGLXXXXXXXXXMIQMTINSMKTPT

SEQ ID NO: 36108 - protein, 32 aa, Artificial Sequence
  Non-cyclic GFR-binding peptide
  MOD_RES (1)..(32): Xaa is C or S
XSKVIMSMEGLIKPTKGIMIQITINSLDQSVX

SEQ ID NO: 36109 - protein, 35 aa, Artificial Sequence
  Non-cyclic GFR-binding peptide
  MOD_RES (34)..(35): Xaa is C or S
  MOD_RES (12)..(13)..(14)..(15)..(16): Xaa is A or G
  MOD_RES (17)..(18)..(19)..(20): Xaa is A or G or absent
SEVVMDSMEGIXXXXXXXXXMIQITINSLRTPVXX

SEQ ID NO: 36110 - protein, 38 aa, Artificial Sequence
  Non-cyclic GFR-binding peptide
  MOD_RES (2)..(4)..(35)..(36): Xaa is C or S
SXKXSKVVMSMEGLVKPTRGVMIQITINSLDQPVXXPS

SEQ ID NO: 36111 - protein, 33 aa, Artificial Sequence
  Non-cyclic GFR-binding peptide
  MOD_RES (33)..(33): Xaa is C or S
  MOD_RES (11)..(12)..(13)..(14)..(15): Xaa is A or G
  MOD_RES (16)..(17)..(18)..(19): Xaa is A or G or absent
EVVMDSMEGLXXXXXXXXXMIQITINSLRTPVX

SEQ ID NO: 36112 - protein, 34 aa, Artificial Sequence
  Non-cyclic GFR-binding peptide
  MOD_RES (1)..(34): Xaa is C or S
  MOD_RES (12)..(13)..(14)..(15)..(16): Xaa is A or G
  MOD_RES (17)..(18)..(19)..(20): Xaa is A or G or absent
XSKVIMSMEGLXXXXXXXXXMIQITINSLDQSVX

SEQ ID NO: 36113 - protein, 39 aa, Artificial Sequence
  Non-cyclic GFR-binding peptide
  MOD_RES (2)..(34)..(35): Xaa is C or S
GXAEVVMDSMEGIVVNNAADMIQITINSLRAPVXXSAPA

SEQ ID NO: 36114 - protein, 34 aa, Artificial Sequence
  Non-cyclic GFR-binding peptide
  MOD_RES (1)..(33)..(34): Xaa is C or S
XRDVVMGSMEGLIIQQKDNMIQMTINSMKTPTXX

SEQ ID NO: 36115 - protein, 42 aa, Artificial Sequence
  Non-cyclic GFR-binding peptide
  MOD_RES (2)..(36)..(37): Xaa is C or S
  MOD_RES (14)..(15)..(16)..(17)..(18): Xaa is A or G
  MOD_RES (19)..(20)..(21)..(22): Xaa is A or G or absent
GXRDVVMGSMEGLXXXXXXXXXMIQMTINSMKTPTXXPGASG

SEQ ID NO: 36116 - protein, 34 aa, Artificial Sequence
  Non-cyclic GFR-binding peptide
  MOD_RES (1)..(33)..(34): Xaa is C or S
XRDVVMGSMEGIIIQQKDNMIQMTINSMKTPTXX

SEQ ID NO: 36117 - protein, 33 aa, Artificial Sequence
  Non-cyclic GFR-binding peptide
  MOD_RES (1)..(33): Xaa is C or S
XAEVVMDSMEGIVVNNAADMIQITINSLRAPVX

SEQ ID NO: 36118 - protein, 37 aa, Artificial Sequence
  Non-cyclic GFR-binding peptide
  MOD_RES (2)..(4)..(36)..(37): Xaa is C or S
SXGXRDVVMGSMEGLIIQQKDNMIQMTINSMKTPTXX

SEQ ID NO: 36119 - protein, 37 aa, Artificial Sequence
  Non-cyclic GFR-binding peptide
  MOD_RES (1)..(3)..(37): Xaa is C or S
  MOD_RES (15)..(16)..(17)..(18)..(19): Xaa is A or G
  MOD_RES (20)..(21)..(22)..(23): Xaa is A or G or absent
XGXAEVVMDSMEGIXXXXXXXXXMIQITINSLRAPVX

SEQ ID NO: 36120 - protein, 35 aa, Artificial Sequence
  Non-cyclic GFR-binding peptide
  MOD_RES (1)..(35): Xaa is C or S
  MOD_RES (13)..(14)..(15)..(16)..(17): Xaa is A or G
  MOD_RES (18)..(19)..(20)..(21): Xaa is A or G or absent
XSEVVMDSMEGLXXXXXXXXXMIQITINSLRTPVX

SEQ ID NO: 36121 - protein, 35 aa, Artificial Sequence
  Non-cyclic GFR-binding peptide
  MOD_RES (1)..(35): Xaa is C or S
  MOD_RES (13)..(14)..(15)..(16)..(17): Xaa is A or G
  MOD_RES (18)..(19)..(20)..(21): Xaa is A or G or absent
XSEVVMDSMEGIXXXXXXXXXMIQITINSLRTPVX

SEQ ID NO: 36122 - protein, 33 aa, Artificial Sequence
  Non-cyclic GFR-binding peptide
  MOD_RES (1)..(33): Xaa is C or S
XAEVVMDSMEGLVVNNAADMIQITINSLRAPVX

SEQ ID NO: 36123 - protein, 37 aa, Artificial Sequence
  Non-cyclic GFR-binding peptide
  MOD_RES (1)..(3)..(34)..(35): Xaa is C or S
XGXEEVIMSMEGLLLVRGNDMIQMTINSTKVPAXXTS

SEQ ID NO: 36124 - protein, 35 aa, Artificial Sequence
  Non-cyclic GFR-binding peptide
  MOD_RES (2)..(35): Xaa is C or S
  MOD_RES (13)..(14)..(15)..(16)..(17): Xaa is A or G
  MOD_RES (18)..(19)..(20)..(21): Xaa is A or G or absent
KXSRVIMSMEGLXXXXXXXXXMIQITINSLAQPVX

SEQ ID NO: 36125 - protein, 32 aa, Artificial Sequence
  Non-cyclic GFR-binding peptide
  MOD_RES (1)..(1): Xaa is C or S
XSEVVMDSMEGLVVNNASDMIQITINSLRTPV

SEQ ID NO: 36126 - protein, 39 aa, Artificial Sequence
  Non-cyclic GFR-binding peptide
  MOD_RES (1)..(3)..(35)..(36): Xaa is C or S
XGXSEVVMDSMEGIVVNNASDMIQITINSLRTPVXXTPP

SEQ ID NO: 36127 - protein, 39 aa, Artificial Sequence
  Non-cyclic GFR-binding peptide
  MOD_RES (2)..(4)..(36)..(37): Xaa is C or S
RXGXSEVVMDSMEGLVVNNASDMIQITINSLRTPVXXTP

SEQ ID NO: 36128 - protein, 36 aa, Artificial Sequence
  Non-cyclic GFR-binding peptide
  MOD_RES (33)..(34): Xaa is C or S
  MOD_RES (11)..(12)..(13)..(14)..(15): Xaa is A or G
  MOD_RES (16)..(17)..(18)..(19): Xaa is A or G or absent
DVVMGSMEGIXXXXXXXXXMIQMTINSMKTPTXXPG

SEQ ID NO: 36129 - protein, 36 aa, Artificial Sequence
  Non-cyclic GFR-binding peptide
  MOD_RES (2)..(4)..(35)..(36): Xaa is C or S
SXKXSKVVMSMEGLVKPTRGVMIQITINSLDQPVXX

SEQ ID NO: 36130 - protein, 33 aa, Artificial Sequence
  Non-cyclic GFR-binding peptide
  MOD_RES (1)..(1): Xaa is C or S
  MOD_RES (12)..(13)..(14)..(15)..(16): Xaa is A or G
  MOD_RES (17)..(18)..(19)..(20): Xaa is A or G or absent
XSKVVMSMEGLXXXXXXXXXMIQITINSLDQPV

SEQ ID NO: 36131 - protein, 35 aa, Artificial Sequence
  Non-cyclic GFR-binding peptide
  MOD_RES (33)..(34): Xaa is C or S
  MOD_RES (11)..(12)..(13)..(14)..(15): Xaa is A or G
  MOD_RES (16)..(17)..(18)..(19): Xaa is A or G or absent
EEVIMSMEGIXXXXXXXXXMIQMTINSTKVPAXXT

SEQ ID NO: 36132 - protein, 37 aa, Artificial Sequence
  Non-cyclic GFR-binding peptide
  MOD_RES (32)..(33): Xaa is C or S
SEVVMDSMEGLVVNNASDMIQITINSLRTPVXXTPPT

SEQ ID NO: 36133 - protein, 41 aa, Artificial Sequence
  Non-cyclic GFR-binding peptide
  MOD_RES (2)..(36)..(37): Xaa is C or S
  MOD_RES (14)..(15)..(16)..(17)..(18): Xaa is A or G
  MOD_RES (19)..(20)..(21)..(22): Xaa is A or G or absent
GXAEVVMDSMEGLXXXXXXXXXMIQITINSLRAPVXXSAPA

SEQ ID NO: 36134 - protein, 38 aa, Artificial Sequence
  Non-cyclic GFR-binding peptide
  MOD_RES (32)..(33): Xaa is C or S
SEVVMDSMEGIVVNNASDMIQITINSLRTPVXXTPPTS

SEQ ID NO: 36135 - protein, 41 aa, Artificial Sequence
  Non-cyclic GFR-binding peptide
  MOD_RES (1)..(3)..(37)..(38): Xaa is C or S
  MOD_RES (15)..(16)..(17)..(18)..(19): Xaa is A or G
  MOD_RES (20)..(21)..(22)..(23): Xaa is A or G or absent
XGXSRVVMNSMEGLXXXXXXXXXMIQVTINSLKTPAXXPKP

SEQ ID NO: 36136 - protein, 35 aa, Artificial Sequence
  Non-cyclic GFR-binding peptide
  MOD_RES (1)..(34)..(35): Xaa is C or S
  MOD_RES (12)..(13)..(14)..(15)..(16): Xaa is A or G
  MOD_RES (17)..(18)..(19)..(20): Xaa is A or G or absent
XEEVIMSMEGLXXXXXXXXXMIQMTINSTKVPAXX

SEQ ID NO: 36137 - protein, 38 aa, Artificial Sequence
  Non-cyclic GFR-binding peptide
  MOD_RES (2)..(4)..(36)..(37): Xaa is C or S
RXGXSEVVMDSMEGLVVNNASDMIQITINSLRTPVXXT

SEQ ID NO: 36138 - protein, 37 aa, Artificial Sequence
  Non-cyclic GFR-binding peptide
  MOD_RES (33)..(34): Xaa is C or S
  MOD_RES (11)..(12)..(13)..(14)..(15): Xaa is A or G
  MOD_RES (16)..(17)..(18)..(19): Xaa is A or G or absent
DVVMGSMEGIXXXXXXXXXMIQMTINSMKTPTXXPGA

SEQ ID NO: 36139 - protein, 41 aa, Artificial Sequence
  Non-cyclic GFR-binding peptide
  MOD_RES (1)..(3)..(36)..(37): Xaa is C or S
  MOD_RES (14)..(15)..(16)..(17)..(18): Xaa is A or G
  MOD_RES (19)..(20)..(21)..(22): Xaa is A or G or absent
XGXEEVIMSMEGIXXXXXXXXXMIQMTINSTKVPAXXTSPV

SEQ ID NO: 36140 - protein, 34 aa, Artificial Sequence
  Non-cyclic GFR-binding peptide
  MOD_RES (1)..(33)..(34): Xaa is C or S
XAEVVMDSMEGLVVNNAADMIQITINSLRAPVXX

SEQ ID NO: 36141 - protein, 35 aa, Artificial Sequence
  Non-cyclic GFR-binding peptide
  MOD_RES (1)..(3)..(35): Xaa is C or S
XGXRDVVMGSMEGIIIQQKDNMIQMTINSMKTPTX

SEQ ID NO: 36142 - protein, 40 aa, Artificial Sequence
  Non-cyclic GFR-binding peptide
  MOD_RES (2)..(34)..(35): Xaa is C or S
GXRDVVMGSMEGLIIQQKDNMIQMTINSMKTPTXXPGASG

SEQ ID NO: 36143 - protein, 38 aa, Artificial Sequence
  Non-cyclic GFR-binding peptide
  MOD_RES (2)..(34)..(35): Xaa is C or S
GXSEVVMDSMEGLVVNNASDMIQITINSLRTPVXXTPP

SEQ ID NO: 36144 - protein, 37 aa, Artificial Sequence
  Non-cyclic GFR-binding peptide
  MOD_RES (33)..(34): Xaa is C or S
  MOD_RES (11)..(12)..(13)..(14)..(15): Xaa is A or G
  MOD_RES (16)..(17)..(18)..(19): Xaa is A or G or absent
EVVMDSMEGIXXXXXXXXXMIQITINSLRAPVXXSAP

SEQ ID NO: 36145 - protein, 33 aa, Artificial Sequence
  Non-cyclic GFR-binding peptide
  MOD_RES (1)..(33): Xaa is C or S
XRDVVMGSMEGIIIQQKDNMIQMTINSMKTPTX

SEQ ID NO: 36146 - protein, 37 aa, Artificial Sequence
  Non-cyclic GFR-binding peptide
  MOD_RES (1)..(3)..(34)..(35): Xaa is C or S
XKXSKVIMSMEGLIKPTKGIMIQITINSLDQSVXXPS

SEQ ID NO: 36147 - protein, 40 aa, Artificial Sequence
  Non-cyclic GFR-binding peptide
  MOD_RES (2)..(36)..(37): Xaa is C or S
  MOD_RES (14)..(15)..(16)..(17)..(18): Xaa is A or G
  MOD_RES (19)..(20)..(21)..(22): Xaa is A or G or absent
GXAEVVMDSMEGLXXXXXXXXXMIQITINSLRAPVXXSAP

SEQ ID NO: 36148 - protein, 38 aa, Artificial Sequence
  Non-cyclic GFR-binding peptide
  MOD_RES (1)..(3)..(36)..(37): Xaa is C or S
  MOD_RES (14)..(15)..(16)..(17)..(18): Xaa is A or G
  MOD_RES (19)..(20)..(21)..(22): Xaa is A or G or absent
XKXSKVIMSMEGLXXXXXXXXXMIQITINSLDQSVXXP

SEQ ID NO: 36149 - protein, 35 aa, Artificial Sequence
  Non-cyclic GFR-binding peptide
  MOD_RES (2)..(4): Xaa is C or S
RXGXSEVVMDSMEGIVVNNASDMIQITINSLRTPV

SEQ ID NO: 36150 - protein, 40 aa, Artificial Sequence
  Non-cyclic GFR-binding peptide
  MOD_RES (1)..(3)..(37)..(38): Xaa is C or S
  MOD_RES (15)..(16)..(17)..(18)..(19): Xaa is A or G
  MOD_RES (20)..(21)..(22)..(23): Xaa is A or G or absent
XGXAEVVMDSMEGIXXXXXXXXXMIQITINSLRAPVXXSA

SEQ ID NO: 36151 - protein, 34 aa, Artificial Sequence
  Non-cyclic GFR-binding peptide
  MOD_RES (1)..(1): Xaa is C or S
  MOD_RES (13)..(14)..(15)..(16)..(17): Xaa is A or G
  MOD_RES (18)..(19)..(20)..(21): Xaa is A or G or absent
XSEVVMDSMEGIXXXXXXXXXMIQITINSLRTPV

SEQ ID NO: 36152 - protein, 40 aa, Artificial Sequence
  Non-cyclic GFR-binding peptide
  MOD_RES (1)..(3)..(37)..(38): Xaa is C or S
  MOD_RES (15)..(16)..(17)..(18)..(19): Xaa is A or G
  MOD_RES (20)..(21)..(22)..(23): Xaa is A or G or absent
XGXRDVVMGSMEGLXXXXXXXXXMIQMTINSMKTPTXXPG

SEQ ID NO: 36153 - protein, 36 aa, Artificial Sequence
  Non-cyclic GFR-binding peptide
  MOD_RES (1)..(3)..(36): Xaa is C or S
  MOD_RES (14)..(15)..(16)..(17)..(18): Xaa is A or G
  MOD_RES (19)..(20)..(21)..(22): Xaa is A or G or absent
XGXEEVIMSMEGIXXXXXXXXXMIQMTINSTKVPAX

SEQ ID NO: 36154 - protein, 43 aa, Artificial Sequence
  Non-cyclic GFR-binding peptide
  MOD_RES (2)..(4)..(37)..(38): Xaa is C or S
  MOD_RES (15)..(16)..(17)..(18)..(19): Xaa is A or G
  MOD_RES (20)..(21)..(22)..(23): Xaa is A or G or absent
SXKXSKVVMSMEGLXXXXXXXXXMIQITINSLDQPVXXPSASA

SEQ ID NO: 36155 - protein, 33 aa, Artificial Sequence
  Non-cyclic GFR-binding peptide
  MOD_RES (2)..(33): Xaa is C or S
GXEEVIMSMEGILLVRGNDMIQMTINSTKVPAX

SEQ ID NO: 36156 - protein, 40 aa, Artificial Sequence
  Non-cyclic GFR-binding peptide
  MOD_RES (2)..(4)..(35)..(36): Xaa is C or S
SXKXSRVIMSMEGLVKPKRGVMIQITINSLAQPVXXPAAS

SEQ ID NO: 36157 - protein, 37 aa, Artificial Sequence
  Non-cyclic GFR-binding peptide
  MOD_RES (31)..(32): Xaa is C or S
EVVMDSMEGLVVNNASDMIQITINSLRTPVXXTPPTS

SEQ ID NO: 36158 - protein, 38 aa, Artificial Sequence
  Non-cyclic GFR-binding peptide
  MOD_RES (1)..(35)..(36): Xaa is C or S
  MOD_RES (13)..(14)..(15)..(16)..(17): Xaa is A or G
  MOD_RES (18)..(19)..(20)..(21): Xaa is A or G or absent
XRDVVMGSMEGLXXXXXXXXXMIQMTINSMKTPTXXPG

SEQ ID NO: 36159 - protein, 43 aa, Artificial Sequence
  Non-cyclic GFR-binding peptide
  MOD_RES (1)..(3)..(37)..(38): Xaa is C or S
  MOD_RES (15)..(16)..(17)..(18)..(19): Xaa is A or G
  MOD_RES (20)..(21)..(22)..(23): Xaa is A or G or absent
XGXSRVVMNSMEGIXXXXXXXXXMIQVTINSLKTPAXXPKPVH

SEQ ID NO: 36160 - protein, 32 aa, Artificial Sequence
  Non-cyclic GFR-binding peptide
  MOD_RES (2)..(2): Xaa is C or S
KXSKVVMSMEGLVKPTRGVMIQITINSLDQPV

SEQ ID NO: 36161 - protein, 37 aa, Artificial Sequence
  Non-cyclic GFR-binding peptide
  MOD_RES (1)..(34)..(35): Xaa is C or S
  MOD_RES (12)..(13)..(14)..(15)..(16): Xaa is A or G
  MOD_RES (17)..(18)..(19)..(20): Xaa is A or G or absent
XSRVIMSMEGLXXXXXXXXXMIQITINSLAQPVXXPA

SEQ ID NO: 36162 - protein, 39 aa, Artificial Sequence
  Non-cyclic GFR-binding peptide
  MOD_RES (1)..(3)..(35)..(36): Xaa is C or S
XGXSRVVMNSMEGLIVNSSDDMIQVTINSLKTPAXXPKP

SEQ ID NO: 36163 - protein, 38 aa, Artificial Sequence
  Non-cyclic GFR-binding peptide
  MOD_RES (2)..(36)..(37): Xaa is C or S
  MOD_RES (14)..(15)..(16)..(17)..(18): Xaa is A or G
  MOD_RES (19)..(20)..(21)..(22): Xaa is A or G or absent
GXSEVVMDSMEGLXXXXXXXXXMIQITINSLRTPVXXT

SEQ ID NO: 36164 - protein, 38 aa, Artificial Sequence
  Non-cyclic GFR-binding peptide
  MOD_RES (1)..(34)..(35): Xaa is C or S
  MOD_RES (12)..(13)..(14)..(15)..(16): Xaa is A or G
  MOD_RES (17)..(18)..(19)..(20): Xaa is A or G or absent
XSRVIMSMEGLXXXXXXXXXMIQITINSLAQPVXXPAA

SEQ ID NO: 36165 - protein, 35 aa, Artificial Sequence
  Non-cyclic GFR-binding peptide
  MOD_RES (31)..(32): Xaa is C or S
SKVVMSMEGLVKPTRGVMIQITINSLDQPVXXPSA

SEQ ID NO: 36166 - protein, 34 aa, Artificial Sequence
  Non-cyclic GFR-binding peptide
  MOD_RES (34)..(34): Xaa is C or S
  MOD_RES (12)..(13)..(14)..(15)..(16): Xaa is A or G
  MOD_RES (17)..(18)..(19)..(20): Xaa is A or G or absent
SEVVMDSMEGIXXXXXXXXXMIQITINSLRTPVX

SEQ ID NO: 36167 - protein, 37 aa, Artificial Sequence
  Non-cyclic GFR-binding peptide
  MOD_RES (31)..(32): Xaa is C or S
EVVMDSMEGIVVNNASDMIQITINSLRTPVXXTPPTS

SEQ ID NO: 36168 - protein, 34 aa, Artificial Sequence
  Non-cyclic GFR-binding peptide
  MOD_RES (2)..(2): Xaa is C or S
  MOD_RES (13)..(14)..(15)..(16)..(17): Xaa is A or G
  MOD_RES (18)..(19)..(20)..(21): Xaa is A or G or absent
KXSRVIMSMEGLXXXXXXXXXMIQITINSLAQPV

SEQ ID NO: 36169 - protein, 36 aa, Artificial Sequence
  Non-cyclic GFR-binding peptide
  MOD_RES (1)..(34)..(36): Xaa is C or S
  MOD_RES (15)..(16)..(17)..(18)..(19): Xaa is A or G
  MOD_RES (20)..(21)..(22)..(23): Xaa is A or G or absent
XVSQDLSNITIQIMXXXXXXXXXLGEMSMIVKSXKX

SEQ ID NO: 36170 - protein, 35 aa, Artificial Sequence
  Non-cyclic GFR-binding peptide
  MOD_RES (4)..(5): Xaa is C or S
PPTXXVPTRLSNITIQIMDSANNVVIGEMSDMVVE

SEQ ID NO: 36171 - protein, 40 aa, Artificial Sequence
  Non-cyclic GFR-binding peptide
  MOD_RES (4)..(5)..(38)..(40): Xaa is C or S
  MOD_RES (19)..(20)..(21)..(22)..(23): Xaa is A or G
  MOD_RES (24)..(25)..(26)..(27): Xaa is A or G or absent
ASPXXVPQDLSNITIQIMXXXXXXXXXLGEMSMVVKSXKX

SEQ ID NO: 36172 - protein, 37 aa, Artificial Sequence
  Non-cyclic GFR-binding peptide
  MOD_RES (5)..(6): Xaa is C or S
APASXXVPARLSNITIQIMDAANNVVLGEMSDMVVEA

SEQ ID NO: 36173 - protein, 40 aa, Artificial Sequence
  Non-cyclic GFR-binding peptide
  MOD_RES (3)..(4)..(37)..(39): Xaa is C or S
  MOD_RES (18)..(19)..(20)..(21)..(22): Xaa is A or G
  MOD_RES (23)..(24)..(25)..(26): Xaa is A or G or absent
SPXXVPQDLSNITIQIMXXXXXXXXXLGEMSMVVKSXKXS

SEQ ID NO: 36174 - protein, 38 aa, Artificial Sequence
  Non-cyclic GFR-binding peptide
  MOD_RES (1)..(2)..(36)..(38): Xaa is C or S
  MOD_RES (16)..(17)..(18)..(19)..(20): Xaa is A or G
  MOD_RES (21)..(22)..(23)..(24): Xaa is A or G or absent
XXVPARLSNITIQIMXXXXXXXXXLGEMSDMVVEAXGX

SEQ ID NO: 36175 - protein, 37 aa, Artificial Sequence
  Non-cyclic GFR-binding peptide
  MOD_RES (6)..(7): Xaa is C or S
RVPSTXXAPVKTSNITMQIMDNGRVLLLGEMSMIVEE

SEQ ID NO: 36176 - protein, 43 aa, Artificial Sequence
  Non-cyclic GFR-binding peptide
  MOD_RES (5)..(6)..(40)..(42): Xaa is C or S
  MOD_RES (20)..(21)..(22)..(23)..(24): Xaa is A or G
  MOD_RES (25)..(26)..(27)..(28): Xaa is A or G or absent
APASXXVPARLSNITIQIMXXXXXXXXXIGEMSDMVVEAXGXR

SEQ ID NO: 36177 - protein, 41 aa, Artificial Sequence
  Non-cyclic GFR-binding peptide
  MOD_RES (4)..(5)..(38)..(40): Xaa is C or S
  MOD_RES (19)..(20)..(21)..(22)..(23): Xaa is A or G
  MOD_RES (24)..(25)..(26)..(27): Xaa is A or G or absent
ASPXXVPQDLSNITIQIMXXXXXXXXXLGEMSMVVKSXKXS

SEQ ID NO: 36178 - protein, 34 aa, Artificial Sequence
  Non-cyclic GFR-binding peptide
  MOD_RES (3)..(4): Xaa is C or S
STXXAPVKTSNITMQIMDNGRVLLLGEMSMIVEE

SEQ ID NO: 36179 - protein, 38 aa, Artificial Sequence
  Non-cyclic GFR-binding peptide
  MOD_RES (5)..(6): Xaa is C or S
  MOD_RES (20)..(21)..(22)..(23)..(24): Xaa is A or G
  MOD_RES (25)..(26)..(27)..(28): Xaa is A or G or absent
TPPTXXVPTRLSNITIQIMXXXXXXXXXIGEMSDMVVE

SEQ ID NO: 36180 - protein, 38 aa, Artificial Sequence
  Non-cyclic GFR-binding peptide
  MOD_RES (3)..(4)..(37): Xaa is C or S
  MOD_RES (18)..(19)..(20)..(21)..(22): Xaa is A or G
  MOD_RES (23)..(24)..(25)..(26): Xaa is A or G or absent
SPXXVPQDLSNITIQIMXXXXXXXXXLGEMSMVVKSXK

SEQ ID NO: 36181 - protein, 43 aa, Artificial Sequence
  Non-cyclic GFR-binding peptide
  MOD_RES (6)..(7)..(41)..(43): Xaa is C or S
  MOD_RES (21)..(22)..(23)..(24)..(25): Xaa is A or G
  MOD_RES (26)..(27)..(28)..(29): Xaa is A or G or absent
STPPTXXVPTRLSNITIQIMXXXXXXXXXLGEMSDMVVESXGX

SEQ ID NO: 36182 - protein, 39 aa, Artificial Sequence
  Non-cyclic GFR-binding peptide
  MOD_RES (6)..(7): Xaa is C or S
  MOD_RES (21)..(22)..(23)..(24)..(25): Xaa is A or G
  MOD_RES (26)..(27)..(28)..(29): Xaa is A or G or absent
STPPTXXVPTRLSNITIQIMXXXXXXXXXLGEMSDMVVE

SEQ ID NO: 36183 - protein, 35 aa, Artificial Sequence
  Non-cyclic GFR-binding peptide
  MOD_RES (3)..(4): Xaa is C or S
ASXXVPARLSNITIQIMDAANNVVIGEMSDMVVEA

SEQ ID NO: 36184 - protein, 31 aa, Artificial Sequence
  Non-cyclic GFR-binding peptide
VPARLSNITIQIMDAANNVVLGEMSDMVVEA

SEQ ID NO: 36185 - protein, 39 aa, Artificial Sequence
  Non-cyclic GFR-binding peptide
  MOD_RES (3)..(4)..(38): Xaa is C or S
  MOD_RES (18)..(19)..(20)..(21)..(22): Xaa is A or G
  MOD_RES (23)..(24)..(25)..(26): Xaa is A or G or absent
GPXXTPTKMSNITMQIMXXXXXXXXXIGEMSGMVVDRXG

SEQ ID NO: 36186 - protein, 31 aa, Artificial Sequence
  Non-cyclic GFR-binding peptide
  MOD_RES (1)..(1): Xaa is C or S
XAPVKTSNITMQIMDNGRVLLLGEMSMIVEE

SEQ ID NO: 36187 - protein, 39 aa, Artificial Sequence
  Non-cyclic GFR-binding peptide
  MOD_RES (4)..(5)..(36)..(38): Xaa is C or S
ASPXXVPQDLSNITIQIMVGRTPKVLGEMSMVVKSXKXS

SEQ ID NO: 36188 - protein, 30 aa, Artificial Sequence
  Non-cyclic GFR-binding peptide
VPTRLSNITIQIMDSANNVVIGEMSDMVVE

SEQ ID NO: 36189 - protein, 36 aa, Artificial Sequence
  Non-cyclic GFR-binding peptide
  MOD_RES (1)..(2)..(33)..(35): Xaa is C or S
XXAPVKTSNITMQIMDNGRVLLLGEMSMIVEEXGXL

SEQ ID NO: 36190 - protein, 35 aa, Artificial Sequence
  Non-cyclic GFR-binding peptide
  MOD_RES (3)..(4)..(35): Xaa is C or S
SPXXVPQDLSNITIQIMVGRTPKVLGEMSMVVKSX

SEQ ID NO: 36191 - protein, 34 aa, Artificial Sequence
  Non-cyclic GFR-binding peptide
  MOD_RES (32)..(34): Xaa is C or S
TPTKMSNITMQIMNDKQQIIIGEMSGMVVDRXGX

SEQ ID NO: 36192 - protein, 42 aa, Artificial Sequence
  Non-cyclic GFR-binding peptide
  MOD_RES (4)..(5)..(39)..(41): Xaa is C or S
  MOD_RES (19)..(20)..(21)..(22)..(23): Xaa is A or G
  MOD_RES (24)..(25)..(26)..(27): Xaa is A or G or absent
PKPXXAPTKLSNITVQIMXXXXXXXXXLGEMSNMVVRSXGXH

SEQ ID NO: 36193 - protein, 37 aa, Artificial Sequence
  Non-cyclic GFR-binding peptide
  MOD_RES (3)..(4): Xaa is C or S
  MOD_RES (18)..(19)..(20)..(21)..(22): Xaa is A or G
  MOD_RES (23)..(24)..(25)..(26): Xaa is A or G or absent
GPXXTPTKMSNITMQIMXXXXXXXXXLGEMSGMVVDR

SEQ ID NO: 36194 - protein, 32 aa, Artificial Sequence
  Non-cyclic GFR-binding peptide
  MOD_RES (32)..(32): Xaa is C or S
TPTKMSNITMQIMNDKQQIIIGEMSGMVVDRX

SEQ ID NO: 36195 - protein, 35 aa, Artificial Sequence
  Non-cyclic GFR-binding peptide
  MOD_RES (1)..(2)..(33)..(35): Xaa is C or S
XXAPVKTSNITMQIMDNGRVLLLGEMSMIVEEXGX

SEQ ID NO: 36196 - protein, 41 aa, Artificial Sequence
  Non-cyclic GFR-binding peptide
  MOD_RES (6)..(7)..(39)..(41): Xaa is C or S
GSAGPXXTPTKMSNITMQIMNDKQQIILGEMSGMVVDRXGX

SEQ ID NO: 36197 - protein, 36 aa, Artificial Sequence
  Non-cyclic GFR-binding peptide
  MOD_RES (1)..(2)..(34)..(36): Xaa is C or S
XXVPTRLSNITIQIMDSANNVVLGEMSDMVVESXGX

SEQ ID NO: 36198 - protein, 39 aa, Artificial Sequence
  Non-cyclic GFR-binding peptide
  MOD_RES (2)..(3)..(37)..(39): Xaa is C or S
  MOD_RES (17)..(18)..(19)..(20)..(21): Xaa is A or G
  MOD_RES (22)..(23)..(24)..(25): Xaa is A or G or absent
SXXVPARLSNITIQIMXXXXXXXXXIGEMSDMVVEAXGX

SEQ ID NO: 36199 - protein, 42 aa, Artificial Sequence
  Non-cyclic GFR-binding peptide
  MOD_RES (6)..(7)..(41): Xaa is C or S
  MOD_RES (21)..(22)..(23)..(24)..(25): Xaa is A or G
  MOD_RES (26)..(27)..(28)..(29): Xaa is A or G or absent
GSAGPXXTPTKMSNITMQIMXXXXXXXXXIGEMSGMVVDRXG

SEQ ID NO: 36200 - protein, 37 aa, Artificial Sequence
  Non-cyclic GFR-binding peptide
  MOD_RES (2)..(3)..(34)..(36): Xaa is C or S
PXXVPQALSNITIQIMVGRKPKVLGEMSMIVRSXKXS

SEQ ID NO: 36201 - protein, 40 aa, Artificial Sequence
  Non-cyclic GFR-binding peptide
  MOD_RES (6)..(7): Xaa is C or S
  MOD_RES (21)..(22)..(23)..(24)..(25): Xaa is A or G
  MOD_RES (26)..(27)..(28)..(29): Xaa is A or G or absent
HVPKPXXAPTKLSNITVQIMXXXXXXXXXIGEMSNMVVRS

SEQ ID NO: 36202 - protein, 38 aa, Artificial Sequence
  Non-cyclic GFR-binding peptide
  MOD_RES (5)..(6)..(37): Xaa is C or S
SASPXXVSQDLSNITIQIMIGKTPKILGEMSMIVKSXK

SEQ ID NO: 36203 - protein, 33 aa, Artificial Sequence
  Non-cyclic GFR-binding peptide
  MOD_RES (14)..(15)..(16)..(17)..(18): Xaa is A or G
  MOD_RES (19)..(20)..(21)..(22): Xaa is A or G or absent
VPARLSNITIQIMXXXXXXXXXLGEMSDMVVEA

SEQ ID NO: 36204 - protein, 41 aa, Artificial Sequence
  Non-cyclic GFR-binding peptide
  MOD_RES (6)..(7)..(40): Xaa is C or S
  MOD_RES (21)..(22)..(23)..(24)..(25): Xaa is A or G
  MOD_RES (26)..(27)..(28)..(29): Xaa is A or G or absent
RVPSTXXAPVKTSNITMQIMXXXXXXXXXIGEMSMIVEEXG

SEQ ID NO: 36205 - protein, 34 aa, Artificial Sequence
  Non-cyclic GFR-binding peptide
  MOD_RES (1)..(2): Xaa is C or S
  MOD_RES (16)..(17)..(18)..(19)..(20): Xaa is A or G
  MOD_RES (21)..(22)..(23)..(24): Xaa is A or G or absent
XXTPTKMSNITMQIMXXXXXXXXXLGEMSGMVVD

SEQ ID NO: 36206 - protein, 35 aa, Artificial Sequence
  Non-cyclic GFR-binding peptide
  MOD_RES (1)..(34): Xaa is C or S
  MOD_RES (15)..(16)..(17)..(18)..(19): Xaa is A or G
  MOD_RES (20)..(21)..(22)..(23): Xaa is A or G or absent
XAPVKTSNITMQIMXXXXXXXXXLGEMSMIVEEXG

SEQ ID NO: 36207 - protein, 40 aa, Artificial Sequence
  Non-cyclic GFR-binding peptide
  MOD_RES (4)..(5)..(39): Xaa is C or S
  MOD_RES (19)..(20)..(21)..(22)..(23): Xaa is A or G
  MOD_RES (24)..(25)..(26)..(27): Xaa is A or G or absent
AGPXXTPTKMSNITMQIMXXXXXXXXXLGEMSGMVVDRXG

SEQ ID NO: 36208 - protein, 34 aa, Artificial Sequence
  Non-cyclic GFR-binding peptide
  MOD_RES (1)..(32)..(34): Xaa is C or S
XAPVKTSNITMQIMDNGRVLLIGEMSMIVEEXGX

SEQ ID NO: 36209 - protein, 35 aa, Artificial Sequence
  Non-cyclic GFR-binding peptide
  MOD_RES (33)..(35): Xaa is C or S
  MOD_RES (14)..(15)..(16)..(17)..(18): Xaa is A or G
  MOD_RES (19)..(20)..(21)..(22): Xaa is A or G or absent
VPQDLSNITIQIMXXXXXXXXXLGEMSMVVKSXKX

SEQ ID NO: 36210 - protein, 41 aa, Artificial Sequence
  Non-cyclic GFR-binding peptide
  MOD_RES (5)..(6)..(38)..(40): Xaa is C or S
SAGPXXTPTKMSNITMQIMNDKQQIIIGEMSGMVVDRXGXS

SEQ ID NO: 36211 - protein, 35 aa, Artificial Sequence
  Non-cyclic GFR-binding peptide
  MOD_RES (1)..(2)..(33)..(35): Xaa is C or S
XXAPVKTSNITMQIMDNGRVLLIGEMSMIVEEXGX

SEQ ID NO: 36212 - protein, 36 aa, Artificial Sequence
  Non-cyclic GFR-binding peptide
  MOD_RES (5)..(6): Xaa is C or S
VPSTXXAPVKTSNITMQIMDNGRVLLLGEMSMIVEE

SEQ ID NO: 36213 - protein, 35 aa, Artificial Sequence
  Non-cyclic GFR-binding peptide
  MOD_RES (3)..(4)..(35): Xaa is C or S
STXXAPVKTSNITMQIMDNGRVLLLGEMSMIVEEX

SEQ ID NO: 36214 - protein, 32 aa, Artificial Sequence
  Non-cyclic GFR-binding peptide
  MOD_RES (14)..(15)..(16)..(17)..(18): Xaa is A or G
  MOD_RES (19)..(20)..(21)..(22): Xaa is A or G or absent
VPARLSNITIQIMXXXXXXXXXIGEMSDMVVE

SEQ ID NO: 36215 - protein, 35 aa, Artificial Sequence
  Non-cyclic GFR-binding peptide
  MOD_RES (1)..(33)..(35): Xaa is C or S
XTPTKMSNITMQIMNDKQQIILGEMSGMVVDRXGX

SEQ ID NO: 36216 - protein, 40 aa, Artificial Sequence
  Non-cyclic GFR-binding peptide
  MOD_RES (6)..(7): Xaa is C or S
  MOD_RES (21)..(22)..(23)..(24)..(25): Xaa is A or G
  MOD_RES (26)..(27)..(28)..(29): Xaa is A or G or absent
AAPASXXVPARLSNITIQIMXXXXXXXXXIGEMSDMVVEA

SEQ ID NO: 36217 - protein, 33 aa, Artificial Sequence
  Non-cyclic GFR-binding peptide
  MOD_RES (1)..(1): Xaa is C or S
  MOD_RES (15)..(16)..(17)..(18)..(19): Xaa is A or G
  MOD_RES (20)..(21)..(22)..(23): Xaa is A or G or absent
XTPTKMSNITMQIMXXXXXXXXXLGEMSGMVVD

SEQ ID NO: 36218 - protein, 36 aa, Artificial Sequence
  Non-cyclic GFR-binding peptide
  MOD_RES (1)..(2)..(36): Xaa is C or S
  MOD_RES (16)..(17)..(18)..(19)..(20): Xaa is A or G
  MOD_RES (21)..(22)..(23)..(24): Xaa is A or G or absent
XXVPARLSNITIQIMXXXXXXXXXLGEMSDMVVEAX

SEQ ID NO: 36219 - protein, 34 aa, Artificial Sequence
  Non-cyclic GFR-binding peptide
  MOD_RES (1)..(2): Xaa is C or S
  MOD_RES (16)..(17)..(18)..(19)..(20): Xaa is A or G
  MOD_RES (21)..(22)..(23)..(24): Xaa is A or G or absent
XXVPQDLSNITIQIMXXXXXXXXXLGEMSMVVKS

SEQ ID NO: 36220 - protein, 41 aa, Artificial Sequence
  Non-cyclic GFR-binding peptide
  MOD_RES (5)..(6)..(40): Xaa is C or S
  MOD_RES (20)..(21)..(22)..(23)..(24): Xaa is A or G
  MOD_RES (25)..(26)..(27)..(28): Xaa is A or G or absent
SAGPXXTPTKMSNITMQIMXXXXXXXXXIGEMSGMVVDRXG

SEQ ID NO: 36221 - protein, 32 aa, Artificial Sequence
  Non-cyclic GFR-binding peptide
  MOD_RES (14)..(15)..(16)..(17)..(18): Xaa is A or G
  MOD_RES (19)..(20)..(21)..(22): Xaa is A or G or absent
VPTRLSNITIQIMXXXXXXXXXIGEMSDMVVE

SEQ ID NO: 36222 - protein, 37 aa, Artificial Sequence
  Non-cyclic GFR-binding peptide
  MOD_RES (1)..(2)..(35)..(37): Xaa is C or S
  MOD_RES (16)..(17)..(18)..(19)..(20): Xaa is A or G
  MOD_RES (21)..(22)..(23)..(24): Xaa is A or G or absent
XXVSQDLSNITIQIMXXXXXXXXXLGEMSMIVKSXKX

SEQ ID NO: 36223 - protein, 36 aa, Artificial Sequence
  Non-cyclic GFR-binding peptide
  MOD_RES (1)..(2)..(35): Xaa is C or S
  MOD_RES (16)..(17)..(18)..(19)..(20): Xaa is A or G
  MOD_RES (21)..(22)..(23)..(24): Xaa is A or G or absent
XXAPVKTSNITMQIMXXXXXXXXXLGEMSMIVEEXG

SEQ ID NO: 36224 - protein, 35 aa, Artificial Sequence
  Non-cyclic GFR-binding peptide
  MOD_RES (1)..(35): Xaa is C or S
  MOD_RES (15)..(16)..(17)..(18)..(19): Xaa is A or G
  MOD_RES (20)..(21)..(22)..(23): Xaa is A or G or absent
XVPARLSNITIQIMXXXXXXXXXLGEMSDMVVEAX

SEQ ID NO: 36225 - protein, 33 aa, Artificial Sequence
  Non-cyclic GFR-binding peptide
  MOD_RES (1)..(1): Xaa is C or S
  MOD_RES (15)..(16)..(17)..(18)..(19): Xaa is A or G
  MOD_RES (20)..(21)..(22)..(23): Xaa is A or G or absent
XVPQDLSNITIQIMXXXXXXXXXLGEMSMVVKS

SEQ ID NO: 36226 - protein, 36 aa, Artificial Sequence
  Non-cyclic GFR-binding peptide
  MOD_RES (1)..(35): Xaa is C or S
  MOD_RES (15)..(16)..(17)..(18)..(19): Xaa is A or G
  MOD_RES (20)..(21)..(22)..(23): Xaa is A or G or absent
XVPTRLSNITIQIMXXXXXXXXXIGEMSDMVVESXG

SEQ ID NO: 36227 - protein, 36 aa, Artificial Sequence
  Non-cyclic GFR-binding peptide
  MOD_RES (2)..(3)..(35): Xaa is C or S
PXXTPTKMSNITMQIMNDKQQIILGEMSGMVVDRXG

SEQ ID NO: 36228 - protein, 39 aa, Artificial Sequence
  Non-cyclic GFR-binding peptide
  MOD_RES (5)..(6): Xaa is C or S
  MOD_RES (20)..(21)..(22)..(23)..(24): Xaa is A or G
  MOD_RES (25)..(26)..(27)..(28): Xaa is A or G or absent
TPPTXXVPTRLSNITIQIMXXXXXXXXXLGEMSDMVVES

SEQ ID NO: 36229 - protein, 36 aa, Artificial Sequence
  Non-cyclic GFR-binding peptide
  MOD_RES (33)..(35): Xaa is C or S
  MOD_RES (14)..(15)..(16)..(17)..(18): Xaa is A or G
  MOD_RES (19)..(20)..(21)..(22): Xaa is A or G or absent
APVKTSNITMQIMXXXXXXXXXLGEMSMIVEEXGXL

SEQ ID NO: 36230 - protein, 39 aa, Artificial Sequence
  Non-cyclic GFR-binding peptide
  MOD_RES (5)..(6)..(38): Xaa is C or S
TPPTXXVPTRLSNITIQIMDSANNVVIGEMSDMVVESXG

SEQ ID NO: 36231 - protein, 35 aa, Artificial Sequence
  Non-cyclic GFR-binding peptide
  MOD_RES (1)..(33)..(35): Xaa is C or S
XVPARLSNITIQIMDAANNVVLGEMSDMVVEAXGX

SEQ ID NO: 36232 - protein, 39 aa, Artificial Sequence
  Non-cyclic GFR-binding peptide
  MOD_RES (5)..(6)..(38): Xaa is C or S
SAGPXXTPTKMSNITMQIMNDKQQIILGEMSGMVVDRXG

SEQ ID NO: 36233 - protein, 33 aa, Artificial Sequence
  Non-cyclic GFR-binding peptide
  MOD_RES (2)..(3): Xaa is C or S
SXXVPARLSNITIQIMDAANNVVIGEMSDMVVE

SEQ ID NO: 36234 - protein, 40 aa, Artificial Sequence
  Non-cyclic GFR-binding peptide
  MOD_RES (5)..(6)..(38)..(40): Xaa is C or S
APASXXVPARLSNITIQIMDAANNVVIGEMSDMVVEAXGX

SEQ ID NO: 36235 - protein, 30 aa, Artificial Sequence
  Non-cyclic GFR-binding peptide
VPQDLSNITIQIMVGRTPKVLGEMSMVVKS

SEQ ID NO: 36236 - protein, 34 aa, Artificial Sequence
  Non-cyclic GFR-binding peptide
  MOD_RES (33)..(33): Xaa is C or S
  MOD_RES (14)..(15)..(16)..(17)..(18): Xaa is A or G
  MOD_RES (19)..(20)..(21)..(22): Xaa is A or G or absent
VSQDLSNITIQIMXXXXXXXXXLGEMSMIVKSXK

SEQ ID NO: 36237 - protein, 35 aa, Artificial Sequence
  Non-cyclic GFR-binding peptide
  MOD_RES (1)..(2)..(34): Xaa is C or S
XXVPTRLSNITIQIMDSANNVVLGEMSDMVVESXG

SEQ ID NO: 36238 - protein, 38 aa, Artificial Sequence
  Non-cyclic GFR-binding peptide
  MOD_RES (1)..(2)..(35)..(37): Xaa is C or S
  MOD_RES (16)..(17)..(18)..(19)..(20): Xaa is A or G
  MOD_RES (21)..(22)..(23)..(24): Xaa is A or G or absent
XXVPQDLSNITIQIMXXXXXXXXXLGEMSMVVKSXKXS

SEQ ID NO: 36239 - protein, 35 aa, Artificial Sequence
  Non-cyclic GFR-binding peptide
  MOD_RES (1)..(35): Xaa is C or S
  MOD_RES (15)..(16)..(17)..(18)..(19): Xaa is A or G
  MOD_RES (20)..(21)..(22)..(23): Xaa is A or G or absent
XTPTKMSNITMQIMXXXXXXXXXIGEMSGMVVDRX

SEQ ID NO: 36240 - protein, 37 aa, Artificial Sequence
  Non-cyclic GFR-binding peptide
  MOD_RES (3)..(4)..(37): Xaa is C or S
  MOD_RES (18)..(19)..(20)..(21)..(22): Xaa is A or G
  MOD_RES (23)..(24)..(25)..(26): Xaa is A or G or absent
SPXXVPQDLSNITIQIMXXXXXXXXXLGEMSMVVKSX

SEQ ID NO: 36241 - protein, 35 aa, Artificial Sequence
  Non-cyclic GFR-binding peptide
  MOD_RES (2)..(3): Xaa is C or S
  MOD_RES (17)..(18)..(19)..(20)..(21): Xaa is A or G
  MOD_RES (22)..(23)..(24)..(25): Xaa is A or G or absent
TXXVPTRLSNITIQIMXXXXXXXXXIGEMSDMVVE

SEQ ID NO: 36242 - protein, 32 aa, Artificial Sequence
  Non-cyclic GFR-binding peptide
  MOD_RES (1)..(2): Xaa is C or S
XXVPQALSNITIQIMVGRKPKVLGEMSMIVRS

SEQ ID NO: 36243 - protein, 33 aa, Artificial Sequence
  Non-cyclic GFR-binding peptide
  MOD_RES (14)..(15)..(16)..(17)..(18): Xaa is A or G
  MOD_RES (19)..(20)..(21)..(22): Xaa is A or G or absent
VPTRLSNITIQIMXXXXXXXXXLGEMSDMVVES

SEQ ID NO: 36244 - protein, 38 aa, Artificial Sequence
  Non-cyclic GFR-binding peptide
  MOD_RES (2)..(3)..(35)..(37): Xaa is C or S
SXXVPARLSNITIQIMDAANNVVIGEMSDMVVEAXGXR

SEQ ID NO: 36245 - protein, 38 aa, Artificial Sequence
  Non-cyclic GFR-binding peptide
  MOD_RES (6)..(7): Xaa is C or S
STPPTXXVPTRLSNITIQIMDSANNVVLGEMSDMVVES

SEQ ID NO: 36246 - protein, 41 aa, Artificial Sequence
  Non-cyclic GFR-binding peptide
  MOD_RES (6)..(7)..(39)..(41): Xaa is C or S
HVPKPXXAPTKLSNITVQIMDDSSNVILGEMSNMVVRSXGX

SEQ ID NO: 36247 - protein, 38 aa, Artificial Sequence
  Non-cyclic GFR-binding peptide
  MOD_RES (5)..(6): Xaa is C or S
  MOD_RES (20)..(21)..(22)..(23)..(24): Xaa is A or G
  MOD_RES (25)..(26)..(27)..(28): Xaa is A or G or absent
VPKPXXAPTKLSNITVQIMXXXXXXXXXLGEMSNMVVR

SEQ ID NO: 36248 - protein, 34 aa, Artificial Sequence
  Non-cyclic GFR-binding peptide
  MOD_RES (1)..(32)..(34): Xaa is C or S
XAPVKTSNITMQIMDNGRVLLLGEMSMIVEEXGX

SEQ ID NO: 36249 - protein, 40 aa, Artificial Sequence
  Non-cyclic GFR-binding peptide
  MOD_RES (4)..(5)..(38)..(40): Xaa is C or S
  MOD_RES (19)..(20)..(21)..(22)..(23): Xaa is A or G
  MOD_RES (24)..(25)..(26)..(27): Xaa is A or G or absent
PSTXXAPVKTSNITMQIMXXXXXXXXXIGEMSMIVEEXGX

SEQ ID NO: 36250 - protein, 37 aa, Artificial Sequence
  Non-cyclic GFR-binding peptide
  MOD_RES (1)..(2)..(36): Xaa is C or S
  MOD_RES (16)..(17)..(18)..(19)..(20): Xaa is A or G
  MOD_RES (21)..(22)..(23)..(24): Xaa is A or G or absent
XXVPARLSNITIQIMXXXXXXXXXIGEMSDMVVEAXG

SEQ ID NO: 36251 - protein, 34 aa, Artificial Sequence
  Non-cyclic GFR-binding peptide
  MOD_RES (34)..(34): Xaa is C or S
  MOD_RES (14)..(15)..(16)..(17)..(18): Xaa is A or G
  MOD_RES (19)..(20)..(21)..(22): Xaa is A or G or absent
APTKLSNITVQIMXXXXXXXXXLGEMSNMVVRSX

SEQ ID NO: 36252 - protein, 34 aa, Artificial Sequence
  Non-cyclic GFR-binding peptide
  MOD_RES (32)..(34): Xaa is C or S
VPTRLSNITIQIMDSANNVVLGEMSDMVVESXGX

SEQ ID NO: 36253 - protein, 37 aa, Artificial Sequence
  Non-cyclic GFR-binding peptide
  MOD_RES (2)..(3)..(36): Xaa is C or S
  MOD_RES (17)..(18)..(19)..(20)..(21): Xaa is A or G
  MOD_RES (22)..(23)..(24)..(25): Xaa is A or G or absent
PXXVPQALSNITIQIMXXXXXXXXXLGEMSMIVRSXK

SEQ ID NO: 36254 - protein, 32 aa, Artificial Sequence
  Non-cyclic GFR-binding peptide
  MOD_RES (32)..(32): Xaa is C or S
APTKLSNITVQIMDDSSNVILGEMSNMVVRSX

SEQ ID NO: 36255 - protein, 36 aa, Artificial Sequence
  Non-cyclic GFR-binding peptide
  MOD_RES (3)..(4)..(36): Xaa is C or S
PTXXVPTRLSNITIQIMDSANNVVLGEMSDMVVESX

SEQ ID NO: 36256 - protein, 38 aa, Artificial Sequence
  Non-cyclic GFR-binding peptide
  MOD_RES (3)..(4)..(36)..(38): Xaa is C or S
GPXXTPTKMSNITMQIMNDKQQIILGEMSGMVVDRXGX

SEQ ID NO: 36257 - protein, 40 aa, Artificial Sequence
  Non-cyclic GFR-binding peptide
  MOD_RES (5)..(6)..(38)..(40): Xaa is C or S
SAGPXXTPTKMSNITMQIMNDKQQIILGEMSGMVVDRXGX

SEQ ID NO: 36258 - protein, 38 aa, Artificial Sequence
  Non-cyclic GFR-binding peptide
  MOD_RES (4)..(5)..(37): Xaa is C or S
PPTXXVPTRLSNITIQIMDSANNVVIGEMSDMVVESXG

SEQ ID NO: 36259 - protein, 35 aa, Artificial Sequence
  Non-cyclic GFR-binding peptide
  MOD_RES (1)..(33)..(35): Xaa is C or S
XAPTKLSNITVQIMDDSSNVILGEMSNMVVRSXGX

SEQ ID NO: 36260 - protein, 36 aa, Artificial Sequence
  Non-cyclic GFR-binding peptide
  MOD_RES (1)..(33)..(35): Xaa is C or S
XVPTRLSNITIQIMDSANNVVLGEMSDMVVESXGXR

SEQ ID NO: 36261 - protein, 35 aa, Artificial Sequence
  Non-cyclic GFR-binding peptide
  MOD_RES (2)..(3): Xaa is C or S
  MOD_RES (17)..(18)..(19)..(20)..(21): Xaa is A or G
  MOD_RES (22)..(23)..(24)..(25): Xaa is A or G or absent
SXXVPARLSNITIQIMXXXXXXXXXIGEMSDMVVE

SEQ ID NO: 36262 - protein, 41 aa, Artificial Sequence
  Non-cyclic GFR-binding peptide
  MOD_RES (5)..(6)..(39)..(41): Xaa is C or S
  MOD_RES (20)..(21)..(22)..(23)..(24): Xaa is A or G
  MOD_RES (25)..(26)..(27)..(28): Xaa is A or G or absent
SAAPXXVPQALSNITIQIMXXXXXXXXXLGEMSMIVRSXKX

SEQ ID NO: 36263 - protein, 35 aa, Artificial Sequence
  Non-cyclic GFR-binding peptide
  MOD_RES (32)..(34): Xaa is C or S
VPARLSNITIQIMDAANNVVIGEMSDMVVEAXGXR

SEQ ID NO: 36264 - protein, 42 aa, Artificial Sequence
  Non-cyclic GFR-binding peptide
  MOD_RES (6)..(7)..(41): Xaa is C or S
  MOD_RES (21)..(22)..(23)..(24)..(25): Xaa is A or G
  MOD_RES (26)..(27)..(28)..(29): Xaa is A or G or absent
AAPASXXVPARLSNITIQIMXXXXXXXXXIGEMSDMVVEAXG

SEQ ID NO: 36265 - protein, 36 aa, Artificial Sequence
  Non-cyclic GFR-binding peptide
  MOD_RES (3)..(4): Xaa is C or S
  MOD_RES (18)..(19)..(20)..(21)..(22): Xaa is A or G
  MOD_RES (23)..(24)..(25)..(26): Xaa is A or G or absent
SPXXVSQDLSNITIQIMXXXXXXXXXLGEMSMIVKS

SEQ ID NO: 36266 - protein, 41 aa, Artificial Sequence
  Non-cyclic GFR-binding peptide
  MOD_RES (6)..(7)..(39)..(41): Xaa is C or S
AAPASXXVPARLSNITIQIMDAANNVVIGEMSDMVVEAXGX

SEQ ID NO: 36267 - protein, 37 aa, Artificial Sequence
  Non-cyclic GFR-binding peptide
  MOD_RES (1)..(34)..(36): Xaa is C or S
  MOD_RES (15)..(16)..(17)..(18)..(19): Xaa is A or G
  MOD_RES (20)..(21)..(22)..(23): Xaa is A or G or absent
XVSQDLSNITIQIMXXXXXXXXXLGEMSMIVKSXKXS

SEQ ID NO: 36268 - protein, 40 aa, Artificial Sequence
  Non-cyclic GFR-binding peptide
  MOD_RES (5)..(6)..(39): Xaa is C or S
  MOD_RES (20)..(21)..(22)..(23)..(24): Xaa is A or G
  MOD_RES (25)..(26)..(27)..(28): Xaa is A or G or absent
VPSTXXAPVKTSNITMQIMXXXXXXXXXIGEMSMIVEEXG

SEQ ID NO: 36269 - protein, 39 aa, Artificial Sequence
  Non-cyclic GFR-binding peptide
  MOD_RES (6)..(7)..(39): Xaa is C or S
STPPTXXVPTRLSNITIQIMDSANNVVIGEMSDMVVESX

SEQ ID NO: 36270 - protein, 36 aa, Artificial Sequence
  Non-cyclic GFR-binding peptide
  MOD_RES (1)..(2)..(36): Xaa is C or S
  MOD_RES (16)..(17)..(18)..(19)..(20): Xaa is A or G
  MOD_RES (21)..(22)..(23)..(24): Xaa is A or G or absent
XXVPTRLSNITIQIMXXXXXXXXXLGEMSDMVVESX

SEQ ID NO: 36271 - protein, 36 aa, Artificial Sequence
  Non-cyclic GFR-binding peptide
  MOD_RES (3)..(4)..(36): Xaa is C or S
GPXXTPTKMSNITMQIMNDKQQIIIGEMSGMVVDRX

SEQ ID NO: 36272 - protein, 37 aa, Artificial Sequence
  Non-cyclic GFR-binding peptide
  MOD_RES (5)..(6)..(37): Xaa is C or S
VPSTXXAPVKTSNITMQIMDNGRVLLIGEMSMIVEEX

SEQ ID NO: 36273 - protein, 35 aa, Artificial Sequence
  Non-cyclic GFR-binding peptide
  MOD_RES (34)..(34): Xaa is C or S
  MOD_RES (14)..(15)..(16)..(17)..(18): Xaa is A or G
  MOD_RES (19)..(20)..(21)..(22): Xaa is A or G or absent
APTKLSNITVQIMXXXXXXXXXLGEMSNMVVRSXG

SEQ ID NO: 36274 - protein, 41 aa, Artificial Sequence
  Non-cyclic GFR-binding peptide
  MOD_RES (5)..(6)..(39)..(41): Xaa is C or S
  MOD_RES (20)..(21)..(22)..(23)..(24): Xaa is A or G
  MOD_RES (25)..(26)..(27)..(28): Xaa is A or G or absent
SASPXXVSQDLSNITIQIMXXXXXXXXXLGEMSMIVKSXKX

SEQ ID NO: 36275 - protein, 35 aa, Artificial Sequence
  Non-cyclic GFR-binding peptide
  MOD_RES (3)..(4): Xaa is C or S
PTXXVPTRLSNITIQIMDSANNVVLGEMSDMVVES

SEQ ID NO: 36276 - protein, 37 aa, Artificial Sequence
  Non-cyclic GFR-binding peptide
  MOD_RES (6)..(7): Xaa is C or S
HVPKPXXAPTKLSNITVQIMDDSSNVILGEMSNMVVR

SEQ ID NO: 36277 - protein, 39 aa, Artificial Sequence
  Non-cyclic GFR-binding peptide
  MOD_RES (1)..(2)..(36)..(38): Xaa is C or S
  MOD_RES (16)..(17)..(18)..(19)..(20): Xaa is A or G
  MOD_RES (21)..(22)..(23)..(24): Xaa is A or G or absent
XXAPTKLSNITVQIMXXXXXXXXXLGEMSNMVVRSXGXH

SEQ ID NO: 36278 - protein, 35 aa, Artificial Sequence
  Non-cyclic GFR-binding peptide
  MOD_RES (33)..(35): Xaa is C or S
  MOD_RES (14)..(15)..(16)..(17)..(18): Xaa is A or G
  MOD_RES (19)..(20)..(21)..(22): Xaa is A or G or absent
VSQDLSNITIQIMXXXXXXXXXLGEMSMIVKSXKX

SEQ ID NO: 36279 - protein, 34 aa, Artificial Sequence
  Non-cyclic GFR-binding peptide
  MOD_RES (1)..(1): Xaa is C or S
  MOD_RES (15)..(16)..(17)..(18)..(19): Xaa is A or G
  MOD_RES (20)..(21)..(22)..(23): Xaa is A or G or absent
XTPTKMSNITMQIMXXXXXXXXXIGEMSGMVVDR

SEQ ID NO: 36280 - protein, 33 aa, Artificial Sequence
  Non-cyclic GFR-binding peptide
  MOD_RES (1)..(1): Xaa is C or S
  MOD_RES (15)..(16)..(17)..(18)..(19): Xaa is A or G
  MOD_RES (20)..(21)..(22)..(23): Xaa is A or G or absent
XVSQDLSNITIQIMXXXXXXXXXLGEMSMIVKS

SEQ ID NO: 36281 - protein, 37 aa, Artificial Sequence
  Non-cyclic GFR-binding peptide
  MOD_RES (3)..(4)..(37): Xaa is C or S
  MOD_RES (18)..(19)..(20)..(21)..(22): Xaa is A or G
  MOD_RES (23)..(24)..(25)..(26): Xaa is A or G or absent
SPXXVSQDLSNITIQIMXXXXXXXXXLGEMSMIVKSX

SEQ ID NO: 36282 - protein, 39 aa, Artificial Sequence
  Non-cyclic GFR-binding peptide
  MOD_RES (3)..(4)..(36)..(38): Xaa is C or S
GPXXTPTKMSNITMQIMNDKQQIIIGEMSGMVVDRXGXS

SEQ ID NO: 36283 - protein, 40 aa, Artificial Sequence
  Non-cyclic GFR-binding peptide
  MOD_RES (5)..(6)..(39): Xaa is C or S
  MOD_RES (20)..(21)..(22)..(23)..(24): Xaa is A or G
  MOD_RES (25)..(26)..(27)..(28): Xaa is A or G or absent
SASPXXVPQDLSNITIQIMXXXXXXXXXLGEMSMVVKSXK

SEQ ID NO: 36284 - protein, 42 aa, Artificial Sequence
  Non-cyclic GFR-binding peptide
  MOD_RES (5)..(6)..(40)..(42): Xaa is C or S
  MOD_RES (20)..(21)..(22)..(23)..(24): Xaa is A or G
  MOD_RES (25)..(26)..(27)..(28): Xaa is A or G or absent
SAGPXXTPTKMSNITMQIMXXXXXXXXXLGEMSGMVVDRXGX

SEQ ID NO: 36285 - protein, 38 aa, Artificial Sequence
  Non-cyclic GFR-binding peptide
  MOD_RES (5)..(6): Xaa is C or S
  MOD_RES (20)..(21)..(22)..(23)..(24): Xaa is A or G
  MOD_RES (25)..(26)..(27)..(28): Xaa is A or G or absent
SAAPXXVPQALSNITIQIMXXXXXXXXXLGEMSMIVRS

SEQ ID NO: 36286 - protein, 40 aa, Artificial Sequence
  Non-cyclic GFR-binding peptide
  MOD_RES (6)..(7)..(39): Xaa is C or S
AAPASXXVPARLSNITIQIMDAANNVVLGEMSDMVVEAXG

SEQ ID NO: 36287 - protein, 39 aa, Artificial Sequence
  Non-cyclic GFR-binding peptide
  MOD_RES (6)..(7)..(39): Xaa is C or S
AAPASXXVPARLSNITIQIMDAANNVVLGEMSDMVVEAX

SEQ ID NO: 36288 - protein, 38 aa, Artificial Sequence
  Non-cyclic GFR-binding peptide
  MOD_RES (3)..(4)..(38): Xaa is C or S
  MOD_RES (18)..(19)..(20)..(21)..(22): Xaa is A or G
  MOD_RES (23)..(24)..(25)..(26): Xaa is A or G or absent
ASXXVPARLSNITIQIMXXXXXXXXXLGEMSDMVVEAX

SEQ ID NO: 36289 - protein, 38 aa, Artificial Sequence
  Non-cyclic GFR-binding peptide
  MOD_RES (4)..(5)..(36)..(38): Xaa is C or S
ASPXXVSQDLSNITIQIMIGKTPKILGEMSMIVKSXKX

SEQ ID NO: 36290 - protein, 36 aa, Artificial Sequence
  Non-cyclic GFR-binding peptide
  MOD_RES (1)..(2)..(34)..(36): Xaa is C or S
XXVPARLSNITIQIMDAANNVVIGEMSDMVVEAXGX

SEQ ID NO: 36291 - protein, 36 aa, Artificial Sequence
  Non-cyclic GFR-binding peptide
  MOD_RES (3)..(4)..(36): Xaa is C or S
ASXXVPARLSNITIQIMDAANNVVLGEMSDMVVEAX

SEQ ID NO: 36292 - protein, 35 aa, Artificial Sequence
  Non-cyclic GFR-binding peptide
  MOD_RES (4)..(5): Xaa is C or S
ASPXXVSQDLSNITIQIMIGKTPKILGEMSMIVKS

SEQ ID NO: 36293 - protein, 37 aa, Artificial Sequence
  Non-cyclic GFR-binding peptide
  MOD_RES (2)..(3)..(35)..(37): Xaa is C or S
SXXVPARLSNITIQIMDAANNVVLGEMSDMVVEAXGX

SEQ ID NO: 36294 - protein, 42 aa, Artificial Sequence
  Non-cyclic GFR-binding peptide
  MOD_RES (4)..(5)..(39)..(41): Xaa is C or S
  MOD_RES (19)..(20)..(21)..(22)..(23): Xaa is A or G
  MOD_RES (24)..(25)..(26)..(27): Xaa is A or G or absent
PPTXXVPTRLSNITIQIMXXXXXXXXXLGEMSDMVVESXGXR

SEQ ID NO: 36295 - protein, 35 aa, Artificial Sequence
  Non-cyclic GFR-binding peptide
  MOD_RES (4)..(5): Xaa is C or S
PASXXVPARLSNITIQIMDAANNVVIGEMSDMVVE

SEQ ID NO: 36296 - protein, 38 aa, Artificial Sequence
  Non-cyclic GFR-binding peptide
  MOD_RES (2)..(3)..(35)..(37): Xaa is C or S
PXXAPTKLSNITVQIMDDSSNVILGEMSNMVVRSXGXH

SEQ ID NO: 36297 - protein, 38 aa, Artificial Sequence
  Non-cyclic GFR-binding peptide
  MOD_RES (6)..(7)..(38): Xaa is C or S
ASASPXXVPQDLSNITIQIMVGRTPKVLGEMSMVVKSX

SEQ ID NO: 36298 - protein, 36 aa, Artificial Sequence
  Non-cyclic GFR-binding peptide
  MOD_RES (3)..(4): Xaa is C or S
  MOD_RES (18)..(19)..(20)..(21)..(22): Xaa is A or G
  MOD_RES (23)..(24)..(25)..(26): Xaa is A or G or absent
PTXXVPTRLSNITIQIMXXXXXXXXXLGEMSDMVVE

SEQ ID NO: 36299 - protein, 44 aa, Artificial Sequence
  Non-cyclic GFR-binding peptide
  MOD_RES (6)..(7)..(41)..(43): Xaa is C or S
  MOD_RES (21)..(22)..(23)..(24)..(25): Xaa is A or G
  MOD_RES (26)..(27)..(28)..(29): Xaa is A or G or absent
HVPKPXXAPTKLSNITVQIMXXXXXXXXXIGEMSNMVVRSXGXH

SEQ ID NO: 36300 - protein, 40 aa, Artificial Sequence
  Non-cyclic GFR-binding peptide
  MOD_RES (4)..(5)..(39): Xaa is C or S
  MOD_RES (19)..(20)..(21)..(22)..(23): Xaa is A or G
  MOD_RES (24)..(25)..(26)..(27): Xaa is A or G or absent
PASXXVPARLSNITIQIMXXXXXXXXXIGEMSDMVVEAXG

SEQ ID NO: 36301 - protein, 41 aa, Artificial Sequence
  Non-cyclic GFR-binding peptide
  MOD_RES (6)..(7)..(39)..(41): Xaa is C or S
STPPTXXVPTRLSNITIQIMDSANNVVIGEMSDMVVESXGX

SEQ ID NO: 36302 - protein, 34 aa, Artificial Sequence
  Non-cyclic GFR-binding peptide
  MOD_RES (1)..(32)..(34): Xaa is C or S
XVSQDLSNITIQIMIGKTPKILGEMSMIVKSXKX

SEQ ID NO: 36303 - protein, 36 aa, Artificial Sequence
  Non-cyclic GFR-binding peptide
  MOD_RES (3)..(4): Xaa is C or S
  MOD_RES (18)..(19)..(20)..(21)..(22): Xaa is A or G
  MOD_RES (23)..(24)..(25)..(26): Xaa is A or G or absent
STXXAPVKTSNITMQIMXXXXXXXXXIGEMSMIVEE

SEQ ID NO: 36304 - protein, 34 aa, Artificial Sequence
  Non-cyclic GFR-binding peptide
  MOD_RES (31)..(33): Xaa is C or S
APVKTSNITMQIMDNGRVLLLGEMSMIVEEXGXL

SEQ ID NO: 36305 - protein, 42 aa, Artificial Sequence
  Non-cyclic GFR-binding peptide
  MOD_RES (5)..(6)..(40)..(42): Xaa is C or S
  MOD_RES (20)..(21)..(22)..(23)..(24): Xaa is A or G
  MOD_RES (25)..(26)..(27)..(28): Xaa is A or G or absent
TPPTXXVPTRLSNITIQIMXXXXXXXXXLGEMSDMVVESXGX

SEQ ID NO: 36306 - protein, 37 aa, Artificial Sequence
  Non-cyclic GFR-binding peptide
  MOD_RES (5)..(6): Xaa is C or S
SAGPXXTPTKMSNITMQIMNDKQQIILGEMSGMVVDR

SEQ ID NO: 36307 - protein, 38 aa, Artificial Sequence
  Non-cyclic GFR-binding peptide
  MOD_RES (2)..(3)..(37): Xaa is C or S
  MOD_RES (17)..(18)..(19)..(20)..(21): Xaa is A or G
  MOD_RES (22)..(23)..(24)..(25): Xaa is A or G or absent
SXXVPARLSNITIQIMXXXXXXXXXLGEMSDMVVEAXG

SEQ ID NO: 36308 - protein, 42 aa, Artificial Sequence
  Non-cyclic GFR-binding peptide
  MOD_RES (6)..(7)..(39)..(41): Xaa is C or S
GSAGPXXTPTKMSNITMQIMNDKQQIILGEMSGMVVDRXGXS

SEQ ID NO: 36309 - protein, 38 aa, Artificial Sequence
  Non-cyclic GFR-binding peptide
  MOD_RES (3)..(4)..(38): Xaa is C or S
  MOD_RES (18)..(19)..(20)..(21)..(22): Xaa is A or G
  MOD_RES (23)..(24)..(25)..(26): Xaa is A or G or absent
KPXXAPTKLSNITVQIMXXXXXXXXXLGEMSNMVVRSX

SEQ ID NO: 36310 - protein, 32 aa, Artificial Sequence
  Non-cyclic GFR-binding peptide
  MOD_RES (1)..(2): Xaa is C or S
XXAPTKLSNITVQIMDDSSNVILGEMSNMVVR

SEQ ID NO: 36311 - protein, 36 aa, Artificial Sequence
  Non-cyclic GFR-binding peptide
  MOD_RES (2)..(3): Xaa is C or S
  MOD_RES (17)..(18)..(19)..(20)..(21): Xaa is A or G
  MOD_RES (22)..(23)..(24)..(25): Xaa is A or G or absent
TXXVPTRLSNITIQIMXXXXXXXXXIGEMSDMVVES

SEQ ID NO: 36312 - protein, 37 aa, Artificial Sequence
  Non-cyclic GFR-binding peptide
  MOD_RES (2)..(3)..(35)..(37): Xaa is C or S
PXXAPTKLSNITVQIMDDSSNVILGEMSNMVVRSXGX

SEQ ID NO: 36313 - protein, 37 aa, Artificial Sequence
  Non-cyclic GFR-binding peptide
  MOD_RES (3)..(4)..(37): Xaa is C or S
  MOD_RES (18)..(19)..(20)..(21)..(22): Xaa is A or G
  MOD_RES (23)..(24)..(25)..(26): Xaa is A or G or absent
STXXAPVKTSNITMQIMXXXXXXXXXIGEMSMIVEEX

SEQ ID NO: 36314 - protein, 37 aa, Artificial Sequence
  Non-cyclic GFR-binding peptide
  MOD_RES (5)..(6)..(37): Xaa is C or S
SASPXXVSQDLSNITIQIMIGKTPKILGEMSMIVKSX

SEQ ID NO: 36315 - protein, 39 aa, Artificial Sequence
  Non-cyclic GFR-binding peptide
  MOD_RES (4)..(5)..(39): Xaa is C or S
  MOD_RES (19)..(20)..(21)..(22)..(23): Xaa is A or G
  MOD_RES (24)..(25)..(26)..(27): Xaa is A or G or absent
AGPXXTPTKMSNITMQIMXXXXXXXXXLGEMSGMVVDRX

SEQ ID NO: 36316 - protein, 41 aa, Artificial Sequence
  Non-cyclic GFR-binding peptide
  MOD_RES (5)..(6)..(38)..(40): Xaa is C or S
APASXXVPARLSNITIQIMDAANNVVIGEMSDMVVEAXGXR

SEQ ID NO: 36317 - protein, 37 aa, Artificial Sequence
  Non-cyclic GFR-binding peptide
  MOD_RES (2)..(3)..(37): Xaa is C or S
  MOD_RES (17)..(18)..(19)..(20)..(21): Xaa is A or G
  MOD_RES (22)..(23)..(24)..(25): Xaa is A or G or absent
SXXVPARLSNITIQIMXXXXXXXXXIGEMSDMVVEAX

SEQ ID NO: 36318 - protein, 36 aa, Artificial Sequence
  Non-cyclic GFR-binding peptide
  MOD_RES (34)..(36): Xaa is C or S
  MOD_RES (14)..(15)..(16)..(17)..(18): Xaa is A or G
  MOD_RES (19)..(20)..(21)..(22): Xaa is A or G or absent
VPTRLSNITIQIMXXXXXXXXXLGEMSDMVVESXGX

SEQ ID NO: 36319 - protein, 39 aa, Artificial Sequence
  Non-cyclic GFR-binding peptide
  MOD_RES (4)..(5)..(37)..(39): Xaa is C or S
PASXXVPARLSNITIQIMDAANNVVIGEMSDMVVEAXGX

SEQ ID NO: 36320 - protein, 44 aa, Artificial Sequence
  Non-cyclic GFR-binding peptide
  MOD_RES (6)..(7)..(41)..(43): Xaa is C or S
  MOD_RES (21)..(22)..(23)..(24)..(25): Xaa is A or G
  MOD_RES (26)..(27)..(28)..(29): Xaa is A or G or absent
GSAGPXXTPTKMSNITMQIMXXXXXXXXXIGEMSGMVVDRXGXS

SEQ ID NO: 36321 - protein, 39 aa, Artificial Sequence
  Non-cyclic GFR-binding peptide
  MOD_RES (3)..(4)..(37)..(39): Xaa is C or S
  MOD_RES (18)..(19)..(20)..(21)..(22): Xaa is A or G
  MOD_RES (23)..(24)..(25)..(26): Xaa is A or G or absent
APXXVPQALSNITIQIMXXXXXXXXXLGEMSMIVRSXKX

SEQ ID NO: 36322 - protein, 34 aa, Artificial Sequence
  Non-cyclic GFR-binding peptide
  MOD_RES (1)..(2)..(34): Xaa is C or S
XXVPTRLSNITIQIMDSANNVVIGEMSDMVVESX

SEQ ID NO: 36323 - protein, 35 aa, Artificial Sequence
  Non-cyclic GFR-binding peptide
  MOD_RES (1)..(2)..(35): Xaa is C or S
  MOD_RES (16)..(17)..(18)..(19)..(20): Xaa is A or G
  MOD_RES (21)..(22)..(23)..(24): Xaa is A or G or absent
XXVPQALSNITIQIMXXXXXXXXXLGEMSMIVRSX

SEQ ID NO: 36324 - protein, 40 aa, Artificial Sequence
  Non-cyclic GFR-binding peptide
  MOD_RES (4)..(5)..(37)..(39): Xaa is C or S
PASXXVPARLSNITIQIMDAANNVVIGEMSDMVVEAXGXR

SEQ ID NO: 36325 - protein, 32 aa, Artificial Sequence
  Non-cyclic GFR-binding peptide
  MOD_RES (1)..(1): Xaa is C or S
XVPTRLSNITIQIMDSANNVVIGEMSDMVVES

SEQ ID NO: 36326 - protein, 37 aa, Artificial Sequence
  Non-cyclic GFR-binding peptide
  MOD_RES (4)..(5)..(37): Xaa is C or S
PASXXVPARLSNITIQIMDAANNVVLGEMSDMVVEAX

SEQ ID NO: 36327 - protein, 38 aa, Artificial Sequence
  Non-cyclic GFR-binding peptide
  MOD_RES (1)..(2)..(36)..(38): Xaa is C or S
  MOD_RES (16)..(17)..(18)..(19)..(20): Xaa is A or G
  MOD_RES (21)..(22)..(23)..(24): Xaa is A or G or absent
XXAPTKLSNITVQIMXXXXXXXXXLGEMSNMVVRSXGX

SEQ ID NO: 36328 - protein, 41 aa, Artificial Sequence
  Non-cyclic GFR-binding peptide
  MOD_RES (6)..(7)..(38)..(40): Xaa is C or S
RVPSTXXAPVKTSNITMQIMDNGRVLLIGEMSMIVEEXGXL

SEQ ID NO: 36329 - protein, 34 aa, Artificial Sequence
  Non-cyclic GFR-binding peptide
  MOD_RES (33)..(33): Xaa is C or S
  MOD_RES (14)..(15)..(16)..(17)..(18): Xaa is A or G
  MOD_RES (19)..(20)..(21)..(22): Xaa is A or G or absent
VPQDLSNITIQIMXXXXXXXXXLGEMSMVVKSXK

SEQ ID NO: 36330 - protein, 39 aa, Artificial Sequence
  Non-cyclic GFR-binding peptide
  MOD_RES (1)..(2)..(36)..(38): Xaa is C or S
  MOD_RES (16)..(17)..(18)..(19)..(20): Xaa is A or G
  MOD_RES (21)..(22)..(23)..(24): Xaa is A or G or absent
XXVPTRLSNITIQIMXXXXXXXXXLGEMSDMVVESXGXR

SEQ ID NO: 36331 - protein, 38 aa, Artificial Sequence
  Non-cyclic GFR-binding peptide
  MOD_RES (1)..(35)..(37): Xaa is C or S
  MOD_RES (15)..(16)..(17)..(18)..(19): Xaa is A or G
  MOD_RES (20)..(21)..(22)..(23): Xaa is A or G or absent
XTPTKMSNITMQIMXXXXXXXXXIGEMSGMVVDRXGXS

SEQ ID NO: 36332 - protein, 37 aa, Artificial Sequence
  Non-cyclic GFR-binding peptide
  MOD_RES (2)..(3)..(35)..(37): Xaa is C or S
PXXTPTKMSNITMQIMNDKQQIILGEMSGMVVDRXGX

SEQ ID NO: 36333 - protein, 35 aa, Artificial Sequence
  Non-cyclic GFR-binding peptide
  MOD_RES (1)..(2)..(34): Xaa is C or S
XXVPARLSNITIQIMDAANNVVIGEMSDMVVEAXG

SEQ ID NO: 36334 - protein, 38 aa, Artificial Sequence
  Non-cyclic GFR-binding peptide
  MOD_RES (1)..(35)..(37): Xaa is C or S
  MOD_RES (15)..(16)..(17)..(18)..(19): Xaa is A or G
  MOD_RES (20)..(21)..(22)..(23): Xaa is A or G or absent
XVPARLSNITIQIMXXXXXXXXXLGEMSDMVVEAXGXR

SEQ ID NO: 36335 - protein, 35 aa, Artificial Sequence
  Non-cyclic GFR-binding peptide
  MOD_RES (1)..(32)..(34): Xaa is C or S
XVPQALSNITIQIMVGRKPKVLGEMSMIVRSXKXS

SEQ ID NO: 36336 - protein, 33 aa, Artificial Sequence
  Non-cyclic GFR-binding peptide
  MOD_RES (1)..(1): Xaa is C or S
  MOD_RES (15)..(16)..(17)..(18)..(19): Xaa is A or G
  MOD_RES (20)..(21)..(22)..(23): Xaa is A or G or absent
XVPARLSNITIQIMXXXXXXXXXIGEMSDMVVE

SEQ ID NO: 36337 - protein, 33 aa, Artificial Sequence
  Non-cyclic GFR-binding peptide
  MOD_RES (1)..(2): Xaa is C or S
XXVPTRLSNITIQIMDSANNVVLGEMSDMVVES

SEQ ID NO: 36338 - protein, 34 aa, Artificial Sequence
  Non-cyclic GFR-binding peptide
  MOD_RES (3)..(4): Xaa is C or S
ASXXVPARLSNITIQIMDAANNVVLGEMSDMVVE

SEQ ID NO: 36339 - protein, 40 aa, Artificial Sequence
  Non-cyclic GFR-binding peptide
  MOD_RES (6)..(7): Xaa is C or S
  MOD_RES (21)..(22)..(23)..(24)..(25): Xaa is A or G
  MOD_RES (26)..(27)..(28)..(29): Xaa is A or G or absent
GSAGPXXTPTKMSNITMQIMXXXXXXXXXLGEMSGMVVDR

SEQ ID NO: 36340 - protein, 39 aa, Artificial Sequence
  Non-cyclic GFR-binding peptide
  MOD_RES (4)..(5)..(36)..(38): Xaa is C or S
PSTXXAPVKTSNITMQIMDNGRVLLIGEMSMIVEEXGXL

SEQ ID NO: 36341 - protein, 32 aa, Artificial Sequence
  Non-cyclic GFR-binding peptide
  MOD_RES (14)..(15)..(16)..(17)..(18): Xaa is A or G
  MOD_RES (19)..(20)..(21)..(22): Xaa is A or G or absent
APVKTSNITMQIMXXXXXXXXXLGEMSMIVEE

SEQ ID NO: 36342 - protein, 36 aa, Artificial Sequence
  Non-cyclic GFR-binding peptide
  MOD_RES (2)..(3)..(36): Xaa is C or S
  MOD_RES (17)..(18)..(19)..(20)..(21): Xaa is A or G
  MOD_RES (22)..(23)..(24)..(25): Xaa is A or G or absent
TXXAPVKTSNITMQIMXXXXXXXXXLGEMSMIVEEX

SEQ ID NO: 36343 - protein, 39 aa, Artificial Sequence
  Non-cyclic GFR-binding peptide
  MOD_RES (6)..(7): Xaa is C or S
  MOD_RES (21)..(22)..(23)..(24)..(25): Xaa is A or G
  MOD_RES (26)..(27)..(28)..(29): Xaa is A or G or absent
RVPSTXXAPVKTSNITMQIMXXXXXXXXXLGEMSMIVEE

SEQ ID NO: 36344 - protein, 33 aa, Artificial Sequence
  Non-cyclic GFR-binding peptide
  MOD_RES (32)..(32): Xaa is C or S
VPTRLSNITIQIMDSANNVVIGEMSDMVVESXG

SEQ ID NO: 36345 - protein, 36 aa, Artificial Sequence
  Non-cyclic GFR-binding peptide
  MOD_RES (1)..(33)..(35): Xaa is C or S
XVPARLSNITIQIMDAANNVVIGEMSDMVVEAXGXR

SEQ ID NO: 36346 - protein, 32 aa, Artificial Sequence
  Non-cyclic GFR-binding peptide
  MOD_RES (1)..(2): Xaa is C or S
XXVPARLSNITIQIMDAANNVVLGEMSDMVVE

SEQ ID NO: 36347 - protein, 42 aa, Artificial Sequence
  Non-cyclic GFR-binding peptide
  MOD_RES (5)..(6)..(39)..(41): Xaa is C or S
  MOD_RES (20)..(21)..(22)..(23)..(24): Xaa is A or G
  MOD_RES (25)..(26)..(27)..(28): Xaa is A or G or absent
SASPXXVSQDLSNITIQIMXXXXXXXXXLGEMSMIVKSXKXS

SEQ ID NO: 36348 - protein, 38 aa, Artificial Sequence
  Non-cyclic GFR-binding peptide
  MOD_RES (3)..(4)..(38): Xaa is C or S
  MOD_RES (18)..(19)..(20)..(21)..(22): Xaa is A or G
  MOD_RES (23)..(24)..(25)..(26): Xaa is A or G or absent
PTXXVPTRLSNITIQIMXXXXXXXXXLGEMSDMVVESX

SEQ ID NO: 36349 - protein, 37 aa, Artificial Sequence
  Non-cyclic GFR-binding peptide
  MOD_RES (6)..(7): Xaa is C or S
AAPASXXVPARLSNITIQIMDAANNVVLGEMSDMVVE

SEQ ID NO: 36350 - protein, 43 aa, Artificial Sequence
  Non-cyclic GFR-binding peptide
  MOD_RES (6)..(7)..(41)..(43): Xaa is C or S
  MOD_RES (21)..(22)..(23)..(24)..(25): Xaa is A or G
  MOD_RES (26)..(27)..(28)..(29): Xaa is A or G or absent
GSAGPXXTPTKMSNITMQIMXXXXXXXXXIGEMSGMVVDRXGX

SEQ ID NO: 36351 - protein, 36 aa, Artificial Sequence
  Non-cyclic GFR-binding peptide
  MOD_RES (5)..(6): Xaa is C or S
SAGPXXTPTKMSNITMQIMNDKQQIIIGEMSGMVVD

SEQ ID NO: 36352 - protein, 36 aa, Artificial Sequence
  Non-cyclic GFR-binding peptide
  MOD_RES (4)..(5)..(36): Xaa is C or S
ASPXXVPQDLSNITIQIMVGRTPKVLGEMSMVVKSX

SEQ ID NO: 36353 - protein, 41 aa, Artificial Sequence
  Non-cyclic GFR-binding peptide
  MOD_RES (4)..(5)..(38)..(40): Xaa is C or S
  MOD_RES (19)..(20)..(21)..(22)..(23): Xaa is A or G
  MOD_RES (24)..(25)..(26)..(27): Xaa is A or G or absent
PSTXXAPVKTSNITMQIMXXXXXXXXXIGEMSMIVEEXGXL

SEQ ID NO: 36354 - protein, 37 aa, Artificial Sequence
  Non-cyclic GFR-binding peptide
  MOD_RES (1)..(35)..(37): Xaa is C or S
  MOD_RES (15)..(16)..(17)..(18)..(19): Xaa is A or G
  MOD_RES (20)..(21)..(22)..(23): Xaa is A or G or absent
XTPTKMSNITMQIMXXXXXXXXXLGEMSGMVVDRXGX

SEQ ID NO: 36355 - protein, 36 aa, Artificial Sequence
  Non-cyclic GFR-binding peptide
  MOD_RES (4)..(5): Xaa is C or S
PASXXVPARLSNITIQIMDAANNVVLGEMSDMVVEA

SEQ ID NO: 36356 - protein, 41 aa, Artificial Sequence
  Non-cyclic GFR-binding peptide
  MOD_RES (5)..(6)..(39)..(41): Xaa is C or S
  MOD_RES (20)..(21)..(22)..(23)..(24): Xaa is A or G
  MOD_RES (25)..(26)..(27)..(28): Xaa is A or G or absent
SASPXXVPQDLSNITIQIMXXXXXXXXXLGEMSMVVKSXKX

SEQ ID NO: 36357 - protein, 33 aa, Artificial Sequence
  Non-cyclic GFR-binding peptide
  MOD_RES (32)..(32): Xaa is C or S
TPTKMSNITMQIMNDKQQIILGEMSGMVVDRXG

SEQ ID NO: 36358 - protein, 32 aa, Artificial Sequence
  Non-cyclic GFR-binding peptide
  MOD_RES (31)..(31): Xaa is C or S
APVKTSNITMQIMDNGRVLLLGEMSMIVEEXG

SEQ ID NO: 36359 - protein, 34 aa, Artificial Sequence
  Non-cyclic GFR-binding peptide
  MOD_RES (3)..(4): Xaa is C or S
PTXXVPTRLSNITIQIMDSANNVVLGEMSDMVVE

SEQ ID NO: 36360 - protein, 41 aa, Artificial Sequence
  Non-cyclic GFR-binding peptide
  MOD_RES (4)..(5)..(38)..(40): Xaa is C or S
  MOD_RES (19)..(20)..(21)..(22)..(23): Xaa is A or G
  MOD_RES (24)..(25)..(26)..(27): Xaa is A or G or absent
AAPXXVPQALSNITIQIMXXXXXXXXXLGEMSMIVRSXKXS

SEQ ID NO: 36361 - protein, 35 aa, Artificial Sequence
  Non-cyclic GFR-binding peptide
  MOD_RES (1)..(2)..(34): Xaa is C or S
XXAPTKLSNITVQIMDDSSNVILGEMSNMVVRSXG

SEQ ID NO: 36362 - protein, 38 aa, Artificial Sequence
  Non-cyclic GFR-binding peptide
  MOD_RES (4)..(5): Xaa is C or S
  MOD_RES (19)..(20)..(21)..(22)..(23): Xaa is A or G
  MOD_RES (24)..(25)..(26)..(27): Xaa is A or G or absent
PASXXVPARLSNITIQIMXXXXXXXXXIGEMSDMVVEA

SEQ ID NO: 36363 - protein, 32 aa, Artificial Sequence
  Non-cyclic GFR-binding peptide
  MOD_RES (14)..(15)..(16)..(17)..(18): Xaa is A or G
  MOD_RES (19)..(20)..(21)..(22): Xaa is A or G or absent
VPQDLSNITIQIMXXXXXXXXXLGEMSMVVKS

SEQ ID NO: 36364 - protein, 39 aa, Artificial Sequence
  Non-cyclic GFR-binding peptide
  MOD_RES (5)..(6)..(39): Xaa is C or S
  MOD_RES (20)..(21)..(22)..(23)..(24): Xaa is A or G
  MOD_RES (25)..(26)..(27)..(28): Xaa is A or G or absent
VPSTXXAPVKTSNITMQIMXXXXXXXXXLGEMSMIVEEX

SEQ ID NO: 36365 - protein, 33 aa, Artificial Sequence
  Non-cyclic GFR-binding peptide
  MOD_RES (33)..(33): Xaa is C or S
  MOD_RES (14)..(15)..(16)..(17)..(18): Xaa is A or G
  MOD_RES (19)..(20)..(21)..(22): Xaa is A or G or absent
APVKTSNITMQIMXXXXXXXXXIGEMSMIVEEX

SEQ ID NO: 36366 - protein, 38 aa, Artificial Sequence
  Non-cyclic GFR-binding peptide
  MOD_RES (2)..(3)..(35)..(37): Xaa is C or S
PXXTPTKMSNITMQIMNDKQQIIIGEMSGMVVDRXGXS

SEQ ID NO: 36367 - protein, 31 aa, Artificial Sequence
  Non-cyclic GFR-binding peptide
APTKLSNITVQIMDDSSNVILGEMSNMVVRS

SEQ ID NO: 36368 - protein, 36 aa, Artificial Sequence
  Non-cyclic GFR-binding peptide
  MOD_RES (4)..(5): Xaa is C or S
PPTXXVPTRLSNITIQIMDSANNVVIGEMSDMVVES

SEQ ID NO: 36369 - protein, 40 aa, Artificial Sequence
  Non-cyclic GFR-binding peptide
  MOD_RES (4)..(5)..(38)..(40): Xaa is C or S
  MOD_RES (19)..(20)..(21)..(22)..(23): Xaa is A or G
  MOD_RES (24)..(25)..(26)..(27): Xaa is A or G or absent
PSTXXAPVKTSNITMQIMXXXXXXXXXLGEMSMIVEEXGX

SEQ ID NO: 36370 - protein, 37 aa, Artificial Sequence
  Non-cyclic GFR-binding peptide
  MOD_RES (5)..(6)..(37): Xaa is C or S
SAAPXXVPQALSNITIQIMVGRKPKVLGEMSMIVRSX

SEQ ID NO: 36371 - protein, 41 aa, Artificial Sequence
  Non-cyclic GFR-binding peptide
  MOD_RES (3)..(4)..(38)..(40): Xaa is C or S
  MOD_RES (18)..(19)..(20)..(21)..(22): Xaa is A or G
  MOD_RES (23)..(24)..(25)..(26): Xaa is A or G or absent
PTXXVPTRLSNITIQIMXXXXXXXXXIGEMSDMVVESXGXR

SEQ ID NO: 36372 - protein, 36 aa, Artificial Sequence
  Non-cyclic GFR-binding peptide
  MOD_RES (34)..(36): Xaa is C or S
  MOD_RES (14)..(15)..(16)..(17)..(18): Xaa is A or G
  MOD_RES (19)..(20)..(21)..(22): Xaa is A or G or absent
VPARLSNITIQIMXXXXXXXXXIGEMSDMVVEAXGX

SEQ ID NO: 36373 - protein, 38 aa, Artificial Sequence
  Non-cyclic GFR-binding peptide
  MOD_RES (3)..(4)..(36)..(38): Xaa is C or S
PTXXVPTRLSNITIQIMDSANNVVLGEMSDMVVESXGX

SEQ ID NO: 36374 - protein, 34 aa, Artificial Sequence
  Non-cyclic GFR-binding peptide
  MOD_RES (33)..(33): Xaa is C or S
  MOD_RES (14)..(15)..(16)..(17)..(18): Xaa is A or G
  MOD_RES (19)..(20)..(21)..(22): Xaa is A or G or absent
APVKTSNITMQIMXXXXXXXXXLGEMSMIVEEXG

SEQ ID NO: 36375 - protein, 31 aa, Artificial Sequence
  Non-cyclic GFR-binding peptide
  MOD_RES (1)..(1): Xaa is C or S
XVPARLSNITIQIMDAANNVVIGEMSDMVVE

SEQ ID NO: 36376 - protein, 37 aa, Artificial Sequence
  Non-cyclic GFR-binding peptide
  MOD_RES (6)..(7): Xaa is C or S
GSAGPXXTPTKMSNITMQIMNDKQQIIIGEMSGMVVD

SEQ ID NO: 36377 - protein, 39 aa, Artificial Sequence
  Non-cyclic GFR-binding peptide
  MOD_RES (6)..(7)..(39): Xaa is C or S
HVPKPXXAPTKLSNITVQIMDDSSNVIIGEMSNMVVRSX

SEQ ID NO: 36378 - protein, 32 aa, Artificial Sequence
  Non-cyclic GFR-binding peptide
  MOD_RES (14)..(15)..(16)..(17)..(18): Xaa is A or G
  MOD_RES (19)..(20)..(21)..(22): Xaa is A or G or absent
TPTKMSNITMQIMXXXXXXXXXLGEMSGMVVD

SEQ ID NO: 36379 - protein, 35 aa, Artificial Sequence
  Non-cyclic GFR-binding peptide
  MOD_RES (1)..(2): Xaa is C or S
  MOD_RES (16)..(17)..(18)..(19)..(20): Xaa is A or G
  MOD_RES (21)..(22)..(23)..(24): Xaa is A or G or absent
XXVPARLSNITIQIMXXXXXXXXXLGEMSDMVVEA

SEQ ID NO: 36380 - protein, 39 aa, Artificial Sequence
  Non-cyclic GFR-binding peptide
  MOD_RES (3)..(4)..(37)..(39): Xaa is C or S
  MOD_RES (18)..(19)..(20)..(21)..(22): Xaa is A or G
  MOD_RES (23)..(24)..(25)..(26): Xaa is A or G or absent
SPXXVSQDLSNITIQIMXXXXXXXXXLGEMSMIVKSXKX

SEQ ID NO: 36381 - protein, 41 aa, Artificial Sequence
  Non-cyclic GFR-binding peptide
  MOD_RES (5)..(6)..(40): Xaa is C or S
  MOD_RES (20)..(21)..(22)..(23)..(24): Xaa is A or G
  MOD_RES (25)..(26)..(27)..(28): Xaa is A or G or absent
APASXXVPARLSNITIQIMXXXXXXXXXIGEMSDMVVEAXG

SEQ ID NO: 36382 - protein, 41 aa, Artificial Sequence
  Non-cyclic GFR-binding peptide
  MOD_RES (6)..(7)..(41): Xaa is C or S
  MOD_RES (21)..(22)..(23)..(24)..(25): Xaa is A or G
  MOD_RES (26)..(27)..(28)..(29): Xaa is A or G or absent
HVPKPXXAPTKLSNITVQIMXXXXXXXXXIGEMSNMVVRSX

SEQ ID NO: 36383 - protein, 40 aa, Artificial Sequence
  Non-cyclic GFR-binding peptide
  MOD_RES (5)..(6)..(39): Xaa is C or S
  MOD_RES (20)..(21)..(22)..(23)..(24): Xaa is A or G
  MOD_RES (25)..(26)..(27)..(28): Xaa is A or G or absent
SASPXXVSQDLSNITIQIMXXXXXXXXXLGEMSMIVKSXK

SEQ ID NO: 36384 - protein, 37 aa, Artificial Sequence
  Non-cyclic GFR-binding peptide
  MOD_RES (1)..(2)..(36): Xaa is C or S
  MOD_RES (16)..(17)..(18)..(19)..(20): Xaa is A or G
  MOD_RES (21)..(22)..(23)..(24): Xaa is A or G or absent
XXTPTKMSNITMQIMXXXXXXXXXIGEMSGMVVDRXG

SEQ ID NO: 36385 - protein, 32 aa, Artificial Sequence
  Non-cyclic GFR-binding peptide
  MOD_RES (1)..(1): Xaa is C or S
XTPTKMSNITMQIMNDKQQIIIGEMSGMVVDR

SEQ ID NO: 36386 - protein, 36 aa, Artificial Sequence
  Non-cyclic GFR-binding peptide
  MOD_RES (2)..(3): Xaa is C or S
  MOD_RES (17)..(18)..(19)..(20)..(21): Xaa is A or G
  MOD_RES (22)..(23)..(24)..(25): Xaa is A or G or absent
SXXVPARLSNITIQIMXXXXXXXXXIGEMSDMVVEA

SEQ ID NO: 36387 - protein, 34 aa, Artificial Sequence
  Non-cyclic GFR-binding peptide
  MOD_RES (1)..(2): Xaa is C or S
  MOD_RES (16)..(17)..(18)..(19)..(20): Xaa is A or G
  MOD_RES (21)..(22)..(23)..(24): Xaa is A or G or absent
XXVSQDLSNITIQIMXXXXXXXXXLGEMSMIVKS

SEQ ID NO: 36388 - protein, 32 aa, Artificial Sequence
  Non-cyclic GFR-binding peptide
  MOD_RES (31)..(31): Xaa is C or S
VSQDLSNITIQIMIGKTPKILGEMSMIVKSXK

SEQ ID NO: 36389 - protein, 37 aa, Artificial Sequence
  Non-cyclic GFR-binding peptide
  MOD_RES (34)..(36): Xaa is C or S
  MOD_RES (14)..(15)..(16)..(17)..(18): Xaa is A or G
  MOD_RES (19)..(20)..(21)..(22): Xaa is A or G or absent
TPTKMSNITMQIMXXXXXXXXXIGEMSGMVVDRXGXS

SEQ ID NO: 36390 - protein, 36 aa, Artificial Sequence
  Non-cyclic GFR-binding peptide
  MOD_RES (34)..(36): Xaa is C or S
  MOD_RES (14)..(15)..(16)..(17)..(18): Xaa is A or G
  MOD_RES (19)..(20)..(21)..(22): Xaa is A or G or absent
APTKLSNITVQIMXXXXXXXXXLGEMSNMVVRSXGX

SEQ ID NO: 36391 - protein, 35 aa, Artificial Sequence
  Non-cyclic GFR-binding peptide
  MOD_RES (2)..(3)..(34): Xaa is C or S
TXXAPVKTSNITMQIMDNGRVLLIGEMSMIVEEXG

SEQ ID NO: 36392 - protein, 33 aa, Artificial Sequence
  Non-cyclic GFR-binding peptide
  MOD_RES (2)..(3): Xaa is C or S
TXXAPVKTSNITMQIMDNGRVLLIGEMSMIVEE

SEQ ID NO: 36393 - protein, 38 aa, Artificial Sequence
  Non-cyclic GFR-binding peptide
  MOD_RES (4)..(5): Xaa is C or S
  MOD_RES (19)..(20)..(21)..(22)..(23): Xaa is A or G
  MOD_RES (24)..(25)..(26)..(27): Xaa is A or G or absent
AGPXXTPTKMSNITMQIMXXXXXXXXXIGEMSGMVVDR

SEQ ID NO: 36394 - protein, 37 aa, Artificial Sequence
  Non-cyclic GFR-binding peptide
  MOD_RES (4)..(5)..(37): Xaa is C or S
AGPXXTPTKMSNITMQIMNDKQQIILGEMSGMVVDRX

SEQ ID NO: 36395 - protein, 34 aa, Artificial Sequence
  Non-cyclic GFR-binding peptide
  MOD_RES (1)..(33): Xaa is C or S
XVPTRLSNITIQIMDSANNVVIGEMSDMVVESXG

SEQ ID NO: 36396 - protein, 36 aa, Artificial Sequence
  Non-cyclic GFR-binding peptide
  MOD_RES (34)..(36): Xaa is C or S
  MOD_RES (14)..(15)..(16)..(17)..(18): Xaa is A or G
  MOD_RES (19)..(20)..(21)..(22): Xaa is A or G or absent
VPARLSNITIQIMXXXXXXXXXLGEMSDMVVEAXGX

SEQ ID NO: 36397 - protein, 37 aa, Artificial Sequence
  Non-cyclic GFR-binding peptide
  MOD_RES (3)..(4)..(36): Xaa is C or S
PTXXVPTRLSNITIQIMDSANNVVIGEMSDMVVESXG

SEQ ID NO: 36398 - protein, 42 aa, Artificial Sequence
  Non-cyclic GFR-binding peptide
  MOD_RES (6)..(7)..(41): Xaa is C or S
  MOD_RES (21)..(22)..(23)..(24)..(25): Xaa is A or G
  MOD_RES (26)..(27)..(28)..(29): Xaa is A or G or absent
STPPTXXVPTRLSNITIQIMXXXXXXXXXLGEMSDMVVESXG

SEQ ID NO: 36399 - protein, 33 aa, Artificial Sequence
  Non-cyclic GFR-binding peptide
  MOD_RES (1)..(32): Xaa is C or S
XVPQALSNITIQIMVGRKPKVLGEMSMIVRSXK

SEQ ID NO: 36400 - protein, 35 aa, Artificial Sequence
  Non-cyclic GFR-binding peptide
  MOD_RES (2)..(3)..(35): Xaa is C or S
PXXTPTKMSNITMQIMNDKQQIILGEMSGMVVDRX

SEQ ID NO: 36401 - protein, 36 aa, Artificial Sequence
  Non-cyclic GFR-binding peptide
  MOD_RES (1)..(34)..(36): Xaa is C or S
  MOD_RES (15)..(16)..(17)..(18)..(19): Xaa is A or G
  MOD_RES (20)..(21)..(22)..(23): Xaa is A or G or absent
XVPQDLSNITIQIMXXXXXXXXXLGEMSMVVKSXKX

SEQ ID NO: 36402 - protein, 34 aa, Artificial Sequence
  Non-cyclic GFR-binding peptide
  MOD_RES (2)..(3)..(34): Xaa is C or S
TXXAPVKTSNITMQIMDNGRVLLIGEMSMIVEEX

SEQ ID NO: 36403 - protein, 33 aa, Artificial Sequence
  Non-cyclic GFR-binding peptide
  MOD_RES (1)..(2): Xaa is C or S
XXTPTKMSNITMQIMNDKQQIILGEMSGMVVDR

SEQ ID NO: 36404 - protein, 39 aa, Artificial Sequence
  Non-cyclic GFR-binding peptide
  MOD_RES (3)..(4)..(36)..(38): Xaa is C or S
PTXXVPTRLSNITIQIMDSANNVVIGEMSDMVVESXGXR

SEQ ID NO: 36405 - protein, 40 aa, Artificial Sequence
  Non-cyclic GFR-binding peptide
  MOD_RES (2)..(3)..(37)..(39): Xaa is C or S
  MOD_RES (17)..(18)..(19)..(20)..(21): Xaa is A or G
  MOD_RES (22)..(23)..(24)..(25): Xaa is A or G or absent
TXXVPTRLSNITIQIMXXXXXXXXXLGEMSDMVVESXGXR

SEQ ID NO: 36406 - protein, 36 aa, Artificial Sequence
  Non-cyclic GFR-binding peptide
  MOD_RES (4)..(5): Xaa is C or S
AGPXXTPTKMSNITMQIMNDKQQIILGEMSGMVVDR

SEQ ID NO: 36407 - protein, 37 aa, Artificial Sequence
  Non-cyclic GFR-binding peptide
  MOD_RES (1)..(2)..(34)..(36): Xaa is C or S
XXTPTKMSNITMQIMNDKQQIIIGEMSGMVVDRXGXS

SEQ ID NO: 36408 - protein, 38 aa, Artificial Sequence
  Non-cyclic GFR-binding peptide
  MOD_RES (5)..(6)..(37): Xaa is C or S
SASPXXVPQDLSNITIQIMVGRTPKVLGEMSMVVKSXK

SEQ ID NO: 36409 - protein, 33 aa, Artificial Sequence
  Non-cyclic GFR-binding peptide
  MOD_RES (14)..(15)..(16)..(17)..(18): Xaa is A or G
  MOD_RES (19)..(20)..(21)..(22): Xaa is A or G or absent
TPTKMSNITMQIMXXXXXXXXXLGEMSGMVVDR

SEQ ID NO: 36410 - protein, 40 aa, Artificial Sequence
  Non-cyclic GFR-binding peptide
  MOD_RES (6)..(7)..(40): Xaa is C or S
  MOD_RES (21)..(22)..(23)..(24)..(25): Xaa is A or G
  MOD_RES (26)..(27)..(28)..(29): Xaa is A or G or absent
ASAAPXXVPQALSNITIQIMXXXXXXXXXLGEMSMIVRSX

SEQ ID NO: 36411 - protein, 40 aa, Artificial Sequence
  Non-cyclic GFR-binding peptide
  MOD_RES (4)..(5)..(38)..(40): Xaa is C or S
  MOD_RES (19)..(20)..(21)..(22)..(23): Xaa is A or G
  MOD_RES (24)..(25)..(26)..(27): Xaa is A or G or absent
AAPXXVPQALSNITIQIMXXXXXXXXXLGEMSMIVRSXKX

SEQ ID NO: 36412 - protein, 41 aa, Artificial Sequence
  Non-cyclic GFR-binding peptide
  MOD_RES (5)..(6)..(38)..(40): Xaa is C or S
VPKPXXAPTKLSNITVQIMDDSSNVILGEMSNMVVRSXGXH

SEQ ID NO: 36413 - protein, 33 aa, Artificial Sequence
  Non-cyclic GFR-binding peptide
  MOD_RES (1)..(33): Xaa is C or S
XVPTRLSNITIQIMDSANNVVIGEMSDMVVESX

SEQ ID NO: 36414 - protein, 39 aa, Artificial Sequence
  Non-cyclic GFR-binding peptide
  MOD_RES (4)..(5)..(36)..(38): Xaa is C or S
PSTXXAPVKTSNITMQIMDNGRVLLLGEMSMIVEEXGXL

SEQ ID NO: 36415 - protein, 35 aa, Artificial Sequence
  Non-cyclic GFR-binding peptide
  MOD_RES (2)..(3)..(35): Xaa is C or S
PXXAPTKLSNITVQIMDDSSNVILGEMSNMVVRSX

SEQ ID NO: 36416 - protein, 39 aa, Artificial Sequence
  Non-cyclic GFR-binding peptide
  MOD_RES (3)..(4)..(37)..(39): Xaa is C or S
  MOD_RES (18)..(19)..(20)..(21)..(22): Xaa is A or G
  MOD_RES (23)..(24)..(25)..(26): Xaa is A or G or absent
STXXAPVKTSNITMQIMXXXXXXXXXLGEMSMIVEEXGX

SEQ ID NO: 36417 - protein, 39 aa, Artificial Sequence
  Non-cyclic GFR-binding peptide
  MOD_RES (4)..(5)..(39): Xaa is C or S
  MOD_RES (19)..(20)..(21)..(22)..(23): Xaa is A or G
  MOD_RES (24)..(25)..(26)..(27): Xaa is A or G or absent
PASXXVPARLSNITIQIMXXXXXXXXXIGEMSDMVVEAX

SEQ ID NO: 36418 - protein, 37 aa, Artificial Sequence
  Non-cyclic GFR-binding peptide
  MOD_RES (1)..(2)..(34)..(36): Xaa is C or S
XXVPTRLSNITIQIMDSANNVVLGEMSDMVVESXGXR

SEQ ID NO: 36419 - protein, 37 aa, Artificial Sequence
  Non-cyclic GFR-binding peptide
  MOD_RES (1)..(2)..(35)..(37): Xaa is C or S
  MOD_RES (16)..(17)..(18)..(19)..(20): Xaa is A or G
  MOD_RES (21)..(22)..(23)..(24): Xaa is A or G or absent
XXVPQDLSNITIQIMXXXXXXXXXLGEMSMVVKSXKX

SEQ ID NO: 36420 - protein, 39 aa, Artificial Sequence
  Non-cyclic GFR-binding peptide
  MOD_RES (4)..(5)..(39): Xaa is C or S
  MOD_RES (19)..(20)..(21)..(22)..(23): Xaa is A or G
  MOD_RES (24)..(25)..(26)..(27): Xaa is A or G or absent
PPTXXVPTRLSNITIQIMXXXXXXXXXLGEMSDMVVESX

SEQ ID NO: 36421 - protein, 37 aa, Artificial Sequence
  Non-cyclic GFR-binding peptide
  MOD_RES (34)..(36): Xaa is C or S
  MOD_RES (14)..(15)..(16)..(17)..(18): Xaa is A or G
  MOD_RES (19)..(20)..(21)..(22): Xaa is A or G or absent
VPARLSNITIQIMXXXXXXXXXLGEMSDMVVEAXGXR

SEQ ID NO: 36422 - protein, 40 aa, Artificial Sequence
  Non-cyclic GFR-binding peptide
  MOD_RES (3)..(4)..(38)..(40): Xaa is C or S
  MOD_RES (18)..(19)..(20)..(21)..(22): Xaa is A or G
  MOD_RES (23)..(24)..(25)..(26): Xaa is A or G or absent
PTXXVPTRLSNITIQIMXXXXXXXXXLGEMSDMVVESXGX

SEQ ID NO: 36423 - protein, 40 aa, Artificial Sequence
  Non-cyclic GFR-binding peptide
  MOD_RES (2)..(3)..(37)..(39): Xaa is C or S
  MOD_RES (17)..(18)..(19)..(20)..(21): Xaa is A or G
  MOD_RES (22)..(23)..(24)..(25): Xaa is A or G or absent
PXXTPTKMSNITMQIMXXXXXXXXXLGEMSGMVVDRXGXS

SEQ ID NO: 36424 - protein, 36 aa, Artificial Sequence
  Non-cyclic GFR-binding peptide
  MOD_RES (5)..(6): Xaa is C or S
VPKPXXAPTKLSNITVQIMDDSSNVILGEMSNMVVR

SEQ ID NO: 36425 - protein, 39 aa, Artificial Sequence
  Non-cyclic GFR-binding peptide
  MOD_RES (3)..(4)..(38): Xaa is C or S
  MOD_RES (18)..(19)..(20)..(21)..(22): Xaa is A or G
  MOD_RES (23)..(24)..(25)..(26): Xaa is A or G or absent
KPXXAPTKLSNITVQIMXXXXXXXXXLGEMSNMVVRSXG

SEQ ID NO: 36426 - protein, 38 aa, Artificial Sequence
  Non-cyclic GFR-binding peptide
  MOD_RES (6)..(7): Xaa is C or S
AAPASXXVPARLSNITIQIMDAANNVVIGEMSDMVVEA

SEQ ID NO: 36427 - protein, 36 aa, Artificial Sequence
  Non-cyclic GFR-binding peptide
  MOD_RES (5)..(6): Xaa is C or S
APASXXVPARLSNITIQIMDAANNVVIGEMSDMVVE

SEQ ID NO: 36428 - protein, 33 aa, Artificial Sequence
  Non-cyclic GFR-binding peptide
  MOD_RES (1)..(2): Xaa is C or S
XXAPTKLSNITVQIMDDSSNVILGEMSNMVVRS

SEQ ID NO: 36429 - protein, 40 aa, Artificial Sequence
  Non-cyclic GFR-binding peptide
  MOD_RES (6)..(7)..(38)..(40): Xaa is C or S
ASAAPXXVPQALSNITIQIMVGRKPKVLGEMSMIVRSXKX

SEQ ID NO: 36430 - protein, 35 aa, Artificial Sequence
  Non-cyclic GFR-binding peptide
  MOD_RES (32)..(34): Xaa is C or S
VPTRLSNITIQIMDSANNVVLGEMSDMVVESXGXR

SEQ ID NO: 36431 - protein, 33 aa, Artificial Sequence
  Non-cyclic GFR-binding peptide
  MOD_RES (2)..(3): Xaa is C or S
PXXTPTKMSNITMQIMNDKQQIILGEMSGMVVD

SEQ ID NO: 36432 - protein, 37 aa, Artificial Sequence
  Non-cyclic GFR-binding peptide
  MOD_RES (3)..(4): Xaa is C or S
  MOD_RES (18)..(19)..(20)..(21)..(22): Xaa is A or G
  MOD_RES (23)..(24)..(25)..(26): Xaa is A or G or absent
ASXXVPARLSNITIQIMXXXXXXXXXIGEMSDMVVEA

SEQ ID NO: 36433 - protein, 36 aa, Artificial Sequence
  Non-cyclic GFR-binding peptide
  MOD_RES (3)..(4): Xaa is C or S
  MOD_RES (18)..(19)..(20)..(21)..(22): Xaa is A or G
  MOD_RES (23)..(24)..(25)..(26): Xaa is A or G or absent
ASXXVPARLSNITIQIMXXXXXXXXXIGEMSDMVVE

SEQ ID NO: 36434 - protein, 39 aa, Artificial Sequence
  Non-cyclic GFR-binding peptide
  MOD_RES (4)..(5)..(37)..(39): Xaa is C or S
PASXXVPARLSNITIQIMDAANNVVLGEMSDMVVEAXGX

SEQ ID NO: 36435 - protein, 34 aa, Artificial Sequence
  Non-cyclic GFR-binding peptide
  MOD_RES (3)..(4): Xaa is C or S
GPXXTPTKMSNITMQIMNDKQQIIIGEMSGMVVD

SEQ ID NO: 36436 - protein, 36 aa, Artificial Sequence
  Non-cyclic GFR-binding peptide
  MOD_RES (2)..(3): Xaa is C or S
  MOD_RES (17)..(18)..(19)..(20)..(21): Xaa is A or G
  MOD_RES (22)..(23)..(24)..(25): Xaa is A or G or absent
PXXAPTKLSNITVQIMXXXXXXXXXLGEMSNMVVRS

SEQ ID NO: 36437 - protein, 40 aa, Artificial Sequence
  Non-cyclic GFR-binding peptide
  MOD_RES (4)..(5)..(38)..(40): Xaa is C or S
  MOD_RES (19)..(20)..(21)..(22)..(23): Xaa is A or G
  MOD_RES (24)..(25)..(26)..(27): Xaa is A or G or absent
ASPXXVSQDLSNITIQIMXXXXXXXXXLGEMSMIVKSXKX

SEQ ID NO: 36438 - protein, 40 aa, Artificial Sequence
  Non-cyclic GFR-binding peptide
  MOD_RES (6)..(7)..(40): Xaa is C or S
  MOD_RES (21)..(22)..(23)..(24)..(25): Xaa is A or G
  MOD_RES (26)..(27)..(28)..(29): Xaa is A or G or absent
RVPSTXXAPVKTSNITMQIMXXXXXXXXXLGEMSMIVEEX

SEQ ID NO: 36439 - protein, 39 aa, Artificial Sequence
  Non-cyclic GFR-binding peptide
  MOD_RES (5)..(6): Xaa is C or S
  MOD_RES (20)..(21)..(22)..(23)..(24): Xaa is A or G
  MOD_RES (25)..(26)..(27)..(28): Xaa is A or G or absent
SAGPXXTPTKMSNITMQIMXXXXXXXXXLGEMSGMVVDR

SEQ ID NO: 36440 - protein, 32 aa, Artificial Sequence
  Non-cyclic GFR-binding peptide
  MOD_RES (1)..(2): Xaa is C or S
XXTPTKMSNITMQIMNDKQQIIIGEMSGMVVD

SEQ ID NO: 36441 - protein, 34 aa, Artificial Sequence
  Non-cyclic GFR-binding peptide
  MOD_RES (1)..(2)..(33): Xaa is C or S
XXVPQALSNITIQIMVGRKPKVLGEMSMIVRSXK

SEQ ID NO: 36442 - protein, 36 aa, Artificial Sequence
  Non-cyclic GFR-binding peptide
  MOD_RES (1)..(2)..(34)..(36): Xaa is C or S
XXTPTKMSNITMQIMNDKQQIIIGEMSGMVVDRXGX

SEQ ID NO: 36443 - protein, 31 aa, Artificial Sequence
  Non-cyclic GFR-binding peptide
  MOD_RES (1)..(1): Xaa is C or S
XTPTKMSNITMQIMNDKQQIIIGEMSGMVVD

SEQ ID NO: 36444 - protein, 35 aa, Artificial Sequence
  Non-cyclic GFR-binding peptide
  MOD_RES (1)..(32)..(34): Xaa is C or S
XVPQDLSNITIQIMVGRTPKVLGEMSMVVKSXKXS

SEQ ID NO: 36445 - protein, 36 aa, Artificial Sequence
  Non-cyclic GFR-binding peptide
  MOD_RES (1)..(2)..(36): Xaa is C or S
  MOD_RES (16)..(17)..(18)..(19)..(20): Xaa is A or G
  MOD_RES (21)..(22)..(23)..(24): Xaa is A or G or absent
XXTPTKMSNITMQIMXXXXXXXXXIGEMSGMVVDRX

SEQ ID NO: 36446 - protein, 41 aa, Artificial Sequence
  Non-cyclic GFR-binding peptide
  MOD_RES (6)..(7)..(39)..(41): Xaa is C or S
HVPKPXXAPTKLSNITVQIMDDSSNVIIGEMSNMVVRSXGX

SEQ ID NO: 36447 - protein, 36 aa, Artificial Sequence
  Non-cyclic GFR-binding peptide
  MOD_RES (33)..(35): Xaa is C or S
  MOD_RES (14)..(15)..(16)..(17)..(18): Xaa is A or G
  MOD_RES (19)..(20)..(21)..(22): Xaa is A or G or absent
VPQDLSNITIQIMXXXXXXXXXLGEMSMVVKSXKXS

SEQ ID NO: 36448 - protein, 36 aa, Artificial Sequence
  Non-cyclic GFR-binding peptide
  MOD_RES (1)..(33)..(35): Xaa is C or S
XTPTKMSNITMQIMNDKQQIILGEMSGMVVDRXGXS

SEQ ID NO: 36449 - protein, 36 aa, Artificial Sequence
  Non-cyclic GFR-binding peptide
  MOD_RES (1)..(2)..(34)..(36): Xaa is C or S
XXTPTKMSNITMQIMNDKQQIILGEMSGMVVDRXGX

SEQ ID NO: 36450 - protein, 36 aa, Artificial Sequence
  Non-cyclic GFR-binding peptide
  MOD_RES (3)..(4)..(35): Xaa is C or S
APXXVPQALSNITIQIMVGRKPKVLGEMSMIVRSXK

SEQ ID NO: 36451 - protein, 38 aa, Artificial Sequence
  Non-cyclic GFR-binding peptide
  MOD_RES (5)..(6): Xaa is C or S
  MOD_RES (20)..(21)..(22)..(23)..(24): Xaa is A or G
  MOD_RES (25)..(26)..(27)..(28): Xaa is A or G or absent
APASXXVPARLSNITIQIMXXXXXXXXXLGEMSDMVVE

SEQ ID NO: 36452 - protein, 36 aa, Artificial Sequence
  Non-cyclic GFR-binding peptide
  MOD_RES (34)..(36): Xaa is C or S
  MOD_RES (14)..(15)..(16)..(17)..(18): Xaa is A or G
  MOD_RES (19)..(20)..(21)..(22): Xaa is A or G or absent
TPTKMSNITMQIMXXXXXXXXXIGEMSGMVVDRXGX

SEQ ID NO: 36453 - protein, 35 aa, Artificial Sequence
  Non-cyclic GFR-binding peptide
  MOD_RES (1)..(33)..(35): Xaa is C or S
XVPTRLSNITIQIMDSANNVVLGEMSDMVVESXGX

SEQ ID NO: 36454 - protein, 35 aa, Artificial Sequence
  Non-cyclic GFR-binding peptide
  MOD_RES (1)..(2)..(35): Xaa is C or S
  MOD_RES (16)..(17)..(18)..(19)..(20): Xaa is A or G
  MOD_RES (21)..(22)..(23)..(24): Xaa is A or G or absent
XXVSQDLSNITIQIMXXXXXXXXXLGEMSMIVKSX

SEQ ID NO: 36455 - protein, 36 aa, Artificial Sequence
  Non-cyclic GFR-binding peptide
  MOD_RES (2)..(3)..(34)..(36): Xaa is C or S
PXXVSQDLSNITIQIMIGKTPKILGEMSMIVKSXKX

SEQ ID NO: 36456 - protein, 38 aa, Artificial Sequence
  Non-cyclic GFR-binding peptide
  MOD_RES (4)..(5)..(37): Xaa is C or S
PASXXVPARLSNITIQIMDAANNVVLGEMSDMVVEAXG

SEQ ID NO: 36457 - protein, 33 aa, Artificial Sequence
  Non-cyclic GFR-binding peptide
  MOD_RES (31)..(33): Xaa is C or S
APVKTSNITMQIMDNGRVLLLGEMSMIVEEXGX

SEQ ID NO: 36458 - protein, 36 aa, Artificial Sequence
  Non-cyclic GFR-binding peptide
  MOD_RES (5)..(6): Xaa is C or S
SASPXXVPQDLSNITIQIMVGRTPKVLGEMSMVVKS

SEQ ID NO: 36459 - protein, 32 aa, Artificial Sequence
  Non-cyclic GFR-binding peptide
  MOD_RES (14)..(15)..(16)..(17)..(18): Xaa is A or G
  MOD_RES (19)..(20)..(21)..(22): Xaa is A or G or absent
TPTKMSNITMQIMXXXXXXXXXIGEMSGMVVD

SEQ ID NO: 36460 - protein, 40 aa, Artificial Sequence
  Non-cyclic GFR-binding peptide
  MOD_RES (5)..(6)..(40): Xaa is C or S
  MOD_RES (20)..(21)..(22)..(23)..(24): Xaa is A or G
  MOD_RES (25)..(26)..(27)..(28): Xaa is A or G or absent
APASXXVPARLSNITIQIMXXXXXXXXXLGEMSDMVVEAX

SEQ ID NO: 36461 - protein, 34 aa, Artificial Sequence
  Non-cyclic GFR-binding peptide
  MOD_RES (1)..(2): Xaa is C or S
  MOD_RES (16)..(17)..(18)..(19)..(20): Xaa is A or G
  MOD_RES (21)..(22)..(23)..(24): Xaa is A or G or absent
XXAPVKTSNITMQIMXXXXXXXXXIGEMSMIVEE

SEQ ID NO: 36462 - protein, 40 aa, Artificial Sequence
  Non-cyclic GFR-binding peptide
  MOD_RES (5)..(6)..(40): Xaa is C or S
  MOD_RES (20)..(21)..(22)..(23)..(24): Xaa is A or G
  MOD_RES (25)..(26)..(27)..(28): Xaa is A or G or absent
APASXXVPARLSNITIQIMXXXXXXXXXIGEMSDMVVEAX

SEQ ID NO: 36463 - protein, 39 aa, Artificial Sequence
  Non-cyclic GFR-binding peptide
  MOD_RES (6)..(7): Xaa is C or S
  MOD_RES (21)..(22)..(23)..(24)..(25): Xaa is A or G
  MOD_RES (26)..(27)..(28)..(29): Xaa is A or G or absent
GSAGPXXTPTKMSNITMQIMXXXXXXXXXIGEMSGMVVD

SEQ ID NO: 36464 - protein, 42 aa, Artificial Sequence
  Non-cyclic GFR-binding peptide
  MOD_RES (6)..(7)..(41): Xaa is C or S
  MOD_RES (21)..(22)..(23)..(24)..(25): Xaa is A or G
  MOD_RES (26)..(27)..(28)..(29): Xaa is A or G or absent
HVPKPXXAPTKLSNITVQIMXXXXXXXXXLGEMSNMVVRSXG

SEQ ID NO: 36465 - protein, 35 aa, Artificial Sequence
  Non-cyclic GFR-binding peptide
  MOD_RES (4)..(5): Xaa is C or S
PKPXXAPTKLSNITVQIMDDSSNVILGEMSNMVVR

SEQ ID NO: 36466 - protein, 40 aa, Artificial Sequence
  Non-cyclic GFR-binding peptide
  MOD_RES (6)..(7)..(39): Xaa is C or S
STPPTXXVPTRLSNITIQIMDSANNVVLGEMSDMVVESXG

SEQ ID NO: 36467 - protein, 42 aa, Artificial Sequence
  Non-cyclic GFR-binding peptide
  MOD_RES (4)..(5)..(39)..(41): Xaa is C or S
  MOD_RES (19)..(20)..(21)..(22)..(23): Xaa is A or G
  MOD_RES (24)..(25)..(26)..(27): Xaa is A or G or absent
AGPXXTPTKMSNITMQIMXXXXXXXXXLGEMSGMVVDRXGXS

SEQ ID NO: 36468 - protein, 34 aa, Artificial Sequence
  Non-cyclic GFR-binding peptide
  MOD_RES (1)..(1): Xaa is C or S
  MOD_RES (15)..(16)..(17)..(18)..(19): Xaa is A or G
  MOD_RES (20)..(21)..(22)..(23): Xaa is A or G or absent
XAPTKLSNITVQIMXXXXXXXXXLGEMSNMVVRS

SEQ ID NO: 36469 - protein, 39 aa, Artificial Sequence
  Non-cyclic GFR-binding peptide
  MOD_RES (6)..(7)..(38): Xaa is C or S
RVPSTXXAPVKTSNITMQIMDNGRVLLLGEMSMIVEEXG

SEQ ID NO: 36470 - protein, 37 aa, Artificial Sequence
  Non-cyclic GFR-binding peptide
  MOD_RES (6)..(7): Xaa is C or S
ASAAPXXVPQALSNITIQIMVGRKPKVLGEMSMIVRS

SEQ ID NO: 36471 - protein, 35 aa, Artificial Sequence
  Non-cyclic GFR-binding peptide
  MOD_RES (2)..(3): Xaa is C or S
  MOD_RES (17)..(18)..(19)..(20)..(21): Xaa is A or G
  MOD_RES (22)..(23)..(24)..(25): Xaa is A or G or absent
PXXVPQDLSNITIQIMXXXXXXXXXLGEMSMVVKS

SEQ ID NO: 36472 - protein, 36 aa, Artificial Sequence
  Non-cyclic GFR-binding peptide
  MOD_RES (1)..(2)..(34)..(36): Xaa is C or S
XXVPTRLSNITIQIMDSANNVVIGEMSDMVVESXGX

SEQ ID NO: 36473 - protein, 34 aa, Artificial Sequence
  Non-cyclic GFR-binding peptide
  MOD_RES (3)..(4): Xaa is C or S
PTXXVPTRLSNITIQIMDSANNVVIGEMSDMVVE

SEQ ID NO: 36474 - protein, 42 aa, Artificial Sequence
  Non-cyclic GFR-binding peptide
  MOD_RES (6)..(7)..(39)..(41): Xaa is C or S
AAPASXXVPARLSNITIQIMDAANNVVIGEMSDMVVEAXGXR

SEQ ID NO: 36475 - protein, 39 aa, Artificial Sequence
  Non-cyclic GFR-binding peptide
  MOD_RES (6)..(7)..(38): Xaa is C or S
RVPSTXXAPVKTSNITMQIMDNGRVLLIGEMSMIVEEXG

SEQ ID NO: 36476 - protein, 39 aa, Artificial Sequence
  Non-cyclic GFR-binding peptide
  MOD_RES (6)..(7): Xaa is C or S
  MOD_RES (21)..(22)..(23)..(24)..(25): Xaa is A or G
  MOD_RES (26)..(27)..(28)..(29): Xaa is A or G or absent
ASASPXXVPQDLSNITIQIMXXXXXXXXXLGEMSMVVKS

SEQ ID NO: 36477 - protein, 37 aa, Artificial Sequence
  Non-cyclic GFR-binding peptide
  MOD_RES (5)..(6): Xaa is C or S
TPPTXXVPTRLSNITIQIMDSANNVVIGEMSDMVVES

SEQ ID NO: 36478 - protein, 37 aa, Artificial Sequence
  Non-cyclic GFR-binding peptide
  MOD_RES (1)..(34)..(36): Xaa is C or S
  MOD_RES (15)..(16)..(17)..(18)..(19): Xaa is A or G
  MOD_RES (20)..(21)..(22)..(23): Xaa is A or G or absent
XAPVKTSNITMQIMXXXXXXXXXLGEMSMIVEEXGXL

SEQ ID NO: 36479 - protein, 36 aa, Artificial Sequence
  Non-cyclic GFR-binding peptide
  MOD_RES (2)..(3)..(35): Xaa is C or S
SXXVPARLSNITIQIMDAANNVVLGEMSDMVVEAXG

SEQ ID NO: 36480 - protein, 35 aa, Artificial Sequence
  Non-cyclic GFR-binding peptide
  MOD_RES (1)..(35): Xaa is C or S
  MOD_RES (15)..(16)..(17)..(18)..(19): Xaa is A or G
  MOD_RES (20)..(21)..(22)..(23): Xaa is A or G or absent
XAPTKLSNITVQIMXXXXXXXXXLGEMSNMVVRSX

SEQ ID NO: 36481 - protein, 38 aa, Artificial Sequence
  Non-cyclic GFR-binding peptide
  MOD_RES (4)..(5)..(38): Xaa is C or S
  MOD_RES (19)..(20)..(21)..(22)..(23): Xaa is A or G
  MOD_RES (24)..(25)..(26)..(27): Xaa is A or G or absent
PSTXXAPVKTSNITMQIMXXXXXXXXXIGEMSMIVEEX

SEQ ID NO: 36482 - protein, 42 aa, Artificial Sequence
  Non-cyclic GFR-binding peptide
  MOD_RES (4)..(5)..(39)..(41): Xaa is C or S
  MOD_RES (19)..(20)..(21)..(22)..(23): Xaa is A or G
  MOD_RES (24)..(25)..(26)..(27): Xaa is A or G or absent
AGPXXTPTKMSNITMQIMXXXXXXXXXIGEMSGMVVDRXGXS

SEQ ID NO: 36483 - protein, 31 aa, Artificial Sequence
  Non-cyclic GFR-binding peptide
  MOD_RES (1)..(1): Xaa is C or S
XAPTKLSNITVQIMDDSSNVILGEMSNMVVR

SEQ ID NO: 36484 - protein, 38 aa, Artificial Sequence
  Non-cyclic GFR-binding peptide
  MOD_RES (5)..(6): Xaa is C or S
  MOD_RES (20)..(21)..(22)..(23)..(24): Xaa is A or G
  MOD_RES (25)..(26)..(27)..(28): Xaa is A or G or absent
VPSTXXAPVKTSNITMQIMXXXXXXXXXIGEMSMIVEE

SEQ ID NO: 36485 - protein, 39 aa, Artificial Sequence
  Non-cyclic GFR-binding peptide
  MOD_RES (6)..(7): Xaa is C or S
  MOD_RES (21)..(22)..(23)..(24)..(25): Xaa is A or G
  MOD_RES (26)..(27)..(28)..(29): Xaa is A or G or absent
AAPASXXVPARLSNITIQIMXXXXXXXXXIGEMSDMVVE

SEQ ID NO: 36486 - protein, 35 aa, Artificial Sequence
  Non-cyclic GFR-binding peptide
  MOD_RES (34)..(34): Xaa is C or S
  MOD_RES (14)..(15)..(16)..(17)..(18): Xaa is A or G
  MOD_RES (19)..(20)..(21)..(22): Xaa is A or G or absent
TPTKMSNITMQIMXXXXXXXXXIGEMSGMVVDRXG

SEQ ID NO: 36487 - protein, 42 aa, Artificial Sequence
  Non-cyclic GFR-binding peptide
  MOD_RES (6)..(7)..(40)..(42): Xaa is C or S
  MOD_RES (21)..(22)..(23)..(24)..(25): Xaa is A or G
  MOD_RES (26)..(27)..(28)..(29): Xaa is A or G or absent
ASASPXXVSQDLSNITIQIMXXXXXXXXXLGEMSMIVKSXKX

SEQ ID NO: 36488 - protein, 36 aa, Artificial Sequence
  Non-cyclic GFR-binding peptide
  MOD_RES (5)..(6): Xaa is C or S
TPPTXXVPTRLSNITIQIMDSANNVVLGEMSDMVVE

SEQ ID NO: 36489 - protein, 32 aa, Artificial Sequence
  Non-cyclic GFR-binding peptide
  MOD_RES (1)..(1): Xaa is C or S
XTPTKMSNITMQIMNDKQQIILGEMSGMVVDR

SEQ ID NO: 36490 - protein, 34 aa, Artificial Sequence
  Non-cyclic GFR-binding peptide
  MOD_RES (32)..(34): Xaa is C or S
TPTKMSNITMQIMNDKQQIILGEMSGMVVDRXGX

SEQ ID NO: 36491 - protein, 41 aa, Artificial Sequence
  Non-cyclic GFR-binding peptide
  MOD_RES (6)..(7)..(40): Xaa is C or S
  MOD_RES (21)..(22)..(23)..(24)..(25): Xaa is A or G
  MOD_RES (26)..(27)..(28)..(29): Xaa is A or G or absent
ASAAPXXVPQALSNITIQIMXXXXXXXXXLGEMSMIVRSXK

SEQ ID NO: 36492 - protein, 42 aa, Artificial Sequence
  Non-cyclic GFR-binding peptide
  MOD_RES (5)..(6)..(40)..(42): Xaa is C or S
  MOD_RES (20)..(21)..(22)..(23)..(24): Xaa is A or G
  MOD_RES (25)..(26)..(27)..(28): Xaa is A or G or absent
APASXXVPARLSNITIQIMXXXXXXXXXLGEMSDMVVEAXGX

SEQ ID NO: 36493 - protein, 37 aa, Artificial Sequence
  Non-cyclic GFR-binding peptide
  MOD_RES (2)..(3)..(35)..(37): Xaa is C or S
TXXVPTRLSNITIQIMDSANNVVIGEMSDMVVESXGX

SEQ ID NO: 36494 - protein, 38 aa, Artificial Sequence
  Non-cyclic GFR-binding peptide
  MOD_RES (5)..(6)..(38): Xaa is C or S
APASXXVPARLSNITIQIMDAANNVVLGEMSDMVVEAX

SEQ ID NO: 36495 - protein, 34 aa, Artificial Sequence
  Non-cyclic GFR-binding peptide
  MOD_RES (3)..(4): Xaa is C or S
ASXXVPARLSNITIQIMDAANNVVIGEMSDMVVE

SEQ ID NO: 36496 - protein, 38 aa, Artificial Sequence
  Non-cyclic GFR-binding peptide
  MOD_RES (5)..(6)..(38): Xaa is C or S
TPPTXXVPTRLSNITIQIMDSANNVVLGEMSDMVVESX

SEQ ID NO: 36497 - protein, 36 aa, Artificial Sequence
  Non-cyclic GFR-binding peptide
  MOD_RES (1)..(35): Xaa is C or S
  MOD_RES (15)..(16)..(17)..(18)..(19): Xaa is A or G
  MOD_RES (20)..(21)..(22)..(23): Xaa is A or G or absent
XVPARLSNITIQIMXXXXXXXXXIGEMSDMVVEAXG

SEQ ID NO: 36498 - protein, 40 aa, Artificial Sequence
  Non-cyclic GFR-binding peptide
  MOD_RES (3)..(4)..(37)..(39): Xaa is C or S
  MOD_RES (18)..(19)..(20)..(21)..(22): Xaa is A or G
  MOD_RES (23)..(24)..(25)..(26): Xaa is A or G or absent
STXXAPVKTSNITMQIMXXXXXXXXXIGEMSMIVEEXGXL

SEQ ID NO: 36499 - protein, 41 aa, Artificial Sequence
  Non-cyclic GFR-binding peptide
  MOD_RES (6)..(7)..(40): Xaa is C or S
  MOD_RES (21)..(22)..(23)..(24)..(25): Xaa is A or G
  MOD_RES (26)..(27)..(28)..(29): Xaa is A or G or absent
ASASPXXVPQDLSNITIQIMXXXXXXXXXLGEMSMVVKSXK

SEQ ID NO: 36500 - protein, 39 aa, Artificial Sequence
  Non-cyclic GFR-binding peptide
  MOD_RES (4)..(5)..(36)..(38): Xaa is C or S
ASPXXVSQDLSNITIQIMIGKTPKILGEMSMIVKSXKXS

SEQ ID NO: 36501 - protein, 40 aa, Artificial Sequence
  Non-cyclic GFR-binding peptide
  MOD_RES (6)..(7)..(40): Xaa is C or S
  MOD_RES (21)..(22)..(23)..(24)..(25): Xaa is A or G
  MOD_RES (26)..(27)..(28)..(29): Xaa is A or G or absent
RVPSTXXAPVKTSNITMQIMXXXXXXXXXIGEMSMIVEEX

SEQ ID NO: 36502 - protein, 36 aa, Artificial Sequence
  Non-cyclic GFR-binding peptide
  MOD_RES (1)..(2)..(35): Xaa is C or S
  MOD_RES (16)..(17)..(18)..(19)..(20): Xaa is A or G
  MOD_RES (21)..(22)..(23)..(24): Xaa is A or G or absent
XXVSQDLSNITIQIMXXXXXXXXXLGEMSMIVKSXK

SEQ ID NO: 36503 - protein, 30 aa, Artificial Sequence
  Non-cyclic GFR-binding peptide
APTKLSNITVQIMDDSSNVILGEMSNMVVR

SEQ ID NO: 36504 - protein, 37 aa, Artificial Sequence
  Non-cyclic GFR-binding peptide
  MOD_RES (4)..(5)..(37): Xaa is C or S
PPTXXVPTRLSNITIQIMDSANNVVIGEMSDMVVESX

SEQ ID NO: 36505 - protein, 37 aa, Artificial Sequence
  Non-cyclic GFR-binding peptide
  MOD_RES (4)..(5): Xaa is C or S
  MOD_RES (19)..(20)..(21)..(22)..(23): Xaa is A or G
  MOD_RES (24)..(25)..(26)..(27): Xaa is A or G or absent
PSTXXAPVKTSNITMQIMXXXXXXXXXLGEMSMIVEE

SEQ ID NO: 36506 - protein, 41 aa, Artificial Sequence
  Non-cyclic GFR-binding peptide
  MOD_RES (6)..(7)..(38)..(40): Xaa is C or S
ASASPXXVSQDLSNITIQIMIGKTPKILGEMSMIVKSXKXS

SEQ ID NO: 36507 - protein, 43 aa, Artificial Sequence
  Non-cyclic GFR-binding peptide
  MOD_RES (6)..(7)..(40)..(42): Xaa is C or S
  MOD_RES (21)..(22)..(23)..(24)..(25): Xaa is A or G
  MOD_RES (26)..(27)..(28)..(29): Xaa is A or G or absent
RVPSTXXAPVKTSNITMQIMXXXXXXXXXLGEMSMIVEEXGXL

SEQ ID NO: 36508 - protein, 39 aa, Artificial Sequence
  Non-cyclic GFR-binding peptide
  MOD_RES (5)..(6)..(37)..(39): Xaa is C or S
SAAPXXVPQALSNITIQIMVGRKPKVLGEMSMIVRSXKX

SEQ ID NO: 36509 - protein, 35 aa, Artificial Sequence
  Non-cyclic GFR-binding peptide
  MOD_RES (2)..(3)..(35): Xaa is C or S
TXXVPTRLSNITIQIMDSANNVVIGEMSDMVVESX

SEQ ID NO: 36510 - protein, 39 aa, Artificial Sequence
  Non-cyclic GFR-binding peptide
  MOD_RES (5)..(6): Xaa is C or S
  MOD_RES (20)..(21)..(22)..(23)..(24): Xaa is A or G
  MOD_RES (25)..(26)..(27)..(28): Xaa is A or G or absent
APASXXVPARLSNITIQIMXXXXXXXXXIGEMSDMVVEA

SEQ ID NO: 36511 - protein, 40 aa, Artificial Sequence
  Non-cyclic GFR-binding peptide
  MOD_RES (5)..(6)..(37)..(39): Xaa is C or S
SASPXXVSQDLSNITIQIMIGKTPKILGEMSMIVKSXKXS

SEQ ID NO: 36512 - protein, 43 aa, Artificial Sequence
  Non-cyclic GFR-binding peptide
  MOD_RES (5)..(6)..(40)..(42): Xaa is C or S
  MOD_RES (20)..(21)..(22)..(23)..(24): Xaa is A or G
  MOD_RES (25)..(26)..(27)..(28): Xaa is A or G or absent
SAGPXXTPTKMSNITMQIMXXXXXXXXXIGEMSGMVVDRXGXS

SEQ ID NO: 36513 - protein, 36 aa, Artificial Sequence
  Non-cyclic GFR-binding peptide
  MOD_RES (33)..(35): Xaa is C or S
  MOD_RES (14)..(15)..(16)..(17)..(18): Xaa is A or G
  MOD_RES (19)..(20)..(21)..(22): Xaa is A or G or absent
VSQDLSNITIQIMXXXXXXXXXLGEMSMIVKSXKXS

SEQ ID NO: 36514 - protein, 34 aa, Artificial Sequence
  Non-cyclic GFR-binding peptide
  MOD_RES (1)..(33): Xaa is C or S
XAPTKLSNITVQIMDDSSNVILGEMSNMVVRSXG

SEQ ID NO: 36515 - protein, 36 aa, Artificial Sequence
  Non-cyclic GFR-binding peptide
  MOD_RES (2)..(3)..(34)..(36): Xaa is C or S
PXXVPQALSNITIQIMVGRKPKVLGEMSMIVRSXKX

SEQ ID NO: 36516 - protein, 34 aa, Artificial Sequence
  Non-cyclic GFR-binding peptide
  MOD_RES (2)..(3): Xaa is C or S
PXXTPTKMSNITMQIMNDKQQIIIGEMSGMVVDR

SEQ ID NO: 36517 - protein, 35 aa, Artificial Sequence
  Non-cyclic GFR-binding peptide
  MOD_RES (32)..(34): Xaa is C or S
TPTKMSNITMQIMNDKQQIIIGEMSGMVVDRXGXS

SEQ ID NO: 36518 - protein, 35 aa, Artificial Sequence
  Non-cyclic GFR-binding peptide
  MOD_RES (32)..(34): Xaa is C or S
TPTKMSNITMQIMNDKQQIILGEMSGMVVDRXGXS

SEQ ID NO: 36519 - protein, 34 aa, Artificial Sequence
  Non-cyclic GFR-binding peptide
  MOD_RES (1)..(2)..(34): Xaa is C or S
XXAPTKLSNITVQIMDDSSNVILGEMSNMVVRSX

SEQ ID NO: 36520 - protein, 39 aa, Artificial Sequence
  Non-cyclic GFR-binding peptide
  MOD_RES (5)..(6)..(39): Xaa is C or S
  MOD_RES (20)..(21)..(22)..(23)..(24): Xaa is A or G
  MOD_RES (25)..(26)..(27)..(28): Xaa is A or G or absent
SASPXXVSQDLSNITIQIMXXXXXXXXXLGEMSMIVKSX

SEQ ID NO: 36521 - protein, 31 aa, Artificial Sequence
  Non-cyclic GFR-binding peptide
  MOD_RES (1)..(1): Xaa is C or S
XVSQDLSNITIQIMIGKTPKILGEMSMIVKS

SEQ ID NO: 36522 - protein, 35 aa, Artificial Sequence
  Non-cyclic GFR-binding peptide
  MOD_RES (2)..(3)..(35): Xaa is C or S
SXXVPARLSNITIQIMDAANNVVLGEMSDMVVEAX

SEQ ID NO: 36523 - protein, 38 aa, Artificial Sequence
  Non-cyclic GFR-binding peptide
  MOD_RES (3)..(4)..(36)..(38): Xaa is C or S
GPXXTPTKMSNITMQIMNDKQQIIIGEMSGMVVDRXGX

SEQ ID NO: 36524 - protein, 34 aa, Artificial Sequence
  Non-cyclic GFR-binding peptide
  MOD_RES (2)..(3)..(34): Xaa is C or S
PXXVPQALSNITIQIMVGRKPKVLGEMSMIVRSX

SEQ ID NO: 36525 - protein, 34 aa, Artificial Sequence
  Non-cyclic GFR-binding peptide
  MOD_RES (1)..(2): Xaa is C or S
  MOD_RES (16)..(17)..(18)..(19)..(20): Xaa is A or G
  MOD_RES (21)..(22)..(23)..(24): Xaa is A or G or absent
XXVPTRLSNITIQIMXXXXXXXXXLGEMSDMVVE

SEQ ID NO: 36526 - protein, 33 aa, Artificial Sequence
  Non-cyclic GFR-binding peptide
  MOD_RES (14)..(15)..(16)..(17)..(18): Xaa is A or G
  MOD_RES (19)..(20)..(21)..(22): Xaa is A or G or absent
APTKLSNITVQIMXXXXXXXXXLGEMSNMVVRS

SEQ ID NO: 36527 - protein, 41 aa, Artificial Sequence
  Non-cyclic GFR-binding peptide
  MOD_RES (5)..(6)..(40): Xaa is C or S
  MOD_RES (20)..(21)..(22)..(23)..(24): Xaa is A or G
  MOD_RES (25)..(26)..(27)..(28): Xaa is A or G or absent
VPKPXXAPTKLSNITVQIMXXXXXXXXXLGEMSNMVVRSXG

SEQ ID NO: 36528 - protein, 36 aa, Artificial Sequence
  Non-cyclic GFR-binding peptide
  MOD_RES (5)..(6): Xaa is C or S
TPPTXXVPTRLSNITIQIMDSANNVVIGEMSDMVVE

SEQ ID NO: 36529 - protein, 37 aa, Artificial Sequence
  Non-cyclic GFR-binding peptide
  MOD_RES (6)..(7): Xaa is C or S
HVPKPXXAPTKLSNITVQIMDDSSNVIIGEMSNMVVR

SEQ ID NO: 36530 - protein, 34 aa, Artificial Sequence
  Non-cyclic GFR-binding peptide
  MOD_RES (2)..(3): Xaa is C or S
TXXVPTRLSNITIQIMDSANNVVIGEMSDMVVES

SEQ ID NO: 36531 - protein, 35 aa, Artificial Sequence
  Non-cyclic GFR-binding peptide
  MOD_RES (1)..(2)..(34): Xaa is C or S
XXVPARLSNITIQIMDAANNVVLGEMSDMVVEAXG

SEQ ID NO: 36532 - protein, 42 aa, Artificial Sequence
  Non-cyclic GFR-binding peptide
  MOD_RES (6)..(7)..(40)..(42): Xaa is C or S
  MOD_RES (21)..(22)..(23)..(24)..(25): Xaa is A or G
  MOD_RES (26)..(27)..(28)..(29): Xaa is A or G or absent
RVPSTXXAPVKTSNITMQIMXXXXXXXXXIGEMSMIVEEXGX

SEQ ID NO: 36533 - protein, 34 aa, Artificial Sequence
  Non-cyclic GFR-binding peptide
  MOD_RES (33)..(33): Xaa is C or S
  MOD_RES (14)..(15)..(16)..(17)..(18): Xaa is A or G
  MOD_RES (19)..(20)..(21)..(22): Xaa is A or G or absent
APVKTSNITMQIMXXXXXXXXXIGEMSMIVEEXG

SEQ ID NO: 36534 - protein, 32 aa, Artificial Sequence
  Non-cyclic GFR-binding peptide
  MOD_RES (1)..(1): Xaa is C or S
XVPARLSNITIQIMDAANNVVIGEMSDMVVEA

SEQ ID NO: 36535 - protein, 34 aa, Artificial Sequence
  Non-cyclic GFR-binding peptide
  MOD_RES (1)..(32)..(34): Xaa is C or S
XVPQDLSNITIQIMVGRTPKVLGEMSMVVKSXKX

SEQ ID NO: 36536 - protein, 39 aa, Artificial Sequence
  Non-cyclic GFR-binding peptide
  MOD_RES (6)..(7): Xaa is C or S
  MOD_RES (21)..(22)..(23)..(24)..(25): Xaa is A or G
  MOD_RES (26)..(27)..(28)..(29): Xaa is A or G or absent
ASASPXXVSQDLSNITIQIMXXXXXXXXXLGEMSMIVKS

SEQ ID NO: 36537 - protein, 36 aa, Artificial Sequence
  Non-cyclic GFR-binding peptide
  MOD_RES (2)..(3): Xaa is C or S
  MOD_RES (17)..(18)..(19)..(20)..(21): Xaa is A or G
  MOD_RES (22)..(23)..(24)..(25): Xaa is A or G or absent
PXXTPTKMSNITMQIMXXXXXXXXXIGEMSGMVVDR

SEQ ID NO: 36538 - protein, 35 aa, Artificial Sequence
  Non-cyclic GFR-binding peptide
  MOD_RES (34)..(34): Xaa is C or S
  MOD_RES (14)..(15)..(16)..(17)..(18): Xaa is A or G
  MOD_RES (19)..(20)..(21)..(22): Xaa is A or G or absent
TPTKMSNITMQIMXXXXXXXXXLGEMSGMVVDRXG

SEQ ID NO: 36539 - protein, 38 aa, Artificial Sequence
  Non-cyclic GFR-binding peptide
  MOD_RES (5)..(6): Xaa is C or S
  MOD_RES (20)..(21)..(22)..(23)..(24): Xaa is A or G
  MOD_RES (25)..(26)..(27)..(28): Xaa is A or G or absent
SASPXXVPQDLSNITIQIMXXXXXXXXXLGEMSMVVKS

SEQ ID NO: 36540 - protein, 34 aa, Artificial Sequence
  Non-cyclic GFR-binding peptide
  MOD_RES (1)..(34): Xaa is C or S
  MOD_RES (15)..(16)..(17)..(18)..(19): Xaa is A or G
  MOD_RES (20)..(21)..(22)..(23): Xaa is A or G or absent
XVPQALSNITIQIMXXXXXXXXXLGEMSMIVRSX

SEQ ID NO: 36541 - protein, 35 aa, Artificial Sequence
  Non-cyclic GFR-binding peptide
  MOD_RES (1)..(34): Xaa is C or S
  MOD_RES (15)..(16)..(17)..(18)..(19): Xaa is A or G
  MOD_RES (20)..(21)..(22)..(23): Xaa is A or G or absent
XVPQDLSNITIQIMXXXXXXXXXLGEMSMVVKSXK

SEQ ID NO: 36542 - protein, 41 aa, Artificial Sequence
  Non-cyclic GFR-binding peptide
  MOD_RES (6)..(7)..(38)..(40): Xaa is C or S
ASAAPXXVPQALSNITIQIMVGRKPKVLGEMSMIVRSXKXS

SEQ ID NO: 36543 - protein, 44 aa, Artificial Sequence
  Non-cyclic GFR-binding peptide
  MOD_RES (6)..(7)..(41)..(43): Xaa is C or S
  MOD_RES (21)..(22)..(23)..(24)..(25): Xaa is A or G
  MOD_RES (26)..(27)..(28)..(29): Xaa is A or G or absent
AAPASXXVPARLSNITIQIMXXXXXXXXXLGEMSDMVVEAXGXR

SEQ ID NO: 36544 - protein, 38 aa, Artificial Sequence
  Non-cyclic GFR-binding peptide
  MOD_RES (1)..(35)..(37): Xaa is C or S
  MOD_RES (15)..(16)..(17)..(18)..(19): Xaa is A or G
  MOD_RES (20)..(21)..(22)..(23): Xaa is A or G or absent
XVPTRLSNITIQIMXXXXXXXXXLGEMSDMVVESXGXR

SEQ ID NO: 36545 - protein, 38 aa, Artificial Sequence
  Non-cyclic GFR-binding peptide
  MOD_RES (1)..(35)..(37): Xaa is C or S
  MOD_RES (15)..(16)..(17)..(18)..(19): Xaa is A or G
  MOD_RES (20)..(21)..(22)..(23): Xaa is A or G or absent
XVPTRLSNITIQIMXXXXXXXXXIGEMSDMVVESXGXR

SEQ ID NO: 36546 - protein, 42 aa, Artificial Sequence
  Non-cyclic GFR-binding peptide
  MOD_RES (6)..(7)..(41): Xaa is C or S
  MOD_RES (21)..(22)..(23)..(24)..(25): Xaa is A or G
  MOD_RES (26)..(27)..(28)..(29): Xaa is A or G or absent
HVPKPXXAPTKLSNITVQIMXXXXXXXXXIGEMSNMVVRSXG

SEQ ID NO: 36547 - protein, 35 aa, Artificial Sequence
  Non-cyclic GFR-binding peptide
  MOD_RES (1)..(2): Xaa is C or S
  MOD_RES (16)..(17)..(18)..(19)..(20): Xaa is A or G
  MOD_RES (21)..(22)..(23)..(24): Xaa is A or G or absent
XXTPTKMSNITMQIMXXXXXXXXXLGEMSGMVVDR

SEQ ID NO: 36548 - protein, 33 aa, Artificial Sequence
  Non-cyclic GFR-binding peptide
  MOD_RES (32)..(32): Xaa is C or S
VPTRLSNITIQIMDSANNVVLGEMSDMVVESXG

SEQ ID NO: 36549 - protein, 40 aa, Artificial Sequence
  Non-cyclic GFR-binding peptide
  MOD_RES (6)..(7)..(40): Xaa is C or S
  MOD_RES (21)..(22)..(23)..(24)..(25): Xaa is A or G
  MOD_RES (26)..(27)..(28)..(29): Xaa is A or G or absent
ASASPXXVSQDLSNITIQIMXXXXXXXXXLGEMSMIVKSX

SEQ ID NO: 36550 - protein, 40 aa, Artificial Sequence
  Non-cyclic GFR-binding peptide
  MOD_RES (2)..(3)..(37)..(39): Xaa is C or S
  MOD_RES (17)..(18)..(19)..(20)..(21): Xaa is A or G
  MOD_RES (22)..(23)..(24)..(25): Xaa is A or G or absent
PXXAPTKLSNITVQIMXXXXXXXXXLGEMSNMVVRSXGXH

SEQ ID NO: 36551 - protein, 32 aa, Artificial Sequence
  Non-cyclic GFR-binding peptide
  MOD_RES (1)..(2): Xaa is C or S
XXAPVKTSNITMQIMDNGRVLLLGEMSMIVEE

SEQ ID NO: 36552 - protein, 37 aa, Artificial Sequence
  Non-cyclic GFR-binding peptide
  MOD_RES (4)..(5): Xaa is C or S
  MOD_RES (19)..(20)..(21)..(22)..(23): Xaa is A or G
  MOD_RES (24)..(25)..(26)..(27): Xaa is A or G or absent
PSTXXAPVKTSNITMQIMXXXXXXXXXIGEMSMIVEE

SEQ ID NO: 36553 - protein, 34 aa, Artificial Sequence
  Non-cyclic GFR-binding peptide
  MOD_RES (31)..(33): Xaa is C or S
VPQALSNITIQIMVGRKPKVLGEMSMIVRSXKXS

SEQ ID NO: 36554 - protein, 33 aa, Artificial Sequence
  Non-cyclic GFR-binding peptide
  MOD_RES (2)..(3): Xaa is C or S
PXXAPTKLSNITVQIMDDSSNVILGEMSNMVVR

SEQ ID NO: 36555 - protein, 43 aa, Artificial Sequence
  Non-cyclic GFR-binding peptide
  MOD_RES (5)..(6)..(40)..(42): Xaa is C or S
  MOD_RES (20)..(21)..(22)..(23)..(24): Xaa is A or G
  MOD_RES (25)..(26)..(27)..(28): Xaa is A or G or absent
VPKPXXAPTKLSNITVQIMXXXXXXXXXLGEMSNMVVRSXGXH

SEQ ID NO: 36556 - protein, 33 aa, Artificial Sequence
  Non-cyclic GFR-binding peptide
  MOD_RES (1)..(1): Xaa is C or S
  MOD_RES (15)..(16)..(17)..(18)..(19): Xaa is A or G
  MOD_RES (20)..(21)..(22)..(23): Xaa is A or G or absent
XVPARLSNITIQIMXXXXXXXXXLGEMSDMVVE

SEQ ID NO: 36557 - protein, 38 aa, Artificial Sequence
  Non-cyclic GFR-binding peptide
  MOD_RES (2)..(3)..(37): Xaa is C or S
  MOD_RES (17)..(18)..(19)..(20)..(21): Xaa is A or G
  MOD_RES (22)..(23)..(24)..(25): Xaa is A or G or absent
PXXAPTKLSNITVQIMXXXXXXXXXLGEMSNMVVRSXG

SEQ ID NO: 36558 - protein, 40 aa, Artificial Sequence
  Non-cyclic GFR-binding peptide
  MOD_RES (6)..(7)..(39): Xaa is C or S
HVPKPXXAPTKLSNITVQIMDDSSNVIIGEMSNMVVRSXG

SEQ ID NO: 36559 - protein, 40 aa, Artificial Sequence
  Non-cyclic GFR-binding peptide
  MOD_RES (4)..(5)..(39): Xaa is C or S
  MOD_RES (19)..(20)..(21)..(22)..(23): Xaa is A or G
  MOD_RES (24)..(25)..(26)..(27): Xaa is A or G or absent
PPTXXVPTRLSNITIQIMXXXXXXXXXLGEMSDMVVESXG

SEQ ID NO: 36560 - protein, 38 aa, Artificial Sequence
  Non-cyclic GFR-binding peptide
  MOD_RES (5)..(6): Xaa is C or S
  MOD_RES (20)..(21)..(22)..(23)..(24): Xaa is A or G
  MOD_RES (25)..(26)..(27)..(28): Xaa is A or G or absent
VPSTXXAPVKTSNITMQIMXXXXXXXXXLGEMSMIVEE

SEQ ID NO: 36561 - protein, 34 aa, Artificial Sequence
  Non-cyclic GFR-binding peptide
  MOD_RES (1)..(1): Xaa is C or S
  MOD_RES (15)..(16)..(17)..(18)..(19): Xaa is A or G
  MOD_RES (20)..(21)..(22)..(23): Xaa is A or G or absent
XVPARLSNITIQIMXXXXXXXXXIGEMSDMVVEA

SEQ ID NO: 36562 - protein, 33 aa, Artificial Sequence
  Non-cyclic GFR-binding peptide
  MOD_RES (31)..(33): Xaa is C or S
VPQALSNITIQIMVGRKPKVLGEMSMIVRSXKX

SEQ ID NO: 36563 - protein, 42 aa, Artificial Sequence
  Non-cyclic GFR-binding peptide
  MOD_RES (6)..(7)..(39)..(41): Xaa is C or S
HVPKPXXAPTKLSNITVQIMDDSSNVILGEMSNMVVRSXGXH

SEQ ID NO: 36564 - protein, 33 aa, Artificial Sequence
  Non-cyclic GFR-binding peptide
  MOD_RES (31)..(33): Xaa is C or S
VSQDLSNITIQIMIGKTPKILGEMSMIVKSXKX

SEQ ID NO: 36565 - protein, 37 aa, Artificial Sequence
  Non-cyclic GFR-binding peptide
  MOD_RES (1)..(35)..(37): Xaa is C or S
  MOD_RES (15)..(16)..(17)..(18)..(19): Xaa is A or G
  MOD_RES (20)..(21)..(22)..(23): Xaa is A or G or absent
XVPTRLSNITIQIMXXXXXXXXXIGEMSDMVVESXGX

SEQ ID NO: 36566 - protein, 39 aa, Artificial Sequence
  Non-cyclic GFR-binding peptide
  MOD_RES (6)..(7)..(38): Xaa is C or S
ASAAPXXVPQALSNITIQIMVGRKPKVLGEMSMIVRSXK

SEQ ID NO: 36567 - protein, 38 aa, Artificial Sequence
  Non-cyclic GFR-binding peptide
  MOD_RES (5)..(6)..(38): Xaa is C or S
APASXXVPARLSNITIQIMDAANNVVIGEMSDMVVEAX

SEQ ID NO: 36568 - protein, 35 aa, Artificial Sequence
  Non-cyclic GFR-binding peptide
  MOD_RES (33)..(35): Xaa is C or S
  MOD_RES (14)..(15)..(16)..(17)..(18): Xaa is A or G
  MOD_RES (19)..(20)..(21)..(22): Xaa is A or G or absent
VPQALSNITIQIMXXXXXXXXXLGEMSMIVRSXKX

SEQ ID NO: 36569 - protein, 37 aa, Artificial Sequence
  Non-cyclic GFR-binding peptide
  MOD_RES (2)..(3)..(36): Xaa is C or S
  MOD_RES (17)..(18)..(19)..(20)..(21): Xaa is A or G
  MOD_RES (22)..(23)..(24)..(25): Xaa is A or G or absent
TXXAPVKTSNITMQIMXXXXXXXXXLGEMSMIVEEXG

SEQ ID NO: 36570 - protein, 32 aa, Artificial Sequence
  Non-cyclic GFR-binding peptide
  MOD_RES (31)..(31): Xaa is C or S
VPQALSNITIQIMVGRKPKVLGEMSMIVRSXK

SEQ ID NO: 36571 - protein, 42 aa, Artificial Sequence
  Non-cyclic GFR-binding peptide
  MOD_RES (4)..(5)..(39)..(41): Xaa is C or S
  MOD_RES (19)..(20)..(21)..(22)..(23): Xaa is A or G
  MOD_RES (24)..(25)..(26)..(27): Xaa is A or G or absent
PASXXVPARLSNITIQIMXXXXXXXXXLGEMSDMVVEAXGXR

SEQ ID NO: 36572 - protein, 31 aa, Artificial Sequence
  Non-cyclic GFR-binding peptide
  MOD_RES (1)..(1): Xaa is C or S
XVPQALSNITIQIMVGRKPKVLGEMSMIVRS

SEQ ID NO: 36573 - protein, 35 aa, Artificial Sequence
  Non-cyclic GFR-binding peptide
  MOD_RES (34)..(34): Xaa is C or S
  MOD_RES (14)..(15)..(16)..(17)..(18): Xaa is A or G
  MOD_RES (19)..(20)..(21)..(22): Xaa is A or G or absent
VPTRLSNITIQIMXXXXXXXXXLGEMSDMVVESXG

SEQ ID NO: 36574 - protein, 34 aa, Artificial Sequence
  Non-cyclic GFR-binding peptide
  MOD_RES (1)..(34): Xaa is C or S
  MOD_RES (15)..(16)..(17)..(18)..(19): Xaa is A or G
  MOD_RES (20)..(21)..(22)..(23): Xaa is A or G or absent
XAPVKTSNITMQIMXXXXXXXXXLGEMSMIVEEX

SEQ ID NO: 36575 - protein, 34 aa, Artificial Sequence
  Non-cyclic GFR-binding peptide
  MOD_RES (2)..(3): Xaa is C or S
SXXVPARLSNITIQIMDAANNVVLGEMSDMVVEA

SEQ ID NO: 36576 - protein, 31 aa, Artificial Sequence
  Non-cyclic GFR-binding peptide
TPTKMSNITMQIMNDKQQIIIGEMSGMVVDR

SEQ ID NO: 36577 - protein, 39 aa, Artificial Sequence
  Non-cyclic GFR-binding peptide
  MOD_RES (3)..(4)..(36)..(38): Xaa is C or S
ASXXVPARLSNITIQIMDAANNVVLGEMSDMVVEAXGXR

SEQ ID NO: 36578 - protein, 40 aa, Artificial Sequence
  Non-cyclic GFR-binding peptide
  MOD_RES (6)..(7)..(39): Xaa is C or S
STPPTXXVPTRLSNITIQIMDSANNVVIGEMSDMVVESXG

SEQ ID NO: 36579 - protein, 37 aa, Artificial Sequence
  Non-cyclic GFR-binding peptide
  MOD_RES (4)..(5)..(37): Xaa is C or S
PPTXXVPTRLSNITIQIMDSANNVVLGEMSDMVVESX

SEQ ID NO: 36580 - protein, 35 aa, Artificial Sequence
  Non-cyclic GFR-binding peptide
  MOD_RES (3)..(4): Xaa is C or S
GPXXTPTKMSNITMQIMNDKQQIILGEMSGMVVDR

SEQ ID NO: 36581 - protein, 36 aa, Artificial Sequence
  Non-cyclic GFR-binding peptide
  MOD_RES (2)..(3)..(34)..(36): Xaa is C or S
TXXAPVKTSNITMQIMDNGRVLLIGEMSMIVEEXGX

SEQ ID NO: 36582 - protein, 38 aa, Artificial Sequence
  Non-cyclic GFR-binding peptide
  MOD_RES (6)..(7): Xaa is C or S
GSAGPXXTPTKMSNITMQIMNDKQQIIIGEMSGMVVDR

SEQ ID NO: 36583 - protein, 37 aa, Artificial Sequence
  Non-cyclic GFR-binding peptide
  MOD_RES (1)..(2)..(34)..(36): Xaa is C or S
XXVPARLSNITIQIMDAANNVVIGEMSDMVVEAXGXR

SEQ ID NO: 36584 - protein, 37 aa, Artificial Sequence
  Non-cyclic GFR-binding peptide
  MOD_RES (1)..(2)..(34)..(36): Xaa is C or S
XXVPARLSNITIQIMDAANNVVLGEMSDMVVEAXGXR

SEQ ID NO: 36585 - protein, 35 aa, Artificial Sequence
  Non-cyclic GFR-binding peptide
  MOD_RES (2)..(3)..(35): Xaa is C or S
SXXVPARLSNITIQIMDAANNVVIGEMSDMVVEAX

SEQ ID NO: 36586 - protein, 38 aa, Artificial Sequence
  Non-cyclic GFR-binding peptide
  MOD_RES (1)..(2)..(35)..(37): Xaa is C or S
  MOD_RES (16)..(17)..(18)..(19)..(20): Xaa is A or G
  MOD_RES (21)..(22)..(23)..(24): Xaa is A or G or absent
XXAPVKTSNITMQIMXXXXXXXXXLGEMSMIVEEXGXL

SEQ ID NO: 36587 - protein, 36 aa, Artificial Sequence
  Non-cyclic GFR-binding peptide
  MOD_RES (4)..(5)..(36): Xaa is C or S
PSTXXAPVKTSNITMQIMDNGRVLLLGEMSMIVEEX

SEQ ID NO: 36588 - protein, 40 aa, Artificial Sequence
  Non-cyclic GFR-binding peptide
  MOD_RES (5)..(6)..(40): Xaa is C or S
  MOD_RES (20)..(21)..(22)..(23)..(24): Xaa is A or G
  MOD_RES (25)..(26)..(27)..(28): Xaa is A or G or absent
SAGPXXTPTKMSNITMQIMXXXXXXXXXLGEMSGMVVDRX

SEQ ID NO: 36589 - protein, 42 aa, Artificial Sequence
  Non-cyclic GFR-binding peptide
  MOD_RES (6)..(7)..(40)..(42): Xaa is C or S
  MOD_RES (21)..(22)..(23)..(24)..(25): Xaa is A or G
  MOD_RES (26)..(27)..(28)..(29): Xaa is A or G or absent
ASAAPXXVPQALSNITIQIMXXXXXXXXXLGEMSMIVRSXKX

SEQ ID NO: 36590 - protein, 35 aa, Artificial Sequence
  Non-cyclic GFR-binding peptide
  MOD_RES (2)..(3)..(35): Xaa is C or S
TXXVPTRLSNITIQIMDSANNVVLGEMSDMVVESX

SEQ ID NO: 36591 - protein, 37 aa, Artificial Sequence
  Non-cyclic GFR-binding peptide
  MOD_RES (6)..(7): Xaa is C or S
ASASPXXVPQDLSNITIQIMVGRTPKVLGEMSMVVKS

SEQ ID NO: 36592 - protein, 35 aa, Artificial Sequence
  Non-cyclic GFR-binding peptide
  MOD_RES (1)..(2)..(34): Xaa is C or S
XXTPTKMSNITMQIMNDKQQIIIGEMSGMVVDRXG

SEQ ID NO: 36593 - protein, 36 aa, Artificial Sequence
  Non-cyclic GFR-binding peptide
  MOD_RES (2)..(3)..(34)..(36): Xaa is C or S
TXXAPVKTSNITMQIMDNGRVLLLGEMSMIVEEXGX

SEQ ID NO: 36594 - protein, 40 aa, Artificial Sequence
  Non-cyclic GFR-binding peptide
  MOD_RES (6)..(7)..(38)..(40): Xaa is C or S
ASASPXXVPQDLSNITIQIMVGRTPKVLGEMSMVVKSXKX

SEQ ID NO: 36595 - protein, 39 aa, Artificial Sequence
  Non-cyclic GFR-binding peptide
  MOD_RES (4)..(5)..(37)..(39): Xaa is C or S
AGPXXTPTKMSNITMQIMNDKQQIILGEMSGMVVDRXGX

SEQ ID NO: 36596 - protein, 34 aa, Artificial Sequence
  Non-cyclic GFR-binding peptide
  MOD_RES (2)..(3)..(34): Xaa is C or S
PXXVSQDLSNITIQIMIGKTPKILGEMSMIVKSX

SEQ ID NO: 36597 - protein, 38 aa, Artificial Sequence
  Non-cyclic GFR-binding peptide
  MOD_RES (1)..(2)..(36)..(38): Xaa is C or S
  MOD_RES (16)..(17)..(18)..(19)..(20): Xaa is A or G
  MOD_RES (21)..(22)..(23)..(24): Xaa is A or G or absent
XXTPTKMSNITMQIMXXXXXXXXXLGEMSGMVVDRXGX

SEQ ID NO: 36598 - protein, 33 aa, Artificial Sequence
  Non-cyclic GFR-binding peptide
  MOD_RES (2)..(3): Xaa is C or S
PXXVSQDLSNITIQIMIGKTPKILGEMSMIVKS

SEQ ID NO: 36599 - protein, 39 aa, Artificial Sequence
  Non-cyclic GFR-binding peptide
  MOD_RES (4)..(5)..(38): Xaa is C or S
  MOD_RES (19)..(20)..(21)..(22)..(23): Xaa is A or G
  MOD_RES (24)..(25)..(26)..(27): Xaa is A or G or absent
PSTXXAPVKTSNITMQIMXXXXXXXXXLGEMSMIVEEXG

SEQ ID NO: 36600 - protein, 37 aa, Artificial Sequence
  Non-cyclic GFR-binding peptide
  MOD_RES (3)..(4): Xaa is C or S
  MOD_RES (18)..(19)..(20)..(21)..(22): Xaa is A or G
  MOD_RES (23)..(24)..(25)..(26): Xaa is A or G or absent
PTXXVPTRLSNITIQIMXXXXXXXXXIGEMSDMVVES

SEQ ID NO: 36601 - protein, 39 aa, Artificial Sequence
  Non-cyclic GFR-binding peptide
  MOD_RES (5)..(6): Xaa is C or S
  MOD_RES (20)..(21)..(22)..(23)..(24): Xaa is A or G
  MOD_RES (25)..(26)..(27)..(28): Xaa is A or G or absent
TPPTXXVPTRLSNITIQIMXXXXXXXXXIGEMSDMVVES

SEQ ID NO: 36602 - protein, 39 aa, Artificial Sequence
  Non-cyclic GFR-binding peptide
  MOD_RES (4)..(5)..(38): Xaa is C or S
  MOD_RES (19)..(20)..(21)..(22)..(23): Xaa is A or G
  MOD_RES (24)..(25)..(26)..(27): Xaa is A or G or absent
PSTXXAPVKTSNITMQIMXXXXXXXXXIGEMSMIVEEXG

SEQ ID NO: 36603 - protein, 39 aa, Artificial Sequence
  Non-cyclic GFR-binding peptide
  MOD_RES (5)..(6): Xaa is C or S
  MOD_RES (20)..(21)..(22)..(23)..(24): Xaa is A or G
  MOD_RES (25)..(26)..(27)..(28): Xaa is A or G or absent
VPKPXXAPTKLSNITVQIMXXXXXXXXXLGEMSNMVVRS

SEQ ID NO: 36604 - protein, 35 aa, Artificial Sequence
  Non-cyclic GFR-binding peptide
  MOD_RES (2)..(3): Xaa is C or S
  MOD_RES (17)..(18)..(19)..(20)..(21): Xaa is A or G
  MOD_RES (22)..(23)..(24)..(25): Xaa is A or G or absent
PXXVPQALSNITIQIMXXXXXXXXXLGEMSMIVRS

SEQ ID NO: 36605 - protein, 34 aa, Artificial Sequence
  Non-cyclic GFR-binding peptide
  MOD_RES (32)..(34): Xaa is C or S
VPARLSNITIQIMDAANNVVLGEMSDMVVEAXGX

SEQ ID NO: 36606 - protein, 37 aa, Artificial Sequence
  Non-cyclic GFR-binding peptide
  MOD_RES (4)..(5)..(36): Xaa is C or S
PSTXXAPVKTSNITMQIMDNGRVLLLGEMSMIVEEXG

SEQ ID NO: 36607 - protein, 39 aa, Artificial Sequence
  Non-cyclic GFR-binding peptide
  MOD_RES (2)..(3)..(37)..(39): Xaa is C or S
  MOD_RES (17)..(18)..(19)..(20)..(21): Xaa is A or G
  MOD_RES (22)..(23)..(24)..(25): Xaa is A or G or absent
PXXTPTKMSNITMQIMXXXXXXXXXLGEMSGMVVDRXGX

SEQ ID NO: 36608 - protein, 36 aa, Artificial Sequence
  Non-cyclic GFR-binding peptide
  MOD_RES (2)..(3)..(36): Xaa is C or S
  MOD_RES (17)..(18)..(19)..(20)..(21): Xaa is A or G
  MOD_RES (22)..(23)..(24)..(25): Xaa is A or G or absent
PXXVPQALSNITIQIMXXXXXXXXXLGEMSMIVRSX

SEQ ID NO: 36609 - protein, 41 aa, Artificial Sequence
  Non-cyclic GFR-binding peptide
  MOD_RES (5)..(6)..(38)..(40): Xaa is C or S
APASXXVPARLSNITIQIMDAANNVVLGEMSDMVVEAXGXR

SEQ ID NO: 36610 - protein, 35 aa, Artificial Sequence
  Non-cyclic GFR-binding peptide
  MOD_RES (3)..(4): Xaa is C or S
ASXXVPARLSNITIQIMDAANNVVLGEMSDMVVEA

SEQ ID NO: 36611 - protein, 35 aa, Artificial Sequence
  Non-cyclic GFR-binding peptide
  MOD_RES (2)..(3)..(34): Xaa is C or S
PXXVPQALSNITIQIMVGRKPKVLGEMSMIVRSXK

SEQ ID NO: 36612 - protein, 38 aa, Artificial Sequence
  Non-cyclic GFR-binding peptide
  MOD_RES (1)..(35)..(37): Xaa is C or S
  MOD_RES (15)..(16)..(17)..(18)..(19): Xaa is A or G
  MOD_RES (20)..(21)..(22)..(23): Xaa is A or G or absent
XTPTKMSNITMQIMXXXXXXXXXLGEMSGMVVDRXGXS

SEQ ID NO: 36613 - protein, 40 aa, Artificial Sequence
  Non-cyclic GFR-binding peptide
  MOD_RES (4)..(5)..(39): Xaa is C or S
  MOD_RES (19)..(20)..(21)..(22)..(23): Xaa is A or G
  MOD_RES (24)..(25)..(26)..(27): Xaa is A or G or absent
PPTXXVPTRLSNITIQIMXXXXXXXXXIGEMSDMVVESXG

SEQ ID NO: 36614 - protein, 35 aa, Artificial Sequence
  Non-cyclic GFR-binding peptide
  MOD_RES (3)..(4): Xaa is C or S
KPXXAPTKLSNITVQIMDDSSNVILGEMSNMVVRS

SEQ ID NO: 36615 - protein, 41 aa, Artificial Sequence
  Non-cyclic GFR-binding peptide
  MOD_RES (4)..(5)..(39)..(41): Xaa is C or S
  MOD_RES (19)..(20)..(21)..(22)..(23): Xaa is A or G
  MOD_RES (24)..(25)..(26)..(27): Xaa is A or G or absent
PASXXVPARLSNITIQIMXXXXXXXXXLGEMSDMVVEAXGX

SEQ ID NO: 36616 - protein, 38 aa, Artificial Sequence
  Non-cyclic GFR-binding peptide
  MOD_RES (6)..(7): Xaa is C or S
HVPKPXXAPTKLSNITVQIMDDSSNVILGEMSNMVVRS

SEQ ID NO: 36617 - protein, 37 aa, Artificial Sequence
  Non-cyclic GFR-binding peptide
  MOD_RES (1)..(35)..(37): Xaa is C or S
  MOD_RES (15)..(16)..(17)..(18)..(19): Xaa is A or G
  MOD_RES (20)..(21)..(22)..(23): Xaa is A or G or absent
XAPTKLSNITVQIMXXXXXXXXXLGEMSNMVVRSXGX

SEQ ID NO: 36618 - protein, 39 aa, Artificial Sequence
  Non-cyclic GFR-binding peptide
  MOD_RES (2)..(3)..(36)..(38): Xaa is C or S
  MOD_RES (17)..(18)..(19)..(20)..(21): Xaa is A or G
  MOD_RES (22)..(23)..(24)..(25): Xaa is A or G or absent
PXXVSQDLSNITIQIMXXXXXXXXXLGEMSMIVKSXKXS

SEQ ID NO: 36619 - protein, 35 aa, Artificial Sequence
  Non-cyclic GFR-binding peptide
  MOD_RES (4)..(5): Xaa is C or S
PPTXXVPTRLSNITIQIMDSANNVVLGEMSDMVVE

SEQ ID NO: 36620 - protein, 36 aa, Artificial Sequence
  Non-cyclic GFR-binding peptide
  MOD_RES (1)..(2)..(35): Xaa is C or S
  MOD_RES (16)..(17)..(18)..(19)..(20): Xaa is A or G
  MOD_RES (21)..(22)..(23)..(24): Xaa is A or G or absent
XXVPQDLSNITIQIMXXXXXXXXXLGEMSMVVKSXK

SEQ ID NO: 36621 - protein, 38 aa, Artificial Sequence
  Non-cyclic GFR-binding peptide
  MOD_RES (6)..(7)..(38): Xaa is C or S
RVPSTXXAPVKTSNITMQIMDNGRVLLLGEMSMIVEEX

SEQ ID NO: 36622 - protein, 37 aa, Artificial Sequence
  Non-cyclic GFR-binding peptide
  MOD_RES (2)..(3)..(35)..(37): Xaa is C or S
SXXVPARLSNITIQIMDAANNVVIGEMSDMVVEAXGX

SEQ ID NO: 36623 - protein, 35 aa, Artificial Sequence
  Non-cyclic GFR-binding peptide
  MOD_RES (2)..(3)..(34): Xaa is C or S
PXXVSQDLSNITIQIMIGKTPKILGEMSMIVKSXK

SEQ ID NO: 36624 - protein, 36 aa, Artificial Sequence
  Non-cyclic GFR-binding peptide
  MOD_RES (3)..(4)..(36): Xaa is C or S
ASXXVPARLSNITIQIMDAANNVVIGEMSDMVVEAX

SEQ ID NO: 36625 - protein, 31 aa, Artificial Sequence
  Non-cyclic GFR-binding peptide
VPARLSNITIQIMDAANNVVIGEMSDMVVEA

SEQ ID NO: 36626 - protein, 44 aa, Artificial Sequence
  Non-cyclic GFR-binding peptide
  MOD_RES (6)..(7)..(41)..(43): Xaa is C or S
  MOD_RES (21)..(22)..(23)..(24)..(25): Xaa is A or G
  MOD_RES (26)..(27)..(28)..(29): Xaa is A or G or absent
STPPTXXVPTRLSNITIQIMXXXXXXXXXLGEMSDMVVESXGXR

SEQ ID NO: 36627 - protein, 36 aa, Artificial Sequence
  Non-cyclic GFR-binding peptide
  MOD_RES (2)..(3)..(35): Xaa is C or S
PXXAPTKLSNITVQIMDDSSNVILGEMSNMVVRSXG

SEQ ID NO: 36628 - protein, 38 aa, Artificial Sequence
  Non-cyclic GFR-binding peptide
  MOD_RES (5)..(6): Xaa is C or S
  MOD_RES (20)..(21)..(22)..(23)..(24): Xaa is A or G
  MOD_RES (25)..(26)..(27)..(28): Xaa is A or G or absent
SAGPXXTPTKMSNITMQIMXXXXXXXXXLGEMSGMVVD

SEQ ID NO: 36629 - protein, 34 aa, Artificial Sequence
  Non-cyclic GFR-binding peptide
  MOD_RES (1)..(2): Xaa is C or S
  MOD_RES (16)..(17)..(18)..(19)..(20): Xaa is A or G
  MOD_RES (21)..(22)..(23)..(24): Xaa is A or G or absent
XXAPVKTSNITMQIMXXXXXXXXXLGEMSMIVEE

SEQ ID NO: 36630 - protein, 39 aa, Artificial Sequence
  Non-cyclic GFR-binding peptide
  MOD_RES (3)..(4)..(38): Xaa is C or S
  MOD_RES (18)..(19)..(20)..(21)..(22): Xaa is A or G
  MOD_RES (23)..(24)..(25)..(26): Xaa is A or G or absent
PTXXVPTRLSNITIQIMXXXXXXXXXLGEMSDMVVESXG

SEQ ID NO: 36631 - protein, 31 aa, Artificial Sequence
  Non-cyclic GFR-binding peptide
  MOD_RES (31)..(31): Xaa is C or S
APVKTSNITMQIMDNGRVLLLGEMSMIVEEX

SEQ ID NO: 36632 - protein, 38 aa, Artificial Sequence
  Non-cyclic GFR-binding peptide
  MOD_RES (5)..(6)..(37): Xaa is C or S
VPSTXXAPVKTSNITMQIMDNGRVLLLGEMSMIVEEXG

SEQ ID NO: 36633 - protein, 39 aa, Artificial Sequence
  Non-cyclic GFR-binding peptide
  MOD_RES (3)..(4)..(38): Xaa is C or S
  MOD_RES (18)..(19)..(20)..(21)..(22): Xaa is A or G
  MOD_RES (23)..(24)..(25)..(26): Xaa is A or G or absent
PTXXVPTRLSNITIQIMXXXXXXXXXIGEMSDMVVESXG

SEQ ID NO: 36634 - protein, 33 aa, Artificial Sequence
  Non-cyclic GFR-binding peptide
  MOD_RES (2)..(3): Xaa is C or S
PXXVPQDLSNITIQIMVGRTPKVLGEMSMVVKS

SEQ ID NO: 36635 - protein, 37 aa, Artificial Sequence
  Non-cyclic GFR-binding peptide
  MOD_RES (4)..(5)..(37): Xaa is C or S
PKPXXAPTKLSNITVQIMDDSSNVILGEMSNMVVRSX

SEQ ID NO: 36636 - protein, 38 aa, Artificial Sequence
  Non-cyclic GFR-binding peptide
  MOD_RES (4)..(5): Xaa is C or S
  MOD_RES (19)..(20)..(21)..(22)..(23): Xaa is A or G
  MOD_RES (24)..(25)..(26)..(27): Xaa is A or G or absent
PPTXXVPTRLSNITIQIMXXXXXXXXXIGEMSDMVVES

SEQ ID NO: 36637 - protein, 34 aa, Artificial Sequence
  Non-cyclic GFR-binding peptide
  MOD_RES (1)..(2): Xaa is C or S
  MOD_RES (16)..(17)..(18)..(19)..(20): Xaa is A or G
  MOD_RES (21)..(22)..(23)..(24): Xaa is A or G or absent
XXVPTRLSNITIQIMXXXXXXXXXIGEMSDMVVE

SEQ ID NO: 36638 - protein, 41 aa, Artificial Sequence
  Non-cyclic GFR-binding peptide
  MOD_RES (5)..(6)..(38)..(40): Xaa is C or S
TPPTXXVPTRLSNITIQIMDSANNVVLGEMSDMVVESXGXR

SEQ ID NO: 36639 - protein, 35 aa, Artificial Sequence
  Non-cyclic GFR-binding peptide
  MOD_RES (1)..(2): Xaa is C or S
  MOD_RES (16)..(17)..(18)..(19)..(20): Xaa is A or G
  MOD_RES (21)..(22)..(23)..(24): Xaa is A or G or absent
XXVPTRLSNITIQIMXXXXXXXXXLGEMSDMVVES

SEQ ID NO: 36640 - protein, 41 aa, Artificial Sequence
  Non-cyclic GFR-binding peptide
  MOD_RES (3)..(4)..(38)..(40): Xaa is C or S
  MOD_RES (18)..(19)..(20)..(21)..(22): Xaa is A or G
  MOD_RES (23)..(24)..(25)..(26): Xaa is A or G or absent
GPXXTPTKMSNITMQIMXXXXXXXXXLGEMSGMVVDRXGXS

SEQ ID NO: 36641 - protein, 40 aa, Artificial Sequence
  Non-cyclic GFR-binding peptide
  MOD_RES (4)..(5)..(37)..(39): Xaa is C or S
AGPXXTPTKMSNITMQIMNDKQQIIIGEMSGMVVDRXGXS

SEQ ID NO: 36642 - protein, 34 aa, Artificial Sequence
  Non-cyclic GFR-binding peptide
  MOD_RES (1)..(1): Xaa is C or S
  MOD_RES (15)..(16)..(17)..(18)..(19): Xaa is A or G
  MOD_RES (20)..(21)..(22)..(23): Xaa is A or G or absent
XVPTRLSNITIQIMXXXXXXXXXLGEMSDMVVES

SEQ ID NO: 36643 - protein, 40 aa, Artificial Sequence
  Non-cyclic GFR-binding peptide
  MOD_RES (3)..(4)..(37)..(39): Xaa is C or S
  MOD_RES (18)..(19)..(20)..(21)..(22): Xaa is A or G
  MOD_RES (23)..(24)..(25)..(26): Xaa is A or G or absent
STXXAPVKTSNITMQIMXXXXXXXXXLGEMSMIVEEXGXL

SEQ ID NO: 36644 - protein, 41 aa, Artificial Sequence
  Non-cyclic GFR-binding peptide
  MOD_RES (3)..(4)..(38)..(40): Xaa is C or S
  MOD_RES (18)..(19)..(20)..(21)..(22): Xaa is A or G
  MOD_RES (23)..(24)..(25)..(26): Xaa is A or G or absent
ASXXVPARLSNITIQIMXXXXXXXXXIGEMSDMVVEAXGXR

SEQ ID NO: 36645 - protein, 33 aa, Artificial Sequence
  Non-cyclic GFR-binding peptide
  MOD_RES (33)..(33): Xaa is C or S
  MOD_RES (14)..(15)..(16)..(17)..(18): Xaa is A or G
  MOD_RES (19)..(20)..(21)..(22): Xaa is A or G or absent
VSQDLSNITIQIMXXXXXXXXXLGEMSMIVKSX

SEQ ID NO: 36646 - protein, 33 aa, Artificial Sequence
  Non-cyclic GFR-binding peptide
  MOD_RES (2)..(3): Xaa is C or S
TXXVPTRLSNITIQIMDSANNVVIGEMSDMVVE

SEQ ID NO: 36647 - protein, 41 aa, Artificial Sequence
  Non-cyclic GFR-binding peptide
  MOD_RES (6)..(7)..(39)..(41): Xaa is C or S
AAPASXXVPARLSNITIQIMDAANNVVLGEMSDMVVEAXGX

SEQ ID NO: 36648 - protein, 37 aa, Artificial Sequence
  Non-cyclic GFR-binding peptide
  MOD_RES (2)..(3)..(36): Xaa is C or S
  MOD_RES (17)..(18)..(19)..(20)..(21): Xaa is A or G
  MOD_RES (22)..(23)..(24)..(25): Xaa is A or G or absent
TXXAPVKTSNITMQIMXXXXXXXXXIGEMSMIVEEXG

SEQ ID NO: 36649 - protein, 38 aa, Artificial Sequence
  Non-cyclic GFR-binding peptide
  MOD_RES (5)..(6)..(38): Xaa is C or S
VPKPXXAPTKLSNITVQIMDDSSNVILGEMSNMVVRSX

SEQ ID NO: 36650 - protein, 40 aa, Artificial Sequence
  Non-cyclic GFR-binding peptide
  MOD_RES (6)..(7): Xaa is C or S
  MOD_RES (21)..(22)..(23)..(24)..(25): Xaa is A or G
  MOD_RES (26)..(27)..(28)..(29): Xaa is A or G or absent
STPPTXXVPTRLSNITIQIMXXXXXXXXXIGEMSDMVVES

SEQ ID NO: 36651 - protein, 42 aa, Artificial Sequence
  Non-cyclic GFR-binding peptide
  MOD_RES (5)..(6)..(40)..(42): Xaa is C or S
  MOD_RES (20)..(21)..(22)..(23)..(24): Xaa is A or G
  MOD_RES (25)..(26)..(27)..(28): Xaa is A or G or absent
APASXXVPARLSNITIQIMXXXXXXXXXIGEMSDMVVEAXGX

SEQ ID NO: 36652 - protein, 32 aa, Artificial Sequence
  Non-cyclic GFR-binding peptide
  MOD_RES (1)..(2): Xaa is C or S
XXVSQDLSNITIQIMIGKTPKILGEMSMIVKS

SEQ ID NO: 36653 - protein, 36 aa, Artificial Sequence
  Non-cyclic GFR-binding peptide
  MOD_RES (3)..(4)..(35): Xaa is C or S
STXXAPVKTSNITMQIMDNGRVLLIGEMSMIVEEXG

SEQ ID NO: 36654 - protein, 38 aa, Artificial Sequence
  Non-cyclic GFR-binding peptide
  MOD_RES (2)..(3)..(35)..(37): Xaa is C or S
PXXTPTKMSNITMQIMNDKQQIILGEMSGMVVDRXGXS

SEQ ID NO: 36655 - protein, 35 aa, Artificial Sequence
  Non-cyclic GFR-binding peptide
  MOD_RES (1)..(33)..(35): Xaa is C or S
XVPTRLSNITIQIMDSANNVVIGEMSDMVVESXGX

SEQ ID NO: 36656 - protein, 41 aa, Artificial Sequence
  Non-cyclic GFR-binding peptide
  MOD_RES (6)..(7)..(41): Xaa is C or S
  MOD_RES (21)..(22)..(23)..(24)..(25): Xaa is A or G
  MOD_RES (26)..(27)..(28)..(29): Xaa is A or G or absent
AAPASXXVPARLSNITIQIMXXXXXXXXXIGEMSDMVVEAX

SEQ ID NO: 36657 - protein, 36 aa, Artificial Sequence
  Non-cyclic GFR-binding peptide
  MOD_RES (34)..(36): Xaa is C or S
  MOD_RES (14)..(15)..(16)..(17)..(18): Xaa is A or G
  MOD_RES (19)..(20)..(21)..(22): Xaa is A or G or absent
TPTKMSNITMQIMXXXXXXXXXLGEMSGMVVDRXGX

SEQ ID NO: 36658 - protein, 34 aa, Artificial Sequence
  Non-cyclic GFR-binding peptide
  MOD_RES (1)..(33): Xaa is C or S
XVPARLSNITIQIMDAANNVVIGEMSDMVVEAXG

SEQ ID NO: 36659 - protein, 35 aa, Artificial Sequence
  Non-cyclic GFR-binding peptide
  MOD_RES (1)..(32)..(34): Xaa is C or S
XVSQDLSNITIQIMIGKTPKILGEMSMIVKSXKXS

SEQ ID NO: 36660 - protein, 34 aa, Artificial Sequence
  Non-cyclic GFR-binding peptide
  MOD_RES (32)..(34): Xaa is C or S
VPARLSNITIQIMDAANNVVIGEMSDMVVEAXGX

SEQ ID NO: 36661 - protein, 37 aa, Artificial Sequence
  Non-cyclic GFR-binding peptide
  MOD_RES (1)..(2)..(36): Xaa is C or S
  MOD_RES (16)..(17)..(18)..(19)..(20): Xaa is A or G
  MOD_RES (21)..(22)..(23)..(24): Xaa is A or G or absent
XXAPTKLSNITVQIMXXXXXXXXXLGEMSNMVVRSXG

SEQ ID NO: 36662 - protein, 40 aa, Artificial Sequence
  Non-cyclic GFR-binding peptide
  MOD_RES (5)..(6)..(38)..(40): Xaa is C or S
TPPTXXVPTRLSNITIQIMDSANNVVIGEMSDMVVESXGX

SEQ ID NO: 36663 - protein, 35 aa, Artificial Sequence
  Non-cyclic GFR-binding peptide
  MOD_RES (3)..(4): Xaa is C or S
PTXXVPTRLSNITIQIMDSANNVVIGEMSDMVVES

SEQ ID NO: 36664 - protein, 38 aa, Artificial Sequence
  Non-cyclic GFR-binding peptide
  MOD_RES (5)..(6): Xaa is C or S
  MOD_RES (20)..(21)..(22)..(23)..(24): Xaa is A or G
  MOD_RES (25)..(26)..(27)..(28): Xaa is A or G or absent
SAGPXXTPTKMSNITMQIMXXXXXXXXXIGEMSGMVVD

SEQ ID NO: 36665 - protein, 38 aa, Artificial Sequence
  Non-cyclic GFR-binding peptide
  MOD_RES (4)..(5)..(36)..(38): Xaa is C or S
AAPXXVPQALSNITIQIMVGRKPKVLGEMSMIVRSXKX

SEQ ID NO: 36666 - protein, 39 aa, Artificial Sequence
  Non-cyclic GFR-binding peptide
  MOD_RES (2)..(3)..(36)..(38): Xaa is C or S
  MOD_RES (17)..(18)..(19)..(20)..(21): Xaa is A or G
  MOD_RES (22)..(23)..(24)..(25): Xaa is A or G or absent
PXXVPQDLSNITIQIMXXXXXXXXXLGEMSMVVKSXKXS

SEQ ID NO: 36667 - protein, 40 aa, Artificial Sequence
  Non-cyclic GFR-binding peptide
  MOD_RES (4)..(5)..(37)..(39): Xaa is C or S
PPTXXVPTRLSNITIQIMDSANNVVLGEMSDMVVESXGXR

SEQ ID NO: 36668 - protein, 38 aa, Artificial Sequence
  Non-cyclic GFR-binding peptide
  MOD_RES (1)..(2)..(36)..(38): Xaa is C or S
  MOD_RES (16)..(17)..(18)..(19)..(20): Xaa is A or G
  MOD_RES (21)..(22)..(23)..(24): Xaa is A or G or absent
XXTPTKMSNITMQIMXXXXXXXXXIGEMSGMVVDRXGX

SEQ ID NO: 36669 - protein, 37 aa, Artificial Sequence
  Non-cyclic GFR-binding peptide
  MOD_RES (1)..(34)..(36): Xaa is C or S
  MOD_RES (15)..(16)..(17)..(18)..(19): Xaa is A or G
  MOD_RES (20)..(21)..(22)..(23): Xaa is A or G or absent
XAPVKTSNITMQIMXXXXXXXXXIGEMSMIVEEXGXL

SEQ ID NO: 36670 - protein, 35 aa, Artificial Sequence
  Non-cyclic GFR-binding peptide
  MOD_RES (1)..(34): Xaa is C or S
  MOD_RES (15)..(16)..(17)..(18)..(19): Xaa is A or G
  MOD_RES (20)..(21)..(22)..(23): Xaa is A or G or absent
XVSQDLSNITIQIMXXXXXXXXXLGEMSMIVKSXK

SEQ ID NO: 36671 - protein, 35 aa, Artificial Sequence
  Non-cyclic GFR-binding peptide
  MOD_RES (2)..(3): Xaa is C or S
  MOD_RES (17)..(18)..(19)..(20)..(21): Xaa is A or G
  MOD_RES (22)..(23)..(24)..(25): Xaa is A or G or absent
PXXVSQDLSNITIQIMXXXXXXXXXLGEMSMIVKS

SEQ ID NO: 36672 - protein, 32 aa, Artificial Sequence
  Non-cyclic GFR-binding peptide
  MOD_RES (1)..(2): Xaa is C or S
XXVPQDLSNITIQIMVGRTPKVLGEMSMVVKS

SEQ ID NO: 36673 - protein, 35 aa, Artificial Sequence
  Non-cyclic GFR-binding peptide
  MOD_RES (34)..(34): Xaa is C or S
  MOD_RES (14)..(15)..(16)..(17)..(18): Xaa is A or G
  MOD_RES (19)..(20)..(21)..(22): Xaa is A or G or absent
VPTRLSNITIQIMXXXXXXXXXIGEMSDMVVESXG

SEQ ID NO: 36674 - protein, 36 aa, Artificial Sequence
  Non-cyclic GFR-binding peptide
  MOD_RES (2)..(3)..(34)..(36): Xaa is C or S
PXXVPQDLSNITIQIMVGRTPKVLGEMSMVVKSXKX

SEQ ID NO: 36675 - protein, 37 aa, Artificial Sequence
  Non-cyclic GFR-binding peptide
  MOD_RES (2)..(3)..(36): Xaa is C or S
  MOD_RES (17)..(18)..(19)..(20)..(21): Xaa is A or G
  MOD_RES (22)..(23)..(24)..(25): Xaa is A or G or absent
PXXVSQDLSNITIQIMXXXXXXXXXLGEMSMIVKSXK

SEQ ID NO: 36676 - protein, 36 aa, Artificial Sequence
  Non-cyclic GFR-binding peptide
  MOD_RES (3)..(4)..(36): Xaa is C or S
KPXXAPTKLSNITVQIMDDSSNVILGEMSNMVVRSX

SEQ ID NO: 36677 - protein, 39 aa, Artificial Sequence
  Non-cyclic GFR-binding peptide
  MOD_RES (5)..(6)..(38): Xaa is C or S
VPKPXXAPTKLSNITVQIMDDSSNVILGEMSNMVVRSXG

SEQ ID NO: 36678 - protein, 32 aa, Artificial Sequence
  Non-cyclic GFR-binding peptide
  MOD_RES (1)..(32): Xaa is C or S
XAPVKTSNITMQIMDNGRVLLLGEMSMIVEEX

SEQ ID NO: 36679 - protein, 40 aa, Artificial Sequence
  Non-cyclic GFR-binding peptide
  MOD_RES (2)..(3)..(37)..(39): Xaa is C or S
  MOD_RES (17)..(18)..(19)..(20)..(21): Xaa is A or G
  MOD_RES (22)..(23)..(24)..(25): Xaa is A or G or absent
TXXVPTRLSNITIQIMXXXXXXXXXIGEMSDMVVESXGXR

SEQ ID NO: 36680 - protein, 33 aa, Artificial Sequence
  Non-cyclic GFR-binding peptide
  MOD_RES (1)..(2)..(33): Xaa is C or S
XXVPQDLSNITIQIMVGRTPKVLGEMSMVVKSX

SEQ ID NO: 36681 - protein, 31 aa, Artificial Sequence
  Non-cyclic GFR-binding peptide
VPTRLSNITIQIMDSANNVVIGEMSDMVVES

SEQ ID NO: 36682 - protein, 34 aa, Artificial Sequence
  Non-cyclic GFR-binding peptide
  MOD_RES (31)..(33): Xaa is C or S
APVKTSNITMQIMDNGRVLLIGEMSMIVEEXGXL

SEQ ID NO: 36683 - protein, 39 aa, Artificial Sequence
  Non-cyclic GFR-binding peptide
  MOD_RES (6)..(7)..(39): Xaa is C or S
GSAGPXXTPTKMSNITMQIMNDKQQIIIGEMSGMVVDRX

SEQ ID NO: 36684 - protein, 38 aa, Artificial Sequence
  Non-cyclic GFR-binding peptide
  MOD_RES (4)..(5)..(36)..(38): Xaa is C or S
PSTXXAPVKTSNITMQIMDNGRVLLLGEMSMIVEEXGX

SEQ ID NO: 36685 - protein, 36 aa, Artificial Sequence
  Non-cyclic GFR-binding peptide
  MOD_RES (1)..(34)..(36): Xaa is C or S
  MOD_RES (15)..(16)..(17)..(18)..(19): Xaa is A or G
  MOD_RES (20)..(21)..(22)..(23): Xaa is A or G or absent
XVPQALSNITIQIMXXXXXXXXXLGEMSMIVRSXKX

SEQ ID NO: 36686 - protein, 35 aa, Artificial Sequence
  Non-cyclic GFR-binding peptide
  MOD_RES (1)..(2)..(34): Xaa is C or S
XXTPTKMSNITMQIMNDKQQIILGEMSGMVVDRXG

SEQ ID NO: 36687 - protein, 41 aa, Artificial Sequence
  Non-cyclic GFR-binding peptide
  MOD_RES (4)..(5)..(38)..(40): Xaa is C or S
  MOD_RES (19)..(20)..(21)..(22)..(23): Xaa is A or G
  MOD_RES (24)..(25)..(26)..(27): Xaa is A or G or absent
ASPXXVSQDLSNITIQIMXXXXXXXXXLGEMSMIVKSXKXS

SEQ ID NO: 36688 - protein, 33 aa, Artificial Sequence
  Non-cyclic GFR-binding peptide
  MOD_RES (31)..(33): Xaa is C or S
APVKTSNITMQIMDNGRVLLIGEMSMIVEEXGX

SEQ ID NO: 36689 - protein, 36 aa, Artificial Sequence
  Non-cyclic GFR-binding peptide
  MOD_RES (1)..(2)..(36): Xaa is C or S
  MOD_RES (16)..(17)..(18)..(19)..(20): Xaa is A or G
  MOD_RES (21)..(22)..(23)..(24): Xaa is A or G or absent
XXAPTKLSNITVQIMXXXXXXXXXLGEMSNMVVRSX

SEQ ID NO: 36690 - protein, 41 aa, Artificial Sequence
  Non-cyclic GFR-binding peptide
  MOD_RES (6)..(7)..(38)..(40): Xaa is C or S
ASASPXXVPQDLSNITIQIMVGRTPKVLGEMSMVVKSXKXS

SEQ ID NO: 36691 - protein, 41 aa, Artificial Sequence
  Non-cyclic GFR-binding peptide
  MOD_RES (4)..(5)..(39)..(41): Xaa is C or S
  MOD_RES (19)..(20)..(21)..(22)..(23): Xaa is A or G
  MOD_RES (24)..(25)..(26)..(27): Xaa is A or G or absent
AGPXXTPTKMSNITMQIMXXXXXXXXXIGEMSGMVVDRXGX

SEQ ID NO: 36692 - protein, 42 aa, Artificial Sequence
  Non-cyclic GFR-binding peptide
  MOD_RES (6)..(7)..(39)..(41): Xaa is C or S
STPPTXXVPTRLSNITIQIMDSANNVVIGEMSDMVVESXGXR

SEQ ID NO: 36693 - protein, 37 aa, Artificial Sequence
  Non-cyclic GFR-binding peptide
  MOD_RES (3)..(4): Xaa is C or S
  MOD_RES (18)..(19)..(20)..(21)..(22): Xaa is A or G
  MOD_RES (23)..(24)..(25)..(26): Xaa is A or G or absent
KPXXAPTKLSNITVQIMXXXXXXXXXLGEMSNMVVRS

SEQ ID NO: 36694 - protein, 34 aa, Artificial Sequence
  Non-cyclic GFR-binding peptide
  MOD_RES (1)..(2): Xaa is C or S
  MOD_RES (16)..(17)..(18)..(19)..(20): Xaa is A or G
  MOD_RES (21)..(22)..(23)..(24): Xaa is A or G or absent
XXAPTKLSNITVQIMXXXXXXXXXLGEMSNMVVR

SEQ ID NO: 36695 - protein, 35 aa, Artificial Sequence
  Non-cyclic GFR-binding peptide
  MOD_RES (1)..(2)..(35): Xaa is C or S
  MOD_RES (16)..(17)..(18)..(19)..(20): Xaa is A or G
  MOD_RES (21)..(22)..(23)..(24): Xaa is A or G or absent
XXAPVKTSNITMQIMXXXXXXXXXIGEMSMIVEEX

SEQ ID NO: 36696 - protein, 37 aa, Artificial Sequence
  Non-cyclic GFR-binding peptide
  MOD_RES (6)..(7): Xaa is C or S
ASASPXXVSQDLSNITIQIMIGKTPKILGEMSMIVKS

SEQ ID NO: 36697 - protein, 37 aa, Artificial Sequence
  Non-cyclic GFR-binding peptide
  MOD_RES (5)..(6): Xaa is C or S
VPKPXXAPTKLSNITVQIMDDSSNVILGEMSNMVVRS

SEQ ID NO: 36698 - protein, 37 aa, Artificial Sequence
  Non-cyclic GFR-binding peptide
  MOD_RES (34)..(36): Xaa is C or S
  MOD_RES (14)..(15)..(16)..(17)..(18): Xaa is A or G
  MOD_RES (19)..(20)..(21)..(22): Xaa is A or G or absent
VPARLSNITIQIMXXXXXXXXXIGEMSDMVVEAXGXR

SEQ ID NO: 36699 - protein, 37 aa, Artificial Sequence
  Non-cyclic GFR-binding peptide
  MOD_RES (1)..(2)..(34)..(36): Xaa is C or S
XXVPTRLSNITIQIMDSANNVVIGEMSDMVVESXGXR

SEQ ID NO: 36700 - protein, 38 aa, Artificial Sequence
  Non-cyclic GFR-binding peptide
  MOD_RES (2)..(3)..(36)..(38): Xaa is C or S
  MOD_RES (17)..(18)..(19)..(20)..(21): Xaa is A or G
  MOD_RES (22)..(23)..(24)..(25): Xaa is A or G or absent
PXXVPQALSNITIQIMXXXXXXXXXLGEMSMIVRSXKX

SEQ ID NO: 36701 - protein, 37 aa, Artificial Sequence
  Non-cyclic GFR-binding peptide
  MOD_RES (1)..(35)..(37): Xaa is C or S
  MOD_RES (15)..(16)..(17)..(18)..(19): Xaa is A or G
  MOD_RES (20)..(21)..(22)..(23): Xaa is A or G or absent
XVPTRLSNITIQIMXXXXXXXXXLGEMSDMVVESXGX

SEQ ID NO: 36702 - protein, 36 aa, Artificial Sequence
  Non-cyclic GFR-binding peptide
  MOD_RES (2)..(3)..(35): Xaa is C or S
SXXVPARLSNITIQIMDAANNVVIGEMSDMVVEAXG

SEQ ID NO: 36703 - protein, 38 aa, Artificial Sequence
  Non-cyclic GFR-binding peptide
  MOD_RES (5)..(6): Xaa is C or S
  MOD_RES (20)..(21)..(22)..(23)..(24): Xaa is A or G
  MOD_RES (25)..(26)..(27)..(28): Xaa is A or G or absent
APASXXVPARLSNITIQIMXXXXXXXXXIGEMSDMVVE

SEQ ID NO: 36704 - protein, 41 aa, Artificial Sequence
  Non-cyclic GFR-binding peptide
  MOD_RES (6)..(7)..(39)..(41): Xaa is C or S
STPPTXXVPTRLSNITIQIMDSANNVVLGEMSDMVVESXGX

SEQ ID NO: 36705 - protein, 40 aa, Artificial Sequence
  Non-cyclic GFR-binding peptide
  MOD_RES (2)..(3)..(37)..(39): Xaa is C or S
  MOD_RES (17)..(18)..(19)..(20)..(21): Xaa is A or G
  MOD_RES (22)..(23)..(24)..(25): Xaa is A or G or absent
PXXTPTKMSNITMQIMXXXXXXXXXIGEMSGMVVDRXGXS

SEQ ID NO: 36706 - protein, 39 aa, Artificial Sequence
  Non-cyclic GFR-binding peptide
  MOD_RES (6)..(7): Xaa is C or S
  MOD_RES (21)..(22)..(23)..(24)..(25): Xaa is A or G
  MOD_RES (26)..(27)..(28)..(29): Xaa is A or G or absent
AAPASXXVPARLSNITIQIMXXXXXXXXXLGEMSDMVVE

SEQ ID NO: 36707 - protein, 38 aa, Artificial Sequence
  Non-cyclic GFR-binding peptide
  MOD_RES (5)..(6)..(37): Xaa is C or S
VPSTXXAPVKTSNITMQIMDNGRVLLIGEMSMIVEEXG

SEQ ID NO: 36708 - protein, 35 aa, Artificial Sequence
  Non-cyclic GFR-binding peptide
  MOD_RES (4)..(5): Xaa is C or S
PSTXXAPVKTSNITMQIMDNGRVLLIGEMSMIVEE

SEQ ID NO: 36709 - protein, 35 aa, Artificial Sequence
  Non-cyclic GFR-binding peptide
  MOD_RES (1)..(2)..(33)..(35): Xaa is C or S
XXVPQDLSNITIQIMVGRTPKVLGEMSMVVKSXKX

SEQ ID NO: 36710 - protein, 36 aa, Artificial Sequence
  Non-cyclic GFR-binding peptide
  MOD_RES (1)..(2)..(35): Xaa is C or S
  MOD_RES (16)..(17)..(18)..(19)..(20): Xaa is A or G
  MOD_RES (21)..(22)..(23)..(24): Xaa is A or G or absent
XXAPVKTSNITMQIMXXXXXXXXXIGEMSMIVEEXG

SEQ ID NO: 36711 - protein, 36 aa, Artificial Sequence
  Non-cyclic GFR-binding peptide
  MOD_RES (3)..(4)..(35): Xaa is C or S
STXXAPVKTSNITMQIMDNGRVLLLGEMSMIVEEXG

SEQ ID NO: 36712 - protein, 33 aa, Artificial Sequence
  Non-cyclic GFR-binding peptide
  MOD_RES (1)..(2): Xaa is C or S
XXVPARLSNITIQIMDAANNVVIGEMSDMVVEA

SEQ ID NO: 36713 - protein, 35 aa, Artificial Sequence
  Non-cyclic GFR-binding peptide
  MOD_RES (1)..(2)..(33)..(35): Xaa is C or S
XXVSQDLSNITIQIMIGKTPKILGEMSMIVKSXKX

SEQ ID NO: 36714 - protein, 35 aa, Artificial Sequence
  Non-cyclic GFR-binding peptide
  MOD_RES (4)..(5): Xaa is C or S
PSTXXAPVKTSNITMQIMDNGRVLLLGEMSMIVEE

SEQ ID NO: 36715 - protein, 37 aa, Artificial Sequence
  Non-cyclic GFR-binding peptide
  MOD_RES (4)..(5)..(36): Xaa is C or S
PSTXXAPVKTSNITMQIMDNGRVLLIGEMSMIVEEXG

SEQ ID NO: 36716 - protein, 38 aa, Artificial Sequence
  Non-cyclic GFR-binding peptide
  MOD_RES (1)..(35)..(37): Xaa is C or S
  MOD_RES (15)..(16)..(17)..(18)..(19): Xaa is A or G
  MOD_RES (20)..(21)..(22)..(23): Xaa is A or G or absent
XAPTKLSNITVQIMXXXXXXXXXLGEMSNMVVRSXGXH

SEQ ID NO: 36717 - protein, 40 aa, Artificial Sequence
  Non-cyclic GFR-binding peptide
  MOD_RES (5)..(6)..(38)..(40): Xaa is C or S
SAGPXXTPTKMSNITMQIMNDKQQIIIGEMSGMVVDRXGX

SEQ ID NO: 36718 - protein, 40 aa, Artificial Sequence
  Non-cyclic GFR-binding peptide
  MOD_RES (6)..(7)..(39): Xaa is C or S
HVPKPXXAPTKLSNITVQIMDDSSNVILGEMSNMVVRSXG

SEQ ID NO: 36719 - protein, 36 aa, Artificial Sequence
  Non-cyclic GFR-binding peptide
  MOD_RES (2)..(3)..(36): Xaa is C or S
  MOD_RES (17)..(18)..(19)..(20)..(21): Xaa is A or G
  MOD_RES (22)..(23)..(24)..(25): Xaa is A or G or absent
PXXVPQDLSNITIQIMXXXXXXXXXLGEMSMVVKSX

SEQ ID NO: 36720 - protein, 34 aa, Artificial Sequence
  Non-cyclic GFR-binding peptide
  MOD_RES (3)..(4): Xaa is C or S
KPXXAPTKLSNITVQIMDDSSNVILGEMSNMVVR

SEQ ID NO: 36721 - protein, 37 aa, Artificial Sequence
  Non-cyclic GFR-binding peptide
  MOD_RES (1)..(2)..(35)..(37): Xaa is C or S
  MOD_RES (16)..(17)..(18)..(19)..(20): Xaa is A or G
  MOD_RES (21)..(22)..(23)..(24): Xaa is A or G or absent
XXAPVKTSNITMQIMXXXXXXXXXIGEMSMIVEEXGX

SEQ ID NO: 36722 - protein, 34 aa, Artificial Sequence
  Non-cyclic GFR-binding peptide
  MOD_RES (1)..(1): Xaa is C or S
  MOD_RES (15)..(16)..(17)..(18)..(19): Xaa is A or G
  MOD_RES (20)..(21)..(22)..(23): Xaa is A or G or absent
XTPTKMSNITMQIMXXXXXXXXXLGEMSGMVVDR

SEQ ID NO: 36723 - protein, 43 aa, Artificial Sequence
  Non-cyclic GFR-binding peptide
  MOD_RES (5)..(6)..(40)..(42): Xaa is C or S
  MOD_RES (20)..(21)..(22)..(23)..(24): Xaa is A or G
  MOD_RES (25)..(26)..(27)..(28): Xaa is A or G or absent
APASXXVPARLSNITIQIMXXXXXXXXXLGEMSDMVVEAXGXR

SEQ ID NO: 36724 - protein, 38 aa, Artificial Sequence
  Non-cyclic GFR-binding peptide
  MOD_RES (4)..(5): Xaa is C or S
  MOD_RES (19)..(20)..(21)..(22)..(23): Xaa is A or G
  MOD_RES (24)..(25)..(26)..(27): Xaa is A or G or absent
PPTXXVPTRLSNITIQIMXXXXXXXXXLGEMSDMVVES

SEQ ID NO: 36725 - protein, 36 aa, Artificial Sequence
  Non-cyclic GFR-binding peptide
  MOD_RES (2)..(3)..(36): Xaa is C or S
  MOD_RES (17)..(18)..(19)..(20)..(21): Xaa is A or G
  MOD_RES (22)..(23)..(24)..(25): Xaa is A or G or absent
PXXVSQDLSNITIQIMXXXXXXXXXLGEMSMIVKSX

SEQ ID NO: 36726 - protein, 32 aa, Artificial Sequence
  Non-cyclic GFR-binding peptide
  MOD_RES (1)..(2): Xaa is C or S
XXTPTKMSNITMQIMNDKQQIILGEMSGMVVD

SEQ ID NO: 36727 - protein, 37 aa, Artificial Sequence
  Non-cyclic GFR-binding peptide
  MOD_RES (2)..(3)..(34)..(36): Xaa is C or S
PXXVSQDLSNITIQIMIGKTPKILGEMSMIVKSXKXS

SEQ ID NO: 36728 - protein, 37 aa, Artificial Sequence
  Non-cyclic GFR-binding peptide
  MOD_RES (1)..(2)..(36): Xaa is C or S
  MOD_RES (16)..(17)..(18)..(19)..(20): Xaa is A or G
  MOD_RES (21)..(22)..(23)..(24): Xaa is A or G or absent
XXVPARLSNITIQIMXXXXXXXXXLGEMSDMVVEAXG

SEQ ID NO: 36729 - protein, 36 aa, Artificial Sequence
  Non-cyclic GFR-binding peptide
  MOD_RES (4)..(5): Xaa is C or S
PASXXVPARLSNITIQIMDAANNVVIGEMSDMVVEA

SEQ ID NO: 36730 - protein, 39 aa, Artificial Sequence
  Non-cyclic GFR-binding peptide
  MOD_RES (5)..(6)..(38): Xaa is C or S
SAGPXXTPTKMSNITMQIMNDKQQIIIGEMSGMVVDRXG

SEQ ID NO: 36731 - protein, 35 aa, Artificial Sequence
  Non-cyclic GFR-binding peptide
  MOD_RES (1)..(2)..(34): Xaa is C or S
XXVPTRLSNITIQIMDSANNVVIGEMSDMVVESXG

SEQ ID NO: 36732 - protein, 40 aa, Artificial Sequence
  Non-cyclic GFR-binding peptide
  MOD_RES (5)..(6)..(39): Xaa is C or S
  MOD_RES (20)..(21)..(22)..(23)..(24): Xaa is A or G
  MOD_RES (25)..(26)..(27)..(28): Xaa is A or G or absent
SAAPXXVPQALSNITIQIMXXXXXXXXXLGEMSMIVRSXK

SEQ ID NO: 36733 - protein, 30 aa, Artificial Sequence; identical to SEQ ID NO: 1128
  Non-cyclic GFR-binding peptide

SEQ ID NO: 36734 - protein, 39 aa, Artificial Sequence
  Non-cyclic GFR-binding peptide
  MOD_RES (5)..(6)..(38): Xaa is C or S
APASXXVPARLSNITIQIMDAANNVVLGEMSDMVVEAXG

SEQ ID NO: 36735 - protein, 32 aa, Artificial Sequence
  Non-cyclic GFR-binding peptide
  MOD_RES (1)..(32): Xaa is C or S
XVPQALSNITIQIMVGRKPKVLGEMSMIVRSX

SEQ ID NO: 36736 - protein, 39 aa, Artificial Sequence
  Non-cyclic GFR-binding peptide
  MOD_RES (3)..(4)..(36)..(38): Xaa is C or S
KPXXAPTKLSNITVQIMDDSSNVILGEMSNMVVRSXGXH

SEQ ID NO: 36737 - protein, 31 aa, Artificial Sequence
  Non-cyclic GFR-binding peptide
  MOD_RES (1)..(1): Xaa is C or S
XVPTRLSNITIQIMDSANNVVIGEMSDMVVE

SEQ ID NO: 36738 - protein, 32 aa, Artificial Sequence
  Non-cyclic GFR-binding peptide
  MOD_RES (32)..(32): Xaa is C or S
TPTKMSNITMQIMNDKQQIILGEMSGMVVDRX

SEQ ID NO: 36739 - protein, 40 aa, Artificial Sequence
  Non-cyclic GFR-binding peptide
  MOD_RES (5)..(6)..(38)..(40): Xaa is C or S
TPPTXXVPTRLSNITIQIMDSANNVVLGEMSDMVVESXGX

SEQ ID NO: 36740 - protein, 37 aa, Artificial Sequence
  Non-cyclic GFR-binding peptide
  MOD_RES (2)..(3)..(35)..(37): Xaa is C or S
TXXVPTRLSNITIQIMDSANNVVLGEMSDMVVESXGX

SEQ ID NO: 36741 - protein, 39 aa, Artificial Sequence
  Non-cyclic GFR-binding peptide
  MOD_RES (3)..(4)..(36)..(38): Xaa is C or S
GPXXTPTKMSNITMQIMNDKQQIILGEMSGMVVDRXGXS

SEQ ID NO: 36742 - protein, 34 aa, Artificial Sequence
  Non-cyclic GFR-binding peptide
  MOD_RES (3)..(4): Xaa is C or S
SPXXVSQDLSNITIQIMIGKTPKILGEMSMIVKS

SEQ ID NO: 36743 - protein, 35 aa, Artificial Sequence
  Non-cyclic GFR-binding peptide
  MOD_RES (2)..(3): Xaa is C or S
  MOD_RES (17)..(18)..(19)..(20)..(21): Xaa is A or G
  MOD_RES (22)..(23)..(24)..(25): Xaa is A or G or absent
SXXVPARLSNITIQIMXXXXXXXXXLGEMSDMVVE

SEQ ID NO: 36744 - protein, 41 aa, Artificial Sequence
  Non-cyclic GFR-binding peptide
  MOD_RES (5)..(6)..(39)..(41): Xaa is C or S
  MOD_RES (20)..(21)..(22)..(23)..(24): Xaa is A or G
  MOD_RES (25)..(26)..(27)..(28): Xaa is A or G or absent
VPSTXXAPVKTSNITMQIMXXXXXXXXXLGEMSMIVEEXGX

SEQ ID NO: 36745 - protein, 33 aa, Artificial Sequence
  Non-cyclic GFR-binding peptide
  MOD_RES (1)..(33): Xaa is C or S
XAPTKLSNITVQIMDDSSNVILGEMSNMVVRSX

SEQ ID NO: 36746 - protein, 39 aa, Artificial Sequence
  Non-cyclic GFR-binding peptide
  MOD_RES (5)..(6)..(37)..(39): Xaa is C or S
VPSTXXAPVKTSNITMQIMDNGRVLLLGEMSMIVEEXGX

SEQ ID NO: 36747 - protein, 39 aa, Artificial Sequence
  Non-cyclic GFR-binding peptide
  MOD_RES (5)..(6)..(38): Xaa is C or S
TPPTXXVPTRLSNITIQIMDSANNVVLGEMSDMVVESXG

SEQ ID NO: 36748 - protein, 33 aa, Artificial Sequence
  Non-cyclic GFR-binding peptide
  MOD_RES (14)..(15)..(16)..(17)..(18): Xaa is A or G
  MOD_RES (19)..(20)..(21)..(22): Xaa is A or G or absent
TPTKMSNITMQIMXXXXXXXXXIGEMSGMVVDR

SEQ ID NO: 36749 - protein, 36 aa, Artificial Sequence
  Non-cyclic GFR-binding peptide
  MOD_RES (2)..(3): Xaa is C or S
  MOD_RES (17)..(18)..(19)..(20)..(21): Xaa is A or G
  MOD_RES (22)..(23)..(24)..(25): Xaa is A or G or absent
TXXVPTRLSNITIQIMXXXXXXXXXLGEMSDMVVES

SEQ ID NO: 36750 - protein, 37 aa, Artificial Sequence
  Non-cyclic GFR-binding peptide
  MOD_RES (2)..(3)..(37): Xaa is C or S
  MOD_RES (17)..(18)..(19)..(20)..(21): Xaa is A or G
  MOD_RES (22)..(23)..(24)..(25): Xaa is A or G or absent
PXXAPTKLSNITVQIMXXXXXXXXXLGEMSNMVVRSX

SEQ ID NO: 36751 - protein, 37 aa, Artificial Sequence
  Non-cyclic GFR-binding peptide
  MOD_RES (3)..(4)..(35)..(37): Xaa is C or S
SPXXVPQDLSNITIQIMVGRTPKVLGEMSMVVKSXKX

SEQ ID NO: 36752 - protein, 38 aa, Artificial Sequence
  Non-cyclic GFR-binding peptide
  MOD_RES (3)..(4)..(36)..(38): Xaa is C or S
KPXXAPTKLSNITVQIMDDSSNVILGEMSNMVVRSXGX

SEQ ID NO: 36753 - protein, 43 aa, Artificial Sequence
  Non-cyclic GFR-binding peptide
  MOD_RES (6)..(7)..(41)..(43): Xaa is C or S
  MOD_RES (21)..(22)..(23)..(24)..(25): Xaa is A or G
  MOD_RES (26)..(27)..(28)..(29): Xaa is A or G or absent
GSAGPXXTPTKMSNITMQIMXXXXXXXXXLGEMSGMVVDRXGX

SEQ ID NO: 36754 - protein, 35 aa, Artificial Sequence
  Non-cyclic GFR-binding peptide
  MOD_RES (1)..(2): Xaa is C or S
  MOD_RES (16)..(17)..(18)..(19)..(20): Xaa is A or G
  MOD_RES (21)..(22)..(23)..(24): Xaa is A or G or absent
XXAPTKLSNITVQIMXXXXXXXXXLGEMSNMVVRS

SEQ ID NO: 36755 - protein, 38 aa, Artificial Sequence
  Non-cyclic GFR-binding peptide
  MOD_RES (2)..(3)..(36)..(38): Xaa is C or S
  MOD_RES (17)..(18)..(19)..(20)..(21): Xaa is A or G
  MOD_RES (22)..(23)..(24)..(25): Xaa is A or G or absent
PXXVPQDLSNITIQIMXXXXXXXXXLGEMSMVVKSXKX

SEQ ID NO: 36756 - protein, 38 aa, Artificial Sequence
  Non-cyclic GFR-binding peptide
  MOD_RES (4)..(5)..(38): Xaa is C or S
  MOD_RES (19)..(20)..(21)..(22)..(23): Xaa is A or G
  MOD_RES (24)..(25)..(26)..(27): Xaa is A or G or absent
ASPXXVPQDLSNITIQIMXXXXXXXXXLGEMSMVVKSX

SEQ ID NO: 36757 - protein, 33 aa, Artificial Sequence
  Non-cyclic GFR-binding peptide
  MOD_RES (1)..(2): Xaa is C or S
XXVPTRLSNITIQIMDSANNVVIGEMSDMVVES

SEQ ID NO: 36758 - protein, 33 aa, Artificial Sequence
  Non-cyclic GFR-binding peptide
  MOD_RES (2)..(3): Xaa is C or S
TXXVPTRLSNITIQIMDSANNVVLGEMSDMVVE

SEQ ID NO: 36759 - protein, 43 aa, Artificial Sequence
  Non-cyclic GFR-binding peptide
  MOD_RES (6)..(7)..(40)..(42): Xaa is C or S
  MOD_RES (21)..(22)..(23)..(24)..(25): Xaa is A or G
  MOD_RES (26)..(27)..(28)..(29): Xaa is A or G or absent
RVPSTXXAPVKTSNITMQIMXXXXXXXXXIGEMSMIVEEXGXL

SEQ ID NO: 36760 - protein, 37 aa, Artificial Sequence
  Non-cyclic GFR-binding peptide
  MOD_RES (1)..(34)..(36): Xaa is C or S
  MOD_RES (15)..(16)..(17)..(18)..(19): Xaa is A or G
  MOD_RES (20)..(21)..(22)..(23): Xaa is A or G or absent
XVPQDLSNITIQIMXXXXXXXXXLGEMSMVVKSXKXS

SEQ ID NO: 36761 - protein, 31 aa, Artificial Sequence
  Non-cyclic GFR-binding peptide
  MOD_RES (1)..(1): Xaa is C or S
XVPQDLSNITIQIMVGRTPKVLGEMSMVVKS

SEQ ID NO: 36762 - protein, 40 aa, Artificial Sequence
  Non-cyclic GFR-binding peptide
  MOD_RES (6)..(7)..(38)..(40): Xaa is C or S
RVPSTXXAPVKTSNITMQIMDNGRVLLIGEMSMIVEEXGX

SEQ ID NO: 36763 - protein, 39 aa, Artificial Sequence
  Non-cyclic GFR-binding peptide
  MOD_RES (6)..(7)..(39): Xaa is C or S
AAPASXXVPARLSNITIQIMDAANNVVIGEMSDMVVEAX

SEQ ID NO: 36764 - protein, 37 aa, Artificial Sequence
  Non-cyclic GFR-binding peptide
  MOD_RES (1)..(35)..(37): Xaa is C or S
  MOD_RES (15)..(16)..(17)..(18)..(19): Xaa is A or G
  MOD_RES (20)..(21)..(22)..(23): Xaa is A or G or absent
XVPARLSNITIQIMXXXXXXXXXLGEMSDMVVEAXGX

SEQ ID NO: 36765 - protein, 38 aa, Artificial Sequence
  Non-cyclic GFR-binding peptide
  MOD_RES (5)..(6)..(37): Xaa is C or S
SAAPXXVPQALSNITIQIMVGRKPKVLGEMSMIVRSXK

SEQ ID NO: 36766 - protein, 41 aa, Artificial Sequence
  Non-cyclic GFR-binding peptide
  MOD_RES (5)..(6)..(40): Xaa is C or S
  MOD_RES (20)..(21)..(22)..(23)..(24): Xaa is A or G
  MOD_RES (25)..(26)..(27)..(28): Xaa is A or G or absent
SAGPXXTPTKMSNITMQIMXXXXXXXXXLGEMSGMVVDRXG

SEQ ID NO: 36767 - protein, 33 aa, Artificial Sequence
  Non-cyclic GFR-binding peptide
  MOD_RES (1)..(2)..(33): Xaa is C or S
XXVSQDLSNITIQIMIGKTPKILGEMSMIVKSX

SEQ ID NO: 36768 - protein, 41 aa, Artificial Sequence
  Non-cyclic GFR-binding peptide
  MOD_RES (5)..(6)..(38)..(40): Xaa is C or S
SAGPXXTPTKMSNITMQIMNDKQQIILGEMSGMVVDRXGXS

SEQ ID NO: 36769 - protein, 38 aa, Artificial Sequence
  Non-cyclic GFR-binding peptide
  MOD_RES (3)..(4)..(38): Xaa is C or S
  MOD_RES (18)..(19)..(20)..(21)..(22): Xaa is A or G
  MOD_RES (23)..(24)..(25)..(26): Xaa is A or G or absent
ASXXVPARLSNITIQIMXXXXXXXXXIGEMSDMVVEAX

SEQ ID NO: 36770 - protein, 36 aa, Artificial Sequence
  Non-cyclic GFR-binding peptide
  MOD_RES (5)..(6): Xaa is C or S
SASPXXVSQDLSNITIQIMIGKTPKILGEMSMIVKS

SEQ ID NO: 36771 - protein, 38 aa, Artificial Sequence
  Non-cyclic GFR-binding peptide
  MOD_RES (3)..(4)..(37): Xaa is C or S
  MOD_RES (18)..(19)..(20)..(21)..(22): Xaa is A or G
  MOD_RES (23)..(24)..(25)..(26): Xaa is A or G or absent
APXXVPQALSNITIQIMXXXXXXXXXLGEMSMIVRSXK

SEQ ID NO: 36772 - protein, 32 aa, Artificial Sequence
  Non-cyclic GFR-binding peptide
  MOD_RES (14)..(15)..(16)..(17)..(18): Xaa is A or G
  MOD_RES (19)..(20)..(21)..(22): Xaa is A or G or absent
VPTRLSNITIQIMXXXXXXXXXLGEMSDMVVE

SEQ ID NO: 36773 - protein, 42 aa, Artificial Sequence
  Non-cyclic GFR-binding peptide
  MOD_RES (5)..(6)..(39)..(41): Xaa is C or S
  MOD_RES (20)..(21)..(22)..(23)..(24): Xaa is A or G
  MOD_RES (25)..(26)..(27)..(28): Xaa is A or G or absent
VPSTXXAPVKTSNITMQIMXXXXXXXXXIGEMSMIVEEXGXL

SEQ ID NO: 36774 - protein, 38 aa, Artificial Sequence
  Non-cyclic GFR-binding peptide
  MOD_RES (6)..(7)..(38): Xaa is C or S
ASAAPXXVPQALSNITIQIMVGRKPKVLGEMSMIVRSX

SEQ ID NO: 36775 - protein, 40 aa, Artificial Sequence
  Non-cyclic GFR-binding peptide
  MOD_RES (5)..(6)..(37)..(39): Xaa is C or S
VPSTXXAPVKTSNITMQIMDNGRVLLIGEMSMIVEEXGXL

SEQ ID NO: 36776 - protein, 42 aa, Artificial Sequence
  Non-cyclic GFR-binding peptide
  MOD_RES (6)..(7)..(41): Xaa is C or S
  MOD_RES (21)..(22)..(23)..(24)..(25): Xaa is A or G
  MOD_RES (26)..(27)..(28)..(29): Xaa is A or G or absent
AAPASXXVPARLSNITIQIMXXXXXXXXXLGEMSDMVVEAXG

SEQ ID NO: 36777 - protein, 36 aa, Artificial Sequence
  Non-cyclic GFR-binding peptide
  MOD_RES (1)..(2)..(36): Xaa is C or S
  MOD_RES (16)..(17)..(18)..(19)..(20): Xaa is A or G
  MOD_RES (21)..(22)..(23)..(24): Xaa is A or G or absent
XXTPTKMSNITMQIMXXXXXXXXXLGEMSGMVVDRX

SEQ ID NO: 36778 - protein, 36 aa, Artificial Sequence
  Non-cyclic GFR-binding peptide
  MOD_RES (5)..(6): Xaa is C or S
VPSTXXAPVKTSNITMQIMDNGRVLLIGEMSMIVEE

SEQ ID NO: 36779 - protein, 37 aa, Artificial Sequence
  Non-cyclic GFR-binding peptide
  MOD_RES (1)..(35)..(37): Xaa is C or S
  MOD_RES (15)..(16)..(17)..(18)..(19): Xaa is A or G
  MOD_RES (20)..(21)..(22)..(23): Xaa is A or G or absent
XTPTKMSNITMQIMXXXXXXXXXIGEMSGMVVDRXGX

SEQ ID NO: 36780 - protein, 40 aa, Artificial Sequence
  Non-cyclic GFR-binding peptide
  MOD_RES (3)..(4)..(37)..(39): Xaa is C or S
  MOD_RES (18)..(19)..(20)..(21)..(22): Xaa is A or G
  MOD_RES (23)..(24)..(25)..(26): Xaa is A or G or absent
SPXXVSQDLSNITIQIMXXXXXXXXXLGEMSMIVKSXKXS

SEQ ID NO: 36781 - protein, 39 aa, Artificial Sequence
  Non-cyclic GFR-binding peptide
  MOD_RES (5)..(6)..(37)..(39): Xaa is C or S
SASPXXVPQDLSNITIQIMVGRTPKVLGEMSMVVKSXKX

SEQ ID NO: 36782 - protein, 39 aa, Artificial Sequence
  Non-cyclic GFR-binding peptide
  MOD_RES (2)..(3)..(37)..(39): Xaa is C or S
  MOD_RES (17)..(18)..(19)..(20)..(21): Xaa is A or G
  MOD_RES (22)..(23)..(24)..(25): Xaa is A or G or absent
PXXTPTKMSNITMQIMXXXXXXXXXIGEMSGMVVDRXGX

SEQ ID NO: 36783 - protein, 39 aa, Artificial Sequence
  Non-cyclic GFR-binding peptide
  MOD_RES (3)..(4)..(38): Xaa is C or S
  MOD_RES (18)..(19)..(20)..(21)..(22): Xaa is A or G
  MOD_RES (23)..(24)..(25)..(26): Xaa is A or G or absent
GPXXTPTKMSNITMQIMXXXXXXXXXLGEMSGMVVDRXG

SEQ ID NO: 36784 - protein, 38 aa, Artificial Sequence
  Non-cyclic GFR-binding peptide
  MOD_RES (2)..(3)..(35)..(37): Xaa is C or S
SXXVPARLSNITIQIMDAANNVVLGEMSDMVVEAXGXR

SEQ ID NO: 36785 - protein, 35 aa, Artificial Sequence
  Non-cyclic GFR-binding peptide
  MOD_RES (2)..(3)..(34): Xaa is C or S
TXXAPVKTSNITMQIMDNGRVLLLGEMSMIVEEXG

SEQ ID NO: 36786 - protein, 39 aa, Artificial Sequence
  Non-cyclic GFR-binding peptide
  MOD_RES (6)..(7): Xaa is C or S
  MOD_RES (21)..(22)..(23)..(24)..(25): Xaa is A or G
  MOD_RES (26)..(27)..(28)..(29): Xaa is A or G or absent
ASAAPXXVPQALSNITIQIMXXXXXXXXXLGEMSMIVRS

SEQ ID NO: 36787 - protein, 37 aa, Artificial Sequence
  Non-cyclic GFR-binding peptide
  MOD_RES (4)..(5)..(36): Xaa is C or S
ASPXXVSQDLSNITIQIMIGKTPKILGEMSMIVKSXK

SEQ ID NO: 36788 - protein, 35 aa, Artificial Sequence
  Non-cyclic GFR-binding peptide
  MOD_RES (1)..(35): Xaa is C or S
  MOD_RES (15)..(16)..(17)..(18)..(19): Xaa is A or G
  MOD_RES (20)..(21)..(22)..(23): Xaa is A or G or absent
XTPTKMSNITMQIMXXXXXXXXXLGEMSGMVVDRX

SEQ ID NO: 36789 - protein, 32 aa, Artificial Sequence
  Non-cyclic GFR-binding peptide
  MOD_RES (1)..(1): Xaa is C or S
XAPTKLSNITVQIMDDSSNVILGEMSNMVVRS

SEQ ID NO: 36790 - protein, 39 aa, Artificial Sequence
  Non-cyclic GFR-binding peptide
  MOD_RES (5)..(6)..(37)..(39): Xaa is C or S
VPSTXXAPVKTSNITMQIMDNGRVLLIGEMSMIVEEXGX

SEQ ID NO: 36791 - protein, 41 aa, Artificial Sequence
  Non-cyclic GFR-binding peptide
  MOD_RES (6)..(7)..(41): Xaa is C or S
  MOD_RES (21)..(22)..(23)..(24)..(25): Xaa is A or G
  MOD_RES (26)..(27)..(28)..(29): Xaa is A or G or absent
AAPASXXVPARLSNITIQIMXXXXXXXXXLGEMSDMVVEAX

SEQ ID NO: 36792 - protein, 44 aa, Artificial Sequence
  Non-cyclic GFR-binding peptide
  MOD_RES (6)..(7)..(41)..(43): Xaa is C or S
  MOD_RES (21)..(22)..(23)..(24)..(25): Xaa is A or G
  MOD_RES (26)..(27)..(28)..(29): Xaa is A or G or absent
HVPKPXXAPTKLSNITVQIMXXXXXXXXXLGEMSNMVVRSXGXH

SEQ ID NO: 36793 - protein, 35 aa, Artificial Sequence
  Non-cyclic GFR-binding peptide
  MOD_RES (33)..(35): Xaa is C or S
  MOD_RES (14)..(15)..(16)..(17)..(18): Xaa is A or G
  MOD_RES (19)..(20)..(21)..(22): Xaa is A or G or absent
APVKTSNITMQIMXXXXXXXXXIGEMSMIVEEXGX

SEQ ID NO: 36794 - protein, 32 aa, Artificial Sequence
  Non-cyclic GFR-binding peptide
  MOD_RES (14)..(15)..(16)..(17)..(18): Xaa is A or G
  MOD_RES (19)..(20)..(21)..(22): Xaa is A or G or absent
APVKTSNITMQIMXXXXXXXXXIGEMSMIVEE

SEQ ID NO: 36795 - protein, 36 aa, Artificial Sequence
  Non-cyclic GFR-binding peptide
  MOD_RES (3)..(4): Xaa is C or S
  MOD_RES (18)..(19)..(20)..(21)..(22): Xaa is A or G
  MOD_RES (23)..(24)..(25)..(26): Xaa is A or G or absent
PTXXVPTRLSNITIQIMXXXXXXXXXIGEMSDMVVE

SEQ ID NO: 36796 - protein, 37 aa, Artificial Sequence
  Non-cyclic GFR-binding peptide
  MOD_RES (6)..(7): Xaa is C or S
GSAGPXXTPTKMSNITMQIMNDKQQIILGEMSGMVVD

SEQ ID NO: 36797 - protein, 39 aa, Artificial Sequence
  Non-cyclic GFR-binding peptide
  MOD_RES (6)..(7)..(39): Xaa is C or S
GSAGPXXTPTKMSNITMQIMNDKQQIILGEMSGMVVDRX

SEQ ID NO: 36798 - protein, 37 aa, Artificial Sequence
  Non-cyclic GFR-binding peptide
  MOD_RES (4)..(5)..(37): Xaa is C or S
AGPXXTPTKMSNITMQIMNDKQQIIIGEMSGMVVDRX

SEQ ID NO: 36799 - protein, 42 aa, Artificial Sequence
  Non-cyclic GFR-binding peptide
  MOD_RES (5)..(6)..(39)..(41): Xaa is C or S
  MOD_RES (20)..(21)..(22)..(23)..(24): Xaa is A or G
  MOD_RES (25)..(26)..(27)..(28): Xaa is A or G or absent
SASPXXVPQDLSNITIQIMXXXXXXXXXLGEMSMVVKSXKXS

SEQ ID NO: 36800 - protein, 31 aa, Artificial Sequence
  Non-cyclic GFR-binding peptide
  MOD_RES (1)..(1): Xaa is C or S
XAPVKTSNITMQIMDNGRVLLIGEMSMIVEE

SEQ ID NO: 36801 - protein, 36 aa, Artificial Sequence
  Non-cyclic GFR-binding peptide
  MOD_RES (4)..(5): Xaa is C or S
AGPXXTPTKMSNITMQIMNDKQQIIIGEMSGMVVDR

SEQ ID NO: 36802 - protein, 40 aa, Artificial Sequence
  Non-cyclic GFR-binding peptide
  MOD_RES (6)..(7): Xaa is C or S
  MOD_RES (21)..(22)..(23)..(24)..(25): Xaa is A or G
  MOD_RES (26)..(27)..(28)..(29): Xaa is A or G or absent
GSAGPXXTPTKMSNITMQIMXXXXXXXXXIGEMSGMVVDR

SEQ ID NO: 36803 - protein, 36 aa, Artificial Sequence
  Non-cyclic GFR-binding peptide
  MOD_RES (1)..(33)..(35): Xaa is C or S
XVPTRLSNITIQIMDSANNVVIGEMSDMVVESXGXR

SEQ ID NO: 36804 - protein, 40 aa, Artificial Sequence
  Non-cyclic GFR-binding peptide
  MOD_RES (6)..(7)..(38)..(40): Xaa is C or S
ASASPXXVSQDLSNITIQIMIGKTPKILGEMSMIVKSXKX

SEQ ID NO: 36805 - protein, 41 aa, Artificial Sequence
  Non-cyclic GFR-binding peptide
  MOD_RES (4)..(5)..(38)..(40): Xaa is C or S
  MOD_RES (19)..(20)..(21)..(22)..(23): Xaa is A or G
  MOD_RES (24)..(25)..(26)..(27): Xaa is A or G or absent
PSTXXAPVKTSNITMQIMXXXXXXXXXLGEMSMIVEEXGXL

SEQ ID NO: 36806 - protein, 32 aa, Artificial Sequence
  Non-cyclic GFR-binding peptide
  MOD_RES (1)..(2): Xaa is C or S
XXAPVKTSNITMQIMDNGRVLLIGEMSMIVEE

SEQ ID NO: 36807 - protein, 36 aa, Artificial Sequence
  Non-cyclic GFR-binding peptide
  MOD_RES (3)..(4)..(36): Xaa is C or S
GPXXTPTKMSNITMQIMNDKQQIILGEMSGMVVDRX

SEQ ID NO: 36808 - protein, 40 aa, Artificial Sequence
  Non-cyclic GFR-binding peptide
  MOD_RES (6)..(7)..(38)..(40): Xaa is C or S
RVPSTXXAPVKTSNITMQIMDNGRVLLLGEMSMIVEEXGX

SEQ ID NO: 36809 - protein, 40 aa, Artificial Sequence
  Non-cyclic GFR-binding peptide
  MOD_RES (5)..(6)..(39): Xaa is C or S
  MOD_RES (20)..(21)..(22)..(23)..(24): Xaa is A or G
  MOD_RES (25)..(26)..(27)..(28): Xaa is A or G or absent
VPSTXXAPVKTSNITMQIMXXXXXXXXXLGEMSMIVEEXG

SEQ ID NO: 36810 - protein, 35 aa, Artificial Sequence
  Non-cyclic GFR-binding peptide
  MOD_RES (32)..(34): Xaa is C or S
VPARLSNITIQIMDAANNVVLGEMSDMVVEAXGXR

SEQ ID NO: 36811 - protein, 33 aa, Artificial Sequence
  Non-cyclic GFR-binding peptide
  MOD_RES (1)..(1): Xaa is C or S
  MOD_RES (15)..(16)..(17)..(18)..(19): Xaa is A or G
  MOD_RES (20)..(21)..(22)..(23): Xaa is A or G or absent
XVPQALSNITIQIMXXXXXXXXXLGEMSMIVRS

SEQ ID NO: 36812 - protein, 34 aa, Artificial Sequence
  Non-cyclic GFR-binding peptide
  MOD_RES (1)..(34): Xaa is C or S
  MOD_RES (15)..(16)..(17)..(18)..(19): Xaa is A or G
  MOD_RES (20)..(21)..(22)..(23): Xaa is A or G or absent
XVPQDLSNITIQIMXXXXXXXXXLGEMSMVVKSX

SEQ ID NO: 36813 - protein, 36 aa, Artificial Sequence
  Non-cyclic GFR-binding peptide
  MOD_RES (2)..(3)..(35): Xaa is C or S
PXXTPTKMSNITMQIMNDKQQIIIGEMSGMVVDRXG

SEQ ID NO: 36814 - protein, 33 aa, Artificial Sequence
  Non-cyclic GFR-binding peptide
  MOD_RES (1)..(33): Xaa is C or S
XVPTRLSNITIQIMDSANNVVLGEMSDMVVESX

SEQ ID NO: 36815 - protein, 38 aa, Artificial Sequence
  Non-cyclic GFR-binding peptide
  MOD_RES (5)..(6): Xaa is C or S
  MOD_RES (20)..(21)..(22)..(23)..(24): Xaa is A or G
  MOD_RES (25)..(26)..(27)..(28): Xaa is A or G or absent
TPPTXXVPTRLSNITIQIMXXXXXXXXXLGEMSDMVVE

SEQ ID NO: 36816 - protein, 39 aa, Artificial Sequence
  Non-cyclic GFR-binding peptide
  MOD_RES (6)..(7)..(39): Xaa is C or S
STPPTXXVPTRLSNITIQIMDSANNVVLGEMSDMVVESX

SEQ ID NO: 36817 - protein, 43 aa, Artificial Sequence
  Non-cyclic GFR-binding peptide
  MOD_RES (6)..(7)..(41)..(43): Xaa is C or S
  MOD_RES (21)..(22)..(23)..(24)..(25): Xaa is A or G
  MOD_RES (26)..(27)..(28)..(29): Xaa is A or G or absent
AAPASXXVPARLSNITIQIMXXXXXXXXXIGEMSDMVVEAXGX

SEQ ID NO: 36818 - protein, 38 aa, Artificial Sequence
  Non-cyclic GFR-binding peptide
  MOD_RES (2)..(3)..(36)..(38): Xaa is C or S
  MOD_RES (17)..(18)..(19)..(20)..(21): Xaa is A or G
  MOD_RES (22)..(23)..(24)..(25): Xaa is A or G or absent
TXXAPVKTSNITMQIMXXXXXXXXXIGEMSMIVEEXGX

SEQ ID NO: 36819 - protein, 37 aa, Artificial Sequence
  Non-cyclic GFR-binding peptide
  MOD_RES (2)..(3)..(36): Xaa is C or S
  MOD_RES (17)..(18)..(19)..(20)..(21): Xaa is A or G
  MOD_RES (22)..(23)..(24)..(25): Xaa is A or G or absent
PXXVPQDLSNITIQIMXXXXXXXXXLGEMSMVVKSXK

SEQ ID NO: 36820 - protein, 36 aa, Artificial Sequence
  Non-cyclic GFR-binding peptide
  MOD_RES (34)..(36): Xaa is C or S
  MOD_RES (14)..(15)..(16)..(17)..(18): Xaa is A or G
  MOD_RES (19)..(20)..(21)..(22): Xaa is A or G or absent
VPTRLSNITIQIMXXXXXXXXXIGEMSDMVVESXGX

SEQ ID NO: 36821 - protein, 36 aa, Artificial Sequence
  Non-cyclic GFR-binding peptide
  MOD_RES (1)..(2)..(36): Xaa is C or S
  MOD_RES (16)..(17)..(18)..(19)..(20): Xaa is A or G
  MOD_RES (21)..(22)..(23)..(24): Xaa is A or G or absent
XXVPTRLSNITIQIMXXXXXXXXXIGEMSDMVVESX

SEQ ID NO: 36822 - protein, 32 aa, Artificial Sequence
  Non-cyclic GFR-binding peptide
  MOD_RES (14)..(15)..(16)..(17)..(18): Xaa is A or G
  MOD_RES (19)..(20)..(21)..(22): Xaa is A or G or absent
VPQALSNITIQIMXXXXXXXXXLGEMSMIVRS

SEQ ID NO: 36823 - protein, 38 aa, Artificial Sequence
  Non-cyclic GFR-binding peptide
  MOD_RES (4)..(5): Xaa is C or S
  MOD_RES (19)..(20)..(21)..(22)..(23): Xaa is A or G
  MOD_RES (24)..(25)..(26)..(27): Xaa is A or G or absent
PKPXXAPTKLSNITVQIMXXXXXXXXXLGEMSNMVVRS

SEQ ID NO: 36824 - protein, 32 aa, Artificial Sequence
  Non-cyclic GFR-binding peptide
  MOD_RES (14)..(15)..(16)..(17)..(18): Xaa is A or G
  MOD_RES (19)..(20)..(21)..(22): Xaa is A or G or absent
VPARLSNITIQIMXXXXXXXXXLGEMSDMVVE

SEQ ID NO: 36825 - protein, 38 aa, Artificial Sequence
  Non-cyclic GFR-binding peptide
  MOD_RES (2)..(3)..(37): Xaa is C or S
  MOD_RES (17)..(18)..(19)..(20)..(21): Xaa is A or G
  MOD_RES (22)..(23)..(24)..(25): Xaa is A or G or absent
PXXTPTKMSNITMQIMXXXXXXXXXLGEMSGMVVDRXG

SEQ ID NO: 36826 - protein, 36 aa, Artificial Sequence
  Non-cyclic GFR-binding peptide
  MOD_RES (3)..(4): Xaa is C or S
  MOD_RES (18)..(19)..(20)..(21)..(22): Xaa is A or G
  MOD_RES (23)..(24)..(25)..(26): Xaa is A or G or absent
APXXVPQALSNITIQIMXXXXXXXXXLGEMSMIVRS

SEQ ID NO: 36827 - protein, 40 aa, Artificial Sequence
  Non-cyclic GFR-binding peptide
  MOD_RES (3)..(4)..(38)..(40): Xaa is C or S
  MOD_RES (18)..(19)..(20)..(21)..(22): Xaa is A or G
  MOD_RES (23)..(24)..(25)..(26): Xaa is A or G or absent
ASXXVPARLSNITIQIMXXXXXXXXXLGEMSDMVVEAXGX

SEQ ID NO: 36828 - protein, 33 aa, Artificial Sequence
  Non-cyclic GFR-binding peptide
  MOD_RES (1)..(32): Xaa is C or S
XVPQDLSNITIQIMVGRTPKVLGEMSMVVKSXK

SEQ ID NO: 36829 - protein, 42 aa, Artificial Sequence
  Non-cyclic GFR-binding peptide
  MOD_RES (6)..(7)..(41): Xaa is C or S
  MOD_RES (21)..(22)..(23)..(24)..(25): Xaa is A or G
  MOD_RES (26)..(27)..(28)..(29): Xaa is A or G or absent
STPPTXXVPTRLSNITIQIMXXXXXXXXXIGEMSDMVVESXG

SEQ ID NO: 36830 - protein, 34 aa, Artificial Sequence
  Non-cyclic GFR-binding peptide
  MOD_RES (2)..(3): Xaa is C or S
PXXAPTKLSNITVQIMDDSSNVILGEMSNMVVRS

SEQ ID NO: 36831 - protein, 32 aa, Artificial Sequence
  Non-cyclic GFR-binding peptide
  MOD_RES (31)..(31): Xaa is C or S
APVKTSNITMQIMDNGRVLLIGEMSMIVEEXG

SEQ ID NO: 36832 - protein, 35 aa, Artificial Sequence
  Non-cyclic GFR-binding peptide
  MOD_RES (2)..(3): Xaa is C or S
  MOD_RES (17)..(18)..(19)..(20)..(21): Xaa is A or G
  MOD_RES (22)..(23)..(24)..(25): Xaa is A or G or absent
TXXVPTRLSNITIQIMXXXXXXXXXLGEMSDMVVE

SEQ ID NO: 36833 - protein, 41 aa, Artificial Sequence
  Non-cyclic GFR-binding peptide
  MOD_RES (6)..(7)..(41): Xaa is C or S
  MOD_RES (21)..(22)..(23)..(24)..(25): Xaa is A or G
  MOD_RES (26)..(27)..(28)..(29): Xaa is A or G or absent
STPPTXXVPTRLSNITIQIMXXXXXXXXXIGEMSDMVVESX

SEQ ID NO: 36834 - protein, 40 aa, Artificial Sequence
  Non-cyclic GFR-binding peptide
  MOD_RES (3)..(4)..(38)..(40): Xaa is C or S
  MOD_RES (18)..(19)..(20)..(21)..(22): Xaa is A or G
  MOD_RES (23)..(24)..(25)..(26): Xaa is A or G or absent
KPXXAPTKLSNITVQIMXXXXXXXXXLGEMSNMVVRSXGX

SEQ ID NO: 36835 - protein, 35 aa, Artificial Sequence
  Non-cyclic GFR-binding peptide
  MOD_RES (1)..(34): Xaa is C or S
  MOD_RES (15)..(16)..(17)..(18)..(19): Xaa is A or G
  MOD_RES (20)..(21)..(22)..(23): Xaa is A or G or absent
XAPVKTSNITMQIMXXXXXXXXXIGEMSMIVEEXG

SEQ ID NO: 36836 - protein, 36 aa, Artificial Sequence
  Non-cyclic GFR-binding peptide
  MOD_RES (3)..(4): Xaa is C or S
  MOD_RES (18)..(19)..(20)..(21)..(22): Xaa is A or G
  MOD_RES (23)..(24)..(25)..(26): Xaa is A or G or absent
STXXAPVKTSNITMQIMXXXXXXXXXLGEMSMIVEE

SEQ ID NO: 36837 - protein, 36 aa, Artificial Sequence
  Non-cyclic GFR-binding peptide
  MOD_RES (4)..(5): Xaa is C or S
PPTXXVPTRLSNITIQIMDSANNVVLGEMSDMVVES

SEQ ID NO: 36838 - protein, 41 aa, Artificial Sequence
  Non-cyclic GFR-binding peptide
  MOD_RES (4)..(5)..(39)..(41): Xaa is C or S
  MOD_RES (19)..(20)..(21)..(22)..(23): Xaa is A or G
  MOD_RES (24)..(25)..(26)..(27): Xaa is A or G or absent
AGPXXTPTKMSNITMQIMXXXXXXXXXLGEMSGMVVDRXGX

SEQ ID NO: 36839 - protein, 41 aa, Artificial Sequence
  Non-cyclic GFR-binding peptide
  MOD_RES (6)..(7)..(40): Xaa is C or S
  MOD_RES (21)..(22)..(23)..(24)..(25): Xaa is A or G
  MOD_RES (26)..(27)..(28)..(29): Xaa is A or G or absent
RVPSTXXAPVKTSNITMQIMXXXXXXXXXLGEMSMIVEEXG

SEQ ID NO: 36840 - protein, 33 aa, Artificial Sequence
  Non-cyclic GFR-binding peptide
  MOD_RES (1)..(32): Xaa is C or S
XVSQDLSNITIQIMIGKTPKILGEMSMIVKSXK

SEQ ID NO: 36841 - protein, 41 aa, Artificial Sequence
  Non-cyclic GFR-binding peptide
  MOD_RES (4)..(5)..(39)..(41): Xaa is C or S
  MOD_RES (19)..(20)..(21)..(22)..(23): Xaa is A or G
  MOD_RES (24)..(25)..(26)..(27): Xaa is A or G or absent
PASXXVPARLSNITIQIMXXXXXXXXXIGEMSDMVVEAXGX

SEQ ID NO: 36842 - protein, 38 aa, Artificial Sequence
  Non-cyclic GFR-binding peptide
  MOD_RES (1)..(2)..(35)..(37): Xaa is C or S
  MOD_RES (16)..(17)..(18)..(19)..(20): Xaa is A or G
  MOD_RES (21)..(22)..(23)..(24): Xaa is A or G or absent
XXVSQDLSNITIQIMXXXXXXXXXLGEMSMIVKSXKXS

SEQ ID NO: 36843 - protein, 33 aa, Artificial Sequence
  Non-cyclic GFR-binding peptide
  MOD_RES (2)..(3): Xaa is C or S
PXXVPQALSNITIQIMVGRKPKVLGEMSMIVRS

SEQ ID NO: 36844 - protein, 40 aa, Artificial Sequence
  Non-cyclic GFR-binding peptide
  MOD_RES (3)..(4)..(38)..(40): Xaa is C or S
  MOD_RES (18)..(19)..(20)..(21)..(22): Xaa is A or G
  MOD_RES (23)..(24)..(25)..(26): Xaa is A or G or absent
PTXXVPTRLSNITIQIMXXXXXXXXXIGEMSDMVVESXGX

SEQ ID NO: 36845 - protein, 37 aa, Artificial Sequence
  Non-cyclic GFR-binding peptide
  MOD_RES (3)..(4)..(36): Xaa is C or S
PTXXVPTRLSNITIQIMDSANNVVLGEMSDMVVESXG

SEQ ID NO: 36846 - protein, 36 aa, Artificial Sequence
  Non-cyclic GFR-binding peptide
  MOD_RES (1)..(33)..(35): Xaa is C or S
XAPTKLSNITVQIMDDSSNVILGEMSNMVVRSXGXH

SEQ ID NO: 36847 - protein, 37 aa, Artificial Sequence
  Non-cyclic GFR-binding peptide
  MOD_RES (5)..(6)..(37): Xaa is C or S
SASPXXVPQDLSNITIQIMVGRTPKVLGEMSMVVKSX

SEQ ID NO: 36848 - protein, 38 aa, Artificial Sequence
  Non-cyclic GFR-binding peptide
  MOD_RES (4)..(5): Xaa is C or S
  MOD_RES (19)..(20)..(21)..(22)..(23): Xaa is A or G
  MOD_RES (24)..(25)..(26)..(27): Xaa is A or G or absent
PASXXVPARLSNITIQIMXXXXXXXXXLGEMSDMVVEA

SEQ ID NO: 36849 - protein, 42 aa, Artificial Sequence
  Non-cyclic GFR-binding peptide
  MOD_RES (4)..(5)..(39)..(41): Xaa is C or S
  MOD_RES (19)..(20)..(21)..(22)..(23): Xaa is A or G
  MOD_RES (24)..(25)..(26)..(27): Xaa is A or G or absent
PPTXXVPTRLSNITIQIMXXXXXXXXXIGEMSDMVVESXGXR

SEQ ID NO: 36850 - protein, 34 aa, Artificial Sequence
  Non-cyclic GFR-binding peptide
  MOD_RES (1)..(32)..(34): Xaa is C or S
XVPQALSNITIQIMVGRKPKVLGEMSMIVRSXKX

SEQ ID NO: 36851 - protein, 38 aa, Artificial Sequence
  Non-cyclic GFR-binding peptide
  MOD_RES (4)..(5)..(38): Xaa is C or S
  MOD_RES (19)..(20)..(21)..(22)..(23): Xaa is A or G
  MOD_RES (24)..(25)..(26)..(27): Xaa is A or G or absent
ASPXXVSQDLSNITIQIMXXXXXXXXXLGEMSMIVKSX

SEQ ID NO: 36852 - protein, 37 aa, Artificial Sequence
  Non-cyclic GFR-binding peptide
  MOD_RES (2)..(3)..(37): Xaa is C or S
  MOD_RES (17)..(18)..(19)..(20)..(21): Xaa is A or G
  MOD_RES (22)..(23)..(24)..(25): Xaa is A or G or absent
SXXVPARLSNITIQIMXXXXXXXXXLGEMSDMVVEAX

SEQ ID NO: 36853 - protein, 35 aa, Artificial Sequence
  Non-cyclic GFR-binding peptide
  MOD_RES (1)..(35): Xaa is C or S
  MOD_RES (15)..(16)..(17)..(18)..(19): Xaa is A or G
  MOD_RES (20)..(21)..(22)..(23): Xaa is A or G or absent
XVPARLSNITIQIMXXXXXXXXXIGEMSDMVVEAX

SEQ ID NO: 36854 - protein, 35 aa, Artificial Sequence
  Non-cyclic GFR-binding peptide
  MOD_RES (1)..(2): Xaa is C or S
  MOD_RES (16)..(17)..(18)..(19)..(20): Xaa is A or G
  MOD_RES (21)..(22)..(23)..(24): Xaa is A or G or absent
XXVPARLSNITIQIMXXXXXXXXXIGEMSDMVVEA

SEQ ID NO: 36855 - protein, 40 aa, Artificial Sequence
  Non-cyclic GFR-binding peptide
  MOD_RES (5)..(6)..(37)..(39): Xaa is C or S
SASPXXVPQDLSNITIQIMVGRTPKVLGEMSMVVKSXKXS

SEQ ID NO: 36856 - protein, 33 aa, Artificial Sequence
  Non-cyclic GFR-binding peptide
  MOD_RES (31)..(33): Xaa is C or S
VPQDLSNITIQIMVGRTPKVLGEMSMVVKSXKX

SEQ ID NO: 36857 - protein, 35 aa, Artificial Sequence
  Non-cyclic GFR-binding peptide
  MOD_RES (3)..(4)..(35): Xaa is C or S
STXXAPVKTSNITMQIMDNGRVLLIGEMSMIVEEX

SEQ ID NO: 36858 - protein, 41 aa, Artificial Sequence
  Non-cyclic GFR-binding peptide
  MOD_RES (6)..(7)..(41): Xaa is C or S
  MOD_RES (21)..(22)..(23)..(24)..(25): Xaa is A or G
  MOD_RES (26)..(27)..(28)..(29): Xaa is A or G or absent
HVPKPXXAPTKLSNITVQIMXXXXXXXXXLGEMSNMVVRSX

SEQ ID NO: 36859 - protein, 36 aa, Artificial Sequence
  Non-cyclic GFR-binding peptide
  MOD_RES (3)..(4): Xaa is C or S
  MOD_RES (18)..(19)..(20)..(21)..(22): Xaa is A or G
  MOD_RES (23)..(24)..(25)..(26): Xaa is A or G or absent
KPXXAPTKLSNITVQIMXXXXXXXXXLGEMSNMVVR

SEQ ID NO: 36860 - protein, 43 aa, Artificial Sequence
  Non-cyclic GFR-binding peptide
  MOD_RES (6)..(7)..(40)..(42): Xaa is C or S
  MOD_RES (21)..(22)..(23)..(24)..(25): Xaa is A or G
  MOD_RES (26)..(27)..(28)..(29): Xaa is A or G or absent
ASAAPXXVPQALSNITIQIMXXXXXXXXXLGEMSMIVRSXKXS

SEQ ID NO: 36861 - protein, 42 aa, Artificial Sequence
  Non-cyclic GFR-binding peptide
  MOD_RES (6)..(7)..(39)..(41): Xaa is C or S
GSAGPXXTPTKMSNITMQIMNDKQQIIIGEMSGMVVDRXGXS

SEQ ID NO: 36862 - protein, 34 aa, Artificial Sequence
  Non-cyclic GFR-binding peptide
  MOD_RES (1)..(2)..(33): Xaa is C or S
XXVSQDLSNITIQIMIGKTPKILGEMSMIVKSXK

SEQ ID NO: 36863 - protein, 37 aa, Artificial Sequence
  Non-cyclic GFR-binding peptide
  MOD_RES (5)..(6): Xaa is C or S
SAGPXXTPTKMSNITMQIMNDKQQIIIGEMSGMVVDR

SEQ ID NO: 36864 - protein, 37 aa, Artificial Sequence
  Non-cyclic GFR-binding peptide
  MOD_RES (1)..(34)..(36): Xaa is C or S
  MOD_RES (15)..(16)..(17)..(18)..(19): Xaa is A or G
  MOD_RES (20)..(21)..(22)..(23): Xaa is A or G or absent
XVPQALSNITIQIMXXXXXXXXXLGEMSMIVRSXKXS

SEQ ID NO: 36865 - protein, 38 aa, Artificial Sequence
  Non-cyclic GFR-binding peptide
  MOD_RES (3)..(4)..(36)..(38): Xaa is C or S
ASXXVPARLSNITIQIMDAANNVVIGEMSDMVVEAXGX

SEQ ID NO: 36866 - protein, 38 aa, Artificial Sequence
  Non-cyclic GFR-binding peptide
  MOD_RES (1)..(2)..(36)..(38): Xaa is C or S
  MOD_RES (16)..(17)..(18)..(19)..(20): Xaa is A or G
  MOD_RES (21)..(22)..(23)..(24): Xaa is A or G or absent
XXVPTRLSNITIQIMXXXXXXXXXIGEMSDMVVESXGX

SEQ ID NO: 36867 - protein, 32 aa, Artificial Sequence
  Non-cyclic GFR-binding peptide
  MOD_RES (32)..(32): Xaa is C or S
VPARLSNITIQIMDAANNVVLGEMSDMVVEAX

SEQ ID NO: 36868 - protein, 36 aa, Artificial Sequence
  Non-cyclic GFR-binding peptide
  MOD_RES (3)..(4): Xaa is C or S
  MOD_RES (18)..(19)..(20)..(21)..(22): Xaa is A or G
  MOD_RES (23)..(24)..(25)..(26): Xaa is A or G or absent
ASXXVPARLSNITIQIMXXXXXXXXXLGEMSDMVVE

SEQ ID NO: 36869 - protein, 38 aa, Artificial Sequence
  Non-cyclic GFR-binding peptide
  MOD_RES (6)..(7): Xaa is C or S
AAPASXXVPARLSNITIQIMDAANNVVLGEMSDMVVEA

SEQ ID NO: 36870 - protein, 39 aa, Artificial Sequence
  Non-cyclic GFR-binding peptide
  MOD_RES (2)..(3)..(36)..(38): Xaa is C or S
  MOD_RES (17)..(18)..(19)..(20)..(21): Xaa is A or G
  MOD_RES (22)..(23)..(24)..(25): Xaa is A or G or absent
TXXAPVKTSNITMQIMXXXXXXXXXLGEMSMIVEEXGXL

SEQ ID NO: 36871 - protein, 36 aa, Artificial Sequence
  Non-cyclic GFR-binding peptide
  MOD_RES (1)..(34)..(36): Xaa is C or S
  MOD_RES (15)..(16)..(17)..(18)..(19): Xaa is A or G
  MOD_RES (20)..(21)..(22)..(23): Xaa is A or G or absent
XAPVKTSNITMQIMXXXXXXXXXLGEMSMIVEEXGX

SEQ ID NO: 36872 - protein, 33 aa, Artificial Sequence
  Non-cyclic GFR-binding peptide
  MOD_RES (2)..(3): Xaa is C or S
PXXTPTKMSNITMQIMNDKQQIIIGEMSGMVVD

SEQ ID NO: 36873 - protein, 37 aa, Artificial Sequence
  Non-cyclic GFR-binding peptide
  MOD_RES (4)..(5)..(36): Xaa is C or S
ASPXXVPQDLSNITIQIMVGRTPKVLGEMSMVVKSXK

SEQ ID NO: 36874 - protein, 37 aa, Artificial Sequence
  Non-cyclic GFR-binding peptide
  MOD_RES (34)..(36): Xaa is C or S
  MOD_RES (14)..(15)..(16)..(17)..(18): Xaa is A or G
  MOD_RES (19)..(20)..(21)..(22): Xaa is A or G or absent
VPTRLSNITIQIMXXXXXXXXXIGEMSDMVVESXGXR

SEQ ID NO: 36875 - protein, 36 aa, Artificial Sequence
  Non-cyclic GFR-binding peptide
  MOD_RES (4)..(5): Xaa is C or S
PKPXXAPTKLSNITVQIMDDSSNVILGEMSNMVVRS

SEQ ID NO: 36876 - protein, 34 aa, Artificial Sequence
  Non-cyclic GFR-binding peptide
  MOD_RES (31)..(33): Xaa is C or S
VPQDLSNITIQIMVGRTPKVLGEMSMVVKSXKXS

SEQ ID NO: 36877 - protein, 40 aa, Artificial Sequence
  Non-cyclic GFR-binding peptide
  MOD_RES (6)..(7)..(39): Xaa is C or S
GSAGPXXTPTKMSNITMQIMNDKQQIIIGEMSGMVVDRXG

SEQ ID NO: 36878 - protein, 38 aa, Artificial Sequence
  Non-cyclic GFR-binding peptide
  MOD_RES (4)..(5)..(36)..(38): Xaa is C or S
PSTXXAPVKTSNITMQIMDNGRVLLIGEMSMIVEEXGX

SEQ ID NO: 36879 - protein, 40 aa, Artificial Sequence
  Non-cyclic GFR-binding peptide
  MOD_RES (5)..(6)..(38)..(40): Xaa is C or S
APASXXVPARLSNITIQIMDAANNVVLGEMSDMVVEAXGX

SEQ ID NO: 36880 - protein, 35 aa, Artificial Sequence
  Non-cyclic GFR-binding peptide
  MOD_RES (3)..(4)..(35): Xaa is C or S
SPXXVSQDLSNITIQIMIGKTPKILGEMSMIVKSX

SEQ ID NO: 36881 - protein, 39 aa, Artificial Sequence
  Non-cyclic GFR-binding peptide
  MOD_RES (1)..(2)..(36)..(38): Xaa is C or S
  MOD_RES (16)..(17)..(18)..(19)..(20): Xaa is A or G
  MOD_RES (21)..(22)..(23)..(24): Xaa is A or G or absent
XXVPARLSNITIQIMXXXXXXXXXIGEMSDMVVEAXGXR

SEQ ID NO: 36882 - protein, 31 aa, Artificial Sequence
  Non-cyclic GFR-binding peptide
TPTKMSNITMQIMNDKQQIILGEMSGMVVDR

SEQ ID NO: 36883 - protein, 31 aa, Artificial Sequence
  Non-cyclic GFR-binding peptide
  MOD_RES (1)..(1): Xaa is C or S
XTPTKMSNITMQIMNDKQQIILGEMSGMVVD

SEQ ID NO: 36884 - protein, 37 aa, Artificial Sequence
  Non-cyclic GFR-binding peptide
  MOD_RES (4)..(5)..(37): Xaa is C or S
PASXXVPARLSNITIQIMDAANNVVIGEMSDMVVEAX

SEQ ID NO: 36885 - protein, 34 aa, Artificial Sequence
  Non-cyclic GFR-binding peptide
  MOD_RES (1)..(1): Xaa is C or S
  MOD_RES (15)..(16)..(17)..(18)..(19): Xaa is A or G
  MOD_RES (20)..(21)..(22)..(23): Xaa is A or G or absent
XVPARLSNITIQIMXXXXXXXXXLGEMSDMVVEA

SEQ ID NO: 36886 - protein, 37 aa, Artificial Sequence
  Non-cyclic GFR-binding peptide
  MOD_RES (1)..(2)..(34)..(36): Xaa is C or S
XXAPTKLSNITVQIMDDSSNVILGEMSNMVVRSXGXH

SEQ ID NO: 36887 - protein, 34 aa, Artificial Sequence
  Non-cyclic GFR-binding peptide
  MOD_RES (1)..(2): Xaa is C or S
  MOD_RES (16)..(17)..(18)..(19)..(20): Xaa is A or G
  MOD_RES (21)..(22)..(23)..(24): Xaa is A or G or absent
XXVPQALSNITIQIMXXXXXXXXXLGEMSMIVRS

SEQ ID NO: 36888 - protein, 34 aa, Artificial Sequence
  Non-cyclic GFR-binding peptide
  MOD_RES (1)..(33): Xaa is C or S
XVPARLSNITIQIMDAANNVVLGEMSDMVVEAXG

SEQ ID NO: 36889 - protein, 35 aa, Artificial Sequence
  Non-cyclic GFR-binding peptide
  MOD_RES (33)..(35): Xaa is C or S
  MOD_RES (14)..(15)..(16)..(17)..(18): Xaa is A or G
  MOD_RES (19)..(20)..(21)..(22): Xaa is A or G or absent
APVKTSNITMQIMXXXXXXXXXLGEMSMIVEEXGX

SEQ ID NO: 36890 - protein, 39 aa, Artificial Sequence
  Non-cyclic GFR-binding peptide
  MOD_RES (4)..(5)..(37)..(39): Xaa is C or S
PPTXXVPTRLSNITIQIMDSANNVVLGEMSDMVVESXGX

SEQ ID NO: 36891 - protein, 34 aa, Artificial Sequence
  Non-cyclic GFR-binding peptide
  MOD_RES (31)..(33): Xaa is C or S
VSQDLSNITIQIMIGKTPKILGEMSMIVKSXKXS

SEQ ID NO: 36892 - protein, 33 aa, Artificial Sequence
  Non-cyclic GFR-binding peptide
  MOD_RES (1)..(2): Xaa is C or S
XXTPTKMSNITMQIMNDKQQIIIGEMSGMVVDR

SEQ ID NO: 36893 - protein, 36 aa, Artificial Sequence
  Non-cyclic GFR-binding peptide
  MOD_RES (33)..(35): Xaa is C or S
  MOD_RES (14)..(15)..(16)..(17)..(18): Xaa is A or G
  MOD_RES (19)..(20)..(21)..(22): Xaa is A or G or absent
APVKTSNITMQIMXXXXXXXXXIGEMSMIVEEXGXL

SEQ ID NO: 36894 - protein, 32 aa, Artificial Sequence
  Non-cyclic GFR-binding peptide
  MOD_RES (14)..(15)..(16)..(17)..(18): Xaa is A or G
  MOD_RES (19)..(20)..(21)..(22): Xaa is A or G or absent
APTKLSNITVQIMXXXXXXXXXLGEMSNMVVR

SEQ ID NO: 36895 - protein, 31 aa, Artificial Sequence
  Non-cyclic GFR-binding peptide
  MOD_RES (31)..(31): Xaa is C or S
VPQALSNITIQIMVGRKPKVLGEMSMIVRSX

SEQ ID NO: 36896 - protein, 39 aa, Artificial Sequence
  Non-cyclic GFR-binding peptide
  MOD_RES (4)..(5)..(36)..(38): Xaa is C or S
AAPXXVPQALSNITIQIMVGRKPKVLGEMSMIVRSXKXS

SEQ ID NO: 36897 - protein, 36 aa, Artificial Sequence
  Non-cyclic GFR-binding peptide
  MOD_RES (1)..(35): Xaa is C or S
  MOD_RES (15)..(16)..(17)..(18)..(19): Xaa is A or G
  MOD_RES (20)..(21)..(22)..(23): Xaa is A or G or absent
XTPTKMSNITMQIMXXXXXXXXXLGEMSGMVVDRXG

SEQ ID NO: 36898 - protein, 39 aa, Artificial Sequence
  Non-cyclic GFR-binding peptide
  MOD_RES (5)..(6)..(37)..(39): Xaa is C or S
SASPXXVSQDLSNITIQIMIGKTPKILGEMSMIVKSXKX

SEQ ID NO: 36899 - protein, 39 aa, Artificial Sequence
  Non-cyclic GFR-binding peptide
  MOD_RES (6)..(7): Xaa is C or S
  MOD_RES (21)..(22)..(23)..(24)..(25): Xaa is A or G
  MOD_RES (26)..(27)..(28)..(29): Xaa is A or G or absent
STPPTXXVPTRLSNITIQIMXXXXXXXXXIGEMSDMVVE

SEQ ID NO: 36900 - protein, 36 aa, Artificial Sequence
  Non-cyclic GFR-binding peptide
  MOD_RES (1)..(35): Xaa is C or S
  MOD_RES (15)..(16)..(17)..(18)..(19): Xaa is A or G
  MOD_RES (20)..(21)..(22)..(23): Xaa is A or G or absent
XAPTKLSNITVQIMXXXXXXXXXLGEMSNMVVRSXG

SEQ ID NO: 36901 - protein, 39 aa, Artificial Sequence
  Non-cyclic GFR-binding peptide
  MOD_RES (2)..(3)..(37)..(39): Xaa is C or S
  MOD_RES (17)..(18)..(19)..(20)..(21): Xaa is A or G
  MOD_RES (22)..(23)..(24)..(25): Xaa is A or G or absent
PXXAPTKLSNITVQIMXXXXXXXXXLGEMSNMVVRSXGX

SEQ ID NO: 36902 - protein, 39 aa, Artificial Sequence
  Non-cyclic GFR-binding peptide
  MOD_RES (4)..(5)..(39): Xaa is C or S
  MOD_RES (19)..(20)..(21)..(22)..(23): Xaa is A or G
  MOD_RES (24)..(25)..(26)..(27): Xaa is A or G or absent
PASXXVPARLSNITIQIMXXXXXXXXXLGEMSDMVVEAX

SEQ ID NO: 36903 - protein, 39 aa, Artificial Sequence
  Non-cyclic GFR-binding peptide
  MOD_RES (3)..(4)..(38): Xaa is C or S
  MOD_RES (18)..(19)..(20)..(21)..(22): Xaa is A or G
  MOD_RES (23)..(24)..(25)..(26): Xaa is A or G or absent
ASXXVPARLSNITIQIMXXXXXXXXXIGEMSDMVVEAXG

SEQ ID NO: 36904 - protein, 38 aa, Artificial Sequence
  Non-cyclic GFR-binding peptide
  MOD_RES (5)..(6): Xaa is C or S
  MOD_RES (20)..(21)..(22)..(23)..(24): Xaa is A or G
  MOD_RES (25)..(26)..(27)..(28): Xaa is A or G or absent
SASPXXVSQDLSNITIQIMXXXXXXXXXLGEMSMIVKS

SEQ ID NO: 36905 - protein, 40 aa, Artificial Sequence
  Non-cyclic GFR-binding peptide
  MOD_RES (4)..(5)..(39): Xaa is C or S
  MOD_RES (19)..(20)..(21)..(22)..(23): Xaa is A or G
  MOD_RES (24)..(25)..(26)..(27): Xaa is A or G or absent
PKPXXAPTKLSNITVQIMXXXXXXXXXLGEMSNMVVRSXG

SEQ ID NO: 36906 - protein, 44 aa, Artificial Sequence
  Non-cyclic GFR-binding peptide
  MOD_RES (6)..(7)..(41)..(43): Xaa is C or S
  MOD_RES (21)..(22)..(23)..(24)..(25): Xaa is A or G
  MOD_RES (26)..(27)..(28)..(29): Xaa is A or G or absent
STPPTXXVPTRLSNITIQIMXXXXXXXXXIGEMSDMVVESXGXR

SEQ ID NO: 36907 - protein, 36 aa, Artificial Sequence
  Non-cyclic GFR-binding peptide
  MOD_RES (5)..(6): Xaa is C or S
SAAPXXVPQALSNITIQIMVGRKPKVLGEMSMIVRS

SEQ ID NO: 36908 - protein, 38 aa, Artificial Sequence
  Non-cyclic GFR-binding peptide
  MOD_RES (4)..(5): Xaa is C or S
  MOD_RES (19)..(20)..(21)..(22)..(23): Xaa is A or G
  MOD_RES (24)..(25)..(26)..(27): Xaa is A or G or absent
AGPXXTPTKMSNITMQIMXXXXXXXXXLGEMSGMVVDR

SEQ ID NO: 36909 - protein, 37 aa, Artificial Sequence
  Non-cyclic GFR-binding peptide
  MOD_RES (5)..(6)..(37): Xaa is C or S
VPSTXXAPVKTSNITMQIMDNGRVLLLGEMSMIVEEX

SEQ ID NO: 36910 - protein, 35 aa, Artificial Sequence
  Non-cyclic GFR-binding peptide
  MOD_RES (3)..(4)..(35): Xaa is C or S
APXXVPQALSNITIQIMVGRKPKVLGEMSMIVRSX

SEQ ID NO: 36911 - protein, 30 aa, Artificial Sequence
  Non-cyclic GFR-binding peptide
VPARLSNITIQIMDAANNVVIGEMSDMVVE

SEQ ID NO: 36912 - protein, 33 aa, Artificial Sequence
  Non-cyclic GFR-binding peptide
  MOD_RES (1)..(2)..(33): Xaa is C or S
XXAPVKTSNITMQIMDNGRVLLIGEMSMIVEEX

SEQ ID NO: 36913 - protein, 34 aa, Artificial Sequence
  Non-cyclic GFR-binding peptide
  MOD_RES (3)..(4): Xaa is C or S
STXXAPVKTSNITMQIMDNGRVLLIGEMSMIVEE

SEQ ID NO: 36914 - protein, 38 aa, Artificial Sequence
  Non-cyclic GFR-binding peptide
  MOD_RES (3)..(4)..(35)..(37): Xaa is C or S
STXXAPVKTSNITMQIMDNGRVLLLGEMSMIVEEXGXL

SEQ ID NO: 36915 - protein, 39 aa, Artificial Sequence
  Non-cyclic GFR-binding peptide
  MOD_RES (6)..(7): Xaa is C or S
  MOD_RES (21)..(22)..(23)..(24)..(25): Xaa is A or G
  MOD_RES (26)..(27)..(28)..(29): Xaa is A or G or absent
HVPKPXXAPTKLSNITVQIMXXXXXXXXXIGEMSNMVVR

SEQ ID NO: 36916 - protein, 41 aa, Artificial Sequence
  Non-cyclic GFR-binding peptide
  MOD_RES (5)..(6)..(38)..(40): Xaa is C or S
TPPTXXVPTRLSNITIQIMDSANNVVIGEMSDMVVESXGXR

SEQ ID NO: 36917 - protein, 41 aa, Artificial Sequence
  Non-cyclic GFR-binding peptide
  MOD_RES (3)..(4)..(38)..(40): Xaa is C or S
  MOD_RES (18)..(19)..(20)..(21)..(22): Xaa is A or G
  MOD_RES (23)..(24)..(25)..(26): Xaa is A or G or absent
GPXXTPTKMSNITMQIMXXXXXXXXXIGEMSGMVVDRXGXS

SEQ ID NO: 36918 - protein, 40 aa, Artificial Sequence
  Non-cyclic GFR-binding peptide
  MOD_RES (2)..(3)..(37)..(39): Xaa is C or S
  MOD_RES (17)..(18)..(19)..(20)..(21): Xaa is A or G
  MOD_RES (22)..(23)..(24)..(25): Xaa is A or G or absent
SXXVPARLSNITIQIMXXXXXXXXXLGEMSDMVVEAXGXR

SEQ ID NO: 36919 - protein, 33 aa, Artificial Sequence
  Non-cyclic GFR-binding peptide
  MOD_RES (1)..(1): Xaa is C or S
  MOD_RES (15)..(16)..(17)..(18)..(19): Xaa is A or G
  MOD_RES (20)..(21)..(22)..(23): Xaa is A or G or absent
XTPTKMSNITMQIMXXXXXXXXXIGEMSGMVVD

SEQ ID NO: 36920 - protein, 39 aa, Artificial Sequence
  Non-cyclic GFR-binding peptide
  MOD_RES (5)..(6): Xaa is C or S
  MOD_RES (20)..(21)..(22)..(23)..(24): Xaa is A or G
  MOD_RES (25)..(26)..(27)..(28): Xaa is A or G or absent
SAGPXXTPTKMSNITMQIMXXXXXXXXXIGEMSGMVVDR

SEQ ID NO: 36921 - protein, 40 aa, Artificial Sequence
  Non-cyclic GFR-binding peptide
  MOD_RES (4)..(5)..(37)..(39): Xaa is C or S
AGPXXTPTKMSNITMQIMNDKQQIILGEMSGMVVDRXGXS

SEQ ID NO: 36922 - protein, 37 aa, Artificial Sequence
  Non-cyclic GFR-binding peptide
  MOD_RES (4)..(5): Xaa is C or S
  MOD_RES (19)..(20)..(21)..(22)..(23): Xaa is A or G
  MOD_RES (24)..(25)..(26)..(27): Xaa is A or G or absent
AAPXXVPQALSNITIQIMXXXXXXXXXLGEMSMIVRS

SEQ ID NO: 36923 - protein, 38 aa, Artificial Sequence
  Non-cyclic GFR-binding peptide
  MOD_RES (3)..(4)..(35)..(37): Xaa is C or S
STXXAPVKTSNITMQIMDNGRVLLIGEMSMIVEEXGXL

SEQ ID NO: 36924 - protein, 36 aa, Artificial Sequence
  Non-cyclic GFR-binding peptide
  MOD_RES (1)..(2)..(33)..(35): Xaa is C or S
XXAPVKTSNITMQIMDNGRVLLIGEMSMIVEEXGXL

SEQ ID NO: 36925 - protein, 39 aa, Artificial Sequence
  Non-cyclic GFR-binding peptide
  MOD_RES (1)..(2)..(36)..(38): Xaa is C or S
  MOD_RES (16)..(17)..(18)..(19)..(20): Xaa is A or G
  MOD_RES (21)..(22)..(23)..(24): Xaa is A or G or absent
XXTPTKMSNITMQIMXXXXXXXXXLGEMSGMVVDRXGXS

SEQ ID NO: 36926 - protein, 37 aa, Artificial Sequence
  Non-cyclic GFR-binding peptide
  MOD_RES (3)..(4)..(35)..(37): Xaa is C or S
APXXVPQALSNITIQIMVGRKPKVLGEMSMIVRSXKX

SEQ ID NO: 36927 - protein, 41 aa, Artificial Sequence
  Non-cyclic GFR-binding peptide
  MOD_RES (3)..(4)..(38)..(40): Xaa is C or S
  MOD_RES (18)..(19)..(20)..(21)..(22): Xaa is A or G
  MOD_RES (23)..(24)..(25)..(26): Xaa is A or G or absent
ASXXVPARLSNITIQIMXXXXXXXXXLGEMSDMVVEAXGXR

SEQ ID NO: 36928 - protein, 32 aa, Artificial Sequence
  Non-cyclic GFR-binding peptide
  MOD_RES (1)..(1): Xaa is C or S
XVPARLSNITIQIMDAANNVVLGEMSDMVVEA

SEQ ID NO: 36929 - protein, 36 aa, Artificial Sequence
  Non-cyclic GFR-binding peptide
  MOD_RES (1)..(2)..(33)..(35): Xaa is C or S
XXVSQDLSNITIQIMIGKTPKILGEMSMIVKSXKXS

SEQ ID NO: 36930 - protein, 34 aa, Artificial Sequence
  Non-cyclic GFR-binding peptide
  MOD_RES (1)..(2)..(34): Xaa is C or S
XXVPTRLSNITIQIMDSANNVVLGEMSDMVVESX

SEQ ID NO: 36931 - protein, 40 aa, Artificial Sequence
  Non-cyclic GFR-binding peptide
  MOD_RES (5)..(6)..(40): Xaa is C or S
  MOD_RES (20)..(21)..(22)..(23)..(24): Xaa is A or G
  MOD_RES (25)..(26)..(27)..(28): Xaa is A or G or absent
SAGPXXTPTKMSNITMQIMXXXXXXXXXIGEMSGMVVDRX

SEQ ID NO: 36932 - protein, 39 aa, Artificial Sequence
  Non-cyclic GFR-binding peptide
  MOD_RES (6)..(7): Xaa is C or S
  MOD_RES (21)..(22)..(23)..(24)..(25): Xaa is A or G
  MOD_RES (26)..(27)..(28)..(29): Xaa is A or G or absent
GSAGPXXTPTKMSNITMQIMXXXXXXXXXLGEMSGMVVD

SEQ ID NO: 36933 - protein, 36 aa, Artificial Sequence
  Non-cyclic GFR-binding peptide
  MOD_RES (5)..(6): Xaa is C or S
SAGPXXTPTKMSNITMQIMNDKQQIILGEMSGMVVD

SEQ ID NO: 36934 - protein, 34 aa, Artificial Sequence
  Non-cyclic GFR-binding peptide
  MOD_RES (2)..(3)..(34): Xaa is C or S
PXXVPQDLSNITIQIMVGRTPKVLGEMSMVVKSX

SEQ ID NO: 36935 - protein, 41 aa, Artificial Sequence
  Non-cyclic GFR-binding peptide
  MOD_RES (6)..(7)..(40): Xaa is C or S
  MOD_RES (21)..(22)..(23)..(24)..(25): Xaa is A or G
  MOD_RES (26)..(27)..(28)..(29): Xaa is A or G or absent
ASASPXXVSQDLSNITIQIMXXXXXXXXXLGEMSMIVKSXK

SEQ ID NO: 36936 - protein, 40 aa, Artificial Sequence
  Non-cyclic GFR-binding peptide
  MOD_RES (5)..(6)..(40): Xaa is C or S
  MOD_RES (20)..(21)..(22)..(23)..(24): Xaa is A or G
  MOD_RES (25)..(26)..(27)..(28): Xaa is A or G or absent
TPPTXXVPTRLSNITIQIMXXXXXXXXXLGEMSDMVVESX

SEQ ID NO: 36937 - protein, 37 aa, Artificial Sequence
  Non-cyclic GFR-binding peptide
  MOD_RES (5)..(6): Xaa is C or S
APASXXVPARLSNITIQIMDAANNVVIGEMSDMVVEA

SEQ ID NO: 36938 - protein, 39 aa, Artificial Sequence
  Non-cyclic GFR-binding peptide
  MOD_RES (6)..(7): Xaa is C or S
  MOD_RES (21)..(22)..(23)..(24)..(25): Xaa is A or G
  MOD_RES (26)..(27)..(28)..(29): Xaa is A or G or absent
RVPSTXXAPVKTSNITMQIMXXXXXXXXXIGEMSMIVEE

SEQ ID NO: 36939 - protein, 43 aa, Artificial Sequence
  Non-cyclic GFR-binding peptide
  MOD_RES (5)..(6)..(40)..(42): Xaa is C or S
  MOD_RES (20)..(21)..(22)..(23)..(24): Xaa is A or G
  MOD_RES (25)..(26)..(27)..(28): Xaa is A or G or absent
TPPTXXVPTRLSNITIQIMXXXXXXXXXIGEMSDMVVESXGXR

SEQ ID NO: 36940 - protein, 40 aa, Artificial Sequence
  Non-cyclic GFR-binding peptide
  MOD_RES (5)..(6)..(40): Xaa is C or S
  MOD_RES (20)..(21)..(22)..(23)..(24): Xaa is A or G
  MOD_RES (25)..(26)..(27)..(28): Xaa is A or G or absent
VPKPXXAPTKLSNITVQIMXXXXXXXXXLGEMSNMVVRSX

SEQ ID NO: 36941 - protein, 40 aa, Artificial Sequence
  Non-cyclic GFR-binding peptide
  MOD_RES (4)..(5)..(37)..(39): Xaa is C or S
PPTXXVPTRLSNITIQIMDSANNVVIGEMSDMVVESXGXR

SEQ ID NO: 36942 - protein, 38 aa, Artificial Sequence
  Non-cyclic GFR-binding peptide
  MOD_RES (3)..(4)..(36)..(38): Xaa is C or S
ASXXVPARLSNITIQIMDAANNVVLGEMSDMVVEAXGX

SEQ ID NO: 36943 - protein, 37 aa, Artificial Sequence
  Non-cyclic GFR-binding peptide
  MOD_RES (3)..(4)..(37): Xaa is C or S
  MOD_RES (18)..(19)..(20)..(21)..(22): Xaa is A or G
  MOD_RES (23)..(24)..(25)..(26): Xaa is A or G or absent
STXXAPVKTSNITMQIMXXXXXXXXXLGEMSMIVEEX

SEQ ID NO: 36944 - protein, 37 aa, Artificial Sequence
  Non-cyclic GFR-binding peptide
  MOD_RES (3)..(4): Xaa is C or S
  MOD_RES (18)..(19)..(20)..(21)..(22): Xaa is A or G
  MOD_RES (23)..(24)..(25)..(26): Xaa is A or G or absent
ASXXVPARLSNITIQIMXXXXXXXXXLGEMSDMVVEA

SEQ ID NO: 36945 - protein, 35 aa, Artificial Sequence
  Non-cyclic GFR-binding peptide
  MOD_RES (32)..(34): Xaa is C or S
APTKLSNITVQIMDDSSNVILGEMSNMVVRSXGXH

SEQ ID NO: 36946 - protein, 35 aa, Artificial Sequence
  Non-cyclic GFR-binding peptide
  MOD_RES (2)..(3)..(35): Xaa is C or S
PXXTPTKMSNITMQIMNDKQQIIIGEMSGMVVDRX

SEQ ID NO: 36947 - protein, 38 aa, Artificial Sequence
  Non-cyclic GFR-binding peptide
  MOD_RES (1)..(2)..(36)..(38): Xaa is C or S
  MOD_RES (16)..(17)..(18)..(19)..(20): Xaa is A or G
  MOD_RES (21)..(22)..(23)..(24): Xaa is A or G or absent
XXVPTRLSNITIQIMXXXXXXXXXLGEMSDMVVESXGX

SEQ ID NO: 36948 - protein, 39 aa, Artificial Sequence
  Non-cyclic GFR-binding peptide
  MOD_RES (2)..(3)..(36)..(38): Xaa is C or S
  MOD_RES (17)..(18)..(19)..(20)..(21): Xaa is A or G
  MOD_RES (22)..(23)..(24)..(25): Xaa is A or G or absent
TXXAPVKTSNITMQIMXXXXXXXXXIGEMSMIVEEXGXL

SEQ ID NO: 36949 - protein, 38 aa, Artificial Sequence
  Non-cyclic GFR-binding peptide
  MOD_RES (1)..(2)..(36)..(38): Xaa is C or S
  MOD_RES (16)..(17)..(18)..(19)..(20): Xaa is A or G
  MOD_RES (21)..(22)..(23)..(24): Xaa is A or G or absent
XXVPARLSNITIQIMXXXXXXXXXIGEMSDMVVEAXGX

SEQ ID NO: 36950 - protein, 33 aa, Artificial Sequence
  Non-cyclic GFR-binding peptide
  MOD_RES (1)..(2)..(33): Xaa is C or S
XXVPQALSNITIQIMVGRKPKVLGEMSMIVRSX

SEQ ID NO: 36951 - protein, 35 aa, Artificial Sequence
  Non-cyclic GFR-binding peptide
  MOD_RES (34)..(34): Xaa is C or S
  MOD_RES (14)..(15)..(16)..(17)..(18): Xaa is A or G
  MOD_RES (19)..(20)..(21)..(22): Xaa is A or G or absent
VPARLSNITIQIMXXXXXXXXXLGEMSDMVVEAXG

SEQ ID NO: 36952 - protein, 36 aa, Artificial Sequence
  Non-cyclic GFR-binding peptide
  MOD_RES (3)..(4)..(36): Xaa is C or S
PTXXVPTRLSNITIQIMDSANNVVIGEMSDMVVESX

SEQ ID NO: 36953 - protein, 39 aa, Artificial Sequence
  Non-cyclic GFR-binding peptide
  MOD_RES (2)..(3)..(37)..(39): Xaa is C or S
  MOD_RES (17)..(18)..(19)..(20)..(21): Xaa is A or G
  MOD_RES (22)..(23)..(24)..(25): Xaa is A or G or absent
TXXVPTRLSNITIQIMXXXXXXXXXLGEMSDMVVESXGX

SEQ ID NO: 36954 - protein, 37 aa, Artificial Sequence
  Non-cyclic GFR-binding peptide
  MOD_RES (1)..(2)..(35)..(37): Xaa is C or S
  MOD_RES (16)..(17)..(18)..(19)..(20): Xaa is A or G
  MOD_RES (21)..(22)..(23)..(24): Xaa is A or G or absent
XXAPVKTSNITMQIMXXXXXXXXXLGEMSMIVEEXGX

SEQ ID NO: 36955 - protein, 40 aa, Artificial Sequence
  Non-cyclic GFR-binding peptide
  MOD_RES (4)..(5)..(39): Xaa is C or S
  MOD_RES (19)..(20)..(21)..(22)..(23): Xaa is A or G
  MOD_RES (24)..(25)..(26)..(27): Xaa is A or G or absent
AGPXXTPTKMSNITMQIMXXXXXXXXXIGEMSGMVVDRXG

SEQ ID NO: 36956 - protein, 35 aa, Artificial Sequence
  Non-cyclic GFR-binding peptide
  MOD_RES (3)..(4): Xaa is C or S
GPXXTPTKMSNITMQIMNDKQQIIIGEMSGMVVDR

SEQ ID NO: 36957 - protein, 38 aa, Artificial Sequence
  Non-cyclic GFR-binding peptide
  MOD_RES (5)..(6)..(38): Xaa is C or S
TPPTXXVPTRLSNITIQIMDSANNVVIGEMSDMVVESX

SEQ ID NO: 36958 - protein, 39 aa, Artificial Sequence
  Non-cyclic GFR-binding peptide
  MOD_RES (4)..(5)..(37)..(39): Xaa is C or S
AGPXXTPTKMSNITMQIMNDKQQIIIGEMSGMVVDRXGX

SEQ ID NO: 36959 - protein, 30 aa, Artificial Sequence
  Non-cyclic GFR-binding peptide
VPTRLSNITIQIMDSANNVVLGEMSDMVVE

SEQ ID NO: 36960 - protein, 34 aa, Artificial Sequence
  Non-cyclic GFR-binding peptide
  MOD_RES (1)..(2): Xaa is C or S
  MOD_RES (16)..(17)..(18)..(19)..(20): Xaa is A or G
  MOD_RES (21)..(22)..(23)..(24): Xaa is A or G or absent
XXTPTKMSNITMQIMXXXXXXXXXIGEMSGMVVD

SEQ ID NO: 36961 - protein, 36 aa, Artificial Sequence
  Non-cyclic GFR-binding peptide
  MOD_RES (1)..(2)..(34)..(36): Xaa is C or S
XXVPARLSNITIQIMDAANNVVLGEMSDMVVEAXGX

SEQ ID NO: 36962 - protein, 36 aa, Artificial Sequence
  Non-cyclic GFR-binding peptide
  MOD_RES (1)..(35): Xaa is C or S
  MOD_RES (15)..(16)..(17)..(18)..(19): Xaa is A or G
  MOD_RES (20)..(21)..(22)..(23): Xaa is A or G or absent
XVPTRLSNITIQIMXXXXXXXXXLGEMSDMVVESXG

SEQ ID NO: 36963 - protein, 37 aa, Artificial Sequence
  Non-cyclic GFR-binding peptide
  MOD_RES (3)..(4): Xaa is C or S
  MOD_RES (18)..(19)..(20)..(21)..(22): Xaa is A or G
  MOD_RES (23)..(24)..(25)..(26): Xaa is A or G or absent
GPXXTPTKMSNITMQIMXXXXXXXXXIGEMSGMVVDR

SEQ ID NO: 36964 - protein, 38 aa, Artificial Sequence
  Non-cyclic GFR-binding peptide
  MOD_RES (1)..(2)..(35)..(37): Xaa is C or S
  MOD_RES (16)..(17)..(18)..(19)..(20): Xaa is A or G
  MOD_RES (21)..(22)..(23)..(24): Xaa is A or G or absent
XXAPVKTSNITMQIMXXXXXXXXXIGEMSMIVEEXGXL

SEQ ID NO: 36965 - protein, 42 aa, Artificial Sequence
  Non-cyclic GFR-binding peptide
  MOD_RES (5)..(6)..(40)..(42): Xaa is C or S
  MOD_RES (20)..(21)..(22)..(23)..(24): Xaa is A or G
  MOD_RES (25)..(26)..(27)..(28): Xaa is A or G or absent
SAGPXXTPTKMSNITMQIMXXXXXXXXXIGEMSGMVVDRXGX

SEQ ID NO: 36966 - protein, 42 aa, Artificial Sequence
  Non-cyclic GFR-binding peptide
  MOD_RES (6)..(7)..(39)..(41): Xaa is C or S
STPPTXXVPTRLSNITIQIMDSANNVVLGEMSDMVVESXGXR

SEQ ID NO: 36967 - protein, 38 aa, Artificial Sequence
  Non-cyclic GFR-binding peptide
  MOD_RES (3)..(4)..(38): Xaa is C or S
  MOD_RES (18)..(19)..(20)..(21)..(22): Xaa is A or G
  MOD_RES (23)..(24)..(25)..(26): Xaa is A or G or absent
PTXXVPTRLSNITIQIMXXXXXXXXXIGEMSDMVVESX

SEQ ID NO: 36968 - protein, 40 aa, Artificial Sequence
  Non-cyclic GFR-binding peptide
  MOD_RES (6)..(7)..(39): Xaa is C or S
AAPASXXVPARLSNITIQIMDAANNVVIGEMSDMVVEAXG

SEQ ID NO: 36969 - protein, 34 aa, Artificial Sequence
  Non-cyclic GFR-binding peptide
  MOD_RES (1)..(33): Xaa is C or S
XTPTKMSNITMQIMNDKQQIIIGEMSGMVVDRXG

SEQ ID NO: 36970 - protein, 37 aa, Artificial Sequence
  Non-cyclic GFR-binding peptide
  MOD_RES (2)..(3)..(34)..(36): Xaa is C or S
TXXAPVKTSNITMQIMDNGRVLLLGEMSMIVEEXGXL

SEQ ID NO: 36971 - protein, 37 aa, Artificial Sequence
  Non-cyclic GFR-binding peptide
  MOD_RES (6)..(7): Xaa is C or S
RVPSTXXAPVKTSNITMQIMDNGRVLLIGEMSMIVEE

SEQ ID NO: 36972 - protein, 38 aa, Artificial Sequence
  Non-cyclic GFR-binding peptide
  MOD_RES (2)..(3)..(35)..(37): Xaa is C or S
TXXVPTRLSNITIQIMDSANNVVIGEMSDMVVESXGXR

SEQ ID NO: 36973 - protein, 42 aa, Artificial Sequence
  Non-cyclic GFR-binding peptide
  MOD_RES (5)..(6)..(40)..(42): Xaa is C or S
  MOD_RES (20)..(21)..(22)..(23)..(24): Xaa is A or G
  MOD_RES (25)..(26)..(27)..(28): Xaa is A or G or absent
TPPTXXVPTRLSNITIQIMXXXXXXXXXIGEMSDMVVESXGX

SEQ ID NO: 36974 - protein, 32 aa, Artificial Sequence
  Non-cyclic GFR-binding peptide
  MOD_RES (1)..(1): Xaa is C or S
XVPTRLSNITIQIMDSANNVVLGEMSDMVVES

SEQ ID NO: 36975 - protein, 35 aa, Artificial Sequence
  Non-cyclic GFR-binding peptide
  MOD_RES (2)..(3): Xaa is C or S
  MOD_RES (17)..(18)..(19)..(20)..(21): Xaa is A or G
  MOD_RES (22)..(23)..(24)..(25): Xaa is A or G or absent
PXXAPTKLSNITVQIMXXXXXXXXXLGEMSNMVVR

SEQ ID NO: 36976 - protein, 36 aa, Artificial Sequence
  Non-cyclic GFR-binding peptide
  MOD_RES (2)..(3)..(35): Xaa is C or S
TXXVPTRLSNITIQIMDSANNVVIGEMSDMVVESXG

SEQ ID NO: 36977 - protein, 36 aa, Artificial Sequence
  Non-cyclic GFR-binding peptide
  MOD_RES (1)..(2)..(36): Xaa is C or S
  MOD_RES (16)..(17)..(18)..(19)..(20): Xaa is A or G
  MOD_RES (21)..(22)..(23)..(24): Xaa is A or G or absent
XXVPARLSNITIQIMXXXXXXXXXIGEMSDMVVEAX

SEQ ID NO: 36978 - protein, 37 aa, Artificial Sequence
  Non-cyclic GFR-binding peptide
  MOD_RES (3)..(4)..(36): Xaa is C or S
GPXXTPTKMSNITMQIMNDKQQIILGEMSGMVVDRXG

SEQ ID NO: 36979 - protein, 39 aa, Artificial Sequence
  Non-cyclic GFR-binding peptide
  MOD_RES (5)..(6)..(39): Xaa is C or S
  MOD_RES (20)..(21)..(22)..(23)..(24): Xaa is A or G
  MOD_RES (25)..(26)..(27)..(28): Xaa is A or G or absent
VPSTXXAPVKTSNITMQIMXXXXXXXXXIGEMSMIVEEX

SEQ ID NO: 36980 - protein, 34 aa, Artificial Sequence
  Non-cyclic GFR-binding peptide
  MOD_RES (3)..(4): Xaa is C or S
GPXXTPTKMSNITMQIMNDKQQIILGEMSGMVVD

SEQ ID NO: 36981 - protein, 35 aa, Artificial Sequence
  Non-cyclic GFR-binding peptide
  MOD_RES (1)..(2)..(33)..(35): Xaa is C or S
XXVPQALSNITIQIMVGRKPKVLGEMSMIVRSXKX

SEQ ID NO: 36982 - protein, 40 aa, Artificial Sequence
  Non-cyclic GFR-binding peptide
  MOD_RES (6)..(7): Xaa is C or S
  MOD_RES (21)..(22)..(23)..(24)..(25): Xaa is A or G
  MOD_RES (26)..(27)..(28)..(29): Xaa is A or G or absent
HVPKPXXAPTKLSNITVQIMXXXXXXXXXLGEMSNMVVRS

SEQ ID NO: 36983 - protein, 36 aa, Artificial Sequence
  Non-cyclic GFR-binding peptide
  MOD_RES (4)..(5)..(36): Xaa is C or S
AAPXXVPQALSNITIQIMVGRKPKVLGEMSMIVRSX

SEQ ID NO: 36984 - protein, 38 aa, Artificial Sequence
  Non-cyclic GFR-binding peptide
  MOD_RES (3)..(4)..(35)..(37): Xaa is C or S
SPXXVSQDLSNITIQIMIGKTPKILGEMSMIVKSXKXS

SEQ ID NO: 36985 - protein, 38 aa, Artificial Sequence
  Non-cyclic GFR-binding peptide
  MOD_RES (4)..(5)..(37): Xaa is C or S
AGPXXTPTKMSNITMQIMNDKQQIILGEMSGMVVDRXG

SEQ ID NO: 36986 - protein, 39 aa, Artificial Sequence
  Non-cyclic GFR-binding peptide
  MOD_RES (6)..(7)..(39): Xaa is C or S
HVPKPXXAPTKLSNITVQIMDDSSNVILGEMSNMVVRSX

SEQ ID NO: 36987 - protein, 41 aa, Artificial Sequence
  Non-cyclic GFR-binding peptide
  MOD_RES (6)..(7)..(41): Xaa is C or S
  MOD_RES (21)..(22)..(23)..(24)..(25): Xaa is A or G
  MOD_RES (26)..(27)..(28)..(29): Xaa is A or G or absent
GSAGPXXTPTKMSNITMQIMXXXXXXXXXIGEMSGMVVDRX

SEQ ID NO: 36988 - protein, 34 aa, Artificial Sequence
  Non-cyclic GFR-binding peptide
  MOD_RES (2)..(3)..(34): Xaa is C or S
TXXAPVKTSNITMQIMDNGRVLLLGEMSMIVEEX

SEQ ID NO: 36989 - protein, 33 aa, Artificial Sequence
  Non-cyclic GFR-binding peptide
  MOD_RES (2)..(3): Xaa is C or S
TXXAPVKTSNITMQIMDNGRVLLLGEMSMIVEE

SEQ ID NO: 36990 - protein, 36 aa, Artificial Sequence
  Non-cyclic GFR-binding peptide
  MOD_RES (4)..(5)..(36): Xaa is C or S
ASPXXVSQDLSNITIQIMIGKTPKILGEMSMIVKSX

SEQ ID NO: 36991 - protein, 33 aa, Artificial Sequence
  Non-cyclic GFR-binding peptide
  MOD_RES (14)..(15)..(16)..(17)..(18): Xaa is A or G
  MOD_RES (19)..(20)..(21)..(22): Xaa is A or G or absent
VPARLSNITIQIMXXXXXXXXXIGEMSDMVVEA

SEQ ID NO: 36992 - protein, 39 aa, Artificial Sequence
  Non-cyclic GFR-binding peptide
  MOD_RES (4)..(5)..(39): Xaa is C or S
  MOD_RES (19)..(20)..(21)..(22)..(23): Xaa is A or G
  MOD_RES (24)..(25)..(26)..(27): Xaa is A or G or absent
PKPXXAPTKLSNITVQIMXXXXXXXXXLGEMSNMVVRSX

SEQ ID NO: 36993 - protein, 33 aa, Artificial Sequence
  Non-cyclic GFR-binding peptide
  MOD_RES (33)..(33): Xaa is C or S
  MOD_RES (14)..(15)..(16)..(17)..(18): Xaa is A or G
  MOD_RES (19)..(20)..(21)..(22): Xaa is A or G or absent
APVKTSNITMQIMXXXXXXXXXLGEMSMIVEEX

SEQ ID NO: 36994 - protein, 38 aa, Artificial Sequence
  Non-cyclic GFR-binding peptide
  MOD_RES (3)..(4)..(37): Xaa is C or S
  MOD_RES (18)..(19)..(20)..(21)..(22): Xaa is A or G
  MOD_RES (23)..(24)..(25)..(26): Xaa is A or G or absent
STXXAPVKTSNITMQIMXXXXXXXXXIGEMSMIVEEXG

SEQ ID NO: 36995 - protein, 40 aa, Artificial Sequence
  Non-cyclic GFR-binding peptide
  MOD_RES (4)..(5)..(37)..(39): Xaa is C or S
PKPXXAPTKLSNITVQIMDDSSNVILGEMSNMVVRSXGXH

SEQ ID NO: 36996 - protein, 36 aa, Artificial Sequence
  Non-cyclic GFR-binding peptide
  MOD_RES (2)..(3)..(35): Xaa is C or S
TXXVPTRLSNITIQIMDSANNVVLGEMSDMVVESXG

SEQ ID NO: 36997 - protein, 32 aa, Artificial Sequence
  Non-cyclic GFR-binding peptide
  MOD_RES (1)..(2): Xaa is C or S
XXVPARLSNITIQIMDAANNVVIGEMSDMVVE

SEQ ID NO: 36998 - protein, 32 aa, Artificial Sequence
  Non-cyclic GFR-binding peptide
  MOD_RES (14)..(15)..(16)..(17)..(18): Xaa is A or G
  MOD_RES (19)..(20)..(21)..(22): Xaa is A or G or absent
VSQDLSNITIQIMXXXXXXXXXLGEMSMIVKS

SEQ ID NO: 36999 - protein, 37 aa, Artificial Sequence
  Non-cyclic GFR-binding peptide
  MOD_RES (4)..(5): Xaa is C or S
  MOD_RES (19)..(20)..(21)..(22)..(23): Xaa is A or G
  MOD_RES (24)..(25)..(26)..(27): Xaa is A or G or absent
AGPXXTPTKMSNITMQIMXXXXXXXXXLGEMSGMVVD

SEQ ID NO: 37000 - protein, 43 aa, Artificial Sequence
  Non-cyclic GFR-binding peptide
  MOD_RES (6)..(7)..(40)..(42): Xaa is C or S
  MOD_RES (21)..(22)..(23)..(24)..(25): Xaa is A or G
  MOD_RES (26)..(27)..(28)..(29): Xaa is A or G or absent
ASASPXXVSQDLSNITIQIMXXXXXXXXXLGEMSMIVKSXKXS

SEQ ID NO: 37001 - protein, 36 aa, Artificial Sequence
  Non-cyclic GFR-binding peptide
  MOD_RES (1)..(33)..(35): Xaa is C or S
XTPTKMSNITMQIMNDKQQIIIGEMSGMVVDRXGXS

SEQ ID NO: 37002 - protein, 38 aa, Artificial Sequence
  Non-cyclic GFR-binding peptide
  MOD_RES (3)..(4)..(37): Xaa is C or S
  MOD_RES (18)..(19)..(20)..(21)..(22): Xaa is A or G
  MOD_RES (23)..(24)..(25)..(26): Xaa is A or G or absent
STXXAPVKTSNITMQIMXXXXXXXXXLGEMSMIVEEXG

SEQ ID NO: 37003 - protein, 34 aa, Artificial Sequence
  Non-cyclic GFR-binding peptide
  MOD_RES (3)..(4): Xaa is C or S
SPXXVPQDLSNITIQIMVGRTPKVLGEMSMVVKS

SEQ ID NO: 37004 - protein, 34 aa, Artificial Sequence
  Non-cyclic GFR-binding peptide
  MOD_RES (34)..(34): Xaa is C or S
  MOD_RES (14)..(15)..(16)..(17)..(18): Xaa is A or G
  MOD_RES (19)..(20)..(21)..(22): Xaa is A or G or absent
VPARLSNITIQIMXXXXXXXXXLGEMSDMVVEAX

SEQ ID NO: 37005 - protein, 38 aa, Artificial Sequence
  Non-cyclic GFR-binding peptide
  MOD_RES (6)..(7): Xaa is C or S
GSAGPXXTPTKMSNITMQIMNDKQQIILGEMSGMVVDR

SEQ ID NO: 37006 - protein, 30 aa, Artificial Sequence
  Non-cyclic GFR-binding peptide
VSQDLSNITIQIMIGKTPKILGEMSMIVKS

SEQ ID NO: 37007 - protein, 39 aa, Artificial Sequence
  Non-cyclic GFR-binding peptide
  MOD_RES (2)..(3)..(37)..(39): Xaa is C or S
  MOD_RES (17)..(18)..(19)..(20)..(21): Xaa is A or G
  MOD_RES (22)..(23)..(24)..(25): Xaa is A or G or absent
TXXVPTRLSNITIQIMXXXXXXXXXIGEMSDMVVESXGX

SEQ ID NO: 37008 - protein, 34 aa, Artificial Sequence
  Non-cyclic GFR-binding peptide
  MOD_RES (1)..(33): Xaa is C or S
XVPTRLSNITIQIMDSANNVVLGEMSDMVVESXG

SEQ ID NO: 37009 - protein, 39 aa, Artificial Sequence
  Non-cyclic GFR-binding peptide
  MOD_RES (4)..(5)..(38): Xaa is C or S
  MOD_RES (19)..(20)..(21)..(22)..(23): Xaa is A or G
  MOD_RES (24)..(25)..(26)..(27): Xaa is A or G or absent
AAPXXVPQALSNITIQIMXXXXXXXXXLGEMSMIVRSXK

SEQ ID NO: 37010 - protein, 35 aa, Artificial Sequence
  Non-cyclic GFR-binding peptide
  MOD_RES (4)..(5): Xaa is C or S
AAPXXVPQALSNITIQIMVGRKPKVLGEMSMIVRS

SEQ ID NO: 37011 - protein, 38 aa, Artificial Sequence
  Non-cyclic GFR-binding peptide
  MOD_RES (6)..(7): Xaa is C or S
HVPKPXXAPTKLSNITVQIMDDSSNVIIGEMSNMVVRS

SEQ ID NO: 37012 - protein, 30 aa, Artificial Sequence; identical to SEQ ID NO: 1106
  Non-cyclic GFR-binding peptide

SEQ ID NO: 37013 - protein, 42 aa, Artificial Sequence
  Non-cyclic GFR-binding peptide
  MOD_RES (6)..(7)..(40)..(42): Xaa is C or S
  MOD_RES (21)..(22)..(23)..(24)..(25): Xaa is A or G
  MOD_RES (26)..(27)..(28)..(29): Xaa is A or G or absent
RVPSTXXAPVKTSNITMQIMXXXXXXXXXLGEMSMIVEEXGX

SEQ ID NO: 37014 - protein, 40 aa, Artificial Sequence
  Non-cyclic GFR-binding peptide
  MOD_RES (6)..(7)..(40): Xaa is C or S
  MOD_RES (21)..(22)..(23)..(24)..(25): Xaa is A or G
  MOD_RES (26)..(27)..(28)..(29): Xaa is A or G or absent
ASASPXXVPQDLSNITIQIMXXXXXXXXXLGEMSMVVKSX

SEQ ID NO: 37015 - protein, 39 aa, Artificial Sequence
  Non-cyclic GFR-binding peptide
  MOD_RES (4)..(5)..(38): Xaa is C or S
  MOD_RES (19)..(20)..(21)..(22)..(23): Xaa is A or G
  MOD_RES (24)..(25)..(26)..(27): Xaa is A or G or absent
ASPXXVPQDLSNITIQIMXXXXXXXXXLGEMSMVVKSXK

SEQ ID NO: 37016 - protein, 37 aa, Artificial Sequence
  Non-cyclic GFR-binding peptide
  MOD_RES (2)..(3)..(37): Xaa is C or S
  MOD_RES (17)..(18)..(19)..(20)..(21): Xaa is A or G
  MOD_RES (22)..(23)..(24)..(25): Xaa is A or G or absent
TXXVPTRLSNITIQIMXXXXXXXXXIGEMSDMVVESX

SEQ ID NO: 37017 - protein, 35 aa, Artificial Sequence
  Non-cyclic GFR-binding peptide
  MOD_RES (1)..(33)..(35): Xaa is C or S
XVPARLSNITIQIMDAANNVVIGEMSDMVVEAXGX

SEQ ID NO: 37018 - protein, 41 aa, Artificial Sequence
  Non-cyclic GFR-binding peptide
  MOD_RES (5)..(6)..(40): Xaa is C or S
  MOD_RES (20)..(21)..(22)..(23)..(24): Xaa is A or G
  MOD_RES (25)..(26)..(27)..(28): Xaa is A or G or absent
TPPTXXVPTRLSNITIQIMXXXXXXXXXIGEMSDMVVESXG

SEQ ID NO: 37019 - protein, 34 aa, Artificial Sequence
  Non-cyclic GFR-binding peptide
  MOD_RES (1)..(2): Xaa is C or S
  MOD_RES (16)..(17)..(18)..(19)..(20): Xaa is A or G
  MOD_RES (21)..(22)..(23)..(24): Xaa is A or G or absent
XXVPARLSNITIQIMXXXXXXXXXLGEMSDMVVE

SEQ ID NO: 37020 - protein, 37 aa, Artificial Sequence
  Non-cyclic GFR-binding peptide
  MOD_RES (4)..(5): Xaa is C or S
  MOD_RES (19)..(20)..(21)..(22)..(23): Xaa is A or G
  MOD_RES (24)..(25)..(26)..(27): Xaa is A or G or absent
ASPXXVPQDLSNITIQIMXXXXXXXXXLGEMSMVVKS

SEQ ID NO: 37021 - protein, 33 aa, Artificial Sequence
  Non-cyclic GFR-binding peptide
  MOD_RES (33)..(33): Xaa is C or S
  MOD_RES (14)..(15)..(16)..(17)..(18): Xaa is A or G
  MOD_RES (19)..(20)..(21)..(22): Xaa is A or G or absent
VPQALSNITIQIMXXXXXXXXXLGEMSMIVRSX

SEQ ID NO: 37022 - protein, 36 aa, Artificial Sequence
  Non-cyclic GFR-binding peptide
  MOD_RES (5)..(6): Xaa is C or S
APASXXVPARLSNITIQIMDAANNVVLGEMSDMVVE

SEQ ID NO: 37023 - protein, 42 aa, Artificial Sequence
  Non-cyclic GFR-binding peptide
  MOD_RES (6)..(7)..(39)..(41): Xaa is C or S
AAPASXXVPARLSNITIQIMDAANNVVLGEMSDMVVEAXGXR

SEQ ID NO: 37024 - protein, 34 aa, Artificial Sequence
  Non-cyclic GFR-binding peptide
  MOD_RES (34)..(34): Xaa is C or S
  MOD_RES (14)..(15)..(16)..(17)..(18): Xaa is A or G
  MOD_RES (19)..(20)..(21)..(22): Xaa is A or G or absent
VPARLSNITIQIMXXXXXXXXXIGEMSDMVVEAX

SEQ ID NO: 37025 - protein, 41 aa, Artificial Sequence
  Non-cyclic GFR-binding peptide
  MOD_RES (6)..(7)..(39)..(41): Xaa is C or S
GSAGPXXTPTKMSNITMQIMNDKQQIIIGEMSGMVVDRXGX

SEQ ID NO: 37026 - protein, 38 aa, Artificial Sequence
  Non-cyclic GFR-binding peptide
  MOD_RES (2)..(3)..(37): Xaa is C or S
  MOD_RES (17)..(18)..(19)..(20)..(21): Xaa is A or G
  MOD_RES (22)..(23)..(24)..(25): Xaa is A or G or absent
TXXVPTRLSNITIQIMXXXXXXXXXIGEMSDMVVESXG

SEQ ID NO: 37027 - protein, 42 aa, Artificial Sequence
  Non-cyclic GFR-binding peptide
  MOD_RES (6)..(7)..(40)..(42): Xaa is C or S
  MOD_RES (21)..(22)..(23)..(24)..(25): Xaa is A or G
  MOD_RES (26)..(27)..(28)..(29): Xaa is A or G or absent
ASASPXXVPQDLSNITIQIMXXXXXXXXXLGEMSMVVKSXKX

SEQ ID NO: 37028 - protein, 41 aa, Artificial Sequence
  Non-cyclic GFR-binding peptide
  MOD_RES (3)..(4)..(38)..(40): Xaa is C or S
  MOD_RES (18)..(19)..(20)..(21)..(22): Xaa is A or G
  MOD_RES (23)..(24)..(25)..(26): Xaa is A or G or absent
KPXXAPTKLSNITVQIMXXXXXXXXXLGEMSNMVVRSXGXH

SEQ ID NO: 37029 - protein, 37 aa, Artificial Sequence
  Non-cyclic GFR-binding peptide
  MOD_RES (2)..(3)..(37): Xaa is C or S
  MOD_RES (17)..(18)..(19)..(20)..(21): Xaa is A or G
  MOD_RES (22)..(23)..(24)..(25): Xaa is A or G or absent
TXXVPTRLSNITIQIMXXXXXXXXXLGEMSDMVVESX

SEQ ID NO: 37030 - protein, 34 aa, Artificial Sequence
  Non-cyclic GFR-binding peptide
  MOD_RES (34)..(34): Xaa is C or S
  MOD_RES (14)..(15)..(16)..(17)..(18): Xaa is A or G
  MOD_RES (19)..(20)..(21)..(22): Xaa is A or G or absent
VPTRLSNITIQIMXXXXXXXXXLGEMSDMVVESX

SEQ ID NO: 37031 - protein, 39 aa, Artificial Sequence
  Non-cyclic GFR-binding peptide
  MOD_RES (6)..(7)..(38): Xaa is C or S
ASASPXXVPQDLSNITIQIMVGRTPKVLGEMSMVVKSXK

SEQ ID NO: 37032 - protein, 37 aa, Artificial Sequence
  Non-cyclic GFR-binding peptide
  MOD_RES (1)..(2)..(36): Xaa is C or S
  MOD_RES (16)..(17)..(18)..(19)..(20): Xaa is A or G
  MOD_RES (21)..(22)..(23)..(24): Xaa is A or G or absent
XXVPTRLSNITIQIMXXXXXXXXXIGEMSDMVVESXG

SEQ ID NO: 37033 - protein, 42 aa, Artificial Sequence
  Non-cyclic GFR-binding peptide
  MOD_RES (5)..(6)..(39)..(41): Xaa is C or S
  MOD_RES (20)..(21)..(22)..(23)..(24): Xaa is A or G
  MOD_RES (25)..(26)..(27)..(28): Xaa is A or G or absent
VPSTXXAPVKTSNITMQIMXXXXXXXXXLGEMSMIVEEXGXL

SEQ ID NO: 37034 - protein, 38 aa, Artificial Sequence
  Non-cyclic GFR-binding peptide
  MOD_RES (6)..(7)..(38): Xaa is C or S
RVPSTXXAPVKTSNITMQIMDNGRVLLIGEMSMIVEEX

SEQ ID NO: 37035 - protein, 30 aa, Artificial Sequence
  Non-cyclic GFR-binding peptide
VPQALSNITIQIMVGRKPKVLGEMSMIVRS

SEQ ID NO: 37036 - protein, 35 aa, Artificial Sequence
  Non-cyclic GFR-binding peptide
  MOD_RES (1)..(2)..(35): Xaa is C or S
  MOD_RES (16)..(17)..(18)..(19)..(20): Xaa is A or G
  MOD_RES (21)..(22)..(23)..(24): Xaa is A or G or absent
XXVPQDLSNITIQIMXXXXXXXXXLGEMSMVVKSX

SEQ ID NO: 37037 - protein, 31 aa, Artificial Sequence
  Non-cyclic GFR-binding peptide
  MOD_RES (31)..(31): Xaa is C or S
VSQDLSNITIQIMIGKTPKILGEMSMIVKSX

SEQ ID NO: 37038 - protein, 39 aa, Artificial Sequence
  Non-cyclic GFR-binding peptide
  MOD_RES (4)..(5)..(39): Xaa is C or S
  MOD_RES (19)..(20)..(21)..(22)..(23): Xaa is A or G
  MOD_RES (24)..(25)..(26)..(27): Xaa is A or G or absent
PPTXXVPTRLSNITIQIMXXXXXXXXXIGEMSDMVVESX

SEQ ID NO: 37039 - protein, 39 aa, Artificial Sequence
  Non-cyclic GFR-binding peptide
  MOD_RES (2)..(3)..(37)..(39): Xaa is C or S
  MOD_RES (17)..(18)..(19)..(20)..(21): Xaa is A or G
  MOD_RES (22)..(23)..(24)..(25): Xaa is A or G or absent
SXXVPARLSNITIQIMXXXXXXXXXLGEMSDMVVEAXGX

SEQ ID NO: 37040 - protein, 37 aa, Artificial Sequence
  Non-cyclic GFR-binding peptide
  MOD_RES (3)..(4): Xaa is C or S
  MOD_RES (18)..(19)..(20)..(21)..(22): Xaa is A or G
  MOD_RES (23)..(24)..(25)..(26): Xaa is A or G or absent
PTXXVPTRLSNITIQIMXXXXXXXXXLGEMSDMVVES

SEQ ID NO: 37041 - protein, 32 aa, Artificial Sequence
  Non-cyclic GFR-binding peptide
  MOD_RES (1)..(2): Xaa is C or S
XXVPTRLSNITIQIMDSANNVVLGEMSDMVVE

SEQ ID NO: 37042 - protein, 34 aa, Artificial Sequence
  Non-cyclic GFR-binding peptide
  MOD_RES (1)..(34): Xaa is C or S
  MOD_RES (15)..(16)..(17)..(18)..(19): Xaa is A or G
  MOD_RES (20)..(21)..(22)..(23): Xaa is A or G or absent
XAPVKTSNITMQIMXXXXXXXXXIGEMSMIVEEX

SEQ ID NO: 37043 - protein, 38 aa, Artificial Sequence
  Non-cyclic GFR-binding peptide
  MOD_RES (4)..(5)..(37): Xaa is C or S
PKPXXAPTKLSNITVQIMDDSSNVILGEMSNMVVRSXG

SEQ ID NO: 37044 - protein, 36 aa, Artificial Sequence
  Non-cyclic GFR-binding peptide
  MOD_RES (1)..(35): Xaa is C or S
  MOD_RES (15)..(16)..(17)..(18)..(19): Xaa is A or G
  MOD_RES (20)..(21)..(22)..(23): Xaa is A or G or absent
XVPARLSNITIQIMXXXXXXXXXLGEMSDMVVEAXG

SEQ ID NO: 37045 - protein, 34 aa, Artificial Sequence
  Non-cyclic GFR-binding peptide
  MOD_RES (32)..(34): Xaa is C or S
APTKLSNITVQIMDDSSNVILGEMSNMVVRSXGX

SEQ ID NO: 37046 - protein, 38 aa, Artificial Sequence
  Non-cyclic GFR-binding peptide
  MOD_RES (3)..(4)..(35)..(37): Xaa is C or S
APXXVPQALSNITIQIMVGRKPKVLGEMSMIVRSXKXS

SEQ ID NO: 37047 - protein, 34 aa, Artificial Sequence
  Non-cyclic GFR-binding peptide
  MOD_RES (34)..(34): Xaa is C or S
  MOD_RES (14)..(15)..(16)..(17)..(18): Xaa is A or G
  MOD_RES (19)..(20)..(21)..(22): Xaa is A or G or absent
TPTKMSNITMQIMXXXXXXXXXLGEMSGMVVDRX

SEQ ID NO: 37048 - protein, 43 aa, Artificial Sequence
  Non-cyclic GFR-binding peptide
  MOD_RES (5)..(6)..(40)..(42): Xaa is C or S
  MOD_RES (20)..(21)..(22)..(23)..(24): Xaa is A or G
  MOD_RES (25)..(26)..(27)..(28): Xaa is A or G or absent
SAGPXXTPTKMSNITMQIMXXXXXXXXXLGEMSGMVVDRXGXS

SEQ ID NO: 37049 - protein, 36 aa, Artificial Sequence
  Non-cyclic GFR-binding peptide
  MOD_RES (2)..(3): Xaa is C or S
  MOD_RES (17)..(18)..(19)..(20)..(21): Xaa is A or G
  MOD_RES (22)..(23)..(24)..(25): Xaa is A or G or absent
PXXTPTKMSNITMQIMXXXXXXXXXLGEMSGMVVDR

SEQ ID NO: 37050 - protein, 37 aa, Artificial Sequence
  Non-cyclic GFR-binding peptide
  MOD_RES (1)..(2)..(36): Xaa is C or S
  MOD_RES (16)..(17)..(18)..(19)..(20): Xaa is A or G
  MOD_RES (21)..(22)..(23)..(24): Xaa is A or G or absent
XXVPTRLSNITIQIMXXXXXXXXXLGEMSDMVVESXG

SEQ ID NO: 37051 - protein, 36 aa, Artificial Sequence
  Non-cyclic GFR-binding peptide
  MOD_RES (3)..(4)..(35): Xaa is C or S
SPXXVPQDLSNITIQIMVGRTPKVLGEMSMVVKSXK

SEQ ID NO: 37052 - protein, 37 aa, Artificial Sequence
  Non-cyclic GFR-binding peptide
  MOD_RES (6)..(7): Xaa is C or S
AAPASXXVPARLSNITIQIMDAANNVVIGEMSDMVVE

SEQ ID NO: 37053 - protein, 33 aa, Artificial Sequence
  Non-cyclic GFR-binding peptide
  MOD_RES (32)..(32): Xaa is C or S
APTKLSNITVQIMDDSSNVILGEMSNMVVRSXG

SEQ ID NO: 37054 - protein, 30 aa, Artificial Sequence
  Non-cyclic GFR-binding peptide
VPARLSNITIQIMDAANNVVLGEMSDMVVE

SEQ ID NO: 37055 - protein, 41 aa, Artificial Sequence
  Non-cyclic GFR-binding peptide
  MOD_RES (6)..(7)..(41): Xaa is C or S
  MOD_RES (21)..(22)..(23)..(24)..(25): Xaa is A or G
  MOD_RES (26)..(27)..(28)..(29): Xaa is A or G or absent
GSAGPXXTPTKMSNITMQIMXXXXXXXXXLGEMSGMVVDRX

SEQ ID NO: 37056 - protein, 34 aa, Artificial Sequence
  Non-cyclic GFR-binding peptide
  MOD_RES (32)..(34): Xaa is C or S
VPTRLSNITIQIMDSANNVVIGEMSDMVVESXGX

SEQ ID NO: 37057 - protein, 39 aa, Artificial Sequence
  Non-cyclic GFR-binding peptide
  MOD_RES (6)..(7)..(38): Xaa is C or S
ASASPXXVSQDLSNITIQIMIGKTPKILGEMSMIVKSXK

SEQ ID NO: 37058 - protein, 37 aa, Artificial Sequence
  Non-cyclic GFR-binding peptide
  MOD_RES (2)..(3)..(37): Xaa is C or S
  MOD_RES (17)..(18)..(19)..(20)..(21): Xaa is A or G
  MOD_RES (22)..(23)..(24)..(25): Xaa is A or G or absent
PXXTPTKMSNITMQIMXXXXXXXXXIGEMSGMVVDRX

SEQ ID NO: 37059 - protein, 39 aa, Artificial Sequence
  Non-cyclic GFR-binding peptide
  MOD_RES (6)..(7): Xaa is C or S
  MOD_RES (21)..(22)..(23)..(24)..(25): Xaa is A or G
  MOD_RES (26)..(27)..(28)..(29): Xaa is A or G or absent
HVPKPXXAPTKLSNITVQIMXXXXXXXXXLGEMSNMVVR

SEQ ID NO: 37060 - protein, 38 aa, Artificial Sequence
  Non-cyclic GFR-binding peptide
  MOD_RES (6)..(7)..(38): Xaa is C or S
ASASPXXVSQDLSNITIQIMIGKTPKILGEMSMIVKSX

SEQ ID NO: 37061 - protein, 37 aa, Artificial Sequence
  Non-cyclic GFR-binding peptide
  MOD_RES (3)..(4)..(35)..(37): Xaa is C or S
STXXAPVKTSNITMQIMDNGRVLLIGEMSMIVEEXGX

SEQ ID NO: 37062 - protein, 33 aa, Artificial Sequence
  Non-cyclic GFR-binding peptide
  MOD_RES (32)..(32): Xaa is C or S
VPARLSNITIQIMDAANNVVIGEMSDMVVEAXG

SEQ ID NO: 37063 - protein, 35 aa, Artificial Sequence
  Non-cyclic GFR-binding peptide
  MOD_RES (2)..(3): Xaa is C or S
  MOD_RES (17)..(18)..(19)..(20)..(21): Xaa is A or G
  MOD_RES (22)..(23)..(24)..(25): Xaa is A or G or absent
PXXTPTKMSNITMQIMXXXXXXXXXIGEMSGMVVD

SEQ ID NO: 37064 - protein, 36 aa, Artificial Sequence
  Non-cyclic GFR-binding peptide
  MOD_RES (3)..(4)..(35): Xaa is C or S
SPXXVSQDLSNITIQIMIGKTPKILGEMSMIVKSXK

SEQ ID NO: 37065 - protein, 37 aa, Artificial Sequence
  Non-cyclic GFR-binding peptide
  MOD_RES (2)..(3)..(37): Xaa is C or S
  MOD_RES (17)..(18)..(19)..(20)..(21): Xaa is A or G
  MOD_RES (22)..(23)..(24)..(25): Xaa is A or G or absent
PXXTPTKMSNITMQIMXXXXXXXXXLGEMSGMVVDRX

SEQ ID NO: 37066 - protein, 35 aa, Artificial Sequence
  Non-cyclic GFR-binding peptide
  MOD_RES (4)..(5): Xaa is C or S
AGPXXTPTKMSNITMQIMNDKQQIIIGEMSGMVVD

SEQ ID NO: 37067 - protein, 31 aa, Artificial Sequence
  Non-cyclic GFR-binding peptide
VPTRLSNITIQIMDSANNVVLGEMSDMVVES

SEQ ID NO: 37068 - protein, 39 aa, Artificial Sequence
  Non-cyclic GFR-binding peptide
  MOD_RES (3)..(4)..(37)..(39): Xaa is C or S
  MOD_RES (18)..(19)..(20)..(21)..(22): Xaa is A or G
  MOD_RES (23)..(24)..(25)..(26): Xaa is A or G or absent
SPXXVPQDLSNITIQIMXXXXXXXXXLGEMSMVVKSXKX

SEQ ID NO: 37069 - protein, 38 aa, Artificial Sequence
  Non-cyclic GFR-binding peptide
  MOD_RES (4)..(5)..(37): Xaa is C or S
PASXXVPARLSNITIQIMDAANNVVIGEMSDMVVEAXG

SEQ ID NO: 37070 - protein, 37 aa, Artificial Sequence
  Non-cyclic GFR-binding peptide
  MOD_RES (4)..(5): Xaa is C or S
  MOD_RES (19)..(20)..(21)..(22)..(23): Xaa is A or G
  MOD_RES (24)..(25)..(26)..(27): Xaa is A or G or absent
ASPXXVSQDLSNITIQIMXXXXXXXXXLGEMSMIVKS

SEQ ID NO: 37071 - protein, 37 aa, Artificial Sequence
  Non-cyclic GFR-binding peptide
  MOD_RES (4)..(5): Xaa is C or S
  MOD_RES (19)..(20)..(21)..(22)..(23): Xaa is A or G
  MOD_RES (24)..(25)..(26)..(27): Xaa is A or G or absent
PPTXXVPTRLSNITIQIMXXXXXXXXXIGEMSDMVVE

SEQ ID NO: 37072 - protein, 41 aa, Artificial Sequence
  Non-cyclic GFR-binding peptide
  MOD_RES (5)..(6)..(40): Xaa is C or S
  MOD_RES (20)..(21)..(22)..(23)..(24): Xaa is A or G
  MOD_RES (25)..(26)..(27)..(28): Xaa is A or G or absent
TPPTXXVPTRLSNITIQIMXXXXXXXXXLGEMSDMVVESXG

SEQ ID NO: 37073 - protein, 31 aa, Artificial Sequence
  Non-cyclic GFR-binding peptide
  MOD_RES (1)..(1): Xaa is C or S
XVPARLSNITIQIMDAANNVVLGEMSDMVVE

SEQ ID NO: 37074 - protein, 33 aa, Artificial Sequence
  Non-cyclic GFR-binding peptide
  MOD_RES (32)..(32): Xaa is C or S
TPTKMSNITMQIMNDKQQIIIGEMSGMVVDRXG

SEQ ID NO: 37075 - protein, 39 aa, Artificial Sequence
  Non-cyclic GFR-binding peptide
  MOD_RES (5)..(6)..(39): Xaa is C or S
  MOD_RES (20)..(21)..(22)..(23)..(24): Xaa is A or G
  MOD_RES (25)..(26)..(27)..(28): Xaa is A or G or absent
SASPXXVPQDLSNITIQIMXXXXXXXXXLGEMSMVVKSX

SEQ ID NO: 37076 - protein, 36 aa, Artificial Sequence
  Non-cyclic GFR-binding peptide
  MOD_RES (1)..(2)..(35): Xaa is C or S
  MOD_RES (16)..(17)..(18)..(19)..(20): Xaa is A or G
  MOD_RES (21)..(22)..(23)..(24): Xaa is A or G or absent
XXVPQALSNITIQIMXXXXXXXXXLGEMSMIVRSXK

SEQ ID NO: 37077 - protein, 40 aa, Artificial Sequence
  Non-cyclic GFR-binding peptide
  MOD_RES (5)..(6)..(37)..(39): Xaa is C or S
VPSTXXAPVKTSNITMQIMDNGRVLLLGEMSMIVEEXGXL

SEQ ID NO: 37078 - protein, 32 aa, Artificial Sequence
  Non-cyclic GFR-binding peptide
  MOD_RES (32)..(32): Xaa is C or S
VPTRLSNITIQIMDSANNVVIGEMSDMVVESX

SEQ ID NO: 37079 - protein, 33 aa, Artificial Sequence
  Non-cyclic GFR-binding peptide
  MOD_RES (1)..(1): Xaa is C or S
  MOD_RES (15)..(16)..(17)..(18)..(19): Xaa is A or G
  MOD_RES (20)..(21)..(22)..(23): Xaa is A or G or absent
XAPVKTSNITMQIMXXXXXXXXXLGEMSMIVEE

SEQ ID NO: 37080 - protein, 35 aa, Artificial Sequence
  Non-cyclic GFR-binding peptide
  MOD_RES (1)..(2): Xaa is C or S
  MOD_RES (16)..(17)..(18)..(19)..(20): Xaa is A or G
  MOD_RES (21)..(22)..(23)..(24): Xaa is A or G or absent
XXTPTKMSNITMQIMXXXXXXXXXIGEMSGMVVDR

SEQ ID NO: 37081 - protein, 44 aa, Artificial Sequence
  Non-cyclic GFR-binding peptide
  MOD_RES (6)..(7)..(41)..(43): Xaa is C or S
  MOD_RES (21)..(22)..(23)..(24)..(25): Xaa is A or G
  MOD_RES (26)..(27)..(28)..(29): Xaa is A or G or absent
AAPASXXVPARLSNITIQIMXXXXXXXXXIGEMSDMVVEAXGXR

SEQ ID NO: 37082 - protein, 37 aa, Artificial Sequence
  Non-cyclic GFR-binding peptide
  MOD_RES (2)..(3)..(35)..(37): Xaa is C or S
PXXTPTKMSNITMQIMNDKQQIIIGEMSGMVVDRXGX

SEQ ID NO: 37083 - protein, 33 aa, Artificial Sequence
  Non-cyclic GFR-binding peptide
  MOD_RES (1)..(1): Xaa is C or S
  MOD_RES (15)..(16)..(17)..(18)..(19): Xaa is A or G
  MOD_RES (20)..(21)..(22)..(23): Xaa is A or G or absent
XAPVKTSNITMQIMXXXXXXXXXIGEMSMIVEE

SEQ ID NO: 37084 - protein, 43 aa, Artificial Sequence
  Non-cyclic GFR-binding peptide
  MOD_RES (6)..(7)..(41)..(43): Xaa is C or S
  MOD_RES (21)..(22)..(23)..(24)..(25): Xaa is A or G
  MOD_RES (26)..(27)..(28)..(29): Xaa is A or G or absent
HVPKPXXAPTKLSNITVQIMXXXXXXXXXLGEMSNMVVRSXGX

SEQ ID NO: 37085 - protein, 35 aa, Artificial Sequence
  Non-cyclic GFR-binding peptide
  MOD_RES (2)..(3)..(34): Xaa is C or S
PXXVPQDLSNITIQIMVGRTPKVLGEMSMVVKSXK

SEQ ID NO: 37086 - protein, 36 aa, Artificial Sequence
  Non-cyclic GFR-binding peptide
  MOD_RES (2)..(3): Xaa is C or S
  MOD_RES (17)..(18)..(19)..(20)..(21): Xaa is A or G
  MOD_RES (22)..(23)..(24)..(25): Xaa is A or G or absent
SXXVPARLSNITIQIMXXXXXXXXXLGEMSDMVVEA

SEQ ID NO: 37087 - protein, 43 aa, Artificial Sequence
  Non-cyclic GFR-binding peptide
  MOD_RES (6)..(7)..(41)..(43): Xaa is C or S
  MOD_RES (21)..(22)..(23)..(24)..(25): Xaa is A or G
  MOD_RES (26)..(27)..(28)..(29): Xaa is A or G or absent
STPPTXXVPTRLSNITIQIMXXXXXXXXXIGEMSDMVVESXGX

SEQ ID NO: 37088 - protein, 34 aa, Artificial Sequence
  Non-cyclic GFR-binding peptide
  MOD_RES (2)..(3): Xaa is C or S
TXXVPTRLSNITIQIMDSANNVVLGEMSDMVVES

SEQ ID NO: 37089 - protein, 33 aa, Artificial Sequence
  Non-cyclic GFR-binding peptide
  MOD_RES (32)..(32): Xaa is C or S
VPARLSNITIQIMDAANNVVLGEMSDMVVEAXG

SEQ ID NO: 37090 - protein, 33 aa, Artificial Sequence
  Non-cyclic GFR-binding peptide
  MOD_RES (1)..(2)..(33): Xaa is C or S
XXAPVKTSNITMQIMDNGRVLLLGEMSMIVEEX

SEQ ID NO: 37091 - protein, 35 aa, Artificial Sequence
  Non-cyclic GFR-binding peptide
  MOD_RES (4)..(5): Xaa is C or S
AGPXXTPTKMSNITMQIMNDKQQIILGEMSGMVVD

SEQ ID NO: 37092 - protein, 37 aa, Artificial Sequence
  Non-cyclic GFR-binding peptide
  MOD_RES (4)..(5): Xaa is C or S
  MOD_RES (19)..(20)..(21)..(22)..(23): Xaa is A or G
  MOD_RES (24)..(25)..(26)..(27): Xaa is A or G or absent
PPTXXVPTRLSNITIQIMXXXXXXXXXLGEMSDMVVE

SEQ ID NO: 37093 - protein, 31 aa, Artificial Sequence
  Non-cyclic GFR-binding peptide
  MOD_RES (31)..(31): Xaa is C or S
APVKTSNITMQIMDNGRVLLIGEMSMIVEEX

SEQ ID NO: 37094 - protein, 32 aa, Artificial Sequence
  Non-cyclic GFR-binding peptide
  MOD_RES (1)..(32): Xaa is C or S
XVPQDLSNITIQIMVGRTPKVLGEMSMVVKSX

SEQ ID NO: 37095 - protein, 35 aa, Artificial Sequence
  Non-cyclic GFR-binding peptide
  MOD_RES (2)..(3): Xaa is C or S
  MOD_RES (17)..(18)..(19)..(20)..(21): Xaa is A or G
  MOD_RES (22)..(23)..(24)..(25): Xaa is A or G or absent
PXXTPTKMSNITMQIMXXXXXXXXXLGEMSGMVVD

SEQ ID NO: 37096 - protein, 38 aa, Artificial Sequence
  Non-cyclic GFR-binding peptide
  MOD_RES (4)..(5)..(37): Xaa is C or S
AGPXXTPTKMSNITMQIMNDKQQIIIGEMSGMVVDRXG

SEQ ID NO: 37097 - protein, 37 aa, Artificial Sequence
  Non-cyclic GFR-binding peptide
  MOD_RES (2)..(3)..(34)..(36): Xaa is C or S
TXXAPVKTSNITMQIMDNGRVLLIGEMSMIVEEXGXL

SEQ ID NO: 37098 - protein, 33 aa, Artificial Sequence
  Non-cyclic GFR-binding peptide
  MOD_RES (1)..(1): Xaa is C or S
  MOD_RES (15)..(16)..(17)..(18)..(19): Xaa is A or G
  MOD_RES (20)..(21)..(22)..(23): Xaa is A or G or absent
XAPTKLSNITVQIMXXXXXXXXXLGEMSNMVVR

SEQ ID NO: 37099 - protein, 36 aa, Artificial Sequence
  Non-cyclic GFR-binding peptide
  MOD_RES (2)..(3)..(36): Xaa is C or S
  MOD_RES (17)..(18)..(19)..(20)..(21): Xaa is A or G
  MOD_RES (22)..(23)..(24)..(25): Xaa is A or G or absent
TXXAPVKTSNITMQIMXXXXXXXXXIGEMSMIVEEX

SEQ ID NO: 37100 - protein, 42 aa, Artificial Sequence
  Non-cyclic GFR-binding peptide
  MOD_RES (4)..(5)..(39)..(41): Xaa is C or S
  MOD_RES (19)..(20)..(21)..(22)..(23): Xaa is A or G
  MOD_RES (24)..(25)..(26)..(27): Xaa is A or G or absent
PASXXVPARLSNITIQIMXXXXXXXXXIGEMSDMVVEAXGXR

SEQ ID NO: 37101 - protein, 33 aa, Artificial Sequence
  Non-cyclic GFR-binding peptide
  MOD_RES (14)..(15)..(16)..(17)..(18): Xaa is A or G
  MOD_RES (19)..(20)..(21)..(22): Xaa is A or G or absent
VPTRLSNITIQIMXXXXXXXXXIGEMSDMVVES

SEQ ID NO: 37102 - protein, 37 aa, Artificial Sequence
  Non-cyclic GFR-binding peptide
  MOD_RES (1)..(2)..(35)..(37): Xaa is C or S
  MOD_RES (16)..(17)..(18)..(19)..(20): Xaa is A or G
  MOD_RES (21)..(22)..(23)..(24): Xaa is A or G or absent
XXVPQALSNITIQIMXXXXXXXXXLGEMSMIVRSXKX

SEQ ID NO: 37103 - protein, 42 aa, Artificial Sequence
  Non-cyclic GFR-binding peptide
  MOD_RES (6)..(7)..(39)..(41): Xaa is C or S
HVPKPXXAPTKLSNITVQIMDDSSNVIIGEMSNMVVRSXGXH

SEQ ID NO: 37104 - protein, 40 aa, Artificial Sequence
  Non-cyclic GFR-binding peptide
  MOD_RES (3)..(4)..(37)..(39): Xaa is C or S
  MOD_RES (18)..(19)..(20)..(21)..(22): Xaa is A or G
  MOD_RES (23)..(24)..(25)..(26): Xaa is A or G or absent
APXXVPQALSNITIQIMXXXXXXXXXLGEMSMIVRSXKXS

SEQ ID NO: 37105 - protein, 39 aa, Artificial Sequence
  Non-cyclic GFR-binding peptide
  MOD_RES (3)..(4)..(36)..(38): Xaa is C or S
ASXXVPARLSNITIQIMDAANNVVIGEMSDMVVEAXGXR

SEQ ID NO: 37106 - protein, 38 aa, Artificial Sequence
  Non-cyclic GFR-binding peptide
  MOD_RES (1)..(2)..(35)..(37): Xaa is C or S
  MOD_RES (16)..(17)..(18)..(19)..(20): Xaa is A or G
  MOD_RES (21)..(22)..(23)..(24): Xaa is A or G or absent
XXVPQALSNITIQIMXXXXXXXXXLGEMSMIVRSXKXS

SEQ ID NO: 37107 - protein, 42 aa, Artificial Sequence
  Non-cyclic GFR-binding peptide
  MOD_RES (5)..(6)..(40)..(42): Xaa is C or S
  MOD_RES (20)..(21)..(22)..(23)..(24): Xaa is A or G
  MOD_RES (25)..(26)..(27)..(28): Xaa is A or G or absent
VPKPXXAPTKLSNITVQIMXXXXXXXXXLGEMSNMVVRSXGX

SEQ ID NO: 37108 - protein, 40 aa, Artificial Sequence
  Non-cyclic GFR-binding peptide
  MOD_RES (3)..(4)..(38)..(40): Xaa is C or S
  MOD_RES (18)..(19)..(20)..(21)..(22): Xaa is A or G
  MOD_RES (23)..(24)..(25)..(26): Xaa is A or G or absent
GPXXTPTKMSNITMQIMXXXXXXXXXIGEMSGMVVDRXGX

SEQ ID NO: 37109 - protein, 34 aa, Artificial Sequence
  Non-cyclic GFR-binding peptide
  MOD_RES (34)..(34): Xaa is C or S
  MOD_RES (14)..(15)..(16)..(17)..(18): Xaa is A or G
  MOD_RES (19)..(20)..(21)..(22): Xaa is A or G or absent
TPTKMSNITMQIMXXXXXXXXXIGEMSGMVVDRX

SEQ ID NO: 37110 - protein, 35 aa, Artificial Sequence
  Non-cyclic GFR-binding peptide
  MOD_RES (4)..(5): Xaa is C or S
PASXXVPARLSNITIQIMDAANNVVLGEMSDMVVE

SEQ ID NO: 37111 - protein, 30 aa, Artificial Sequence; identical to SEQ ID NO: 1125
  Non-cyclic GFR-binding peptide

SEQ ID NO: 37112 - protein, 34 aa, Artificial Sequence
  Non-cyclic GFR-binding peptide
  MOD_RES (1)..(2)..(33): Xaa is C or S
XXVPQDLSNITIQIMVGRTPKVLGEMSMVVKSXK

SEQ ID NO: 37113 - protein, 36 aa, Artificial Sequence
  Non-cyclic GFR-binding peptide
  MOD_RES (1)..(2)..(34)..(36): Xaa is C or S
XXAPTKLSNITVQIMDDSSNVILGEMSNMVVRSXGX

SEQ ID NO: 37114 - protein, 39 aa, Artificial Sequence
  Non-cyclic GFR-binding peptide
  MOD_RES (5)..(6): Xaa is C or S
  MOD_RES (20)..(21)..(22)..(23)..(24): Xaa is A or G
  MOD_RES (25)..(26)..(27)..(28): Xaa is A or G or absent
APASXXVPARLSNITIQIMXXXXXXXXXLGEMSDMVVEA

SEQ ID NO: 37115 - protein, 40 aa, Artificial Sequence
  Non-cyclic GFR-binding peptide
  MOD_RES (6)..(7): Xaa is C or S
  MOD_RES (21)..(22)..(23)..(24)..(25): Xaa is A or G
  MOD_RES (26)..(27)..(28)..(29): Xaa is A or G or absent
STPPTXXVPTRLSNITIQIMXXXXXXXXXLGEMSDMVVES

SEQ ID NO: 37116 - protein, 38 aa, Artificial Sequence
  Non-cyclic GFR-binding peptide
  MOD_RES (4)..(5)..(36)..(38): Xaa is C or S
ASPXXVPQDLSNITIQIMVGRTPKVLGEMSMVVKSXKX

SEQ ID NO: 37117 - protein, 37 aa, Artificial Sequence
  Non-cyclic GFR-binding peptide
  MOD_RES (2)..(3)..(34)..(36): Xaa is C or S
PXXVPQDLSNITIQIMVGRTPKVLGEMSMVVKSXKXS

SEQ ID NO: 37118 - protein, 34 aa, Artificial Sequence
  Non-cyclic GFR-binding peptide
  MOD_RES (3)..(4): Xaa is C or S
APXXVPQALSNITIQIMVGRKPKVLGEMSMIVRS

SEQ ID NO: 37119 - protein, 41 aa, Artificial Sequence
  Non-cyclic GFR-binding peptide
  MOD_RES (6)..(7)..(38)..(40): Xaa is C or S
RVPSTXXAPVKTSNITMQIMDNGRVLLLGEMSMIVEEXGXL

SEQ ID NO: 37120 - protein, 40 aa, Artificial Sequence
  Non-cyclic GFR-binding peptide
  MOD_RES (5)..(6)..(40): Xaa is C or S
  MOD_RES (20)..(21)..(22)..(23)..(24): Xaa is A or G
  MOD_RES (25)..(26)..(27)..(28): Xaa is A or G or absent
TPPTXXVPTRLSNITIQIMXXXXXXXXXIGEMSDMVVESX

SEQ ID NO: 37121 - protein, 34 aa, Artificial Sequence
  Non-cyclic GFR-binding peptide
  MOD_RES (2)..(3): Xaa is C or S
PXXTPTKMSNITMQIMNDKQQIILGEMSGMVVDR

SEQ ID NO: 37122 - protein, 38 aa, Artificial Sequence
  Non-cyclic GFR-binding peptide
  MOD_RES (5)..(6)..(38): Xaa is C or S
SAGPXXTPTKMSNITMQIMNDKQQIILGEMSGMVVDRX

SEQ ID NO: 37123 - protein, 37 aa, Artificial Sequence
  Non-cyclic GFR-binding peptide
  MOD_RES (4)..(5): Xaa is C or S
  MOD_RES (19)..(20)..(21)..(22)..(23): Xaa is A or G
  MOD_RES (24)..(25)..(26)..(27): Xaa is A or G or absent
PASXXVPARLSNITIQIMXXXXXXXXXLGEMSDMVVE

SEQ ID NO: 37124 - protein, 40 aa, Artificial Sequence
  Non-cyclic GFR-binding peptide
  MOD_RES (6)..(7): Xaa is C or S
  MOD_RES (21)..(22)..(23)..(24)..(25): Xaa is A or G
  MOD_RES (26)..(27)..(28)..(29): Xaa is A or G or absent
AAPASXXVPARLSNITIQIMXXXXXXXXXLGEMSDMVVEA

SEQ ID NO: 37125 - protein, 39 aa, Artificial Sequence
  Non-cyclic GFR-binding peptide
  MOD_RES (4)..(5)..(39): Xaa is C or S
  MOD_RES (19)..(20)..(21)..(22)..(23): Xaa is A or G
  MOD_RES (24)..(25)..(26)..(27): Xaa is A or G or absent
AGPXXTPTKMSNITMQIMXXXXXXXXXIGEMSGMVVDRX

SEQ ID NO: 37126 - protein, 39 aa, Artificial Sequence
  Non-cyclic GFR-binding peptide
  MOD_RES (5)..(6)..(39): Xaa is C or S
  MOD_RES (20)..(21)..(22)..(23)..(24): Xaa is A or G
  MOD_RES (25)..(26)..(27)..(28): Xaa is A or G or absent
SAAPXXVPQALSNITIQIMXXXXXXXXXLGEMSMIVRSX

SEQ ID NO: 37127 - protein, 34 aa, Artificial Sequence
  Non-cyclic GFR-binding peptide
  MOD_RES (1)..(2)..(33): Xaa is C or S
XXAPVKTSNITMQIMDNGRVLLLGEMSMIVEEXG

SEQ ID NO: 37128 - protein, 32 aa, Artificial Sequence
  Non-cyclic GFR-binding peptide
  MOD_RES (32)..(32): Xaa is C or S
VPARLSNITIQIMDAANNVVIGEMSDMVVEAX

SEQ ID NO: 37129 - protein, 32 aa, Artificial Sequence
  Non-cyclic GFR-binding peptide
  MOD_RES (1)..(2): Xaa is C or S
XXVPTRLSNITIQIMDSANNVVIGEMSDMVVE

SEQ ID NO: 37130 - protein, 34 aa, Artificial Sequence
  Non-cyclic GFR-binding peptide
  MOD_RES (2)..(3): Xaa is C or S
SXXVPARLSNITIQIMDAANNVVIGEMSDMVVEA

SEQ ID NO: 37131 - protein, 34 aa, Artificial Sequence
  Non-cyclic GFR-binding peptide
  MOD_RES (1)..(2)..(33): Xaa is C or S
XXAPVKTSNITMQIMDNGRVLLIGEMSMIVEEXG

SEQ ID NO: 37132 - protein, 37 aa, Artificial Sequence
  Non-cyclic GFR-binding peptide
  MOD_RES (34)..(36): Xaa is C or S
  MOD_RES (14)..(15)..(16)..(17)..(18): Xaa is A or G
  MOD_RES (19)..(20)..(21)..(22): Xaa is A or G or absent
VPTRLSNITIQIMXXXXXXXXXLGEMSDMVVESXGXR

SEQ ID NO: 37133 - protein, 38 aa, Artificial Sequence
  Non-cyclic GFR-binding peptide
  MOD_RES (2)..(3)..(36)..(38): Xaa is C or S
  MOD_RES (17)..(18)..(19)..(20)..(21): Xaa is A or G
  MOD_RES (22)..(23)..(24)..(25): Xaa is A or G or absent
TXXAPVKTSNITMQIMXXXXXXXXXLGEMSMIVEEXGX

SEQ ID NO: 37134 - protein, 37 aa, Artificial Sequence
  Non-cyclic GFR-binding peptide
  MOD_RES (4)..(5): Xaa is C or S
  MOD_RES (19)..(20)..(21)..(22)..(23): Xaa is A or G
  MOD_RES (24)..(25)..(26)..(27): Xaa is A or G or absent
PKPXXAPTKLSNITVQIMXXXXXXXXXLGEMSNMVVR

SEQ ID NO: 37135 - protein, 35 aa, Artificial Sequence
  Non-cyclic GFR-binding peptide
  MOD_RES (2)..(3): Xaa is C or S
  MOD_RES (17)..(18)..(19)..(20)..(21): Xaa is A or G
  MOD_RES (22)..(23)..(24)..(25): Xaa is A or G or absent
TXXAPVKTSNITMQIMXXXXXXXXXLGEMSMIVEE

SEQ ID NO: 37136 - protein, 44 aa, Artificial Sequence
  Non-cyclic GFR-binding peptide
  MOD_RES (6)..(7)..(41)..(43): Xaa is C or S
  MOD_RES (21)..(22)..(23)..(24)..(25): Xaa is A or G
  MOD_RES (26)..(27)..(28)..(29): Xaa is A or G or absent
GSAGPXXTPTKMSNITMQIMXXXXXXXXXLGEMSGMVVDRXGXS

SEQ ID NO: 37137 - protein, 43 aa, Artificial Sequence
  Non-cyclic GFR-binding peptide
  MOD_RES (6)..(7)..(41)..(43): Xaa is C or S
  MOD_RES (21)..(22)..(23)..(24)..(25): Xaa is A or G
  MOD_RES (26)..(27)..(28)..(29): Xaa is A or G or absent
AAPASXXVPARLSNITIQIMXXXXXXXXXLGEMSDMVVEAXGX

SEQ ID NO: 37138 - protein, 37 aa, Artificial Sequence
  Non-cyclic GFR-binding peptide
  MOD_RES (3)..(4)..(36): Xaa is C or S
GPXXTPTKMSNITMQIMNDKQQIIIGEMSGMVVDRXG

SEQ ID NO: 37139 - protein, 33 aa, Artificial Sequence
  Non-cyclic GFR-binding peptide
  MOD_RES (2)..(3): Xaa is C or S
SXXVPARLSNITIQIMDAANNVVLGEMSDMVVE

SEQ ID NO: 37140 - protein, 38 aa, Artificial Sequence
  Non-cyclic GFR-binding peptide
  MOD_RES (3)..(4)..(38): Xaa is C or S
  MOD_RES (18)..(19)..(20)..(21)..(22): Xaa is A or G
  MOD_RES (23)..(24)..(25)..(26): Xaa is A or G or absent
GPXXTPTKMSNITMQIMXXXXXXXXXIGEMSGMVVDRX

SEQ ID NO: 37141 - protein, 37 aa, Artificial Sequence
  Non-cyclic GFR-binding peptide
  MOD_RES (3)..(4)..(36): Xaa is C or S
ASXXVPARLSNITIQIMDAANNVVLGEMSDMVVEAXG

SEQ ID NO: 37142 - protein, 40 aa, Artificial Sequence
  Non-cyclic GFR-binding peptide
  MOD_RES (4)..(5)..(37)..(39): Xaa is C or S
PASXXVPARLSNITIQIMDAANNVVLGEMSDMVVEAXGXR

SEQ ID NO: 37143 - protein, 39 aa, Artificial Sequence
  Non-cyclic GFR-binding peptide
  MOD_RES (2)..(3)..(36)..(38): Xaa is C or S
  MOD_RES (17)..(18)..(19)..(20)..(21): Xaa is A or G
  MOD_RES (22)..(23)..(24)..(25): Xaa is A or G or absent
PXXVPQALSNITIQIMXXXXXXXXXLGEMSMIVRSXKXS

SEQ ID NO: 37144 - protein, 32 aa, Artificial Sequence
  Non-cyclic GFR-binding peptide
  MOD_RES (1)..(32): Xaa is C or S
XAPVKTSNITMQIMDNGRVLLIGEMSMIVEEX

SEQ ID NO: 37145 - protein, 39 aa, Artificial Sequence
  Non-cyclic GFR-binding peptide
  MOD_RES (3)..(4)..(38): Xaa is C or S
  MOD_RES (18)..(19)..(20)..(21)..(22): Xaa is A or G
  MOD_RES (23)..(24)..(25)..(26): Xaa is A or G or absent
ASXXVPARLSNITIQIMXXXXXXXXXLGEMSDMVVEAXG

SEQ ID NO: 37146 - protein, 41 aa, Artificial Sequence
  Non-cyclic GFR-binding peptide
  MOD_RES (4)..(5)..(39)..(41): Xaa is C or S
  MOD_RES (19)..(20)..(21)..(22)..(23): Xaa is A or G
  MOD_RES (24)..(25)..(26)..(27): Xaa is A or G or absent
PPTXXVPTRLSNITIQIMXXXXXXXXXIGEMSDMVVESXGX

SEQ ID NO: 37147 - protein, 31 aa, Artificial Sequence
  Non-cyclic GFR-binding peptide
  MOD_RES (31)..(31): Xaa is C or S
VPQDLSNITIQIMVGRTPKVLGEMSMVVKSX

SEQ ID NO: 37148 - protein, 36 aa, Artificial Sequence
  Non-cyclic GFR-binding peptide
  MOD_RES (3)..(4): Xaa is C or S
  MOD_RES (18)..(19)..(20)..(21)..(22): Xaa is A or G
  MOD_RES (23)..(24)..(25)..(26): Xaa is A or G or absent
GPXXTPTKMSNITMQIMXXXXXXXXXLGEMSGMVVD

SEQ ID NO: 37149 - protein, 39 aa, Artificial Sequence
  Non-cyclic GFR-binding peptide
  MOD_RES (1)..(2)..(36)..(38): Xaa is C or S
  MOD_RES (16)..(17)..(18)..(19)..(20): Xaa is A or G
  MOD_RES (21)..(22)..(23)..(24): Xaa is A or G or absent
XXVPTRLSNITIQIMXXXXXXXXXIGEMSDMVVESXGXR

SEQ ID NO: 37150 - protein, 40 aa, Artificial Sequence
  Non-cyclic GFR-binding peptide
  MOD_RES (5)..(6)..(38)..(40): Xaa is C or S
VPKPXXAPTKLSNITVQIMDDSSNVILGEMSNMVVRSXGX

SEQ ID NO: 37151 - protein, 38 aa, Artificial Sequence
  Non-cyclic GFR-binding peptide
  MOD_RES (1)..(35)..(37): Xaa is C or S
  MOD_RES (15)..(16)..(17)..(18)..(19): Xaa is A or G
  MOD_RES (20)..(21)..(22)..(23): Xaa is A or G or absent
XVPARLSNITIQIMXXXXXXXXXIGEMSDMVVEAXGXR

SEQ ID NO: 37152 - protein, 37 aa, Artificial Sequence
  Non-cyclic GFR-binding peptide
  MOD_RES (3)..(4)..(36): Xaa is C or S
KPXXAPTKLSNITVQIMDDSSNVILGEMSNMVVRSXG

SEQ ID NO: 37153 - protein, 34 aa, Artificial Sequence
  Non-cyclic GFR-binding peptide
  MOD_RES (1)..(33): Xaa is C or S
XTPTKMSNITMQIMNDKQQIILGEMSGMVVDRXG

SEQ ID NO: 37154 - protein, 42 aa, Artificial Sequence
  Non-cyclic GFR-binding peptide
  MOD_RES (5)..(6)..(39)..(41): Xaa is C or S
  MOD_RES (20)..(21)..(22)..(23)..(24): Xaa is A or G
  MOD_RES (25)..(26)..(27)..(28): Xaa is A or G or absent
SAAPXXVPQALSNITIQIMXXXXXXXXXLGEMSMIVRSXKXS

SEQ ID NO: 37155 - protein, 38 aa, Artificial Sequence
  Non-cyclic GFR-binding peptide
  MOD_RES (3)..(4)..(37): Xaa is C or S
  MOD_RES (18)..(19)..(20)..(21)..(22): Xaa is A or G
  MOD_RES (23)..(24)..(25)..(26): Xaa is A or G or absent
SPXXVSQDLSNITIQIMXXXXXXXXXLGEMSMIVKSXK

SEQ ID NO: 37156 - protein, 38 aa, Artificial Sequence
  Non-cyclic GFR-binding peptide
  MOD_RES (2)..(3)..(37): Xaa is C or S
  MOD_RES (17)..(18)..(19)..(20)..(21): Xaa is A or G
  MOD_RES (22)..(23)..(24)..(25): Xaa is A or G or absent
SXXVPARLSNITIQIMXXXXXXXXXIGEMSDMVVEAXG

SEQ ID NO: 37157 - protein, 37 aa, Artificial Sequence
  Non-cyclic GFR-binding peptide
  MOD_RES (4)..(5)..(36): Xaa is C or S
AAPXXVPQALSNITIQIMVGRKPKVLGEMSMIVRSXK

SEQ ID NO: 37158 - protein, 35 aa, Artificial Sequence
  Non-cyclic GFR-binding peptide
  MOD_RES (1)..(32)..(34): Xaa is C or S
XAPVKTSNITMQIMDNGRVLLIGEMSMIVEEXGXL

SEQ ID NO: 37159 - protein, 33 aa, Artificial Sequence
  Non-cyclic GFR-binding peptide
  MOD_RES (1)..(33): Xaa is C or S
XTPTKMSNITMQIMNDKQQIILGEMSGMVVDRX

SEQ ID NO: 37160 - protein, 35 aa, Artificial Sequence
  Non-cyclic GFR-binding peptide
  MOD_RES (34)..(34): Xaa is C or S
  MOD_RES (14)..(15)..(16)..(17)..(18): Xaa is A or G
  MOD_RES (19)..(20)..(21)..(22): Xaa is A or G or absent
VPARLSNITIQIMXXXXXXXXXIGEMSDMVVEAXG

SEQ ID NO: 37161 - protein, 38 aa, Artificial Sequence
  Non-cyclic GFR-binding peptide
  MOD_RES (3)..(4)..(36)..(38): Xaa is C or S
PTXXVPTRLSNITIQIMDSANNVVIGEMSDMVVESXGX

SEQ ID NO: 37162 - protein, 34 aa, Artificial Sequence
  Non-cyclic GFR-binding peptide
  MOD_RES (1)..(2)..(34): Xaa is C or S
XXVPARLSNITIQIMDAANNVVIGEMSDMVVEAX

SEQ ID NO: 37163 - protein, 36 aa, Artificial Sequence
  Non-cyclic GFR-binding peptide
  MOD_RES (1)..(33)..(35): Xaa is C or S
XVPARLSNITIQIMDAANNVVLGEMSDMVVEAXGXR

SEQ ID NO: 37164 - protein, 36 aa, Artificial Sequence
  Non-cyclic GFR-binding peptide
  MOD_RES (3)..(4): Xaa is C or S
  MOD_RES (18)..(19)..(20)..(21)..(22): Xaa is A or G
  MOD_RES (23)..(24)..(25)..(26): Xaa is A or G or absent
SPXXVPQDLSNITIQIMXXXXXXXXXLGEMSMVVKS

SEQ ID NO: 37165 - protein, 41 aa, Artificial Sequence
  Non-cyclic GFR-binding peptide
  MOD_RES (3)..(4)..(38)..(40): Xaa is C or S
  MOD_RES (18)..(19)..(20)..(21)..(22): Xaa is A or G
  MOD_RES (23)..(24)..(25)..(26): Xaa is A or G or absent
PTXXVPTRLSNITIQIMXXXXXXXXXLGEMSDMVVESXGXR

SEQ ID NO: 37166 - protein, 41 aa, Artificial Sequence
  Non-cyclic GFR-binding peptide
  MOD_RES (4)..(5)..(39)..(41): Xaa is C or S
  MOD_RES (19)..(20)..(21)..(22)..(23): Xaa is A or G
  MOD_RES (24)..(25)..(26)..(27): Xaa is A or G or absent
PPTXXVPTRLSNITIQIMXXXXXXXXXLGEMSDMVVESXGX

SEQ ID NO: 37167 - protein, 36 aa, Artificial Sequence
  Non-cyclic GFR-binding peptide
  MOD_RES (4)..(5)..(36): Xaa is C or S
PSTXXAPVKTSNITMQIMDNGRVLLIGEMSMIVEEX

SEQ ID NO: 37168 - protein, 37 aa, Artificial Sequence
  Non-cyclic GFR-binding peptide
  MOD_RES (3)..(4)..(36): Xaa is C or S
ASXXVPARLSNITIQIMDAANNVVIGEMSDMVVEAXG

SEQ ID NO: 37169 - protein, 40 aa, Artificial Sequence
  Non-cyclic GFR-binding peptide
  MOD_RES (2)..(3)..(37)..(39): Xaa is C or S
  MOD_RES (17)..(18)..(19)..(20)..(21): Xaa is A or G
  MOD_RES (22)..(23)..(24)..(25): Xaa is A or G or absent
SXXVPARLSNITIQIMXXXXXXXXXIGEMSDMVVEAXGXR

SEQ ID NO: 37170 - protein, 38 aa, Artificial Sequence
  Non-cyclic GFR-binding peptide
  MOD_RES (4)..(5)..(38): Xaa is C or S
  MOD_RES (19)..(20)..(21)..(22)..(23): Xaa is A or G
  MOD_RES (24)..(25)..(26)..(27): Xaa is A or G or absent
PSTXXAPVKTSNITMQIMXXXXXXXXXLGEMSMIVEEX

SEQ ID NO: 37171 - protein, 39 aa, Artificial Sequence
  Non-cyclic GFR-binding peptide
  MOD_RES (3)..(4)..(37)..(39): Xaa is C or S
  MOD_RES (18)..(19)..(20)..(21)..(22): Xaa is A or G
  MOD_RES (23)..(24)..(25)..(26): Xaa is A or G or absent
STXXAPVKTSNITMQIMXXXXXXXXXIGEMSMIVEEXGX

SEQ ID NO: 37172 - protein, 38 aa, Artificial Sequence
  Non-cyclic GFR-binding peptide
  MOD_RES (2)..(3)..(37): Xaa is C or S
  MOD_RES (17)..(18)..(19)..(20)..(21): Xaa is A or G
  MOD_RES (22)..(23)..(24)..(25): Xaa is A or G or absent
PXXTPTKMSNITMQIMXXXXXXXXXIGEMSGMVVDRXG

SEQ ID NO: 37173 - protein, 39 aa, Artificial Sequence
  Non-cyclic GFR-binding peptide
  MOD_RES (1)..(2)..(36)..(38): Xaa is C or S
  MOD_RES (16)..(17)..(18)..(19)..(20): Xaa is A or G
  MOD_RES (21)..(22)..(23)..(24): Xaa is A or G or absent
XXVPARLSNITIQIMXXXXXXXXXLGEMSDMVVEAXGXR

SEQ ID NO: 37174 - protein, 39 aa, Artificial Sequence
  Non-cyclic GFR-binding peptide
  MOD_RES (1)..(2)..(36)..(38): Xaa is C or S
  MOD_RES (16)..(17)..(18)..(19)..(20): Xaa is A or G
  MOD_RES (21)..(22)..(23)..(24): Xaa is A or G or absent
XXTPTKMSNITMQIMXXXXXXXXXIGEMSGMVVDRXGXS

SEQ ID NO: 37175 - protein, 37 aa, Artificial Sequence
  Non-cyclic GFR-binding peptide
  MOD_RES (1)..(2)..(36): Xaa is C or S
  MOD_RES (16)..(17)..(18)..(19)..(20): Xaa is A or G
  MOD_RES (21)..(22)..(23)..(24): Xaa is A or G or absent
XXTPTKMSNITMQIMXXXXXXXXXLGEMSGMVVDRXG

SEQ ID NO: 37176 - protein, 31 aa, Artificial Sequence
  Non-cyclic GFR-binding peptide
  MOD_RES (1)..(1): Xaa is C or S
XVPTRLSNITIQIMDSANNVVLGEMSDMVVE

SEQ ID NO: 37177 - protein, 34 aa, Artificial Sequence
  Non-cyclic GFR-binding peptide
  MOD_RES (1)..(2): Xaa is C or S
  MOD_RES (16)..(17)..(18)..(19)..(20): Xaa is A or G
  MOD_RES (21)..(22)..(23)..(24): Xaa is A or G or absent
XXVPARLSNITIQIMXXXXXXXXXIGEMSDMVVE

SEQ ID NO: 37178 - protein, 30 aa, Artificial Sequence; identical to SEQ ID NO: 1109
  Non-cyclic GFR-binding peptide

SEQ ID NO: 37179 - protein, 33 aa, Artificial Sequence
  Non-cyclic GFR-binding peptide
  MOD_RES (1)..(32): Xaa is C or S
XAPVKTSNITMQIMDNGRVLLLGEMSMIVEEXG

SEQ ID NO: 37180 - protein, 36 aa, Artificial Sequence
  Non-cyclic GFR-binding peptide
  MOD_RES (1)..(35): Xaa is C or S
  MOD_RES (15)..(16)..(17)..(18)..(19): Xaa is A or G
  MOD_RES (20)..(21)..(22)..(23): Xaa is A or G or absent
XTPTKMSNITMQIMXXXXXXXXXIGEMSGMVVDRXG

SEQ ID NO: 37181 - protein, 39 aa, Artificial Sequence
  Non-cyclic GFR-binding peptide
  MOD_RES (4)..(5)..(38): Xaa is C or S
  MOD_RES (19)..(20)..(21)..(22)..(23): Xaa is A or G
  MOD_RES (24)..(25)..(26)..(27): Xaa is A or G or absent
ASPXXVSQDLSNITIQIMXXXXXXXXXLGEMSMIVKSXK

SEQ ID NO: 37182 - protein, 36 aa, Artificial Sequence
  Non-cyclic GFR-binding peptide
  MOD_RES (33)..(35): Xaa is C or S
  MOD_RES (14)..(15)..(16)..(17)..(18): Xaa is A or G
  MOD_RES (19)..(20)..(21)..(22): Xaa is A or G or absent
VPQALSNITIQIMXXXXXXXXXLGEMSMIVRSXKXS

SEQ ID NO: 37183 - protein, 33 aa, Artificial Sequence
  Non-cyclic GFR-binding peptide
  MOD_RES (1)..(2): Xaa is C or S
XXVPARLSNITIQIMDAANNVVLGEMSDMVVEA

SEQ ID NO: 37184 - protein, 37 aa, Artificial Sequence
  Non-cyclic GFR-binding peptide
  MOD_RES (34)..(36): Xaa is C or S
  MOD_RES (14)..(15)..(16)..(17)..(18): Xaa is A or G
  MOD_RES (19)..(20)..(21)..(22): Xaa is A or G or absent
APTKLSNITVQIMXXXXXXXXXLGEMSNMVVRSXGXH

SEQ ID NO: 37185 - protein, 38 aa, Artificial Sequence
  Non-cyclic GFR-binding peptide
  MOD_RES (5)..(6)..(38): Xaa is C or S
SAGPXXTPTKMSNITMQIMNDKQQIIIGEMSGMVVDRX

SEQ ID NO: 37186 - protein, 33 aa, Artificial Sequence
  Non-cyclic GFR-binding peptide
  MOD_RES (1)..(1): Xaa is C or S
  MOD_RES (15)..(16)..(17)..(18)..(19): Xaa is A or G
  MOD_RES (20)..(21)..(22)..(23): Xaa is A or G or absent
XVPTRLSNITIQIMXXXXXXXXXIGEMSDMVVE

SEQ ID NO: 37187 - protein, 36 aa, Artificial Sequence
  Non-cyclic GFR-binding peptide
  MOD_RES (1)..(2)..(33)..(35): Xaa is C or S
XXVPQALSNITIQIMVGRKPKVLGEMSMIVRSXKXS

SEQ ID NO: 37188 - protein, 35 aa, Artificial Sequence
  Non-cyclic GFR-binding peptide
  MOD_RES (1)..(32)..(34): Xaa is C or S
XAPVKTSNITMQIMDNGRVLLLGEMSMIVEEXGXL

SEQ ID NO: 37189 - protein, 43 aa, Artificial Sequence
  Non-cyclic GFR-binding peptide
  MOD_RES (5)..(6)..(40)..(42): Xaa is C or S
  MOD_RES (20)..(21)..(22)..(23)..(24): Xaa is A or G
  MOD_RES (25)..(26)..(27)..(28): Xaa is A or G or absent
TPPTXXVPTRLSNITIQIMXXXXXXXXXLGEMSDMVVESXGXR

SEQ ID NO: 37190 - protein, 37 aa, Artificial Sequence
  Non-cyclic GFR-binding peptide
  MOD_RES (34)..(36): Xaa is C or S
  MOD_RES (14)..(15)..(16)..(17)..(18): Xaa is A or G
  MOD_RES (19)..(20)..(21)..(22): Xaa is A or G or absent
TPTKMSNITMQIMXXXXXXXXXLGEMSGMVVDRXGXS

SEQ ID NO: 37191 - protein, 32 aa, Artificial Sequence
  Non-cyclic GFR-binding peptide
  MOD_RES (1)..(32): Xaa is C or S
XVSQDLSNITIQIMIGKTPKILGEMSMIVKSX

SEQ ID NO: 37192 - protein, 35 aa, Artificial Sequence
  Non-cyclic GFR-binding peptide
  MOD_RES (1)..(2): Xaa is C or S
  MOD_RES (16)..(17)..(18)..(19)..(20): Xaa is A or G
  MOD_RES (21)..(22)..(23)..(24): Xaa is A or G or absent
XXVPTRLSNITIQIMXXXXXXXXXIGEMSDMVVES

SEQ ID NO: 37193 - protein, 38 aa, Artificial Sequence
  Non-cyclic GFR-binding peptide
  MOD_RES (3)..(4)..(35)..(37): Xaa is C or S
SPXXVPQDLSNITIQIMVGRTPKVLGEMSMVVKSXKXS

SEQ ID NO: 37194 - protein, 33 aa, Artificial Sequence
  Non-cyclic GFR-binding peptide
  MOD_RES (1)..(1): Xaa is C or S
  MOD_RES (15)..(16)..(17)..(18)..(19): Xaa is A or G
  MOD_RES (20)..(21)..(22)..(23): Xaa is A or G or absent
XVPTRLSNITIQIMXXXXXXXXXLGEMSDMVVE

SEQ ID NO: 37195 - protein, 34 aa, Artificial Sequence
  Non-cyclic GFR-binding peptide
  MOD_RES (1)..(34): Xaa is C or S
  MOD_RES (15)..(16)..(17)..(18)..(19): Xaa is A or G
  MOD_RES (20)..(21)..(22)..(23): Xaa is A or G or absent
XVSQDLSNITIQIMXXXXXXXXXLGEMSMIVKSX

SEQ ID NO: 37196 - protein, 39 aa, Artificial Sequence
  Non-cyclic GFR-binding peptide
  MOD_RES (5)..(6)..(38): Xaa is C or S
APASXXVPARLSNITIQIMDAANNVVIGEMSDMVVEAXG

SEQ ID NO: 37197 - protein, 34 aa, Artificial Sequence
  Non-cyclic GFR-binding peptide
  MOD_RES (1)..(2)..(34): Xaa is C or S
XXTPTKMSNITMQIMNDKQQIILGEMSGMVVDRX

SEQ ID NO: 37198 - protein, 42 aa, Artificial Sequence
  Non-cyclic GFR-binding peptide
  MOD_RES (6)..(7)..(41): Xaa is C or S
  MOD_RES (21)..(22)..(23)..(24)..(25): Xaa is A or G
  MOD_RES (26)..(27)..(28)..(29): Xaa is A or G or absent
GSAGPXXTPTKMSNITMQIMXXXXXXXXXLGEMSGMVVDRXG

SEQ ID NO: 37199 - protein, 34 aa, Artificial Sequence
  Non-cyclic GFR-binding peptide
  MOD_RES (1)..(2)..(34): Xaa is C or S
XXTPTKMSNITMQIMNDKQQIIIGEMSGMVVDRX

SEQ ID NO: 37200 - protein, 33 aa, Artificial Sequence
  Non-cyclic GFR-binding peptide
  MOD_RES (1)..(33): Xaa is C or S
XVPARLSNITIQIMDAANNVVIGEMSDMVVEAX

SEQ ID NO: 37201 - protein, 37 aa, Artificial Sequence
  Non-cyclic GFR-binding peptide
  MOD_RES (1)..(2)..(34)..(36): Xaa is C or S
XXTPTKMSNITMQIMNDKQQIILGEMSGMVVDRXGXS

SEQ ID NO: 37202 - protein, 37 aa, Artificial Sequence
  Non-cyclic GFR-binding peptide
  MOD_RES (1)..(35)..(37): Xaa is C or S
  MOD_RES (15)..(16)..(17)..(18)..(19): Xaa is A or G
  MOD_RES (20)..(21)..(22)..(23): Xaa is A or G or absent
XVPARLSNITIQIMXXXXXXXXXIGEMSDMVVEAXGX

SEQ ID NO: 37203 - protein, 35 aa, Artificial Sequence
  Non-cyclic GFR-binding peptide
  MOD_RES (1)..(35): Xaa is C or S
  MOD_RES (15)..(16)..(17)..(18)..(19): Xaa is A or G
  MOD_RES (20)..(21)..(22)..(23): Xaa is A or G or absent
XVPTRLSNITIQIMXXXXXXXXXLGEMSDMVVESX

SEQ ID NO: 37204 - protein, 35 aa, Artificial Sequence
  Non-cyclic GFR-binding peptide
  MOD_RES (1)..(35): Xaa is C or S
  MOD_RES (15)..(16)..(17)..(18)..(19): Xaa is A or G
  MOD_RES (20)..(21)..(22)..(23): Xaa is A or G or absent
XVPTRLSNITIQIMXXXXXXXXXIGEMSDMVVESX

SEQ ID NO: 37205 - protein, 33 aa, Artificial Sequence
  Non-cyclic GFR-binding peptide
  MOD_RES (1)..(33): Xaa is C or S
XVPARLSNITIQIMDAANNVVLGEMSDMVVEAX

SEQ ID NO: 37206 - protein, 37 aa, Artificial Sequence
  Non-cyclic GFR-binding peptide
  MOD_RES (3)..(4)..(35)..(37): Xaa is C or S
STXXAPVKTSNITMQIMDNGRVLLLGEMSMIVEEXGX

SEQ ID NO: 37207 - protein, 35 aa, Artificial Sequence
  Non-cyclic GFR-binding peptide
  MOD_RES (1)..(34): Xaa is C or S
  MOD_RES (15)..(16)..(17)..(18)..(19): Xaa is A or G
  MOD_RES (20)..(21)..(22)..(23): Xaa is A or G or absent
XVPQALSNITIQIMXXXXXXXXXLGEMSMIVRSXK

SEQ ID NO: 37208 - protein, 32 aa, Artificial Sequence
  Non-cyclic GFR-binding peptide
  MOD_RES (32)..(32): Xaa is C or S
VPTRLSNITIQIMDSANNVVLGEMSDMVVESX

SEQ ID NO: 37209 - protein, 39 aa, Artificial Sequence
  Non-cyclic GFR-binding peptide
  MOD_RES (4)..(5)..(37)..(39): Xaa is C or S
PPTXXVPTRLSNITIQIMDSANNVVIGEMSDMVVESXGX

SEQ ID NO: 37210 - protein, 39 aa, Artificial Sequence
  Non-cyclic GFR-binding peptide
  MOD_RES (3)..(4)..(36)..(38): Xaa is C or S
PTXXVPTRLSNITIQIMDSANNVVLGEMSDMVVESXGXR

SEQ ID NO: 37211 - protein, 36 aa, Artificial Sequence
  Non-cyclic GFR-binding peptide
  MOD_RES (3)..(4): Xaa is C or S
  MOD_RES (18)..(19)..(20)..(21)..(22): Xaa is A or G
  MOD_RES (23)..(24)..(25)..(26): Xaa is A or G or absent
GPXXTPTKMSNITMQIMXXXXXXXXXIGEMSGMVVD

SEQ ID NO: 37212 - protein, 36 aa, Artificial Sequence
  Non-cyclic GFR-binding peptide
  MOD_RES (1)..(2)..(33)..(35): Xaa is C or S
XXVPQDLSNITIQIMVGRTPKVLGEMSMVVKSXKXS

SEQ ID NO: 37213 - protein, 33 aa, Artificial Sequence
  Non-cyclic GFR-binding peptide
  MOD_RES (33)..(33): Xaa is C or S
  MOD_RES (14)..(15)..(16)..(17)..(18): Xaa is A or G
  MOD_RES (19)..(20)..(21)..(22): Xaa is A or G or absent
VPQDLSNITIQIMXXXXXXXXXLGEMSMVVKSX

SEQ ID NO: 37214 - protein, 35 aa, Artificial Sequence
  Non-cyclic GFR-binding peptide
  MOD_RES (2)..(3): Xaa is C or S
  MOD_RES (17)..(18)..(19)..(20)..(21): Xaa is A or G
  MOD_RES (22)..(23)..(24)..(25): Xaa is A or G or absent
TXXAPVKTSNITMQIMXXXXXXXXXIGEMSMIVEE

SEQ ID NO: 37215 - protein, 37 aa, Artificial Sequence
  Non-cyclic GFR-binding peptide
  MOD_RES (5)..(6): Xaa is C or S
TPPTXXVPTRLSNITIQIMDSANNVVLGEMSDMVVES

SEQ ID NO: 37216 - protein, 41 aa, Artificial Sequence
  Non-cyclic GFR-binding peptide
  MOD_RES (5)..(6)..(40): Xaa is C or S
  MOD_RES (20)..(21)..(22)..(23)..(24): Xaa is A or G
  MOD_RES (25)..(26)..(27)..(28): Xaa is A or G or absent
APASXXVPARLSNITIQIMXXXXXXXXXLGEMSDMVVEAXG

SEQ ID NO: 37217 - protein, 38 aa, Artificial Sequence
  Non-cyclic GFR-binding peptide
  MOD_RES (6)..(7): Xaa is C or S
STPPTXXVPTRLSNITIQIMDSANNVVIGEMSDMVVES

SEQ ID NO: 37218 - protein, 41 aa, Artificial Sequence
  Non-cyclic GFR-binding peptide
  MOD_RES (4)..(5)..(39)..(41): Xaa is C or S
  MOD_RES (19)..(20)..(21)..(22)..(23): Xaa is A or G
  MOD_RES (24)..(25)..(26)..(27): Xaa is A or G or absent
PKPXXAPTKLSNITVQIMXXXXXXXXXLGEMSNMVVRSXGX

SEQ ID NO: 37219 - protein, 35 aa, Artificial Sequence
  Non-cyclic GFR-binding peptide
  MOD_RES (1)..(2)..(35): Xaa is C or S
  MOD_RES (16)..(17)..(18)..(19)..(20): Xaa is A or G
  MOD_RES (21)..(22)..(23)..(24): Xaa is A or G or absent
XXAPVKTSNITMQIMXXXXXXXXXLGEMSMIVEEX

SEQ ID NO: 37220 - protein, 38 aa, Artificial Sequence
  Non-cyclic GFR-binding peptide
  MOD_RES (2)..(3)..(35)..(37): Xaa is C or S
TXXVPTRLSNITIQIMDSANNVVLGEMSDMVVESXGXR

SEQ ID NO: 37221 - protein, 37 aa, Artificial Sequence
  Non-cyclic GFR-binding peptide
  MOD_RES (4)..(5): Xaa is C or S
  MOD_RES (19)..(20)..(21)..(22)..(23): Xaa is A or G
  MOD_RES (24)..(25)..(26)..(27): Xaa is A or G or absent
AGPXXTPTKMSNITMQIMXXXXXXXXXIGEMSGMVVD

SEQ ID NO: 37222 - protein, 41 aa, Artificial Sequence
  Non-cyclic GFR-binding peptide
  MOD_RES (5)..(6)..(39)..(41): Xaa is C or S
  MOD_RES (20)..(21)..(22)..(23)..(24): Xaa is A or G
  MOD_RES (25)..(26)..(27)..(28): Xaa is A or G or absent
VPSTXXAPVKTSNITMQIMXXXXXXXXXIGEMSMIVEEXGX

SEQ ID NO: 37223 - protein, 34 aa, Artificial Sequence
  Non-cyclic GFR-binding peptide
  MOD_RES (1)..(2)..(34): Xaa is C or S
XXVPARLSNITIQIMDAANNVVLGEMSDMVVEAX

SEQ ID NO: 37224 - protein, 35 aa, Artificial Sequence
  Non-cyclic GFR-binding peptide
  MOD_RES (1)..(33)..(35): Xaa is C or S
XTPTKMSNITMQIMNDKQQIIIGEMSGMVVDRXGX

SEQ ID NO: 37225 - protein, 40 aa, Artificial Sequence
  Non-cyclic GFR-binding peptide
  MOD_RES (6)..(7)..(39): Xaa is C or S
GSAGPXXTPTKMSNITMQIMNDKQQIILGEMSGMVVDRXG

SEQ ID NO: 37226 - protein, 38 aa, Artificial Sequence
  Non-cyclic GFR-binding peptide
  MOD_RES (4)..(5)..(37): Xaa is C or S
PPTXXVPTRLSNITIQIMDSANNVVLGEMSDMVVESXG

SEQ ID NO: 37227 - protein, 37 aa, Artificial Sequence
  Non-cyclic GFR-binding peptide
  MOD_RES (4)..(5): Xaa is C or S
  MOD_RES (19)..(20)..(21)..(22)..(23): Xaa is A or G
  MOD_RES (24)..(25)..(26)..(27): Xaa is A or G or absent
PASXXVPARLSNITIQIMXXXXXXXXXIGEMSDMVVE

SEQ ID NO: 37228 - protein, 33 aa, Artificial Sequence
  Non-cyclic GFR-binding peptide
  MOD_RES (1)..(33): Xaa is C or S
XTPTKMSNITMQIMNDKQQIIIGEMSGMVVDRX

SEQ ID NO: 37229 - protein, 37 aa, Artificial Sequence
  Non-cyclic GFR-binding peptide
  MOD_RES (3)..(4)..(35)..(37): Xaa is C or S
SPXXVSQDLSNITIQIMIGKTPKILGEMSMIVKSXKX

SEQ ID NO: 37230 - protein, 40 aa, Artificial Sequence
  Non-cyclic GFR-binding peptide
  MOD_RES (4)..(5)..(39): Xaa is C or S
  MOD_RES (19)..(20)..(21)..(22)..(23): Xaa is A or G
  MOD_RES (24)..(25)..(26)..(27): Xaa is A or G or absent
PASXXVPARLSNITIQIMXXXXXXXXXLGEMSDMVVEAXG

SEQ ID NO: 37231 - protein, 38 aa, Artificial Sequence
  Non-cyclic GFR-binding peptide
  MOD_RES (2)..(3)..(36)..(38): Xaa is C or S
  MOD_RES (17)..(18)..(19)..(20)..(21): Xaa is A or G
  MOD_RES (22)..(23)..(24)..(25): Xaa is A or G or absent
PXXVSQDLSNITIQIMXXXXXXXXXLGEMSMIVKSXKX

SEQ ID NO: 37232 - protein, 35 aa, Artificial Sequence
  Non-cyclic GFR-binding peptide
  MOD_RES (32)..(34): Xaa is C or S
VPTRLSNITIQIMDSANNVVIGEMSDMVVESXGXR

SEQ ID NO: 37233 - protein, 40 aa, Artificial Sequence
  Non-cyclic GFR-binding peptide
  MOD_RES (3)..(4)..(38)..(40): Xaa is C or S
  MOD_RES (18)..(19)..(20)..(21)..(22): Xaa is A or G
  MOD_RES (23)..(24)..(25)..(26): Xaa is A or G or absent
ASXXVPARLSNITIQIMXXXXXXXXXIGEMSDMVVEAXGX

SEQ ID NO: 37234 - protein, 34 aa, Artificial Sequence
  Non-cyclic GFR-binding peptide
  MOD_RES (34)..(34): Xaa is C or S
  MOD_RES (14)..(15)..(16)..(17)..(18): Xaa is A or G
  MOD_RES (19)..(20)..(21)..(22): Xaa is A or G or absent
VPTRLSNITIQIMXXXXXXXXXIGEMSDMVVESX

SEQ ID NO: 37235 - protein, 40 aa, Artificial Sequence
  Non-cyclic GFR-binding peptide
  MOD_RES (3)..(4)..(38)..(40): Xaa is C or S
  MOD_RES (18)..(19)..(20)..(21)..(22): Xaa is A or G
  MOD_RES (23)..(24)..(25)..(26): Xaa is A or G or absent
GPXXTPTKMSNITMQIMXXXXXXXXXLGEMSGMVVDRXGX

SEQ ID NO: 37236 - protein, 36 aa, Artificial Sequence
  Non-cyclic GFR-binding peptide
  MOD_RES (1)..(34)..(36): Xaa is C or S
  MOD_RES (15)..(16)..(17)..(18)..(19): Xaa is A or G
  MOD_RES (20)..(21)..(22)..(23): Xaa is A or G or absent
XAPVKTSNITMQIMXXXXXXXXXIGEMSMIVEEXGX

SEQ ID NO: 37237 - protein, 43 aa, Artificial Sequence
  Non-cyclic GFR-binding peptide
  MOD_RES (6)..(7)..(40)..(42): Xaa is C or S
  MOD_RES (21)..(22)..(23)..(24)..(25): Xaa is A or G
  MOD_RES (26)..(27)..(28)..(29): Xaa is A or G or absent
ASASPXXVPQDLSNITIQIMXXXXXXXXXLGEMSMVVKSXKXS

SEQ ID NO: 37238 - protein, 33 aa, Artificial Sequence
  Non-cyclic GFR-binding peptide
  MOD_RES (1)..(32): Xaa is C or S
XAPVKTSNITMQIMDNGRVLLIGEMSMIVEEXG

SEQ ID NO: 37239 - protein, 40 aa, Artificial Sequence
  Non-cyclic GFR-binding peptide
  MOD_RES (5)..(6)..(37)..(39): Xaa is C or S
SAAPXXVPQALSNITIQIMVGRKPKVLGEMSMIVRSXKXS

SEQ ID NO: 37240 - protein, 37 aa, Artificial Sequence
  Non-cyclic GFR-binding peptide
  MOD_RES (6)..(7): Xaa is C or S
STPPTXXVPTRLSNITIQIMDSANNVVLGEMSDMVVE

SEQ ID NO: 37241 - protein, 38 aa, Artificial Sequence
  Non-cyclic GFR-binding peptide
  MOD_RES (3)..(4)..(38): Xaa is C or S
  MOD_RES (18)..(19)..(20)..(21)..(22): Xaa is A or G
  MOD_RES (23)..(24)..(25)..(26): Xaa is A or G or absent
GPXXTPTKMSNITMQIMXXXXXXXXXLGEMSGMVVDRX

SEQ ID NO: 37242 - protein, 43 aa, Artificial Sequence
  Non-cyclic GFR-binding peptide
  MOD_RES (6)..(7)..(41)..(43): Xaa is C or S
  MOD_RES (21)..(22)..(23)..(24)..(25): Xaa is A or G
  MOD_RES (26)..(27)..(28)..(29): Xaa is A or G or absent
HVPKPXXAPTKLSNITVQIMXXXXXXXXXIGEMSNMVVRSXGX

SEQ ID NO: 37243 - protein, 32 aa, Artificial Sequence
  Non-cyclic GFR-binding peptide
  MOD_RES (31)..(31): Xaa is C or S
VPQDLSNITIQIMVGRTPKVLGEMSMVVKSXK

SEQ ID NO: 37244 - protein, 37 aa, Artificial Sequence
  Non-cyclic GFR-binding peptide
  MOD_RES (3)..(4)..(37): Xaa is C or S
  MOD_RES (18)..(19)..(20)..(21)..(22): Xaa is A or G
  MOD_RES (23)..(24)..(25)..(26): Xaa is A or G or absent
APXXVPQALSNITIQIMXXXXXXXXXLGEMSMIVRSX

SEQ ID NO: 37245 - protein, 39 aa, Artificial Sequence
  Non-cyclic GFR-binding peptide
  MOD_RES (4)..(5)..(37)..(39): Xaa is C or S
PKPXXAPTKLSNITVQIMDDSSNVILGEMSNMVVRSXGX

SEQ ID NO: 37246 - protein, 38 aa, Artificial Sequence
  Non-cyclic GFR-binding peptide
  MOD_RES (2)..(3)..(37): Xaa is C or S
  MOD_RES (17)..(18)..(19)..(20)..(21): Xaa is A or G
  MOD_RES (22)..(23)..(24)..(25): Xaa is A or G or absent
TXXVPTRLSNITIQIMXXXXXXXXXLGEMSDMVVESXG

SEQ ID NO: 37247 - protein, 38 aa, Artificial Sequence
  Non-cyclic GFR-binding peptide
  MOD_RES (4)..(5)..(38): Xaa is C or S
  MOD_RES (19)..(20)..(21)..(22)..(23): Xaa is A or G
  MOD_RES (24)..(25)..(26)..(27): Xaa is A or G or absent
AAPXXVPQALSNITIQIMXXXXXXXXXLGEMSMIVRSX

SEQ ID NO: 37248 - protein, 35 aa, Artificial Sequence
  Non-cyclic GFR-binding peptide
  MOD_RES (4)..(5): Xaa is C or S
ASPXXVPQDLSNITIQIMVGRTPKVLGEMSMVVKS

SEQ ID NO: 37249 - protein, 34 aa, Artificial Sequence
  Non-cyclic GFR-binding peptide
  MOD_RES (1)..(1): Xaa is C or S
  MOD_RES (15)..(16)..(17)..(18)..(19): Xaa is A or G
  MOD_RES (20)..(21)..(22)..(23): Xaa is A or G or absent
XVPTRLSNITIQIMXXXXXXXXXIGEMSDMVVES

SEQ ID NO: 37250 - protein, 37 aa, Artificial Sequence
  Non-cyclic GFR-binding peptide
  MOD_RES (6)..(7): Xaa is C or S
STPPTXXVPTRLSNITIQIMDSANNVVIGEMSDMVVE

SEQ ID NO: 37251 - protein, 34 aa, Artificial Sequence
  Non-cyclic GFR-binding peptide
  MOD_RES (33)..(33): Xaa is C or S
  MOD_RES (14)..(15)..(16)..(17)..(18): Xaa is A or G
  MOD_RES (19)..(20)..(21)..(22): Xaa is A or G or absent
VPQALSNITIQIMXXXXXXXXXLGEMSMIVRSXK

SEQ ID NO: 37252 - protein, 37 aa, Artificial Sequence
  Non-cyclic GFR-binding peptide
  MOD_RES (31)..(32): Xaa is C or S
DVVMGQYNKLIIQQKDNLYLMSIASMKTPTXXPGASG

SEQ ID NO: 37253 - protein, 39 aa, Artificial Sequence
  Non-cyclic GFR-binding peptide
  MOD_RES (1)..(3)..(37)..(38): Xaa is C or S
  MOD_RES (15)..(16)..(17)..(18)..(19): Xaa is A or G
  MOD_RES (20)..(21)..(22)..(23): Xaa is A or G or absent
XGXRDVVMGQYNKLXXXXXXXXXLYLMSIASMKTPTXXP

SEQ ID NO: 37254 - protein, 37 aa, Artificial Sequence
  Non-cyclic GFR-binding peptide
  MOD_RES (33)..(34): Xaa is C or S
  MOD_RES (11)..(12)..(13)..(14)..(15): Xaa is A or G
  MOD_RES (16)..(17)..(18)..(19): Xaa is A or G or absent
SVAMGQYNKLXXXXXXXXXLYLISIASLKTPVXXAKS

SEQ ID NO: 37255 - protein, 36 aa, Artificial Sequence
  Non-cyclic GFR-binding peptide
  MOD_RES (1)..(35)..(36): Xaa is C or S
  MOD_RES (13)..(14)..(15)..(16)..(17): Xaa is A or G
  MOD_RES (18)..(19)..(20)..(21): Xaa is A or G or absent
XSEVTMNQYNKLXXXXXXXXXLYLISIASMKEPVXX

SEQ ID NO: 37256 - protein, 33 aa, Artificial Sequence
  Non-cyclic GFR-binding peptide
  MOD_RES (1)..(1): Xaa is C or S
  MOD_RES (12)..(13)..(14)..(15)..(16): Xaa is A or G
  MOD_RES (17)..(18)..(19)..(20): Xaa is A or G or absent
XEEVIMQYNKLXXXXXXXXXLYLMSIASTKVPA

SEQ ID NO: 37257 - protein, 38 aa, Artificial Sequence
  Non-cyclic GFR-binding peptide
  MOD_RES (2)..(4)..(36)..(37): Xaa is C or S
RXAXSEVTMNQYNKLVVNKNEDLYLISIASMKEPVXXP

SEQ ID NO: 37258 - protein, 39 aa, Artificial Sequence
  Non-cyclic GFR-binding peptide
  MOD_RES (33)..(34): Xaa is C or S
  MOD_RES (11)..(12)..(13)..(14)..(15): Xaa is A or G
  MOD_RES (16)..(17)..(18)..(19): Xaa is A or G or absent
SVAMGQYNKLXXXXXXXXXLYLISIASLKTPVXXAKSAK

SEQ ID NO: 37259 - protein, 40 aa, Artificial Sequence
  Non-cyclic GFR-binding peptide
  MOD_RES (2)..(4)..(38)..(39): Xaa is C or S
  MOD_RES (16)..(17)..(18)..(19)..(20): Xaa is A or G
  MOD_RES (21)..(22)..(23)..(24): Xaa is A or G or absent
RXGXESVAMGQYNKLXXXXXXXXXLYLISIASLKTPVXXA

SEQ ID NO: 37260 - protein, 40 aa, Artificial Sequence
  Non-cyclic GFR-binding peptide
  MOD_RES (1)..(35)..(36): Xaa is C or S
  MOD_RES (13)..(14)..(15)..(16)..(17): Xaa is A or G
  MOD_RES (18)..(19)..(20)..(21): Xaa is A or G or absent
XESVAMGQYNKLXXXXXXXXXLYLISIASLKTPVXXAKSA

SEQ ID NO: 37261 - protein, 37 aa, Artificial Sequence
  Non-cyclic GFR-binding peptide
  MOD_RES (1)..(3)..(37): Xaa is C or S
  MOD_RES (15)..(16)..(17)..(18)..(19): Xaa is A or G
  MOD_RES (20)..(21)..(22)..(23): Xaa is A or G or absent
XGXRDVVMGQYNKLXXXXXXXXXLYLMSIASMKTPTX

SEQ ID NO: 37262 - protein, 41 aa, Artificial Sequence
  Non-cyclic GFR-binding peptide
  MOD_RES (1)..(3)..(37)..(38): Xaa is C or S
  MOD_RES (15)..(16)..(17)..(18)..(19): Xaa is A or G
  MOD_RES (20)..(21)..(22)..(23): Xaa is A or G or absent
XGXAEVVMDQYNKLXXXXXXXXXLYLISIASLRAPVXXSAP

SEQ ID NO: 37263 - protein, 36 aa, Artificial Sequence
  Non-cyclic GFR-binding peptide
  MOD_RES (2)..(34)..(35): Xaa is C or S
AXSEVTMNQYNKLVVNKNEDLYLISIASMKEPVXXP

SEQ ID NO: 37264 - protein, 33 aa, Artificial Sequence
  Non-cyclic GFR-binding peptide
  MOD_RES (32)..(33): Xaa is C or S
RDVVMGQYNKLIIQQKDNLYLMSIASMKTPTXX

SEQ ID NO: 37265 - protein, 34 aa, Artificial Sequence
  Non-cyclic GFR-binding peptide
  MOD_RES (1)..(34): Xaa is C or S
  MOD_RES (12)..(13)..(14)..(15)..(16): Xaa is A or G
  MOD_RES (17)..(18)..(19)..(20): Xaa is A or G or absent
XEEVIMQYNKLXXXXXXXXXLYLMSIASTKVPAX

SEQ ID NO: 37266 - protein, 36 aa, Artificial Sequence
  Non-cyclic GFR-binding peptide
  MOD_RES (1)..(33)..(34): Xaa is C or S
XSEVTMNQYNKLVVNKNEDLYLISIASMKEPVXXPE

SEQ ID NO: 37267 - protein, 35 aa, Artificial Sequence
  Non-cyclic GFR-binding peptide
  MOD_RES (32)..(33): Xaa is C or S
SEVTMNQYNKLVVNKNEDLYLISIASMKEPVXXPE

SEQ ID NO: 37268 - protein, 41 aa, Artificial Sequence
  Non-cyclic GFR-binding peptide
  MOD_RES (2)..(36)..(37): Xaa is C or S
  MOD_RES (14)..(15)..(16)..(17)..(18): Xaa is A or G
  MOD_RES (19)..(20)..(21)..(22): Xaa is A or G or absent
GXAEVVMDQYNKLXXXXXXXXXLYLISIASLRAPVXXSAPA

SEQ ID NO: 37269 - protein, 34 aa, Artificial Sequence
  Non-cyclic GFR-binding peptide
  MOD_RES (1)..(32)..(33): Xaa is C or S
XEEVIMQYNKLLLVRGNDLYLMSIASTKVPAXXT

SEQ ID NO: 37270 - protein, 34 aa, Artificial Sequence
  Non-cyclic GFR-binding peptide
  MOD_RES (32)..(33): Xaa is C or S
AEVVMDQYNKLVVNNAADLYLISIASLRAPVXXS

SEQ ID NO: 37271 - protein, 38 aa, Artificial Sequence
  Non-cyclic GFR-binding peptide
  MOD_RES (33)..(34): Xaa is C or S
  MOD_RES (11)..(12)..(13)..(14)..(15): Xaa is A or G
  MOD_RES (16)..(17)..(18)..(19): Xaa is A or G or absent
EEVIMQYNKLXXXXXXXXXLYLMSIASTKVPAXXTSPV

SEQ ID NO: 37272 - protein, 38 aa, Artificial Sequence
  Non-cyclic GFR-binding peptide
  MOD_RES (2)..(4)..(38): Xaa is C or S
  MOD_RES (16)..(17)..(18)..(19)..(20): Xaa is A or G
  MOD_RES (21)..(22)..(23)..(24): Xaa is A or G or absent
RXAXSEVTMNQYNKLXXXXXXXXXLYLISIASMKEPVX

SEQ ID NO: 37273 - protein, 35 aa, Artificial Sequence
  Non-cyclic GFR-binding peptide
  MOD_RES (2)..(2): Xaa is C or S
  MOD_RES (14)..(15)..(16)..(17)..(18): Xaa is A or G
  MOD_RES (19)..(20)..(21)..(22): Xaa is A or G or absent
GXAEVVMDQYNKLXXXXXXXXXLYLISIASLRAPV

SEQ ID NO: 37274 - protein, 38 aa, Artificial Sequence
  Non-cyclic GFR-binding peptide
  MOD_RES (1)..(33)..(34): Xaa is C or S
XAEVVMDQYNKLVVNNAADLYLISIASLRAPVXXSAPA

SEQ ID NO: 37275 - protein, 42 aa, Artificial Sequence
  Non-cyclic GFR-binding peptide
  MOD_RES (2)..(36)..(37): Xaa is C or S
  MOD_RES (14)..(15)..(16)..(17)..(18): Xaa is A or G
  MOD_RES (19)..(20)..(21)..(22): Xaa is A or G or absent
GXAEVVMDQYNKLXXXXXXXXXLYLISIASLRAPVXXSAPAA

SEQ ID NO: 37276 - protein, 34 aa, Artificial Sequence
  Non-cyclic GFR-binding peptide
  MOD_RES (1)..(33)..(34): Xaa is C or S
XESVAMGQYNKLYTVVGKDLYLISIASLKTPVXX

SEQ ID NO: 37277 - protein, 40 aa, Artificial Sequence
  Non-cyclic GFR-binding peptide
  MOD_RES (34)..(35): Xaa is C or S
  MOD_RES (12)..(13)..(14)..(15)..(16): Xaa is A or G
  MOD_RES (17)..(18)..(19)..(20): Xaa is A or G or absent
AEVVMDQYNKLXXXXXXXXXLYLISIASLRAPVXXSAPAA

SEQ ID NO: 37278 - protein, 36 aa, Artificial Sequence
  Non-cyclic GFR-binding peptide
  MOD_RES (2)..(35)..(36): Xaa is C or S
  MOD_RES (13)..(14)..(15)..(16)..(17): Xaa is A or G
  MOD_RES (18)..(19)..(20)..(21): Xaa is A or G or absent
GXEEVIMQYNKLXXXXXXXXXLYLMSIASTKVPAXX

SEQ ID NO: 37279 - protein, 35 aa, Artificial Sequence
  Non-cyclic GFR-binding peptide
  MOD_RES (1)..(33)..(34): Xaa is C or S
XRDVVMGQYNKLIIQQKDNLYLMSIASMKTPTXXP

SEQ ID NO: 37280 - protein, 39 aa, Artificial Sequence
  Non-cyclic GFR-binding peptide
  MOD_RES (2)..(34)..(35): Xaa is C or S
GXESVAMGQYNKLYTVVGKDLYLISIASLKTPVXXAKSA

SEQ ID NO: 37281 - protein, 37 aa, Artificial Sequence
  Non-cyclic GFR-binding peptide
  MOD_RES (1)..(34)..(35): Xaa is C or S
  MOD_RES (12)..(13)..(14)..(15)..(16): Xaa is A or G
  MOD_RES (17)..(18)..(19)..(20): Xaa is A or G or absent
XEEVIMQYNKLXXXXXXXXXLYLMSIASTKVPAXXTS

SEQ ID NO: 37282 - protein, 37 aa, Artificial Sequence
  Non-cyclic GFR-binding peptide
  MOD_RES (2)..(36)..(37): Xaa is C or S
  MOD_RES (14)..(15)..(16)..(17)..(18): Xaa is A or G
  MOD_RES (19)..(20)..(21)..(22): Xaa is A or G or absent
GXRDVVMGQYNKLXXXXXXXXXLYLMSIASMKTPTXX

SEQ ID NO: 37283 - protein, 33 aa, Artificial Sequence
  Non-cyclic GFR-binding peptide
  MOD_RES (2)..(33): Xaa is C or S
GXEEVIMQYNKLLLVRGNDLYLMSIASTKVPAX

SEQ ID NO: 37284 - protein, 35 aa, Artificial Sequence
  Non-cyclic GFR-binding peptide
  MOD_RES (32)..(33): Xaa is C or S
RDVVMGQYNKLIIQQKDNLYLMSIASMKTPTXXPG

SEQ ID NO: 37285 - protein, 38 aa, Artificial Sequence
  Non-cyclic GFR-binding peptide
  MOD_RES (1)..(3)..(37)..(38): Xaa is C or S
  MOD_RES (15)..(16)..(17)..(18)..(19): Xaa is A or G
  MOD_RES (20)..(21)..(22)..(23): Xaa is A or G or absent
XGXESVAMGQYNKLXXXXXXXXXLYLISIASLKTPVXX

SEQ ID NO: 37286 - protein, 37 aa, Artificial Sequence
  Non-cyclic GFR-binding peptide
  MOD_RES (2)..(36)..(37): Xaa is C or S
  MOD_RES (14)..(15)..(16)..(17)..(18): Xaa is A or G
  MOD_RES (19)..(20)..(21)..(22): Xaa is A or G or absent
GXAEVVMDQYNKLXXXXXXXXXLYLISIASLRAPVXX

SEQ ID NO: 37287 - protein, 36 aa, Artificial Sequence
  Non-cyclic GFR-binding peptide
  MOD_RES (33)..(34): Xaa is C or S
  MOD_RES (11)..(12)..(13)..(14)..(15): Xaa is A or G
  MOD_RES (16)..(17)..(18)..(19): Xaa is A or G or absent
SVAMGQYNKLXXXXXXXXXLYLISIASLKTPVXXAK

SEQ ID NO: 37288 - protein, 39 aa, Artificial Sequence
  Non-cyclic GFR-binding peptide
  MOD_RES (2)..(34)..(35): Xaa is C or S
GXRDVVMGQYNKLIIQQKDNLYLMSIASMKTPTXXPGAS

SEQ ID NO: 37289 - protein, 43 aa, Artificial Sequence
  Non-cyclic GFR-binding peptide
  MOD_RES (1)..(3)..(37)..(38): Xaa is C or S
  MOD_RES (15)..(16)..(17)..(18)..(19): Xaa is A or G
  MOD_RES (20)..(21)..(22)..(23): Xaa is A or G or absent
XGXSRVVMNQYNKLXXXXXXXXXLYLVSIASLKTPAXXPKPVH

SEQ ID NO: 37290 - protein, 32 aa, Artificial Sequence
  Non-cyclic GFR-binding peptide
  MOD_RES (11)..(12)..(13)..(14)..(15): Xaa is A or G
  MOD_RES (16)..(17)..(18)..(19): Xaa is A or G or absent
DVVMGQYNKLXXXXXXXXXLYLMSIASMKTPT

SEQ ID NO: 37291 - protein, 34 aa, Artificial Sequence
  Non-cyclic GFR-binding peptide
  MOD_RES (1)..(33)..(34): Xaa is C or S
XSEVTMNQYNKLVVNKNEDLYLISIASMKEPVXX

SEQ ID NO: 37292 - protein, 40 aa, Artificial Sequence
  Non-cyclic GFR-binding peptide
  MOD_RES (2)..(34)..(35): Xaa is C or S
GXRDVVMGQYNKLIIQQKDNLYLMSIASMKTPTXXPGASG

SEQ ID NO: 37293 - protein, 41 aa, Artificial Sequence
  Non-cyclic GFR-binding peptide
  MOD_RES (2)..(4)..(38)..(39): Xaa is C or S
  MOD_RES (16)..(17)..(18)..(19)..(20): Xaa is A or G
  MOD_RES (21)..(22)..(23)..(24): Xaa is A or G or absent
RXGXESVAMGQYNKLXXXXXXXXXLYLISIASLKTPVXXAK

SEQ ID NO: 37294 - protein, 35 aa, Artificial Sequence
  Non-cyclic GFR-binding peptide
  MOD_RES (1)..(3)..(35): Xaa is C or S
XAXSEVTMNQYNKLVVNKNEDLYLISIASMKEPVX

SEQ ID NO: 37295 - protein, 40 aa, Artificial Sequence
  Non-cyclic GFR-binding peptide
  MOD_RES (34)..(35): Xaa is C or S
  MOD_RES (12)..(13)..(14)..(15)..(16): Xaa is A or G
  MOD_RES (17)..(18)..(19)..(20): Xaa is A or G or absent
SRVVMNQYNKLXXXXXXXXXLYLVSIASLKTPAXXPKPVH

SEQ ID NO: 37296 - protein, 34 aa, Artificial Sequence
  Non-cyclic GFR-binding peptide
  MOD_RES (32)..(33): Xaa is C or S
ESVAMGQYNKLYTVVGKDLYLISIASLKTPVXXA

SEQ ID NO: 37297 - protein, 40 aa, Artificial Sequence
  Non-cyclic GFR-binding peptide
  MOD_RES (2)..(4)..(38)..(39): Xaa is C or S
  MOD_RES (16)..(17)..(18)..(19)..(20): Xaa is A or G
  MOD_RES (21)..(22)..(23)..(24): Xaa is A or G or absent
SXGXRDVVMGQYNKLXXXXXXXXXLYLMSIASMKTPTXXP

SEQ ID NO: 37298 - protein, 36 aa, Artificial Sequence
  Non-cyclic GFR-binding peptide
  MOD_RES (32)..(33): Xaa is C or S
AEVVMDQYNKLVVNNAADLYLISIASLRAPVXXSAP

SEQ ID NO: 37299 - protein, 32 aa, Artificial Sequence
  Non-cyclic GFR-binding peptide
  MOD_RES (11)..(12)..(13)..(14)..(15): Xaa is A or G
  MOD_RES (16)..(17)..(18)..(19): Xaa is A or G or absent
SVAMGQYNKLXXXXXXXXXLYLISIASLKTPV

SEQ ID NO: 37300 - protein, 39 aa, Artificial Sequence
  Non-cyclic GFR-binding peptide
  MOD_RES (2)..(36)..(37): Xaa is C or S
  MOD_RES (14)..(15)..(16)..(17)..(18): Xaa is A or G
  MOD_RES (19)..(20)..(21)..(22): Xaa is A or G or absent
GXESVAMGQYNKLXXXXXXXXXLYLISIASLKTPVXXAK

SEQ ID NO: 37301 - protein, 38 aa, Artificial Sequence
  Non-cyclic GFR-binding peptide
  MOD_RES (1)..(32)..(33): Xaa is C or S
XEEVIMQYNKLLLVRGNDLYLMSIASTKVPAXXTSPVR

SEQ ID NO: 37302 - protein, 36 aa, Artificial Sequence
  Non-cyclic GFR-binding peptide
  MOD_RES (1)..(3)..(35)..(36): Xaa is C or S
XGXAEVVMDQYNKLVVNNAADLYLISIASLRAPVXX

SEQ ID NO: 37303 - protein, 41 aa, Artificial Sequence
  Non-cyclic GFR-binding peptide
  MOD_RES (1)..(3)..(35)..(36): Xaa is C or S
XGXAEVVMDQYNKLVVNNAADLYLISIASLRAPVXXSAPAA

SEQ ID NO: 37304 - protein, 38 aa, Artificial Sequence
  Non-cyclic GFR-binding peptide
  MOD_RES (2)..(4)..(37)..(38): Xaa is C or S
  MOD_RES (15)..(16)..(17)..(18)..(19): Xaa is A or G
  MOD_RES (20)..(21)..(22)..(23): Xaa is A or G or absent
LXGXEEVIMQYNKLXXXXXXXXXLYLMSIASTKVPAXX

SEQ ID NO: 37305 - protein, 35 aa, Artificial Sequence
  Non-cyclic GFR-binding peptide
  MOD_RES (1)..(35): Xaa is C or S
  MOD_RES (13)..(14)..(15)..(16)..(17): Xaa is A or G
  MOD_RES (18)..(19)..(20)..(21): Xaa is A or G or absent
XSEVTMNQYNKLXXXXXXXXXLYLISIASMKEPVX

SEQ ID NO: 37306 - protein, 34 aa, Artificial Sequence
  Non-cyclic GFR-binding peptide
  MOD_RES (1)..(3): Xaa is C or S
XGXRDVVMGQYNKLIIQQKDNLYLMSIASMKTPT

SEQ ID NO: 37307 - protein, 38 aa, Artificial Sequence
  Non-cyclic GFR-binding peptide
  MOD_RES (2)..(34)..(35): Xaa is C or S
AXSEVTMNQYNKLVVNKNEDLYLISIASMKEPVXXPEP

SEQ ID NO: 37308 - protein, 34 aa, Artificial Sequence
  Non-cyclic GFR-binding peptide
  MOD_RES (2)..(34): Xaa is C or S
AXSEVTMNQYNKLVVNKNEDLYLISIASMKEPVX

SEQ ID NO: 37309 - protein, 42 aa, Artificial Sequence
  Non-cyclic GFR-binding peptide
  MOD_RES (1)..(3)..(37)..(38): Xaa is C or S
  MOD_RES (15)..(16)..(17)..(18)..(19): Xaa is A or G
  MOD_RES (20)..(21)..(22)..(23): Xaa is A or G or absent
XAXSEVTMNQYNKLXXXXXXXXXLYLISIASMKEPVXXPEPI

SEQ ID NO: 37310 - protein, 37 aa, Artificial Sequence
  Non-cyclic GFR-binding peptide
  MOD_RES (2)..(33)..(34): Xaa is C or S
GXEEVIMQYNKLLLVRGNDLYLMSIASTKVPAXXTSP

SEQ ID NO: 37311 - protein, 34 aa, Artificial Sequence
  Non-cyclic GFR-binding peptide
  MOD_RES (1)..(1): Xaa is C or S
  MOD_RES (13)..(14)..(15)..(16)..(17): Xaa is A or G
  MOD_RES (18)..(19)..(20)..(21): Xaa is A or G or absent
XRDVVMGQYNKLXXXXXXXXXLYLMSIASMKTPT

SEQ ID NO: 37312 - protein, 37 aa, Artificial Sequence
  Non-cyclic GFR-binding peptide
  MOD_RES (1)..(3)..(37): Xaa is C or S
  MOD_RES (15)..(16)..(17)..(18)..(19): Xaa is A or G
  MOD_RES (20)..(21)..(22)..(23): Xaa is A or G or absent
XAXSEVTMNQYNKLXXXXXXXXXLYLISIASMKEPVX

SEQ ID NO: 37313 - protein, 39 aa, Artificial Sequence
  Non-cyclic GFR-binding peptide
  MOD_RES (2)..(36)..(37): Xaa is C or S
  MOD_RES (14)..(15)..(16)..(17)..(18): Xaa is A or G
  MOD_RES (19)..(20)..(21)..(22): Xaa is A or G or absent
AXSEVTMNQYNKLXXXXXXXXXLYLISIASMKEPVXXPE

SEQ ID NO: 37314 - protein, 34 aa, Artificial Sequence
  Non-cyclic GFR-binding peptide
  MOD_RES (2)..(33)..(34): Xaa is C or S
GXEEVIMQYNKLLLVRGNDLYLMSIASTKVPAXX

SEQ ID NO: 37315 - protein, 32 aa, Artificial Sequence
  Non-cyclic GFR-binding peptide
  MOD_RES (1)..(1): Xaa is C or S
XAEVVMDQYNKLVVNNAADLYLISIASLRAPV

SEQ ID NO: 37316 - protein, 36 aa, Artificial Sequence
  Non-cyclic GFR-binding peptide
  MOD_RES (1)..(35)..(36): Xaa is C or S
  MOD_RES (13)..(14)..(15)..(16)..(17): Xaa is A or G
  MOD_RES (18)..(19)..(20)..(21): Xaa is A or G or absent
XAEVVMDQYNKLXXXXXXXXXLYLISIASLRAPVXX

SEQ ID NO: 37317 - protein, 34 aa, Artificial Sequence
  Non-cyclic GFR-binding peptide
  MOD_RES (33)..(34): Xaa is C or S
  MOD_RES (11)..(12)..(13)..(14)..(15): Xaa is A or G
  MOD_RES (16)..(17)..(18)..(19): Xaa is A or G or absent
DVVMGQYNKLXXXXXXXXXLYLMSIASMKTPTXX

SEQ ID NO: 37318 - protein, 42 aa, Artificial Sequence
  Non-cyclic GFR-binding peptide
  MOD_RES (1)..(3)..(37)..(38): Xaa is C or S
  MOD_RES (15)..(16)..(17)..(18)..(19): Xaa is A or G
  MOD_RES (20)..(21)..(22)..(23): Xaa is A or G or absent
XGXAEVVMDQYNKLXXXXXXXXXLYLISIASLRAPVXXSAPA

SEQ ID NO: 37319 - protein, 39 aa, Artificial Sequence
  Non-cyclic GFR-binding peptide
  MOD_RES (1)..(33)..(34): Xaa is C or S
XSRVVMNQYNKLIVNSSDDLYLVSIASLKTPAXXPKPVH

SEQ ID NO: 37320 - protein, 39 aa, Artificial Sequence
  Non-cyclic GFR-binding peptide
  MOD_RES (1)..(3)..(35)..(36): Xaa is C or S
XGXAEVVMDQYNKLVVNNAADLYLISIASLRAPVXXSAP

SEQ ID NO: 37321 - protein, 35 aa, Artificial Sequence
  Non-cyclic GFR-binding peptide
  MOD_RES (2)..(4): Xaa is C or S
SXGXRDVVMGQYNKLIIQQKDNLYLMSIASMKTPT

SEQ ID NO: 37322 - protein, 37 aa, Artificial Sequence
  Non-cyclic GFR-binding peptide
  MOD_RES (2)..(34)..(35): Xaa is C or S
GXAEVVMDQYNKLVVNNAADLYLISIASLRAPVXXSA

SEQ ID NO: 37323 - protein, 30 aa, Artificial Sequence
  Non-cyclic GFR-binding peptide
SVAMGQYNKLYTVVGKDLYLISIASLKTPV

SEQ ID NO: 37324 - protein, 41 aa, Artificial Sequence
  Non-cyclic GFR-binding peptide
  MOD_RES (1)..(35)..(36): Xaa is C or S
  MOD_RES (13)..(14)..(15)..(16)..(17): Xaa is A or G
  MOD_RES (18)..(19)..(20)..(21): Xaa is A or G or absent
XRDVVMGQYNKLXXXXXXXXXLYLMSIASMKTPTXXPGASG

SEQ ID NO: 37325 - protein, 33 aa, Artificial Sequence
  Non-cyclic GFR-binding peptide
  MOD_RES (33)..(33): Xaa is C or S
  MOD_RES (11)..(12)..(13)..(14)..(15): Xaa is A or G
  MOD_RES (16)..(17)..(18)..(19): Xaa is A or G or absent
DVVMGQYNKLXXXXXXXXXLYLMSIASMKTPTX

SEQ ID NO: 37326 - protein, 36 aa, Artificial Sequence
  Non-cyclic GFR-binding peptide
  MOD_RES (1)..(3): Xaa is C or S
  MOD_RES (15)..(16)..(17)..(18)..(19): Xaa is A or G
  MOD_RES (20)..(21)..(22)..(23): Xaa is A or G or absent
XGXESVAMGQYNKLXXXXXXXXXLYLISIASLKTPV

SEQ ID NO: 37327 - protein, 37 aa, Artificial Sequence
  Non-cyclic GFR-binding peptide
  MOD_RES (32)..(33): Xaa is C or S
ESVAMGQYNKLYTVVGKDLYLISIASLKTPVXXAKSA

SEQ ID NO: 37328 - protein, 37 aa, Artificial Sequence
  Non-cyclic GFR-binding peptide
  MOD_RES (2)..(4)..(35)..(36): Xaa is C or S
LXGXEEVIMQYNKLLLVRGNDLYLMSIASTKVPAXXT

SEQ ID NO: 37329 - protein, 37 aa, Artificial Sequence
  Non-cyclic GFR-binding peptide
  MOD_RES (2)..(4): Xaa is C or S
  MOD_RES (16)..(17)..(18)..(19)..(20): Xaa is A or G
  MOD_RES (21)..(22)..(23)..(24): Xaa is A or G or absent
RXGXAEVVMDQYNKLXXXXXXXXXLYLISIASLRAPV

SEQ ID NO: 37330 - protein, 39 aa, Artificial Sequence
  Non-cyclic GFR-binding peptide
  MOD_RES (2)..(4)..(35)..(36): Xaa is C or S
LXGXEEVIMQYNKLLLVRGNDLYLMSIASTKVPAXXTSP

SEQ ID NO: 37331 - protein, 35 aa, Artificial Sequence
  Non-cyclic GFR-binding peptide
  MOD_RES (1)..(33)..(34): Xaa is C or S
XESVAMGQYNKLYTVVGKDLYLISIASLKTPVXXA

SEQ ID NO: 37332 - protein, 36 aa, Artificial Sequence
  Non-cyclic GFR-binding peptide
  MOD_RES (1)..(32)..(33): Xaa is C or S
XEEVIMQYNKLLLVRGNDLYLMSIASTKVPAXXTSP

SEQ ID NO: 37333 - protein, 35 aa, Artificial Sequence
  Non-cyclic GFR-binding peptide
  MOD_RES (1)..(35): Xaa is C or S
  MOD_RES (13)..(14)..(15)..(16)..(17): Xaa is A or G
  MOD_RES (18)..(19)..(20)..(21): Xaa is A or G or absent
XAEVVMDQYNKLXXXXXXXXXLYLISIASLRAPVX

SEQ ID NO: 37334 - protein, 31 aa, Artificial Sequence
  Non-cyclic GFR-binding peptide
  MOD_RES (31)..(31): Xaa is C or S
DVVMGQYNKLIIQQKDNLYLMSIASMKTPTX

SEQ ID NO: 37335 - protein, 41 aa, Artificial Sequence
  Non-cyclic GFR-binding peptide
  MOD_RES (2)..(4)..(35)..(36): Xaa is C or S
LXGXEEVIMQYNKLLLVRGNDLYLMSIASTKVPAXXTSPVR

SEQ ID NO: 37336 - protein, 36 aa, Artificial Sequence
  Non-cyclic GFR-binding peptide
  MOD_RES (31)..(32): Xaa is C or S
SVAMGQYNKLYTVVGKDLYLISIASLKTPVXXAKSA

SEQ ID NO: 37337 - protein, 42 aa, Artificial Sequence
  Non-cyclic GFR-binding peptide
  MOD_RES (2)..(4)..(37)..(38): Xaa is C or S
  MOD_RES (15)..(16)..(17)..(18)..(19): Xaa is A or G
  MOD_RES (20)..(21)..(22)..(23): Xaa is A or G or absent
LXGXEEVIMQYNKLXXXXXXXXXLYLMSIASTKVPAXXTSPV

SEQ ID NO: 37338 - protein, 41 aa, Artificial Sequence
  Non-cyclic GFR-binding peptide
  MOD_RES (2)..(36)..(37): Xaa is C or S
  MOD_RES (14)..(15)..(16)..(17)..(18): Xaa is A or G
  MOD_RES (19)..(20)..(21)..(22): Xaa is A or G or absent
GXRDVVMGQYNKLXXXXXXXXXLYLMSIASMKTPTXXPGAS

SEQ ID NO: 37339 - protein, 34 aa, Artificial Sequence
  Non-cyclic GFR-binding peptide
  MOD_RES (1)..(3): Xaa is C or S
XGXESVAMGQYNKLYTVVGKDLYLISIASLKTPV

SEQ ID NO: 37340 - protein, 43 aa, Artificial Sequence
  Non-cyclic GFR-binding peptide
  MOD_RES (2)..(4)..(37)..(38): Xaa is C or S
  MOD_RES (15)..(16)..(17)..(18)..(19): Xaa is A or G
  MOD_RES (20)..(21)..(22)..(23): Xaa is A or G or absent
LXGXEEVIMQYNKLXXXXXXXXXLYLMSIASTKVPAXXTSPVR

SEQ ID NO: 37341 - protein, 41 aa, Artificial Sequence
  Non-cyclic GFR-binding peptide
  MOD_RES (2)..(4)..(36)..(37): Xaa is C or S
RXGXESVAMGQYNKLYTVVGKDLYLISIASLKTPVXXAKSA

SEQ ID NO: 37342 - protein, 38 aa, Artificial Sequence
  Non-cyclic GFR-binding peptide
  MOD_RES (34)..(35): Xaa is C or S
  MOD_RES (12)..(13)..(14)..(15)..(16): Xaa is A or G
  MOD_RES (17)..(18)..(19)..(20): Xaa is A or G or absent
SEVTMNQYNKLXXXXXXXXXLYLISIASMKEPVXXPEP

SEQ ID NO: 37343 - protein, 36 aa, Artificial Sequence
  Non-cyclic GFR-binding peptide
  MOD_RES (2)..(4): Xaa is C or S
  MOD_RES (15)..(16)..(17)..(18)..(19): Xaa is A or G
  MOD_RES (20)..(21)..(22)..(23): Xaa is A or G or absent
LXGXEEVIMQYNKLXXXXXXXXXLYLMSIASTKVPA

SEQ ID NO: 37344 - protein, 42 aa, Artificial Sequence
  Non-cyclic GFR-binding peptide
  MOD_RES (2)..(4)..(36)..(37): Xaa is C or S
SXGXRDVVMGQYNKLIIQQKDNLYLMSIASMKTPTXXPGASG

SEQ ID NO: 37345 - protein, 33 aa, Artificial Sequence
  Non-cyclic GFR-binding peptide
  MOD_RES (32)..(33): Xaa is C or S
SEVTMNQYNKLVVNKNEDLYLISIASMKEPVXX

SEQ ID NO: 37346 - protein, 35 aa, Artificial Sequence
  Non-cyclic GFR-binding peptide
  MOD_RES (1)..(33)..(34): Xaa is C or S
XAEVVMDQYNKLVVNNAADLYLISIASLRAPVXXS

SEQ ID NO: 37347 - protein, 32 aa, Artificial Sequence
  Non-cyclic GFR-binding peptide
  MOD_RES (31)..(32): Xaa is C or S
DVVMGQYNKLIIQQKDNLYLMSIASMKTPTXX

SEQ ID NO: 37348 - protein, 40 aa, Artificial Sequence
  Non-cyclic GFR-binding peptide
  MOD_RES (1)..(3)..(35)..(36): Xaa is C or S
XGXAEVVMDQYNKLVVNNAADLYLISIASLRAPVXXSAPA

SEQ ID NO: 37349 - protein, 33 aa, Artificial Sequence
  Non-cyclic GFR-binding peptide
  MOD_RES (1)..(3): Xaa is C or S
XGXEEVIMQYNKLLLVRGNDLYLMSIASTKVPA

SEQ ID NO: 37350 - protein, 33 aa, Artificial Sequence
  Non-cyclic GFR-binding peptide
  MOD_RES (31)..(32): Xaa is C or S
EEVIMQYNKLLLVRGNDLYLMSIASTKVPAXXT

SEQ ID NO: 37351 - protein, 35 aa, Artificial Sequence
  Non-cyclic GFR-binding peptide
  MOD_RES (2)..(2): Xaa is C or S
  MOD_RES (14)..(15)..(16)..(17)..(18): Xaa is A or G
  MOD_RES (19)..(20)..(21)..(22): Xaa is A or G or absent
AXSEVTMNQYNKLXXXXXXXXXLYLISIASMKEPV

SEQ ID NO: 37352 - protein, 34 aa, Artificial Sequence
  Non-cyclic GFR-binding peptide
  MOD_RES (34)..(34): Xaa is C or S
  MOD_RES (12)..(13)..(14)..(15)..(16): Xaa is A or G
  MOD_RES (17)..(18)..(19)..(20): Xaa is A or G or absent
AEVVMDQYNKLXXXXXXXXXLYLISIASLRAPVX

SEQ ID NO: 37353 - protein, 41 aa, Artificial Sequence
  Non-cyclic GFR-binding peptide
  MOD_RES (1)..(3)..(37)..(38): Xaa is C or S
  MOD_RES (15)..(16)..(17)..(18)..(19): Xaa is A or G
  MOD_RES (20)..(21)..(22)..(23): Xaa is A or G or absent
XAXSEVTMNQYNKLXXXXXXXXXLYLISIASMKEPVXXPEP

SEQ ID NO: 37354 - protein, 38 aa, Artificial Sequence
  Non-cyclic GFR-binding peptide
  MOD_RES (2)..(36)..(37): Xaa is C or S
  MOD_RES (14)..(15)..(16)..(17)..(18): Xaa is A or G
  MOD_RES (19)..(20)..(21)..(22): Xaa is A or G or absent
GXRDVVMGQYNKLXXXXXXXXXLYLMSIASMKTPTXXP

SEQ ID NO: 37355 - protein, 36 aa, Artificial Sequence
  Non-cyclic GFR-binding peptide
  MOD_RES (1)..(3)..(35)..(36): Xaa is C or S
XGXRDVVMGQYNKLIIQQKDNLYLMSIASMKTPTXX

SEQ ID NO: 37356 - protein, 33 aa, Artificial Sequence
  Non-cyclic GFR-binding peptide
  MOD_RES (12)..(13)..(14)..(15)..(16): Xaa is A or G
  MOD_RES (17)..(18)..(19)..(20): Xaa is A or G or absent
SEVTMNQYNKLXXXXXXXXXLYLISIASMKEPV

SEQ ID NO: 37357 - protein, 36 aa, Artificial Sequence
  Non-cyclic GFR-binding peptide
  MOD_RES (32)..(33): Xaa is C or S
RDVVMGQYNKLIIQQKDNLYLMSIASMKTPTXXPGA

SEQ ID NO: 37358 - protein, 35 aa, Artificial Sequence
  Non-cyclic GFR-binding peptide
  MOD_RES (2)..(2): Xaa is C or S
  MOD_RES (14)..(15)..(16)..(17)..(18): Xaa is A or G
  MOD_RES (19)..(20)..(21)..(22): Xaa is A or G or absent
GXRDVVMGQYNKLXXXXXXXXXLYLMSIASMKTPT

SEQ ID NO: 37359 - protein, 40 aa, Artificial Sequence
  Non-cyclic GFR-binding peptide
  MOD_RES (2)..(4)..(36)..(37): Xaa is C or S
RXAXSEVTMNQYNKLVVNKNEDLYLISIASMKEPVXXPEP

SEQ ID NO: 37360 - protein, 31 aa, Artificial Sequence
  Non-cyclic GFR-binding peptide
RDVVMGQYNKLIIQQKDNLYLMSIASMKTPT

SEQ ID NO: 37361 - protein, 36 aa, Artificial Sequence
  Non-cyclic GFR-binding peptide
  MOD_RES (2)..(36): Xaa is C or S
  MOD_RES (14)..(15)..(16)..(17)..(18): Xaa is A or G
  MOD_RES (19)..(20)..(21)..(22): Xaa is A or G or absent
GXESVAMGQYNKLXXXXXXXXXLYLISIASLKTPVX

SEQ ID NO: 37362 - protein, 36 aa, Artificial Sequence
  Non-cyclic GFR-binding peptide
  MOD_RES (32)..(33): Xaa is C or S
ESVAMGQYNKLYTVVGKDLYLISIASLKTPVXXAKS

SEQ ID NO: 37363 - protein, 36 aa, Artificial Sequence
  Non-cyclic GFR-binding peptide
  MOD_RES (1)..(33)..(34): Xaa is C or S
XRDVVMGQYNKLIIQQKDNLYLMSIASMKTPTXXPG

SEQ ID NO: 37364 - protein, 38 aa, Artificial Sequence
  Non-cyclic GFR-binding peptide
  MOD_RES (2)..(4)..(38): Xaa is C or S
  MOD_RES (16)..(17)..(18)..(19)..(20): Xaa is A or G
  MOD_RES (21)..(22)..(23)..(24): Xaa is A or G or absent
RXGXAEVVMDQYNKLXXXXXXXXXLYLISIASLRAPVX

SEQ ID NO: 37365 - protein, 38 aa, Artificial Sequence
  Non-cyclic GFR-binding peptide
  MOD_RES (1)..(35)..(36): Xaa is C or S
  MOD_RES (13)..(14)..(15)..(16)..(17): Xaa is A or G
  MOD_RES (18)..(19)..(20)..(21): Xaa is A or G or absent
XAEVVMDQYNKLXXXXXXXXXLYLISIASLRAPVXXSA

SEQ ID NO: 37366 - protein, 32 aa, Artificial Sequence
  Non-cyclic GFR-binding peptide
  MOD_RES (1)..(1): Xaa is C or S
XRDVVMGQYNKLIIQQKDNLYLMSIASMKTPT

SEQ ID NO: 37367 - protein, 39 aa, Artificial Sequence
  Non-cyclic GFR-binding peptide
  MOD_RES (2)..(36)..(37): Xaa is C or S
  MOD_RES (14)..(15)..(16)..(17)..(18): Xaa is A or G
  MOD_RES (19)..(20)..(21)..(22): Xaa is A or G or absent
GXRDVVMGQYNKLXXXXXXXXXLYLMSIASMKTPTXXPG

SEQ ID NO: 37368 - protein, 39 aa, Artificial Sequence
  Non-cyclic GFR-binding peptide
  MOD_RES (33)..(34): Xaa is C or S
  MOD_RES (11)..(12)..(13)..(14)..(15): Xaa is A or G
  MOD_RES (16)..(17)..(18)..(19): Xaa is A or G or absent
EVTMNQYNKLXXXXXXXXXLYLISIASMKEPVXXPEPIG

SEQ ID NO: 37369 - protein, 32 aa, Artificial Sequence
  Non-cyclic GFR-binding peptide
  MOD_RES (32)..(32): Xaa is C or S
AEVVMDQYNKLVVNNAADLYLISIASLRAPVX

SEQ ID NO: 37370 - protein, 39 aa, Artificial Sequence
  Non-cyclic GFR-binding peptide
  MOD_RES (2)..(4)..(36)..(37): Xaa is C or S
RXAXSEVTMNQYNKLVVNKNEDLYLISIASMKEPVXXPE

SEQ ID NO: 37371 - protein, 34 aa, Artificial Sequence
  Non-cyclic GFR-binding peptide
  MOD_RES (34)..(34): Xaa is C or S
  MOD_RES (12)..(13)..(14)..(15)..(16): Xaa is A or G
  MOD_RES (17)..(18)..(19)..(20): Xaa is A or G or absent
RDVVMGQYNKLXXXXXXXXXLYLMSIASMKTPTX

SEQ ID NO: 37372 - protein, 38 aa, Artificial Sequence
  Non-cyclic GFR-binding peptide
  MOD_RES (1)..(34)..(35): Xaa is C or S
  MOD_RES (12)..(13)..(14)..(15)..(16): Xaa is A or G
  MOD_RES (17)..(18)..(19)..(20): Xaa is A or G or absent
XEEVIMQYNKLXXXXXXXXXLYLMSIASTKVPAXXTSP

SEQ ID NO: 37373 - protein, 37 aa, Artificial Sequence
  Non-cyclic GFR-binding peptide
  MOD_RES (34)..(35): Xaa is C or S
  MOD_RES (12)..(13)..(14)..(15)..(16): Xaa is A or G
  MOD_RES (17)..(18)..(19)..(20): Xaa is A or G or absent
SEVTMNQYNKLXXXXXXXXXLYLISIASMKEPVXXPE

SEQ ID NO: 37374 - protein, 36 aa, Artificial Sequence
  Non-cyclic GFR-binding peptide
  MOD_RES (1)..(33)..(34): Xaa is C or S
XAEVVMDQYNKLVVNNAADLYLISIASLRAPVXXSA

SEQ ID NO: 37375 - protein, 33 aa, Artificial Sequence
  Non-cyclic GFR-binding peptide
  MOD_RES (12)..(13)..(14)..(15)..(16): Xaa is A or G
  MOD_RES (17)..(18)..(19)..(20): Xaa is A or G or absent
ESVAMGQYNKLXXXXXXXXXLYLISIASLKTPV

SEQ ID NO: 37376 - protein, 35 aa, Artificial Sequence
  Non-cyclic GFR-binding peptide
  MOD_RES (1)..(3)..(35): Xaa is C or S
XGXESVAMGQYNKLYTVVGKDLYLISIASLKTPVX

SEQ ID NO: 37377 - protein, 35 aa, Artificial Sequence
  Non-cyclic GFR-binding peptide
  MOD_RES (31)..(32): Xaa is C or S
EVTMNQYNKLVVNKNEDLYLISIASMKEPVXXPEP

SEQ ID NO: 37378 - protein, 35 aa, Artificial Sequence
  Non-cyclic GFR-binding peptide
  MOD_RES (33)..(34): Xaa is C or S
  MOD_RES (11)..(12)..(13)..(14)..(15): Xaa is A or G
  MOD_RES (16)..(17)..(18)..(19): Xaa is A or G or absent
EEVIMQYNKLXXXXXXXXXLYLMSIASTKVPAXXT

SEQ ID NO: 37379 - protein, 37 aa, Artificial Sequence
  Non-cyclic GFR-binding peptide
  MOD_RES (1)..(32)..(33): Xaa is C or S
XEEVIMQYNKLLLVRGNDLYLMSIASTKVPAXXTSPV

SEQ ID NO: 37380 - protein, 40 aa, Artificial Sequence
  Non-cyclic GFR-binding peptide
  MOD_RES (1)..(3)..(35)..(36): Xaa is C or S
XGXRDVVMGQYNKLIIQQKDNLYLMSIASMKTPTXXPGAS

SEQ ID NO: 37381 - protein, 40 aa, Artificial Sequence
  Non-cyclic GFR-binding peptide
  MOD_RES (1)..(3)..(35)..(36): Xaa is C or S
XAXSEVTMNQYNKLVVNKNEDLYLISIASMKEPVXXPEPI

SEQ ID NO: 37382 - protein, 40 aa, Artificial Sequence
  Non-cyclic GFR-binding peptide
  MOD_RES (2)..(4)..(36)..(37): Xaa is C or S
SXGXRDVVMGQYNKLIIQQKDNLYLMSIASMKTPTXXPGA

SEQ ID NO: 37383 - protein, 38 aa, Artificial Sequence
  Non-cyclic GFR-binding peptide
  MOD_RES (1)..(3)..(35)..(36): Xaa is C or S
XGXRDVVMGQYNKLIIQQKDNLYLMSIASMKTPTXXPG

SEQ ID NO: 37384 - protein, 40 aa, Artificial Sequence
  Non-cyclic GFR-binding peptide
  MOD_RES (1)..(35)..(36): Xaa is C or S
  MOD_RES (13)..(14)..(15)..(16)..(17): Xaa is A or G
  MOD_RES (18)..(19)..(20)..(21): Xaa is A or G or absent
XRDVVMGQYNKLXXXXXXXXXLYLMSIASMKTPTXXPGAS

SEQ ID NO: 37385 - protein, 36 aa, Artificial Sequence
  Non-cyclic GFR-binding peptide
  MOD_RES (2)..(36): Xaa is C or S
  MOD_RES (14)..(15)..(16)..(17)..(18): Xaa is A or G
  MOD_RES (19)..(20)..(21)..(22): Xaa is A or G or absent
GXRDVVMGQYNKLXXXXXXXXXLYLMSIASMKTPTX

SEQ ID NO: 37386 - protein, 42 aa, Artificial Sequence
  Non-cyclic GFR-binding peptide
  MOD_RES (2)..(36)..(37): Xaa is C or S
  MOD_RES (14)..(15)..(16)..(17)..(18): Xaa is A or G
  MOD_RES (19)..(20)..(21)..(22): Xaa is A or G or absent
AXSEVTMNQYNKLXXXXXXXXXLYLISIASMKEPVXXPEPIG

SEQ ID NO: 37387 - protein, 36 aa, Artificial Sequence
  Non-cyclic GFR-binding peptide
  MOD_RES (2)..(34)..(35): Xaa is C or S
GXAEVVMDQYNKLVVNNAADLYLISIASLRAPVXXS

SEQ ID NO: 37388 - protein, 38 aa, Artificial Sequence
  Non-cyclic GFR-binding peptide
  MOD_RES (1)..(35)..(36): Xaa is C or S
  MOD_RES (13)..(14)..(15)..(16)..(17): Xaa is A or G
  MOD_RES (18)..(19)..(20)..(21): Xaa is A or G or absent
XSEVTMNQYNKLXXXXXXXXXLYLISIASMKEPVXXPE

SEQ ID NO: 37389 - protein, 32 aa, Artificial Sequence
  Non-cyclic GFR-binding peptide
  MOD_RES (11)..(12)..(13)..(14)..(15): Xaa is A or G
  MOD_RES (16)..(17)..(18)..(19): Xaa is A or G or absent
EEVIMQYNKLXXXXXXXXXLYLMSIASTKVPA

SEQ ID NO: 37390 - protein, 38 aa, Artificial Sequence
  Non-cyclic GFR-binding peptide
  MOD_RES (1)..(3)..(35)..(36): Xaa is C or S
XGXESVAMGQYNKLYTVVGKDLYLISIASLKTPVXXAK

SEQ ID NO: 37391 - protein, 37 aa, Artificial Sequence
  Non-cyclic GFR-binding peptide
  MOD_RES (1)..(35)..(36): Xaa is C or S
  MOD_RES (13)..(14)..(15)..(16)..(17): Xaa is A or G
  MOD_RES (18)..(19)..(20)..(21): Xaa is A or G or absent
XSEVTMNQYNKLXXXXXXXXXLYLISIASMKEPVXXP

SEQ ID NO: 37392 - protein, 36 aa, Artificial Sequence
  Non-cyclic GFR-binding peptide
  MOD_RES (1)..(3)..(35)..(36): Xaa is C or S
XAXSEVTMNQYNKLVVNKNEDLYLISIASMKEPVXX

SEQ ID NO: 37393 - protein, 40 aa, Artificial Sequence
  Non-cyclic GFR-binding peptide
  MOD_RES (1)..(3)..(35)..(36): Xaa is C or S
XGXESVAMGQYNKLYTVVGKDLYLISIASLKTPVXXAKSA

SEQ ID NO: 37394 - protein, 38 aa, Artificial Sequence
  Non-cyclic GFR-binding peptide
  MOD_RES (1)..(35)..(36): Xaa is C or S
  MOD_RES (13)..(14)..(15)..(16)..(17): Xaa is A or G
  MOD_RES (18)..(19)..(20)..(21): Xaa is A or G or absent
XESVAMGQYNKLXXXXXXXXXLYLISIASLKTPVXXAK

SEQ ID NO: 37395 - protein, 37 aa, Artificial Sequence
  Non-cyclic GFR-binding peptide
  MOD_RES (33)..(34): Xaa is C or S
  MOD_RES (11)..(12)..(13)..(14)..(15): Xaa is A or G
  MOD_RES (16)..(17)..(18)..(19): Xaa is A or G or absent
EVTMNQYNKLXXXXXXXXXLYLISIASMKEPVXXPEP

SEQ ID NO: 37396 - protein, 39 aa, Artificial Sequence
  Non-cyclic GFR-binding peptide
  MOD_RES (1)..(33)..(34): Xaa is C or S
XRDVVMGQYNKLIIQQKDNLYLMSIASMKTPTXXPGASG

SEQ ID NO: 37397 - protein, 36 aa, Artificial Sequence
  Non-cyclic GFR-binding peptide
  MOD_RES (33)..(34): Xaa is C or S
  MOD_RES (11)..(12)..(13)..(14)..(15): Xaa is A or G
  MOD_RES (16)..(17)..(18)..(19): Xaa is A or G or absent
DVVMGQYNKLXXXXXXXXXLYLMSIASMKTPTXXPG

SEQ ID NO: 37398 - protein, 37 aa, Artificial Sequence
  Non-cyclic GFR-binding peptide
  MOD_RES (32)..(33): Xaa is C or S
RDVVMGQYNKLIIQQKDNLYLMSIASMKTPTXXPGAS

SEQ ID NO: 37399 - protein, 36 aa, Artificial Sequence
  Non-cyclic GFR-binding peptide
  MOD_RES (34)..(35): Xaa is C or S
  MOD_RES (12)..(13)..(14)..(15)..(16): Xaa is A or G
  MOD_RES (17)..(18)..(19)..(20): Xaa is A or G or absent
AEVVMDQYNKLXXXXXXXXXLYLISIASLRAPVXXS

SEQ ID NO: 37400 - protein, 33 aa, Artificial Sequence
  Non-cyclic GFR-binding peptide
  MOD_RES (32)..(33): Xaa is C or S
ESVAMGQYNKLYTVVGKDLYLISIASLKTPVXX

SEQ ID NO: 37401 - protein, 36 aa, Artificial Sequence
  Non-cyclic GFR-binding peptide
  MOD_RES (1)..(3)..(34)..(35): Xaa is C or S
XGXEEVIMQYNKLLLVRGNDLYLMSIASTKVPAXXT

SEQ ID NO: 37402 - protein, 43 aa, Artificial Sequence
  Non-cyclic GFR-binding peptide
  MOD_RES (2)..(4)..(38)..(39): Xaa is C or S
  MOD_RES (16)..(17)..(18)..(19)..(20): Xaa is A or G
  MOD_RES (21)..(22)..(23)..(24): Xaa is A or G or absent
RXAXSEVTMNQYNKLXXXXXXXXXLYLISIASMKEPVXXPEPI

SEQ ID NO: 37403 - protein, 37 aa, Artificial Sequence
  Non-cyclic GFR-binding peptide
  MOD_RES (2)..(4)..(36)..(37): Xaa is C or S
SXGXRDVVMGQYNKLIIQQKDNLYLMSIASMKTPTXX

SEQ ID NO: 37404 - protein, 42 aa, Artificial Sequence
  Non-cyclic GFR-binding peptide
  MOD_RES (2)..(36)..(37): Xaa is C or S
  MOD_RES (14)..(15)..(16)..(17)..(18): Xaa is A or G
  MOD_RES (19)..(20)..(21)..(22): Xaa is A or G or absent
GXSRVVMNQYNKLXXXXXXXXXLYLVSIASLKTPAXXPKPVH

SEQ ID NO: 37405 - protein, 37 aa, Artificial Sequence
  Non-cyclic GFR-binding peptide
  MOD_RES (1)..(33)..(34): Xaa is C or S
XESVAMGQYNKLYTVVGKDLYLISIASLKTPVXXAKS

SEQ ID NO: 37406 - protein, 39 aa, Artificial Sequence
  Non-cyclic GFR-binding peptide
  MOD_RES (2)..(4)..(38)..(39): Xaa is C or S
  MOD_RES (16)..(17)..(18)..(19)..(20): Xaa is A or G
  MOD_RES (21)..(22)..(23)..(24): Xaa is A or G or absent
RXAXSEVTMNQYNKLXXXXXXXXXLYLISIASMKEPVXX

SEQ ID NO: 37407 - protein, 38 aa, Artificial Sequence
  Non-cyclic GFR-binding peptide
  MOD_RES (1)..(33)..(34): Xaa is C or S
XESVAMGQYNKLYTVVGKDLYLISIASLKTPVXXAKSA

SEQ ID NO: 37408 - protein, 39 aa, Artificial Sequence
  Non-cyclic GFR-binding peptide
  MOD_RES (34)..(35): Xaa is C or S
  MOD_RES (12)..(13)..(14)..(15)..(16): Xaa is A or G
  MOD_RES (17)..(18)..(19)..(20): Xaa is A or G or absent
RDVVMGQYNKLXXXXXXXXXLYLMSIASMKTPTXXPGAS

SEQ ID NO: 37409 - protein, 32 aa, Artificial Sequence
  Non-cyclic GFR-binding peptide
  MOD_RES (31)..(32): Xaa is C or S
EEVIMQYNKLLLVRGNDLYLMSIASTKVPAXX

SEQ ID NO: 37410 - protein, 38 aa, Artificial Sequence
  Non-cyclic GFR-binding peptide
  MOD_RES (2)..(33)..(34): Xaa is C or S
GXEEVIMQYNKLLLVRGNDLYLMSIASTKVPAXXTSPV

SEQ ID NO: 37411 - protein, 38 aa, Artificial Sequence
  Non-cyclic GFR-binding peptide
  MOD_RES (1)..(35)..(36): Xaa is C or S
  MOD_RES (13)..(14)..(15)..(16)..(17): Xaa is A or G
  MOD_RES (18)..(19)..(20)..(21): Xaa is A or G or absent
XRDVVMGQYNKLXXXXXXXXXLYLMSIASMKTPTXXPG

SEQ ID NO: 37412 - protein, 34 aa, Artificial Sequence
  Non-cyclic GFR-binding peptide
  MOD_RES (1)..(1): Xaa is C or S
  MOD_RES (13)..(14)..(15)..(16)..(17): Xaa is A or G
  MOD_RES (18)..(19)..(20)..(21): Xaa is A or G or absent
XSEVTMNQYNKLXXXXXXXXXLYLISIASMKEPV

SEQ ID NO: 37413 - protein, 41 aa, Artificial Sequence
  Non-cyclic GFR-binding peptide
  MOD_RES (2)..(36)..(37): Xaa is C or S
  MOD_RES (14)..(15)..(16)..(17)..(18): Xaa is A or G
  MOD_RES (19)..(20)..(21)..(22): Xaa is A or G or absent
AXSEVTMNQYNKLXXXXXXXXXLYLISIASMKEPVXXPEPI

SEQ ID NO: 37414 - protein, 38 aa, Artificial Sequence
  Non-cyclic GFR-binding peptide
  MOD_RES (32)..(33): Xaa is C or S
SRVVMNQYNKLIVNSSDDLYLVSIASLKTPAXXPKPVH

SEQ ID NO: 37415 - protein, 32 aa, Artificial Sequence
  Non-cyclic GFR-binding peptide
  MOD_RES (11)..(12)..(13)..(14)..(15): Xaa is A or G
  MOD_RES (16)..(17)..(18)..(19): Xaa is A or G or absent
EVTMNQYNKLXXXXXXXXXLYLISIASMKEPV

SEQ ID NO: 37416 - protein, 42 aa, Artificial Sequence
  Non-cyclic GFR-binding peptide
  MOD_RES (1)..(3)..(37)..(38): Xaa is C or S
  MOD_RES (15)..(16)..(17)..(18)..(19): Xaa is A or G
  MOD_RES (20)..(21)..(22)..(23): Xaa is A or G or absent
XGXRDVVMGQYNKLXXXXXXXXXLYLMSIASMKTPTXXPGAS

SEQ ID NO: 37417 - protein, 38 aa, Artificial Sequence
  Non-cyclic GFR-binding peptide
  MOD_RES (2)..(4)..(36)..(37): Xaa is C or S
RXGXESVAMGQYNKLYTVVGKDLYLISIASLKTPVXXA

SEQ ID NO: 37418 - protein, 37 aa, Artificial Sequence
  Non-cyclic GFR-binding peptide
  MOD_RES (34)..(35): Xaa is C or S
  MOD_RES (12)..(13)..(14)..(15)..(16): Xaa is A or G
  MOD_RES (17)..(18)..(19)..(20): Xaa is A or G or absent
ESVAMGQYNKLXXXXXXXXXLYLISIASLKTPVXXAK

SEQ ID NO: 37419 - protein, 34 aa, Artificial Sequence
  Non-cyclic GFR-binding peptide
  MOD_RES (2)..(34): Xaa is C or S
GXESVAMGQYNKLYTVVGKDLYLISIASLKTPVX

SEQ ID NO: 37420 - protein, 38 aa, Artificial Sequence
  Non-cyclic GFR-binding peptide
  MOD_RES (2)..(35)..(36): Xaa is C or S
  MOD_RES (13)..(14)..(15)..(16)..(17): Xaa is A or G
  MOD_RES (18)..(19)..(20)..(21): Xaa is A or G or absent
GXEEVIMQYNKLXXXXXXXXXLYLMSIASTKVPAXXTS

SEQ ID NO: 37421 - protein, 32 aa, Artificial Sequence
  Non-cyclic GFR-binding peptide
  MOD_RES (32)..(32): Xaa is C or S
SEVTMNQYNKLVVNKNEDLYLISIASMKEPVX

SEQ ID NO: 37422 - protein, 35 aa, Artificial Sequence
  Non-cyclic GFR-binding peptide
  MOD_RES (2)..(2): Xaa is C or S
  MOD_RES (14)..(15)..(16)..(17)..(18): Xaa is A or G
  MOD_RES (19)..(20)..(21)..(22): Xaa is A or G or absent
GXESVAMGQYNKLXXXXXXXXXLYLISIASLKTPV

SEQ ID NO: 37423 - protein, 38 aa, Artificial Sequence
  Non-cyclic GFR-binding peptide
  MOD_RES (1)..(3)..(37)..(38): Xaa is C or S
  MOD_RES (15)..(16)..(17)..(18)..(19): Xaa is A or G
  MOD_RES (20)..(21)..(22)..(23): Xaa is A or G or absent
XGXAEVVMDQYNKLXXXXXXXXXLYLISIASLRAPVXX

SEQ ID NO: 37424 - protein, 39 aa, Artificial Sequence
  Non-cyclic GFR-binding peptide
  MOD_RES (2)..(4)..(38)..(39): Xaa is C or S
  MOD_RES (16)..(17)..(18)..(19)..(20): Xaa is A or G
  MOD_RES (21)..(22)..(23)..(24): Xaa is A or G or absent
SXGXRDVVMGQYNKLXXXXXXXXXLYLMSIASMKTPTXX

SEQ ID NO: 37425 - protein, 39 aa, Artificial Sequence
  Non-cyclic GFR-binding peptide
  MOD_RES (2)..(4)..(38)..(39): Xaa is C or S
  MOD_RES (16)..(17)..(18)..(19)..(20): Xaa is A or G
  MOD_RES (21)..(22)..(23)..(24): Xaa is A or G or absent
RXGXAEVVMDQYNKLXXXXXXXXXLYLISIASLRAPVXX

SEQ ID NO: 37426 - protein, 40 aa, Artificial Sequence
  Non-cyclic GFR-binding peptide
  MOD_RES (1)..(3)..(37)..(38): Xaa is C or S
  MOD_RES (15)..(16)..(17)..(18)..(19): Xaa is A or G
  MOD_RES (20)..(21)..(22)..(23): Xaa is A or G or absent
XAXSEVTMNQYNKLXXXXXXXXXLYLISIASMKEPVXXPE

SEQ ID NO: 37427 - protein, 34 aa, Artificial Sequence
  Non-cyclic GFR-binding peptide
  MOD_RES (2)..(34): Xaa is C or S
GXAEVVMDQYNKLVVNNAADLYLISIASLRAPVX

SEQ ID NO: 37428 - protein, 37 aa, Artificial Sequence
  Non-cyclic GFR-binding peptide
  MOD_RES (33)..(34): Xaa is C or S
  MOD_RES (11)..(12)..(13)..(14)..(15): Xaa is A or G
  MOD_RES (16)..(17)..(18)..(19): Xaa is A or G or absent
DVVMGQYNKLXXXXXXXXXLYLMSIASMKTPTXXPGA

SEQ ID NO: 37429 - protein, 33 aa, Artificial Sequence
  Non-cyclic GFR-binding peptide
  MOD_RES (33)..(33): Xaa is C or S
  MOD_RES (11)..(12)..(13)..(14)..(15): Xaa is A or G
  MOD_RES (16)..(17)..(18)..(19): Xaa is A or G or absent
EVTMNQYNKLXXXXXXXXXLYLISIASMKEPVX

SEQ ID NO: 37430 - protein, 44 aa, Artificial Sequence
  Non-cyclic GFR-binding peptide
  MOD_RES (2)..(4)..(38)..(39): Xaa is C or S
  MOD_RES (16)..(17)..(18)..(19)..(20): Xaa is A or G
  MOD_RES (21)..(22)..(23)..(24): Xaa is A or G or absent
SXGXRDVVMGQYNKLXXXXXXXXXLYLMSIASMKTPTXXPGASG

SEQ ID NO: 37431 - protein, 39 aa, Artificial Sequence
  Non-cyclic GFR-binding peptide
  MOD_RES (1)..(3)..(37)..(38): Xaa is C or S
  MOD_RES (15)..(16)..(17)..(18)..(19): Xaa is A or G
  MOD_RES (20)..(21)..(22)..(23): Xaa is A or G or absent
XAXSEVTMNQYNKLXXXXXXXXXLYLISIASMKEPVXXP

SEQ ID NO: 37432 - protein, 35 aa, Artificial Sequence
  Non-cyclic GFR-binding peptide
  MOD_RES (32)..(33): Xaa is C or S
ESVAMGQYNKLYTVVGKDLYLISIASLKTPVXXAK

SEQ ID NO: 37433 - protein, 40 aa, Artificial Sequence
  Non-cyclic GFR-binding peptide
  MOD_RES (1)..(3)..(37)..(38): Xaa is C or S
  MOD_RES (15)..(16)..(17)..(18)..(19): Xaa is A or G
  MOD_RES (20)..(21)..(22)..(23): Xaa is A or G or absent
XGXRDVVMGQYNKLXXXXXXXXXLYLMSIASMKTPTXXPG

SEQ ID NO: 37434 - protein, 32 aa, Artificial Sequence
  Non-cyclic GFR-binding peptide
  MOD_RES (32)..(32): Xaa is C or S
ESVAMGQYNKLYTVVGKDLYLISIASLKTPVX

SEQ ID NO: 37435 - protein, 43 aa, Artificial Sequence
  Non-cyclic GFR-binding peptide
  MOD_RES (1)..(3)..(37)..(38): Xaa is C or S
  MOD_RES (15)..(16)..(17)..(18)..(19): Xaa is A or G
  MOD_RES (20)..(21)..(22)..(23): Xaa is A or G or absent
XGXESVAMGQYNKLXXXXXXXXXLYLISIASLKTPVXXAKSAK

SEQ ID NO: 37436 - protein, 36 aa, Artificial Sequence
  Non-cyclic GFR-binding peptide
  MOD_RES (2)..(33)..(34): Xaa is C or S
GXEEVIMQYNKLLLVRGNDLYLMSIASTKVPAXXTS

SEQ ID NO: 37437 - protein, 42 aa, Artificial Sequence
  Non-cyclic GFR-binding peptide
  MOD_RES (2)..(4)..(36)..(37): Xaa is C or S
RXGXESVAMGQYNKLYTVVGKDLYLISIASLKTPVXXAKSAK

SEQ ID NO: 37438 - protein, 35 aa, Artificial Sequence
  Non-cyclic GFR-binding peptide
  MOD_RES (1)..(3)..(34)..(35): Xaa is C or S
XGXEEVIMQYNKLLLVRGNDLYLMSIASTKVPAXX

SEQ ID NO: 37439 - protein, 37 aa, Artificial Sequence
  Non-cyclic GFR-binding peptide
  MOD_RES (1)..(3)..(35)..(36): Xaa is C or S
XAXSEVTMNQYNKLVVNKNEDLYLISIASMKEPVXXP

SEQ ID NO: 37440 - protein, 39 aa, Artificial Sequence
  Non-cyclic GFR-binding peptide
  MOD_RES (1)..(3)..(37)..(38): Xaa is C or S
  MOD_RES (15)..(16)..(17)..(18)..(19): Xaa is A or G
  MOD_RES (20)..(21)..(22)..(23): Xaa is A or G or absent
XGXAEVVMDQYNKLXXXXXXXXXLYLISIASLRAPVXXS

SEQ ID NO: 37441 - protein, 40 aa, Artificial Sequence
  Non-cyclic GFR-binding peptide
  MOD_RES (1)..(34)..(35): Xaa is C or S
  MOD_RES (12)..(13)..(14)..(15)..(16): Xaa is A or G
  MOD_RES (17)..(18)..(19)..(20): Xaa is A or G or absent
XEEVIMQYNKLXXXXXXXXXLYLMSIASTKVPAXXTSPVR

SEQ ID NO: 37442 - protein, 39 aa, Artificial Sequence
  Non-cyclic GFR-binding peptide
  MOD_RES (1)..(3)..(36)..(37): Xaa is C or S
  MOD_RES (14)..(15)..(16)..(17)..(18): Xaa is A or G
  MOD_RES (19)..(20)..(21)..(22): Xaa is A or G or absent
XGXEEVIMQYNKLXXXXXXXXXLYLMSIASTKVPAXXTS

SEQ ID NO: 37443 - protein, 35 aa, Artificial Sequence
  Non-cyclic GFR-binding peptide
  MOD_RES (32)..(33): Xaa is C or S
AEVVMDQYNKLVVNNAADLYLISIASLRAPVXXSA

SEQ ID NO: 37444 - protein, 34 aa, Artificial Sequence
  Non-cyclic GFR-binding peptide
  MOD_RES (2)..(34): Xaa is C or S
GXRDVVMGQYNKLIIQQKDNLYLMSIASMKTPTX

SEQ ID NO: 37445 - protein, 34 aa, Artificial Sequence
  Non-cyclic GFR-binding peptide
  MOD_RES (33)..(34): Xaa is C or S
  MOD_RES (11)..(12)..(13)..(14)..(15): Xaa is A or G
  MOD_RES (16)..(17)..(18)..(19): Xaa is A or G or absent
EVVMDQYNKLXXXXXXXXXLYLISIASLRAPVXX

SEQ ID NO: 37446 - protein, 40 aa, Artificial Sequence
  Non-cyclic GFR-binding peptide
  MOD_RES (2)..(36)..(37): Xaa is C or S
  MOD_RES (14)..(15)..(16)..(17)..(18): Xaa is A or G
  MOD_RES (19)..(20)..(21)..(22): Xaa is A or G or absent
GXESVAMGQYNKLXXXXXXXXXLYLISIASLKTPVXXAKS

SEQ ID NO: 37447 - protein, 37 aa, Artificial Sequence
  Non-cyclic GFR-binding peptide
  MOD_RES (1)..(35)..(36): Xaa is C or S
  MOD_RES (13)..(14)..(15)..(16)..(17): Xaa is A or G
  MOD_RES (18)..(19)..(20)..(21): Xaa is A or G or absent
XESVAMGQYNKLXXXXXXXXXLYLISIASLKTPVXXA

SEQ ID NO: 37448 - protein, 37 aa, Artificial Sequence
  Non-cyclic GFR-binding peptide
  MOD_RES (1)..(3)..(37): Xaa is C or S
  MOD_RES (15)..(16)..(17)..(18)..(19): Xaa is A or G
  MOD_RES (20)..(21)..(22)..(23): Xaa is A or G or absent
XGXAEVVMDQYNKLXXXXXXXXXLYLISIASLRAPVX

SEQ ID NO: 37449 - protein, 35 aa, Artificial Sequence
  Non-cyclic GFR-binding peptide
  MOD_RES (33)..(34): Xaa is C or S
  MOD_RES (11)..(12)..(13)..(14)..(15): Xaa is A or G
  MOD_RES (16)..(17)..(18)..(19): Xaa is A or G or absent
EVVMDQYNKLXXXXXXXXXLYLISIASLRAPVXXS

SEQ ID NO: 37450 - protein, 38 aa, Artificial Sequence
  Non-cyclic GFR-binding peptide
  MOD_RES (34)..(35): Xaa is C or S
  MOD_RES (12)..(13)..(14)..(15)..(16): Xaa is A or G
  MOD_RES (17)..(18)..(19)..(20): Xaa is A or G or absent
AEVVMDQYNKLXXXXXXXXXLYLISIASLRAPVXXSAP

SEQ ID NO: 37451 - protein, 42 aa, Artificial Sequence
  Non-cyclic GFR-binding peptide
  MOD_RES (2)..(4)..(36)..(37): Xaa is C or S
RXGXAEVVMDQYNKLVVNNAADLYLISIASLRAPVXXSAPAA

SEQ ID NO: 37452 - protein, 37 aa, Artificial Sequence
  Non-cyclic GFR-binding peptide
  MOD_RES (1)..(3)..(35)..(36): Xaa is C or S
XGXAEVVMDQYNKLVVNNAADLYLISIASLRAPVXXS

SEQ ID NO: 37453 - protein, 38 aa, Artificial Sequence
  Non-cyclic GFR-binding peptide
  MOD_RES (1)..(3)..(35)..(36): Xaa is C or S
XAXSEVTMNQYNKLVVNKNEDLYLISIASMKEPVXXPE

SEQ ID NO: 37454 - protein, 36 aa, Artificial Sequence
  Non-cyclic GFR-binding peptide
  MOD_RES (34)..(35): Xaa is C or S
  MOD_RES (12)..(13)..(14)..(15)..(16): Xaa is A or G
  MOD_RES (17)..(18)..(19)..(20): Xaa is A or G or absent
ESVAMGQYNKLXXXXXXXXXLYLISIASLKTPVXXA

SEQ ID NO: 37455 - protein, 38 aa, Artificial Sequence
  Non-cyclic GFR-binding peptide
  MOD_RES (1)..(3)..(37)..(38): Xaa is C or S
  MOD_RES (15)..(16)..(17)..(18)..(19): Xaa is A or G
  MOD_RES (20)..(21)..(22)..(23): Xaa is A or G or absent
XAXSEVTMNQYNKLXXXXXXXXXLYLISIASMKEPVXX

SEQ ID NO: 37456 - protein, 35 aa, Artificial Sequence
  Non-cyclic GFR-binding peptide
  MOD_RES (33)..(34): Xaa is C or S
  MOD_RES (11)..(12)..(13)..(14)..(15): Xaa is A or G
  MOD_RES (16)..(17)..(18)..(19): Xaa is A or G or absent
DVVMGQYNKLXXXXXXXXXLYLMSIASMKTPTXXP

SEQ ID NO: 37457 - protein, 35 aa, Artificial Sequence
  Non-cyclic GFR-binding peptide
  MOD_RES (33)..(34): Xaa is C or S
  MOD_RES (11)..(12)..(13)..(14)..(15): Xaa is A or G
  MOD_RES (16)..(17)..(18)..(19): Xaa is A or G or absent
SVAMGQYNKLXXXXXXXXXLYLISIASLKTPVXXA

SEQ ID NO: 37458 - protein, 39 aa, Artificial Sequence
  Non-cyclic GFR-binding peptide
  MOD_RES (1)..(3)..(35)..(36): Xaa is C or S
XAXSEVTMNQYNKLVVNKNEDLYLISIASMKEPVXXPEP

SEQ ID NO: 37459 - protein, 36 aa, Artificial Sequence
  Non-cyclic GFR-binding peptide
  MOD_RES (1)..(3)..(36): Xaa is C or S
  MOD_RES (14)..(15)..(16)..(17)..(18): Xaa is A or G
  MOD_RES (19)..(20)..(21)..(22): Xaa is A or G or absent
XGXEEVIMQYNKLXXXXXXXXXLYLMSIASTKVPAX

SEQ ID NO: 37460 - protein, 34 aa, Artificial Sequence
  Non-cyclic GFR-binding peptide
  MOD_RES (2)..(4): Xaa is C or S
LXGXEEVIMQYNKLLLVRGNDLYLMSIASTKVPA

SEQ ID NO: 37461 - protein, 32 aa, Artificial Sequence
  Non-cyclic GFR-binding peptide
  MOD_RES (1)..(32): Xaa is C or S
XEEVIMQYNKLLLVRGNDLYLMSIASTKVPAX

SEQ ID NO: 37462 - protein, 37 aa, Artificial Sequence
  Non-cyclic GFR-binding peptide
  MOD_RES (2)..(34)..(35): Xaa is C or S
AXSEVTMNQYNKLVVNKNEDLYLISIASMKEPVXXPE

SEQ ID NO: 37463 - protein, 39 aa, Artificial Sequence
  Non-cyclic GFR-binding peptide
  MOD_RES (1)..(3)..(35)..(36): Xaa is C or S
XGXESVAMGQYNKLYTVVGKDLYLISIASLKTPVXXAKS

SEQ ID NO: 37464 - protein, 39 aa, Artificial Sequence
  Non-cyclic GFR-binding peptide
  MOD_RES (34)..(35): Xaa is C or S
  MOD_RES (12)..(13)..(14)..(15)..(16): Xaa is A or G
  MOD_RES (17)..(18)..(19)..(20): Xaa is A or G or absent
AEVVMDQYNKLXXXXXXXXXLYLISIASLRAPVXXSAPA

SEQ ID NO: 37465 - protein, 36 aa, Artificial Sequence
  Non-cyclic GFR-binding peptide
  MOD_RES (2)..(4)..(36): Xaa is C or S
RXAXSEVTMNQYNKLVVNKNEDLYLISIASMKEPVX

SEQ ID NO: 37466 - protein, 44 aa, Artificial Sequence
  Non-cyclic GFR-binding peptide
  MOD_RES (2)..(4)..(38)..(39): Xaa is C or S
  MOD_RES (16)..(17)..(18)..(19)..(20): Xaa is A or G
  MOD_RES (21)..(22)..(23)..(24): Xaa is A or G or absent
HXGXSRVVMNQYNKLXXXXXXXXXLYLVSIASLKTPAXXPKPVH

SEQ ID NO: 37467 - protein, 37 aa, Artificial Sequence
  Non-cyclic GFR-binding peptide
  MOD_RES (2)..(4)..(36)..(37): Xaa is C or S
RXGXESVAMGQYNKLYTVVGKDLYLISIASLKTPVXX

SEQ ID NO: 37468 - protein, 34 aa, Artificial Sequence
  Non-cyclic GFR-binding peptide
  MOD_RES (1)..(3): Xaa is C or S
XGXAEVVMDQYNKLVVNNAADLYLISIASLRAPV

SEQ ID NO: 37469 - protein, 37 aa, Artificial Sequence
  Non-cyclic GFR-binding peptide
  MOD_RES (2)..(4): Xaa is C or S
  MOD_RES (16)..(17)..(18)..(19)..(20): Xaa is A or G
  MOD_RES (21)..(22)..(23)..(24): Xaa is A or G or absent
RXAXSEVTMNQYNKLXXXXXXXXXLYLISIASMKEPV

SEQ ID NO: 37470 - protein, 35 aa, Artificial Sequence
  Non-cyclic GFR-binding peptide
  MOD_RES (31)..(32): Xaa is C or S
EEVIMQYNKLLLVRGNDLYLMSIASTKVPAXXTSP

SEQ ID NO: 37471 - protein, 37 aa, Artificial Sequence
  Non-cyclic GFR-binding peptide
  MOD_RES (2)..(34)..(35): Xaa is C or S
GXESVAMGQYNKLYTVVGKDLYLISIASLKTPVXXAK

SEQ ID NO: 37472 - protein, 36 aa, Artificial Sequence
  Non-cyclic GFR-binding peptide
  MOD_RES (2)..(34)..(35): Xaa is C or S
GXRDVVMGQYNKLIIQQKDNLYLMSIASMKTPTXXP

SEQ ID NO: 37473 - protein, 38 aa, Artificial Sequence
  Non-cyclic GFR-binding peptide
  MOD_RES (1)..(3)..(34)..(35): Xaa is C or S
XGXEEVIMQYNKLLLVRGNDLYLMSIASTKVPAXXTSP

SEQ ID NO: 37474 - protein, 30 aa, Artificial Sequence
  Non-cyclic GFR-binding peptide
EVTMNQYNKLVVNKNEDLYLISIASMKEPV

SEQ ID NO: 37475 - protein, 40 aa, Artificial Sequence
  Non-cyclic GFR-binding peptide
  MOD_RES (2)..(34)..(35): Xaa is C or S
AXSEVTMNQYNKLVVNKNEDLYLISIASMKEPVXXPEPIG

SEQ ID NO: 37476 - protein, 34 aa, Artificial Sequence
  Non-cyclic GFR-binding peptide
  MOD_RES (33)..(34): Xaa is C or S
  MOD_RES (11)..(12)..(13)..(14)..(15): Xaa is A or G
  MOD_RES (16)..(17)..(18)..(19): Xaa is A or G or absent
SVAMGQYNKLXXXXXXXXXLYLISIASLKTPVXX

SEQ ID NO: 37477 - protein, 33 aa, Artificial Sequence
  Non-cyclic GFR-binding peptide
  MOD_RES (2)..(2): Xaa is C or S
AXSEVTMNQYNKLVVNKNEDLYLISIASMKEPV

SEQ ID NO: 37478 - protein, 36 aa, Artificial Sequence
  Non-cyclic GFR-binding peptide
  MOD_RES (34)..(35): Xaa is C or S
  MOD_RES (12)..(13)..(14)..(15)..(16): Xaa is A or G
  MOD_RES (17)..(18)..(19)..(20): Xaa is A or G or absent
RDVVMGQYNKLXXXXXXXXXLYLMSIASMKTPTXXP

SEQ ID NO: 37479 - protein, 36 aa, Artificial Sequence
  Non-cyclic GFR-binding peptide
  MOD_RES (31)..(32): Xaa is C or S
EEVIMQYNKLLLVRGNDLYLMSIASTKVPAXXTSPV

SEQ ID NO: 37480 - protein, 39 aa, Artificial Sequence
  Non-cyclic GFR-binding peptide
  MOD_RES (1)..(35)..(36): Xaa is C or S
  MOD_RES (13)..(14)..(15)..(16)..(17): Xaa is A or G
  MOD_RES (18)..(19)..(20)..(21): Xaa is A or G or absent
XRDVVMGQYNKLXXXXXXXXXLYLMSIASMKTPTXXPGA

SEQ ID NO: 37481 - protein, 31 aa, Artificial Sequence
  Non-cyclic GFR-binding peptide
  MOD_RES (1)..(1): Xaa is C or S
XEEVIMQYNKLLLVRGNDLYLMSIASTKVPA

SEQ ID NO: 37482 - protein, 41 aa, Artificial Sequence
  Non-cyclic GFR-binding peptide
  MOD_RES (1)..(3)..(36)..(37): Xaa is C or S
  MOD_RES (14)..(15)..(16)..(17)..(18): Xaa is A or G
  MOD_RES (19)..(20)..(21)..(22): Xaa is A or G or absent
XGXEEVIMQYNKLXXXXXXXXXLYLMSIASTKVPAXXTSPV

SEQ ID NO: 37483 - protein, 43 aa, Artificial Sequence
  Non-cyclic GFR-binding peptide
  MOD_RES (1)..(3)..(37)..(38): Xaa is C or S
  MOD_RES (15)..(16)..(17)..(18)..(19): Xaa is A or G
  MOD_RES (20)..(21)..(22)..(23): Xaa is A or G or absent
XGXAEVVMDQYNKLXXXXXXXXXLYLISIASLRAPVXXSAPAA

SEQ ID NO: 37484 - protein, 39 aa, Artificial Sequence
  Non-cyclic GFR-binding peptide
  MOD_RES (34)..(35): Xaa is C or S
  MOD_RES (12)..(13)..(14)..(15)..(16): Xaa is A or G
  MOD_RES (17)..(18)..(19)..(20): Xaa is A or G or absent
SEVTMNQYNKLXXXXXXXXXLYLISIASMKEPVXXPEPI

SEQ ID NO: 37485 - protein, 40 aa, Artificial Sequence
  Non-cyclic GFR-binding peptide
  MOD_RES (1)..(3)..(37)..(38): Xaa is C or S
  MOD_RES (15)..(16)..(17)..(18)..(19): Xaa is A or G
  MOD_RES (20)..(21)..(22)..(23): Xaa is A or G or absent
XGXESVAMGQYNKLXXXXXXXXXLYLISIASLKTPVXXAK

SEQ ID NO: 37486 - protein, 37 aa, Artificial Sequence
  Non-cyclic GFR-binding peptide
  MOD_RES (33)..(34): Xaa is C or S
  MOD_RES (11)..(12)..(13)..(14)..(15): Xaa is A or G
  MOD_RES (16)..(17)..(18)..(19): Xaa is A or G or absent
EVVMDQYNKLXXXXXXXXXLYLISIASLRAPVXXSAP

SEQ ID NO: 37487 - protein, 43 aa, Artificial Sequence
  Non-cyclic GFR-binding peptide
  MOD_RES (2)..(4)..(38)..(39): Xaa is C or S
  MOD_RES (16)..(17)..(18)..(19)..(20): Xaa is A or G
  MOD_RES (21)..(22)..(23)..(24): Xaa is A or G or absent
RXGXAEVVMDQYNKLXXXXXXXXXLYLISIASLRAPVXXSAPA

SEQ ID NO: 37488 - protein, 39 aa, Artificial Sequence
  Non-cyclic GFR-binding peptide
  MOD_RES (2)..(33)..(34): Xaa is C or S
GXEEVIMQYNKLLLVRGNDLYLMSIASTKVPAXXTSPVR

SEQ ID NO: 37489 - protein, 38 aa, Artificial Sequence
  Non-cyclic GFR-binding peptide
  MOD_RES (1)..(3)..(37)..(38): Xaa is C or S
  MOD_RES (15)..(16)..(17)..(18)..(19): Xaa is A or G
  MOD_RES (20)..(21)..(22)..(23): Xaa is A or G or absent
XGXRDVVMGQYNKLXXXXXXXXXLYLMSIASMKTPTXX

SEQ ID NO: 37490 - protein, 36 aa, Artificial Sequence
  Non-cyclic GFR-binding peptide
  MOD_RES (2)..(4)..(36): Xaa is C or S
RXGXESVAMGQYNKLYTVVGKDLYLISIASLKTPVX

SEQ ID NO: 37491 - protein, 36 aa, Artificial Sequence
  Non-cyclic GFR-binding peptide
  MOD_RES (2)..(36): Xaa is C or S
  MOD_RES (14)..(15)..(16)..(17)..(18): Xaa is A or G
  MOD_RES (19)..(20)..(21)..(22): Xaa is A or G or absent
AXSEVTMNQYNKLXXXXXXXXXLYLISIASMKEPVX

SEQ ID NO: 37492 - protein, 34 aa, Artificial Sequence
  Non-cyclic GFR-binding peptide
  MOD_RES (31)..(32): Xaa is C or S
EVTMNQYNKLVVNKNEDLYLISIASMKEPVXXPE

SEQ ID NO: 37493 - protein, 36 aa, Artificial Sequence
  Non-cyclic GFR-binding peptide
  MOD_RES (32)..(33): Xaa is C or S
SEVTMNQYNKLVVNKNEDLYLISIASMKEPVXXPEP

SEQ ID NO: 37494 - protein, 40 aa, Artificial Sequence
  Non-cyclic GFR-binding peptide
  MOD_RES (2)..(4)..(35)..(36): Xaa is C or S
LXGXEEVIMQYNKLLLVRGNDLYLMSIASTKVPAXXTSPV

SEQ ID NO: 37495 - protein, 41 aa, Artificial Sequence
  Non-cyclic GFR-binding peptide
  MOD_RES (2)..(4)..(36)..(37): Xaa is C or S
RXGXAEVVMDQYNKLVVNNAADLYLISIASLRAPVXXSAPA

SEQ ID NO: 37496 - protein, 39 aa, Artificial Sequence
  Non-cyclic GFR-binding peptide
  MOD_RES (2)..(34)..(35): Xaa is C or S
GXAEVVMDQYNKLVVNNAADLYLISIASLRAPVXXSAPA

SEQ ID NO: 37497 - protein, 35 aa, Artificial Sequence
  Non-cyclic GFR-binding peptide
  MOD_RES (34)..(35): Xaa is C or S
  MOD_RES (12)..(13)..(14)..(15)..(16): Xaa is A or G
  MOD_RES (17)..(18)..(19)..(20): Xaa is A or G or absent
ESVAMGQYNKLXXXXXXXXXLYLISIASLKTPVXX

SEQ ID NO: 37498 - protein, 33 aa, Artificial Sequence
  Non-cyclic GFR-binding peptide
  MOD_RES (31)..(32): Xaa is C or S
DVVMGQYNKLIIQQKDNLYLMSIASMKTPTXXP

SEQ ID NO: 37499 - protein, 43 aa, Artificial Sequence
  Non-cyclic GFR-binding peptide
  MOD_RES (1)..(3)..(37)..(38): Xaa is C or S
  MOD_RES (15)..(16)..(17)..(18)..(19): Xaa is A or G
  MOD_RES (20)..(21)..(22)..(23): Xaa is A or G or absent
XAXSEVTMNQYNKLXXXXXXXXXLYLISIASMKEPVXXPEPIG

SEQ ID NO: 37500 - protein, 35 aa, Artificial Sequence
  Non-cyclic GFR-binding peptide
  MOD_RES (2)..(4): Xaa is C or S
RXGXAEVVMDQYNKLVVNNAADLYLISIASLRAPV

SEQ ID NO: 37501 - protein, 37 aa, Artificial Sequence
  Non-cyclic GFR-binding peptide
  MOD_RES (32)..(33): Xaa is C or S
SEVTMNQYNKLVVNKNEDLYLISIASMKEPVXXPEPI

SEQ ID NO: 37502 - protein, 37 aa, Artificial Sequence
  Non-cyclic GFR-binding peptide
  MOD_RES (31)..(32): Xaa is C or S
RVVMNQYNKLIVNSSDDLYLVSIASLKTPAXXPKPVH

SEQ ID NO: 37503 - protein, 40 aa, Artificial Sequence
  Non-cyclic GFR-binding peptide
  MOD_RES (2)..(4)..(38)..(39): Xaa is C or S
  MOD_RES (16)..(17)..(18)..(19)..(20): Xaa is A or G
  MOD_RES (21)..(22)..(23)..(24): Xaa is A or G or absent
RXAXSEVTMNQYNKLXXXXXXXXXLYLISIASMKEPVXXP

SEQ ID NO: 37504 - protein, 42 aa, Artificial Sequence
  Non-cyclic GFR-binding peptide
  MOD_RES (2)..(36)..(37): Xaa is C or S
  MOD_RES (14)..(15)..(16)..(17)..(18): Xaa is A or G
  MOD_RES (19)..(20)..(21)..(22): Xaa is A or G or absent
GXESVAMGQYNKLXXXXXXXXXLYLISIASLKTPVXXAKSAK

SEQ ID NO: 37505 - protein, 42 aa, Artificial Sequence
  Non-cyclic GFR-binding peptide
  MOD_RES (1)..(3)..(37)..(38): Xaa is C or S
  MOD_RES (15)..(16)..(17)..(18)..(19): Xaa is A or G
  MOD_RES (20)..(21)..(22)..(23): Xaa is A or G or absent
XGXESVAMGQYNKLXXXXXXXXXLYLISIASLKTPVXXAKSA

SEQ ID NO: 37506 - protein, 41 aa, Artificial Sequence
  Non-cyclic GFR-binding peptide
  MOD_RES (1)..(35)..(36): Xaa is C or S
  MOD_RES (13)..(14)..(15)..(16)..(17): Xaa is A or G
  MOD_RES (18)..(19)..(20)..(21): Xaa is A or G or absent
XAEVVMDQYNKLXXXXXXXXXLYLISIASLRAPVXXSAPAA

SEQ ID NO: 37507 - protein, 42 aa, Artificial Sequence
  Non-cyclic GFR-binding peptide
  MOD_RES (2)..(4)..(38)..(39): Xaa is C or S
  MOD_RES (16)..(17)..(18)..(19)..(20): Xaa is A or G
  MOD_RES (21)..(22)..(23)..(24): Xaa is A or G or absent
RXGXESVAMGQYNKLXXXXXXXXXLYLISIASLKTPVXXAKS

SEQ ID NO: 37508 - protein, 34 aa, Artificial Sequence
  Non-cyclic GFR-binding peptide
  MOD_RES (33)..(34): Xaa is C or S
  MOD_RES (11)..(12)..(13)..(14)..(15): Xaa is A or G
  MOD_RES (16)..(17)..(18)..(19): Xaa is A or G or absent
EEVIMQYNKLXXXXXXXXXLYLMSIASTKVPAXX

SEQ ID NO: 37509 - protein, 39 aa, Artificial Sequence
  Non-cyclic GFR-binding peptide
  MOD_RES (33)..(34): Xaa is C or S
  MOD_RES (11)..(12)..(13)..(14)..(15): Xaa is A or G
  MOD_RES (16)..(17)..(18)..(19): Xaa is A or G or absent
EVVMDQYNKLXXXXXXXXXLYLISIASLRAPVXXSAPAA

SEQ ID NO: 37510 - protein, 39 aa, Artificial Sequence
  Non-cyclic GFR-binding peptide
  MOD_RES (2)..(35)..(36): Xaa is C or S
  MOD_RES (13)..(14)..(15)..(16)..(17): Xaa is A or G
  MOD_RES (18)..(19)..(20)..(21): Xaa is A or G or absent
GXEEVIMQYNKLXXXXXXXXXLYLMSIASTKVPAXXTSP

SEQ ID NO: 37511 - protein, 40 aa, Artificial Sequence
  Non-cyclic GFR-binding peptide
  MOD_RES (2)..(4)..(36)..(37): Xaa is C or S
RXGXAEVVMDQYNKLVVNNAADLYLISIASLRAPVXXSAP

SEQ ID NO: 37512 - protein, 40 aa, Artificial Sequence
  Non-cyclic GFR-binding peptide
  MOD_RES (2)..(34)..(35): Xaa is C or S
GXESVAMGQYNKLYTVVGKDLYLISIASLKTPVXXAKSAK

SEQ ID NO: 37513 - protein, 36 aa, Artificial Sequence
  Non-cyclic GFR-binding peptide
  MOD_RES (2)..(4)..(36): Xaa is C or S
RXGXAEVVMDQYNKLVVNNAADLYLISIASLRAPVX

SEQ ID NO: 37514 - protein, 37 aa, Artificial Sequence
  Non-cyclic GFR-binding peptide
  MOD_RES (1)..(3)..(36)..(37): Xaa is C or S
  MOD_RES (14)..(15)..(16)..(17)..(18): Xaa is A or G
  MOD_RES (19)..(20)..(21)..(22): Xaa is A or G or absent
XGXEEVIMQYNKLXXXXXXXXXLYLMSIASTKVPAXX

SEQ ID NO: 37515 - protein, 41 aa, Artificial Sequence
  Non-cyclic GFR-binding peptide
  MOD_RES (2)..(4)..(38)..(39): Xaa is C or S
  MOD_RES (16)..(17)..(18)..(19)..(20): Xaa is A or G
  MOD_RES (21)..(22)..(23)..(24): Xaa is A or G or absent
RXAXSEVTMNQYNKLXXXXXXXXXLYLISIASMKEPVXXPE

SEQ ID NO: 37516 - protein, 34 aa, Artificial Sequence
  Non-cyclic GFR-binding peptide
  MOD_RES (31)..(32): Xaa is C or S
EVVMDQYNKLVVNNAADLYLISIASLRAPVXXSA

SEQ ID NO: 37517 - protein, 37 aa, Artificial Sequence
  Non-cyclic GFR-binding peptide
  MOD_RES (2)..(4): Xaa is C or S
  MOD_RES (16)..(17)..(18)..(19)..(20): Xaa is A or G
  MOD_RES (21)..(22)..(23)..(24): Xaa is A or G or absent
SXGXRDVVMGQYNKLXXXXXXXXXLYLMSIASMKTPT

SEQ ID NO: 37518 - protein, 40 aa, Artificial Sequence
  Non-cyclic GFR-binding peptide
  MOD_RES (2)..(4)..(38)..(39): Xaa is C or S
  MOD_RES (16)..(17)..(18)..(19)..(20): Xaa is A or G
  MOD_RES (21)..(22)..(23)..(24): Xaa is A or G or absent
RXGXAEVVMDQYNKLXXXXXXXXXLYLISIASLRAPVXXS

SEQ ID NO: 37519 - protein, 35 aa, Artificial Sequence
  Non-cyclic GFR-binding peptide
  MOD_RES (2)..(4): Xaa is C or S
RXAXSEVTMNQYNKLVVNKNEDLYLISIASMKEPV

SEQ ID NO: 37520 - protein, 38 aa, Artificial Sequence
  Non-cyclic GFR-binding peptide
  MOD_RES (2)..(4)..(36)..(37): Xaa is C or S
SXGXRDVVMGQYNKLIIQQKDNLYLMSIASMKTPTXXP

SEQ ID NO: 37521 - protein, 38 aa, Artificial Sequence
  Non-cyclic GFR-binding peptide
  MOD_RES (1)..(3)..(36)..(37): Xaa is C or S
  MOD_RES (14)..(15)..(16)..(17)..(18): Xaa is A or G
  MOD_RES (19)..(20)..(21)..(22): Xaa is A or G or absent
XGXEEVIMQYNKLXXXXXXXXXLYLMSIASTKVPAXXT

SEQ ID NO: 37522 - protein, 32 aa, Artificial Sequence
  Non-cyclic GFR-binding peptide
  MOD_RES (32)..(32): Xaa is C or S
RDVVMGQYNKLIIQQKDNLYLMSIASMKTPTX

SEQ ID NO: 37523 - protein, 30 aa, Artificial Sequence; identical to SEQ ID NO: 1782
  Non-cyclic GFR-binding peptide

SEQ ID NO: 37524 - protein, 36 aa, Artificial Sequence
  Non-cyclic GFR-binding peptide
  MOD_RES (1)..(34)..(35): Xaa is C or S
  MOD_RES (12)..(13)..(14)..(15)..(16): Xaa is A or G
  MOD_RES (17)..(18)..(19)..(20): Xaa is A or G or absent
XEEVIMQYNKLXXXXXXXXXLYLMSIASTKVPAXXT

SEQ ID NO: 37525 - protein, 37 aa, Artificial Sequence
  Non-cyclic GFR-binding peptide
  MOD_RES (31)..(32): Xaa is C or S
EVTMNQYNKLVVNKNEDLYLISIASMKEPVXXPEPIG

SEQ ID NO: 37526 - protein, 36 aa, Artificial Sequence
  Non-cyclic GFR-binding peptide
  MOD_RES (33)..(34): Xaa is C or S
  MOD_RES (11)..(12)..(13)..(14)..(15): Xaa is A or G
  MOD_RES (16)..(17)..(18)..(19): Xaa is A or G or absent
EVTMNQYNKLXXXXXXXXXLYLISIASMKEPVXXPE

SEQ ID NO: 37527 - protein, 42 aa, Artificial Sequence
  Non-cyclic GFR-binding peptide
  MOD_RES (2)..(4)..(36)..(37): Xaa is C or S
RXAXSEVTMNQYNKLVVNKNEDLYLISIASMKEPVXXPEPIG

SEQ ID NO: 37528 - protein, 37 aa, Artificial Sequence
  Non-cyclic GFR-binding peptide
  MOD_RES (31)..(32): Xaa is C or S
EVVMDQYNKLVVNNAADLYLISIASLRAPVXXSAPAA

SEQ ID NO: 37529 - protein, 37 aa, Artificial Sequence
  Non-cyclic GFR-binding peptide
  MOD_RES (2)..(4): Xaa is C or S
  MOD_RES (16)..(17)..(18)..(19)..(20): Xaa is A or G
  MOD_RES (21)..(22)..(23)..(24): Xaa is A or G or absent
RXGXESVAMGQYNKLXXXXXXXXXLYLISIASLKTPV

SEQ ID NO: 37530 - protein, 37 aa, Artificial Sequence
  Non-cyclic GFR-binding peptide
  MOD_RES (1)..(3)..(37): Xaa is C or S
  MOD_RES (15)..(16)..(17)..(18)..(19): Xaa is A or G
  MOD_RES (20)..(21)..(22)..(23): Xaa is A or G or absent
XGXESVAMGQYNKLXXXXXXXXXLYLISIASLKTPVX

SEQ ID NO: 37531 - protein, 37 aa, Artificial Sequence
  Non-cyclic GFR-binding peptide
  MOD_RES (34)..(35): Xaa is C or S
  MOD_RES (12)..(13)..(14)..(15)..(16): Xaa is A or G
  MOD_RES (17)..(18)..(19)..(20): Xaa is A or G or absent
RDVVMGQYNKLXXXXXXXXXLYLMSIASMKTPTXXPG

SEQ ID NO: 37532 - protein, 33 aa, Artificial Sequence
  Non-cyclic GFR-binding peptide
  MOD_RES (1)..(33): Xaa is C or S
XAEVVMDQYNKLVVNNAADLYLISIASLRAPVX

SEQ ID NO: 37533 - protein, 32 aa, Artificial Sequence
  Non-cyclic GFR-binding peptide
  MOD_RES (31)..(32): Xaa is C or S
EVVMDQYNKLVVNNAADLYLISIASLRAPVXX

SEQ ID NO: 37534 - protein, 41 aa, Artificial Sequence
  Non-cyclic GFR-binding peptide
  MOD_RES (2)..(4)..(37)..(38): Xaa is C or S
  MOD_RES (15)..(16)..(17)..(18)..(19): Xaa is A or G
  MOD_RES (20)..(21)..(22)..(23): Xaa is A or G or absent
LXGXEEVIMQYNKLXXXXXXXXXLYLMSIASTKVPAXXTSP

SEQ ID NO: 37535 - protein, 35 aa, Artificial Sequence
  Non-cyclic GFR-binding peptide
  MOD_RES (1)..(3): Xaa is C or S
  MOD_RES (14)..(15)..(16)..(17)..(18): Xaa is A or G
  MOD_RES (19)..(20)..(21)..(22): Xaa is A or G or absent
XGXEEVIMQYNKLXXXXXXXXXLYLMSIASTKVPA

SEQ ID NO: 37536 - protein, 39 aa, Artificial Sequence
  Non-cyclic GFR-binding peptide
  MOD_RES (1)..(3)..(37)..(38): Xaa is C or S
  MOD_RES (15)..(16)..(17)..(18)..(19): Xaa is A or G
  MOD_RES (20)..(21)..(22)..(23): Xaa is A or G or absent
XGXESVAMGQYNKLXXXXXXXXXLYLISIASLKTPVXXA

SEQ ID NO: 37537 - protein, 37 aa, Artificial Sequence
  Non-cyclic GFR-binding peptide
  MOD_RES (33)..(34): Xaa is C or S
  MOD_RES (11)..(12)..(13)..(14)..(15): Xaa is A or G
  MOD_RES (16)..(17)..(18)..(19): Xaa is A or G or absent
EEVIMQYNKLXXXXXXXXXLYLMSIASTKVPAXXTSP

SEQ ID NO: 37538 - protein, 37 aa, Artificial Sequence
  Non-cyclic GFR-binding peptide
  MOD_RES (2)..(4)..(36)..(37): Xaa is C or S
RXAXSEVTMNQYNKLVVNKNEDLYLISIASMKEPVXX

SEQ ID NO: 37539 - protein, 41 aa, Artificial Sequence
  Non-cyclic GFR-binding peptide
  MOD_RES (2)..(36)..(37): Xaa is C or S
  MOD_RES (14)..(15)..(16)..(17)..(18): Xaa is A or G
  MOD_RES (19)..(20)..(21)..(22): Xaa is A or G or absent
GXESVAMGQYNKLXXXXXXXXXLYLISIASLKTPVXXAKSA

SEQ ID NO: 37540 - protein, 41 aa, Artificial Sequence
  Non-cyclic GFR-binding peptide
  MOD_RES (1)..(3)..(37)..(38): Xaa is C or S
  MOD_RES (15)..(16)..(17)..(18)..(19): Xaa is A or G
  MOD_RES (20)..(21)..(22)..(23): Xaa is A or G or absent
XGXRDVVMGQYNKLXXXXXXXXXLYLMSIASMKTPTXXPGA

SEQ ID NO: 37541 - protein, 38 aa, Artificial Sequence
  Non-cyclic GFR-binding peptide
  MOD_RES (32)..(33): Xaa is C or S
AEVVMDQYNKLVVNNAADLYLISIASLRAPVXXSAPAA

SEQ ID NO: 37542 - protein, 31 aa, Artificial Sequence
  Non-cyclic GFR-binding peptide
  MOD_RES (31)..(31): Xaa is C or S
EEVIMQYNKLLLVRGNDLYLMSIASTKVPAX

SEQ ID NO: 37543 - protein, 34 aa, Artificial Sequence
  Non-cyclic GFR-binding peptide
  MOD_RES (1)..(33)..(34): Xaa is C or S
XRDVVMGQYNKLIIQQKDNLYLMSIASMKTPTXX

SEQ ID NO: 37544 - protein, 33 aa, Artificial Sequence
  Non-cyclic GFR-binding peptide
  MOD_RES (12)..(13)..(14)..(15)..(16): Xaa is A or G
  MOD_RES (17)..(18)..(19)..(20): Xaa is A or G or absent
RDVVMGQYNKLXXXXXXXXXLYLMSIASMKTPT

SEQ ID NO: 37545 - protein, 40 aa, Artificial Sequence
  Non-cyclic GFR-binding peptide
  MOD_RES (1)..(3)..(37)..(38): Xaa is C or S
  MOD_RES (15)..(16)..(17)..(18)..(19): Xaa is A or G
  MOD_RES (20)..(21)..(22)..(23): Xaa is A or G or absent
XGXAEVVMDQYNKLXXXXXXXXXLYLISIASLRAPVXXSA

SEQ ID NO: 37546 - protein, 36 aa, Artificial Sequence
  Non-cyclic GFR-binding peptide
  MOD_RES (1)..(3): Xaa is C or S
  MOD_RES (15)..(16)..(17)..(18)..(19): Xaa is A or G
  MOD_RES (20)..(21)..(22)..(23): Xaa is A or G or absent
XAXSEVTMNQYNKLXXXXXXXXXLYLISIASMKEPV

SEQ ID NO: 37547 - protein, 31 aa, Artificial Sequence
  Non-cyclic GFR-binding peptide
ESVAMGQYNKLYTVVGKDLYLISIASLKTPV

SEQ ID NO: 37548 - protein, 41 aa, Artificial Sequence
  Non-cyclic GFR-binding peptide
  MOD_RES (1)..(3)..(37)..(38): Xaa is C or S
  MOD_RES (15)..(16)..(17)..(18)..(19): Xaa is A or G
  MOD_RES (20)..(21)..(22)..(23): Xaa is A or G or absent
XGXESVAMGQYNKLXXXXXXXXXLYLISIASLKTPVXXAKS

SEQ ID NO: 37549 - protein, 41 aa, Artificial Sequence
  Non-cyclic GFR-binding peptide
  MOD_RES (2)..(4)..(36)..(37): Xaa is C or S
SXGXRDVVMGQYNKLIIQQKDNLYLMSIASMKTPTXXPGAS

SEQ ID NO: 37550 - protein, 34 aa, Artificial Sequence
  Non-cyclic GFR-binding peptide
  MOD_RES (1)..(3)..(34): Xaa is C or S
XGXEEVIMQYNKLLLVRGNDLYLMSIASTKVPAX

SEQ ID NO: 37551 - protein, 40 aa, Artificial Sequence
  Non-cyclic GFR-binding peptide
  MOD_RES (2)..(36)..(37): Xaa is C or S
  MOD_RES (14)..(15)..(16)..(17)..(18): Xaa is A or G
  MOD_RES (19)..(20)..(21)..(22): Xaa is A or G or absent
AXSEVTMNQYNKLXXXXXXXXXLYLISIASMKEPVXXPEP

SEQ ID NO: 37552 - protein, 38 aa, Artificial Sequence
  Non-cyclic GFR-binding peptide
  MOD_RES (33)..(34): Xaa is C or S
  MOD_RES (11)..(12)..(13)..(14)..(15): Xaa is A or G
  MOD_RES (16)..(17)..(18)..(19): Xaa is A or G or absent
SVAMGQYNKLXXXXXXXXXLYLISIASLKTPVXXAKSA

SEQ ID NO: 37553 - protein, 35 aa, Artificial Sequence
  Non-cyclic GFR-binding peptide
  MOD_RES (34)..(35): Xaa is C or S
  MOD_RES (12)..(13)..(14)..(15)..(16): Xaa is A or G
  MOD_RES (17)..(18)..(19)..(20): Xaa is A or G or absent
AEVVMDQYNKLXXXXXXXXXLYLISIASLRAPVXX

SEQ ID NO: 37554 - protein, 38 aa, Artificial Sequence
  Non-cyclic GFR-binding peptide
  MOD_RES (1)..(33)..(34): Xaa is C or S
XRDVVMGQYNKLIIQQKDNLYLMSIASMKTPTXXPGAS

SEQ ID NO: 37555 - protein, 36 aa, Artificial Sequence
  Non-cyclic GFR-binding peptide
  MOD_RES (34)..(35): Xaa is C or S
  MOD_RES (12)..(13)..(14)..(15)..(16): Xaa is A or G
  MOD_RES (17)..(18)..(19)..(20): Xaa is A or G or absent
SEVTMNQYNKLXXXXXXXXXLYLISIASMKEPVXXP

SEQ ID NO: 37556 - protein, 36 aa, Artificial Sequence
  Non-cyclic GFR-binding peptide
  MOD_RES (33)..(34): Xaa is C or S
  MOD_RES (11)..(12)..(13)..(14)..(15): Xaa is A or G
  MOD_RES (16)..(17)..(18)..(19): Xaa is A or G or absent
EEVIMQYNKLXXXXXXXXXLYLMSIASTKVPAXXTS

SEQ ID NO: 37557 - protein, 39 aa, Artificial Sequence
  Non-cyclic GFR-binding peptide
  MOD_RES (33)..(34): Xaa is C or S
  MOD_RES (11)..(12)..(13)..(14)..(15): Xaa is A or G
  MOD_RES (16)..(17)..(18)..(19): Xaa is A or G or absent
RVVMNQYNKLXXXXXXXXXLYLVSIASLKTPAXXPKPVH

SEQ ID NO: 37558 - protein, 38 aa, Artificial Sequence
  Non-cyclic GFR-binding peptide
  MOD_RES (1)..(3)..(35)..(36): Xaa is C or S
XGXAEVVMDQYNKLVVNNAADLYLISIASLRAPVXXSA

SEQ ID NO: 37559 - protein, 36 aa, Artificial Sequence
  Non-cyclic GFR-binding peptide
  MOD_RES (1)..(35)..(36): Xaa is C or S
  MOD_RES (13)..(14)..(15)..(16)..(17): Xaa is A or G
  MOD_RES (18)..(19)..(20)..(21): Xaa is A or G or absent
XRDVVMGQYNKLXXXXXXXXXLYLMSIASMKTPTXX

SEQ ID NO: 37560 - protein, 32 aa, Artificial Sequence
  Non-cyclic GFR-binding peptide
  MOD_RES (2)..(2): Xaa is C or S
GXEEVIMQYNKLLLVRGNDLYLMSIASTKVPA

SEQ ID NO: 37561 - protein, 38 aa, Artificial Sequence
  Non-cyclic GFR-binding peptide
  MOD_RES (1)..(33)..(34): Xaa is C or S
XSEVTMNQYNKLVVNKNEDLYLISIASMKEPVXXPEPI

SEQ ID NO: 37562 - protein, 38 aa, Artificial Sequence
  Non-cyclic GFR-binding peptide
  MOD_RES (2)..(4)..(36)..(37): Xaa is C or S
RXGXAEVVMDQYNKLVVNNAADLYLISIASLRAPVXXS

SEQ ID NO: 37563 - protein, 43 aa, Artificial Sequence
  Non-cyclic GFR-binding peptide
  MOD_RES (1)..(3)..(37)..(38): Xaa is C or S
  MOD_RES (15)..(16)..(17)..(18)..(19): Xaa is A or G
  MOD_RES (20)..(21)..(22)..(23): Xaa is A or G or absent
XGXRDVVMGQYNKLXXXXXXXXXLYLMSIASMKTPTXXPGASG

SEQ ID NO: 37564 - protein, 36 aa, Artificial Sequence
  Non-cyclic GFR-binding peptide
  MOD_RES (2)..(4)..(35)..(36): Xaa is C or S
LXGXEEVIMQYNKLLLVRGNDLYLMSIASTKVPAXX

SEQ ID NO: 37565 - protein, 42 aa, Artificial Sequence
  Non-cyclic GFR-binding peptide
  MOD_RES (2)..(4)..(38)..(39): Xaa is C or S
  MOD_RES (16)..(17)..(18)..(19)..(20): Xaa is A or G
  MOD_RES (21)..(22)..(23)..(24): Xaa is A or G or absent
RXGXAEVVMDQYNKLXXXXXXXXXLYLISIASLRAPVXXSAP

SEQ ID NO: 37566 - protein, 40 aa, Artificial Sequence
  Non-cyclic GFR-binding peptide
  MOD_RES (34)..(35): Xaa is C or S
  MOD_RES (12)..(13)..(14)..(15)..(16): Xaa is A or G
  MOD_RES (17)..(18)..(19)..(20): Xaa is A or G or absent
RDVVMGQYNKLXXXXXXXXXLYLMSIASMKTPTXXPGASG

SEQ ID NO: 37567 - protein, 35 aa, Artificial Sequence
  Non-cyclic GFR-binding peptide
  MOD_RES (1)..(33)..(34): Xaa is C or S
XSEVTMNQYNKLVVNKNEDLYLISIASMKEPVXXP

SEQ ID NO: 37568 - protein, 33 aa, Artificial Sequence
  Non-cyclic GFR-binding peptide
  MOD_RES (33)..(33): Xaa is C or S
  MOD_RES (11)..(12)..(13)..(14)..(15): Xaa is A or G
  MOD_RES (16)..(17)..(18)..(19): Xaa is A or G or absent
EEVIMQYNKLXXXXXXXXXLYLMSIASTKVPAX

SEQ ID NO: 37569 - protein, 34 aa, Artificial Sequence
  Non-cyclic GFR-binding peptide
  MOD_RES (32)..(33): Xaa is C or S
SEVTMNQYNKLVVNKNEDLYLISIASMKEPVXXP

SEQ ID NO: 37570 - protein, 35 aa, Artificial Sequence
  Non-cyclic GFR-binding peptide
  MOD_RES (1)..(34)..(35): Xaa is C or S
  MOD_RES (12)..(13)..(14)..(15)..(16): Xaa is A or G
  MOD_RES (17)..(18)..(19)..(20): Xaa is A or G or absent
XEEVIMQYNKLXXXXXXXXXLYLMSIASTKVPAXX

SEQ ID NO: 37571 - protein, 34 aa, Artificial Sequence
  Non-cyclic GFR-binding peptide
  MOD_RES (32)..(33): Xaa is C or S
RDVVMGQYNKLIIQQKDNLYLMSIASMKTPTXXP

SEQ ID NO: 37572 - protein, 32 aa, Artificial Sequence
  Non-cyclic GFR-binding peptide
  MOD_RES (11)..(12)..(13)..(14)..(15): Xaa is A or G
  MOD_RES (16)..(17)..(18)..(19): Xaa is A or G or absent
EVVMDQYNKLXXXXXXXXXLYLISIASLRAPV

SEQ ID NO: 37573 - protein, 37 aa, Artificial Sequence
  Non-cyclic GFR-binding peptide
  MOD_RES (1)..(33)..(34): Xaa is C or S
XAEVVMDQYNKLVVNNAADLYLISIASLRAPVXXSAP

SEQ ID NO: 37574 - protein, 34 aa, Artificial Sequence
  Non-cyclic GFR-binding peptide
  MOD_RES (1)..(1): Xaa is C or S
  MOD_RES (13)..(14)..(15)..(16)..(17): Xaa is A or G
  MOD_RES (18)..(19)..(20)..(21): Xaa is A or G or absent
XAEVVMDQYNKLXXXXXXXXXLYLISIASLRAPV

SEQ ID NO: 37575 - protein, 39 aa, Artificial Sequence
  Non-cyclic GFR-binding peptide
  MOD_RES (1)..(33)..(34): Xaa is C or S
XSEVTMNQYNKLVVNKNEDLYLISIASMKEPVXXPEPIG

SEQ ID NO: 37576 - protein, 34 aa, Artificial Sequence
  Non-cyclic GFR-binding peptide
  MOD_RES (31)..(32): Xaa is C or S
EEVIMQYNKLLLVRGNDLYLMSIASTKVPAXXTS

SEQ ID NO: 37577 - protein, 39 aa, Artificial Sequence
  Non-cyclic GFR-binding peptide
  MOD_RES (1)..(3)..(35)..(36): Xaa is C or S
XGXRDVVMGQYNKLIIQQKDNLYLMSIASMKTPTXXPGA

SEQ ID NO: 37578 - protein, 37 aa, Artificial Sequence
  Non-cyclic GFR-binding peptide
  MOD_RES (31)..(32): Xaa is C or S
EEVIMQYNKLLLVRGNDLYLMSIASTKVPAXXTSPVR

SEQ ID NO: 37579 - protein, 39 aa, Artificial Sequence
  Non-cyclic GFR-binding peptide
  MOD_RES (1)..(35)..(36): Xaa is C or S
  MOD_RES (13)..(14)..(15)..(16)..(17): Xaa is A or G
  MOD_RES (18)..(19)..(20)..(21): Xaa is A or G or absent
XESVAMGQYNKLXXXXXXXXXLYLISIASLKTPVXXAKS

SEQ ID NO: 37580 - protein, 39 aa, Artificial Sequence
  Non-cyclic GFR-binding peptide
  MOD_RES (2)..(34)..(35): Xaa is C or S
AXSEVTMNQYNKLVVNKNEDLYLISIASMKEPVXXPEPI

SEQ ID NO: 37581 - protein, 39 aa, Artificial Sequence
  Non-cyclic GFR-binding peptide
  MOD_RES (2)..(4)..(36)..(37): Xaa is C or S
SXGXRDVVMGQYNKLIIQQKDNLYLMSIASMKTPTXXPG

SEQ ID NO: 37582 - protein, 44 aa, Artificial Sequence
  Non-cyclic GFR-binding peptide
  MOD_RES (2)..(4)..(38)..(39): Xaa is C or S
  MOD_RES (16)..(17)..(18)..(19)..(20): Xaa is A or G
  MOD_RES (21)..(22)..(23)..(24): Xaa is A or G or absent
RXGXAEVVMDQYNKLXXXXXXXXXLYLISIASLRAPVXXSAPAA

SEQ ID NO: 37583 - protein, 34 aa, Artificial Sequence
  Non-cyclic GFR-binding peptide
  MOD_RES (34)..(34): Xaa is C or S
  MOD_RES (12)..(13)..(14)..(15)..(16): Xaa is A or G
  MOD_RES (17)..(18)..(19)..(20): Xaa is A or G or absent
ESVAMGQYNKLXXXXXXXXXLYLISIASLKTPVX

SEQ ID NO: 37584 - protein, 36 aa, Artificial Sequence
  Non-cyclic GFR-binding peptide
  MOD_RES (1)..(3): Xaa is C or S
  MOD_RES (15)..(16)..(17)..(18)..(19): Xaa is A or G
  MOD_RES (20)..(21)..(22)..(23): Xaa is A or G or absent
XGXAEVVMDQYNKLXXXXXXXXXLYLISIASLRAPV

SEQ ID NO: 37585 - protein, 38 aa, Artificial Sequence
  Non-cyclic GFR-binding peptide
  MOD_RES (2)..(36)..(37): Xaa is C or S
  MOD_RES (14)..(15)..(16)..(17)..(18): Xaa is A or G
  MOD_RES (19)..(20)..(21)..(22): Xaa is A or G or absent
AXSEVTMNQYNKLXXXXXXXXXLYLISIASMKEPVXXP

SEQ ID NO: 37586 - protein, 38 aa, Artificial Sequence
  Non-cyclic GFR-binding peptide
  MOD_RES (2)..(4)..(38): Xaa is C or S
  MOD_RES (16)..(17)..(18)..(19)..(20): Xaa is A or G
  MOD_RES (21)..(22)..(23)..(24): Xaa is A or G or absent
RXGXESVAMGQYNKLXXXXXXXXXLYLISIASLKTPVX

SEQ ID NO: 37587 - protein, 38 aa, Artificial Sequence
  Non-cyclic GFR-binding peptide
  MOD_RES (32)..(33): Xaa is C or S
ESVAMGQYNKLYTVVGKDLYLISIASLKTPVXXAKSAK

SEQ ID NO: 37588 - protein, 41 aa, Artificial Sequence
  Non-cyclic GFR-binding peptide
  MOD_RES (1)..(35)..(36): Xaa is C or S
  MOD_RES (13)..(14)..(15)..(16)..(17): Xaa is A or G
  MOD_RES (18)..(19)..(20)..(21): Xaa is A or G or absent
XSRVVMNQYNKLXXXXXXXXXLYLVSIASLKTPAXXPKPVH

SEQ ID NO: 37589 - protein, 34 aa, Artificial Sequence
  Non-cyclic GFR-binding peptide
  MOD_RES (33)..(34): Xaa is C or S
  MOD_RES (11)..(12)..(13)..(14)..(15): Xaa is A or G
  MOD_RES (16)..(17)..(18)..(19): Xaa is A or G or absent
EVTMNQYNKLXXXXXXXXXLYLISIASMKEPVXX

SEQ ID NO: 37590 - protein, 39 aa, Artificial Sequence
  Non-cyclic GFR-binding peptide
  MOD_RES (33)..(34): Xaa is C or S
  MOD_RES (11)..(12)..(13)..(14)..(15): Xaa is A or G
  MOD_RES (16)..(17)..(18)..(19): Xaa is A or G or absent
DVVMGQYNKLXXXXXXXXXLYLMSIASMKTPTXXPGASG

SEQ ID NO: 37591 - protein, 35 aa, Artificial Sequence
  Non-cyclic GFR-binding peptide
  MOD_RES (1)..(35): Xaa is C or S
  MOD_RES (13)..(14)..(15)..(16)..(17): Xaa is A or G
  MOD_RES (18)..(19)..(20)..(21): Xaa is A or G or absent
XRDVVMGQYNKLXXXXXXXXXLYLMSIASMKTPTX

SEQ ID NO: 37592 - protein, 37 aa, Artificial Sequence
  Non-cyclic GFR-binding peptide
  MOD_RES (1)..(35)..(36): Xaa is C or S
  MOD_RES (13)..(14)..(15)..(16)..(17): Xaa is A or G
  MOD_RES (18)..(19)..(20)..(21): Xaa is A or G or absent
XRDVVMGQYNKLXXXXXXXXXLYLMSIASMKTPTXXP

SEQ ID NO: 37593 - protein, 41 aa, Artificial Sequence
  Non-cyclic GFR-binding peptide
  MOD_RES (1)..(35)..(36): Xaa is C or S
  MOD_RES (13)..(14)..(15)..(16)..(17): Xaa is A or G
  MOD_RES (18)..(19)..(20)..(21): Xaa is A or G or absent
XSEVTMNQYNKLXXXXXXXXXLYLISIASMKEPVXXPEPIG

SEQ ID NO: 37594 - protein, 38 aa, Artificial Sequence
  Non-cyclic GFR-binding peptide
  MOD_RES (2)..(4)..(35)..(36): Xaa is C or S
LXGXEEVIMQYNKLLLVRGNDLYLMSIASTKVPAXXTS

SEQ ID NO: 37595 - protein, 33 aa, Artificial Sequence
  Non-cyclic GFR-binding peptide
  MOD_RES (2)..(2): Xaa is C or S
GXAEVVMDQYNKLVVNNAADLYLISIASLRAPV

SEQ ID NO: 37596 - protein, 37 aa, Artificial Sequence
  Non-cyclic GFR-binding peptide
  MOD_RES (1)..(35)..(36): Xaa is C or S
  MOD_RES (13)..(14)..(15)..(16)..(17): Xaa is A or G
  MOD_RES (18)..(19)..(20)..(21): Xaa is A or G or absent
XAEVVMDQYNKLXXXXXXXXXLYLISIASLRAPVXXS

SEQ ID NO: 37597 - protein, 40 aa, Artificial Sequence
  Non-cyclic GFR-binding peptide
  MOD_RES (34)..(35): Xaa is C or S
  MOD_RES (12)..(13)..(14)..(15)..(16): Xaa is A or G
  MOD_RES (17)..(18)..(19)..(20): Xaa is A or G or absent
ESVAMGQYNKLXXXXXXXXXLYLISIASLKTPVXXAKSAK

SEQ ID NO: 37598 - protein, 33 aa, Artificial Sequence
  Non-cyclic GFR-binding peptide
  MOD_RES (31)..(32): Xaa is C or S
SVAMGQYNKLYTVVGKDLYLISIASLKTPVXXA

SEQ ID NO: 37599 - protein, 38 aa, Artificial Sequence
  Non-cyclic GFR-binding peptide
  MOD_RES (2)..(36)..(37): Xaa is C or S
  MOD_RES (14)..(15)..(16)..(17)..(18): Xaa is A or G
  MOD_RES (19)..(20)..(21)..(22): Xaa is A or G or absent
GXAEVVMDQYNKLXXXXXXXXXLYLISIASLRAPVXXS

SEQ ID NO: 37600 - protein, 37 aa, Artificial Sequence
  Non-cyclic GFR-binding peptide
  MOD_RES (2)..(4)..(36)..(37): Xaa is C or S
RXGXAEVVMDQYNKLVVNNAADLYLISIASLRAPVXX

SEQ ID NO: 37601 - protein, 44 aa, Artificial Sequence
  Non-cyclic GFR-binding peptide
  MOD_RES (2)..(4)..(38)..(39): Xaa is C or S
  MOD_RES (16)..(17)..(18)..(19)..(20): Xaa is A or G
  MOD_RES (21)..(22)..(23)..(24): Xaa is A or G or absent
RXGXESVAMGQYNKLXXXXXXXXXLYLISIASLKTPVXXAKSAK

SEQ ID NO: 37602 - protein, 41 aa, Artificial Sequence
  Non-cyclic GFR-binding peptide
  MOD_RES (2)..(4)..(38)..(39): Xaa is C or S
  MOD_RES (16)..(17)..(18)..(19)..(20): Xaa is A or G
  MOD_RES (21)..(22)..(23)..(24): Xaa is A or G or absent
RXGXAEVVMDQYNKLXXXXXXXXXLYLISIASLRAPVXXSA

SEQ ID NO: 37603 - protein, 41 aa, Artificial Sequence
  Non-cyclic GFR-binding peptide
  MOD_RES (1)..(3)..(35)..(36): Xaa is C or S
XGXSRVVMNQYNKLIVNSSDDLYLVSIASLKTPAXXPKPVH

SEQ ID NO: 37604 - protein, 40 aa, Artificial Sequence
  Non-cyclic GFR-binding peptide
  MOD_RES (2)..(35)..(36): Xaa is C or S
  MOD_RES (13)..(14)..(15)..(16)..(17): Xaa is A or G
  MOD_RES (18)..(19)..(20)..(21): Xaa is A or G or absent
GXEEVIMQYNKLXXXXXXXXXLYLMSIASTKVPAXXTSPV

SEQ ID NO: 37605 - protein, 35 aa, Artificial Sequence
  Non-cyclic GFR-binding peptide
  MOD_RES (2)..(34)..(35): Xaa is C or S
AXSEVTMNQYNKLVVNKNEDLYLISIASMKEPVXX

SEQ ID NO: 37606 - protein, 41 aa, Artificial Sequence
  Non-cyclic GFR-binding peptide
  MOD_RES (1)..(3)..(35)..(36): Xaa is C or S
XGXRDVVMGQYNKLIIQQKDNLYLMSIASMKTPTXXPGASG

SEQ ID NO: 37607 - protein, 33 aa, Artificial Sequence
  Non-cyclic GFR-binding peptide
  MOD_RES (2)..(2): Xaa is C or S
GXESVAMGQYNKLYTVVGKDLYLISIASLKTPV

SEQ ID NO: 37608 - protein, 41 aa, Artificial Sequence
  Non-cyclic GFR-binding peptide
  MOD_RES (2)..(35)..(36): Xaa is C or S
  MOD_RES (13)..(14)..(15)..(16)..(17): Xaa is A or G
  MOD_RES (18)..(19)..(20)..(21): Xaa is A or G or absent
GXEEVIMQYNKLXXXXXXXXXLYLMSIASTKVPAXXTSPVR

SEQ ID NO: 37609 - protein, 31 aa, Artificial Sequence
  Non-cyclic GFR-binding peptide
  MOD_RES (31)..(31): Xaa is C or S
EVVMDQYNKLVVNNAADLYLISIASLRAPVX

SEQ ID NO: 37610 - protein, 30 aa, Artificial Sequence
  Non-cyclic GFR-binding peptide
EVVMDQYNKLVVNNAADLYLISIASLRAPV

SEQ ID NO: 37611 - protein, 39 aa, Artificial Sequence
  Non-cyclic GFR-binding peptide
  MOD_RES (2)..(4)..(37)..(38): Xaa is C or S
  MOD_RES (15)..(16)..(17)..(18)..(19): Xaa is A or G
  MOD_RES (20)..(21)..(22)..(23): Xaa is A or G or absent
LXGXEEVIMQYNKLXXXXXXXXXLYLMSIASTKVPAXXT

SEQ ID NO: 37612 - protein, 39 aa, Artificial Sequence
  Non-cyclic GFR-binding peptide
  MOD_RES (2)..(4)..(36)..(37): Xaa is C or S
RXGXAEVVMDQYNKLVVNNAADLYLISIASLRAPVXXSA

SEQ ID NO: 37613 - protein, 38 aa, Artificial Sequence
  Non-cyclic GFR-binding peptide
  MOD_RES (2)..(36)..(37): Xaa is C or S
  MOD_RES (14)..(15)..(16)..(17)..(18): Xaa is A or G
  MOD_RES (19)..(20)..(21)..(22): Xaa is A or G or absent
GXESVAMGQYNKLXXXXXXXXXLYLISIASLKTPVXXA

SEQ ID NO: 37614 - protein, 35 aa, Artificial Sequence
  Non-cyclic GFR-binding peptide
  MOD_RES (34)..(35): Xaa is C or S
  MOD_RES (12)..(13)..(14)..(15)..(16): Xaa is A or G
  MOD_RES (17)..(18)..(19)..(20): Xaa is A or G or absent
RDVVMGQYNKLXXXXXXXXXLYLMSIASMKTPTXX

SEQ ID NO: 37615 - protein, 38 aa, Artificial Sequence
  Non-cyclic GFR-binding peptide
  MOD_RES (34)..(35): Xaa is C or S
  MOD_RES (12)..(13)..(14)..(15)..(16): Xaa is A or G
  MOD_RES (17)..(18)..(19)..(20): Xaa is A or G or absent
ESVAMGQYNKLXXXXXXXXXLYLISIASLKTPVXXAKS

SEQ ID NO: 37616 - protein, 40 aa, Artificial Sequence
  Non-cyclic GFR-binding peptide
  MOD_RES (1)..(35)..(36): Xaa is C or S
  MOD_RES (13)..(14)..(15)..(16)..(17): Xaa is A or G
  MOD_RES (18)..(19)..(20)..(21): Xaa is A or G or absent
XSEVTMNQYNKLXXXXXXXXXLYLISIASMKEPVXXPEPI

SEQ ID NO: 37617 - protein, 39 aa, Artificial Sequence
  Non-cyclic GFR-binding peptide
  MOD_RES (1)..(35)..(36): Xaa is C or S
  MOD_RES (13)..(14)..(15)..(16)..(17): Xaa is A or G
  MOD_RES (18)..(19)..(20)..(21): Xaa is A or G or absent
XAEVVMDQYNKLXXXXXXXXXLYLISIASLRAPVXXSAP

SEQ ID NO: 37618 - protein, 36 aa, Artificial Sequence
  Non-cyclic GFR-binding peptide
  MOD_RES (33)..(34): Xaa is C or S
  MOD_RES (11)..(12)..(13)..(14)..(15): Xaa is A or G
  MOD_RES (16)..(17)..(18)..(19): Xaa is A or G or absent
EVVMDQYNKLXXXXXXXXXLYLISIASLRAPVXXSA

SEQ ID NO: 37619 - protein, 31 aa, Artificial Sequence
  Non-cyclic GFR-binding peptide
SEVTMNQYNKLVVNKNEDLYLISIASMKEPV

SEQ ID NO: 37620 - protein, 36 aa, Artificial Sequence
  Non-cyclic GFR-binding peptide
  MOD_RES (31)..(32): Xaa is C or S
DVVMGQYNKLIIQQKDNLYLMSIASMKTPTXXPGAS

SEQ ID NO: 37621 - protein, 39 aa, Artificial Sequence
  Non-cyclic GFR-binding peptide
  MOD_RES (1)..(34)..(35): Xaa is C or S
  MOD_RES (12)..(13)..(14)..(15)..(16): Xaa is A or G
  MOD_RES (17)..(18)..(19)..(20): Xaa is A or G or absent
XEEVIMQYNKLXXXXXXXXXLYLMSIASTKVPAXXTSPV

SEQ ID NO: 37622 - protein, 35 aa, Artificial Sequence
  Non-cyclic GFR-binding peptide
  MOD_RES (1)..(35): Xaa is C or S
  MOD_RES (13)..(14)..(15)..(16)..(17): Xaa is A or G
  MOD_RES (18)..(19)..(20)..(21): Xaa is A or G or absent
XESVAMGQYNKLXXXXXXXXXLYLISIASLKTPVX

SEQ ID NO: 37623 - protein, 41 aa, Artificial Sequence
  Non-cyclic GFR-binding peptide
  MOD_RES (1)..(35)..(36): Xaa is C or S
  MOD_RES (13)..(14)..(15)..(16)..(17): Xaa is A or G
  MOD_RES (18)..(19)..(20)..(21): Xaa is A or G or absent
XESVAMGQYNKLXXXXXXXXXLYLISIASLKTPVXXAKSAK

SEQ ID NO: 37624 - protein, 43 aa, Artificial Sequence
  Non-cyclic GFR-binding peptide
  MOD_RES (2)..(4)..(38)..(39): Xaa is C or S
  MOD_RES (16)..(17)..(18)..(19)..(20): Xaa is A or G
  MOD_RES (21)..(22)..(23)..(24): Xaa is A or G or absent
SXGXRDVVMGQYNKLXXXXXXXXXLYLMSIASMKTPTXXPGAS

SEQ ID NO: 37625 - protein, 39 aa, Artificial Sequence
  Non-cyclic GFR-binding peptide
  MOD_RES (1)..(33)..(34): Xaa is C or S
XAEVVMDQYNKLVVNNAADLYLISIASLRAPVXXSAPAA

SEQ ID NO: 37626 - protein, 37 aa, Artificial Sequence
  Non-cyclic GFR-binding peptide
  MOD_RES (2)..(35)..(36): Xaa is C or S
  MOD_RES (13)..(14)..(15)..(16)..(17): Xaa is A or G
  MOD_RES (18)..(19)..(20)..(21): Xaa is A or G or absent
GXEEVIMQYNKLXXXXXXXXXLYLMSIASTKVPAXXT

SEQ ID NO: 37627 - protein, 39 aa, Artificial Sequence
  Non-cyclic GFR-binding peptide
  MOD_RES (2)..(36)..(37): Xaa is C or S
  MOD_RES (14)..(15)..(16)..(17)..(18): Xaa is A or G
  MOD_RES (19)..(20)..(21)..(22): Xaa is A or G or absent
GXAEVVMDQYNKLXXXXXXXXXLYLISIASLRAPVXXSA

SEQ ID NO: 37628 - protein, 32 aa, Artificial Sequence
  Non-cyclic GFR-binding peptide
  MOD_RES (1)..(1): Xaa is C or S
XESVAMGQYNKLYTVVGKDLYLISIASLKTPV

SEQ ID NO: 37629 - protein, 42 aa, Artificial Sequence
  Non-cyclic GFR-binding peptide
  MOD_RES (2)..(4)..(38)..(39): Xaa is C or S
  MOD_RES (16)..(17)..(18)..(19)..(20): Xaa is A or G
  MOD_RES (21)..(22)..(23)..(24): Xaa is A or G or absent
SXGXRDVVMGQYNKLXXXXXXXXXLYLMSIASMKTPTXXPGA

SEQ ID NO: 37630 - protein, 34 aa, Artificial Sequence
  Non-cyclic GFR-binding peptide
  MOD_RES (2)..(2): Xaa is C or S
  MOD_RES (13)..(14)..(15)..(16)..(17): Xaa is A or G
  MOD_RES (18)..(19)..(20)..(21): Xaa is A or G or absent
GXEEVIMQYNKLXXXXXXXXXLYLMSIASTKVPA

SEQ ID NO: 37631 - protein, 34 aa, Artificial Sequence
  Non-cyclic GFR-binding peptide
  MOD_RES (31)..(32): Xaa is C or S
DVVMGQYNKLIIQQKDNLYLMSIASMKTPTXXPG

SEQ ID NO: 37632 - protein, 38 aa, Artificial Sequence
  Non-cyclic GFR-binding peptide
  MOD_RES (33)..(34): Xaa is C or S
  MOD_RES (11)..(12)..(13)..(14)..(15): Xaa is A or G
  MOD_RES (16)..(17)..(18)..(19): Xaa is A or G or absent
DVVMGQYNKLXXXXXXXXXLYLMSIASMKTPTXXPGAS

SEQ ID NO: 37633 - protein, 39 aa, Artificial Sequence
  Non-cyclic GFR-binding peptide
  MOD_RES (33)..(34): Xaa is C or S
  MOD_RES (11)..(12)..(13)..(14)..(15): Xaa is A or G
  MOD_RES (16)..(17)..(18)..(19): Xaa is A or G or absent
EEVIMQYNKLXXXXXXXXXLYLMSIASTKVPAXXTSPVR

SEQ ID NO: 37634 - protein, 40 aa, Artificial Sequence
  Non-cyclic GFR-binding peptide
  MOD_RES (2)..(34)..(35): Xaa is C or S
GXSRVVMNQYNKLIVNSSDDLYLVSIASLKTPAXXPKPVH

SEQ ID NO: 37635 - protein, 35 aa, Artificial Sequence
  Non-cyclic GFR-binding peptide
  MOD_RES (2)..(34)..(35): Xaa is C or S
GXRDVVMGQYNKLIIQQKDNLYLMSIASMKTPTXX

SEQ ID NO: 37636 - protein, 37 aa, Artificial Sequence
  Non-cyclic GFR-binding peptide
  MOD_RES (1)..(33)..(34): Xaa is C or S
XRDVVMGQYNKLIIQQKDNLYLMSIASMKTPTXXPGA

SEQ ID NO: 37637 - protein, 39 aa, Artificial Sequence
  Non-cyclic GFR-binding peptide
  MOD_RES (2)..(4)..(36)..(37): Xaa is C or S
RXGXESVAMGQYNKLYTVVGKDLYLISIASLKTPVXXAK

SEQ ID NO: 37638 - protein, 36 aa, Artificial Sequence
  Non-cyclic GFR-binding peptide
  MOD_RES (31)..(32): Xaa is C or S
EVVMDQYNKLVVNNAADLYLISIASLRAPVXXSAPA

SEQ ID NO: 37639 - protein, 33 aa, Artificial Sequence
  Non-cyclic GFR-binding peptide
  MOD_RES (1)..(33): Xaa is C or S
XSEVTMNQYNKLVVNKNEDLYLISIASMKEPVX

SEQ ID NO: 37640 - protein, 37 aa, Artificial Sequence
  Non-cyclic GFR-binding peptide
  MOD_RES (32)..(33): Xaa is C or S
AEVVMDQYNKLVVNNAADLYLISIASLRAPVXXSAPA

SEQ ID NO: 37641 - protein, 40 aa, Artificial Sequence
  Non-cyclic GFR-binding peptide
  MOD_RES (2)..(4)..(37)..(38): Xaa is C or S
  MOD_RES (15)..(16)..(17)..(18)..(19): Xaa is A or G
  MOD_RES (20)..(21)..(22)..(23): Xaa is A or G or absent
LXGXEEVIMQYNKLXXXXXXXXXLYLMSIASTKVPAXXTS

SEQ ID NO: 37642 - protein, 38 aa, Artificial Sequence
  Non-cyclic GFR-binding peptide
  MOD_RES (2)..(34)..(35): Xaa is C or S
GXAEVVMDQYNKLVVNNAADLYLISIASLRAPVXXSAP

SEQ ID NO: 37643 - protein, 38 aa, Artificial Sequence
  Non-cyclic GFR-binding peptide
  MOD_RES (2)..(34)..(35): Xaa is C or S
GXRDVVMGQYNKLIIQQKDNLYLMSIASMKTPTXXPGA

SEQ ID NO: 37644 - protein, 37 aa, Artificial Sequence
  Non-cyclic GFR-binding peptide
  MOD_RES (2)..(34)..(35): Xaa is C or S
GXRDVVMGQYNKLIIQQKDNLYLMSIASMKTPTXXPG

SEQ ID NO: 37645 - protein, 33 aa, Artificial Sequence
  Non-cyclic GFR-binding peptide
  MOD_RES (33)..(33): Xaa is C or S
  MOD_RES (11)..(12)..(13)..(14)..(15): Xaa is A or G
  MOD_RES (16)..(17)..(18)..(19): Xaa is A or G or absent
EVVMDQYNKLXXXXXXXXXLYLISIASLRAPVX

SEQ ID NO: 37646 - protein, 37 aa, Artificial Sequence
  Non-cyclic GFR-binding peptide
  MOD_RES (1)..(3)..(35)..(36): Xaa is C or S
XGXRDVVMGQYNKLIIQQKDNLYLMSIASMKTPTXXP

SEQ ID NO: 37647 - protein, 38 aa, Artificial Sequence
  Non-cyclic GFR-binding peptide
  MOD_RES (33)..(34): Xaa is C or S
  MOD_RES (11)..(12)..(13)..(14)..(15): Xaa is A or G
  MOD_RES (16)..(17)..(18)..(19): Xaa is A or G or absent
EVTMNQYNKLXXXXXXXXXLYLISIASMKEPVXXPEPI

SEQ ID NO: 37648 - protein, 37 aa, Artificial Sequence
  Non-cyclic GFR-binding peptide
  MOD_RES (1)..(33)..(34): Xaa is C or S
XSEVTMNQYNKLVVNKNEDLYLISIASMKEPVXXPEP

SEQ ID NO: 37649 - protein, 41 aa, Artificial Sequence
  Non-cyclic GFR-binding peptide
  MOD_RES (1)..(3)..(35)..(36): Xaa is C or S
XAXSEVTMNQYNKLVVNKNEDLYLISIASMKEPVXXPEPIG

SEQ ID NO: 37650 - protein, 39 aa, Artificial Sequence
  Non-cyclic GFR-binding peptide
  MOD_RES (34)..(35): Xaa is C or S
  MOD_RES (12)..(13)..(14)..(15)..(16): Xaa is A or G
  MOD_RES (17)..(18)..(19)..(20): Xaa is A or G or absent
ESVAMGQYNKLXXXXXXXXXLYLISIASLKTPVXXAKSA

SEQ ID NO: 37651 - protein, 33 aa, Artificial Sequence
  Non-cyclic GFR-binding peptide
  MOD_RES (31)..(32): Xaa is C or S
EVVMDQYNKLVVNNAADLYLISIASLRAPVXXS

SEQ ID NO: 37652 - protein, 36 aa, Artificial Sequence
  Non-cyclic GFR-binding peptide
  MOD_RES (1)..(33)..(34): Xaa is C or S
XESVAMGQYNKLYTVVGKDLYLISIASLKTPVXXAK

SEQ ID NO: 37653 - protein, 32 aa, Artificial Sequence
  Non-cyclic GFR-binding peptide
  MOD_RES (31)..(32): Xaa is C or S
SVAMGQYNKLYTVVGKDLYLISIASLKTPVXX

SEQ ID NO: 37654 - protein, 36 aa, Artificial Sequence
  Non-cyclic GFR-binding peptide
  MOD_RES (1)..(35)..(36): Xaa is C or S
  MOD_RES (13)..(14)..(15)..(16)..(17): Xaa is A or G
  MOD_RES (18)..(19)..(20)..(21): Xaa is A or G or absent
XESVAMGQYNKLXXXXXXXXXLYLISIASLKTPVXX

SEQ ID NO: 37655 - protein, 44 aa, Artificial Sequence
  Non-cyclic GFR-binding peptide
  MOD_RES (2)..(4)..(38)..(39): Xaa is C or S
  MOD_RES (16)..(17)..(18)..(19)..(20): Xaa is A or G
  MOD_RES (21)..(22)..(23)..(24): Xaa is A or G or absent
RXAXSEVTMNQYNKLXXXXXXXXXLYLISIASMKEPVXXPEPIG

SEQ ID NO: 37656 - protein, 42 aa, Artificial Sequence
  Non-cyclic GFR-binding peptide
  MOD_RES (1)..(3)..(36)..(37): Xaa is C or S
  MOD_RES (14)..(15)..(16)..(17)..(18): Xaa is A or G
  MOD_RES (19)..(20)..(21)..(22): Xaa is A or G or absent
XGXEEVIMQYNKLXXXXXXXXXLYLMSIASTKVPAXXTSPVR

SEQ ID NO: 37657 - protein, 31 aa, Artificial Sequence
  Non-cyclic GFR-binding peptide
AEVVMDQYNKLVVNNAADLYLISIASLRAPV

SEQ ID NO: 37658 - protein, 35 aa, Artificial Sequence
  Non-cyclic GFR-binding peptide
  MOD_RES (31)..(32): Xaa is C or S
EVVMDQYNKLVVNNAADLYLISIASLRAPVXXSAP

SEQ ID NO: 37659 - protein, 39 aa, Artificial Sequence
  Non-cyclic GFR-binding peptide
  MOD_RES (2)..(4)..(38)..(39): Xaa is C or S
  MOD_RES (16)..(17)..(18)..(19)..(20): Xaa is A or G
  MOD_RES (21)..(22)..(23)..(24): Xaa is A or G or absent
RXGXESVAMGQYNKLXXXXXXXXXLYLISIASLKTPVXX

SEQ ID NO: 37660 - protein, 35 aa, Artificial Sequence
  Non-cyclic GFR-binding peptide
  MOD_RES (31)..(32): Xaa is C or S
DVVMGQYNKLIIQQKDNLYLMSIASMKTPTXXPGA

SEQ ID NO: 37661 - protein, 36 aa, Artificial Sequence
  Non-cyclic GFR-binding peptide
  MOD_RES (2)..(4)..(36): Xaa is C or S
SXGXRDVVMGQYNKLIIQQKDNLYLMSIASMKTPTX

SEQ ID NO: 37662 - protein, 31 aa, Artificial Sequence
  Non-cyclic GFR-binding peptide
  MOD_RES (31)..(31): Xaa is C or S
EVTMNQYNKLVVNKNEDLYLISIASMKEPVX

SEQ ID NO: 37663 - protein, 42 aa, Artificial Sequence
  Non-cyclic GFR-binding peptide
  MOD_RES (2)..(36)..(37): Xaa is C or S
  MOD_RES (14)..(15)..(16)..(17)..(18): Xaa is A or G
  MOD_RES (19)..(20)..(21)..(22): Xaa is A or G or absent
GXRDVVMGQYNKLXXXXXXXXXLYLMSIASMKTPTXXPGASG

SEQ ID NO: 37664 - protein, 34 aa, Artificial Sequence
  Non-cyclic GFR-binding peptide
  MOD_RES (34)..(34): Xaa is C or S
  MOD_RES (12)..(13)..(14)..(15)..(16): Xaa is A or G
  MOD_RES (17)..(18)..(19)..(20): Xaa is A or G or absent
SEVTMNQYNKLXXXXXXXXXLYLISIASMKEPVX

SEQ ID NO: 37665 - protein, 34 aa, Artificial Sequence
  Non-cyclic GFR-binding peptide
  MOD_RES (31)..(32): Xaa is C or S
SVAMGQYNKLYTVVGKDLYLISIASLKTPVXXAK

SEQ ID NO: 37666 - protein, 41 aa, Artificial Sequence
  Non-cyclic GFR-binding peptide
  MOD_RES (2)..(4)..(36)..(37): Xaa is C or S
RXAXSEVTMNQYNKLVVNKNEDLYLISIASMKEPVXXPEPI

SEQ ID NO: 37667 - protein, 33 aa, Artificial Sequence
  Non-cyclic GFR-binding peptide
  MOD_RES (1)..(33): Xaa is C or S
XRDVVMGQYNKLIIQQKDNLYLMSIASMKTPTX

SEQ ID NO: 37668 - protein, 35 aa, Artificial Sequence
  Non-cyclic GFR-binding peptide
  MOD_RES (1)..(3)..(35): Xaa is C or S
XGXAEVVMDQYNKLVVNNAADLYLISIASLRAPVX

SEQ ID NO: 37669 - protein, 40 aa, Artificial Sequence
  Non-cyclic GFR-binding peptide
  MOD_RES (2)..(36)..(37): Xaa is C or S
  MOD_RES (14)..(15)..(16)..(17)..(18): Xaa is A or G
  MOD_RES (19)..(20)..(21)..(22): Xaa is A or G or absent
GXAEVVMDQYNKLXXXXXXXXXLYLISIASLRAPVXXSAP

SEQ ID NO: 37670 - protein, 33 aa, Artificial Sequence
  Non-cyclic GFR-binding peptide
  MOD_RES (33)..(33): Xaa is C or S
  MOD_RES (11)..(12)..(13)..(14)..(15): Xaa is A or G
  MOD_RES (16)..(17)..(18)..(19): Xaa is A or G or absent
SVAMGQYNKLXXXXXXXXXLYLISIASLKTPVX

SEQ ID NO: 37671 - protein, 34 aa, Artificial Sequence
  Non-cyclic GFR-binding peptide
  MOD_RES (1)..(33)..(34): Xaa is C or S
XAEVVMDQYNKLVVNNAADLYLISIASLRAPVXX

SEQ ID NO: 37672 - protein, 40 aa, Artificial Sequence
  Non-cyclic GFR-binding peptide
  MOD_RES (1)..(35)..(36): Xaa is C or S
  MOD_RES (13)..(14)..(15)..(16)..(17): Xaa is A or G
  MOD_RES (18)..(19)..(20)..(21): Xaa is A or G or absent
XAEVVMDQYNKLXXXXXXXXXLYLISIASLRAPVXXSAPA

SEQ ID NO: 37673 - protein, 37 aa, Artificial Sequence
  Non-cyclic GFR-binding peptide
  MOD_RES (2)..(36)..(37): Xaa is C or S
  MOD_RES (14)..(15)..(16)..(17)..(18): Xaa is A or G
  MOD_RES (19)..(20)..(21)..(22): Xaa is A or G or absent
AXSEVTMNQYNKLXXXXXXXXXLYLISIASMKEPVXX

SEQ ID NO: 37674 - protein, 42 aa, Artificial Sequence
  Non-cyclic GFR-binding peptide
  MOD_RES (2)..(4)..(38)..(39): Xaa is C or S
  MOD_RES (16)..(17)..(18)..(19)..(20): Xaa is A or G
  MOD_RES (21)..(22)..(23)..(24): Xaa is A or G or absent
RXAXSEVTMNQYNKLXXXXXXXXXLYLISIASMKEPVXXPEP

SEQ ID NO: 37675 - protein, 32 aa, Artificial Sequence
  Non-cyclic GFR-binding peptide
  MOD_RES (31)..(32): Xaa is C or S
EVTMNQYNKLVVNKNEDLYLISIASMKEPVXX

SEQ ID NO: 37676 - protein, 37 aa, Artificial Sequence
  Non-cyclic GFR-binding peptide
  MOD_RES (31)..(32): Xaa is C or S
SVAMGQYNKLYTVVGKDLYLISIASLKTPVXXAKSAK

SEQ ID NO: 37677 - protein, 33 aa, Artificial Sequence
  Non-cyclic GFR-binding peptide
  MOD_RES (1)..(32)..(33): Xaa is C or S
XEEVIMQYNKLLLVRGNDLYLMSIASTKVPAXX

SEQ ID NO: 37678 - protein, 33 aa, Artificial Sequence
  Non-cyclic GFR-binding peptide
  MOD_RES (31)..(32): Xaa is C or S
EVTMNQYNKLVVNKNEDLYLISIASMKEPVXXP

SEQ ID NO: 37679 - protein, 33 aa, Artificial Sequence
  Non-cyclic GFR-binding peptide
  MOD_RES (32)..(33): Xaa is C or S
AEVVMDQYNKLVVNNAADLYLISIASLRAPVXX

SEQ ID NO: 37680 - protein, 41 aa, Artificial Sequence
  Non-cyclic GFR-binding peptide
  MOD_RES (2)..(4)..(38)..(39): Xaa is C or S
  MOD_RES (16)..(17)..(18)..(19)..(20): Xaa is A or G
  MOD_RES (21)..(22)..(23)..(24): Xaa is A or G or absent
SXGXRDVVMGQYNKLXXXXXXXXXLYLMSIASMKTPTXXPG

SEQ ID NO: 37681 - protein, 32 aa, Artificial Sequence
  Non-cyclic GFR-binding peptide
  MOD_RES (1)..(1): Xaa is C or S
XSEVTMNQYNKLVVNKNEDLYLISIASMKEPV

SEQ ID NO: 37682 - protein, 40 aa, Artificial Sequence
  Non-cyclic GFR-binding peptide
  MOD_RES (34)..(35): Xaa is C or S
  MOD_RES (12)..(13)..(14)..(15)..(16): Xaa is A or G
  MOD_RES (17)..(18)..(19)..(20): Xaa is A or G or absent
SEVTMNQYNKLXXXXXXXXXLYLISIASMKEPVXXPEPIG

SEQ ID NO: 37683 - protein, 40 aa, Artificial Sequence
  Non-cyclic GFR-binding peptide
  MOD_RES (1)..(3)..(34)..(35): Xaa is C or S
XGXEEVIMQYNKLLLVRGNDLYLMSIASTKVPAXXTSPVR

SEQ ID NO: 37684 - protein, 38 aa, Artificial Sequence
  Non-cyclic GFR-binding peptide
  MOD_RES (33)..(34): Xaa is C or S
  MOD_RES (11)..(12)..(13)..(14)..(15): Xaa is A or G
  MOD_RES (16)..(17)..(18)..(19): Xaa is A or G or absent
EVVMDQYNKLXXXXXXXXXLYLISIASLRAPVXXSAPA

SEQ ID NO: 37685 - protein, 35 aa, Artificial Sequence
  Non-cyclic GFR-binding peptide
  MOD_RES (34)..(35): Xaa is C or S
  MOD_RES (12)..(13)..(14)..(15)..(16): Xaa is A or G
  MOD_RES (17)..(18)..(19)..(20): Xaa is A or G or absent
SEVTMNQYNKLXXXXXXXXXLYLISIASMKEPVXX

SEQ ID NO: 37686 - protein, 33 aa, Artificial Sequence
  Non-cyclic GFR-binding peptide
  MOD_RES (2)..(2): Xaa is C or S
GXRDVVMGQYNKLIIQQKDNLYLMSIASMKTPT

SEQ ID NO: 37687 - protein, 43 aa, Artificial Sequence
  Non-cyclic GFR-binding peptide
  MOD_RES (2)..(4)..(38)..(39): Xaa is C or S
  MOD_RES (16)..(17)..(18)..(19)..(20): Xaa is A or G
  MOD_RES (21)..(22)..(23)..(24): Xaa is A or G or absent
RXGXESVAMGQYNKLXXXXXXXXXLYLISIASLKTPVXXAKSA

SEQ ID NO: 37688 - protein, 37 aa, Artificial Sequence
  Non-cyclic GFR-binding peptide
  MOD_RES (2)..(4)..(37): Xaa is C or S
  MOD_RES (15)..(16)..(17)..(18)..(19): Xaa is A or G
  MOD_RES (20)..(21)..(22)..(23): Xaa is A or G or absent
LXGXEEVIMQYNKLXXXXXXXXXLYLMSIASTKVPAX

SEQ ID NO: 37689 - protein, 39 aa, Artificial Sequence
  Non-cyclic GFR-binding peptide
  MOD_RES (1)..(35)..(36): Xaa is C or S
  MOD_RES (13)..(14)..(15)..(16)..(17): Xaa is A or G
  MOD_RES (18)..(19)..(20)..(21): Xaa is A or G or absent
XSEVTMNQYNKLXXXXXXXXXLYLISIASMKEPVXXPEP

SEQ ID NO: 37690 - protein, 42 aa, Artificial Sequence
  Non-cyclic GFR-binding peptide
  MOD_RES (2)..(4)..(36)..(37): Xaa is C or S
HXGXSRVVMNQYNKLIVNSSDDLYLVSIASLKTPAXXPKPVH

SEQ ID NO: 37691 - protein, 36 aa, Artificial Sequence
  Non-cyclic GFR-binding peptide
  MOD_RES (2)..(34)..(35): Xaa is C or S
GXESVAMGQYNKLYTVVGKDLYLISIASLKTPVXXA

SEQ ID NO: 37692 - protein, 33 aa, Artificial Sequence
  Non-cyclic GFR-binding peptide
  MOD_RES (12)..(13)..(14)..(15)..(16): Xaa is A or G
  MOD_RES (17)..(18)..(19)..(20): Xaa is A or G or absent
AEVVMDQYNKLXXXXXXXXXLYLISIASLRAPV

SEQ ID NO: 37693 - protein, 38 aa, Artificial Sequence
  Non-cyclic GFR-binding peptide
  MOD_RES (34)..(35): Xaa is C or S
  MOD_RES (12)..(13)..(14)..(15)..(16): Xaa is A or G
  MOD_RES (17)..(18)..(19)..(20): Xaa is A or G or absent
RDVVMGQYNKLXXXXXXXXXLYLMSIASMKTPTXXPGA

SEQ ID NO: 37694 - protein, 40 aa, Artificial Sequence
  Non-cyclic GFR-binding peptide
  MOD_RES (2)..(34)..(35): Xaa is C or S
GXAEVVMDQYNKLVVNNAADLYLISIASLRAPVXXSAPAA

SEQ ID NO: 37695 - protein, 37 aa, Artificial Sequence
  Non-cyclic GFR-binding peptide
  MOD_RES (1)..(3)..(34)..(35): Xaa is C or S
XGXEEVIMQYNKLLLVRGNDLYLMSIASTKVPAXXTS

SEQ ID NO: 37696 - protein, 31 aa, Artificial Sequence
  Non-cyclic GFR-binding peptide
  MOD_RES (31)..(31): Xaa is C or S
SVAMGQYNKLYTVVGKDLYLISIASLKTPVX

SEQ ID NO: 37697 - protein, 35 aa, Artificial Sequence
  Non-cyclic GFR-binding peptide
  MOD_RES (1)..(32)..(33): Xaa is C or S
XEEVIMQYNKLLLVRGNDLYLMSIASTKVPAXXTS

SEQ ID NO: 37698 - protein, 40 aa, Artificial Sequence
  Non-cyclic GFR-binding peptide
  MOD_RES (1)..(3)..(36)..(37): Xaa is C or S
  MOD_RES (14)..(15)..(16)..(17)..(18): Xaa is A or G
  MOD_RES (19)..(20)..(21)..(22): Xaa is A or G or absent
XGXEEVIMQYNKLXXXXXXXXXLYLMSIASTKVPAXXTSP

SEQ ID NO: 37699 - protein, 36 aa, Artificial Sequence
  Non-cyclic GFR-binding peptide
  MOD_RES (2)..(36): Xaa is C or S
  MOD_RES (14)..(15)..(16)..(17)..(18): Xaa is A or G
  MOD_RES (19)..(20)..(21)..(22): Xaa is A or G or absent
GXAEVVMDQYNKLXXXXXXXXXLYLISIASLRAPVX

SEQ ID NO: 37700 - protein, 38 aa, Artificial Sequence
  Non-cyclic GFR-binding peptide
  MOD_RES (2)..(34)..(35): Xaa is C or S
GXESVAMGQYNKLYTVVGKDLYLISIASLKTPVXXAKS

SEQ ID NO: 37701 - protein, 35 aa, Artificial Sequence
  Non-cyclic GFR-binding peptide
  MOD_RES (2)..(33)..(34): Xaa is C or S
GXEEVIMQYNKLLLVRGNDLYLMSIASTKVPAXXT

SEQ ID NO: 37702 - protein, 35 aa, Artificial Sequence
  Non-cyclic GFR-binding peptide
  MOD_RES (2)..(4)..(35): Xaa is C or S
LXGXEEVIMQYNKLLLVRGNDLYLMSIASTKVPAX

SEQ ID NO: 37703 - protein, 39 aa, Artificial Sequence
  Non-cyclic GFR-binding peptide
  MOD_RES (1)..(3)..(34)..(35): Xaa is C or S
XGXEEVIMQYNKLLLVRGNDLYLMSIASTKVPAXXTSPV

SEQ ID NO: 37704 - protein, 35 aa, Artificial Sequence
  Non-cyclic GFR-binding peptide
  MOD_RES (31)..(32): Xaa is C or S
SVAMGQYNKLYTVVGKDLYLISIASLKTPVXXAKS

SEQ ID NO: 37705 - protein, 34 aa, Artificial Sequence
  Non-cyclic GFR-binding peptide
  MOD_RES (1)..(1): Xaa is C or S
  MOD_RES (13)..(14)..(15)..(16)..(17): Xaa is A or G
  MOD_RES (18)..(19)..(20)..(21): Xaa is A or G or absent
XESVAMGQYNKLXXXXXXXXXLYLISIASLKTPV

SEQ ID NO: 37706 - protein, 30 aa, Artificial Sequence; identical to SEQ ID NO: 1784
  Non-cyclic GFR-binding peptide

SEQ ID NO: 37707 - protein, 41 aa, Artificial Sequence
  Non-cyclic GFR-binding peptide
  MOD_RES (1)..(3)..(35)..(36): Xaa is C or S
XGXESVAMGQYNKLYTVVGKDLYLISIASLKTPVXXAKSAK

SEQ ID NO: 37708 - protein, 40 aa, Artificial Sequence
  Non-cyclic GFR-binding peptide
  MOD_RES (2)..(36)..(37): Xaa is C or S
  MOD_RES (14)..(15)..(16)..(17)..(18): Xaa is A or G
  MOD_RES (19)..(20)..(21)..(22): Xaa is A or G or absent
GXRDVVMGQYNKLXXXXXXXXXLYLMSIASMKTPTXXPGA

SEQ ID NO: 37709 - protein, 36 aa, Artificial Sequence
  Non-cyclic GFR-binding peptide
  MOD_RES (31)..(32): Xaa is C or S
EVTMNQYNKLVVNKNEDLYLISIASMKEPVXXPEPI

SEQ ID NO: 37710 - protein, 39 aa, Artificial Sequence
  Non-cyclic GFR-binding peptide
  MOD_RES (1)..(33)..(34): Xaa is C or S
XESVAMGQYNKLYTVVGKDLYLISIASLKTPVXXAKSAK

SEQ ID NO: 37711 - protein, 33 aa, Artificial Sequence
  Non-cyclic GFR-binding peptide
  MOD_RES (1)..(33): Xaa is C or S
XESVAMGQYNKLYTVVGKDLYLISIASLKTPVX

SEQ ID NO: 37712 - protein, 36 aa, Artificial Sequence
  Non-cyclic GFR-binding peptide
  MOD_RES (1)..(3)..(35)..(36): Xaa is C or S
XGXESVAMGQYNKLYTVVGKDLYLISIASLKTPVXX

SEQ ID NO: 37713 - protein, 37 aa, Artificial Sequence
  Non-cyclic GFR-binding peptide
  MOD_RES (2)..(36)..(37): Xaa is C or S
  MOD_RES (14)..(15)..(16)..(17)..(18): Xaa is A or G
  MOD_RES (19)..(20)..(21)..(22): Xaa is A or G or absent
GXESVAMGQYNKLXXXXXXXXXLYLISIASLKTPVXX

SEQ ID NO: 37714 - protein, 35 aa, Artificial Sequence
  Non-cyclic GFR-binding peptide
  MOD_RES (33)..(34): Xaa is C or S
  MOD_RES (11)..(12)..(13)..(14)..(15): Xaa is A or G
  MOD_RES (16)..(17)..(18)..(19): Xaa is A or G or absent
EVTMNQYNKLXXXXXXXXXLYLISIASMKEPVXXP

SEQ ID NO: 37715 - protein, 35 aa, Artificial Sequence
  Non-cyclic GFR-binding peptide
  MOD_RES (2)..(35): Xaa is C or S
  MOD_RES (13)..(14)..(15)..(16)..(17): Xaa is A or G
  MOD_RES (18)..(19)..(20)..(21): Xaa is A or G or absent
GXEEVIMQYNKLXXXXXXXXXLYLMSIASTKVPAX

SEQ ID NO: 37716 - protein, 40 aa, Artificial Sequence
  Non-cyclic GFR-binding peptide
  MOD_RES (2)..(4)..(36)..(37): Xaa is C or S
RXGXESVAMGQYNKLYTVVGKDLYLISIASLKTPVXXAKS

SEQ ID NO: 37717 - protein, 38 aa, Artificial Sequence
  Non-cyclic GFR-binding peptide
  MOD_RES (32)..(33): Xaa is C or S
SEVTMNQYNKLVVNKNEDLYLISIASMKEPVXXPEPIG

SEQ ID NO: 37718 - protein, 34 aa, Artificial Sequence
  Non-cyclic GFR-binding peptide
  MOD_RES (1)..(3): Xaa is C or S
XAXSEVTMNQYNKLVVNKNEDLYLISIASMKEPV

SEQ ID NO: 37719 - protein, 37 aa, Artificial Sequence
  Non-cyclic GFR-binding peptide
  MOD_RES (1)..(3)..(35)..(36): Xaa is C or S
XGXESVAMGQYNKLYTVVGKDLYLISIASLKTPVXXA

SEQ ID NO: 37720 - protein, 35 aa, Artificial Sequence
  Non-cyclic GFR-binding peptide
  MOD_RES (2)..(34)..(35): Xaa is C or S
GXESVAMGQYNKLYTVVGKDLYLISIASLKTPVXX

SEQ ID NO: 37721 - protein, 35 aa, Artificial Sequence
  Non-cyclic GFR-binding peptide
  MOD_RES (1)..(3)..(35): Xaa is C or S
XGXRDVVMGQYNKLIIQQKDNLYLMSIASMKTPTX

SEQ ID NO: 37722 - protein, 38 aa, Artificial Sequence
  Non-cyclic GFR-binding peptide
  MOD_RES (2)..(4)..(38): Xaa is C or S
  MOD_RES (16)..(17)..(18)..(19)..(20): Xaa is A or G
  MOD_RES (21)..(22)..(23)..(24): Xaa is A or G or absent
SXGXRDVVMGQYNKLXXXXXXXXXLYLMSIASMKTPTX

SEQ ID NO: 37723 - protein, 38 aa, Artificial Sequence
  Non-cyclic GFR-binding peptide
  MOD_RES (32)..(33): Xaa is C or S
RDVVMGQYNKLIIQQKDNLYLMSIASMKTPTXXPGASG

SEQ ID NO: 37724 - protein, 35 aa, Artificial Sequence
  Non-cyclic GFR-binding peptide
  MOD_RES (2)..(34)..(35): Xaa is C or S
GXAEVVMDQYNKLVVNNAADLYLISIASLRAPVXX

SEQ ID NO: 37725 - protein, 35 aa, Artificial Sequence
  Non-cyclic GFR-binding peptide
  MOD_RES (2)..(4): Xaa is C or S
RXGXESVAMGQYNKLYTVVGKDLYLISIASLKTPV

SEQ ID NO: 37726 - protein, 37 aa, Artificial Sequence
  Non-cyclic GFR-binding peptide
  MOD_RES (6)..(7): Xaa is C or S
GSAGPXXTPTKMSAISMLYLNDKQQIILKNYQGMVVD

SEQ ID NO: 37727 - protein, 39 aa, Artificial Sequence
  Non-cyclic GFR-binding peptide
  MOD_RES (2)..(3)..(37)..(39): Xaa is C or S
  MOD_RES (17)..(18)..(19)..(20)..(21): Xaa is A or G
  MOD_RES (22)..(23)..(24)..(25): Xaa is A or G or absent
PXXTPTKMSAISMLYLXXXXXXXXXLKNYQGMVVDRXGX

SEQ ID NO: 37728 - protein, 37 aa, Artificial Sequence
  Non-cyclic GFR-binding peptide
  MOD_RES (4)..(5): Xaa is C or S
  MOD_RES (19)..(20)..(21)..(22)..(23): Xaa is A or G
  MOD_RES (24)..(25)..(26)..(27): Xaa is A or G or absent
SKAXXVPTKLSAISILYLXXXXXXXXXLKNYQGMAVS

SEQ ID NO: 37729 - protein, 36 aa, Artificial Sequence
  Non-cyclic GFR-binding peptide
  MOD_RES (1)..(2)..(36): Xaa is C or S
  MOD_RES (16)..(17)..(18)..(19)..(20): Xaa is A or G
  MOD_RES (21)..(22)..(23)..(24): Xaa is A or G or absent
XXVPEKMSAISILYLXXXXXXXXXLKNYQNMTVESX

SEQ ID NO: 37730 - protein, 33 aa, Artificial Sequence
  Non-cyclic GFR-binding peptide
  MOD_RES (33)..(33): Xaa is C or S
  MOD_RES (14)..(15)..(16)..(17)..(18): Xaa is A or G
  MOD_RES (19)..(20)..(21)..(22): Xaa is A or G or absent
APVKTSAISMLYLXXXXXXXXXLKNYQMIVEEX

SEQ ID NO: 37731 - protein, 38 aa, Artificial Sequence
  Non-cyclic GFR-binding peptide
  MOD_RES (2)..(3)..(35)..(37): Xaa is C or S
PXXVPEKMSAISILYLDENKNVVLKNYQNMTVESXAXR

SEQ ID NO: 37732 - protein, 39 aa, Artificial Sequence
  Non-cyclic GFR-binding peptide
  MOD_RES (6)..(7): Xaa is C or S
  MOD_RES (21)..(22)..(23)..(24)..(25): Xaa is A or G
  MOD_RES (26)..(27)..(28)..(29): Xaa is A or G or absent
KASKAXXVPTKLSAISILYLXXXXXXXXXLKNYQGMAVS

SEQ ID NO: 37733 - protein, 40 aa, Artificial Sequence
  Non-cyclic GFR-binding peptide
  MOD_RES (2)..(3)..(37)..(39): Xaa is C or S
  MOD_RES (17)..(18)..(19)..(20)..(21): Xaa is A or G
  MOD_RES (22)..(23)..(24)..(25): Xaa is A or G or absent
AXXVPTKLSAISILYLXXXXXXXXXLKNYQGMAVSEXGXR

SEQ ID NO: 37734 - protein, 40 aa, Artificial Sequence
  Non-cyclic GFR-binding peptide
  MOD_RES (5)..(6)..(40): Xaa is C or S
  MOD_RES (20)..(21)..(22)..(23)..(24): Xaa is A or G
  MOD_RES (25)..(26)..(27)..(28): Xaa is A or G or absent
ASKAXXVPTKLSAISILYLXXXXXXXXXLKNYQGMAVSEX

SEQ ID NO: 37735 - protein, 37 aa, Artificial Sequence
  Non-cyclic GFR-binding peptide
  MOD_RES (1)..(35)..(37): Xaa is C or S
  MOD_RES (15)..(16)..(17)..(18)..(19): Xaa is A or G
  MOD_RES (20)..(21)..(22)..(23): Xaa is A or G or absent
XTPTKMSAISMLYLXXXXXXXXXLKNYQGMVVDRXGX

SEQ ID NO: 37736 - protein, 41 aa, Artificial Sequence
  Non-cyclic GFR-binding peptide
  MOD_RES (4)..(5)..(39)..(41): Xaa is C or S
  MOD_RES (19)..(20)..(21)..(22)..(23): Xaa is A or G
  MOD_RES (24)..(25)..(26)..(27): Xaa is A or G or absent
PASXXVPARLSAISILYLXXXXXXXXXLKNYQDMVVEAXGX

SEQ ID NO: 37737 - protein, 36 aa, Artificial Sequence
  Non-cyclic GFR-binding peptide
  MOD_RES (2)..(3)..(35): Xaa is C or S
PXXVPEKMSAISILYLDENKNVVLKNYQNMTVESXA

SEQ ID NO: 37738 - protein, 33 aa, Artificial Sequence
  Non-cyclic GFR-binding peptide
  MOD_RES (1)..(2): Xaa is C or S
XXTPTKMSAISMLYLNDKQQIILKNYQGMVVDR

SEQ ID NO: 37739 - protein, 34 aa, Artificial Sequence
  Non-cyclic GFR-binding peptide
  MOD_RES (1)..(34): Xaa is C or S
  MOD_RES (15)..(16)..(17)..(18)..(19): Xaa is A or G
  MOD_RES (20)..(21)..(22)..(23): Xaa is A or G or absent
XAPVKTSAISMLYLXXXXXXXXXLKNYQMIVEEX

SEQ ID NO: 37740 - protein, 36 aa, Artificial Sequence
  Non-cyclic GFR-binding peptide
  MOD_RES (3)..(4)..(36): Xaa is C or S
EPXXVPEKMSAISILYLDENKNVVLKNYQNMTVESX

SEQ ID NO: 37741 - protein, 35 aa, Artificial Sequence
  Non-cyclic GFR-binding peptide
  MOD_RES (3)..(4): Xaa is C or S
EPXXVPEKMSAISILYLDENKNVVLKNYQNMTVES

SEQ ID NO: 37742 - protein, 41 aa, Artificial Sequence
  Non-cyclic GFR-binding peptide
  MOD_RES (5)..(6)..(40): Xaa is C or S
  MOD_RES (20)..(21)..(22)..(23)..(24): Xaa is A or G
  MOD_RES (25)..(26)..(27)..(28): Xaa is A or G or absent
APASXXVPARLSAISILYLXXXXXXXXXLKNYQDMVVEAXG

SEQ ID NO: 37743 - protein, 34 aa, Artificial Sequence
  Non-cyclic GFR-binding peptide
  MOD_RES (2)..(3)..(34): Xaa is C or S
TXXAPVKTSAISMLYLDNGRVLLLKNYQMIVEEX

SEQ ID NO: 37744 - protein, 34 aa, Artificial Sequence
  Non-cyclic GFR-binding peptide
  MOD_RES (2)..(3): Xaa is C or S
SXXVPARLSAISILYLDAANNVVLKNYQDMVVEA

SEQ ID NO: 37745 - protein, 38 aa, Artificial Sequence
  Non-cyclic GFR-binding peptide
  MOD_RES (5)..(6): Xaa is C or S
  MOD_RES (20)..(21)..(22)..(23)..(24): Xaa is A or G
  MOD_RES (25)..(26)..(27)..(28): Xaa is A or G or absent
VPSTXXAPVKTSAISMLYLXXXXXXXXXLKNYQMIVEE

SEQ ID NO: 37746 - protein, 38 aa, Artificial Sequence
  Non-cyclic GFR-binding peptide
  MOD_RES (1)..(35)..(37): Xaa is C or S
  MOD_RES (15)..(16)..(17)..(18)..(19): Xaa is A or G
  MOD_RES (20)..(21)..(22)..(23): Xaa is A or G or absent
XVPEKMSAISILYLXXXXXXXXXLKNYQNMTVESXAXR

SEQ ID NO: 37747 - protein, 35 aa, Artificial Sequence
  Non-cyclic GFR-binding peptide
  MOD_RES (34)..(34): Xaa is C or S
  MOD_RES (14)..(15)..(16)..(17)..(18): Xaa is A or G
  MOD_RES (19)..(20)..(21)..(22): Xaa is A or G or absent
VPARLSAISILYLXXXXXXXXXLKNYQDMVVEAXG

SEQ ID NO: 37748 - protein, 38 aa, Artificial Sequence
  Non-cyclic GFR-binding peptide
  MOD_RES (5)..(6)..(38): Xaa is C or S
APASXXVPARLSAISILYLDAANNVVLKNYQDMVVEAX

SEQ ID NO: 37749 - protein, 42 aa, Artificial Sequence
  Non-cyclic GFR-binding peptide
  MOD_RES (6)..(7)..(41): Xaa is C or S
  MOD_RES (21)..(22)..(23)..(24)..(25): Xaa is A or G
  MOD_RES (26)..(27)..(28)..(29): Xaa is A or G or absent
AAPASXXVPARLSAISILYLXXXXXXXXXLKNYQDMVVEAXG

SEQ ID NO: 37750 - protein, 34 aa, Artificial Sequence
  Non-cyclic GFR-binding peptide
  MOD_RES (1)..(2)..(34): Xaa is C or S
XXVPTKLSAISILYLDKGVVTYLKNYQGMAVSEX

SEQ ID NO: 37751 - protein, 40 aa, Artificial Sequence
  Non-cyclic GFR-binding peptide
  MOD_RES (6)..(7): Xaa is C or S
  MOD_RES (21)..(22)..(23)..(24)..(25): Xaa is A or G
  MOD_RES (26)..(27)..(28)..(29): Xaa is A or G or absent
AAPASXXVPARLSAISILYLXXXXXXXXXLKNYQDMVVEA

SEQ ID NO: 37752 - protein, 36 aa, Artificial Sequence
  Non-cyclic GFR-binding peptide
  MOD_RES (1)..(2)..(35): Xaa is C or S
  MOD_RES (16)..(17)..(18)..(19)..(20): Xaa is A or G
  MOD_RES (21)..(22)..(23)..(24): Xaa is A or G or absent
XXAPVKTSAISMLYLXXXXXXXXXLKNYQMIVEEXG

SEQ ID NO: 37753 - protein, 35 aa, Artificial Sequence
  Non-cyclic GFR-binding peptide
  MOD_RES (2)..(3)..(35): Xaa is C or S
PXXTPTKMSAISMLYLNDKQQIILKNYQGMVVDRX

SEQ ID NO: 37754 - protein, 39 aa, Artificial Sequence
  Non-cyclic GFR-binding peptide
  MOD_RES (5)..(6)..(38): Xaa is C or S
ASKAXXVPTKLSAISILYLDKGVVTYLKNYQGMAVSEXG

SEQ ID NO: 37755 - protein, 37 aa, Artificial Sequence
  Non-cyclic GFR-binding peptide
  MOD_RES (3)..(4)..(37): Xaa is C or S
  MOD_RES (18)..(19)..(20)..(21)..(22): Xaa is A or G
  MOD_RES (23)..(24)..(25)..(26): Xaa is A or G or absent
STXXAPVKTSAISMLYLXXXXXXXXXLKNYQMIVEEX

SEQ ID NO: 37756 - protein, 37 aa, Artificial Sequence
  Non-cyclic GFR-binding peptide
  MOD_RES (1)..(2)..(36): Xaa is C or S
  MOD_RES (16)..(17)..(18)..(19)..(20): Xaa is A or G
  MOD_RES (21)..(22)..(23)..(24): Xaa is A or G or absent
XXTPTKMSAISMLYLXXXXXXXXXLKNYQGMVVDRXG

SEQ ID NO: 37757 - protein, 33 aa, Artificial Sequence
  Non-cyclic GFR-binding peptide
  MOD_RES (1)..(32): Xaa is C or S
XAPVKTSAISMLYLDNGRVLLLKNYQMIVEEXG

SEQ ID NO: 37758 - protein, 35 aa, Artificial Sequence
  Non-cyclic GFR-binding peptide
  MOD_RES (3)..(4): Xaa is C or S
GPXXTPTKMSAISMLYLNDKQQIILKNYQGMVVDR

SEQ ID NO: 37759 - protein, 38 aa, Artificial Sequence
  Non-cyclic GFR-binding peptide
  MOD_RES (1)..(2)..(36)..(38): Xaa is C or S
  MOD_RES (16)..(17)..(18)..(19)..(20): Xaa is A or G
  MOD_RES (21)..(22)..(23)..(24): Xaa is A or G or absent
XXVPTKLSAISILYLXXXXXXXXXLKNYQGMAVSEXGX

SEQ ID NO: 37760 - protein, 37 aa, Artificial Sequence
  Non-cyclic GFR-binding peptide
  MOD_RES (1)..(2)..(36): Xaa is C or S
  MOD_RES (16)..(17)..(18)..(19)..(20): Xaa is A or G
  MOD_RES (21)..(22)..(23)..(24): Xaa is A or G or absent
XXVPARLSAISILYLXXXXXXXXXLKNYQDMVVEAXG

SEQ ID NO: 37761 - protein, 36 aa, Artificial Sequence
  Non-cyclic GFR-binding peptide
  MOD_RES (3)..(4): Xaa is C or S
  MOD_RES (18)..(19)..(20)..(21)..(22): Xaa is A or G
  MOD_RES (23)..(24)..(25)..(26): Xaa is A or G or absent
KAXXVPTKLSAISILYLXXXXXXXXXLKNYQGMAVS

SEQ ID NO: 37762 - protein, 39 aa, Artificial Sequence
  Non-cyclic GFR-binding peptide
  MOD_RES (5)..(6)..(38): Xaa is C or S
SAGPXXTPTKMSAISMLYLNDKQQIILKNYQGMVVDRXG

SEQ ID NO: 37763 - protein, 43 aa, Artificial Sequence
  Non-cyclic GFR-binding peptide
  MOD_RES (6)..(7)..(41)..(43): Xaa is C or S
  MOD_RES (21)..(22)..(23)..(24)..(25): Xaa is A or G
  MOD_RES (26)..(27)..(28)..(29): Xaa is A or G or absent
HVPKPXXAPTKLSAISVLYLXXXXXXXXXLKNYQNMVVRSXGX

SEQ ID NO: 37764 - protein, 32 aa, Artificial Sequence
  Non-cyclic GFR-binding peptide
  MOD_RES (14)..(15)..(16)..(17)..(18): Xaa is A or G
  MOD_RES (19)..(20)..(21)..(22): Xaa is A or G or absent
TPTKMSAISMLYLXXXXXXXXXLKNYQGMVVD

SEQ ID NO: 37765 - protein, 34 aa, Artificial Sequence
  Non-cyclic GFR-binding peptide
  MOD_RES (1)..(2)..(34): Xaa is C or S
XXVPEKMSAISILYLDENKNVVLKNYQNMTVESX

SEQ ID NO: 37766 - protein, 40 aa, Artificial Sequence
  Non-cyclic GFR-binding peptide
  MOD_RES (6)..(7)..(39): Xaa is C or S
GSAGPXXTPTKMSAISMLYLNDKQQIILKNYQGMVVDRXG

SEQ ID NO: 37767 - protein, 41 aa, Artificial Sequence
  Non-cyclic GFR-binding peptide
  MOD_RES (3)..(4)..(38)..(40): Xaa is C or S
  MOD_RES (18)..(19)..(20)..(21)..(22): Xaa is A or G
  MOD_RES (23)..(24)..(25)..(26): Xaa is A or G or absent
KAXXVPTKLSAISILYLXXXXXXXXXLKNYQGMAVSEXGXR

SEQ ID NO: 37768 - protein, 35 aa, Artificial Sequence
  Non-cyclic GFR-binding peptide
  MOD_RES (1)..(33)..(35): Xaa is C or S
XVPEKMSAISILYLDENKNVVLKNYQNMTVESXAX

SEQ ID NO: 37769 - protein, 40 aa, Artificial Sequence
  Non-cyclic GFR-binding peptide
  MOD_RES (6)..(7): Xaa is C or S
  MOD_RES (21)..(22)..(23)..(24)..(25): Xaa is A or G
  MOD_RES (26)..(27)..(28)..(29): Xaa is A or G or absent
HVPKPXXAPTKLSAISVLYLXXXXXXXXXLKNYQNMVVRS

SEQ ID NO: 37770 - protein, 34 aa, Artificial Sequence
  Non-cyclic GFR-binding peptide
  MOD_RES (2)..(3): Xaa is C or S
AXXVPTKLSAISILYLDKGVVTYLKNYQGMAVSE

SEQ ID NO: 37771 - protein, 40 aa, Artificial Sequence
  Non-cyclic GFR-binding peptide
  MOD_RES (2)..(3)..(37)..(39): Xaa is C or S
  MOD_RES (17)..(18)..(19)..(20)..(21): Xaa is A or G
  MOD_RES (22)..(23)..(24)..(25): Xaa is A or G or absent
PXXTPTKMSAISMLYLXXXXXXXXXLKNYQGMVVDRXGXS

SEQ ID NO: 37772 - protein, 36 aa, Artificial Sequence
  Non-cyclic GFR-binding peptide
  MOD_RES (4)..(5): Xaa is C or S
PASXXVPARLSAISILYLDAANNVVLKNYQDMVVEA

SEQ ID NO: 37773 - protein, 32 aa, Artificial Sequence
  Non-cyclic GFR-binding peptide
  MOD_RES (14)..(15)..(16)..(17)..(18): Xaa is A or G
  MOD_RES (19)..(20)..(21)..(22): Xaa is A or G or absent
VPTKLSAISILYLXXXXXXXXXLKNYQGMAVS

SEQ ID NO: 37774 - protein, 39 aa, Artificial Sequence
  Non-cyclic GFR-binding peptide
  MOD_RES (3)..(4)..(38): Xaa is C or S
  MOD_RES (18)..(19)..(20)..(21)..(22): Xaa is A or G
  MOD_RES (23)..(24)..(25)..(26): Xaa is A or G or absent
KAXXVPTKLSAISILYLXXXXXXXXXLKNYQGMAVSEXG

SEQ ID NO: 37775 - protein, 38 aa, Artificial Sequence
  Non-cyclic GFR-binding peptide
  MOD_RES (6)..(7)..(38): Xaa is C or S
RVPSTXXAPVKTSAISMLYLDNGRVLLLKNYQMIVEEX

SEQ ID NO: 37776 - protein, 36 aa, Artificial Sequence
  Non-cyclic GFR-binding peptide
  MOD_RES (1)..(2)..(34)..(36): Xaa is C or S
XXVPARLSAISILYLDAANNVVLKNYQDMVVEAXGX

SEQ ID NO: 37777 - protein, 41 aa, Artificial Sequence
  Non-cyclic GFR-binding peptide
  MOD_RES (6)..(7)..(39)..(41): Xaa is C or S
AAPASXXVPARLSAISILYLDAANNVVLKNYQDMVVEAXGX

SEQ ID NO: 37778 - protein, 38 aa, Artificial Sequence
  Non-cyclic GFR-binding peptide
  MOD_RES (1)..(2)..(35)..(37): Xaa is C or S
  MOD_RES (16)..(17)..(18)..(19)..(20): Xaa is A or G
  MOD_RES (21)..(22)..(23)..(24): Xaa is A or G or absent
XXAPVKTSAISMLYLXXXXXXXXXLKNYQMIVEEXGXL

SEQ ID NO: 37779 - protein, 35 aa, Artificial Sequence
  Non-cyclic GFR-binding peptide
  MOD_RES (1)..(35): Xaa is C or S
  MOD_RES (15)..(16)..(17)..(18)..(19): Xaa is A or G
  MOD_RES (20)..(21)..(22)..(23): Xaa is A or G or absent
XVPEKMSAISILYLXXXXXXXXXLKNYQNMTVESX

SEQ ID NO: 37780 - protein, 34 aa, Artificial Sequence
  Non-cyclic GFR-binding peptide
  MOD_RES (32)..(34): Xaa is C or S
TPTKMSAISMLYLNDKQQIILKNYQGMVVDRXGX

SEQ ID NO: 37781 - protein, 38 aa, Artificial Sequence
  Non-cyclic GFR-binding peptide
  MOD_RES (4)..(5)..(37): Xaa is C or S
PEPXXVPEKMSAISILYLDENKNVVLKNYQNMTVESXA

SEQ ID NO: 37782 - protein, 34 aa, Artificial Sequence
  Non-cyclic GFR-binding peptide
  MOD_RES (1)..(33): Xaa is C or S
XVPEKMSAISILYLDENKNVVLKNYQNMTVESXA

SEQ ID NO: 37783 - protein, 42 aa, Artificial Sequence
  Non-cyclic GFR-binding peptide
  MOD_RES (5)..(6)..(40)..(42): Xaa is C or S
  MOD_RES (20)..(21)..(22)..(23)..(24): Xaa is A or G
  MOD_RES (25)..(26)..(27)..(28): Xaa is A or G or absent
IPEPXXVPEKMSAISILYLXXXXXXXXXLKNYQNMTVESXAX

SEQ ID NO: 37784 - protein, 37 aa, Artificial Sequence
  Non-cyclic GFR-binding peptide
  MOD_RES (4)..(5)..(36): Xaa is C or S
PSTXXAPVKTSAISMLYLDNGRVLLLKNYQMIVEEXG

SEQ ID NO: 37785 - protein, 34 aa, Artificial Sequence
  Non-cyclic GFR-binding peptide
  MOD_RES (34)..(34): Xaa is C or S
  MOD_RES (14)..(15)..(16)..(17)..(18): Xaa is A or G
  MOD_RES (19)..(20)..(21)..(22): Xaa is A or G or absent
TPTKMSAISMLYLXXXXXXXXXLKNYQGMVVDRX

SEQ ID NO: 37786 - protein, 37 aa, Artificial Sequence
  Non-cyclic GFR-binding peptide
  MOD_RES (1)..(35)..(37): Xaa is C or S
  MOD_RES (15)..(16)..(17)..(18)..(19): Xaa is A or G
  MOD_RES (20)..(21)..(22)..(23): Xaa is A or G or absent
XVPEKMSAISILYLXXXXXXXXXLKNYQNMTVESXAX

SEQ ID NO: 37787 - protein, 39 aa, Artificial Sequence
  Non-cyclic GFR-binding peptide
  MOD_RES (3)..(4)..(38): Xaa is C or S
  MOD_RES (18)..(19)..(20)..(21)..(22): Xaa is A or G
  MOD_RES (23)..(24)..(25)..(26): Xaa is A or G or absent
EPXXVPEKMSAISILYLXXXXXXXXXLKNYQNMTVESXA

SEQ ID NO: 37788 - protein, 34 aa, Artificial Sequence
  Non-cyclic GFR-binding peptide
  MOD_RES (1)..(2)..(33): Xaa is C or S
XXAPVKTSAISMLYLDNGRVLLLKNYQMIVEEXG

SEQ ID NO: 37789 - protein, 32 aa, Artificial Sequence
  Non-cyclic GFR-binding peptide
  MOD_RES (32)..(32): Xaa is C or S
VPARLSAISILYLDAANNVVLKNYQDMVVEAX

SEQ ID NO: 37790 - protein, 36 aa, Artificial Sequence
  Non-cyclic GFR-binding peptide
  MOD_RES (1)..(2)..(36): Xaa is C or S
  MOD_RES (16)..(17)..(18)..(19)..(20): Xaa is A or G
  MOD_RES (21)..(22)..(23)..(24): Xaa is A or G or absent
XXVPARLSAISILYLXXXXXXXXXLKNYQDMVVEAX

SEQ ID NO: 37791 - protein, 34 aa, Artificial Sequence
  Non-cyclic GFR-binding peptide
  MOD_RES (1)..(2): Xaa is C or S
  MOD_RES (16)..(17)..(18)..(19)..(20): Xaa is A or G
  MOD_RES (21)..(22)..(23)..(24): Xaa is A or G or absent
XXTPTKMSAISMLYLXXXXXXXXXLKNYQGMVVD

SEQ ID NO: 37792 - protein, 42 aa, Artificial Sequence
  Non-cyclic GFR-binding peptide
  MOD_RES (5)..(6)..(40)..(42): Xaa is C or S
  MOD_RES (20)..(21)..(22)..(23)..(24): Xaa is A or G
  MOD_RES (25)..(26)..(27)..(28): Xaa is A or G or absent
APASXXVPARLSAISILYLXXXXXXXXXLKNYQDMVVEAXGX

SEQ ID NO: 37793 - protein, 39 aa, Artificial Sequence
  Non-cyclic GFR-binding peptide
  MOD_RES (6)..(7)..(39): Xaa is C or S
HVPKPXXAPTKLSAISVLYLDDSSNVILKNYQNMVVRSX

SEQ ID NO: 37794 - protein, 39 aa, Artificial Sequence
  Non-cyclic GFR-binding peptide
  MOD_RES (4)..(5)..(37)..(39): Xaa is C or S
PASXXVPARLSAISILYLDAANNVVLKNYQDMVVEAXGX

SEQ ID NO: 37795 - protein, 35 aa, Artificial Sequence
  Non-cyclic GFR-binding peptide
  MOD_RES (32)..(34): Xaa is C or S
TPTKMSAISMLYLNDKQQIILKNYQGMVVDRXGXS

SEQ ID NO: 37796 - protein, 37 aa, Artificial Sequence
  Non-cyclic GFR-binding peptide
  MOD_RES (3)..(4)..(36): Xaa is C or S
ASXXVPARLSAISILYLDAANNVVLKNYQDMVVEAXG

SEQ ID NO: 37797 - protein, 30 aa, Artificial Sequence
  Non-cyclic GFR-binding peptide
VPTKLSAISILYLDKGVVTYLKNYQGMAVS

SEQ ID NO: 37798 - protein, 41 aa, Artificial Sequence
  Non-cyclic GFR-binding peptide
  MOD_RES (6)..(7)..(41): Xaa is C or S
  MOD_RES (21)..(22)..(23)..(24)..(25): Xaa is A or G
  MOD_RES (26)..(27)..(28)..(29): Xaa is A or G or absent
GSAGPXXTPTKMSAISMLYLXXXXXXXXXLKNYQGMVVDRX

SEQ ID NO: 37799 - protein, 33 aa, Artificial Sequence
  Non-cyclic GFR-binding peptide
  MOD_RES (1)..(1): Xaa is C or S
  MOD_RES (15)..(16)..(17)..(18)..(19): Xaa is A or G
  MOD_RES (20)..(21)..(22)..(23): Xaa is A or G or absent
XTPTKMSAISMLYLXXXXXXXXXLKNYQGMVVD

SEQ ID NO: 37800 - protein, 36 aa, Artificial Sequence
  Non-cyclic GFR-binding peptide
  MOD_RES (34)..(36): Xaa is C or S
  MOD_RES (14)..(15)..(16)..(17)..(18): Xaa is A or G
  MOD_RES (19)..(20)..(21)..(22): Xaa is A or G or absent
VPTKLSAISILYLXXXXXXXXXLKNYQGMAVSEXGX

SEQ ID NO: 37801 - protein, 37 aa, Artificial Sequence
  Non-cyclic GFR-binding peptide
  MOD_RES (5)..(6): Xaa is C or S
ASKAXXVPTKLSAISILYLDKGVVTYLKNYQGMAVSE

SEQ ID NO: 37802 - protein, 37 aa, Artificial Sequence
  Non-cyclic GFR-binding peptide
  MOD_RES (2)..(3)..(34)..(36): Xaa is C or S
TXXAPVKTSAISMLYLDNGRVLLLKNYQMIVEEXGXL

SEQ ID NO: 37803 - protein, 37 aa, Artificial Sequence
  Non-cyclic GFR-binding peptide
  MOD_RES (34)..(36): Xaa is C or S
  MOD_RES (14)..(15)..(16)..(17)..(18): Xaa is A or G
  MOD_RES (19)..(20)..(21)..(22): Xaa is A or G or absent
VPARLSAISILYLXXXXXXXXXLKNYQDMVVEAXGXR

SEQ ID NO: 37804 - protein, 39 aa, Artificial Sequence
  Non-cyclic GFR-binding peptide
  MOD_RES (4)..(5)..(36)..(38): Xaa is C or S
PSTXXAPVKTSAISMLYLDNGRVLLLKNYQMIVEEXGXL

SEQ ID NO: 37805 - protein, 36 aa, Artificial Sequence
  Non-cyclic GFR-binding peptide
  MOD_RES (4)..(5)..(36): Xaa is C or S
PSTXXAPVKTSAISMLYLDNGRVLLLKNYQMIVEEX

SEQ ID NO: 37806 - protein, 35 aa, Artificial Sequence
  Non-cyclic GFR-binding peptide
  MOD_RES (1)..(35): Xaa is C or S
  MOD_RES (15)..(16)..(17)..(18)..(19): Xaa is A or G
  MOD_RES (20)..(21)..(22)..(23): Xaa is A or G or absent
XVPARLSAISILYLXXXXXXXXXLKNYQDMVVEAX

SEQ ID NO: 37807 - protein, 31 aa, Artificial Sequence
  Non-cyclic GFR-binding peptide
  MOD_RES (1)..(1): Xaa is C or S
XTPTKMSAISMLYLNDKQQIILKNYQGMVVD

SEQ ID NO: 37808 - protein, 41 aa, Artificial Sequence
  Non-cyclic GFR-binding peptide
  MOD_RES (6)..(7)..(38)..(40): Xaa is C or S
RVPSTXXAPVKTSAISMLYLDNGRVLLLKNYQMIVEEXGXL

SEQ ID NO: 37809 - protein, 36 aa, Artificial Sequence
  Non-cyclic GFR-binding peptide
  MOD_RES (5)..(6): Xaa is C or S
ASKAXXVPTKLSAISILYLDKGVVTYLKNYQGMAVS

SEQ ID NO: 37810 - protein, 42 aa, Artificial Sequence
  Non-cyclic GFR-binding peptide
  MOD_RES (5)..(6)..(39)..(41): Xaa is C or S
  MOD_RES (20)..(21)..(22)..(23)..(24): Xaa is A or G
  MOD_RES (25)..(26)..(27)..(28): Xaa is A or G or absent
VPSTXXAPVKTSAISMLYLXXXXXXXXXLKNYQMIVEEXGXL

SEQ ID NO: 37811 - protein, 41 aa, Artificial Sequence
  Non-cyclic GFR-binding peptide
  MOD_RES (5)..(6)..(40): Xaa is C or S
  MOD_RES (20)..(21)..(22)..(23)..(24): Xaa is A or G
  MOD_RES (25)..(26)..(27)..(28): Xaa is A or G or absent
SAGPXXTPTKMSAISMLYLXXXXXXXXXLKNYQGMVVDRXG

SEQ ID NO: 37812 - protein, 34 aa, Artificial Sequence
  Non-cyclic GFR-binding peptide
  MOD_RES (32)..(34): Xaa is C or S
VPTKLSAISILYLDKGVVTYLKNYQGMAVSEXGX

SEQ ID NO: 37813 - protein, 43 aa, Artificial Sequence
  Non-cyclic GFR-binding peptide
  MOD_RES (6)..(7)..(40)..(42): Xaa is C or S
  MOD_RES (21)..(22)..(23)..(24)..(25): Xaa is A or G
  MOD_RES (26)..(27)..(28)..(29): Xaa is A or G or absent
RVPSTXXAPVKTSAISMLYLXXXXXXXXXLKNYQMIVEEXGXL

SEQ ID NO: 37814 - protein, 41 aa, Artificial Sequence
  Non-cyclic GFR-binding peptide
  MOD_RES (5)..(6)..(38)..(40): Xaa is C or S
ASKAXXVPTKLSAISILYLDKGVVTYLKNYQGMAVSEXGXR

SEQ ID NO: 37815 - protein, 38 aa, Artificial Sequence
  Non-cyclic GFR-binding peptide
  MOD_RES (4)..(5): Xaa is C or S
  MOD_RES (19)..(20)..(21)..(22)..(23): Xaa is A or G
  MOD_RES (24)..(25)..(26)..(27): Xaa is A or G or absent
PEPXXVPEKMSAISILYLXXXXXXXXXLKNYQNMTVES

SEQ ID NO: 37816 - protein, 36 aa, Artificial Sequence
  Non-cyclic GFR-binding peptide
  MOD_RES (33)..(35): Xaa is C or S
  MOD_RES (14)..(15)..(16)..(17)..(18): Xaa is A or G
  MOD_RES (19)..(20)..(21)..(22): Xaa is A or G or absent
APVKTSAISMLYLXXXXXXXXXLKNYQMIVEEXGXL

SEQ ID NO: 37817 - protein, 42 aa, Artificial Sequence
  Non-cyclic GFR-binding peptide
  MOD_RES (6)..(7)..(39)..(41): Xaa is C or S
GSAGPXXTPTKMSAISMLYLNDKQQIILKNYQGMVVDRXGXS

SEQ ID NO: 37818 - protein, 33 aa, Artificial Sequence
  Non-cyclic GFR-binding peptide
  MOD_RES (1)..(2): Xaa is C or S
XXVPEKMSAISILYLDENKNVVLKNYQNMTVES

SEQ ID NO: 37819 - protein, 35 aa, Artificial Sequence
  Non-cyclic GFR-binding peptide
  MOD_RES (2)..(3)..(35): Xaa is C or S
SXXVPARLSAISILYLDAANNVVLKNYQDMVVEAX

SEQ ID NO: 37820 - protein, 32 aa, Artificial Sequence
  Non-cyclic GFR-binding peptide
  MOD_RES (1)..(2): Xaa is C or S
XXTPTKMSAISMLYLNDKQQIILKNYQGMVVD

SEQ ID NO: 37821 - protein, 40 aa, Artificial Sequence
  Non-cyclic GFR-binding peptide
  MOD_RES (5)..(6)..(38)..(40): Xaa is C or S
APASXXVPARLSAISILYLDAANNVVLKNYQDMVVEAXGX

SEQ ID NO: 37822 - protein, 33 aa, Artificial Sequence
  Non-cyclic GFR-binding peptide
  MOD_RES (31)..(33): Xaa is C or S
APVKTSAISMLYLDNGRVLLLKNYQMIVEEXGX

SEQ ID NO: 37823 - protein, 33 aa, Artificial Sequence
  Non-cyclic GFR-binding peptide
  MOD_RES (2)..(3): Xaa is C or S
TXXAPVKTSAISMLYLDNGRVLLLKNYQMIVEE

SEQ ID NO: 37824 - protein, 35 aa, Artificial Sequence
  Non-cyclic GFR-binding peptide
  MOD_RES (34)..(34): Xaa is C or S
  MOD_RES (14)..(15)..(16)..(17)..(18): Xaa is A or G
  MOD_RES (19)..(20)..(21)..(22): Xaa is A or G or absent
VPEKMSAISILYLXXXXXXXXXLKNYQNMTVESXA

SEQ ID NO: 37825 - protein, 34 aa, Artificial Sequence
  Non-cyclic GFR-binding peptide
  MOD_RES (1)..(1): Xaa is C or S
  MOD_RES (15)..(16)..(17)..(18)..(19): Xaa is A or G
  MOD_RES (20)..(21)..(22)..(23): Xaa is A or G or absent
XVPARLSAISILYLXXXXXXXXXLKNYQDMVVEA

SEQ ID NO: 37826 - protein, 41 aa, Artificial Sequence
  Non-cyclic GFR-binding peptide
  MOD_RES (4)..(5)..(39)..(41): Xaa is C or S
  MOD_RES (19)..(20)..(21)..(22)..(23): Xaa is A or G
  MOD_RES (24)..(25)..(26)..(27): Xaa is A or G or absent
PEPXXVPEKMSAISILYLXXXXXXXXXLKNYQNMTVESXAX

SEQ ID NO: 37827 - protein, 38 aa, Artificial Sequence
  Non-cyclic GFR-binding peptide
  MOD_RES (2)..(3)..(37): Xaa is C or S
  MOD_RES (17)..(18)..(19)..(20)..(21): Xaa is A or G
  MOD_RES (22)..(23)..(24)..(25): Xaa is A or G or absent
PXXTPTKMSAISMLYLXXXXXXXXXLKNYQGMVVDRXG

SEQ ID NO: 37828 - protein, 36 aa, Artificial Sequence
  Non-cyclic GFR-binding peptide
  MOD_RES (1)..(2)..(34)..(36): Xaa is C or S
XXTPTKMSAISMLYLNDKQQIILKNYQGMVVDRXGX

SEQ ID NO: 37829 - protein, 33 aa, Artificial Sequence
  Non-cyclic GFR-binding peptide
  MOD_RES (14)..(15)..(16)..(17)..(18): Xaa is A or G
  MOD_RES (19)..(20)..(21)..(22): Xaa is A or G or absent
VPEKMSAISILYLXXXXXXXXXLKNYQNMTVES

SEQ ID NO: 37830 - protein, 36 aa, Artificial Sequence
  Non-cyclic GFR-binding peptide
  MOD_RES (4)..(5): Xaa is C or S
AGPXXTPTKMSAISMLYLNDKQQIILKNYQGMVVDR

SEQ ID NO: 37831 - protein, 35 aa, Artificial Sequence
  Non-cyclic GFR-binding peptide
  MOD_RES (34)..(34): Xaa is C or S
  MOD_RES (14)..(15)..(16)..(17)..(18): Xaa is A or G
  MOD_RES (19)..(20)..(21)..(22): Xaa is A or G or absent
TPTKMSAISMLYLXXXXXXXXXLKNYQGMVVDRXG

SEQ ID NO: 37832 - protein, 40 aa, Artificial Sequence
  Non-cyclic GFR-binding peptide
  MOD_RES (4)..(5)..(37)..(39): Xaa is C or S
PEPXXVPEKMSAISILYLDENKNVVLKNYQNMTVESXAXR

SEQ ID NO: 37833 - protein, 31 aa, Artificial Sequence
  Non-cyclic GFR-binding peptide
TPTKMSAISMLYLNDKQQIILKNYQGMVVDR

SEQ ID NO: 37834 - protein, 36 aa, Artificial Sequence
  Non-cyclic GFR-binding peptide
  MOD_RES (1)..(35): Xaa is C or S
  MOD_RES (15)..(16)..(17)..(18)..(19): Xaa is A or G
  MOD_RES (20)..(21)..(22)..(23): Xaa is A or G or absent
XVPTKLSAISILYLXXXXXXXXXLKNYQGMAVSEXG

SEQ ID NO: 37835 - protein, 36 aa, Artificial Sequence
  Non-cyclic GFR-binding peptide
  MOD_RES (4)..(5): Xaa is C or S
SKAXXVPTKLSAISILYLDKGVVTYLKNYQGMAVSE

SEQ ID NO: 37836 - protein, 36 aa, Artificial Sequence
  Non-cyclic GFR-binding peptide
  MOD_RES (3)..(4)..(36): Xaa is C or S
GPXXTPTKMSAISMLYLNDKQQIILKNYQGMVVDRX

SEQ ID NO: 37837 - protein, 38 aa, Artificial Sequence
  Non-cyclic GFR-binding peptide
  MOD_RES (1)..(35)..(37): Xaa is C or S
  MOD_RES (15)..(16)..(17)..(18)..(19): Xaa is A or G
  MOD_RES (20)..(21)..(22)..(23): Xaa is A or G or absent
XVPARLSAISILYLXXXXXXXXXLKNYQDMVVEAXGXR

SEQ ID NO: 37838 - protein, 38 aa, Artificial Sequence
  Non-cyclic GFR-binding peptide
  MOD_RES (3)..(4)..(38): Xaa is C or S
  MOD_RES (18)..(19)..(20)..(21)..(22): Xaa is A or G
  MOD_RES (23)..(24)..(25)..(26): Xaa is A or G or absent
ASXXVPARLSAISILYLXXXXXXXXXLKNYQDMVVEAX

SEQ ID NO: 37839 - protein, 32 aa, Artificial Sequence
  Non-cyclic GFR-binding peptide
  MOD_RES (32)..(32): Xaa is C or S
TPTKMSAISMLYLNDKQQIILKNYQGMVVDRX

SEQ ID NO: 37840 - protein, 39 aa, Artificial Sequence
  Non-cyclic GFR-binding peptide
  MOD_RES (3)..(4)..(38): Xaa is C or S
  MOD_RES (18)..(19)..(20)..(21)..(22): Xaa is A or G
  MOD_RES (23)..(24)..(25)..(26): Xaa is A or G or absent
GPXXTPTKMSAISMLYLXXXXXXXXXLKNYQGMVVDRXG

SEQ ID NO: 37841 - protein, 39 aa, Artificial Sequence
  Non-cyclic GFR-binding peptide
  MOD_RES (6)..(7): Xaa is C or S
  MOD_RES (21)..(22)..(23)..(24)..(25): Xaa is A or G
  MOD_RES (26)..(27)..(28)..(29): Xaa is A or G or absent
GIPEPXXVPEKMSAISILYLXXXXXXXXXLKNYQNMTVE

SEQ ID NO: 37842 - protein, 32 aa, Artificial Sequence
  Non-cyclic GFR-binding peptide
  MOD_RES (1)..(1): Xaa is C or S
XVPARLSAISILYLDAANNVVLKNYQDMVVEA

SEQ ID NO: 37843 - protein, 39 aa, Artificial Sequence
  Non-cyclic GFR-binding peptide
  MOD_RES (3)..(4)..(36)..(38): Xaa is C or S
EPXXVPEKMSAISILYLDENKNVVLKNYQNMTVESXAXR

SEQ ID NO: 37844 - protein, 34 aa, Artificial Sequence
  Non-cyclic GFR-binding peptide
  MOD_RES (1)..(1): Xaa is C or S
  MOD_RES (15)..(16)..(17)..(18)..(19): Xaa is A or G
  MOD_RES (20)..(21)..(22)..(23): Xaa is A or G or absent
XTPTKMSAISMLYLXXXXXXXXXLKNYQGMVVDR

SEQ ID NO: 37845 - protein, 38 aa, Artificial Sequence
  Non-cyclic GFR-binding peptide
  MOD_RES (4)..(5)..(38): Xaa is C or S
  MOD_RES (19)..(20)..(21)..(22)..(23): Xaa is A or G
  MOD_RES (24)..(25)..(26)..(27): Xaa is A or G or absent
PSTXXAPVKTSAISMLYLXXXXXXXXXLKNYQMIVEEX

SEQ ID NO: 37846 - protein, 37 aa, Artificial Sequence
  Non-cyclic GFR-binding peptide
  MOD_RES (3)..(4): Xaa is C or S
  MOD_RES (18)..(19)..(20)..(21)..(22): Xaa is A or G
  MOD_RES (23)..(24)..(25)..(26): Xaa is A or G or absent
EPXXVPEKMSAISILYLXXXXXXXXXLKNYQNMTVES

SEQ ID NO: 37847 - protein, 36 aa, Artificial Sequence
  Non-cyclic GFR-binding peptide
  MOD_RES (3)..(4)..(36): Xaa is C or S
ASXXVPARLSAISILYLDAANNVVLKNYQDMVVEAX

SEQ ID NO: 37848 - protein, 33 aa, Artificial Sequence
  Non-cyclic GFR-binding peptide
  MOD_RES (14)..(15)..(16)..(17)..(18): Xaa is A or G
  MOD_RES (19)..(20)..(21)..(22): Xaa is A or G or absent
VPTKLSAISILYLXXXXXXXXXLKNYQGMAVSE

SEQ ID NO: 37849 - protein, 35 aa, Artificial Sequence
  Non-cyclic GFR-binding peptide
  MOD_RES (1)..(33)..(35): Xaa is C or S
XVPTKLSAISILYLDKGVVTYLKNYQGMAVSEXGX

SEQ ID NO: 37850 - protein, 35 aa, Artificial Sequence
  Non-cyclic GFR-binding peptide
  MOD_RES (4)..(5): Xaa is C or S
PEPXXVPEKMSAISILYLDENKNVVLKNYQNMTVE

SEQ ID NO: 37851 - protein, 35 aa, Artificial Sequence
  Non-cyclic GFR-binding peptide
  MOD_RES (2)..(3): Xaa is C or S
  MOD_RES (17)..(18)..(19)..(20)..(21): Xaa is A or G
  MOD_RES (22)..(23)..(24)..(25): Xaa is A or G or absent
TXXAPVKTSAISMLYLXXXXXXXXXLKNYQMIVEE

SEQ ID NO: 37852 - protein, 37 aa, Artificial Sequence
  Non-cyclic GFR-binding peptide
  MOD_RES (5)..(6)..(37): Xaa is C or S
VPSTXXAPVKTSAISMLYLDNGRVLLLKNYQMIVEEX

SEQ ID NO: 37853 - protein, 40 aa, Artificial Sequence
  Non-cyclic GFR-binding peptide
  MOD_RES (5)..(6)..(38)..(40): Xaa is C or S
SAGPXXTPTKMSAISMLYLNDKQQIILKNYQGMVVDRXGX

SEQ ID NO: 37854 - protein, 40 aa, Artificial Sequence
  Non-cyclic GFR-binding peptide
  MOD_RES (5)..(6)..(38)..(40): Xaa is C or S
IPEPXXVPEKMSAISILYLDENKNVVLKNYQNMTVESXAX

SEQ ID NO: 37855 - protein, 40 aa, Artificial Sequence
  Non-cyclic GFR-binding peptide
  MOD_RES (4)..(5)..(37)..(39): Xaa is C or S
AGPXXTPTKMSAISMLYLNDKQQIILKNYQGMVVDRXGXS

SEQ ID NO: 37856 - protein, 38 aa, Artificial Sequence
  Non-cyclic GFR-binding peptide
  MOD_RES (3)..(4)..(36)..(38): Xaa is C or S
GPXXTPTKMSAISMLYLNDKQQIILKNYQGMVVDRXGX

SEQ ID NO: 37857 - protein, 40 aa, Artificial Sequence
  Non-cyclic GFR-binding peptide
  MOD_RES (5)..(6)..(40): Xaa is C or S
  MOD_RES (20)..(21)..(22)..(23)..(24): Xaa is A or G
  MOD_RES (25)..(26)..(27)..(28): Xaa is A or G or absent
SAGPXXTPTKMSAISMLYLXXXXXXXXXLKNYQGMVVDRX

SEQ ID NO: 37858 - protein, 36 aa, Artificial Sequence
  Non-cyclic GFR-binding peptide
  MOD_RES (1)..(35): Xaa is C or S
  MOD_RES (15)..(16)..(17)..(18)..(19): Xaa is A or G
  MOD_RES (20)..(21)..(22)..(23): Xaa is A or G or absent
XTPTKMSAISMLYLXXXXXXXXXLKNYQGMVVDRXG

SEQ ID NO: 37859 - protein, 42 aa, Artificial Sequence
  Non-cyclic GFR-binding peptide
  MOD_RES (6)..(7)..(41): Xaa is C or S
  MOD_RES (21)..(22)..(23)..(24)..(25): Xaa is A or G
  MOD_RES (26)..(27)..(28)..(29): Xaa is A or G or absent
GIPEPXXVPEKMSAISILYLXXXXXXXXXLKNYQNMTVESXA

SEQ ID NO: 37860 - protein, 36 aa, Artificial Sequence
  Non-cyclic GFR-binding peptide
  MOD_RES (2)..(3)..(35): Xaa is C or S
SXXVPARLSAISILYLDAANNVVLKNYQDMVVEAXG

SEQ ID NO: 37861 - protein, 38 aa, Artificial Sequence
  Non-cyclic GFR-binding peptide
  MOD_RES (3)..(4)..(38): Xaa is C or S
  MOD_RES (18)..(19)..(20)..(21)..(22): Xaa is A or G
  MOD_RES (23)..(24)..(25)..(26): Xaa is A or G or absent
EPXXVPEKMSAISILYLXXXXXXXXXLKNYQNMTVESX

SEQ ID NO: 37862 - protein, 32 aa, Artificial Sequence
  Non-cyclic GFR-binding peptide
  MOD_RES (14)..(15)..(16)..(17)..(18): Xaa is A or G
  MOD_RES (19)..(20)..(21)..(22): Xaa is A or G or absent
APVKTSAISMLYLXXXXXXXXXLKNYQMIVEE

SEQ ID NO: 37863 - protein, 38 aa, Artificial Sequence
  Non-cyclic GFR-binding peptide
  MOD_RES (3)..(4)..(36)..(38): Xaa is C or S
KAXXVPTKLSAISILYLDKGVVTYLKNYQGMAVSEXGX

SEQ ID NO: 37864 - protein, 37 aa, Artificial Sequence
  Non-cyclic GFR-binding peptide
  MOD_RES (2)..(3)..(37): Xaa is C or S
  MOD_RES (17)..(18)..(19)..(20)..(21): Xaa is A or G
  MOD_RES (22)..(23)..(24)..(25): Xaa is A or G or absent
PXXVPEKMSAISILYLXXXXXXXXXLKNYQNMTVESX

SEQ ID NO: 37865 - protein, 36 aa, Artificial Sequence
  Non-cyclic GFR-binding peptide
  MOD_RES (1)..(2)..(34)..(36): Xaa is C or S
XXVPEKMSAISILYLDENKNVVLKNYQNMTVESXAX

SEQ ID NO: 37866 - protein, 40 aa, Artificial Sequence
  Non-cyclic GFR-binding peptide
  MOD_RES (5)..(6)..(38)..(40): Xaa is C or S
ASKAXXVPTKLSAISILYLDKGVVTYLKNYQGMAVSEXGX

SEQ ID NO: 37867 - protein, 38 aa, Artificial Sequence
  Non-cyclic GFR-binding peptide
  MOD_RES (3)..(4)..(38): Xaa is C or S
  MOD_RES (18)..(19)..(20)..(21)..(22): Xaa is A or G
  MOD_RES (23)..(24)..(25)..(26): Xaa is A or G or absent
KAXXVPTKLSAISILYLXXXXXXXXXLKNYQGMAVSEX

SEQ ID NO: 37868 - protein, 37 aa, Artificial Sequence
  Non-cyclic GFR-binding peptide
  MOD_RES (4)..(5): Xaa is C or S
  MOD_RES (19)..(20)..(21)..(22)..(23): Xaa is A or G
  MOD_RES (24)..(25)..(26)..(27): Xaa is A or G or absent
PEPXXVPEKMSAISILYLXXXXXXXXXLKNYQNMTVE

SEQ ID NO: 37869 - protein, 39 aa, Artificial Sequence
  Non-cyclic GFR-binding peptide
  MOD_RES (6)..(7)..(39): Xaa is C or S
GSAGPXXTPTKMSAISMLYLNDKQQIILKNYQGMVVDRX

SEQ ID NO: 37870 - protein, 36 aa, Artificial Sequence
  Non-cyclic GFR-binding peptide
  MOD_RES (3)..(4): Xaa is C or S
  MOD_RES (18)..(19)..(20)..(21)..(22): Xaa is A or G
  MOD_RES (23)..(24)..(25)..(26): Xaa is A or G or absent
GPXXTPTKMSAISMLYLXXXXXXXXXLKNYQGMVVD

SEQ ID NO: 37871 - protein, 36 aa, Artificial Sequence
  Non-cyclic GFR-binding peptide
  MOD_RES (2)..(3): Xaa is C or S
  MOD_RES (17)..(18)..(19)..(20)..(21): Xaa is A or G
  MOD_RES (22)..(23)..(24)..(25): Xaa is A or G or absent
SXXVPARLSAISILYLXXXXXXXXXLKNYQDMVVEA

SEQ ID NO: 37872 - protein, 33 aa, Artificial Sequence
  Non-cyclic GFR-binding peptide
  MOD_RES (1)..(2): Xaa is C or S
XXVPTKLSAISILYLDKGVVTYLKNYQGMAVSE

SEQ ID NO: 37873 - protein, 36 aa, Artificial Sequence
  Non-cyclic GFR-binding peptide
  MOD_RES (2)..(3)..(34)..(36): Xaa is C or S
TXXAPVKTSAISMLYLDNGRVLLLKNYQMIVEEXGX

SEQ ID NO: 37874 - protein, 43 aa, Artificial Sequence
  Non-cyclic GFR-binding peptide
  MOD_RES (5)..(6)..(40)..(42): Xaa is C or S
  MOD_RES (20)..(21)..(22)..(23)..(24): Xaa is A or G
  MOD_RES (25)..(26)..(27)..(28): Xaa is A or G or absent
IPEPXXVPEKMSAISILYLXXXXXXXXXLKNYQNMTVESXAXR

SEQ ID NO: 37875 - protein, 37 aa, Artificial Sequence
  Non-cyclic GFR-binding peptide
  MOD_RES (1)..(2)..(34)..(36): Xaa is C or S
XXTPTKMSAISMLYLNDKQQIILKNYQGMVVDRXGXS

SEQ ID NO: 37876 - protein, 42 aa, Artificial Sequence
  Non-cyclic GFR-binding peptide
  MOD_RES (6)..(7)..(41): Xaa is C or S
  MOD_RES (21)..(22)..(23)..(24)..(25): Xaa is A or G
  MOD_RES (26)..(27)..(28)..(29): Xaa is A or G or absent
HVPKPXXAPTKLSAISVLYLXXXXXXXXXLKNYQNMVVRSXG

SEQ ID NO: 37877 - protein, 37 aa, Artificial Sequence
  Non-cyclic GFR-binding peptide
  MOD_RES (4)..(5)..(37): Xaa is C or S
SKAXXVPTKLSAISILYLDKGVVTYLKNYQGMAVSEX

SEQ ID NO: 37878 - protein, 39 aa, Artificial Sequence
  Non-cyclic GFR-binding peptide
  MOD_RES (1)..(2)..(36)..(38): Xaa is C or S
  MOD_RES (16)..(17)..(18)..(19)..(20): Xaa is A or G
  MOD_RES (21)..(22)..(23)..(24): Xaa is A or G or absent
XXVPEKMSAISILYLXXXXXXXXXLKNYQNMTVESXAXR

SEQ ID NO: 37879 - protein, 38 aa, Artificial Sequence
  Non-cyclic GFR-binding peptide
  MOD_RES (5)..(6)..(38): Xaa is C or S
ASKAXXVPTKLSAISILYLDKGVVTYLKNYQGMAVSEX

SEQ ID NO: 37880 - protein, 39 aa, Artificial Sequence
  Non-cyclic GFR-binding peptide
  MOD_RES (5)..(6): Xaa is C or S
  MOD_RES (20)..(21)..(22)..(23)..(24): Xaa is A or G
  MOD_RES (25)..(26)..(27)..(28): Xaa is A or G or absent
SAGPXXTPTKMSAISMLYLXXXXXXXXXLKNYQGMVVDR

SEQ ID NO: 37881 - protein, 32 aa, Artificial Sequence
  Non-cyclic GFR-binding peptide
  MOD_RES (1)..(2): Xaa is C or S
XXAPVKTSAISMLYLDNGRVLLLKNYQMIVEE

SEQ ID NO: 37882 - protein, 38 aa, Artificial Sequence
  Non-cyclic GFR-binding peptide
  MOD_RES (5)..(6)..(37): Xaa is C or S
VPSTXXAPVKTSAISMLYLDNGRVLLLKNYQMIVEEXG

SEQ ID NO: 37883 - protein, 38 aa, Artificial Sequence
  Non-cyclic GFR-binding peptide
  MOD_RES (3)..(4)..(38): Xaa is C or S
  MOD_RES (18)..(19)..(20)..(21)..(22): Xaa is A or G
  MOD_RES (23)..(24)..(25)..(26): Xaa is A or G or absent
GPXXTPTKMSAISMLYLXXXXXXXXXLKNYQGMVVDRX

SEQ ID NO: 37884 - protein, 34 aa, Artificial Sequence
  Non-cyclic GFR-binding peptide
  MOD_RES (34)..(34): Xaa is C or S
  MOD_RES (14)..(15)..(16)..(17)..(18): Xaa is A or G
  MOD_RES (19)..(20)..(21)..(22): Xaa is A or G or absent
VPEKMSAISILYLXXXXXXXXXLKNYQNMTVESX

SEQ ID NO: 37885 - protein, 41 aa, Artificial Sequence
  Non-cyclic GFR-binding peptide
  MOD_RES (5)..(6)..(40): Xaa is C or S
  MOD_RES (20)..(21)..(22)..(23)..(24): Xaa is A or G
  MOD_RES (25)..(26)..(27)..(28): Xaa is A or G or absent
IPEPXXVPEKMSAISILYLXXXXXXXXXLKNYQNMTVESXA

SEQ ID NO: 37886 - protein, 38 aa, Artificial Sequence
  Non-cyclic GFR-binding peptide
  MOD_RES (6)..(7): Xaa is C or S
HVPKPXXAPTKLSAISVLYLDDSSNVILKNYQNMVVRS

SEQ ID NO: 37887 - protein, 32 aa, Artificial Sequence
  Non-cyclic GFR-binding peptide
  MOD_RES (14)..(15)..(16)..(17)..(18): Xaa is A or G
  MOD_RES (19)..(20)..(21)..(22): Xaa is A or G or absent
VPEKMSAISILYLXXXXXXXXXLKNYQNMTVE

SEQ ID NO: 37888 - protein, 42 aa, Artificial Sequence
  Non-cyclic GFR-binding peptide
  MOD_RES (5)..(6)..(40)..(42): Xaa is C or S
  MOD_RES (20)..(21)..(22)..(23)..(24): Xaa is A or G
  MOD_RES (25)..(26)..(27)..(28): Xaa is A or G or absent
SAGPXXTPTKMSAISMLYLXXXXXXXXXLKNYQGMVVDRXGX

SEQ ID NO: 37889 - protein, 38 aa, Artificial Sequence
  Non-cyclic GFR-binding peptide
  MOD_RES (2)..(3)..(35)..(37): Xaa is C or S
AXXVPTKLSAISILYLDKGVVTYLKNYQGMAVSEXGXR

SEQ ID NO: 37890 - protein, 37 aa, Artificial Sequence
  Non-cyclic GFR-binding peptide
  MOD_RES (3)..(4): Xaa is C or S
  MOD_RES (18)..(19)..(20)..(21)..(22): Xaa is A or G
  MOD_RES (23)..(24)..(25)..(26): Xaa is A or G or absent
KAXXVPTKLSAISILYLXXXXXXXXXLKNYQGMAVSE

SEQ ID NO: 37891 - protein, 34 aa, Artificial Sequence
  Non-cyclic GFR-binding peptide
  MOD_RES (1)..(33): Xaa is C or S
XVPTKLSAISILYLDKGVVTYLKNYQGMAVSEXG

SEQ ID NO: 37892 - protein, 38 aa, Artificial Sequence
  Non-cyclic GFR-binding peptide
  MOD_RES (3)..(4)..(37): Xaa is C or S
  MOD_RES (18)..(19)..(20)..(21)..(22): Xaa is A or G
  MOD_RES (23)..(24)..(25)..(26): Xaa is A or G or absent
STXXAPVKTSAISMLYLXXXXXXXXXLKNYQMIVEEXG

SEQ ID NO: 37893 - protein, 32 aa, Artificial Sequence
  Non-cyclic GFR-binding peptide
  MOD_RES (1)..(1): Xaa is C or S
XVPEKMSAISILYLDENKNVVLKNYQNMTVES

SEQ ID NO: 37894 - protein, 35 aa, Artificial Sequence
  Non-cyclic GFR-binding peptide
  MOD_RES (34)..(34): Xaa is C or S
  MOD_RES (14)..(15)..(16)..(17)..(18): Xaa is A or G
  MOD_RES (19)..(20)..(21)..(22): Xaa is A or G or absent
VPTKLSAISILYLXXXXXXXXXLKNYQGMAVSEXG

SEQ ID NO: 37895 - protein, 38 aa, Artificial Sequence
  Non-cyclic GFR-binding peptide
  MOD_RES (1)..(2)..(36)..(38): Xaa is C or S
  MOD_RES (16)..(17)..(18)..(19)..(20): Xaa is A or G
  MOD_RES (21)..(22)..(23)..(24): Xaa is A or G or absent
XXVPARLSAISILYLXXXXXXXXXLKNYQDMVVEAXGX

SEQ ID NO: 37896 - protein, 39 aa, Artificial Sequence
  Non-cyclic GFR-binding peptide
  MOD_RES (1)..(2)..(36)..(38): Xaa is C or S
  MOD_RES (16)..(17)..(18)..(19)..(20): Xaa is A or G
  MOD_RES (21)..(22)..(23)..(24): Xaa is A or G or absent
XXTPTKMSAISMLYLXXXXXXXXXLKNYQGMVVDRXGXS

SEQ ID NO: 37897 - protein, 39 aa, Artificial Sequence
  Non-cyclic GFR-binding peptide
  MOD_RES (1)..(2)..(36)..(38): Xaa is C or S
  MOD_RES (16)..(17)..(18)..(19)..(20): Xaa is A or G
  MOD_RES (21)..(22)..(23)..(24): Xaa is A or G or absent
XXVPARLSAISILYLXXXXXXXXXLKNYQDMVVEAXGXR

SEQ ID NO: 37898 - protein, 40 aa, Artificial Sequence
  Non-cyclic GFR-binding peptide
  MOD_RES (3)..(4)..(38)..(40): Xaa is C or S
  MOD_RES (18)..(19)..(20)..(21)..(22): Xaa is A or G
  MOD_RES (23)..(24)..(25)..(26): Xaa is A or G or absent
EPXXVPEKMSAISILYLXXXXXXXXXLKNYQNMTVESXAX

SEQ ID NO: 37899 - protein, 34 aa, Artificial Sequence
  Non-cyclic GFR-binding peptide
  MOD_RES (1)..(33): Xaa is C or S
XVPARLSAISILYLDAANNVVLKNYQDMVVEAXG

SEQ ID NO: 37900 - protein, 37 aa, Artificial Sequence
  Non-cyclic GFR-binding peptide
  MOD_RES (4)..(5): Xaa is C or S
  MOD_RES (19)..(20)..(21)..(22)..(23): Xaa is A or G
  MOD_RES (24)..(25)..(26)..(27): Xaa is A or G or absent
AGPXXTPTKMSAISMLYLXXXXXXXXXLKNYQGMVVD

SEQ ID NO: 37901 - protein, 37 aa, Artificial Sequence
  Non-cyclic GFR-binding peptide
  MOD_RES (3)..(4): Xaa is C or S
  MOD_RES (18)..(19)..(20)..(21)..(22): Xaa is A or G
  MOD_RES (23)..(24)..(25)..(26): Xaa is A or G or absent
ASXXVPARLSAISILYLXXXXXXXXXLKNYQDMVVEA

SEQ ID NO: 37902 - protein, 33 aa, Artificial Sequence
  Non-cyclic GFR-binding peptide
  MOD_RES (1)..(1): Xaa is C or S
  MOD_RES (15)..(16)..(17)..(18)..(19): Xaa is A or G
  MOD_RES (20)..(21)..(22)..(23): Xaa is A or G or absent
XVPEKMSAISILYLXXXXXXXXXLKNYQNMTVE

SEQ ID NO: 37903 - protein, 44 aa, Artificial Sequence
  Non-cyclic GFR-binding peptide
  MOD_RES (6)..(7)..(41)..(43): Xaa is C or S
  MOD_RES (21)..(22)..(23)..(24)..(25): Xaa is A or G
  MOD_RES (26)..(27)..(28)..(29): Xaa is A or G or absent
GSAGPXXTPTKMSAISMLYLXXXXXXXXXLKNYQGMVVDRXGXS

SEQ ID NO: 37904 - protein, 39 aa, Artificial Sequence
  Non-cyclic GFR-binding peptide
  MOD_RES (2)..(3)..(37)..(39): Xaa is C or S
  MOD_RES (17)..(18)..(19)..(20)..(21): Xaa is A or G
  MOD_RES (22)..(23)..(24)..(25): Xaa is A or G or absent
PXXVPEKMSAISILYLXXXXXXXXXLKNYQNMTVESXAX

SEQ ID NO: 37905 - protein, 35 aa, Artificial Sequence
  Non-cyclic GFR-binding peptide
  MOD_RES (3)..(4): Xaa is C or S
KAXXVPTKLSAISILYLDKGVVTYLKNYQGMAVSE

SEQ ID NO: 37906 - protein, 40 aa, Artificial Sequence
  Non-cyclic GFR-binding peptide
  MOD_RES (3)..(4)..(38)..(40): Xaa is C or S
  MOD_RES (18)..(19)..(20)..(21)..(22): Xaa is A or G
  MOD_RES (23)..(24)..(25)..(26): Xaa is A or G or absent
GPXXTPTKMSAISMLYLXXXXXXXXXLKNYQGMVVDRXGX

SEQ ID NO: 37907 - protein, 32 aa, Artificial Sequence
  Non-cyclic GFR-binding peptide
  MOD_RES (1)..(1): Xaa is C or S
XVPTKLSAISILYLDKGVVTYLKNYQGMAVSE

SEQ ID NO: 37908 - protein, 43 aa, Artificial Sequence
  Non-cyclic GFR-binding peptide
  MOD_RES (6)..(7)..(41)..(43): Xaa is C or S
  MOD_RES (21)..(22)..(23)..(24)..(25): Xaa is A or G
  MOD_RES (26)..(27)..(28)..(29): Xaa is A or G or absent
KASKAXXVPTKLSAISILYLXXXXXXXXXLKNYQGMAVSEXGX

SEQ ID NO: 37909 - protein, 36 aa, Artificial Sequence
  Non-cyclic GFR-binding peptide
  MOD_RES (3)..(4)..(35): Xaa is C or S
STXXAPVKTSAISMLYLDNGRVLLLKNYQMIVEEXG

SEQ ID NO: 37910 - protein, 42 aa, Artificial Sequence
  Non-cyclic GFR-binding peptide
  MOD_RES (6)..(7)..(39)..(41): Xaa is C or S
KASKAXXVPTKLSAISILYLDKGVVTYLKNYQGMAVSEXGXR

SEQ ID NO: 37911 - protein, 35 aa, Artificial Sequence
  Non-cyclic GFR-binding peptide
  MOD_RES (1)..(2)..(33)..(35): Xaa is C or S
XXAPVKTSAISMLYLDNGRVLLLKNYQMIVEEXGX

SEQ ID NO: 37912 - protein, 37 aa, Artificial Sequence
  Non-cyclic GFR-binding peptide
  MOD_RES (2)..(3)..(35)..(37): Xaa is C or S
PXXVPEKMSAISILYLDENKNVVLKNYQNMTVESXAX

SEQ ID NO: 37913 - protein, 39 aa, Artificial Sequence
  Non-cyclic GFR-binding peptide
  MOD_RES (2)..(3)..(37)..(39): Xaa is C or S
  MOD_RES (17)..(18)..(19)..(20)..(21): Xaa is A or G
  MOD_RES (22)..(23)..(24)..(25): Xaa is A or G or absent
SXXVPARLSAISILYLXXXXXXXXXLKNYQDMVVEAXGX

SEQ ID NO: 37914 - protein, 40 aa, Artificial Sequence
  Non-cyclic GFR-binding peptide
  MOD_RES (6)..(7)..(40): Xaa is C or S
  MOD_RES (21)..(22)..(23)..(24)..(25): Xaa is A or G
  MOD_RES (26)..(27)..(28)..(29): Xaa is A or G or absent
RVPSTXXAPVKTSAISMLYLXXXXXXXXXLKNYQMIVEEX

SEQ ID NO: 37915 - protein, 39 aa, Artificial Sequence
  Non-cyclic GFR-binding peptide
  MOD_RES (3)..(4)..(37)..(39): Xaa is C or S
  MOD_RES (18)..(19)..(20)..(21)..(22): Xaa is A or G
  MOD_RES (23)..(24)..(25)..(26): Xaa is A or G or absent
STXXAPVKTSAISMLYLXXXXXXXXXLKNYQMIVEEXGX

SEQ ID NO: 37916 - protein, 35 aa, Artificial Sequence
  Non-cyclic GFR-binding peptide
  MOD_RES (3)..(4): Xaa is C or S
ASXXVPARLSAISILYLDAANNVVLKNYQDMVVEA

SEQ ID NO: 37917 - protein, 34 aa, Artificial Sequence
  Non-cyclic GFR-binding peptide
  MOD_RES (1)..(33): Xaa is C or S
XTPTKMSAISMLYLNDKQQIILKNYQGMVVDRXG

SEQ ID NO: 37918 - protein, 34 aa, Artificial Sequence
  Non-cyclic GFR-binding peptide
  MOD_RES (1)..(2): Xaa is C or S
  MOD_RES (16)..(17)..(18)..(19)..(20): Xaa is A or G
  MOD_RES (21)..(22)..(23)..(24): Xaa is A or G or absent
XXVPARLSAISILYLXXXXXXXXXLKNYQDMVVE

SEQ ID NO: 37919 - protein, 40 aa, Artificial Sequence
  Non-cyclic GFR-binding peptide
  MOD_RES (4)..(5)..(39): Xaa is C or S
  MOD_RES (19)..(20)..(21)..(22)..(23): Xaa is A or G
  MOD_RES (24)..(25)..(26)..(27): Xaa is A or G or absent
SKAXXVPTKLSAISILYLXXXXXXXXXLKNYQGMAVSEXG

SEQ ID NO: 37920 - protein, 37 aa, Artificial Sequence
  Non-cyclic GFR-binding peptide
  MOD_RES (2)..(3)..(37): Xaa is C or S
  MOD_RES (17)..(18)..(19)..(20)..(21): Xaa is A or G
  MOD_RES (22)..(23)..(24)..(25): Xaa is A or G or absent
AXXVPTKLSAISILYLXXXXXXXXXLKNYQGMAVSEX

SEQ ID NO: 37921 - protein, 37 aa, Artificial Sequence
  Non-cyclic GFR-binding peptide
  MOD_RES (1)..(35)..(37): Xaa is C or S
  MOD_RES (15)..(16)..(17)..(18)..(19): Xaa is A or G
  MOD_RES (20)..(21)..(22)..(23): Xaa is A or G or absent
XVPARLSAISILYLXXXXXXXXXLKNYQDMVVEAXGX

SEQ ID NO: 37922 - protein, 35 aa, Artificial Sequence
  Non-cyclic GFR-binding peptide
  MOD_RES (2)..(3): Xaa is C or S
  MOD_RES (17)..(18)..(19)..(20)..(21): Xaa is A or G
  MOD_RES (22)..(23)..(24)..(25): Xaa is A or G or absent
SXXVPARLSAISILYLXXXXXXXXXLKNYQDMVVE

SEQ ID NO: 37923 - protein, 38 aa, Artificial Sequence
  Non-cyclic GFR-binding peptide
  MOD_RES (4)..(5): Xaa is C or S
  MOD_RES (19)..(20)..(21)..(22)..(23): Xaa is A or G
  MOD_RES (24)..(25)..(26)..(27): Xaa is A or G or absent
PASXXVPARLSAISILYLXXXXXXXXXLKNYQDMVVEA

SEQ ID NO: 37924 - protein, 42 aa, Artificial Sequence
  Non-cyclic GFR-binding peptide
  MOD_RES (6)..(7)..(39)..(41): Xaa is C or S
AAPASXXVPARLSAISILYLDAANNVVLKNYQDMVVEAXGXR

SEQ ID NO: 37925 - protein, 37 aa, Artificial Sequence
  Non-cyclic GFR-binding peptide
  MOD_RES (2)..(3)..(35)..(37): Xaa is C or S
SXXVPARLSAISILYLDAANNVVLKNYQDMVVEAXGX

SEQ ID NO: 37926 - protein, 38 aa, Artificial Sequence
  Non-cyclic GFR-binding peptide
  MOD_RES (3)..(4)..(36)..(38): Xaa is C or S
EPXXVPEKMSAISILYLDENKNVVLKNYQNMTVESXAX

SEQ ID NO: 37927 - protein, 36 aa, Artificial Sequence
  Non-cyclic GFR-binding peptide
  MOD_RES (2)..(3): Xaa is C or S
  MOD_RES (17)..(18)..(19)..(20)..(21): Xaa is A or G
  MOD_RES (22)..(23)..(24)..(25): Xaa is A or G or absent
AXXVPTKLSAISILYLXXXXXXXXXLKNYQGMAVSE

SEQ ID NO: 37928 - protein, 38 aa, Artificial Sequence
  Non-cyclic GFR-binding peptide
  MOD_RES (1)..(2)..(36)..(38): Xaa is C or S
  MOD_RES (16)..(17)..(18)..(19)..(20): Xaa is A or G
  MOD_RES (21)..(22)..(23)..(24): Xaa is A or G or absent
XXVPEKMSAISILYLXXXXXXXXXLKNYQNMTVESXAX

SEQ ID NO: 37929 - protein, 35 aa, Artificial Sequence
  Non-cyclic GFR-binding peptide
  MOD_RES (2)..(3): Xaa is C or S
  MOD_RES (17)..(18)..(19)..(20)..(21): Xaa is A or G
  MOD_RES (22)..(23)..(24)..(25): Xaa is A or G or absent
PXXTPTKMSAISMLYLXXXXXXXXXLKNYQGMVVD

SEQ ID NO: 37930 - protein, 35 aa, Artificial Sequence
  Non-cyclic GFR-binding peptide
  MOD_RES (2)..(3): Xaa is C or S
  MOD_RES (17)..(18)..(19)..(20)..(21): Xaa is A or G
  MOD_RES (22)..(23)..(24)..(25): Xaa is A or G or absent
AXXVPTKLSAISILYLXXXXXXXXXLKNYQGMAVS

SEQ ID NO: 37931 - protein, 39 aa, Artificial Sequence
  Non-cyclic GFR-binding peptide
  MOD_RES (4)..(5)..(37)..(39): Xaa is C or S
PEPXXVPEKMSAISILYLDENKNVVLKNYQNMTVESXAX

SEQ ID NO: 37932 - protein, 36 aa, Artificial Sequence
  Non-cyclic GFR-binding peptide
  MOD_RES (1)..(34)..(36): Xaa is C or S
  MOD_RES (15)..(16)..(17)..(18)..(19): Xaa is A or G
  MOD_RES (20)..(21)..(22)..(23): Xaa is A or G or absent
XAPVKTSAISMLYLXXXXXXXXXLKNYQMIVEEXGX

SEQ ID NO: 37933 - protein, 34 aa, Artificial Sequence
  Non-cyclic GFR-binding peptide
  MOD_RES (31)..(33): Xaa is C or S
APVKTSAISMLYLDNGRVLLLKNYQMIVEEXGXL

SEQ ID NO: 37934 - protein, 32 aa, Artificial Sequence
  Non-cyclic GFR-binding peptide
  MOD_RES (1)..(32): Xaa is C or S
XAPVKTSAISMLYLDNGRVLLLKNYQMIVEEX

SEQ ID NO: 37935 - protein, 37 aa, Artificial Sequence
  Non-cyclic GFR-binding peptide
  MOD_RES (3)..(4)..(36): Xaa is C or S
EPXXVPEKMSAISILYLDENKNVVLKNYQNMTVESXA

SEQ ID NO: 37936 - protein, 39 aa, Artificial Sequence
  Non-cyclic GFR-binding peptide
  MOD_RES (4)..(5)..(37)..(39): Xaa is C or S
SKAXXVPTKLSAISILYLDKGVVTYLKNYQGMAVSEXGX

SEQ ID NO: 37937 - protein, 39 aa, Artificial Sequence
  Non-cyclic GFR-binding peptide
  MOD_RES (5)..(6): Xaa is C or S
  MOD_RES (20)..(21)..(22)..(23)..(24): Xaa is A or G
  MOD_RES (25)..(26)..(27)..(28): Xaa is A or G or absent
APASXXVPARLSAISILYLXXXXXXXXXLKNYQDMVVEA

SEQ ID NO: 37938 - protein, 36 aa, Artificial Sequence
  Non-cyclic GFR-binding peptide
  MOD_RES (1)..(33)..(35): Xaa is C or S
XVPEKMSAISILYLDENKNVVLKNYQNMTVESXAXR

SEQ ID NO: 37939 - protein, 44 aa, Artificial Sequence
  Non-cyclic GFR-binding peptide
  MOD_RES (6)..(7)..(41)..(43): Xaa is C or S
  MOD_RES (21)..(22)..(23)..(24)..(25): Xaa is A or G
  MOD_RES (26)..(27)..(28)..(29): Xaa is A or G or absent
HVPKPXXAPTKLSAISVLYLXXXXXXXXXLKNYQNMVVRSXGXH

SEQ ID NO: 37940 - protein, 37 aa, Artificial Sequence
  Non-cyclic GFR-binding peptide
  MOD_RES (1)..(2)..(34)..(36): Xaa is C or S
XXVPTKLSAISILYLDKGVVTYLKNYQGMAVSEXGXR

SEQ ID NO: 37941 - protein, 34 aa, Artificial Sequence
  Non-cyclic GFR-binding peptide
  MOD_RES (32)..(34): Xaa is C or S
VPARLSAISILYLDAANNVVLKNYQDMVVEAXGX

SEQ ID NO: 37942 - protein, 37 aa, Artificial Sequence
  Non-cyclic GFR-binding peptide
  MOD_RES (34)..(36): Xaa is C or S
  MOD_RES (14)..(15)..(16)..(17)..(18): Xaa is A or G
  MOD_RES (19)..(20)..(21)..(22): Xaa is A or G or absent
VPEKMSAISILYLXXXXXXXXXLKNYQNMTVESXAXR

SEQ ID NO: 37943 - protein, 35 aa, Artificial Sequence
  Non-cyclic GFR-binding peptide
  MOD_RES (4)..(5): Xaa is C or S
PSTXXAPVKTSAISMLYLDNGRVLLLKNYQMIVEE

SEQ ID NO: 37944 - protein, 37 aa, Artificial Sequence
  Non-cyclic GFR-binding peptide
  MOD_RES (3)..(4)..(36): Xaa is C or S
KAXXVPTKLSAISILYLDKGVVTYLKNYQGMAVSEXG

SEQ ID NO: 37945 - protein, 36 aa, Artificial Sequence
  Non-cyclic GFR-binding peptide
  MOD_RES (2)..(3)..(35): Xaa is C or S
PXXTPTKMSAISMLYLNDKQQIILKNYQGMVVDRXG

SEQ ID NO: 37946 - protein, 38 aa, Artificial Sequence
  Non-cyclic GFR-binding peptide
  MOD_RES (4)..(5)..(36)..(38): Xaa is C or S
PSTXXAPVKTSAISMLYLDNGRVLLLKNYQMIVEEXGX

SEQ ID NO: 37947 - protein, 30 aa, Artificial Sequence
  Non-cyclic GFR-binding peptide
VPEKMSAISILYLDENKNVVLKNYQNMTVE

SEQ ID NO: 37948 - protein, 40 aa, Artificial Sequence
  Non-cyclic GFR-binding peptide
  MOD_RES (6)..(7)..(39): Xaa is C or S
GIPEPXXVPEKMSAISILYLDENKNVVLKNYQNMTVESXA

SEQ ID NO: 37949 - protein, 34 aa, Artificial Sequence
  Non-cyclic GFR-binding peptide
  MOD_RES (1)..(2): Xaa is C or S
  MOD_RES (16)..(17)..(18)..(19)..(20): Xaa is A or G
  MOD_RES (21)..(22)..(23)..(24): Xaa is A or G or absent
XXVPTKLSAISILYLXXXXXXXXXLKNYQGMAVS

SEQ ID NO: 37950 - protein, 33 aa, Artificial Sequence
  Non-cyclic GFR-binding peptide
  MOD_RES (32)..(32): Xaa is C or S
VPEKMSAISILYLDENKNVVLKNYQNMTVESXA

SEQ ID NO: 37951 - protein, 36 aa, Artificial Sequence
  Non-cyclic GFR-binding peptide
  MOD_RES (2)..(3): Xaa is C or S
  MOD_RES (17)..(18)..(19)..(20)..(21): Xaa is A or G
  MOD_RES (22)..(23)..(24)..(25): Xaa is A or G or absent
PXXTPTKMSAISMLYLXXXXXXXXXLKNYQGMVVDR

SEQ ID NO: 37952 - protein, 36 aa, Artificial Sequence
  Non-cyclic GFR-binding peptide
  MOD_RES (5)..(6): Xaa is C or S
VPSTXXAPVKTSAISMLYLDNGRVLLLKNYQMIVEE

SEQ ID NO: 37953 - protein, 39 aa, Artificial Sequence
  Non-cyclic GFR-binding peptide
  MOD_RES (4)..(5)..(39): Xaa is C or S
  MOD_RES (19)..(20)..(21)..(22)..(23): Xaa is A or G
  MOD_RES (24)..(25)..(26)..(27): Xaa is A or G or absent
AGPXXTPTKMSAISMLYLXXXXXXXXXLKNYQGMVVDRX

SEQ ID NO: 37954 - protein, 31 aa, Artificial Sequence
  Non-cyclic GFR-binding peptide
  MOD_RES (31)..(31): Xaa is C or S
APVKTSAISMLYLDNGRVLLLKNYQMIVEEX

SEQ ID NO: 37955 - protein, 41 aa, Artificial Sequence
  Non-cyclic GFR-binding peptide
  MOD_RES (5)..(6)..(39)..(41): Xaa is C or S
  MOD_RES (20)..(21)..(22)..(23)..(24): Xaa is A or G
  MOD_RES (25)..(26)..(27)..(28): Xaa is A or G or absent
VPSTXXAPVKTSAISMLYLXXXXXXXXXLKNYQMIVEEXGX

SEQ ID NO: 37956 - protein, 43 aa, Artificial Sequence
  Non-cyclic GFR-binding peptide
  MOD_RES (6)..(7)..(41)..(43): Xaa is C or S
  MOD_RES (21)..(22)..(23)..(24)..(25): Xaa is A or G
  MOD_RES (26)..(27)..(28)..(29): Xaa is A or G or absent
AAPASXXVPARLSAISILYLXXXXXXXXXLKNYQDMVVEAXGX

SEQ ID NO: 37957 - protein, 39 aa, Artificial Sequence
  Non-cyclic GFR-binding peptide
  MOD_RES (5)..(6): Xaa is C or S
  MOD_RES (20)..(21)..(22)..(23)..(24): Xaa is A or G
  MOD_RES (25)..(26)..(27)..(28): Xaa is A or G or absent
IPEPXXVPEKMSAISILYLXXXXXXXXXLKNYQNMTVES

SEQ ID NO: 37958 - protein, 40 aa, Artificial Sequence
  Non-cyclic GFR-binding peptide
  MOD_RES (3)..(4)..(38)..(40): Xaa is C or S
  MOD_RES (18)..(19)..(20)..(21)..(22): Xaa is A or G
  MOD_RES (23)..(24)..(25)..(26): Xaa is A or G or absent
KAXXVPTKLSAISILYLXXXXXXXXXLKNYQGMAVSEXGX

SEQ ID NO: 37959 - protein, 37 aa, Artificial Sequence
  Non-cyclic GFR-binding peptide
  MOD_RES (4)..(5): Xaa is C or S
  MOD_RES (19)..(20)..(21)..(22)..(23): Xaa is A or G
  MOD_RES (24)..(25)..(26)..(27): Xaa is A or G or absent
PASXXVPARLSAISILYLXXXXXXXXXLKNYQDMVVE

SEQ ID NO: 37960 - protein, 43 aa, Artificial Sequence
  Non-cyclic GFR-binding peptide
  MOD_RES (5)..(6)..(40)..(42): Xaa is C or S
  MOD_RES (20)..(21)..(22)..(23)..(24): Xaa is A or G
  MOD_RES (25)..(26)..(27)..(28): Xaa is A or G or absent
APASXXVPARLSAISILYLXXXXXXXXXLKNYQDMVVEAXGXR

SEQ ID NO: 37961 - protein, 39 aa, Artificial Sequence
  Non-cyclic GFR-binding peptide
  MOD_RES (6)..(7)..(38): Xaa is C or S
RVPSTXXAPVKTSAISMLYLDNGRVLLLKNYQMIVEEXG

SEQ ID NO: 37962 - protein, 38 aa, Artificial Sequence
  Non-cyclic GFR-binding peptide
  MOD_RES (1)..(2)..(36)..(38): Xaa is C or S
  MOD_RES (16)..(17)..(18)..(19)..(20): Xaa is A or G
  MOD_RES (21)..(22)..(23)..(24): Xaa is A or G or absent
XXTPTKMSAISMLYLXXXXXXXXXLKNYQGMVVDRXGX

SEQ ID NO: 37963 - protein, 36 aa, Artificial Sequence
  Non-cyclic GFR-binding peptide
  MOD_RES (1)..(33)..(35): Xaa is C or S
XVPTKLSAISILYLDKGVVTYLKNYQGMAVSEXGXR

SEQ ID NO: 37964 - protein, 36 aa, Artificial Sequence
  Non-cyclic GFR-binding peptide
  MOD_RES (1)..(35): Xaa is C or S
  MOD_RES (15)..(16)..(17)..(18)..(19): Xaa is A or G
  MOD_RES (20)..(21)..(22)..(23): Xaa is A or G or absent
XVPEKMSAISILYLXXXXXXXXXLKNYQNMTVESXA

SEQ ID NO: 37965 - protein, 34 aa, Artificial Sequence
  Non-cyclic GFR-binding peptide
  MOD_RES (3)..(4): Xaa is C or S
EPXXVPEKMSAISILYLDENKNVVLKNYQNMTVE

SEQ ID NO: 37966 - protein, 36 aa, Artificial Sequence
  Non-cyclic GFR-binding peptide
  MOD_RES (4)..(5): Xaa is C or S
PEPXXVPEKMSAISILYLDENKNVVLKNYQNMTVES

SEQ ID NO: 37967 - protein, 40 aa, Artificial Sequence
  Non-cyclic GFR-binding peptide
  MOD_RES (5)..(6)..(37)..(39): Xaa is C or S
VPSTXXAPVKTSAISMLYLDNGRVLLLKNYQMIVEEXGXL

SEQ ID NO: 37968 - protein, 41 aa, Artificial Sequence
  Non-cyclic GFR-binding peptide
  MOD_RES (5)..(6)..(38)..(40): Xaa is C or S
APASXXVPARLSAISILYLDAANNVVLKNYQDMVVEAXGXR

SEQ ID NO: 37969 - protein, 39 aa, Artificial Sequence
  Non-cyclic GFR-binding peptide
  MOD_RES (5)..(6)..(38): Xaa is C or S
APASXXVPARLSAISILYLDAANNVVLKNYQDMVVEAXG

SEQ ID NO: 37970 - protein, 35 aa, Artificial Sequence
  Non-cyclic GFR-binding peptide
  MOD_RES (1)..(2): Xaa is C or S
  MOD_RES (16)..(17)..(18)..(19)..(20): Xaa is A or G
  MOD_RES (21)..(22)..(23)..(24): Xaa is A or G or absent
XXVPTKLSAISILYLXXXXXXXXXLKNYQGMAVSE

SEQ ID NO: 37971 - protein, 33 aa, Artificial Sequence
  Non-cyclic GFR-binding peptide
  MOD_RES (2)..(3): Xaa is C or S
PXXTPTKMSAISMLYLNDKQQIILKNYQGMVVD

SEQ ID NO: 37972 - protein, 43 aa, Artificial Sequence
  Non-cyclic GFR-binding peptide
  MOD_RES (6)..(7)..(41)..(43): Xaa is C or S
  MOD_RES (21)..(22)..(23)..(24)..(25): Xaa is A or G
  MOD_RES (26)..(27)..(28)..(29): Xaa is A or G or absent
GIPEPXXVPEKMSAISILYLXXXXXXXXXLKNYQNMTVESXAX

SEQ ID NO: 37973 - protein, 35 aa, Artificial Sequence
  Non-cyclic GFR-binding peptide
  MOD_RES (32)..(34): Xaa is C or S
VPARLSAISILYLDAANNVVLKNYQDMVVEAXGXR

SEQ ID NO: 37974 - protein, 37 aa, Artificial Sequence
  Non-cyclic GFR-binding peptide
  MOD_RES (5)..(6): Xaa is C or S
IPEPXXVPEKMSAISILYLDENKNVVLKNYQNMTVES

SEQ ID NO: 37975 - protein, 37 aa, Artificial Sequence
  Non-cyclic GFR-binding peptide
  MOD_RES (6)..(7): Xaa is C or S
HVPKPXXAPTKLSAISVLYLDDSSNVILKNYQNMVVR

SEQ ID NO: 37976 - protein, 40 aa, Artificial Sequence
  Non-cyclic GFR-binding peptide
  MOD_RES (2)..(3)..(37)..(39): Xaa is C or S
  MOD_RES (17)..(18)..(19)..(20)..(21): Xaa is A or G
  MOD_RES (22)..(23)..(24)..(25): Xaa is A or G or absent
PXXVPEKMSAISILYLXXXXXXXXXLKNYQNMTVESXAXR

SEQ ID NO: 37977 - protein, 42 aa, Artificial Sequence
  Non-cyclic GFR-binding peptide
  MOD_RES (6)..(7)..(41): Xaa is C or S
  MOD_RES (21)..(22)..(23)..(24)..(25): Xaa is A or G
  MOD_RES (26)..(27)..(28)..(29): Xaa is A or G or absent
KASKAXXVPTKLSAISILYLXXXXXXXXXLKNYQGMAVSEXG

SEQ ID NO: 37978 - protein, 42 aa, Artificial Sequence
  Non-cyclic GFR-binding peptide
  MOD_RES (5)..(6)..(40)..(42): Xaa is C or S
  MOD_RES (20)..(21)..(22)..(23)..(24): Xaa is A or G
  MOD_RES (25)..(26)..(27)..(28): Xaa is A or G or absent
ASKAXXVPTKLSAISILYLXXXXXXXXXLKNYQGMAVSEXGX

SEQ ID NO: 37979 - protein, 41 aa, Artificial Sequence
  Non-cyclic GFR-binding peptide
  MOD_RES (6)..(7)..(41): Xaa is C or S
  MOD_RES (21)..(22)..(23)..(24)..(25): Xaa is A or G
  MOD_RES (26)..(27)..(28)..(29): Xaa is A or G or absent
AAPASXXVPARLSAISILYLXXXXXXXXXLKNYQDMVVEAX

SEQ ID NO: 37980 - protein, 42 aa, Artificial Sequence
  Non-cyclic GFR-binding peptide
  MOD_RES (4)..(5)..(39)..(41): Xaa is C or S
  MOD_RES (19)..(20)..(21)..(22)..(23): Xaa is A or G
  MOD_RES (24)..(25)..(26)..(27): Xaa is A or G or absent
SKAXXVPTKLSAISILYLXXXXXXXXXLKNYQGMAVSEXGXR

SEQ ID NO: 37981 - protein, 34 aa, Artificial Sequence
  Non-cyclic GFR-binding peptide
  MOD_RES (1)..(2): Xaa is C or S
  MOD_RES (16)..(17)..(18)..(19)..(20): Xaa is A or G
  MOD_RES (21)..(22)..(23)..(24): Xaa is A or G or absent
XXAPVKTSAISMLYLXXXXXXXXXLKNYQMIVEE

SEQ ID NO: 37982 - protein, 39 aa, Artificial Sequence
  Non-cyclic GFR-binding peptide
  MOD_RES (6)..(7): Xaa is C or S
  MOD_RES (21)..(22)..(23)..(24)..(25): Xaa is A or G
  MOD_RES (26)..(27)..(28)..(29): Xaa is A or G or absent
AAPASXXVPARLSAISILYLXXXXXXXXXLKNYQDMVVE

SEQ ID NO: 37983 - protein, 39 aa, Artificial Sequence
  Non-cyclic GFR-binding peptide
  MOD_RES (4)..(5)..(38): Xaa is C or S
  MOD_RES (19)..(20)..(21)..(22)..(23): Xaa is A or G
  MOD_RES (24)..(25)..(26)..(27): Xaa is A or G or absent
PSTXXAPVKTSAISMLYLXXXXXXXXXLKNYQMIVEEXG

SEQ ID NO: 37984 - protein, 40 aa, Artificial Sequence
  Non-cyclic GFR-binding peptide
  MOD_RES (4)..(5)..(37)..(39): Xaa is C or S
PASXXVPARLSAISILYLDAANNVVLKNYQDMVVEAXGXR

SEQ ID NO: 37985 - protein, 40 aa, Artificial Sequence
  Non-cyclic GFR-binding peptide
  MOD_RES (6)..(7)..(39): Xaa is C or S
KASKAXXVPTKLSAISILYLDKGVVTYLKNYQGMAVSEXG

SEQ ID NO: 37986 - protein, 36 aa, Artificial Sequence
  Non-cyclic GFR-binding peptide
  MOD_RES (1)..(33)..(35): Xaa is C or S
XVPARLSAISILYLDAANNVVLKNYQDMVVEAXGXR

SEQ ID NO: 37987 - protein, 37 aa, Artificial Sequence
  Non-cyclic GFR-binding peptide
  MOD_RES (1)..(2)..(35)..(37): Xaa is C or S
  MOD_RES (16)..(17)..(18)..(19)..(20): Xaa is A or G
  MOD_RES (21)..(22)..(23)..(24): Xaa is A or G or absent
XXAPVKTSAISMLYLXXXXXXXXXLKNYQMIVEEXGX

SEQ ID NO: 37988 - protein, 41 aa, Artificial Sequence
  Non-cyclic GFR-binding peptide
  MOD_RES (3)..(4)..(38)..(40): Xaa is C or S
  MOD_RES (18)..(19)..(20)..(21)..(22): Xaa is A or G
  MOD_RES (23)..(24)..(25)..(26): Xaa is A or G or absent
EPXXVPEKMSAISILYLXXXXXXXXXLKNYQNMTVESXAXR

SEQ ID NO: 37989 - protein, 34 aa, Artificial Sequence
  Non-cyclic GFR-binding peptide
  MOD_RES (3)..(4): Xaa is C or S
ASXXVPARLSAISILYLDAANNVVLKNYQDMVVE

SEQ ID NO: 37990 - protein, 37 aa, Artificial Sequence
  Non-cyclic GFR-binding peptide
  MOD_RES (34)..(36): Xaa is C or S
  MOD_RES (14)..(15)..(16)..(17)..(18): Xaa is A or G
  MOD_RES (19)..(20)..(21)..(22): Xaa is A or G or absent
TPTKMSAISMLYLXXXXXXXXXLKNYQGMVVDRXGXS

SEQ ID NO: 37991 - protein, 40 aa, Artificial Sequence
  Non-cyclic GFR-binding peptide
  MOD_RES (2)..(3)..(37)..(39): Xaa is C or S
  MOD_RES (17)..(18)..(19)..(20)..(21): Xaa is A or G
  MOD_RES (22)..(23)..(24)..(25): Xaa is A or G or absent
SXXVPARLSAISILYLXXXXXXXXXLKNYQDMVVEAXGXR

SEQ ID NO: 37992 - protein, 35 aa, Artificial Sequence
  Non-cyclic GFR-binding peptide
  MOD_RES (32)..(34): Xaa is C or S
VPEKMSAISILYLDENKNVVLKNYQNMTVESXAXR

SEQ ID NO: 37993 - protein, 38 aa, Artificial Sequence
  Non-cyclic GFR-binding peptide
  MOD_RES (2)..(3)..(35)..(37): Xaa is C or S
PXXTPTKMSAISMLYLNDKQQIILKNYQGMVVDRXGXS

SEQ ID NO: 37994 - protein, 38 aa, Artificial Sequence
  Non-cyclic GFR-binding peptide
  MOD_RES (2)..(3)..(36)..(38): Xaa is C or S
  MOD_RES (17)..(18)..(19)..(20)..(21): Xaa is A or G
  MOD_RES (22)..(23)..(24)..(25): Xaa is A or G or absent
TXXAPVKTSAISMLYLXXXXXXXXXLKNYQMIVEEXGX

SEQ ID NO: 37995 - protein, 32 aa, Artificial Sequence
  Non-cyclic GFR-binding peptide
  MOD_RES (1)..(1): Xaa is C or S
XTPTKMSAISMLYLNDKQQIILKNYQGMVVDR

SEQ ID NO: 37996 - protein, 30 aa, Artificial Sequence; identical to SEQ ID NO: 727
  Non-cyclic GFR-binding peptide

SEQ ID NO: 37997 - protein, 36 aa, Artificial Sequence
  Non-cyclic GFR-binding peptide
  MOD_RES (2)..(3)..(36): Xaa is C or S
  MOD_RES (17)..(18)..(19)..(20)..(21): Xaa is A or G
  MOD_RES (22)..(23)..(24)..(25): Xaa is A or G or absent
TXXAPVKTSAISMLYLXXXXXXXXXLKNYQMIVEEX

SEQ ID NO: 37998 - protein, 37 aa, Artificial Sequence
  Non-cyclic GFR-binding peptide
  MOD_RES (6)..(7): Xaa is C or S
GIPEPXXVPEKMSAISILYLDENKNVVLKNYQNMTVE

SEQ ID NO: 37999 - protein, 36 aa, Artificial Sequence
  Non-cyclic GFR-binding peptide
  MOD_RES (3)..(4): Xaa is C or S
  MOD_RES (18)..(19)..(20)..(21)..(22): Xaa is A or G
  MOD_RES (23)..(24)..(25)..(26): Xaa is A or G or absent
EPXXVPEKMSAISILYLXXXXXXXXXLKNYQNMTVE

SEQ ID NO: 38000 - protein, 42 aa, Artificial Sequence
  Non-cyclic GFR-binding peptide
  MOD_RES (6)..(7)..(39)..(41): Xaa is C or S
GIPEPXXVPEKMSAISILYLDENKNVVLKNYQNMTVESXAXR

SEQ ID NO: 38001 - protein, 37 aa, Artificial Sequence
  Non-cyclic GFR-binding peptide
  MOD_RES (6)..(7): Xaa is C or S
AAPASXXVPARLSAISILYLDAANNVVLKNYQDMVVE

SEQ ID NO: 38002 - protein, 37 aa, Artificial Sequence
  Non-cyclic GFR-binding peptide
  MOD_RES (34)..(36): Xaa is C or S
  MOD_RES (14)..(15)..(16)..(17)..(18): Xaa is A or G
  MOD_RES (19)..(20)..(21)..(22): Xaa is A or G or absent
VPTKLSAISILYLXXXXXXXXXLKNYQGMAVSEXGXR

SEQ ID NO: 38003 - protein, 37 aa, Artificial Sequence
  Non-cyclic GFR-binding peptide
  MOD_RES (1)..(35)..(37): Xaa is C or S
  MOD_RES (15)..(16)..(17)..(18)..(19): Xaa is A or G
  MOD_RES (20)..(21)..(22)..(23): Xaa is A or G or absent
XVPTKLSAISILYLXXXXXXXXXLKNYQGMAVSEXGX

SEQ ID NO: 38004 - protein, 37 aa, Artificial Sequence
  Non-cyclic GFR-binding peptide
  MOD_RES (3)..(4): Xaa is C or S
  MOD_RES (18)..(19)..(20)..(21)..(22): Xaa is A or G
  MOD_RES (23)..(24)..(25)..(26): Xaa is A or G or absent
GPXXTPTKMSAISMLYLXXXXXXXXXLKNYQGMVVDR

SEQ ID NO: 38005 - protein, 33 aa, Artificial Sequence
  Non-cyclic GFR-binding peptide
  MOD_RES (1)..(33): Xaa is C or S
XVPARLSAISILYLDAANNVVLKNYQDMVVEAX

SEQ ID NO: 38006 - protein, 32 aa, Artificial Sequence
  Non-cyclic GFR-binding peptide
  MOD_RES (1)..(2): Xaa is C or S
XXVPARLSAISILYLDAANNVVLKNYQDMVVE

SEQ ID NO: 38007 - protein, 41 aa, Artificial Sequence
  Non-cyclic GFR-binding peptide
  MOD_RES (4)..(5)..(38)..(40): Xaa is C or S
  MOD_RES (19)..(20)..(21)..(22)..(23): Xaa is A or G
  MOD_RES (24)..(25)..(26)..(27): Xaa is A or G or absent
PSTXXAPVKTSAISMLYLXXXXXXXXXLKNYQMIVEEXGXL

SEQ ID NO: 38008 - protein, 35 aa, Artificial Sequence
  Non-cyclic GFR-binding peptide
  MOD_RES (33)..(35): Xaa is C or S
  MOD_RES (14)..(15)..(16)..(17)..(18): Xaa is A or G
  MOD_RES (19)..(20)..(21)..(22): Xaa is A or G or absent
APVKTSAISMLYLXXXXXXXXXLKNYQMIVEEXGX

SEQ ID NO: 38009 - protein, 39 aa, Artificial Sequence
  Non-cyclic GFR-binding peptide
  MOD_RES (2)..(3)..(37)..(39): Xaa is C or S
  MOD_RES (17)..(18)..(19)..(20)..(21): Xaa is A or G
  MOD_RES (22)..(23)..(24)..(25): Xaa is A or G or absent
AXXVPTKLSAISILYLXXXXXXXXXLKNYQGMAVSEXGX

SEQ ID NO: 38010 - protein, 37 aa, Artificial Sequence
  Non-cyclic GFR-binding peptide
  MOD_RES (4)..(5): Xaa is C or S
  MOD_RES (19)..(20)..(21)..(22)..(23): Xaa is A or G
  MOD_RES (24)..(25)..(26)..(27): Xaa is A or G or absent
PSTXXAPVKTSAISMLYLXXXXXXXXXLKNYQMIVEE

SEQ ID NO: 38011 - protein, 37 aa, Artificial Sequence
  Non-cyclic GFR-binding peptide
  MOD_RES (1)..(2)..(34)..(36): Xaa is C or S
XXVPEKMSAISILYLDENKNVVLKNYQNMTVESXAXR

SEQ ID NO: 38012 - protein, 41 aa, Artificial Sequence
  Non-cyclic GFR-binding peptide
  MOD_RES (5)..(6)..(40): Xaa is C or S
  MOD_RES (20)..(21)..(22)..(23)..(24): Xaa is A or G
  MOD_RES (25)..(26)..(27)..(28): Xaa is A or G or absent
ASKAXXVPTKLSAISILYLXXXXXXXXXLKNYQGMAVSEXG

SEQ ID NO: 38013 - protein, 41 aa, Artificial Sequence
  Non-cyclic GFR-binding peptide
  MOD_RES (4)..(5)..(39)..(41): Xaa is C or S
  MOD_RES (19)..(20)..(21)..(22)..(23): Xaa is A or G
  MOD_RES (24)..(25)..(26)..(27): Xaa is A or G or absent
AGPXXTPTKMSAISMLYLXXXXXXXXXLKNYQGMVVDRXGX

SEQ ID NO: 38014 - protein, 38 aa, Artificial Sequence
  Non-cyclic GFR-binding peptide
  MOD_RES (6)..(7): Xaa is C or S
AAPASXXVPARLSAISILYLDAANNVVLKNYQDMVVEA

SEQ ID NO: 38015 - protein, 31 aa, Artificial Sequence
  Non-cyclic GFR-binding peptide
  MOD_RES (1)..(1): Xaa is C or S
XAPVKTSAISMLYLDNGRVLLLKNYQMIVEE

SEQ ID NO: 38016 - protein, 34 aa, Artificial Sequence
  Non-cyclic GFR-binding peptide
  MOD_RES (1)..(2)..(34): Xaa is C or S
XXTPTKMSAISMLYLNDKQQIILKNYQGMVVDRX

SEQ ID NO: 38017 - protein, 33 aa, Artificial Sequence
  Non-cyclic GFR-binding peptide
  MOD_RES (14)..(15)..(16)..(17)..(18): Xaa is A or G
  MOD_RES (19)..(20)..(21)..(22): Xaa is A or G or absent
TPTKMSAISMLYLXXXXXXXXXLKNYQGMVVDR

SEQ ID NO: 38018 - protein, 40 aa, Artificial Sequence
  Non-cyclic GFR-binding peptide
  MOD_RES (3)..(4)..(38)..(40): Xaa is C or S
  MOD_RES (18)..(19)..(20)..(21)..(22): Xaa is A or G
  MOD_RES (23)..(24)..(25)..(26): Xaa is A or G or absent
ASXXVPARLSAISILYLXXXXXXXXXLKNYQDMVVEAXGX

SEQ ID NO: 38019 - protein, 36 aa, Artificial Sequence
  Non-cyclic GFR-binding peptide
  MOD_RES (34)..(36): Xaa is C or S
  MOD_RES (14)..(15)..(16)..(17)..(18): Xaa is A or G
  MOD_RES (19)..(20)..(21)..(22): Xaa is A or G or absent
VPEKMSAISILYLXXXXXXXXXLKNYQNMTVESXAX

SEQ ID NO: 38020 - protein, 31 aa, Artificial Sequence
  Non-cyclic GFR-binding peptide
VPTKLSAISILYLDKGVVTYLKNYQGMAVSE

SEQ ID NO: 38021 - protein, 41 aa, Artificial Sequence
  Non-cyclic GFR-binding peptide
  MOD_RES (4)..(5)..(39)..(41): Xaa is C or S
  MOD_RES (19)..(20)..(21)..(22)..(23): Xaa is A or G
  MOD_RES (24)..(25)..(26)..(27): Xaa is A or G or absent
SKAXXVPTKLSAISILYLXXXXXXXXXLKNYQGMAVSEXGX

SEQ ID NO: 38022 - protein, 41 aa, Artificial Sequence
  Non-cyclic GFR-binding peptide
  MOD_RES (5)..(6)..(38)..(40): Xaa is C or S
SAGPXXTPTKMSAISMLYLNDKQQIILKNYQGMVVDRXGXS

SEQ ID NO: 38023 - protein, 34 aa, Artificial Sequence
  Non-cyclic GFR-binding peptide
  MOD_RES (1)..(32)..(34): Xaa is C or S
XAPVKTSAISMLYLDNGRVLLLKNYQMIVEEXGX

SEQ ID NO: 38024 - protein, 40 aa, Artificial Sequence
  Non-cyclic GFR-binding peptide
  MOD_RES (4)..(5)..(39): Xaa is C or S
  MOD_RES (19)..(20)..(21)..(22)..(23): Xaa is A or G
  MOD_RES (24)..(25)..(26)..(27): Xaa is A or G or absent
PEPXXVPEKMSAISILYLXXXXXXXXXLKNYQNMTVESXA

SEQ ID NO: 38025 - protein, 38 aa, Artificial Sequence
  Non-cyclic GFR-binding peptide
  MOD_RES (5)..(6): Xaa is C or S
  MOD_RES (20)..(21)..(22)..(23)..(24): Xaa is A or G
  MOD_RES (25)..(26)..(27)..(28): Xaa is A or G or absent
ASKAXXVPTKLSAISILYLXXXXXXXXXLKNYQGMAVS

SEQ ID NO: 38026 - protein, 35 aa, Artificial Sequence
  Non-cyclic GFR-binding peptide
  MOD_RES (1)..(2): Xaa is C or S
  MOD_RES (16)..(17)..(18)..(19)..(20): Xaa is A or G
  MOD_RES (21)..(22)..(23)..(24): Xaa is A or G or absent
XXVPARLSAISILYLXXXXXXXXXLKNYQDMVVEA

SEQ ID NO: 38027 - protein, 38 aa, Artificial Sequence
  Non-cyclic GFR-binding peptide
  MOD_RES (5)..(6)..(38): Xaa is C or S
SAGPXXTPTKMSAISMLYLNDKQQIILKNYQGMVVDRX

SEQ ID NO: 38028 - protein, 36 aa, Artificial Sequence
  Non-cyclic GFR-binding peptide
  MOD_RES (2)..(3): Xaa is C or S
  MOD_RES (17)..(18)..(19)..(20)..(21): Xaa is A or G
  MOD_RES (22)..(23)..(24)..(25): Xaa is A or G or absent
PXXVPEKMSAISILYLXXXXXXXXXLKNYQNMTVES

SEQ ID NO: 38029 - protein, 36 aa, Artificial Sequence
  Non-cyclic GFR-binding peptide
  MOD_RES (3)..(4): Xaa is C or S
  MOD_RES (18)..(19)..(20)..(21)..(22): Xaa is A or G
  MOD_RES (23)..(24)..(25)..(26): Xaa is A or G or absent
STXXAPVKTSAISMLYLXXXXXXXXXLKNYQMIVEE

SEQ ID NO: 38030 - protein, 39 aa, Artificial Sequence
  Non-cyclic GFR-binding peptide
  MOD_RES (6)..(7): Xaa is C or S
  MOD_RES (21)..(22)..(23)..(24)..(25): Xaa is A or G
  MOD_RES (26)..(27)..(28)..(29): Xaa is A or G or absent
HVPKPXXAPTKLSAISVLYLXXXXXXXXXLKNYQNMVVR

SEQ ID NO: 38031 - protein, 38 aa, Artificial Sequence
  Non-cyclic GFR-binding peptide
  MOD_RES (3)..(4)..(36)..(38): Xaa is C or S
ASXXVPARLSAISILYLDAANNVVLKNYQDMVVEAXGX

SEQ ID NO: 38032 - protein, 36 aa, Artificial Sequence
  Non-cyclic GFR-binding peptide
  MOD_RES (1)..(2)..(36): Xaa is C or S
  MOD_RES (16)..(17)..(18)..(19)..(20): Xaa is A or G
  MOD_RES (21)..(22)..(23)..(24): Xaa is A or G or absent
XXTPTKMSAISMLYLXXXXXXXXXLKNYQGMVVDRX

SEQ ID NO: 38033 - protein, 32 aa, Artificial Sequence
  Non-cyclic GFR-binding peptide
  MOD_RES (31)..(31): Xaa is C or S
APVKTSAISMLYLDNGRVLLLKNYQMIVEEXG

SEQ ID NO: 38034 - protein, 38 aa, Artificial Sequence
  Non-cyclic GFR-binding peptide
  MOD_RES (5)..(6)..(38): Xaa is C or S
IPEPXXVPEKMSAISILYLDENKNVVLKNYQNMTVESX

SEQ ID NO: 38035 - protein, 38 aa, Artificial Sequence
  Non-cyclic GFR-binding peptide
  MOD_RES (2)..(3)..(35)..(37): Xaa is C or S
SXXVPARLSAISILYLDAANNVVLKNYQDMVVEAXGXR

SEQ ID NO: 38036 - protein, 43 aa, Artificial Sequence
  Non-cyclic GFR-binding peptide
  MOD_RES (6)..(7)..(41)..(43): Xaa is C or S
  MOD_RES (21)..(22)..(23)..(24)..(25): Xaa is A or G
  MOD_RES (26)..(27)..(28)..(29): Xaa is A or G or absent
GSAGPXXTPTKMSAISMLYLXXXXXXXXXLKNYQGMVVDRXGX

SEQ ID NO: 38037 - protein, 36 aa, Artificial Sequence
  Non-cyclic GFR-binding peptide
  MOD_RES (1)..(2)..(33)..(35): Xaa is C or S
XXAPVKTSAISMLYLDNGRVLLLKNYQMIVEEXGXL

SEQ ID NO: 38038 - protein, 42 aa, Artificial Sequence
  Non-cyclic GFR-binding peptide
  MOD_RES (4)..(5)..(39)..(41): Xaa is C or S
  MOD_RES (19)..(20)..(21)..(22)..(23): Xaa is A or G
  MOD_RES (24)..(25)..(26)..(27): Xaa is A or G or absent
PASXXVPARLSAISILYLXXXXXXXXXLKNYQDMVVEAXGXR

SEQ ID NO: 38039 - protein, 40 aa, Artificial Sequence
  Non-cyclic GFR-binding peptide
  MOD_RES (6)..(7): Xaa is C or S
  MOD_RES (21)..(22)..(23)..(24)..(25): Xaa is A or G
  MOD_RES (26)..(27)..(28)..(29): Xaa is A or G or absent
GSAGPXXTPTKMSAISMLYLXXXXXXXXXLKNYQGMVVDR

SEQ ID NO: 38040 - protein, 35 aa, Artificial Sequence
  Non-cyclic GFR-binding peptide
  MOD_RES (2)..(3)..(35): Xaa is C or S
PXXVPEKMSAISILYLDENKNVVLKNYQNMTVESX

SEQ ID NO: 38041 - protein, 33 aa, Artificial Sequence
  Non-cyclic GFR-binding peptide
  MOD_RES (1)..(1): Xaa is C or S
  MOD_RES (15)..(16)..(17)..(18)..(19): Xaa is A or G
  MOD_RES (20)..(21)..(22)..(23): Xaa is A or G or absent
XAPVKTSAISMLYLXXXXXXXXXLKNYQMIVEE

SEQ ID NO: 38042 - protein, 34 aa, Artificial Sequence
  Non-cyclic GFR-binding peptide
  MOD_RES (2)..(3): Xaa is C or S
PXXVPEKMSAISILYLDENKNVVLKNYQNMTVES

SEQ ID NO: 38043 - protein, 35 aa, Artificial Sequence
  Non-cyclic GFR-binding peptide
  MOD_RES (1)..(2)..(35): Xaa is C or S
  MOD_RES (16)..(17)..(18)..(19)..(20): Xaa is A or G
  MOD_RES (21)..(22)..(23)..(24): Xaa is A or G or absent
XXAPVKTSAISMLYLXXXXXXXXXLKNYQMIVEEX

SEQ ID NO: 38044 - protein, 34 aa, Artificial Sequence
  Non-cyclic GFR-binding peptide
  MOD_RES (2)..(3): Xaa is C or S
PXXTPTKMSAISMLYLNDKQQIILKNYQGMVVDR

SEQ ID NO: 38045 - protein, 32 aa, Artificial Sequence
  Non-cyclic GFR-binding peptide
  MOD_RES (14)..(15)..(16)..(17)..(18): Xaa is A or G
  MOD_RES (19)..(20)..(21)..(22): Xaa is A or G or absent
VPARLSAISILYLXXXXXXXXXLKNYQDMVVE

SEQ ID NO: 38046 - protein, 37 aa, Artificial Sequence
  Non-cyclic GFR-binding peptide
  MOD_RES (4)..(5)..(37): Xaa is C or S
PASXXVPARLSAISILYLDAANNVVLKNYQDMVVEAX

SEQ ID NO: 38047 - protein, 34 aa, Artificial Sequence
  Non-cyclic GFR-binding peptide
  MOD_RES (34)..(34): Xaa is C or S
  MOD_RES (14)..(15)..(16)..(17)..(18): Xaa is A or G
  MOD_RES (19)..(20)..(21)..(22): Xaa is A or G or absent
VPARLSAISILYLXXXXXXXXXLKNYQDMVVEAX

SEQ ID NO: 38048 - protein, 39 aa, Artificial Sequence
  Non-cyclic GFR-binding peptide
  MOD_RES (6)..(7)..(39): Xaa is C or S
GIPEPXXVPEKMSAISILYLDENKNVVLKNYQNMTVESX

SEQ ID NO: 38049 - protein, 34 aa, Artificial Sequence
  Non-cyclic GFR-binding peptide
  MOD_RES (3)..(4): Xaa is C or S
STXXAPVKTSAISMLYLDNGRVLLLKNYQMIVEE

SEQ ID NO: 38050 - protein, 39 aa, Artificial Sequence
  Non-cyclic GFR-binding peptide
  MOD_RES (4)..(5)..(37)..(39): Xaa is C or S
AGPXXTPTKMSAISMLYLNDKQQIILKNYQGMVVDRXGX

SEQ ID NO: 38051 - protein, 37 aa, Artificial Sequence
  Non-cyclic GFR-binding peptide
  MOD_RES (6)..(7): Xaa is C or S
RVPSTXXAPVKTSAISMLYLDNGRVLLLKNYQMIVEE

SEQ ID NO: 38052 - protein, 39 aa, Artificial Sequence
  Non-cyclic GFR-binding peptide
  MOD_RES (4)..(5)..(39): Xaa is C or S
  MOD_RES (19)..(20)..(21)..(22)..(23): Xaa is A or G
  MOD_RES (24)..(25)..(26)..(27): Xaa is A or G or absent
SKAXXVPTKLSAISILYLXXXXXXXXXLKNYQGMAVSEX

SEQ ID NO: 38053 - protein, 39 aa, Artificial Sequence
  Non-cyclic GFR-binding peptide
  MOD_RES (5)..(6)..(38): Xaa is C or S
IPEPXXVPEKMSAISILYLDENKNVVLKNYQNMTVESXA

SEQ ID NO: 38054 - protein, 39 aa, Artificial Sequence
  Non-cyclic GFR-binding peptide
  MOD_RES (3)..(4)..(36)..(38): Xaa is C or S
GPXXTPTKMSAISMLYLNDKQQIILKNYQGMVVDRXGXS

SEQ ID NO: 38055 - protein, 44 aa, Artificial Sequence
  Non-cyclic GFR-binding peptide
  MOD_RES (6)..(7)..(41)..(43): Xaa is C or S
  MOD_RES (21)..(22)..(23)..(24)..(25): Xaa is A or G
  MOD_RES (26)..(27)..(28)..(29): Xaa is A or G or absent
AAPASXXVPARLSAISILYLXXXXXXXXXLKNYQDMVVEAXGXR

SEQ ID NO: 38056 - protein, 34 aa, Artificial Sequence
  Non-cyclic GFR-binding peptide
  MOD_RES (1)..(1): Xaa is C or S
  MOD_RES (15)..(16)..(17)..(18)..(19): Xaa is A or G
  MOD_RES (20)..(21)..(22)..(23): Xaa is A or G or absent
XVPTKLSAISILYLXXXXXXXXXLKNYQGMAVSE

SEQ ID NO: 38057 - protein, 36 aa, Artificial Sequence
  Non-cyclic GFR-binding peptide
  MOD_RES (34)..(36): Xaa is C or S
  MOD_RES (14)..(15)..(16)..(17)..(18): Xaa is A or G
  MOD_RES (19)..(20)..(21)..(22): Xaa is A or G or absent
VPARLSAISILYLXXXXXXXXXLKNYQDMVVEAXGX

SEQ ID NO: 38058 - protein, 38 aa, Artificial Sequence
  Non-cyclic GFR-binding peptide
  MOD_RES (2)..(3)..(37): Xaa is C or S
  MOD_RES (17)..(18)..(19)..(20)..(21): Xaa is A or G
  MOD_RES (22)..(23)..(24)..(25): Xaa is A or G or absent
PXXVPEKMSAISILYLXXXXXXXXXLKNYQNMTVESXA

SEQ ID NO: 38059 - protein, 38 aa, Artificial Sequence
  Non-cyclic GFR-binding peptide
  MOD_RES (1)..(35)..(37): Xaa is C or S
  MOD_RES (15)..(16)..(17)..(18)..(19): Xaa is A or G
  MOD_RES (20)..(21)..(22)..(23): Xaa is A or G or absent
XVPTKLSAISILYLXXXXXXXXXLKNYQGMAVSEXGXR

SEQ ID NO: 38060 - protein, 38 aa, Artificial Sequence
  Non-cyclic GFR-binding peptide
  MOD_RES (6)..(7): Xaa is C or S
KASKAXXVPTKLSAISILYLDKGVVTYLKNYQGMAVSE

SEQ ID NO: 38061 - protein, 41 aa, Artificial Sequence
  Non-cyclic GFR-binding peptide
  MOD_RES (6)..(7)..(41): Xaa is C or S
  MOD_RES (21)..(22)..(23)..(24)..(25): Xaa is A or G
  MOD_RES (26)..(27)..(28)..(29): Xaa is A or G or absent
HVPKPXXAPTKLSAISVLYLXXXXXXXXXLKNYQNMVVRSX

SEQ ID NO: 38062 - protein, 34 aa, Artificial Sequence
  Non-cyclic GFR-binding peptide
  MOD_RES (1)..(2): Xaa is C or S
  MOD_RES (16)..(17)..(18)..(19)..(20): Xaa is A or G
  MOD_RES (21)..(22)..(23)..(24): Xaa is A or G or absent
XXVPEKMSAISILYLXXXXXXXXXLKNYQNMTVE

SEQ ID NO: 38063 - protein, 39 aa, Artificial Sequence
  Non-cyclic GFR-binding peptide
  MOD_RES (6)..(7): Xaa is C or S
  MOD_RES (21)..(22)..(23)..(24)..(25): Xaa is A or G
  MOD_RES (26)..(27)..(28)..(29): Xaa is A or G or absent
GSAGPXXTPTKMSAISMLYLXXXXXXXXXLKNYQGMVVD

SEQ ID NO: 38064 - protein, 35 aa, Artificial Sequence
  Non-cyclic GFR-binding peptide
  MOD_RES (1)..(35): Xaa is C or S
  MOD_RES (15)..(16)..(17)..(18)..(19): Xaa is A or G
  MOD_RES (20)..(21)..(22)..(23): Xaa is A or G or absent
XTPTKMSAISMLYLXXXXXXXXXLKNYQGMVVDRX

SEQ ID NO: 38065 - protein, 37 aa, Artificial Sequence
  Non-cyclic GFR-binding peptide
  MOD_RES (2)..(3)..(37): Xaa is C or S
  MOD_RES (17)..(18)..(19)..(20)..(21): Xaa is A or G
  MOD_RES (22)..(23)..(24)..(25): Xaa is A or G or absent
PXXTPTKMSAISMLYLXXXXXXXXXLKNYQGMVVDRX

SEQ ID NO: 38066 - protein, 41 aa, Artificial Sequence
  Non-cyclic GFR-binding peptide
  MOD_RES (6)..(7)..(41): Xaa is C or S
  MOD_RES (21)..(22)..(23)..(24)..(25): Xaa is A or G
  MOD_RES (26)..(27)..(28)..(29): Xaa is A or G or absent
GIPEPXXVPEKMSAISILYLXXXXXXXXXLKNYQNMTVESX

SEQ ID NO: 38067 - protein, 38 aa, Artificial Sequence
  Non-cyclic GFR-binding peptide
  MOD_RES (3)..(4)..(35)..(37): Xaa is C or S
STXXAPVKTSAISMLYLDNGRVLLLKNYQMIVEEXGXL

SEQ ID NO: 38068 - protein, 33 aa, Artificial Sequence
  Non-cyclic GFR-binding peptide
  MOD_RES (32)..(32): Xaa is C or S
VPARLSAISILYLDAANNVVLKNYQDMVVEAXG

SEQ ID NO: 38069 - protein, 37 aa, Artificial Sequence
  Non-cyclic GFR-binding peptide
  MOD_RES (2)..(3)..(37): Xaa is C or S
  MOD_RES (17)..(18)..(19)..(20)..(21): Xaa is A or G
  MOD_RES (22)..(23)..(24)..(25): Xaa is A or G or absent
SXXVPARLSAISILYLXXXXXXXXXLKNYQDMVVEAX

SEQ ID NO: 38070 - protein, 40 aa, Artificial Sequence
  Non-cyclic GFR-binding peptide
  MOD_RES (6)..(7): Xaa is C or S
  MOD_RES (21)..(22)..(23)..(24)..(25): Xaa is A or G
  MOD_RES (26)..(27)..(28)..(29): Xaa is A or G or absent
KASKAXXVPTKLSAISILYLXXXXXXXXXLKNYQGMAVSE

SEQ ID NO: 38071 - protein, 33 aa, Artificial Sequence
  Non-cyclic GFR-binding peptide
  MOD_RES (2)..(3): Xaa is C or S
AXXVPTKLSAISILYLDKGVVTYLKNYQGMAVS

SEQ ID NO: 38072 - protein, 38 aa, Artificial Sequence
  Non-cyclic GFR-binding peptide
  MOD_RES (2)..(3)..(37): Xaa is C or S
  MOD_RES (17)..(18)..(19)..(20)..(21): Xaa is A or G
  MOD_RES (22)..(23)..(24)..(25): Xaa is A or G or absent
SXXVPARLSAISILYLXXXXXXXXXLKNYQDMVVEAXG

SEQ ID NO: 38073 - protein, 37 aa, Artificial Sequence
  Non-cyclic GFR-binding peptide
  MOD_RES (1)..(2)..(34)..(36): Xaa is C or S
XXVPARLSAISILYLDAANNVVLKNYQDMVVEAXGXR

SEQ ID NO: 38074 - protein, 44 aa, Artificial Sequence
  Non-cyclic GFR-binding peptide
  MOD_RES (6)..(7)..(41)..(43): Xaa is C or S
  MOD_RES (21)..(22)..(23)..(24)..(25): Xaa is A or G
  MOD_RES (26)..(27)..(28)..(29): Xaa is A or G or absent
KASKAXXVPTKLSAISILYLXXXXXXXXXLKNYQGMAVSEXGXR

SEQ ID NO: 38075 - protein, 41 aa, Artificial Sequence
  Non-cyclic GFR-binding peptide
  MOD_RES (3)..(4)..(38)..(40): Xaa is C or S
  MOD_RES (18)..(19)..(20)..(21)..(22): Xaa is A or G
  MOD_RES (23)..(24)..(25)..(26): Xaa is A or G or absent
ASXXVPARLSAISILYLXXXXXXXXXLKNYQDMVVEAXGXR

SEQ ID NO: 38076 - protein, 41 aa, Artificial Sequence
  Non-cyclic GFR-binding peptide
  MOD_RES (6)..(7)..(39)..(41): Xaa is C or S
HVPKPXXAPTKLSAISVLYLDDSSNVILKNYQNMVVRSXGX

SEQ ID NO: 38077 - protein, 40 aa, Artificial Sequence
  Non-cyclic GFR-binding peptide
  MOD_RES (5)..(6)..(39): Xaa is C or S
  MOD_RES (20)..(21)..(22)..(23)..(24): Xaa is A or G
  MOD_RES (25)..(26)..(27)..(28): Xaa is A or G or absent
VPSTXXAPVKTSAISMLYLXXXXXXXXXLKNYQMIVEEXG

SEQ ID NO: 38078 - protein, 35 aa, Artificial Sequence
  Non-cyclic GFR-binding peptide
  MOD_RES (1)..(2)..(34): Xaa is C or S
XXVPEKMSAISILYLDENKNVVLKNYQNMTVESXA

SEQ ID NO: 38079 - protein, 41 aa, Artificial Sequence
  Non-cyclic GFR-binding peptide
  MOD_RES (6)..(7)..(39)..(41): Xaa is C or S
GSAGPXXTPTKMSAISMLYLNDKQQIILKNYQGMVVDRXGX

SEQ ID NO: 38080 - protein, 33 aa, Artificial Sequence
  Non-cyclic GFR-binding peptide
  MOD_RES (32)..(32): Xaa is C or S
VPTKLSAISILYLDKGVVTYLKNYQGMAVSEXG

SEQ ID NO: 38081 - protein, 41 aa, Artificial Sequence
  Non-cyclic GFR-binding peptide
  MOD_RES (6)..(7)..(40): Xaa is C or S
  MOD_RES (21)..(22)..(23)..(24)..(25): Xaa is A or G
  MOD_RES (26)..(27)..(28)..(29): Xaa is A or G or absent
RVPSTXXAPVKTSAISMLYLXXXXXXXXXLKNYQMIVEEXG

SEQ ID NO: 38082 - protein, 31 aa, Artificial Sequence
  Non-cyclic GFR-binding peptide
  MOD_RES (1)..(1): Xaa is C or S
XVPARLSAISILYLDAANNVVLKNYQDMVVE

SEQ ID NO: 38083 - protein, 30 aa, Artificial Sequence
  Non-cyclic GFR-binding peptide
VPARLSAISILYLDAANNVVLKNYQDMVVE

SEQ ID NO: 38084 - protein, 39 aa, Artificial Sequence
  Non-cyclic GFR-binding peptide
  MOD_RES (2)..(3)..(36)..(38): Xaa is C or S
  MOD_RES (17)..(18)..(19)..(20)..(21): Xaa is A or G
  MOD_RES (22)..(23)..(24)..(25): Xaa is A or G or absent
TXXAPVKTSAISMLYLXXXXXXXXXLKNYQMIVEEXGXL

SEQ ID NO: 38085 - protein, 39 aa, Artificial Sequence
  Non-cyclic GFR-binding peptide
  MOD_RES (3)..(4)..(36)..(38): Xaa is C or S
ASXXVPARLSAISILYLDAANNVVLKNYQDMVVEAXGXR

SEQ ID NO: 38086 - protein, 38 aa, Artificial Sequence
  Non-cyclic GFR-binding peptide
  MOD_RES (2)..(3)..(37): Xaa is C or S
  MOD_RES (17)..(18)..(19)..(20)..(21): Xaa is A or G
  MOD_RES (22)..(23)..(24)..(25): Xaa is A or G or absent
AXXVPTKLSAISILYLXXXXXXXXXLKNYQGMAVSEXG

SEQ ID NO: 38087 - protein, 35 aa, Artificial Sequence
  Non-cyclic GFR-binding peptide
  MOD_RES (1)..(2): Xaa is C or S
  MOD_RES (16)..(17)..(18)..(19)..(20): Xaa is A or G
  MOD_RES (21)..(22)..(23)..(24): Xaa is A or G or absent
XXTPTKMSAISMLYLXXXXXXXXXLKNYQGMVVDR

SEQ ID NO: 38088 - protein, 38 aa, Artificial Sequence
  Non-cyclic GFR-binding peptide
  MOD_RES (4)..(5): Xaa is C or S
  MOD_RES (19)..(20)..(21)..(22)..(23): Xaa is A or G
  MOD_RES (24)..(25)..(26)..(27): Xaa is A or G or absent
SKAXXVPTKLSAISILYLXXXXXXXXXLKNYQGMAVSE

SEQ ID NO: 38089 - protein, 40 aa, Artificial Sequence
  Non-cyclic GFR-binding peptide
  MOD_RES (5)..(6)..(40): Xaa is C or S
  MOD_RES (20)..(21)..(22)..(23)..(24): Xaa is A or G
  MOD_RES (25)..(26)..(27)..(28): Xaa is A or G or absent
IPEPXXVPEKMSAISILYLXXXXXXXXXLKNYQNMTVESX

SEQ ID NO: 38090 - protein, 39 aa, Artificial Sequence
  Non-cyclic GFR-binding peptide
  MOD_RES (4)..(5)..(39): Xaa is C or S
  MOD_RES (19)..(20)..(21)..(22)..(23): Xaa is A or G
  MOD_RES (24)..(25)..(26)..(27): Xaa is A or G or absent
PASXXVPARLSAISILYLXXXXXXXXXLKNYQDMVVEAX

SEQ ID NO: 38091 - protein, 36 aa, Artificial Sequence
  Non-cyclic GFR-binding peptide
  MOD_RES (3)..(4): Xaa is C or S
  MOD_RES (18)..(19)..(20)..(21)..(22): Xaa is A or G
  MOD_RES (23)..(24)..(25)..(26): Xaa is A or G or absent
ASXXVPARLSAISILYLXXXXXXXXXLKNYQDMVVE

SEQ ID NO: 38092 - protein, 31 aa, Artificial Sequence
  Non-cyclic GFR-binding peptide
VPEKMSAISILYLDENKNVVLKNYQNMTVES

SEQ ID NO: 38093 - protein, 36 aa, Artificial Sequence
  Non-cyclic GFR-binding peptide
  MOD_RES (5)..(6): Xaa is C or S
SAGPXXTPTKMSAISMLYLNDKQQIILKNYQGMVVD

SEQ ID NO: 38094 - protein, 39 aa, Artificial Sequence
  Non-cyclic GFR-binding peptide
  MOD_RES (5)..(6)..(39): Xaa is C or S
  MOD_RES (20)..(21)..(22)..(23)..(24): Xaa is A or G
  MOD_RES (25)..(26)..(27)..(28): Xaa is A or G or absent
VPSTXXAPVKTSAISMLYLXXXXXXXXXLKNYQMIVEEX

SEQ ID NO: 38095 - protein, 35 aa, Artificial Sequence
  Non-cyclic GFR-binding peptide
  MOD_RES (1)..(35): Xaa is C or S
  MOD_RES (15)..(16)..(17)..(18)..(19): Xaa is A or G
  MOD_RES (20)..(21)..(22)..(23): Xaa is A or G or absent
XVPTKLSAISILYLXXXXXXXXXLKNYQGMAVSEX

SEQ ID NO: 38096 - protein, 41 aa, Artificial Sequence
  Non-cyclic GFR-binding peptide
  MOD_RES (6)..(7)..(41): Xaa is C or S
  MOD_RES (21)..(22)..(23)..(24)..(25): Xaa is A or G
  MOD_RES (26)..(27)..(28)..(29): Xaa is A or G or absent
KASKAXXVPTKLSAISILYLXXXXXXXXXLKNYQGMAVSEX

SEQ ID NO: 38097 - protein, 43 aa, Artificial Sequence
  Non-cyclic GFR-binding peptide
  MOD_RES (5)..(6)..(40)..(42): Xaa is C or S
  MOD_RES (20)..(21)..(22)..(23)..(24): Xaa is A or G
  MOD_RES (25)..(26)..(27)..(28): Xaa is A or G or absent
SAGPXXTPTKMSAISMLYLXXXXXXXXXLKNYQGMVVDRXGXS

SEQ ID NO: 38098 - protein, 39 aa, Artificial Sequence
  Non-cyclic GFR-binding peptide
  MOD_RES (6)..(7)..(39): Xaa is C or S
AAPASXXVPARLSAISILYLDAANNVVLKNYQDMVVEAX

SEQ ID NO: 38099 - protein, 37 aa, Artificial Sequence
  Non-cyclic GFR-binding peptide
  MOD_RES (2)..(3)..(36): Xaa is C or S
  MOD_RES (17)..(18)..(19)..(20)..(21): Xaa is A or G
  MOD_RES (22)..(23)..(24)..(25): Xaa is A or G or absent
TXXAPVKTSAISMLYLXXXXXXXXXLKNYQMIVEEXG

SEQ ID NO: 38100 - protein, 39 aa, Artificial Sequence
  Non-cyclic GFR-binding peptide
  MOD_RES (3)..(4)..(38): Xaa is C or S
  MOD_RES (18)..(19)..(20)..(21)..(22): Xaa is A or G
  MOD_RES (23)..(24)..(25)..(26): Xaa is A or G or absent
ASXXVPARLSAISILYLXXXXXXXXXLKNYQDMVVEAXG

SEQ ID NO: 38101 - protein, 32 aa, Artificial Sequence
  Non-cyclic GFR-binding peptide
  MOD_RES (32)..(32): Xaa is C or S
VPTKLSAISILYLDKGVVTYLKNYQGMAVSEX

SEQ ID NO: 38102 - protein, 42 aa, Artificial Sequence
  Non-cyclic GFR-binding peptide
  MOD_RES (4)..(5)..(39)..(41): Xaa is C or S
  MOD_RES (19)..(20)..(21)..(22)..(23): Xaa is A or G
  MOD_RES (24)..(25)..(26)..(27): Xaa is A or G or absent
AGPXXTPTKMSAISMLYLXXXXXXXXXLKNYQGMVVDRXGXS

SEQ ID NO: 38103 - protein, 34 aa, Artificial Sequence
  Non-cyclic GFR-binding peptide
  MOD_RES (33)..(33): Xaa is C or S
  MOD_RES (14)..(15)..(16)..(17)..(18): Xaa is A or G
  MOD_RES (19)..(20)..(21)..(22): Xaa is A or G or absent
APVKTSAISMLYLXXXXXXXXXLKNYQMIVEEXG

SEQ ID NO: 38104 - protein, 34 aa, Artificial Sequence
  Non-cyclic GFR-binding peptide
  MOD_RES (3)..(4): Xaa is C or S
GPXXTPTKMSAISMLYLNDKQQIILKNYQGMVVD

SEQ ID NO: 38105 - protein, 38 aa, Artificial Sequence
  Non-cyclic GFR-binding peptide
  MOD_RES (5)..(6): Xaa is C or S
  MOD_RES (20)..(21)..(22)..(23)..(24): Xaa is A or G
  MOD_RES (25)..(26)..(27)..(28): Xaa is A or G or absent
SAGPXXTPTKMSAISMLYLXXXXXXXXXLKNYQGMVVD

SEQ ID NO: 38106 - protein, 39 aa, Artificial Sequence
  Non-cyclic GFR-binding peptide
  MOD_RES (6)..(7): Xaa is C or S
  MOD_RES (21)..(22)..(23)..(24)..(25): Xaa is A or G
  MOD_RES (26)..(27)..(28)..(29): Xaa is A or G or absent
RVPSTXXAPVKTSAISMLYLXXXXXXXXXLKNYQMIVEE

SEQ ID NO: 38107 - protein, 40 aa, Artificial Sequence
  Non-cyclic GFR-binding peptide
  MOD_RES (6)..(7)..(39): Xaa is C or S
HVPKPXXAPTKLSAISVLYLDDSSNVILKNYQNMVVRSXG

SEQ ID NO: 38108 - protein, 35 aa, Artificial Sequence
  Non-cyclic GFR-binding peptide
  MOD_RES (1)..(2)..(34): Xaa is C or S
XXTPTKMSAISMLYLNDKQQIILKNYQGMVVDRXG

SEQ ID NO: 38109 - protein, 37 aa, Artificial Sequence
  Non-cyclic GFR-binding peptide
  MOD_RES (4)..(5)..(37): Xaa is C or S
AGPXXTPTKMSAISMLYLNDKQQIILKNYQGMVVDRX

SEQ ID NO: 38110 - protein, 39 aa, Artificial Sequence
  Non-cyclic GFR-binding peptide
  MOD_RES (3)..(4)..(36)..(38): Xaa is C or S
KAXXVPTKLSAISILYLDKGVVTYLKNYQGMAVSEXGXR

SEQ ID NO: 38111 - protein, 36 aa, Artificial Sequence
  Non-cyclic GFR-binding peptide
  MOD_RES (5)..(6): Xaa is C or S
APASXXVPARLSAISILYLDAANNVVLKNYQDMVVE

SEQ ID NO: 38112 - protein, 33 aa, Artificial Sequence
  Non-cyclic GFR-binding peptide
  MOD_RES (1)..(33): Xaa is C or S
XVPEKMSAISILYLDENKNVVLKNYQNMTVESX

SEQ ID NO: 38113 - protein, 37 aa, Artificial Sequence
  Non-cyclic GFR-binding peptide
  MOD_RES (5)..(6): Xaa is C or S
APASXXVPARLSAISILYLDAANNVVLKNYQDMVVEA

SEQ ID NO: 38114 - protein, 40 aa, Artificial Sequence
  Non-cyclic GFR-binding peptide
  MOD_RES (3)..(4)..(37)..(39): Xaa is C or S
  MOD_RES (18)..(19)..(20)..(21)..(22): Xaa is A or G
  MOD_RES (23)..(24)..(25)..(26): Xaa is A or G or absent
STXXAPVKTSAISMLYLXXXXXXXXXLKNYQMIVEEXGXL

SEQ ID NO: 38115 - protein, 38 aa, Artificial Sequence
  Non-cyclic GFR-binding peptide
  MOD_RES (4)..(5)..(37): Xaa is C or S
PASXXVPARLSAISILYLDAANNVVLKNYQDMVVEAXG

SEQ ID NO: 38116 - protein, 38 aa, Artificial Sequence
  Non-cyclic GFR-binding peptide
  MOD_RES (4)..(5)..(37): Xaa is C or S
AGPXXTPTKMSAISMLYLNDKQQIILKNYQGMVVDRXG

SEQ ID NO: 38117 - protein, 37 aa, Artificial Sequence
  Non-cyclic GFR-binding peptide
  MOD_RES (3)..(4)..(36): Xaa is C or S
GPXXTPTKMSAISMLYLNDKQQIILKNYQGMVVDRXG

SEQ ID NO: 38118 - protein, 33 aa, Artificial Sequence
  Non-cyclic GFR-binding peptide
  MOD_RES (1)..(1): Xaa is C or S
  MOD_RES (15)..(16)..(17)..(18)..(19): Xaa is A or G
  MOD_RES (20)..(21)..(22)..(23): Xaa is A or G or absent
XVPARLSAISILYLXXXXXXXXXLKNYQDMVVE

SEQ ID NO: 38119 - protein, 37 aa, Artificial Sequence
  Non-cyclic GFR-binding peptide
  MOD_RES (2)..(3)..(35)..(37): Xaa is C or S
PXXTPTKMSAISMLYLNDKQQIILKNYQGMVVDRXGX

SEQ ID NO: 38120 - protein, 38 aa, Artificial Sequence
  Non-cyclic GFR-binding peptide
  MOD_RES (5)..(6): Xaa is C or S
  MOD_RES (20)..(21)..(22)..(23)..(24): Xaa is A or G
  MOD_RES (25)..(26)..(27)..(28): Xaa is A or G or absent
IPEPXXVPEKMSAISILYLXXXXXXXXXLKNYQNMTVE

SEQ ID NO: 38121 - protein, 37 aa, Artificial Sequence
  Non-cyclic GFR-binding peptide
  MOD_RES (4)..(5)..(37): Xaa is C or S
PEPXXVPEKMSAISILYLDENKNVVLKNYQNMTVESX

SEQ ID NO: 38122 - protein, 41 aa, Artificial Sequence
  Non-cyclic GFR-binding peptide
  MOD_RES (6)..(7)..(39)..(41): Xaa is C or S
GIPEPXXVPEKMSAISILYLDENKNVVLKNYQNMTVESXAX

SEQ ID NO: 38123 - protein, 39 aa, Artificial Sequence
  Non-cyclic GFR-binding peptide
  MOD_RES (5)..(6): Xaa is C or S
  MOD_RES (20)..(21)..(22)..(23)..(24): Xaa is A or G
  MOD_RES (25)..(26)..(27)..(28): Xaa is A or G or absent
ASKAXXVPTKLSAISILYLXXXXXXXXXLKNYQGMAVSE

SEQ ID NO: 38124 - protein, 33 aa, Artificial Sequence
  Non-cyclic GFR-binding peptide
  MOD_RES (2)..(3): Xaa is C or S
SXXVPARLSAISILYLDAANNVVLKNYQDMVVE

SEQ ID NO: 38125 - protein, 36 aa, Artificial Sequence
  Non-cyclic GFR-binding peptide
  MOD_RES (3)..(4)..(36): Xaa is C or S
KAXXVPTKLSAISILYLDKGVVTYLKNYQGMAVSEX

SEQ ID NO: 38126 - protein, 32 aa, Artificial Sequence
  Non-cyclic GFR-binding peptide
  MOD_RES (1)..(2): Xaa is C or S
XXVPTKLSAISILYLDKGVVTYLKNYQGMAVS

SEQ ID NO: 38127 - protein, 36 aa, Artificial Sequence
  Non-cyclic GFR-binding peptide
  MOD_RES (1)..(2)..(36): Xaa is C or S
  MOD_RES (16)..(17)..(18)..(19)..(20): Xaa is A or G
  MOD_RES (21)..(22)..(23)..(24): Xaa is A or G or absent
XXVPTKLSAISILYLXXXXXXXXXLKNYQGMAVSEX

SEQ ID NO: 38128 - protein, 44 aa, Artificial Sequence
  Non-cyclic GFR-binding peptide
  MOD_RES (6)..(7)..(41)..(43): Xaa is C or S
  MOD_RES (21)..(22)..(23)..(24)..(25): Xaa is A or G
  MOD_RES (26)..(27)..(28)..(29): Xaa is A or G or absent
GIPEPXXVPEKMSAISILYLXXXXXXXXXLKNYQNMTVESXAXR

SEQ ID NO: 38129 - protein, 42 aa, Artificial Sequence
  Non-cyclic GFR-binding peptide
  MOD_RES (6)..(7)..(40)..(42): Xaa is C or S
  MOD_RES (21)..(22)..(23)..(24)..(25): Xaa is A or G
  MOD_RES (26)..(27)..(28)..(29): Xaa is A or G or absent
RVPSTXXAPVKTSAISMLYLXXXXXXXXXLKNYQMIVEEXGX

SEQ ID NO: 38130 - protein, 31 aa, Artificial Sequence
  Non-cyclic GFR-binding peptide
VPARLSAISILYLDAANNVVLKNYQDMVVEA

SEQ ID NO: 38131 - protein, 35 aa, Artificial Sequence
  Non-cyclic GFR-binding peptide
  MOD_RES (4)..(5): Xaa is C or S
PASXXVPARLSAISILYLDAANNVVLKNYQDMVVE

SEQ ID NO: 38132 - protein, 39 aa, Artificial Sequence
  Non-cyclic GFR-binding peptide
  MOD_RES (1)..(2)..(36)..(38): Xaa is C or S
  MOD_RES (16)..(17)..(18)..(19)..(20): Xaa is A or G
  MOD_RES (21)..(22)..(23)..(24): Xaa is A or G or absent
XXVPTKLSAISILYLXXXXXXXXXLKNYQGMAVSEXGXR

SEQ ID NO: 38133 - protein, 35 aa, Artificial Sequence
  Non-cyclic GFR-binding peptide
  MOD_RES (4)..(5): Xaa is C or S
AGPXXTPTKMSAISMLYLNDKQQIILKNYQGMVVD

SEQ ID NO: 38134 - protein, 36 aa, Artificial Sequence
  Non-cyclic GFR-binding peptide
  MOD_RES (1)..(33)..(35): Xaa is C or S
XTPTKMSAISMLYLNDKQQIILKNYQGMVVDRXGXS

SEQ ID NO: 38135 - protein, 31 aa, Artificial Sequence
  Non-cyclic GFR-binding peptide
  MOD_RES (1)..(1): Xaa is C or S
XVPEKMSAISILYLDENKNVVLKNYQNMTVE

SEQ ID NO: 38136 - protein, 42 aa, Artificial Sequence
  Non-cyclic GFR-binding peptide
  MOD_RES (6)..(7)..(41): Xaa is C or S
  MOD_RES (21)..(22)..(23)..(24)..(25): Xaa is A or G
  MOD_RES (26)..(27)..(28)..(29): Xaa is A or G or absent
GSAGPXXTPTKMSAISMLYLXXXXXXXXXLKNYQGMVVDRXG

SEQ ID NO: 38137 - protein, 34 aa, Artificial Sequence
  Non-cyclic GFR-binding peptide
  MOD_RES (1)..(1): Xaa is C or S
  MOD_RES (15)..(16)..(17)..(18)..(19): Xaa is A or G
  MOD_RES (20)..(21)..(22)..(23): Xaa is A or G or absent
XVPEKMSAISILYLXXXXXXXXXLKNYQNMTVES

SEQ ID NO: 38138 - protein, 34 aa, Artificial Sequence
  Non-cyclic GFR-binding peptide
  MOD_RES (3)..(4): Xaa is C or S
KAXXVPTKLSAISILYLDKGVVTYLKNYQGMAVS

SEQ ID NO: 38139 - protein, 41 aa, Artificial Sequence
  Non-cyclic GFR-binding peptide
  MOD_RES (5)..(6)..(38)..(40): Xaa is C or S
IPEPXXVPEKMSAISILYLDENKNVVLKNYQNMTVESXAXR

SEQ ID NO: 38140 - protein, 33 aa, Artificial Sequence
  Non-cyclic GFR-binding peptide
  MOD_RES (1)..(33): Xaa is C or S
XTPTKMSAISMLYLNDKQQIILKNYQGMVVDRX

SEQ ID NO: 38141 - protein, 35 aa, Artificial Sequence
  Non-cyclic GFR-binding peptide
  MOD_RES (1)..(33)..(35): Xaa is C or S
XVPARLSAISILYLDAANNVVLKNYQDMVVEAXGX

SEQ ID NO: 38142 - protein, 40 aa, Artificial Sequence
  Non-cyclic GFR-binding peptide
  MOD_RES (4)..(5)..(39): Xaa is C or S
  MOD_RES (19)..(20)..(21)..(22)..(23): Xaa is A or G
  MOD_RES (24)..(25)..(26)..(27): Xaa is A or G or absent
PASXXVPARLSAISILYLXXXXXXXXXLKNYQDMVVEAXG

SEQ ID NO: 38143 - protein, 33 aa, Artificial Sequence
  Non-cyclic GFR-binding peptide
  MOD_RES (1)..(1): Xaa is C or S
  MOD_RES (15)..(16)..(17)..(18)..(19): Xaa is A or G
  MOD_RES (20)..(21)..(22)..(23): Xaa is A or G or absent
XVPTKLSAISILYLXXXXXXXXXLKNYQGMAVS

SEQ ID NO: 38144 - protein, 34 aa, Artificial Sequence
  Non-cyclic GFR-binding peptide
  MOD_RES (1)..(2)..(34): Xaa is C or S
XXVPARLSAISILYLDAANNVVLKNYQDMVVEAX

SEQ ID NO: 38145 - protein, 40 aa, Artificial Sequence
  Non-cyclic GFR-binding peptide
  MOD_RES (5)..(6)..(40): Xaa is C or S
  MOD_RES (20)..(21)..(22)..(23)..(24): Xaa is A or G
  MOD_RES (25)..(26)..(27)..(28): Xaa is A or G or absent
APASXXVPARLSAISILYLXXXXXXXXXLKNYQDMVVEAX

SEQ ID NO: 38146 - protein, 37 aa, Artificial Sequence
  Non-cyclic GFR-binding peptide
  MOD_RES (1)..(2)..(36): Xaa is C or S
  MOD_RES (16)..(17)..(18)..(19)..(20): Xaa is A or G
  MOD_RES (21)..(22)..(23)..(24): Xaa is A or G or absent
XXVPEKMSAISILYLXXXXXXXXXLKNYQNMTVESXA

SEQ ID NO: 38147 - protein, 42 aa, Artificial Sequence
  Non-cyclic GFR-binding peptide
  MOD_RES (4)..(5)..(39)..(41): Xaa is C or S
  MOD_RES (19)..(20)..(21)..(22)..(23): Xaa is A or G
  MOD_RES (24)..(25)..(26)..(27): Xaa is A or G or absent
PEPXXVPEKMSAISILYLXXXXXXXXXLKNYQNMTVESXAXR

SEQ ID NO: 38148 - protein, 32 aa, Artificial Sequence
  Non-cyclic GFR-binding peptide
  MOD_RES (1)..(2): Xaa is C or S
XXVPEKMSAISILYLDENKNVVLKNYQNMTVE

SEQ ID NO: 38149 - protein, 37 aa, Artificial Sequence
  Non-cyclic GFR-binding peptide
  MOD_RES (6)..(7): Xaa is C or S
KASKAXXVPTKLSAISILYLDKGVVTYLKNYQGMAVS

SEQ ID NO: 38150 - protein, 33 aa, Artificial Sequence
  Non-cyclic GFR-binding peptide
  MOD_RES (1)..(2)..(33): Xaa is C or S
XXAPVKTSAISMLYLDNGRVLLLKNYQMIVEEX

SEQ ID NO: 38151 - protein, 33 aa, Artificial Sequence
  Non-cyclic GFR-binding peptide
  MOD_RES (2)..(3): Xaa is C or S
PXXVPEKMSAISILYLDENKNVVLKNYQNMTVE

SEQ ID NO: 38152 - protein, 33 aa, Artificial Sequence
  Non-cyclic GFR-binding peptide
  MOD_RES (1)..(2): Xaa is C or S
XXVPARLSAISILYLDAANNVVLKNYQDMVVEA

SEQ ID NO: 38153 - protein, 41 aa, Artificial Sequence
  Non-cyclic GFR-binding peptide
  MOD_RES (3)..(4)..(38)..(40): Xaa is C or S
  MOD_RES (18)..(19)..(20)..(21)..(22): Xaa is A or G
  MOD_RES (23)..(24)..(25)..(26): Xaa is A or G or absent
GPXXTPTKMSAISMLYLXXXXXXXXXLKNYQGMVVDRXGXS

SEQ ID NO: 38154 - protein, 32 aa, Artificial Sequence
  Non-cyclic GFR-binding peptide
  MOD_RES (32)..(32): Xaa is C or S
VPEKMSAISILYLDENKNVVLKNYQNMTVESX

SEQ ID NO: 38155 - protein, 40 aa, Artificial Sequence
  Non-cyclic GFR-binding peptide
  MOD_RES (6)..(7): Xaa is C or S
  MOD_RES (21)..(22)..(23)..(24)..(25): Xaa is A or G
  MOD_RES (26)..(27)..(28)..(29): Xaa is A or G or absent
GIPEPXXVPEKMSAISILYLXXXXXXXXXLKNYQNMTVES

SEQ ID NO: 38156 - protein, 40 aa, Artificial Sequence
  Non-cyclic GFR-binding peptide
  MOD_RES (6)..(7)..(38)..(40): Xaa is C or S
RVPSTXXAPVKTSAISMLYLDNGRVLLLKNYQMIVEEXGX

SEQ ID NO: 38157 - protein, 38 aa, Artificial Sequence
  Non-cyclic GFR-binding peptide
  MOD_RES (5)..(6): Xaa is C or S
  MOD_RES (20)..(21)..(22)..(23)..(24): Xaa is A or G
  MOD_RES (25)..(26)..(27)..(28): Xaa is A or G or absent
APASXXVPARLSAISILYLXXXXXXXXXLKNYQDMVVE

SEQ ID NO: 38158 - protein, 35 aa, Artificial Sequence
  Non-cyclic GFR-binding peptide
  MOD_RES (1)..(2): Xaa is C or S
  MOD_RES (16)..(17)..(18)..(19)..(20): Xaa is A or G
  MOD_RES (21)..(22)..(23)..(24): Xaa is A or G or absent
XXVPEKMSAISILYLXXXXXXXXXLKNYQNMTVES

SEQ ID NO: 38159 - protein, 33 aa, Artificial Sequence
  Non-cyclic GFR-binding peptide
  MOD_RES (32)..(32): Xaa is C or S
TPTKMSAISMLYLNDKQQIILKNYQGMVVDRXG

SEQ ID NO: 38160 - protein, 43 aa, Artificial Sequence
  Non-cyclic GFR-binding peptide
  MOD_RES (5)..(6)..(40)..(42): Xaa is C or S
  MOD_RES (20)..(21)..(22)..(23)..(24): Xaa is A or G
  MOD_RES (25)..(26)..(27)..(28): Xaa is A or G or absent
ASKAXXVPTKLSAISILYLXXXXXXXXXLKNYQGMAVSEXGXR

SEQ ID NO: 38161 - protein, 37 aa, Artificial Sequence
  Non-cyclic GFR-binding peptide
  MOD_RES (1)..(34)..(36): Xaa is C or S
  MOD_RES (15)..(16)..(17)..(18)..(19): Xaa is A or G
  MOD_RES (20)..(21)..(22)..(23): Xaa is A or G or absent
XAPVKTSAISMLYLXXXXXXXXXLKNYQMIVEEXGXL

SEQ ID NO: 38162 - protein, 39 aa, Artificial Sequence
  Non-cyclic GFR-binding peptide
  MOD_RES (4)..(5)..(39): Xaa is C or S
  MOD_RES (19)..(20)..(21)..(22)..(23): Xaa is A or G
  MOD_RES (24)..(25)..(26)..(27): Xaa is A or G or absent
PEPXXVPEKMSAISILYLXXXXXXXXXLKNYQNMTVESX

SEQ ID NO: 38163 - protein, 42 aa, Artificial Sequence
  Non-cyclic GFR-binding peptide
  MOD_RES (6)..(7)..(39)..(41): Xaa is C or S
HVPKPXXAPTKLSAISVLYLDDSSNVILKNYQNMVVRSXGXH

SEQ ID NO: 38164 - protein, 36 aa, Artificial Sequence
  Non-cyclic GFR-binding peptide
  MOD_RES (2)..(3)..(35): Xaa is C or S
AXXVPTKLSAISILYLDKGVVTYLKNYQGMAVSEXG

SEQ ID NO: 38165 - protein, 33 aa, Artificial Sequence
  Non-cyclic GFR-binding peptide
  MOD_RES (14)..(15)..(16)..(17)..(18): Xaa is A or G
  MOD_RES (19)..(20)..(21)..(22): Xaa is A or G or absent
VPARLSAISILYLXXXXXXXXXLKNYQDMVVEA

SEQ ID NO: 38166 - protein, 38 aa, Artificial Sequence
  Non-cyclic GFR-binding peptide
  MOD_RES (4)..(5): Xaa is C or S
  MOD_RES (19)..(20)..(21)..(22)..(23): Xaa is A or G
  MOD_RES (24)..(25)..(26)..(27): Xaa is A or G or absent
AGPXXTPTKMSAISMLYLXXXXXXXXXLKNYQGMVVDR

SEQ ID NO: 38167 - protein, 40 aa, Artificial Sequence
  Non-cyclic GFR-binding peptide
  MOD_RES (6)..(7)..(39): Xaa is C or S
AAPASXXVPARLSAISILYLDAANNVVLKNYQDMVVEAXG

SEQ ID NO: 38168 - protein, 37 aa, Artificial Sequence
  Non-cyclic GFR-binding peptide
  MOD_RES (3)..(4)..(35)..(37): Xaa is C or S
STXXAPVKTSAISMLYLDNGRVLLLKNYQMIVEEXGX

SEQ ID NO: 38169 - protein, 31 aa, Artificial Sequence
  Non-cyclic GFR-binding peptide
  MOD_RES (1)..(1): Xaa is C or S
XVPTKLSAISILYLDKGVVTYLKNYQGMAVS

SEQ ID NO: 38170 - protein, 35 aa, Artificial Sequence
  Non-cyclic GFR-binding peptide
  MOD_RES (3)..(4)..(35): Xaa is C or S
STXXAPVKTSAISMLYLDNGRVLLLKNYQMIVEEX

SEQ ID NO: 38171 - protein, 40 aa, Artificial Sequence
  Non-cyclic GFR-binding peptide
  MOD_RES (4)..(5)..(38)..(40): Xaa is C or S
  MOD_RES (19)..(20)..(21)..(22)..(23): Xaa is A or G
  MOD_RES (24)..(25)..(26)..(27): Xaa is A or G or absent
PSTXXAPVKTSAISMLYLXXXXXXXXXLKNYQMIVEEXGX

SEQ ID NO: 38172 - protein, 36 aa, Artificial Sequence
  Non-cyclic GFR-binding peptide
  MOD_RES (1)..(35): Xaa is C or S
  MOD_RES (15)..(16)..(17)..(18)..(19): Xaa is A or G
  MOD_RES (20)..(21)..(22)..(23): Xaa is A or G or absent
XVPARLSAISILYLXXXXXXXXXLKNYQDMVVEAXG

SEQ ID NO: 38173 - protein, 38 aa, Artificial Sequence
  Non-cyclic GFR-binding peptide
  MOD_RES (4)..(5)..(37): Xaa is C or S
SKAXXVPTKLSAISILYLDKGVVTYLKNYQGMAVSEXG

SEQ ID NO: 38174 - protein, 35 aa, Artificial Sequence
  Non-cyclic GFR-binding peptide
  MOD_RES (2)..(3)..(34): Xaa is C or S
TXXAPVKTSAISMLYLDNGRVLLLKNYQMIVEEXG

SEQ ID NO: 38175 - protein, 35 aa, Artificial Sequence
  Non-cyclic GFR-binding peptide
  MOD_RES (1)..(32)..(34): Xaa is C or S
XAPVKTSAISMLYLDNGRVLLLKNYQMIVEEXGXL

SEQ ID NO: 38176 - protein, 39 aa, Artificial Sequence
  Non-cyclic GFR-binding peptide
  MOD_RES (5)..(6)..(37)..(39): Xaa is C or S
VPSTXXAPVKTSAISMLYLDNGRVLLLKNYQMIVEEXGX

SEQ ID NO: 38177 - protein, 35 aa, Artificial Sequence
  Non-cyclic GFR-binding peptide
  MOD_RES (4)..(5): Xaa is C or S
SKAXXVPTKLSAISILYLDKGVVTYLKNYQGMAVS

SEQ ID NO: 38178 - protein, 34 aa, Artificial Sequence
  Non-cyclic GFR-binding peptide
  MOD_RES (34)..(34): Xaa is C or S
  MOD_RES (14)..(15)..(16)..(17)..(18): Xaa is A or G
  MOD_RES (19)..(20)..(21)..(22): Xaa is A or G or absent
VPTKLSAISILYLXXXXXXXXXLKNYQGMAVSEX

SEQ ID NO: 38179 - protein, 30 aa, Artificial Sequence; identical to SEQ ID NO: 729
  Non-cyclic GFR-binding peptide

SEQ ID NO: 38180 - protein, 36 aa, Artificial Sequence
  Non-cyclic GFR-binding peptide
  MOD_RES (34)..(36): Xaa is C or S
  MOD_RES (14)..(15)..(16)..(17)..(18): Xaa is A or G
  MOD_RES (19)..(20)..(21)..(22): Xaa is A or G or absent
TPTKMSAISMLYLXXXXXXXXXLKNYQGMVVDRXGX

SEQ ID NO: 38181 - protein, 41 aa, Artificial Sequence
  Non-cyclic GFR-binding peptide
  MOD_RES (6)..(7)..(39)..(41): Xaa is C or S
KASKAXXVPTKLSAISILYLDKGVVTYLKNYQGMAVSEXGX

SEQ ID NO: 38182 - protein, 40 aa, Artificial Sequence
  Non-cyclic GFR-binding peptide
  MOD_RES (4)..(5)..(39): Xaa is C or S
  MOD_RES (19)..(20)..(21)..(22)..(23): Xaa is A or G
  MOD_RES (24)..(25)..(26)..(27): Xaa is A or G or absent
AGPXXTPTKMSAISMLYLXXXXXXXXXLKNYQGMVVDRXG

SEQ ID NO: 38183 - protein, 36 aa, Artificial Sequence
  Non-cyclic GFR-binding peptide
  MOD_RES (5)..(6): Xaa is C or S
IPEPXXVPEKMSAISILYLDENKNVVLKNYQNMTVE

SEQ ID NO: 38184 - protein, 39 aa, Artificial Sequence
  Non-cyclic GFR-binding peptide
  MOD_RES (6)..(7)..(39): Xaa is C or S
KASKAXXVPTKLSAISILYLDKGVVTYLKNYQGMAVSEX

SEQ ID NO: 38185 - protein, 33 aa, Artificial Sequence
  Non-cyclic GFR-binding peptide
  MOD_RES (1)..(33): Xaa is C or S
XVPTKLSAISILYLDKGVVTYLKNYQGMAVSEX

SEQ ID NO: 38186 - protein, 36 aa, Artificial Sequence
  Non-cyclic GFR-binding peptide
  MOD_RES (1)..(2)..(34)..(36): Xaa is C or S
XXVPTKLSAISILYLDKGVVTYLKNYQGMAVSEXGX

SEQ ID NO: 38187 - protein, 37 aa, Artificial Sequence
  Non-cyclic GFR-binding peptide
  MOD_RES (1)..(2)..(36): Xaa is C or S
  MOD_RES (16)..(17)..(18)..(19)..(20): Xaa is A or G
  MOD_RES (21)..(22)..(23)..(24): Xaa is A or G or absent
XXVPTKLSAISILYLXXXXXXXXXLKNYQGMAVSEXG

SEQ ID NO: 38188 - protein, 35 aa, Artificial Sequence
  Non-cyclic GFR-binding peptide
  MOD_RES (2)..(3): Xaa is C or S
  MOD_RES (17)..(18)..(19)..(20)..(21): Xaa is A or G
  MOD_RES (22)..(23)..(24)..(25): Xaa is A or G or absent
PXXVPEKMSAISILYLXXXXXXXXXLKNYQNMTVE

SEQ ID NO: 38189 - protein, 35 aa, Artificial Sequence
  Non-cyclic GFR-binding peptide
  MOD_RES (1)..(34): Xaa is C or S
  MOD_RES (15)..(16)..(17)..(18)..(19): Xaa is A or G
  MOD_RES (20)..(21)..(22)..(23): Xaa is A or G or absent
XAPVKTSAISMLYLXXXXXXXXXLKNYQMIVEEXG

SEQ ID NO: 38190 - protein, 40 aa, Artificial Sequence
  Non-cyclic GFR-binding peptide
  MOD_RES (4)..(5)..(37)..(39): Xaa is C or S
SKAXXVPTKLSAISILYLDKGVVTYLKNYQGMAVSEXGXR

SEQ ID NO: 38191 - protein, 38 aa, Artificial Sequence
  Non-cyclic GFR-binding peptide
  MOD_RES (6)..(7): Xaa is C or S
GIPEPXXVPEKMSAISILYLDENKNVVLKNYQNMTVES

SEQ ID NO: 38192 - protein, 34 aa, Artificial Sequence
  Non-cyclic GFR-binding peptide
  MOD_RES (32)..(34): Xaa is C or S
VPEKMSAISILYLDENKNVVLKNYQNMTVESXAX

SEQ ID NO: 38193 - protein, 37 aa, Artificial Sequence
  Non-cyclic GFR-binding peptide
  MOD_RES (2)..(3)..(35)..(37): Xaa is C or S
AXXVPTKLSAISILYLDKGVVTYLKNYQGMAVSEXGX

SEQ ID NO: 38194 - protein, 35 aa, Artificial Sequence
  Non-cyclic GFR-binding peptide
  MOD_RES (1)..(2)..(34): Xaa is C or S
XXVPTKLSAISILYLDKGVVTYLKNYQGMAVSEXG

SEQ ID NO: 38195 - protein, 35 aa, Artificial Sequence
  Non-cyclic GFR-binding peptide
  MOD_RES (1)..(33)..(35): Xaa is C or S
XTPTKMSAISMLYLNDKQQIILKNYQGMVVDRXGX

SEQ ID NO: 38196 - protein, 38 aa, Artificial Sequence
  Non-cyclic GFR-binding peptide
  MOD_RES (1)..(35)..(37): Xaa is C or S
  MOD_RES (15)..(16)..(17)..(18)..(19): Xaa is A or G
  MOD_RES (20)..(21)..(22)..(23): Xaa is A or G or absent
XTPTKMSAISMLYLXXXXXXXXXLKNYQGMVVDRXGXS

SEQ ID NO: 38197 - protein, 38 aa, Artificial Sequence
  Non-cyclic GFR-binding peptide
  MOD_RES (6)..(7): Xaa is C or S
GSAGPXXTPTKMSAISMLYLNDKQQIILKNYQGMVVDR

SEQ ID NO: 38198 - protein, 35 aa, Artificial Sequence
  Non-cyclic GFR-binding peptide
  MOD_RES (1)..(2)..(34): Xaa is C or S
XXVPARLSAISILYLDAANNVVLKNYQDMVVEAXG

SEQ ID NO: 38199 - protein, 35 aa, Artificial Sequence
  Non-cyclic GFR-binding peptide
  MOD_RES (32)..(34): Xaa is C or S
VPTKLSAISILYLDKGVVTYLKNYQGMAVSEXGXR

SEQ ID NO: 38200 - protein, 37 aa, Artificial Sequence
  Cyclic GFR-binding peptide
VPTAASAISILYLDAANNVVLKNYQAAVVEDKGVVTY

SEQ ID NO: 38201 - protein, 39 aa, Artificial Sequence
  Cyclic GFR-binding peptide
VPEAASSLSMLFFEIVRKKPIFLKVYPAATVEDKGVVTY

SEQ ID NO: 38202 - protein, 39 aa, Artificial Sequence
  Cyclic GFR-binding peptide
VPTVVSAISTLYLRIKPHQGQHLKNYQVVVVENDKQQII

SEQ ID NO: 38203 - protein, 37 aa, Artificial Sequence
  Cyclic GFR-binding peptide
APTLLNAISMLYFNDKQQIILKKYRLLVVRNDKQQII

SEQ ID NO: 38204 - protein, 37 aa, Artificial Sequence
  Cyclic GFR-binding peptide
APTGGSATSMLYYDKGVVTYLRKHRGGVVKDKGVVTY

SEQ ID NO: 38205 - protein, 37 aa, Artificial Sequence
  Cyclic GFR-binding peptide
VPTSSSPISTLYIDKGVVTYLKYHYSSVAEDEYDKVV

SEQ ID NO: 38206 - protein, 37 aa, Artificial Sequence
  Cyclic GFR-binding peptide
VPTAAEPISMLYLDEYDKVVKFKYEAAAVSNDKQQII

SEQ ID NO: 38207 - protein, 37 aa, Artificial Sequence
  Cyclic GFR-binding peptide
TPTSSSPINTLYFDDMGVPTYGKIPSSVVDDEYDKVV

SEQ ID NO: 38208 - protein, 37 aa, Artificial Sequence
  Cyclic GFR-binding peptide
VPTVVSPISMLYIDDMGVPTYKQYEVVVVEDDMGVPT

SEQ ID NO: 38209 - protein, 37 aa, Artificial Sequence
  Cyclic GFR-binding peptide
APVAAKPLSMLYVDKGVVTYDHHKDAAVEEDEYDKVV

SEQ ID NO: 38210 - protein, 37 aa, Artificial Sequence
  Cyclic GFR-binding peptide
VPQAAEPLPMLYYDKGVVTYEQLSNAAVRSDKGVVTY

SEQ ID NO: 38211 - protein, 37 aa, Artificial Sequence
  Cyclic GFR-binding peptide
VPQQQEPLTTLYYDEYDKVVEQLSNQQVKSNDKQQII

SEQ ID NO: 38212 - protein, 39 aa, Artificial Sequence
  Cyclic GFR-binding peptide
VPTMMSNITTQIMRIKPHQGQHIGEMSMMQHNDEYDKVV

SEQ ID NO: 38213 - protein, 36 aa, Artificial Sequence
  Cyclic GFR-binding peptide
SRVAARSVKMAKVGGGGGGGKEVQVAAEEHGGGGGG

SEQ ID NO: 38214 - protein, 37 aa, Artificial Sequence
  Cyclic GFR-binding peptide
VPTDDSATSTLYYDKGVVTYLRKHRDDEHSDKGVVTY

SEQ ID NO: 38215 - protein, 37 aa, Artificial Sequence
  Cyclic GFR-binding peptide
VPTGGEPLTTLYYNDKQQIIEQLSNGGEHSDDMGVPT

SEQ ID NO: 38216 - protein, 37 aa, Artificial Sequence
  Cyclic GFR-binding peptide
SRVLLRPVQMRKIDKGVVTYKKATVLLEEHDKGVVTY

SEQ ID NO: 38217 - protein, 37 aa, Artificial Sequence
  Cyclic GFR-binding peptide
TQVAARPVQTRKIDDMGVPTKKATVAAEDHDKGVVTY

SEQ ID NO: 38218 - protein, 47 aa, Artificial Sequence
  Cyclic GFR-binding peptide
IPKASSAPVGQRPVQMRKIDKGVVTYKKATVSSVEESGSLDKGVVTY

SEQ ID NO: 38219 - protein, 45 aa, Artificial Sequence
  Cyclic GFR-binding peptide
KASSVPQEERPVQMRKIGGGGGGGKKATVMIVRSSKSSDDMGVPT

SEQ ID NO: 38220 - protein, 37 aa, Artificial Sequence
  Cyclic GFR-binding peptide
VSQAARPVQTRKIDDMGVPTKKATVAAVKSDDMGVPT

SEQ ID NO: 38221 - protein, 46 aa, Artificial Sequence
  Cyclic GFR-binding peptide
PTSSAPTDLRSVKMAKVEIVRKKPIFKEVQVDMVVKASGDKGVVTY

SEQ ID NO: 38222 - protein, 48 aa, Artificial Sequence
  Cyclic GFR-binding peptide
KASSSRVKMSNITVQIMRIKPHQGQHIGEMSVVEEHASGSHDKGVVTY

SEQ ID NO: 38223 - protein, 39 aa, Artificial Sequence
  Cyclic GFR-binding peptide
VPTAAEPLTMLYYEIVRKKPIFEQLSNMVEHSDDMGVPT

SEQ ID NO: 38224 - protein, 43 aa, Artificial Sequence
  Cyclic GFR-binding peptide
EPSSSRVRLEPLTTLYYGGGGGGGEQLSNVVEEHSKDKGVVTY

SEQ ID NO: 38225 - protein, 41 aa, Artificial Sequence
  Cyclic GFR-binding peptide
APVKMEPLPTVYYDDMGVPTEQLSNDMVEESGSLDDMGVPT

SEQ ID NO: 38226 - protein, 47 aa, Artificial Sequence
  Cyclic GFR-binding peptide
EPSSVSQAAEPLPIVYYRIKPHQGQHEQLSNMIVKSSKSSDDMGVPT

SEQ ID NO: 38227 - protein, 27 aa, Artificial Sequence
  Cyclic GFR-binding peptide
QLSAISTLYLDEYDKVVLKNYQDEYDK

SEQ ID NO: 38228 - protein, 25 aa, Artificial Sequence
  Cyclic GFR-binding peptide
GTPGPSAISTLYLDDMGVPTLKNYQ

SEQ ID NO: 38229 - protein, 20 aa, Artificial Sequence
  Cyclic GFR-binding peptide
SAISTLYLIGKTPKILKNYQ

SEQ ID NO: 38230 - protein, 21 aa, Artificial Sequence
  Cyclic GFR-binding peptide
NAISVLYFDENEKVILKKYEL

SEQ ID NO: 38231 - protein, 20 aa, Artificial Sequence
  Cyclic GFR-binding peptide
SATSVLYYDSSNNVVLRKHR

SEQ ID NO: 38232 - protein, 27 aa, Artificial Sequence
  Cyclic GFR-binding peptide
SAISTLYLEIVRKKPLKNYQEIVRKKP

SEQ ID NO: 38233 - protein, 20 aa, Artificial Sequence
  Cyclic GFR-binding peptide
NAISVLYFGGGLKKYELGGG

SEQ ID NO: 38234 - protein, 19 aa, Artificial Sequence
  Cyclic GFR-binding peptide
SATSVLYYGGGLRKHRGGG

SEQ ID NO: 38235 - protein, 25 aa, Artificial Sequence
  Cyclic GFR-binding peptide
WWFWGSAISTLYLIGKTPKILKNYQ

SEQ ID NO: 38236 - protein, 25 aa, Artificial Sequence
  Cyclic GFR-binding peptide
GTPGPSAISTLYLIGKTPKILKNYQ

SEQ ID NO: 38237 - protein, 26 aa, Artificial Sequence
  Cyclic GFR-binding peptide
GTPGPNAISVLYFDENEKVILKKYEL

SEQ ID NO: 38238 - protein, 21 aa, Artificial Sequence
  Cyclic GFR-binding peptide
GTPGPSAISMLYLGGGLKNYQ

SEQ ID NO: 38239 - protein, 25 aa, Artificial Sequence
  Cyclic GFR-binding peptide
GTPGPSPISTLYKDENEKVVLKYHY

SEQ ID NO: 38240 - protein, 25 aa, Artificial Sequence
  Cyclic GFR-binding peptide
GTPGPNAISMLYFVGRKPKVLKKYR

SEQ ID NO: 38241 - protein, 25 aa, Artificial Sequence
  Cyclic GFR-binding peptide
GTPGPNAISTLYLDENEKVVLKKYR

SEQ ID NO: 38242 - protein, 25 aa, Artificial Sequence
  Cyclic GFR-binding peptide
GTPGPSAISTLYLDDSSNVILKNYQ

SEQ ID NO: 38243 - protein, 25 aa, Artificial Sequence
  Cyclic GFR-binding peptide
GTPGPNAISTLYLDDSSNVILKNYQ

SEQ ID NO: 38244 - protein, 25 aa, Artificial Sequence
  Cyclic GFR-binding peptide
GTPGPSAISTLYLDDYDKVILKKYR

SEQ ID NO: 38245 - protein, 25 aa, Artificial Sequence
  Cyclic GFR-binding peptide
WWFWGSAISTLYLDEYDKVVLKNYQ

SEQ ID NO: 38246 - protein, 22 aa, Artificial Sequence
  Cyclic GFR-binding peptide
GTPGPSAISTLYLGGGGLKNYQ

SEQ ID NO: 38247 - protein, 25 aa, Artificial Sequence
  Cyclic GFR-binding peptide
GTPGPSATSVLYYDDSSNVILRKHR

SEQ ID NO: 38248 - protein, 24 aa, Artificial Sequence
  Cyclic GFR-binding peptide
ELEPLPIVYYVGRKPKVEQLSNGG

SEQ ID NO: 38249 - protein, 22 aa, Artificial Sequence
  Cyclic GFR-binding peptide
EPLPIVYYVGRTPKVEQLSNGG

SEQ ID NO: 38250 - protein, 25 aa, Artificial Sequence
  Cyclic GFR-binding peptide
GTPGPSATSVLYYDENKNVVLRKHR

SEQ ID NO: 38251 - protein, 24 aa, Artificial Sequence
  Cyclic GFR-binding peptide
RSVKVAKVRIKPHQGQHKEVQVGG

SEQ ID NO: 38252 - protein, 24 aa, Artificial Sequence
  Cyclic GFR-binding peptide
SNITMQIMRIKPHQGQHIGEMSGG

SEQ ID NO: 38253 - protein, 29 aa, Artificial Sequence
  Cyclic GFR-binding peptide
RPTQVQLRPVQVRKIEYVRKKPKLKKATV

SEQ ID NO: 38254 - protein, 25 aa, Artificial Sequence
  Cyclic GFR-binding peptide
DENKNSSLSILFFDENKNVVLKVYP

SEQ ID NO: 38255 - protein, 25 aa, Artificial Sequence
  Cyclic GFR-binding peptide
DENEKSSLSILFFDENEKVVLKVYP

SEQ ID NO: 38256 - protein, 22 aa, Artificial Sequence
  Cyclic GFR-binding peptide
SPISILYIDAANNVVYKQYEGG

SEQ ID NO: 38257 - protein, 25 aa, Artificial Sequence
  Cyclic GFR-binding peptide
SPISILYIDAANNVVYKQYEDAANN

SEQ ID NO: 38258 - protein, 22 aa, Artificial Sequence
  Cyclic GFR-binding peptide
SPISLLYIDAANNVVYKQYEGG

SEQ ID NO: 38259 - protein, 19 aa, Artificial Sequence
  Cyclic GFR-binding peptide
SPISILYIAAYKQYEAAGG

SEQ ID NO: 38260 - protein, 22 aa, Artificial Sequence
  Cyclic GFR-binding peptide
EPLPIVYYVGRKPKVEQLSNGG

SEQ ID NO: 38261 - protein, 25 aa, Artificial Sequence
  Cyclic GFR-binding peptide
EPLPIVYYDDSSNVIEQLSNDDSSN

SEQ ID NO: 38262 - protein, 23 aa, Artificial Sequence
  Cyclic GFR-binding peptide
EPLPIVYYDDSSNEQLSNDDSSN

SEQ ID NO: 38263 - protein, 24 aa, Artificial Sequence
  Cyclic GFR-binding peptide
SPISILYIDAANNVVYKQYEDAAN

SEQ ID NO: 38264 - protein, 22 aa, Artificial Sequence
  Cyclic GFR-binding peptide
NAISTLYFDDSSNVILKKYRGG

SEQ ID NO: 38265 - protein, 24 aa, Artificial Sequence
  Cyclic GFR-binding peptide
KLSAISTLYLEIVRKKPLKNYQGG

SEQ ID NO: 38266 - protein, 22 aa, Artificial Sequence
  Cyclic GFR-binding peptide
SPINMLYFNEKNQIIYGKIPGG

SEQ ID NO: 38267 - protein, 22 aa, Artificial Sequence
  Cyclic GFR-binding peptide
EPLEIVYYDDSSNVIEQLSNGG

SEQ ID NO: 38268 - protein, 19 aa, Artificial Sequence
  Cyclic GFR-binding peptide
SAISMLYLGGGLKNYQGGG

SEQ ID NO: 38269 - protein, 25 aa, Artificial Sequence
  Cyclic GFR-binding peptide
SPINILFFDENKNVVLKVYPDENKN

SEQ ID NO: 38270 - protein, 27 aa, Artificial Sequence
  Cyclic GFR-binding peptide
SNITMQIMIGKTPKIEQLSNIGKTPKI

SEQ ID NO: 38271 - protein, 27 aa, Artificial Sequence
  Cyclic GFR-binding peptide
KDYEDQYNKLVVKDYEDLYLTSIASLQ

SEQ ID NO: 38272 - protein, 25 aa, Artificial Sequence
  Cyclic GFR-binding peptide
QYNKLTPVGMDDLYLTSIASPGPTG

SEQ ID NO: 38273 - protein, 21 aa, Artificial Sequence
  Cyclic GFR-binding peptide
LEYKKLIVKENEDFYLVSIAN

SEQ ID NO: 38274 - protein, 20 aa, Artificial Sequence
  Cyclic GFR-binding peptide
RHKRLVVNNSSDYYLVSTAS

SEQ ID NO: 38275 - protein, 27 aa, Artificial Sequence
  Cyclic GFR-binding peptide
PKKRVIEQYNKLPKKRVIELYLTSIAS

SEQ ID NO: 38276 - protein, 20 aa, Artificial Sequence
  Cyclic GFR-binding peptide
GGGLEYKKLGGGFYLVSIAN

SEQ ID NO: 38277 - protein, 19 aa, Artificial Sequence
  Cyclic GFR-binding peptide
GGGRHKRLGGGYYLVSTAS

SEQ ID NO: 38278 - protein, 26 aa, Artificial Sequence
  Cyclic GFR-binding peptide
LEYKKLIVKENEDFYLVSIANPGPTG

SEQ ID NO: 38279 - protein, 21 aa, Artificial Sequence
  Cyclic GFR-binding peptide
QYNKLGGGLYLMSIASPGPTG

SEQ ID NO: 38280 - protein, 25 aa, Artificial Sequence
  Cyclic GFR-binding peptide
YHYKLVVKENEDKYLTSIPSPGPTG

SEQ ID NO: 38281 - protein, 25 aa, Artificial Sequence
  Cyclic GFR-binding peptide
RYKKLVKPKRGVFYLMSIANPGPTG

SEQ ID NO: 38282 - protein, 25 aa, Artificial Sequence
  Cyclic GFR-binding peptide
RYKKLVVKENEDLYLTSIANPGPTG

SEQ ID NO: 38283 - protein, 25 aa, Artificial Sequence
  Cyclic GFR-binding peptide
QYNKLIVNSSDDLYLTSIASPGPTG

SEQ ID NO: 38284 - protein, 25 aa, Artificial Sequence
  Cyclic GFR-binding peptide
QYNKLIVNSSDDLYLTSIANPGPTG

SEQ ID NO: 38285 - protein, 25 aa, Artificial Sequence
  Cyclic GFR-binding peptide
RYKKLIVKDYDDLYLTSIASPGPTG

SEQ ID NO: 38286 - protein, 25 aa, Artificial Sequence
  Cyclic GFR-binding peptide
QYNKLVVKDYEDLYLTSIASGWFWW

SEQ ID NO: 38287 - protein, 22 aa, Artificial Sequence
  Cyclic GFR-binding peptide
QYNKLGGGGLYLTSIASPGPTG

SEQ ID NO: 38288 - protein, 25 aa, Artificial Sequence
  Cyclic GFR-binding peptide
RHKRLIVNSSDDYYLVSTASPGPTG

SEQ ID NO: 38289 - protein, 24 aa, Artificial Sequence
  Cyclic GFR-binding peptide
GGNSLQEVKPKRGVYYVIPLPELE

SEQ ID NO: 38290 - protein, 22 aa, Artificial Sequence
  Cyclic GFR-binding peptide
GGNSLQEVKPTRGVYYVIPLPE

SEQ ID NO: 38291 - protein, 24 aa, Artificial Sequence
  Cyclic GFR-binding peptide
GGVQVEKHQGQHPKIRVKAVKVSR

SEQ ID NO: 38292 - protein, 24 aa, Artificial Sequence
  Cyclic GFR-binding peptide
GGSMEGIHQGQHPKIRMIQMTINS

SEQ ID NO: 38293 - protein, 29 aa, Artificial Sequence
  Cyclic GFR-binding peptide
VTAKKLKPKKRVYEIKRVQVPRLQVQTPR

SEQ ID NO: 38294 - protein, 25 aa, Artificial Sequence
  Cyclic GFR-binding peptide
PYVKLVVNKNEDFFLISLSSNKNED

SEQ ID NO: 38295 - protein, 25 aa, Artificial Sequence
  Cyclic GFR-binding peptide
PYVKLVVKENEDFFLISLSSKENED

SEQ ID NO: 38296 - protein, 22 aa, Artificial Sequence
  Cyclic GFR-binding peptide
GGEYQKYVVNNAADIYLISIPS

SEQ ID NO: 38297 - protein, 25 aa, Artificial Sequence
  Cyclic GFR-binding peptide
NNAADEYQKYVVNNAADIYLISIPS

SEQ ID NO: 38298 - protein, 22 aa, Artificial Sequence
  Cyclic GFR-binding peptide
GGEYQKYVVNNAADIYLLSIPS

SEQ ID NO: 38299 - protein, 19 aa, Artificial Sequence
  Cyclic GFR-binding peptide
GGAAEYQKYAAIYLISIPS

SEQ ID NO: 38300 - protein, 22 aa, Artificial Sequence
  Cyclic GFR-binding peptide
GGNSLQEVKPKRGVYYVIPLPE

SEQ ID NO: 38301 - protein, 25 aa, Artificial Sequence
  Cyclic GFR-binding peptide
NSSDDNSLQEIVNSSDDYYVIPLPE

SEQ ID NO: 38302 - protein, 23 aa, Artificial Sequence
  Cyclic GFR-binding peptide
NSSDDNSLQENSSDDYYVIPLPE

SEQ ID NO: 38303 - protein, 24 aa, Artificial Sequence
  Cyclic GFR-binding peptide
NAADEYQKYVVNNAADIYLISIPS

SEQ ID NO: 38304 - protein, 22 aa, Artificial Sequence
  Cyclic GFR-binding peptide
GGRYKKLIVNSSDDFYLTSIAN

SEQ ID NO: 38305 - protein, 24 aa, Artificial Sequence
  Cyclic GFR-binding peptide
GGQYNKLPKKRVIELYLTSIASLK

SEQ ID NO: 38306 - protein, 22 aa, Artificial Sequence
  Cyclic GFR-binding peptide
GGPIKGYIIQNKENFYLMNIPS

SEQ ID NO: 38307 - protein, 22 aa, Artificial Sequence
  Cyclic GFR-binding peptide
GGNSLQEIVNSSDDYYVIELPE

SEQ ID NO: 38308 - protein, 19 aa, Artificial Sequence
  Cyclic GFR-binding peptide
GGGQYNKLGGGLYLMSIAS

SEQ ID NO: 38309 - protein, 25 aa, Artificial Sequence
  Cyclic GFR-binding peptide
NKNEDPYVKLVVNKNEDFFLINIPS

SEQ ID NO: 38310 - protein, 27 aa, Artificial Sequence
  Cyclic GFR-binding peptide
IKPTKGINSLQEIKPTKGIMIQMTINS

SEQ ID NO: 38311 - protein, 25 aa, Artificial Sequence
  Cyclic GFR-binding peptide
GTPGPSAISMLYLDENKNVVLKNYQ

SEQ ID NO: 38312 - protein, 25 aa, Artificial Sequence
  Cyclic GFR-binding peptide
GTPGPSAISMLYLDDSSNVILKNYQ

SEQ ID NO: 38313 - protein, 25 aa, Artificial Sequence
  Cyclic GFR-binding peptide
GTPGPSAISMLYLDSSNNVILKNYQ

SEQ ID NO: 38314 - protein, 25 aa, Artificial Sequence
  Cyclic GFR-binding peptide
GTPGPSAISMLYLDDMGVPTLKNYQ

SEQ ID NO: 38315 - protein, 25 aa, Artificial Sequence
  Cyclic GFR-binding peptide
GTPGPSAISMLYLDKGVVTYLKNYQ

SEQ ID NO: 38316 - protein, 25 aa, Artificial Sequence
  Cyclic GFR-binding peptide
GTPGPSAISMLYLNDKQQIILKNYQ

SEQ ID NO: 38317 - protein, 25 aa, Artificial Sequence
  Cyclic GFR-binding peptide
GTPGPSAISMLYLDAANNVVLKNYQ

SEQ ID NO: 38318 - protein, 25 aa, Artificial Sequence
  Cyclic GFR-binding peptide
WWFWGSAISMLYLDSANNVVLKNYQ

SEQ ID NO: 38319 - protein, 25 aa, Artificial Sequence
  Cyclic GFR-binding peptide
WWFWGSAISMLYLDNGRVLLLKNYQ

SEQ ID NO: 38320 - protein, 25 aa, Artificial Sequence
  Cyclic GFR-binding peptide
WWFWGSAISMLYLVGRKPKVLKNYQ

SEQ ID NO: 38321 - protein, 25 aa, Artificial Sequence
  Cyclic GFR-binding peptide
WWFWGSAISMLYLIGKTPKILKNYQ

SEQ ID NO: 38322 - protein, 25 aa, Artificial Sequence
  Cyclic GFR-binding peptide
WWFWGSAISMLYLVGRTPKVLKNYQ

SEQ ID NO: 38323 - protein, 25 aa, Artificial Sequence
  Cyclic GFR-binding peptide
WWFWGSAISMLYLDENKNVVLKNYQ

SEQ ID NO: 38324 - protein, 25 aa, Artificial Sequence
  Cyclic GFR-binding peptide
WWFWGSAISMLYLDDSSNVILKNYQ

SEQ ID NO: 38325 - protein, 22 aa, Artificial Sequence
  Cyclic GFR-binding peptide
GTPGPSAISMLYLGGGGLKNYQ

SEQ ID NO: 38326 - protein, 27 aa, Artificial Sequence
  Cyclic GFR-binding peptide
SAISMLYLRIKPHQGQHLKNYQRIKPH

SEQ ID NO: 38327 - protein, 27 aa, Artificial Sequence
  Cyclic GFR-binding peptide
SAISMLYLEYVRKKPKLLKNYQEYVRK

SEQ ID NO: 38328 - protein, 27 aa, Artificial Sequence
  Cyclic GFR-binding peptide
SAISMLYLEIVRKKPIFLKNYQEIVRK

SEQ ID NO: 38329 - protein, 25 aa, Artificial Sequence
  Cyclic GFR-binding peptide
GTPGPSSLSILFFDENEKVVLKVYP

SEQ ID NO: 38330 - protein, 25 aa, Artificial Sequence
  Cyclic GFR-binding peptide
GTPGPSSLSILFFDEYDKVVLKVYP

SEQ ID NO: 38331 - protein, 25 aa, Artificial Sequence
  Cyclic GFR-binding peptide
GTPGPSSLSILFFDDSSNVILKVYP

SEQ ID NO: 38332 - protein, 25 aa, Artificial Sequence
  Cyclic GFR-binding peptide
GTPGPSSLSILFFDSSNNVILKVYP

SEQ ID NO: 38333 - protein, 25 aa, Artificial Sequence
  Cyclic GFR-binding peptide
GTPGPSSLSILFFDDMGVPTLKVYP

SEQ ID NO: 38334 - protein, 25 aa, Artificial Sequence
  Cyclic GFR-binding peptide
GTPGPSSLSILFFDKGVVTYLKVYP

SEQ ID NO: 38335 - protein, 25 aa, Artificial Sequence
  Cyclic GFR-binding peptide
GTPGPSSLSILFFNDKQQIILKVYP

SEQ ID NO: 38336 - protein, 25 aa, Artificial Sequence
  Cyclic GFR-binding peptide
WWFWGSSLSILFFDAANNVVLKVYP

SEQ ID NO: 38337 - protein, 25 aa, Artificial Sequence
  Cyclic GFR-binding peptide
WWFWGSSLSILFFDSANNVVLKVYP

SEQ ID NO: 38338 - protein, 25 aa, Artificial Sequence
  Cyclic GFR-binding peptide
WWFWGSSLSILFFDNGRVLLLKVYP

SEQ ID NO: 38339 - protein, 25 aa, Artificial Sequence
  Cyclic GFR-binding peptide
WWFWGSSLSILFFVGRKPKVLKVYP

SEQ ID NO: 38340 - protein, 25 aa, Artificial Sequence
  Cyclic GFR-binding peptide
WWFWGSSLSILFFIGKTPKILKVYP

SEQ ID NO: 38341 - protein, 25 aa, Artificial Sequence
  Cyclic GFR-binding peptide
WWFWGSSLSILFFVGRTPKVLKVYP

SEQ ID NO: 38342 - protein, 25 aa, Artificial Sequence
  Cyclic GFR-binding peptide
WWFWGSSLSILFFDENEKVVLKVYP

SEQ ID NO: 38343 - protein, 21 aa, Artificial Sequence
  Cyclic GFR-binding peptide
GTPGPSSLSILFFGGGLKVYP

SEQ ID NO: 38344 - protein, 22 aa, Artificial Sequence
  Cyclic GFR-binding peptide
GTPGPSSLSILFFGGGGLKVYP

SEQ ID NO: 38345 - protein, 19 aa, Artificial Sequence
  Cyclic GFR-binding peptide
SSLSILFFGGGLKVYPGGG

SEQ ID NO: 38346 - protein, 27 aa, Artificial Sequence
  Cyclic GFR-binding peptide
SSLSILFFEYVRKKPKLLKVYPEYVRK

SEQ ID NO: 38347 - protein, 27 aa, Artificial Sequence
  Cyclic GFR-binding peptide
SSLSILFFEIVRKKPIFLKVYPEIVRK

SEQ ID NO: 38348 - protein, 25 aa, Artificial Sequence
  Cyclic GFR-binding peptide
GTPGPNAISVLYFDENEKVVLKKYR

SEQ ID NO: 38349 - protein, 25 aa, Artificial Sequence
  Cyclic GFR-binding peptide
GTPGPNAISVLYFDENKNVVLKKYR

SEQ ID NO: 38350 - protein, 25 aa, Artificial Sequence
  Cyclic GFR-binding peptide
GTPGPNAISVLYFDEYDKVVLKKYR

SEQ ID NO: 38351 - protein, 25 aa, Artificial Sequence
  Cyclic GFR-binding peptide
GTPGPNAISVLYFDSSNNVILKKYR

SEQ ID NO: 38352 - protein, 25 aa, Artificial Sequence
  Cyclic GFR-binding peptide
GTPGPNAISVLYFDDMGVPTLKKYR

SEQ ID NO: 38353 - protein, 25 aa, Artificial Sequence
  Cyclic GFR-binding peptide
GTPGPNAISVLYFDKGVVTYLKKYR

SEQ ID NO: 38354 - protein, 25 aa, Artificial Sequence
  Cyclic GFR-binding peptide
GTPGPNAISVLYFNDKQQIILKKYR

SEQ ID NO: 38355 - protein, 25 aa, Artificial Sequence
  Cyclic GFR-binding peptide
GTPGPNAISVLYFDAANNVVLKKYR

SEQ ID NO: 38356 - protein, 25 aa, Artificial Sequence
  Cyclic GFR-binding peptide
WWFWGNAISVLYFDSANNVVLKKYR

SEQ ID NO: 38357 - protein, 25 aa, Artificial Sequence
  Cyclic GFR-binding peptide
WWFWGNAISVLYFDNGRVLLLKKYR

SEQ ID NO: 38358 - protein, 25 aa, Artificial Sequence
  Cyclic GFR-binding peptide
WWFWGNAISVLYFVGRKPKVLKKYR

SEQ ID NO: 38359 - protein, 25 aa, Artificial Sequence
  Cyclic GFR-binding peptide
WWFWGNAISVLYFIGKTPKILKKYR

SEQ ID NO: 38360 - protein, 25 aa, Artificial Sequence
  Cyclic GFR-binding peptide
WWFWGNAISVLYFVGRTPKVLKKYR

SEQ ID NO: 38361 - protein, 25 aa, Artificial Sequence
  Cyclic GFR-binding peptide
WWFWGNAISVLYFDENEKVVLKKYR

SEQ ID NO: 38362 - protein, 25 aa, Artificial Sequence
  Cyclic GFR-binding peptide
WWFWGNAISVLYFDENKNVVLKKYR

SEQ ID NO: 38363 - protein, 20 aa, Artificial Sequence
  Cyclic GFR-binding peptide
GTPGPNAISVLYGGGLKKYR

SEQ ID NO: 38364 - protein, 21 aa, Artificial Sequence
  Cyclic GFR-binding peptide
GTPGPNAISVLYGGGGLKKYR

SEQ ID NO: 38365 - protein, 18 aa, Artificial Sequence
  Cyclic GFR-binding peptide
NAISVLYGGGLKKYRGGG

SEQ ID NO: 38366 - protein, 27 aa, Artificial Sequence
  Cyclic GFR-binding peptide
NAISVLYFRIKPHQGQHLKKYRRIKPH

SEQ ID NO: 38367 - protein, 27 aa, Artificial Sequence
  Cyclic GFR-binding peptide
NAISVLYFEYVRKKPKLLKKYREYVRK

SEQ ID NO: 38368 - protein, 27 aa, Artificial Sequence
  Cyclic GFR-binding peptide
NAISVLYFEIVRKKPIFLKKYREIVRK

SEQ ID NO: 38369 - protein, 25 aa, Artificial Sequence
  Cyclic GFR-binding peptide
GTPGPSATSVLYYDENEKVVLRKHR

SEQ ID NO: 38370 - protein, 25 aa, Artificial Sequence
  Cyclic GFR-binding peptide
GTPGPSATSVLYYDEYDKVVLRKHR

SEQ ID NO: 38371 - protein, 25 aa, Artificial Sequence
  Cyclic GFR-binding peptide
GTPGPSATSVLYYDDMGVPTLRKHR

SEQ ID NO: 38372 - protein, 25 aa, Artificial Sequence
  Cyclic GFR-binding peptide
GTPGPSATSVLYYDKGVVTYLRKHR

SEQ ID NO: 38373 - protein, 25 aa, Artificial Sequence
  Cyclic GFR-binding peptide
GTPGPSATSVLYYNDKQQIILRKHR

SEQ ID NO: 38374 - protein, 25 aa, Artificial Sequence
  Cyclic GFR-binding peptide
WWFWGSATSVLYYDAANNVVLRKHR

SEQ ID NO: 38375 - protein, 25 aa, Artificial Sequence
  Cyclic GFR-binding peptide
WWFWGSATSVLYYDSANNVVLRKHR

SEQ ID NO: 38376 - protein, 25 aa, Artificial Sequence
  Cyclic GFR-binding peptide
WWFWGSATSVLYYDNGRVLLLRKHR

SEQ ID NO: 38377 - protein, 25 aa, Artificial Sequence
  Cyclic GFR-binding peptide
WWFWGSATSVLYYVGRKPKVLRKHR

SEQ ID NO: 38378 - protein, 25 aa, Artificial Sequence
  Cyclic GFR-binding peptide
WWFWGSATSVLYYIGKTPKILRKHR

SEQ ID NO: 38379 - protein, 25 aa, Artificial Sequence
  Cyclic GFR-binding peptide
WWFWGSATSVLYYVGRTPKVLRKHR

SEQ ID NO: 38380 - protein, 25 aa, Artificial Sequence
  Cyclic GFR-binding peptide
WWFWGSATSVLYYDENEKVVLRKHR

SEQ ID NO: 38381 - protein, 21 aa, Artificial Sequence
  Cyclic GFR-binding peptide
GTPGPSATSVLYYGGGLRKHR

SEQ ID NO: 38382 - protein, 22 aa, Artificial Sequence
  Cyclic GFR-binding peptide
GTPGPSATSVLYYGGGGLRKHR

SEQ ID NO: 38383 - protein, 25 aa, Artificial Sequence
  Cyclic GFR-binding peptide
SATSVLYYVGRTPKVLRKHRVGRTP

SEQ ID NO: 38384 - protein, 27 aa, Artificial Sequence
  Cyclic GFR-binding peptide
SATSVLYYRIKPHQGQHLRKHRRIKPH

SEQ ID NO: 38385 - protein, 27 aa, Artificial Sequence
  Cyclic GFR-binding peptide
SATSVLYYEYVRKKPKLLRKHREYVRK

SEQ ID NO: 38386 - protein, 27 aa, Artificial Sequence
  Cyclic GFR-binding peptide
SATSVLYYEIVRKKPIFLRKHREIVRK

SEQ ID NO: 38387 - protein, 25 aa, Artificial Sequence
  Cyclic GFR-binding peptide
GTPGPSPISVLYKDENEKVVLKYHY

SEQ ID NO: 38388 - protein, 25 aa, Artificial Sequence
  Cyclic GFR-binding peptide
GTPGPSPISVLYKDENKNVVLKYHY

SEQ ID NO: 38389 - protein, 25 aa, Artificial Sequence
  Cyclic GFR-binding peptide
GTPGPSPISVLYKDEYDKVVLKYHY

SEQ ID NO: 38390 - protein, 25 aa, Artificial Sequence
  Cyclic GFR-binding peptide
GTPGPSPISVLYKDDSSNVILKYHY

SEQ ID NO: 38391 - protein, 25 aa, Artificial Sequence
  Cyclic GFR-binding peptide
GTPGPSPISVLYKDSSNNVILKYHY

SEQ ID NO: 38392 - protein, 25 aa, Artificial Sequence
  Cyclic GFR-binding peptide
GTPGPSPISVLYKDKGVVTYLKYHY

SEQ ID NO: 38393 - protein, 25 aa, Artificial Sequence
  Cyclic GFR-binding peptide
GTPGPSPISVLYKNDKQQIILKYHY

SEQ ID NO: 38394 - protein, 25 aa, Artificial Sequence
  Cyclic GFR-binding peptide
WWFWGSPISVLYKDAANNVVLKYHY

SEQ ID NO: 38395 - protein, 25 aa, Artificial Sequence
  Cyclic GFR-binding peptide
WWFWGSPISVLYKDSANNVVLKYHY

SEQ ID NO: 38396 - protein, 25 aa, Artificial Sequence
  Cyclic GFR-binding peptide
WWFWGSPISVLYKDNGRVLLLKYHY

SEQ ID NO: 38397 - protein, 25 aa, Artificial Sequence
  Cyclic GFR-binding peptide
WWFWGSPISVLYKVGRKPKVLKYHY

SEQ ID NO: 38398 - protein, 25 aa, Artificial Sequence
  Cyclic GFR-binding peptide
WWFWGSPISVLYKIGKTPKILKYHY

SEQ ID NO: 38399 - protein, 25 aa, Artificial Sequence
  Cyclic GFR-binding peptide
WWFWGSPISVLYKVGRTPKVLKYHY

SEQ ID NO: 38400 - protein, 25 aa, Artificial Sequence
  Cyclic GFR-binding peptide
WWFWGSPISVLYKDENEKVVLKYHY

SEQ ID NO: 38401 - protein, 20 aa, Artificial Sequence
  Cyclic GFR-binding peptide
GTPGPSPISVLYGGGLKYHY

SEQ ID NO: 38402 - protein, 21 aa, Artificial Sequence
  Cyclic GFR-binding peptide
GTPGPSPISVLYGGGGLKYHY

SEQ ID NO: 38403 - protein, 18 aa, Artificial Sequence
  Cyclic GFR-binding peptide
SPISVLYGGGLKYHYGGG

SEQ ID NO: 38404 - protein, 25 aa, Artificial Sequence
  Cyclic GFR-binding peptide
SPISVLYKVGRTPKVLKYHYVGRTP

SEQ ID NO: 38405 - protein, 27 aa, Artificial Sequence
  Cyclic GFR-binding peptide
SPISVLYKRIKPHQGQHLKYHYRIKPH

SEQ ID NO: 38406 - protein, 27 aa, Artificial Sequence
  Cyclic GFR-binding peptide
SPISVLYKEYVRKKPKLLKYHYEYVRK

SEQ ID NO: 38407 - protein, 27 aa, Artificial Sequence
  Cyclic GFR-binding peptide
SPISVLYKEIVRKKPIFLKYHYEIVRK

SEQ ID NO: 38408 - protein, 25 aa, Artificial Sequence
  Cyclic GFR-binding peptide
GTPGPEPISILYLDENEKVVKFKYE

SEQ ID NO: 38409 - protein, 25 aa, Artificial Sequence
  Cyclic GFR-binding peptide
GTPGPEPISILYLDENKNVVKFKYE

SEQ ID NO: 38410 - protein, 25 aa, Artificial Sequence
  Cyclic GFR-binding peptide
GTPGPEPISILYLDEYDKVVKFKYE

SEQ ID NO: 38411 - protein, 25 aa, Artificial Sequence
  Cyclic GFR-binding peptide
GTPGPEPISILYLDDSSNVIKFKYE

SEQ ID NO: 38412 - protein, 25 aa, Artificial Sequence
  Cyclic GFR-binding peptide
GTPGPEPISILYLDSSNNVIKFKYE

SEQ ID NO: 38413 - protein, 25 aa, Artificial Sequence
  Cyclic GFR-binding peptide
GTPGPEPISILYLDDMGVPTKFKYE

SEQ ID NO: 38414 - protein, 25 aa, Artificial Sequence
  Cyclic GFR-binding peptide
GTPGPEPISILYLNDKQQIIKFKYE

SEQ ID NO: 38415 - protein, 25 aa, Artificial Sequence
  Cyclic GFR-binding peptide
WWFWGEPISILYLDAANNVVKFKYE

SEQ ID NO: 38416 - protein, 25 aa, Artificial Sequence
  Cyclic GFR-binding peptide
WWFWGEPISILYLDSANNVVKFKYE

SEQ ID NO: 38417 - protein, 25 aa, Artificial Sequence
  Cyclic GFR-binding peptide
WWFWGEPISILYLDNGRVLLKFKYE

SEQ ID NO: 38418 - protein, 25 aa, Artificial Sequence
  Cyclic GFR-binding peptide
WWFWGEPISILYLVGRKPKVKFKYE

SEQ ID NO: 38419 - protein, 25 aa, Artificial Sequence
  Cyclic GFR-binding peptide
WWFWGEPISILYLIGKTPKIKFKYE

SEQ ID NO: 38420 - protein, 25 aa, Artificial Sequence
  Cyclic GFR-binding peptide
WWFWGEPISILYLVGRTPKVKFKYE

SEQ ID NO: 38421 - protein, 25 aa, Artificial Sequence
  Cyclic GFR-binding peptide
WWFWGEPISILYLDENEKVVKFKYE

SEQ ID NO: 38422 - protein, 19 aa, Artificial Sequence
  Cyclic GFR-binding peptide
EPISILYLGGGKFKYEGGG

SEQ ID NO: 38423 - protein, 25 aa, Artificial Sequence
  Cyclic GFR-binding peptide
EPISILYLVGRTPKVKFKYEVGRTP

SEQ ID NO: 38424 - protein, 27 aa, Artificial Sequence
  Cyclic GFR-binding peptide
EPISILYLRIKPHQGQHKFKYERIKPH

SEQ ID NO: 38425 - protein, 27 aa, Artificial Sequence
  Cyclic GFR-binding peptide
EPISILYLEYVRKKPKLKFKYEEYVRK

SEQ ID NO: 38426 - protein, 27 aa, Artificial Sequence
  Cyclic GFR-binding peptide
EPISILYLEIVRKKPIFKFKYEEIVRK

SEQ ID NO: 38427 - protein, 25 aa, Artificial Sequence
  Cyclic GFR-binding peptide
GTPGPSPINMLYFDENEKVVYGKIP

SEQ ID NO: 38428 - protein, 25 aa, Artificial Sequence
  Cyclic GFR-binding peptide
GTPGPSPINMLYFDENKNVVYGKIP

SEQ ID NO: 38429 - protein, 25 aa, Artificial Sequence
  Cyclic GFR-binding peptide
GTPGPSPINMLYFDEYDKVVYGKIP

SEQ ID NO: 38430 - protein, 25 aa, Artificial Sequence
  Cyclic GFR-binding peptide
GTPGPSPINMLYFDDSSNVIYGKIP

SEQ ID NO: 38431 - protein, 25 aa, Artificial Sequence
  Cyclic GFR-binding peptide
GTPGPSPINMLYFDSSNNVIYGKIP

SEQ ID NO: 38432 - protein, 25 aa, Artificial Sequence
  Cyclic GFR-binding peptide
GTPGPSPINMLYFDDMGVPTYGKIP

SEQ ID NO: 38433 - protein, 25 aa, Artificial Sequence
  Cyclic GFR-binding peptide
GTPGPSPINMLYFDKGVVTYYGKIP

SEQ ID NO: 38434 - protein, 25 aa, Artificial Sequence
  Cyclic GFR-binding peptide
WWFWGSPINMLYFDAANNVVYGKIP

SEQ ID NO: 38435 - protein, 25 aa, Artificial Sequence
  Cyclic GFR-binding peptide
WWFWGSPINMLYFDSANNVVYGKIP

SEQ ID NO: 38436 - protein, 25 aa, Artificial Sequence
  Cyclic GFR-binding peptide
WWFWGSPINMLYFDNGRVLLYGKIP

SEQ ID NO: 38437 - protein, 25 aa, Artificial Sequence
  Cyclic GFR-binding peptide
WWFWGSPINMLYFVGRKPKVYGKIP

SEQ ID NO: 38438 - protein, 25 aa, Artificial Sequence
  Cyclic GFR-binding peptide
WWFWGSPINMLYFIGKTPKIYGKIP

SEQ ID NO: 38439 - protein, 25 aa, Artificial Sequence
  Cyclic GFR-binding peptide
WWFWGSPINMLYFVGRTPKVYGKIP

SEQ ID NO: 38440 - protein, 25 aa, Artificial Sequence
  Cyclic GFR-binding peptide
WWFWGSPINMLYFDENEKVVYGKIP

SEQ ID NO: 38441 - protein, 21 aa, Artificial Sequence
  Cyclic GFR-binding peptide
GTPGPSPINMLYFGGGYGKIP

SEQ ID NO: 38442 - protein, 22 aa, Artificial Sequence
  Cyclic GFR-binding peptide
GTPGPSPINMLYFGGGGYGKIP

SEQ ID NO: 38443 - protein, 19 aa, Artificial Sequence
  Cyclic GFR-binding peptide
SPINMLYFGGGYGKIPGGG

SEQ ID NO: 38444 - protein, 25 aa, Artificial Sequence
  Cyclic GFR-binding peptide
SPINMLYFIGKTPKIYGKIPIGKTP

SEQ ID NO: 38445 - protein, 25 aa, Artificial Sequence
  Cyclic GFR-binding peptide
SPINMLYFVGRTPKVYGKIPVGRTP

SEQ ID NO: 38446 - protein, 27 aa, Artificial Sequence
  Cyclic GFR-binding peptide
SPINMLYFRIKPHQGQHYGKIPRIKPH

SEQ ID NO: 38447 - protein, 27 aa, Artificial Sequence
  Cyclic GFR-binding peptide
SPINMLYFEYVRKKPKLYGKIPEYVRK

SEQ ID NO: 38448 - protein, 27 aa, Artificial Sequence
  Cyclic GFR-binding peptide
SPINMLYFEIVRKKPIFYGKIPEIVRK

SEQ ID NO: 38449 - protein, 25 aa, Artificial Sequence
  Cyclic GFR-binding peptide
GTPGPSPISILYIDENEKVVYKQYE

SEQ ID NO: 38450 - protein, 25 aa, Artificial Sequence
  Cyclic GFR-binding peptide
GTPGPSPISILYIDENKNVVYKQYE

SEQ ID NO: 38451 - protein, 25 aa, Artificial Sequence
  Cyclic GFR-binding peptide
GTPGPSPISILYIDEYDKVVYKQYE

SEQ ID NO: 38452 - protein, 25 aa, Artificial Sequence
  Cyclic GFR-binding peptide
GTPGPSPISILYIDDSSNVIYKQYE

SEQ ID NO: 38453 - protein, 25 aa, Artificial Sequence
  Cyclic GFR-binding peptide
GTPGPSPISILYIDSSNNVIYKQYE

SEQ ID NO: 38454 - protein, 25 aa, Artificial Sequence
  Cyclic GFR-binding peptide
GTPGPSPISILYIDDMGVPTYKQYE

SEQ ID NO: 38455 - protein, 25 aa, Artificial Sequence
  Cyclic GFR-binding peptide
GTPGPSPISILYIDKGVVTYYKQYE

SEQ ID NO: 38456 - protein, 25 aa, Artificial Sequence
  Cyclic GFR-binding peptide
WWFWGSPISILYINDKQQIIYKQYE

SEQ ID NO: 38457 - protein, 25 aa, Artificial Sequence
  Cyclic GFR-binding peptide
WWFWGSPISILYIDSANNVVYKQYE

SEQ ID NO: 38458 - protein, 25 aa, Artificial Sequence
  Cyclic GFR-binding peptide
WWFWGSPISILYIDNGRVLLYKQYE

SEQ ID NO: 38459 - protein, 25 aa, Artificial Sequence
  Cyclic GFR-binding peptide
WWFWGSPISILYIVGRKPKVYKQYE

SEQ ID NO: 38460 - protein, 25 aa, Artificial Sequence
  Cyclic GFR-binding peptide
WWFWGSPISILYIIGKTPKIYKQYE

SEQ ID NO: 38461 - protein, 25 aa, Artificial Sequence
  Cyclic GFR-binding peptide
WWFWGSPISILYIVGRTPKVYKQYE

SEQ ID NO: 38462 - protein, 25 aa, Artificial Sequence
  Cyclic GFR-binding peptide
WWFWGSPISILYIDENEKVVYKQYE

SEQ ID NO: 38463 - protein, 21 aa, Artificial Sequence
  Cyclic GFR-binding peptide
GTPGPSPISILYIGGGYKQYE

SEQ ID NO: 38464 - protein, 22 aa, Artificial Sequence
  Cyclic GFR-binding peptide
GTPGPSPISILYIGGGGYKQYE

SEQ ID NO: 38465 - protein, 25 aa, Artificial Sequence
  Cyclic GFR-binding peptide
SPISILYIDKGVVTYYKQYEDKGVV

SEQ ID NO: 38466 - protein, 25 aa, Artificial Sequence
  Cyclic GFR-binding peptide
SPISILYINDKQQIIYKQYENDKQQ

SEQ ID NO: 38467 - protein, 25 aa, Artificial Sequence
  Cyclic GFR-binding peptide
SPISILYIDSANNVVYKQYEDSANN

SEQ ID NO: 38468 - protein, 25 aa, Artificial Sequence
  Cyclic GFR-binding peptide
SPISILYIDNGRVLLYKQYEDNGRV

SEQ ID NO: 38469 - protein, 25 aa, Artificial Sequence
  Cyclic GFR-binding peptide
SPISILYIVGRKPKVYKQYEVGRKP

SEQ ID NO: 38470 - protein, 25 aa, Artificial Sequence
  Cyclic GFR-binding peptide
SPISILYIIGKTPKIYKQYEIGKTP

SEQ ID NO: 38471 - protein, 25 aa, Artificial Sequence
  Cyclic GFR-binding peptide
SPISILYIVGRTPKVYKQYEVGRTP

SEQ ID NO: 38472 - protein, 27 aa, Artificial Sequence
  Cyclic GFR-binding peptide
SPISILYIRIKPHQGQHYKQYERIKPH

SEQ ID NO: 38473 - protein, 19 aa, Artificial Sequence
  Cyclic GFR-binding peptide
SPISILYIGGGYKQYEGGG

SEQ ID NO: 38474 - protein, 19 aa, Artificial Sequence
  Cyclic GFR-binding peptide
SPISILFIGGGYKQYEGGG

SEQ ID NO: 38475 - protein, 22 aa, Artificial Sequence
  Cyclic GFR-binding peptide
GTPGPSPISILFIGGGGYKQYE

SEQ ID NO: 38476 - protein, 22 aa, Artificial Sequence
  Cyclic GFR-binding peptide
WWFWGSPISILFIGGGGYKQYE

SEQ ID NO: 38477 - protein, 21 aa, Artificial Sequence
  Cyclic GFR-binding peptide
WWFWGSPISILFIGGGYKQYE

SEQ ID NO: 38478 - protein, 21 aa, Artificial Sequence
  Cyclic GFR-binding peptide
GTPGPSPISILFIGGGYKQYE

SEQ ID NO: 38479 - protein, 25 aa, Artificial Sequence
  Cyclic GFR-binding peptide
GTPGPSPISILFIDNGRVLLYKQYE

SEQ ID NO: 38480 - protein, 25 aa, Artificial Sequence
  Cyclic GFR-binding peptide
GTPGPSPISILFIVGRKPKVYKQYE

SEQ ID NO: 38481 - protein, 25 aa, Artificial Sequence
  Cyclic GFR-binding peptide
WWFWGSPISILFIIGKTPKIYKQYE

SEQ ID NO: 38482 - protein, 25 aa, Artificial Sequence
  Cyclic GFR-binding peptide
WWFWGSPISILFIVGRTPKVYKQYE

SEQ ID NO: 38483 - protein, 25 aa, Artificial Sequence
  Cyclic GFR-binding peptide
GTPGPSPISILFIDENKNVVYKQYE

SEQ ID NO: 38484 - protein, 25 aa, Artificial Sequence
  Cyclic GFR-binding peptide
GTPGPSPISILFIDDSSNVIYKQYE

SEQ ID NO: 38485 - protein, 25 aa, Artificial Sequence
  Cyclic GFR-binding peptide
GTPGPSPISILFIDSSNNVIYKQYE

SEQ ID NO: 38486 - protein, 25 aa, Artificial Sequence
  Cyclic GFR-binding peptide
WWFWGSPISILFIDDMGVPTYKQYE

SEQ ID NO: 38487 - protein, 25 aa, Artificial Sequence
  Cyclic GFR-binding peptide
WWFWGSPISILFIDKGVVTYYKQYE

SEQ ID NO: 38488 - protein, 25 aa, Artificial Sequence
  Cyclic GFR-binding peptide
GTPGPSPISILFINDKQQIIYKQYE

SEQ ID NO: 38489 - protein, 25 aa, Artificial Sequence
  Cyclic GFR-binding peptide
GTPGPSPISILFIDAANNVVYKQYE

SEQ ID NO: 38490 - protein, 25 aa, Artificial Sequence
  Cyclic GFR-binding peptide
SPISILFIDNGRVLLYKQYEDNGRV

SEQ ID NO: 38491 - protein, 25 aa, Artificial Sequence
  Cyclic GFR-binding peptide
SPISILFIVGRKPKVYKQYEVGRKP

SEQ ID NO: 38492 - protein, 25 aa, Artificial Sequence
  Cyclic GFR-binding peptide
SPISILFIIGKTPKIYKQYEIGKTP

SEQ ID NO: 38493 - protein, 25 aa, Artificial Sequence
  Cyclic GFR-binding peptide
SPISILFIVGRTPKVYKQYEVGRTP

SEQ ID NO: 38494 - protein, 27 aa, Artificial Sequence
  Cyclic GFR-binding peptide
SPISILFIRIKPHQGQHYKQYERIKPH

SEQ ID NO: 38495 - protein, 27 aa, Artificial Sequence
  Cyclic GFR-binding peptide
SPISILFIEYVRKKPKLYKQYEEYVRK

SEQ ID NO: 38496 - protein, 27 aa, Artificial Sequence
  Cyclic GFR-binding peptide
SPISILFIEIVRKKPIFYKQYEEIVRK

SEQ ID NO: 38497 - protein, 25 aa, Artificial Sequence
  Cyclic GFR-binding peptide
GTPGPKPLSMLYVDENEKVVDHHKD

SEQ ID NO: 38498 - protein, 25 aa, Artificial Sequence
  Cyclic GFR-binding peptide
GTPGPKPLSMLYVDENKNVVDHHKD

SEQ ID NO: 38499 - protein, 25 aa, Artificial Sequence
  Cyclic GFR-binding peptide
GTPGPKPLSMLYVDEYDKVVDHHKD

SEQ ID NO: 38500 - protein, 25 aa, Artificial Sequence
  Cyclic GFR-binding peptide
GTPGPKPLSMLYVDDSSNVIDHHKD

SEQ ID NO: 38501 - protein, 25 aa, Artificial Sequence
  Cyclic GFR-binding peptide
GTPGPKPLSMLYVDSSNNVIDHHKD

SEQ ID NO: 38502 - protein, 21 aa, Artificial Sequence
  Cyclic GFR-binding peptide
GTPGPKPLSMLYVGGGDHHKD

SEQ ID NO: 38503 - protein, 22 aa, Artificial Sequence
  Cyclic GFR-binding peptide
GTPGPKPLSMLYVGGGGDHHKD

SEQ ID NO: 38504 - protein, 25 aa, Artificial Sequence
  Cyclic GFR-binding peptide
WWFWGKPLSMLYVNDKQQIIDHHKD

SEQ ID NO: 38505 - protein, 25 aa, Artificial Sequence
  Cyclic GFR-binding peptide
WWFWGKPLSMLYVDAANNVVDHHKD

SEQ ID NO: 38506 - protein, 25 aa, Artificial Sequence
  Cyclic GFR-binding peptide
WWFWGKPLSMLYVDSANNVVDHHKD

SEQ ID NO: 38507 - protein, 21 aa, Artificial Sequence
  Cyclic GFR-binding peptide
WWFWGKPLSMLYVGGGDHHKD

SEQ ID NO: 38508 - protein, 22 aa, Artificial Sequence
  Cyclic GFR-binding peptide
WWFWGKPLSMLYVGGGGDHHKD

SEQ ID NO: 38509 - protein, 25 aa, Artificial Sequence
  Cyclic GFR-binding peptide
WWFWGKPLSMLYVVGRTPKVDHHKD

SEQ ID NO: 38510 - protein, 25 aa, Artificial Sequence
  Cyclic GFR-binding peptide
WWFWGKPLSMLYVDENEKVVDHHKD

SEQ ID NO: 38511 - protein, 19 aa, Artificial Sequence
  Cyclic GFR-binding peptide
KPLSMLYVGGGDHHKDGGG

SEQ ID NO: 38512 - protein, 25 aa, Artificial Sequence
  Cyclic GFR-binding peptide
KPLSMLYVVGRTPKVDHHKDVGRTP

SEQ ID NO: 38513 - protein, 27 aa, Artificial Sequence
  Cyclic GFR-binding peptide
KPLSMLYVRIKPHQGQHDHHKDRIKPH

SEQ ID NO: 38514 - protein, 27 aa, Artificial Sequence
  Cyclic GFR-binding peptide
KPLSMLYVEYVRKKPKLDHHKDEYVRK

SEQ ID NO: 38515 - protein, 27 aa, Artificial Sequence
  Cyclic GFR-binding peptide
KPLSMLYVEIVRKKPIFDHHKDEIVRK

SEQ ID NO: 38516 - protein, 25 aa, Artificial Sequence
  Cyclic GFR-binding peptide
GTPGPEPLPIVYYDENEKVVEQLSN

SEQ ID NO: 38517 - protein, 25 aa, Artificial Sequence
  Cyclic GFR-binding peptide
GTPGPEPLPIVYYDENKNVVEQLSN

SEQ ID NO: 38518 - protein, 21 aa, Artificial Sequence
  Cyclic GFR-binding peptide
GTPGPEPLPIVYYGGGEQLSN

SEQ ID NO: 38519 - protein, 22 aa, Artificial Sequence
  Cyclic GFR-binding peptide
GTPGPEPLPIVYYGGGGEQLSN

SEQ ID NO: 38520 - protein, 25 aa, Artificial Sequence
  Cyclic GFR-binding peptide
GTPGPEPLPIVYYDDSSNVIEQLSN

SEQ ID NO: 38521 - protein, 25 aa, Artificial Sequence
  Cyclic GFR-binding peptide
GTPGPEPLPIVYYDSSNNVIEQLSN

SEQ ID NO: 38522 - protein, 25 aa, Artificial Sequence
  Cyclic GFR-binding peptide
GTPGPEPLPIVYYDDMGVPTEQLSN

SEQ ID NO: 38523 - protein, 25 aa, Artificial Sequence
  Cyclic GFR-binding peptide
GTPGPEPLPIVYYDKGVVTYEQLSN

SEQ ID NO: 38524 - protein, 25 aa, Artificial Sequence
  Cyclic GFR-binding peptide
WWFWGEPLPIVYYNDKQQIIEQLSN

SEQ ID NO: 38525 - protein, 25 aa, Artificial Sequence
  Cyclic GFR-binding peptide
WWFWGEPLPIVYYDAANNVVEQLSN

SEQ ID NO: 38526 - protein, 21 aa, Artificial Sequence
  Cyclic GFR-binding peptide
WWFWGEPLPIVYYGGGEQLSN

SEQ ID NO: 38527 - protein, 22 aa, Artificial Sequence
  Cyclic GFR-binding peptide
WWFWGEPLPIVYYGGGGEQLSN

SEQ ID NO: 38528 - protein, 25 aa, Artificial Sequence
  Cyclic GFR-binding peptide
WWFWGEPLPIVYYIGKTPKIEQLSN

SEQ ID NO: 38529 - protein, 25 aa, Artificial Sequence
  Cyclic GFR-binding peptide
WWFWGEPLPIVYYVGRTPKVEQLSN

SEQ ID NO: 38530 - protein, 25 aa, Artificial Sequence
  Cyclic GFR-binding peptide
WWFWGEPLPIVYYDENEKVVEQLSN

SEQ ID NO: 38531 - protein, 25 aa, Artificial Sequence
  Cyclic GFR-binding peptide
GTPGPEPLPIVYYDEYDKVVEQLSN

SEQ ID NO: 38532 - protein, 25 aa, Artificial Sequence
  Cyclic GFR-binding peptide
EPLPIVYYDKGVVTYEQLSNDKGVV

SEQ ID NO: 38533 - protein, 25 aa, Artificial Sequence
  Cyclic GFR-binding peptide
EPLPIVYYNDKQQIIEQLSNNDKQQ

SEQ ID NO: 38534 - protein, 25 aa, Artificial Sequence
  Cyclic GFR-binding peptide
EPLPIVYYDAANNVVEQLSNDAANN

SEQ ID NO: 38535 - protein, 25 aa, Artificial Sequence
  Cyclic GFR-binding peptide
EPLPIVYYDSANNVVEQLSNDSANN

SEQ ID NO: 38536 - protein, 19 aa, Artificial Sequence
  Cyclic GFR-binding peptide
EPLPIVYYGGGEQLSNGGG

SEQ ID NO: 38537 - protein, 25 aa, Artificial Sequence
  Cyclic GFR-binding peptide
GTPGPEPLTILYYDENEKVVEQLSN

SEQ ID NO: 38538 - protein, 25 aa, Artificial Sequence
  Cyclic GFR-binding peptide
GTPGPEPLTILYYDENKNVVEQLSN

SEQ ID NO: 38539 - protein, 25 aa, Artificial Sequence
  Cyclic GFR-binding peptide
GTPGPEPLTILYYDEYDKVVEQLSN

SEQ ID NO: 38540 - protein, 21 aa, Artificial Sequence
  Cyclic GFR-binding peptide
GTPGPEPLTILYYGGGEQLSN

SEQ ID NO: 38541 - protein, 22 aa, Artificial Sequence
  Cyclic GFR-binding peptide
GTPGPEPLTILYYGGGGEQLSN

SEQ ID NO: 38542 - protein, 25 aa, Artificial Sequence
  Cyclic GFR-binding peptide
GTPGPEPLTILYYDSSNNVIEQLSN

SEQ ID NO: 38543 - protein, 25 aa, Artificial Sequence
  Cyclic GFR-binding peptide
GTPGPEPLTILYYDDMGVPTEQLSN

SEQ ID NO: 38544 - protein, 25 aa, Artificial Sequence
  Cyclic GFR-binding peptide
GTPGPEPLTILYYDKGVVTYEQLSN

SEQ ID NO: 38545 - protein, 25 aa, Artificial Sequence
  Cyclic GFR-binding peptide
WWFWGEPLTILYYNDKQQIIEQLSN

SEQ ID NO: 38546 - protein, 25 aa, Artificial Sequence
  Cyclic GFR-binding peptide
WWFWGEPLTILYYDAANNVVEQLSN

SEQ ID NO: 38547 - protein, 25 aa, Artificial Sequence
  Cyclic GFR-binding peptide
WWFWGEPLTILYYDSANNVVEQLSN

SEQ ID NO: 38548 - protein, 21 aa, Artificial Sequence
  Cyclic GFR-binding peptide
WWFWGEPLTILYYGGGEQLSN

SEQ ID NO: 38549 - protein, 22 aa, Artificial Sequence
  Cyclic GFR-binding peptide
WWFWGEPLTILYYGGGGEQLSN

SEQ ID NO: 38550 - protein, 25 aa, Artificial Sequence
  Cyclic GFR-binding peptide
WWFWGEPLTILYYVGRTPKVEQLSN

SEQ ID NO: 38551 - protein, 25 aa, Artificial Sequence
  Cyclic GFR-binding peptide
WWFWGEPLTILYYDENEKVVEQLSN

SEQ ID NO: 38552 - protein, 25 aa, Artificial Sequence
  Cyclic GFR-binding peptide
GTPGPEPLTILYYDDSSNVIEQLSN

SEQ ID NO: 38553 - protein, 25 aa, Artificial Sequence
  Cyclic GFR-binding peptide
EPLTILYYDKGVVTYEQLSNDKGVV

SEQ ID NO: 38554 - protein, 25 aa, Artificial Sequence
  Cyclic GFR-binding peptide
EPLTILYYNDKQQIIEQLSNNDKQQ

SEQ ID NO: 38555 - protein, 25 aa, Artificial Sequence
  Cyclic GFR-binding peptide
EPLTILYYDAANNVVEQLSNDAANN

SEQ ID NO: 38556 - protein, 25 aa, Artificial Sequence
  Cyclic GFR-binding peptide
EPLTILYYDSANNVVEQLSNDSANN

SEQ ID NO: 38557 - protein, 25 aa, Artificial Sequence
  Cyclic GFR-binding peptide
EPLTILYYDNGRVLLEQLSNDNGRV

SEQ ID NO: 38558 - protein, 19 aa, Artificial Sequence
  Cyclic GFR-binding peptide
EPLTILYYGGGEQLSNGGG

SEQ ID NO: 38559 - protein, 25 aa, Artificial Sequence
  Cyclic GFR-binding peptide
GTPGPEPLTILYYNDKQQIIEQLSN

SEQ ID NO: 38560 - protein, 25 aa, Artificial Sequence
  Cyclic GFR-binding peptide
WWFWGEPLTILYYIGKTPKIEQLSN

SEQ ID NO: 38561 - protein, 25 aa, Artificial Sequence
  Cyclic GFR-binding peptide
WWFWGEPLTILYYDENKNVVEQLSN

SEQ ID NO: 38562 - protein, 27 aa, Artificial Sequence
  Cyclic GFR-binding peptide
EPLTILYYRIKPHQGQHEQLSNRIKPH

SEQ ID NO: 38563 - protein, 27 aa, Artificial Sequence
  Cyclic GFR-binding peptide
EPLTILYYEYVRKKPKLEQLSNEYVRK

SEQ ID NO: 38564 - protein, 27 aa, Artificial Sequence
  Cyclic GFR-binding peptide
EPLTILYYEIVRKKPIFEQLSNEIVRK

SEQ ID NO: 38565 - protein, 27 aa, Artificial Sequence
  Cyclic GFR-binding peptide
GTPGPSNITMQIMRIKPHQGQHIGEMS

SEQ ID NO: 38566 - protein, 25 aa, Artificial Sequence
  Cyclic GFR-binding peptide
GTPGPSNITMQIMDENEKVVIGEMS

SEQ ID NO: 38567 - protein, 20 aa, Artificial Sequence
  Cyclic GFR-binding peptide
GTPGPSNITMQIGGGIGEMS

SEQ ID NO: 38568 - protein, 21 aa, Artificial Sequence
  Cyclic GFR-binding peptide
GTPGPSNITMQIGGGGIGEMS

SEQ ID NO: 38569 - protein, 25 aa, Artificial Sequence
  Cyclic GFR-binding peptide
GTPGPSNITMQIMDDSSNVIIGEMS

SEQ ID NO: 38570 - protein, 25 aa, Artificial Sequence
  Cyclic GFR-binding peptide
GTPGPSNITMQIMDSSNNVIIGEMS

SEQ ID NO: 38571 - protein, 25 aa, Artificial Sequence
  Cyclic GFR-binding peptide
GTPGPSNITMQIMDDMGVPTIGEMS

SEQ ID NO: 38572 - protein, 20 aa, Artificial Sequence
  Cyclic GFR-binding peptide
WWFWGSNITMQIGGGIGEMS

SEQ ID NO: 38573 - protein, 21 aa, Artificial Sequence
  Cyclic GFR-binding peptide
WWFWGSNITMQIGGGGIGEMS

SEQ ID NO: 38574 - protein, 25 aa, Artificial Sequence
  Cyclic GFR-binding peptide
WWFWGSNITMQIMDAANNVVIGEMS

SEQ ID NO: 38575 - protein, 25 aa, Artificial Sequence
  Cyclic GFR-binding peptide
WWFWGSNITMQIMDSANNVVIGEMS

SEQ ID NO: 38576 - protein, 25 aa, Artificial Sequence
  Cyclic GFR-binding peptide
WWFWGSNITMQIMDNGRVLLIGEMS

SEQ ID NO: 38577 - protein, 25 aa, Artificial Sequence
  Cyclic GFR-binding peptide
WWFWGSNITMQIMVGRKPKVIGEMS

SEQ ID NO: 38578 - protein, 25 aa, Artificial Sequence
  Cyclic GFR-binding peptide
WWFWGSNITMQIMIGKTPKIIGEMS

SEQ ID NO: 38579 - protein, 25 aa, Artificial Sequence
  Cyclic GFR-binding peptide
GTPGPSNITMQIMVGRTPKVIGEMS

SEQ ID NO: 38580 - protein, 27 aa, Artificial Sequence
  Cyclic GFR-binding peptide
GTPGPSNITMQIMEYVRKKPKLIGEMS

SEQ ID NO: 38581 - protein, 27 aa, Artificial Sequence
  Cyclic GFR-binding peptide
GTPGPSNITMQIMEIVRKKPIFIGEMS

SEQ ID NO: 38582 - protein, 21 aa, Artificial Sequence
  Cyclic GFR-binding peptide
GTPGPSNITMQIMGGGLGEMS

SEQ ID NO: 38583 - protein, 22 aa, Artificial Sequence
  Cyclic GFR-binding peptide
GTPGPSNITMQIMGGGGLGEMS

SEQ ID NO: 38584 - protein, 25 aa, Artificial Sequence
  Cyclic GFR-binding peptide
SNITMQIMDENKNVVLGEMSDENKN

SEQ ID NO: 38585 - protein, 25 aa, Artificial Sequence
  Cyclic GFR-binding peptide
SNITMQIMDEYDKVVLGEMSDEYDK

SEQ ID NO: 38586 - protein, 25 aa, Artificial Sequence
  Cyclic GFR-binding peptide
SNITMQIMDDSSNVILGEMSDDSSN

SEQ ID NO: 38587 - protein, 25 aa, Artificial Sequence
  Cyclic GFR-binding peptide
SNITMQIMDSSNNVILGEMSDSSNN

SEQ ID NO: 38588 - protein, 25 aa, Artificial Sequence
  Cyclic GFR-binding peptide
SNITMQIMDDMGVPTLGEMSDDMGV

SEQ ID NO: 38589 - protein, 25 aa, Artificial Sequence
  Cyclic GFR-binding peptide
SNITMQIMDKGVVTYLGEMSDKGVV

SEQ ID NO: 38590 - protein, 25 aa, Artificial Sequence
  Cyclic GFR-binding peptide
SNITMQIMNDKQQIILGEMSNDKQQ

SEQ ID NO: 38591 - protein, 19 aa, Artificial Sequence
  Cyclic GFR-binding peptide
SNITMQIMGGGLGEMSGGG

SEQ ID NO: 38592 - protein, 27 aa, Artificial Sequence
  Cyclic GFR-binding peptide
GTPGPRSVKVAKVEIVRKKPIFKEVQV

SEQ ID NO: 38593 - protein, 21 aa, Artificial Sequence
  Cyclic GFR-binding peptide
GTPGPRSVKVAKVGGGKEVQV

SEQ ID NO: 38594 - protein, 25 aa, Artificial Sequence
  Cyclic GFR-binding peptide
GTPGPRSVKVAKVDENKNVVKEVQV

SEQ ID NO: 38595 - protein, 25 aa, Artificial Sequence
  Cyclic GFR-binding peptide
GTPGPRSVKVAKVDEYDKVVKEVQV

SEQ ID NO: 38596 - protein, 25 aa, Artificial Sequence
  Cyclic GFR-binding peptide
WWFWGRSVKVAKVDDSSNVIKEVQV

SEQ ID NO: 38597 - protein, 22 aa, Artificial Sequence
  Cyclic GFR-binding peptide
WWFWGRSVKVAKVGGGGKEVQV

SEQ ID NO: 38598 - protein, 25 aa, Artificial Sequence
  Cyclic GFR-binding peptide
WWFWGRSVKVAKVDSSNNVIKEVQV

SEQ ID NO: 38599 - protein, 25 aa, Artificial Sequence
  Cyclic GFR-binding peptide
WWFWGRSVKVAKVDDMGVPTKEVQV

SEQ ID NO: 38600 - protein, 25 aa, Artificial Sequence
  Cyclic GFR-binding peptide
GTPGPRSVKVAKVNDKQQIIKEVQV

SEQ ID NO: 38601 - protein, 25 aa, Artificial Sequence
  Cyclic GFR-binding peptide
GTPGPRSVKVAKVDAANNVVKEVQV

SEQ ID NO: 38602 - protein, 19 aa, Artificial Sequence
  Cyclic GFR-binding peptide
RSVKVAKVGGGKEVQVGGG

SEQ ID NO: 38603 - protein, 25 aa, Artificial Sequence
  Cyclic GFR-binding peptide
RSVKVAKVVGRTPKVKEVQVVGRTP

SEQ ID NO: 38604 - protein, 27 aa, Artificial Sequence
  Cyclic GFR-binding peptide
RSVKVAKVRIKPHQGQHKEVQVRIKPH

SEQ ID NO: 38605 - protein, 27 aa, Artificial Sequence
  Cyclic GFR-binding peptide
RSVKVAKVEIVRKKPIFKEVQVEIVRK

SEQ ID NO: 38606 - protein, 27 aa, Artificial Sequence
  Cyclic GFR-binding peptide
GTPGPRPVQVRKIEYVRKKPKLKKATV

SEQ ID NO: 38607 - protein, 25 aa, Artificial Sequence
  Cyclic GFR-binding peptide
GTPGPRPVQVRKIDENEKVVKKATV

SEQ ID NO: 38608 - protein, 25 aa, Artificial Sequence
  Cyclic GFR-binding peptide
GTPGPRPVQVRKIDENKNVVKKATV

SEQ ID NO: 38609 - protein, 25 aa, Artificial Sequence
  Cyclic GFR-binding peptide
GTPGPRPVQVRKIDEYDKVVKKATV

SEQ ID NO: 38610 - protein, 25 aa, Artificial Sequence
  Cyclic GFR-binding peptide
WWFWGRPVQVRKIDDSSNVIKKATV

SEQ ID NO: 38611 - protein, 21 aa, Artificial Sequence
  Cyclic GFR-binding peptide
WWFWGRPVQVRKIGGGKKATV

SEQ ID NO: 38612 - protein, 22 aa, Artificial Sequence
  Cyclic GFR-binding peptide
WWFWGRPVQVRKIGGGGKKATV

SEQ ID NO: 38613 - protein, 25 aa, Artificial Sequence
  Cyclic GFR-binding peptide
WWFWGRPVQVRKIDDMGVPTKKATV

SEQ ID NO: 38614 - protein, 25 aa, Artificial Sequence
  Cyclic GFR-binding peptide
GTPGPRPVQVRKIDKGVVTYKKATV

SEQ ID NO: 38615 - protein, 21 aa, Artificial Sequence
  Cyclic GFR-binding peptide
GTPGPRPVQVRKIGGGKKATV

SEQ ID NO: 38616 - protein, 22 aa, Artificial Sequence
  Cyclic GFR-binding peptide
GTPGPRPVQVRKIGGGGKKATV

SEQ ID NO: 38617 - protein, 25 aa, Artificial Sequence
  Cyclic GFR-binding peptide
RPVQVRKIDSANNVVKKATVDSANN

SEQ ID NO: 38618 - protein, 25 aa, Artificial Sequence
  Cyclic GFR-binding peptide
RPVQVRKIDNGRVLLKKATVDNGRV

SEQ ID NO: 38619 - protein, 25 aa, Artificial Sequence
  Cyclic GFR-binding peptide
RPVQVRKIVGRKPKVKKATVVGRKP

SEQ ID NO: 38620 - protein, 25 aa, Artificial Sequence
  Cyclic GFR-binding peptide
RPVQVRKIIGKTPKIKKATVIGKTP

SEQ ID NO: 38621 - protein, 19 aa, Artificial Sequence
  Cyclic GFR-binding peptide
RPVQVRKIGGGKKATVGGG

SEQ ID NO: 38622 - protein, 25 aa, Artificial Sequence
  Cyclic GFR-binding peptide
QYNKLVVNKNEDLYLMSIASPGPTG

SEQ ID NO: 38623 - protein, 25 aa, Artificial Sequence
  Cyclic GFR-binding peptide
QYNKLIVNSSDDLYLMSIASPGPTG

SEQ ID NO: 38624 - protein, 25 aa, Artificial Sequence
  Cyclic GFR-binding peptide
QYNKLIVNNSSDLYLMSIASPGPTG

SEQ ID NO: 38625 - protein, 25 aa, Artificial Sequence
  Cyclic GFR-binding peptide
QYNKLTPVGMDDLYLMSIASPGPTG

SEQ ID NO: 38626 - protein, 25 aa, Artificial Sequence
  Cyclic GFR-binding peptide
QYNKLYTVVGKDLYLMSIASPGPTG

SEQ ID NO: 38627 - protein, 25 aa, Artificial Sequence
  Cyclic GFR-binding peptide
QYNKLIIQQKDNLYLMSIASPGPTG

SEQ ID NO: 38628 - protein, 25 aa, Artificial Sequence
  Cyclic GFR-binding peptide
QYNKLVVNNAADLYLMSIASPGPTG

SEQ ID NO: 38629 - protein, 25 aa, Artificial Sequence
  Cyclic GFR-binding peptide
QYNKLVVNNASDLYLMSIASGWFWW

SEQ ID NO: 38630 - protein, 25 aa, Artificial Sequence
  Cyclic GFR-binding peptide
QYNKLLLVRGNDLYLMSIASGWFWW

SEQ ID NO: 38631 - protein, 25 aa, Artificial Sequence
  Cyclic GFR-binding peptide
QYNKLVKPKRGVLYLMSIASGWFWW

SEQ ID NO: 38632 - protein, 25 aa, Artificial Sequence
  Cyclic GFR-binding peptide
QYNKLIKPTKGILYLMSIASGWFWW

SEQ ID NO: 38633 - protein, 25 aa, Artificial Sequence
  Cyclic GFR-binding peptide
QYNKLVKPTRGVLYLMSIASGWFWW

SEQ ID NO: 38634 - protein, 25 aa, Artificial Sequence
  Cyclic GFR-binding peptide
QYNKLVVNKNEDLYLMSIASGWFWW

SEQ ID NO: 38635 - protein, 25 aa, Artificial Sequence
  Cyclic GFR-binding peptide
QYNKLIVNSSDDLYLMSIASGWFWW

SEQ ID NO: 38636 - protein, 22 aa, Artificial Sequence
  Cyclic GFR-binding peptide
QYNKLGGGGLYLMSIASPGPTG

SEQ ID NO: 38637 - protein, 27 aa, Artificial Sequence
  Cyclic GFR-binding peptide
HPKIRQYNKLHQGQHPKIRLYLMSIAS

SEQ ID NO: 38638 - protein, 27 aa, Artificial Sequence
  Cyclic GFR-binding peptide
KRVYEQYNKLLKPKKRVYELYLMSIAS

SEQ ID NO: 38639 - protein, 27 aa, Artificial Sequence
  Cyclic GFR-binding peptide
KRVIEQYNKLFIPKKRVIELYLMSIAS

SEQ ID NO: 38640 - protein, 25 aa, Artificial Sequence
  Cyclic GFR-binding peptide
PYVKLVVKENEDFFLISLSSPGPTG

SEQ ID NO: 38641 - protein, 25 aa, Artificial Sequence
  Cyclic GFR-binding peptide
PYVKLVVKDYEDFFLISLSSPGPTG

SEQ ID NO: 38642 - protein, 25 aa, Artificial Sequence
  Cyclic GFR-binding peptide
PYVKLIVNSSDDFFLISLSSPGPTG

SEQ ID NO: 38643 - protein, 25 aa, Artificial Sequence
  Cyclic GFR-binding peptide
PYVKLIVNNSSDFFLISLSSPGPTG

SEQ ID NO: 38644 - protein, 25 aa, Artificial Sequence
  Cyclic GFR-binding peptide
PYVKLTPVGMDDFFLISLSSPGPTG

SEQ ID NO: 38645 - protein, 25 aa, Artificial Sequence
  Cyclic GFR-binding peptide
PYVKLYTVVGKDFFLISLSSPGPTG

SEQ ID NO: 38646 - protein, 25 aa, Artificial Sequence
  Cyclic GFR-binding peptide
PYVKLIIQQKDNFFLISLSSPGPTG

SEQ ID NO: 38647 - protein, 25 aa, Artificial Sequence
  Cyclic GFR-binding peptide
PYVKLVVNNAADFFLISLSSGWFWW

SEQ ID NO: 38648 - protein, 25 aa, Artificial Sequence
  Cyclic GFR-binding peptide
PYVKLVVNNASDFFLISLSSGWFWW

SEQ ID NO: 38649 - protein, 25 aa, Artificial Sequence
  Cyclic GFR-binding peptide
PYVKLLLVRGNDFFLISLSSGWFWW

SEQ ID NO: 38650 - protein, 25 aa, Artificial Sequence
  Cyclic GFR-binding peptide
PYVKLVKPKRGVFFLISLSSGWFWW

SEQ ID NO: 38651 - protein, 25 aa, Artificial Sequence
  Cyclic GFR-binding peptide
PYVKLIKPTKGIFFLISLSSGWFWW

SEQ ID NO: 38652 - protein, 25 aa, Artificial Sequence
  Cyclic GFR-binding peptide
PYVKLVKPTRGVFFLISLSSGWFWW

SEQ ID NO: 38653 - protein, 25 aa, Artificial Sequence
  Cyclic GFR-binding peptide
PYVKLVVKENEDFFLISLSSGWFWW

SEQ ID NO: 38654 - protein, 21 aa, Artificial Sequence
  Cyclic GFR-binding peptide
PYVKLGGGFFLISLSSPGPTG

SEQ ID NO: 38655 - protein, 22 aa, Artificial Sequence
  Cyclic GFR-binding peptide
PYVKLGGGGFFLISLSSPGPTG

SEQ ID NO: 38656 - protein, 19 aa, Artificial Sequence
  Cyclic GFR-binding peptide
GGGPYVKLGGGFFLISLSS

SEQ ID NO: 38657 - protein, 27 aa, Artificial Sequence
  Cyclic GFR-binding peptide
KRVYEPYVKLLKPKKRVYEFFLISLSS

SEQ ID NO: 38658 - protein, 27 aa, Artificial Sequence
  Cyclic GFR-binding peptide
KRVIEPYVKLFIPKKRVIEFFLISLSS

SEQ ID NO: 38659 - protein, 25 aa, Artificial Sequence
  Cyclic GFR-binding peptide
RYKKLVVKENEDFYLVSIANPGPTG

SEQ ID NO: 38660 - protein, 25 aa, Artificial Sequence
  Cyclic GFR-binding peptide
RYKKLVVNKNEDFYLVSIANPGPTG

SEQ ID NO: 38661 - protein, 25 aa, Artificial Sequence
  Cyclic GFR-binding peptide
RYKKLVVKDYEDFYLVSIANPGPTG

SEQ ID NO: 38662 - protein, 25 aa, Artificial Sequence
  Cyclic GFR-binding peptide
RYKKLIVNNSSDFYLVSIANPGPTG

SEQ ID NO: 38663 - protein, 25 aa, Artificial Sequence
  Cyclic GFR-binding peptide
RYKKLTPVGMDDFYLVSIANPGPTG

SEQ ID NO: 38664 - protein, 25 aa, Artificial Sequence
  Cyclic GFR-binding peptide
RYKKLYTVVGKDFYLVSIANPGPTG

SEQ ID NO: 38665 - protein, 25 aa, Artificial Sequence
  Cyclic GFR-binding peptide
RYKKLIIQQKDNFYLVSIANPGPTG

SEQ ID NO: 38666 - protein, 25 aa, Artificial Sequence
  Cyclic GFR-binding peptide
RYKKLVVNNAADFYLVSIANPGPTG

SEQ ID NO: 38667 - protein, 25 aa, Artificial Sequence
  Cyclic GFR-binding peptide
RYKKLVVNNASDFYLVSIANGWFWW

SEQ ID NO: 38668 - protein, 25 aa, Artificial Sequence
  Cyclic GFR-binding peptide
RYKKLLLVRGNDFYLVSIANGWFWW

SEQ ID NO: 38669 - protein, 25 aa, Artificial Sequence
  Cyclic GFR-binding peptide
RYKKLVKPKRGVFYLVSIANGWFWW

SEQ ID NO: 38670 - protein, 25 aa, Artificial Sequence
  Cyclic GFR-binding peptide
RYKKLIKPTKGIFYLVSIANGWFWW

SEQ ID NO: 38671 - protein, 25 aa, Artificial Sequence
  Cyclic GFR-binding peptide
RYKKLVKPTRGVFYLVSIANGWFWW

SEQ ID NO: 38672 - protein, 25 aa, Artificial Sequence
  Cyclic GFR-binding peptide
RYKKLVVKENEDFYLVSIANGWFWW

SEQ ID NO: 38673 - protein, 25 aa, Artificial Sequence
  Cyclic GFR-binding peptide
RYKKLVVNKNEDFYLVSIANGWFWW

SEQ ID NO: 38674 - protein, 20 aa, Artificial Sequence
  Cyclic GFR-binding peptide
RYKKLGGGYLVSIANPGPTG

SEQ ID NO: 38675 - protein, 21 aa, Artificial Sequence
  Cyclic GFR-binding peptide
RYKKLGGGGYLVSIANPGPTG

SEQ ID NO: 38676 - protein, 18 aa, Artificial Sequence
  Cyclic GFR-binding peptide
GGGRYKKLGGGYLVSIAN

SEQ ID NO: 38677 - protein, 27 aa, Artificial Sequence
  Cyclic GFR-binding peptide
HPKIRRYKKLHQGQHPKIRFYLVSIAN

SEQ ID NO: 38678 - protein, 27 aa, Artificial Sequence
  Cyclic GFR-binding peptide
KRVYERYKKLLKPKKRVYEFYLVSIAN

SEQ ID NO: 38679 - protein, 27 aa, Artificial Sequence
  Cyclic GFR-binding peptide
KRVIERYKKLFIPKKRVIEFYLVSIAN

SEQ ID NO: 38680 - protein, 25 aa, Artificial Sequence
  Cyclic GFR-binding peptide
RHKRLVVKENEDYYLVSTASPGPTG

SEQ ID NO: 38681 - protein, 25 aa, Artificial Sequence
  Cyclic GFR-binding peptide
RHKRLVVNKNEDYYLVSTASPGPTG

SEQ ID NO: 38682 - protein, 25 aa, Artificial Sequence
  Cyclic GFR-binding peptide
RHKRLVVKDYEDYYLVSTASPGPTG

SEQ ID NO: 38683 - protein, 25 aa, Artificial Sequence
  Cyclic GFR-binding peptide
RHKRLTPVGMDDYYLVSTASPGPTG

SEQ ID NO: 38684 - protein, 25 aa, Artificial Sequence
  Cyclic GFR-binding peptide
RHKRLYTVVGKDYYLVSTASPGPTG

SEQ ID NO: 38685 - protein, 25 aa, Artificial Sequence
  Cyclic GFR-binding peptide
RHKRLIIQQKDNYYLVSTASPGPTG

SEQ ID NO: 38686 - protein, 25 aa, Artificial Sequence
  Cyclic GFR-binding peptide
RHKRLVVNNAADYYLVSTASGWFWW

SEQ ID NO: 38687 - protein, 25 aa, Artificial Sequence
  Cyclic GFR-binding peptide
RHKRLVVNNASDYYLVSTASGWFWW

SEQ ID NO: 38688 - protein, 25 aa, Artificial Sequence
  Cyclic GFR-binding peptide
RHKRLLLVRGNDYYLVSTASGWFWW

SEQ ID NO: 38689 - protein, 25 aa, Artificial Sequence
  Cyclic GFR-binding peptide
RHKRLVKPKRGVYYLVSTASGWFWW

SEQ ID NO: 38690 - protein, 25 aa, Artificial Sequence
  Cyclic GFR-binding peptide
RHKRLIKPTKGIYYLVSTASGWFWW

SEQ ID NO: 38691 - protein, 25 aa, Artificial Sequence
  Cyclic GFR-binding peptide
RHKRLVKPTRGVYYLVSTASGWFWW

SEQ ID NO: 38692 - protein, 25 aa, Artificial Sequence
  Cyclic GFR-binding peptide
RHKRLVVKENEDYYLVSTASGWFWW

SEQ ID NO: 38693 - protein, 21 aa, Artificial Sequence
  Cyclic GFR-binding peptide
RHKRLGGGYYLVSTASPGPTG

SEQ ID NO: 38694 - protein, 22 aa, Artificial Sequence
  Cyclic GFR-binding peptide
RHKRLGGGGYYLVSTASPGPTG

SEQ ID NO: 38695 - protein, 25 aa, Artificial Sequence
  Cyclic GFR-binding peptide
PTRGVRHKRLVKPTRGVYYLVSTAS

SEQ ID NO: 38696 - protein, 27 aa, Artificial Sequence
  Cyclic GFR-binding peptide
HPKIRRHKRLHQGQHPKIRYYLVSTAS

SEQ ID NO: 38697 - protein, 27 aa, Artificial Sequence
  Cyclic GFR-binding peptide
KRVYERHKRLLKPKKRVYEYYLVSTAS

SEQ ID NO: 38698 - protein, 27 aa, Artificial Sequence
  Cyclic GFR-binding peptide
KRVIERHKRLFIPKKRVIEYYLVSTAS

SEQ ID NO: 38699 - protein, 25 aa, Artificial Sequence
  Cyclic GFR-binding peptide
YHYKLVVKENEDKYLVSIPSPGPTG

SEQ ID NO: 38700 - protein, 25 aa, Artificial Sequence
  Cyclic GFR-binding peptide
YHYKLVVNKNEDKYLVSIPSPGPTG

SEQ ID NO: 38701 - protein, 25 aa, Artificial Sequence
  Cyclic GFR-binding peptide
YHYKLVVKDYEDKYLVSIPSPGPTG

SEQ ID NO: 38702 - protein, 25 aa, Artificial Sequence
  Cyclic GFR-binding peptide
YHYKLIVNSSDDKYLVSIPSPGPTG

SEQ ID NO: 38703 - protein, 25 aa, Artificial Sequence
  Cyclic GFR-binding peptide
YHYKLIVNNSSDKYLVSIPSPGPTG

SEQ ID NO: 38704 - protein, 25 aa, Artificial Sequence
  Cyclic GFR-binding peptide
YHYKLYTVVGKDKYLVSIPSPGPTG

SEQ ID NO: 38705 - protein, 25 aa, Artificial Sequence
  Cyclic GFR-binding peptide
YHYKLIIQQKDNKYLVSIPSPGPTG

SEQ ID NO: 38706 - protein, 25 aa, Artificial Sequence
  Cyclic GFR-binding peptide
YHYKLVVNNAADKYLVSIPSGWFWW

SEQ ID NO: 38707 - protein, 25 aa, Artificial Sequence
  Cyclic GFR-binding peptide
YHYKLVVNNASDKYLVSIPSGWFWW

SEQ ID NO: 38708 - protein, 25 aa, Artificial Sequence
  Cyclic GFR-binding peptide
YHYKLLLVRGNDKYLVSIPSGWFWW

SEQ ID NO: 38709 - protein, 25 aa, Artificial Sequence
  Cyclic GFR-binding peptide
YHYKLVKPKRGVKYLVSIPSGWFWW

SEQ ID NO: 38710 - protein, 25 aa, Artificial Sequence
  Cyclic GFR-binding peptide
YHYKLIKPTKGIKYLVSIPSGWFWW

SEQ ID NO: 38711 - protein, 25 aa, Artificial Sequence
  Cyclic GFR-binding peptide
YHYKLVKPTRGVKYLVSIPSGWFWW

SEQ ID NO: 38712 - protein, 25 aa, Artificial Sequence
  Cyclic GFR-binding peptide
YHYKLVVKENEDKYLVSIPSGWFWW

SEQ ID NO: 38713 - protein, 20 aa, Artificial Sequence
  Cyclic GFR-binding peptide
YHYKLGGGYLVSIPSPGPTG

SEQ ID NO: 38714 - protein, 21 aa, Artificial Sequence
  Cyclic GFR-binding peptide
YHYKLGGGGYLVSIPSPGPTG

SEQ ID NO: 38715 - protein, 18 aa, Artificial Sequence
  Cyclic GFR-binding peptide
GGGYHYKLGGGYLVSIPS

SEQ ID NO: 38716 - protein, 25 aa, Artificial Sequence
  Cyclic GFR-binding peptide
PTRGVYHYKLVKPTRGVKYLVSIPS

SEQ ID NO: 38717 - protein, 27 aa, Artificial Sequence
  Cyclic GFR-binding peptide
HPKIRYHYKLHQGQHPKIRKYLVSIPS

SEQ ID NO: 38718 - protein, 27 aa, Artificial Sequence
  Cyclic GFR-binding peptide
KRVYEYHYKLLKPKKRVYEKYLVSIPS

SEQ ID NO: 38719 - protein, 27 aa, Artificial Sequence
  Cyclic GFR-binding peptide
KRVIEYHYKLFIPKKRVIEKYLVSIPS

SEQ ID NO: 38720 - protein, 25 aa, Artificial Sequence
  Cyclic GFR-binding peptide
EYKFKVVKENEDLYLISIPEPGPTG

SEQ ID NO: 38721 - protein, 25 aa, Artificial Sequence
  Cyclic GFR-binding peptide
EYKFKVVNKNEDLYLISIPEPGPTG

SEQ ID NO: 38722 - protein, 25 aa, Artificial Sequence
  Cyclic GFR-binding peptide
EYKFKVVKDYEDLYLISIPEPGPTG

SEQ ID NO: 38723 - protein, 25 aa, Artificial Sequence
  Cyclic GFR-binding peptide
EYKFKIVNSSDDLYLISIPEPGPTG

SEQ ID NO: 38724 - protein, 25 aa, Artificial Sequence
  Cyclic GFR-binding peptide
EYKFKIVNNSSDLYLISIPEPGPTG

SEQ ID NO: 38725 - protein, 25 aa, Artificial Sequence
  Cyclic GFR-binding peptide
EYKFKTPVGMDDLYLISIPEPGPTG

SEQ ID NO: 38726 - protein, 25 aa, Artificial Sequence
  Cyclic GFR-binding peptide
EYKFKIIQQKDNLYLISIPEPGPTG

SEQ ID NO: 38727 - protein, 25 aa, Artificial Sequence
  Cyclic GFR-binding peptide
EYKFKVVNNAADLYLISIPEGWFWW

SEQ ID NO: 38728 - protein, 25 aa, Artificial Sequence
  Cyclic GFR-binding peptide
EYKFKVVNNASDLYLISIPEGWFWW

SEQ ID NO: 38729 - protein, 25 aa, Artificial Sequence
  Cyclic GFR-binding peptide
EYKFKLLVRGNDLYLISIPEGWFWW

SEQ ID NO: 38730 - protein, 25 aa, Artificial Sequence
  Cyclic GFR-binding peptide
EYKFKVKPKRGVLYLISIPEGWFWW

SEQ ID NO: 38731 - protein, 25 aa, Artificial Sequence
  Cyclic GFR-binding peptide
EYKFKIKPTKGILYLISIPEGWFWW

SEQ ID NO: 38732 - protein, 25 aa, Artificial Sequence
  Cyclic GFR-binding peptide
EYKFKVKPTRGVLYLISIPEGWFWW

SEQ ID NO: 38733 - protein, 25 aa, Artificial Sequence
  Cyclic GFR-binding peptide
EYKFKVVKENEDLYLISIPEGWFWW

SEQ ID NO: 38734 - protein, 19 aa, Artificial Sequence
  Cyclic GFR-binding peptide
GGGEYKFKGGGLYLISIPE

SEQ ID NO: 38735 - protein, 25 aa, Artificial Sequence
  Cyclic GFR-binding peptide
PTRGVEYKFKVKPTRGVLYLISIPE

SEQ ID NO: 38736 - protein, 27 aa, Artificial Sequence
  Cyclic GFR-binding peptide
HPKIREYKFKHQGQHPKIRLYLISIPE

SEQ ID NO: 38737 - protein, 27 aa, Artificial Sequence
  Cyclic GFR-binding peptide
KRVYEEYKFKLKPKKRVYELYLISIPE

SEQ ID NO: 38738 - protein, 27 aa, Artificial Sequence
  Cyclic GFR-binding peptide
KRVIEEYKFKFIPKKRVIELYLISIPE

SEQ ID NO: 38739 - protein, 25 aa, Artificial Sequence
  Cyclic GFR-binding peptide
PIKGYVVKENEDFYLMNIPSPGPTG

SEQ ID NO: 38740 - protein, 25 aa, Artificial Sequence
  Cyclic GFR-binding peptide
PIKGYVVNKNEDFYLMNIPSPGPTG

SEQ ID NO: 38741 - protein, 25 aa, Artificial Sequence
  Cyclic GFR-binding peptide
PIKGYVVKDYEDFYLMNIPSPGPTG

SEQ ID NO: 38742 - protein, 25 aa, Artificial Sequence
  Cyclic GFR-binding peptide
PIKGYIVNSSDDFYLMNIPSPGPTG

SEQ ID NO: 38743 - protein, 25 aa, Artificial Sequence
  Cyclic GFR-binding peptide
PIKGYIVNNSSDFYLMNIPSPGPTG

SEQ ID NO: 38744 - protein, 25 aa, Artificial Sequence
  Cyclic GFR-binding peptide
PIKGYTPVGMDDFYLMNIPSPGPTG

SEQ ID NO: 38745 - protein, 25 aa, Artificial Sequence
  Cyclic GFR-binding peptide
PIKGYYTVVGKDFYLMNIPSPGPTG

SEQ ID NO: 38746 - protein, 25 aa, Artificial Sequence
  Cyclic GFR-binding peptide
PIKGYVVNNAADFYLMNIPSGWFWW

SEQ ID NO: 38747 - protein, 25 aa, Artificial Sequence
  Cyclic GFR-binding peptide
PIKGYVVNNASDFYLMNIPSGWFWW

SEQ ID NO: 38748 - protein, 25 aa, Artificial Sequence
  Cyclic GFR-binding peptide
PIKGYLLVRGNDFYLMNIPSGWFWW

SEQ ID NO: 38749 - protein, 25 aa, Artificial Sequence
  Cyclic GFR-binding peptide
PIKGYVKPKRGVFYLMNIPSGWFWW

SEQ ID NO: 38750 - protein, 25 aa, Artificial Sequence
  Cyclic GFR-binding peptide
PIKGYIKPTKGIFYLMNIPSGWFWW

SEQ ID NO: 38751 - protein, 25 aa, Artificial Sequence
  Cyclic GFR-binding peptide
PIKGYVKPTRGVFYLMNIPSGWFWW

SEQ ID NO: 38752 - protein, 25 aa, Artificial Sequence
  Cyclic GFR-binding peptide
PIKGYVVKENEDFYLMNIPSGWFWW

SEQ ID NO: 38753 - protein, 21 aa, Artificial Sequence
  Cyclic GFR-binding peptide
PIKGYGGGFYLMNIPSPGPTG

SEQ ID NO: 38754 - protein, 22 aa, Artificial Sequence
  Cyclic GFR-binding peptide
PIKGYGGGGFYLMNIPSPGPTG

SEQ ID NO: 38755 - protein, 19 aa, Artificial Sequence
  Cyclic GFR-binding peptide
GGGPIKGYGGGFYLMNIPS

SEQ ID NO: 38756 - protein, 25 aa, Artificial Sequence
  Cyclic GFR-binding peptide
PTKGIPIKGYIKPTKGIFYLMNIPS

SEQ ID NO: 38757 - protein, 25 aa, Artificial Sequence
  Cyclic GFR-binding peptide
PTRGVPIKGYVKPTRGVFYLMNIPS

SEQ ID NO: 38758 - protein, 27 aa, Artificial Sequence
  Cyclic GFR-binding peptide
HPKIRPIKGYHQGQHPKIRFYLMNIPS

SEQ ID NO: 38759 - protein, 27 aa, Artificial Sequence
  Cyclic GFR-binding peptide
KRVYEPIKGYLKPKKRVYEFYLMNIPS

SEQ ID NO: 38760 - protein, 27 aa, Artificial Sequence
  Cyclic GFR-binding peptide
KRVIEPIKGYFIPKKRVIEFYLMNIPS

SEQ ID NO: 38761 - protein, 25 aa, Artificial Sequence
  Cyclic GFR-binding peptide
EYQKYVVKENEDIYLISIPSPGPTG

SEQ ID NO: 38762 - protein, 25 aa, Artificial Sequence
  Cyclic GFR-binding peptide
EYQKYVVNKNEDIYLISIPSPGPTG

SEQ ID NO: 38763 - protein, 25 aa, Artificial Sequence
  Cyclic GFR-binding peptide
EYQKYVVKDYEDIYLISIPSPGPTG

SEQ ID NO: 38764 - protein, 25 aa, Artificial Sequence
  Cyclic GFR-binding peptide
EYQKYIVNSSDDIYLISIPSPGPTG

SEQ ID NO: 38765 - protein, 25 aa, Artificial Sequence
  Cyclic GFR-binding peptide
EYQKYIVNNSSDIYLISIPSPGPTG

SEQ ID NO: 38766 - protein, 25 aa, Artificial Sequence
  Cyclic GFR-binding peptide
EYQKYTPVGMDDIYLISIPSPGPTG

SEQ ID NO: 38767 - protein, 25 aa, Artificial Sequence
  Cyclic GFR-binding peptide
EYQKYYTVVGKDIYLISIPSPGPTG

SEQ ID NO: 38768 - protein, 25 aa, Artificial Sequence
  Cyclic GFR-binding peptide
EYQKYIIQQKDNIYLISIPSGWFWW

SEQ ID NO: 38769 - protein, 25 aa, Artificial Sequence
  Cyclic GFR-binding peptide
EYQKYVVNNASDIYLISIPSGWFWW

SEQ ID NO: 38770 - protein, 25 aa, Artificial Sequence
  Cyclic GFR-binding peptide
EYQKYLLVRGNDIYLISIPSGWFWW

SEQ ID NO: 38771 - protein, 25 aa, Artificial Sequence
  Cyclic GFR-binding peptide
EYQKYVKPKRGVIYLISIPSGWFWW

SEQ ID NO: 38772 - protein, 25 aa, Artificial Sequence
  Cyclic GFR-binding peptide
EYQKYIKPTKGIIYLISIPSGWFWW

SEQ ID NO: 38773 - protein, 25 aa, Artificial Sequence
  Cyclic GFR-binding peptide
EYQKYVKPTRGVIYLISIPSGWFWW

SEQ ID NO: 38774 - protein, 25 aa, Artificial Sequence
  Cyclic GFR-binding peptide
EYQKYVVKENEDIYLISIPSGWFWW

SEQ ID NO: 38775 - protein, 21 aa, Artificial Sequence
  Cyclic GFR-binding peptide
EYQKYGGGIYLISIPSPGPTG

SEQ ID NO: 38776 - protein, 22 aa, Artificial Sequence
  Cyclic GFR-binding peptide
EYQKYGGGGIYLISIPSPGPTG

SEQ ID NO: 38777 - protein, 25 aa, Artificial Sequence
  Cyclic GFR-binding peptide
VVGKDEYQKYYTVVGKDIYLISIPS

SEQ ID NO: 38778 - protein, 25 aa, Artificial Sequence
  Cyclic GFR-binding peptide
QQKDNEYQKYIIQQKDNIYLISIPS

SEQ ID NO: 38779 - protein, 25 aa, Artificial Sequence
  Cyclic GFR-binding peptide
NNASDEYQKYVVNNASDIYLISIPS

SEQ ID NO: 38780 - protein, 25 aa, Artificial Sequence
  Cyclic GFR-binding peptide
VRGNDEYQKYLLVRGNDIYLISIPS

SEQ ID NO: 38781 - protein, 25 aa, Artificial Sequence
  Cyclic GFR-binding peptide
PKRGVEYQKYVKPKRGVIYLISIPS

SEQ ID NO: 38782 - protein, 25 aa, Artificial Sequence
  Cyclic GFR-binding peptide
PTKGIEYQKYIKPTKGIIYLISIPS

SEQ ID NO: 38783 - protein, 25 aa, Artificial Sequence
  Cyclic GFR-binding peptide
PTRGVEYQKYVKPTRGVIYLISIPS

SEQ ID NO: 38784 - protein, 27 aa, Artificial Sequence
  Cyclic GFR-binding peptide
HPKIREYQKYHQGQHPKIRIYLISIPS

SEQ ID NO: 38785 - protein, 19 aa, Artificial Sequence
  Cyclic GFR-binding peptide
GGGEYQKYGGGIYLISIPS

SEQ ID NO: 38786 - protein, 19 aa, Artificial Sequence
  Cyclic GFR-binding peptide
GGGEYQKYGGGIFLISIPS

SEQ ID NO: 38787 - protein, 22 aa, Artificial Sequence
  Cyclic GFR-binding peptide
EYQKYGGGGIFLISIPSPGPTG

SEQ ID NO: 38788 - protein, 22 aa, Artificial Sequence
  Cyclic GFR-binding peptide
EYQKYGGGGIFLISIPSGWFWW

SEQ ID NO: 38789 - protein, 21 aa, Artificial Sequence
  Cyclic GFR-binding peptide
EYQKYGGGIFLISIPSGWFWW

SEQ ID NO: 38790 - protein, 21 aa, Artificial Sequence
  Cyclic GFR-binding peptide
EYQKYGGGIFLISIPSPGPTG

SEQ ID NO: 38791 - protein, 25 aa, Artificial Sequence
  Cyclic GFR-binding peptide
EYQKYLLVRGNDIFLISIPSPGPTG

SEQ ID NO: 38792 - protein, 25 aa, Artificial Sequence
  Cyclic GFR-binding peptide
EYQKYVKPKRGVIFLISIPSPGPTG

SEQ ID NO: 38793 - protein, 25 aa, Artificial Sequence
  Cyclic GFR-binding peptide
EYQKYIKPTKGIIFLISIPSGWFWW

SEQ ID NO: 38794 - protein, 25 aa, Artificial Sequence
  Cyclic GFR-binding peptide
EYQKYVKPTRGVIFLISIPSGWFWW

SEQ ID NO: 38795 - protein, 25 aa, Artificial Sequence
  Cyclic GFR-binding peptide
EYQKYVVNKNEDIFLISIPSPGPTG

SEQ ID NO: 38796 - protein, 25 aa, Artificial Sequence
  Cyclic GFR-binding peptide
EYQKYIVNSSDDIFLISIPSPGPTG

SEQ ID NO: 38797 - protein, 25 aa, Artificial Sequence
  Cyclic GFR-binding peptide
EYQKYIVNNSSDIFLISIPSPGPTG

SEQ ID NO: 38798 - protein, 25 aa, Artificial Sequence
  Cyclic GFR-binding peptide
EYQKYTPVGMDDIFLISIPSGWFWW

SEQ ID NO: 38799 - protein, 25 aa, Artificial Sequence
  Cyclic GFR-binding peptide
EYQKYYTVVGKDIFLISIPSGWFWW

SEQ ID NO: 38800 - protein, 25 aa, Artificial Sequence
  Cyclic GFR-binding peptide
EYQKYIIQQKDNIFLISIPSPGPTG

SEQ ID NO: 38801 - protein, 25 aa, Artificial Sequence
  Cyclic GFR-binding peptide
EYQKYVVNNAADIFLISIPSPGPTG

SEQ ID NO: 38802 - protein, 25 aa, Artificial Sequence
  Cyclic GFR-binding peptide
VRGNDEYQKYLLVRGNDIFLISIPS

SEQ ID NO: 38803 - protein, 25 aa, Artificial Sequence
  Cyclic GFR-binding peptide
PKRGVEYQKYVKPKRGVIFLISIPS

SEQ ID NO: 38804 - protein, 25 aa, Artificial Sequence
  Cyclic GFR-binding peptide
PTKGIEYQKYIKPTKGIIFLISIPS

SEQ ID NO: 38805 - protein, 25 aa, Artificial Sequence
  Cyclic GFR-binding peptide
PTRGVEYQKYVKPTRGVIFLISIPS

SEQ ID NO: 38806 - protein, 27 aa, Artificial Sequence
  Cyclic GFR-binding peptide
HPKIREYQKYHQGQHPKIRIFLISIPS

SEQ ID NO: 38807 - protein, 27 aa, Artificial Sequence
  Cyclic GFR-binding peptide
KRVYEEYQKYLKPKKRVYEIFLISIPS

SEQ ID NO: 38808 - protein, 27 aa, Artificial Sequence
  Cyclic GFR-binding peptide
KRVIEEYQKYFIPKKRVIEIFLISIPS

SEQ ID NO: 38809 - protein, 25 aa, Artificial Sequence
  Cyclic GFR-binding peptide
DKHHDVVKENEDVYLMSLPKPGPTG

SEQ ID NO: 38810 - protein, 25 aa, Artificial Sequence
  Cyclic GFR-binding peptide
DKHHDVVNKNEDVYLMSLPKPGPTG

SEQ ID NO: 38811 - protein, 25 aa, Artificial Sequence
  Cyclic GFR-binding peptide
DKHHDVVKDYEDVYLMSLPKPGPTG

SEQ ID NO: 38812 - protein, 25 aa, Artificial Sequence
  Cyclic GFR-binding peptide
DKHHDIVNSSDDVYLMSLPKPGPTG

SEQ ID NO: 38813 - protein, 25 aa, Artificial Sequence
  Cyclic GFR-binding peptide
DKHHDIVNNSSDVYLMSLPKPGPTG

SEQ ID NO: 38814 - protein, 21 aa, Artificial Sequence
  Cyclic GFR-binding peptide
DKHHDGGGVYLMSLPKPGPTG

SEQ ID NO: 38815 - protein, 22 aa, Artificial Sequence
  Cyclic GFR-binding peptide
DKHHDGGGGVYLMSLPKPGPTG

SEQ ID NO: 38816 - protein, 25 aa, Artificial Sequence
  Cyclic GFR-binding peptide
DKHHDIIQQKDNVYLMSLPKGWFWW

SEQ ID NO: 38817 - protein, 25 aa, Artificial Sequence
  Cyclic GFR-binding peptide
DKHHDVVNNAADVYLMSLPKGWFWW

SEQ ID NO: 38818 - protein, 25 aa, Artificial Sequence
  Cyclic GFR-binding peptide
DKHHDVVNNASDVYLMSLPKGWFWW

SEQ ID NO: 38819 - protein, 21 aa, Artificial Sequence
  Cyclic GFR-binding peptide
DKHHDGGGVYLMSLPKGWFWW

SEQ ID NO: 38820 - protein, 22 aa, Artificial Sequence
  Cyclic GFR-binding peptide
DKHHDGGGGVYLMSLPKGWFWW

SEQ ID NO: 38821 - protein, 25 aa, Artificial Sequence
  Cyclic GFR-binding peptide
DKHHDVKPTRGVVYLMSLPKGWFWW

SEQ ID NO: 38822 - protein, 25 aa, Artificial Sequence
  Cyclic GFR-binding peptide
DKHHDVVKENEDVYLMSLPKGWFWW

SEQ ID NO: 38823 - protein, 19 aa, Artificial Sequence
  Cyclic GFR-binding peptide
GGGDKHHDGGGVYLMSLPK

SEQ ID NO: 38824 - protein, 25 aa, Artificial Sequence
  Cyclic GFR-binding peptide
PTRGVDKHHDVKPTRGVVYLMSLPK

SEQ ID NO: 38825 - protein, 27 aa, Artificial Sequence
  Cyclic GFR-binding peptide
HPKIRDKHHDHQGQHPKIRVYLMSLPK

SEQ ID NO: 38826 - protein, 27 aa, Artificial Sequence
  Cyclic GFR-binding peptide
KRVYEDKHHDLKPKKRVYEVYLMSLPK

SEQ ID NO: 38827 - protein, 27 aa, Artificial Sequence
  Cyclic GFR-binding peptide
KRVIEDKHHDFIPKKRVIEVYLMSLPK

SEQ ID NO: 38828 - protein, 25 aa, Artificial Sequence
  Cyclic GFR-binding peptide
NSLQEVVKENEDYYVIPLPEPGPTG

SEQ ID NO: 38829 - protein, 25 aa, Artificial Sequence
  Cyclic GFR-binding peptide
NSLQEVVNKNEDYYVIPLPEPGPTG

SEQ ID NO: 38830 - protein, 21 aa, Artificial Sequence
  Cyclic GFR-binding peptide
NSLQEGGGYYVIPLPEPGPTG

SEQ ID NO: 38831 - protein, 22 aa, Artificial Sequence
  Cyclic GFR-binding peptide
NSLQEGGGGYYVIPLPEPGPTG

SEQ ID NO: 38832 - protein, 25 aa, Artificial Sequence
  Cyclic GFR-binding peptide
NSLQEIVNSSDDYYVIPLPEPGPTG

SEQ ID NO: 38833 - protein, 25 aa, Artificial Sequence
  Cyclic GFR-binding peptide
NSLQEIVNNSSDYYVIPLPEPGPTG

SEQ ID NO: 38834 - protein, 25 aa, Artificial Sequence
  Cyclic GFR-binding peptide
NSLQETPVGMDDYYVIPLPEPGPTG

SEQ ID NO: 38835 - protein, 25 aa, Artificial Sequence
  Cyclic GFR-binding peptide
NSLQEYTVVGKDYYVIPLPEPGPTG

SEQ ID NO: 38836 - protein, 25 aa, Artificial Sequence
  Cyclic GFR-binding peptide
NSLQEIIQQKDNYYVIPLPEGWFWW

SEQ ID NO: 38837 - protein, 25 aa, Artificial Sequence
  Cyclic GFR-binding peptide
NSLQEVVNNAADYYVIPLPEGWFWW

SEQ ID NO: 38838 - protein, 21 aa, Artificial Sequence
  Cyclic GFR-binding peptide
NSLQEGGGYYVIPLPEGWFWW

SEQ ID NO: 38839 - protein, 22 aa, Artificial Sequence
  Cyclic GFR-binding peptide
NSLQEGGGGYYVIPLPEGWFWW

SEQ ID NO: 38840 - protein, 25 aa, Artificial Sequence
  Cyclic GFR-binding peptide
NSLQEIKPTKGIYYVIPLPEGWFWW

SEQ ID NO: 38841 - protein, 25 aa, Artificial Sequence
  Cyclic GFR-binding peptide
NSLQEVKPTRGVYYVIPLPEGWFWW

SEQ ID NO: 38842 - protein, 25 aa, Artificial Sequence
  Cyclic GFR-binding peptide
NSLQEVVKENEDYYVIPLPEGWFWW

SEQ ID NO: 38843 - protein, 25 aa, Artificial Sequence
  Cyclic GFR-binding peptide
NSLQEVVKDYEDYYVIPLPEPGPTG

SEQ ID NO: 38844 - protein, 25 aa, Artificial Sequence
  Cyclic GFR-binding peptide
VVGKDNSLQEYTVVGKDYYVIPLPE

SEQ ID NO: 38845 - protein, 25 aa, Artificial Sequence
  Cyclic GFR-binding peptide
QQKDNNSLQEIIQQKDNYYVIPLPE

SEQ ID NO: 38846 - protein, 25 aa, Artificial Sequence
  Cyclic GFR-binding peptide
NNAADNSLQEVVNNAADYYVIPLPE

SEQ ID NO: 38847 - protein, 25 aa, Artificial Sequence
  Cyclic GFR-binding peptide
NNASDNSLQEVVNNASDYYVIPLPE

SEQ ID NO: 38848 - protein, 19 aa, Artificial Sequence
  Cyclic GFR-binding peptide
GGGNSLQEGGGYYVIPLPE

SEQ ID NO: 38849 - protein, 25 aa, Artificial Sequence
  Cyclic GFR-binding peptide
NSLQEVVKENEDYYLITLPEPGPTG

SEQ ID NO: 38850 - protein, 25 aa, Artificial Sequence
  Cyclic GFR-binding peptide
NSLQEVVNKNEDYYLITLPEPGPTG

SEQ ID NO: 38851 - protein, 25 aa, Artificial Sequence
  Cyclic GFR-binding peptide
NSLQEVVKDYEDYYLITLPEPGPTG

SEQ ID NO: 38852 - protein, 21 aa, Artificial Sequence
  Cyclic GFR-binding peptide
NSLQEGGGYYLITLPEPGPTG

SEQ ID NO: 38853 - protein, 22 aa, Artificial Sequence
  Cyclic GFR-binding peptide
NSLQEGGGGYYLITLPEPGPTG

SEQ ID NO: 38854 - protein, 25 aa, Artificial Sequence
  Cyclic GFR-binding peptide
NSLQEIVNNSSDYYLITLPEPGPTG

SEQ ID NO: 38855 - protein, 25 aa, Artificial Sequence
  Cyclic GFR-binding peptide
NSLQETPVGMDDYYLITLPEPGPTG

SEQ ID NO: 38856 - protein, 25 aa, Artificial Sequence
  Cyclic GFR-binding peptide
NSLQEYTVVGKDYYLITLPEPGPTG

SEQ ID NO: 38857 - protein, 25 aa, Artificial Sequence
  Cyclic GFR-binding peptide
NSLQEIIQQKDNYYLITLPEGWFWW

SEQ ID NO: 38858 - protein, 25 aa, Artificial Sequence
  Cyclic GFR-binding peptide
NSLQEVVNNAADYYLITLPEGWFWW

SEQ ID NO: 38859 - protein, 25 aa, Artificial Sequence
  Cyclic GFR-binding peptide
NSLQEVVNNASDYYLITLPEGWFWW

SEQ ID NO: 38860 - protein, 21 aa, Artificial Sequence
  Cyclic GFR-binding peptide
NSLQEGGGYYLITLPEGWFWW

SEQ ID NO: 38861 - protein, 22 aa, Artificial Sequence
  Cyclic GFR-binding peptide
NSLQEGGGGYYLITLPEGWFWW

SEQ ID NO: 38862 - protein, 25 aa, Artificial Sequence
  Cyclic GFR-binding peptide
NSLQEVKPTRGVYYLITLPEGWFWW

SEQ ID NO: 38863 - protein, 25 aa, Artificial Sequence
  Cyclic GFR-binding peptide
NSLQEVVKENEDYYLITLPEGWFWW

SEQ ID NO: 38864 - protein, 25 aa, Artificial Sequence
  Cyclic GFR-binding peptide
NSLQEIVNSSDDYYLITLPEPGPTG

SEQ ID NO: 38865 - protein, 25 aa, Artificial Sequence
  Cyclic GFR-binding peptide
VVGKDNSLQEYTVVGKDYYLITLPE

SEQ ID NO: 38866 - protein, 25 aa, Artificial Sequence
  Cyclic GFR-binding peptide
QQKDNNSLQEIIQQKDNYYLITLPE

SEQ ID NO: 38867 - protein, 25 aa, Artificial Sequence
  Cyclic GFR-binding peptide
NNAADNSLQEVVNNAADYYLITLPE

SEQ ID NO: 38868 - protein, 25 aa, Artificial Sequence
  Cyclic GFR-binding peptide
NNASDNSLQEVVNNASDYYLITLPE

SEQ ID NO: 38869 - protein, 25 aa, Artificial Sequence
  Cyclic GFR-binding peptide
VRGNDNSLQELLVRGNDYYLITLPE

SEQ ID NO: 38870 - protein, 19 aa, Artificial Sequence
  Cyclic GFR-binding peptide
GGGNSLQEGGGYYLITLPE

SEQ ID NO: 38871 - protein, 25 aa, Artificial Sequence
  Cyclic GFR-binding peptide
NSLQEIIQQKDNYYLITLPEPGPTG

SEQ ID NO: 38872 - protein, 25 aa, Artificial Sequence
  Cyclic GFR-binding peptide
NSLQEIKPTKGIYYLITLPEGWFWW

SEQ ID NO: 38873 - protein, 25 aa, Artificial Sequence
  Cyclic GFR-binding peptide
NSLQEVVNKNEDYYLITLPEGWFWW

SEQ ID NO: 38874 - protein, 27 aa, Artificial Sequence
  Cyclic GFR-binding peptide
HPKIRNSLQEHQGQHPKIRYYLITLPE

SEQ ID NO: 38875 - protein, 27 aa, Artificial Sequence
  Cyclic GFR-binding peptide
KRVYENSLQELKPKKRVYEYYLITLPE

SEQ ID NO: 38876 - protein, 27 aa, Artificial Sequence
  Cyclic GFR-binding peptide
KRVIENSLQEFIPKKRVIEYYLITLPE

SEQ ID NO: 38877 - protein, 27 aa, Artificial Sequence
  Cyclic GFR-binding peptide
SMEGIHQGQHPKIRMIQMTINSPGPTG

SEQ ID NO: 38878 - protein, 25 aa, Artificial Sequence
  Cyclic GFR-binding peptide
SMEGIVVKENEDMIQMTINSPGPTG

SEQ ID NO: 38879 - protein, 20 aa, Artificial Sequence
  Cyclic GFR-binding peptide
SMEGIGGGIQMTINSPGPTG

SEQ ID NO: 38880 - protein, 21 aa, Artificial Sequence
  Cyclic GFR-binding peptide
SMEGIGGGGIQMTINSPGPTG

SEQ ID NO: 38881 - protein, 25 aa, Artificial Sequence
  Cyclic GFR-binding peptide
SMEGIIVNSSDDMIQMTINSPGPTG

SEQ ID NO: 38882 - protein, 25 aa, Artificial Sequence
  Cyclic GFR-binding peptide
SMEGIIVNNSSDMIQMTINSPGPTG

SEQ ID NO: 38883 - protein, 25 aa, Artificial Sequence
  Cyclic GFR-binding peptide
SMEGITPVGMDDMIQMTINSPGPTG

SEQ ID NO: 38884 - protein, 20 aa, Artificial Sequence
  Cyclic GFR-binding peptide
SMEGIGGGIQMTINSGWFWW

SEQ ID NO: 38885 - protein, 21 aa, Artificial Sequence
  Cyclic GFR-binding peptide
SMEGIGGGGIQMTINSGWFWW

SEQ ID NO: 38886 - protein, 25 aa, Artificial Sequence
  Cyclic GFR-binding peptide
SMEGIVVNNAADMIQMTINSGWFWW

SEQ ID NO: 38887 - protein, 25 aa, Artificial Sequence
  Cyclic GFR-binding peptide
SMEGIVVNNASDMIQMTINSGWFWW

SEQ ID NO: 38888 - protein, 25 aa, Artificial Sequence
  Cyclic GFR-binding peptide
SMEGILLVRGNDMIQMTINSGWFWW

SEQ ID NO: 38889 - protein, 25 aa, Artificial Sequence
  Cyclic GFR-binding peptide
SMEGIVKPKRGVMIQMTINSGWFWW

SEQ ID NO: 38890 - protein, 25 aa, Artificial Sequence
  Cyclic GFR-binding peptide
SMEGIIKPTKGIMIQMTINSGWFWW

SEQ ID NO: 38891 - protein, 25 aa, Artificial Sequence
  Cyclic GFR-binding peptide
SMEGIVKPTRGVMIQMTINSPGPTG

SEQ ID NO: 38892 - protein, 27 aa, Artificial Sequence
  Cyclic GFR-binding peptide
SMEGILKPKKRVYEMIQMTINSPGPTG

SEQ ID NO: 38893 - protein, 27 aa, Artificial Sequence
  Cyclic GFR-binding peptide
SMEGIFIPKKRVIEMIQMTINSPGPTG

SEQ ID NO: 38894 - protein, 21 aa, Artificial Sequence
  Cyclic GFR-binding peptide
SMEGLGGGMIQMTINSPGPTG

SEQ ID NO: 38895 - protein, 22 aa, Artificial Sequence
  Cyclic GFR-binding peptide
SMEGLGGGGMIQMTINSPGPTG

SEQ ID NO: 38896 - protein, 25 aa, Artificial Sequence
  Cyclic GFR-binding peptide
NKNEDSMEGLVVNKNEDMIQMTINS

SEQ ID NO: 38897 - protein, 25 aa, Artificial Sequence
  Cyclic GFR-binding peptide
KDYEDSMEGLVVKDYEDMIQMTINS

SEQ ID NO: 38898 - protein, 25 aa, Artificial Sequence
  Cyclic GFR-binding peptide
NSSDDSMEGLIVNSSDDMIQMTINS

SEQ ID NO: 38899 - protein, 25 aa, Artificial Sequence
  Cyclic GFR-binding peptide
NNSSDSMEGLIVNNSSDMIQMTINS

SEQ ID NO: 38900 - protein, 25 aa, Artificial Sequence
  Cyclic GFR-binding peptide
VGMDDSMEGLTPVGMDDMIQMTINS

SEQ ID NO: 38901 - protein, 25 aa, Artificial Sequence
  Cyclic GFR-binding peptide
VVGKDSMEGLYTVVGKDMIQMTINS

SEQ ID NO: 38902 - protein, 25 aa, Artificial Sequence
  Cyclic GFR-binding peptide
QQKDNSMEGLIIQQKDNMIQMTINS

SEQ ID NO: 38903 - protein, 19 aa, Artificial Sequence
  Cyclic GFR-binding peptide
GGGSMEGLGGGMIQMTINS

SEQ ID NO: 38904 - protein, 27 aa, Artificial Sequence
  Cyclic GFR-binding peptide
VQVEKFIPKKRVIEVKAVKVSRPGPTG

SEQ ID NO: 38905 - protein, 21 aa, Artificial Sequence
  Cyclic GFR-binding peptide
VQVEKGGGVKAVKVSRPGPTG

SEQ ID NO: 38906 - protein, 25 aa, Artificial Sequence
  Cyclic GFR-binding peptide
VQVEKVVNKNEDVKAVKVSRPGPTG

SEQ ID NO: 38907 - protein, 25 aa, Artificial Sequence
  Cyclic GFR-binding peptide
VQVEKVVKDYEDVKAVKVSRPGPTG

SEQ ID NO: 38908 - protein, 25 aa, Artificial Sequence
  Cyclic GFR-binding peptide
VQVEKIVNSSDDVKAVKVSRGWFWW

SEQ ID NO: 38909 - protein, 22 aa, Artificial Sequence
  Cyclic GFR-binding peptide
VQVEKGGGGVKAVKVSRGWFWW

SEQ ID NO: 38910 - protein, 25 aa, Artificial Sequence
  Cyclic GFR-binding peptide
VQVEKIVNNSSDVKAVKVSRGWFWW

SEQ ID NO: 38911 - protein, 25 aa, Artificial Sequence
  Cyclic GFR-binding peptide
VQVEKTPVGMDDVKAVKVSRGWFWW

SEQ ID NO: 38912 - protein, 25 aa, Artificial Sequence
  Cyclic GFR-binding peptide
VQVEKIIQQKDNVKAVKVSRPGPTG

SEQ ID NO: 38913 - protein, 25 aa, Artificial Sequence
  Cyclic GFR-binding peptide
VQVEKVVNNAADVKAVKVSRPGPTG

SEQ ID NO: 38914 - protein, 19 aa, Artificial Sequence
  Cyclic GFR-binding peptide
GGGVQVEKGGGVKAVKVSR

SEQ ID NO: 38915 - protein, 25 aa, Artificial Sequence
  Cyclic GFR-binding peptide
PTRGVVQVEKVKPTRGVVKAVKVSR

SEQ ID NO: 38916 - protein, 27 aa, Artificial Sequence
  Cyclic GFR-binding peptide
HPKIRVQVEKHQGQHPKIRVKAVKVSR

SEQ ID NO: 38917 - protein, 27 aa, Artificial Sequence
  Cyclic GFR-binding peptide
KRVIEVQVEKFIPKKRVIEVKAVKVSR

SEQ ID NO: 38918 - protein, 27 aa, Artificial Sequence
  Cyclic GFR-binding peptide
VTAKKLKPKKRVYEIKRVQVPRPGPTG

SEQ ID NO: 38919 - protein, 25 aa, Artificial Sequence
  Cyclic GFR-binding peptide
VTAKKVVKENEDIKRVQVPRPGPTG

SEQ ID NO: 38920 - protein, 25 aa, Artificial Sequence
  Cyclic GFR-binding peptide
VTAKKVVNKNEDIKRVQVPRPGPTG

SEQ ID NO: 38921 - protein, 25 aa, Artificial Sequence
  Cyclic GFR-binding peptide
VTAKKVVKDYEDIKRVQVPRPGPTG

SEQ ID NO: 38922 - protein, 25 aa, Artificial Sequence
  Cyclic GFR-binding peptide
VTAKKIVNSSDDIKRVQVPRGWFWW

SEQ ID NO: 38923 - protein, 21 aa, Artificial Sequence
  Cyclic GFR-binding peptide
VTAKKGGGIKRVQVPRGWFWW

SEQ ID NO: 38924 - protein, 22 aa, Artificial Sequence
  Cyclic GFR-binding peptide
VTAKKGGGGIKRVQVPRGWFWW

SEQ ID NO: 38925 - protein, 25 aa, Artificial Sequence
  Cyclic GFR-binding peptide
VTAKKTPVGMDDIKRVQVPRGWFWW

SEQ ID NO: 38926 - protein, 25 aa, Artificial Sequence
  Cyclic GFR-binding peptide
VTAKKYTVVGKDIKRVQVPRPGPTG

SEQ ID NO: 38927 - protein, 21 aa, Artificial Sequence
  Cyclic GFR-binding peptide
VTAKKGGGIKRVQVPRPGPTG

SEQ ID NO: 38928 - protein, 22 aa, Artificial Sequence
  Cyclic GFR-binding peptide
VTAKKGGGGIKRVQVPRPGPTG

SEQ ID NO: 38929 - protein, 25 aa, Artificial Sequence
  Cyclic GFR-binding peptide
NNASDVTAKKVVNNASDIKRVQVPR

SEQ ID NO: 38930 - protein, 25 aa, Artificial Sequence
  Cyclic GFR-binding peptide
VRGNDVTAKKLLVRGNDIKRVQVPR

SEQ ID NO: 38931 - protein, 25 aa, Artificial Sequence
  Cyclic GFR-binding peptide
PKRGVVTAKKVKPKRGVIKRVQVPR

SEQ ID NO: 38932 - protein, 25 aa, Artificial Sequence
  Cyclic GFR-binding peptide
PTKGIVTAKKIKPTKGIIKRVQVPR

SEQ ID NO: 38933 - protein, 19 aa, Artificial Sequence
  Cyclic GFR-binding peptide
GGGVTAKKGGGIKRVQVPR

SEQ ID NO: 38934 - protein, 28 aa, Artificial Sequence
  Cyclic GFR-binding peptide
  MOD_RES (1)..(1): Xaa is C or S
XSRVVMNQYNKLIVNSSDDLYLVSIASL

SEQ ID NO: 38935 - protein, 38 aa, Artificial Sequence; identical to SEQ ID NO: 2308
  Cyclic GFR-binding peptide
  MOD_RES (32)..(33): Xaa is C or S

SEQ ID NO: 38936 - protein, 35 aa, Artificial Sequence
  Cyclic GFR-binding peptide
  MOD_RES (2)..(4): Xaa is C or S
RXGXEAVSMGERHKRLTPVGMDDYYLVSTASLKTP

SEQ ID NO: 38937 - protein, 27 aa, Artificial Sequence
  Cyclic GFR-binding peptide
VMNYHYKLIVNSSDDKYLVSIPSLKTP

SEQ ID NO: 38938 - protein, 35 aa, Artificial Sequence; identical to SEQ ID NO: 2309
  Cyclic GFR-binding peptide
  MOD_RES (2)..(4): Xaa is C or S

SEQ ID NO: 38939 - protein, 29 aa, Artificial Sequence
  Cyclic GFR-binding peptide
  MOD_RES (26)..(27): Xaa is C or S
RHKRLVVKDYEDYYLMSTASLETPVXXAK

SEQ ID NO: 38940 - protein, 24 aa, Artificial Sequence
  Cyclic GFR-binding peptide
MRYKKLIKPTKGIFYLISIANLDQ

SEQ ID NO: 38941 - protein, 29 aa, Artificial Sequence
  Cyclic GFR-binding peptide
  MOD_RES (1)..(1): Xaa is C or S
XSKVVMRYKKLVKPTRGVFYLISIANLDQ

SEQ ID NO: 38942 - protein, 31 aa, Artificial Sequence
  Cyclic GFR-binding peptide
  MOD_RES (2)..(2): Xaa is C or S
GXGEVVMEYHYKLVVKDYEDKYLMSIPSLET

SEQ ID NO: 38943 - protein, 30 aa, Artificial Sequence
  Cyclic GFR-binding peptide
  MOD_RES (1)..(1): Xaa is C or S
XSRVIMRYKKLVKPKRGVFYLISIANLAQP

SEQ ID NO: 38944 - protein, 25 aa, Artificial Sequence
  Cyclic GFR-binding peptide
QYNKLIKPTKGILYLISIASLDQSV

SEQ ID NO: 38945 - protein, 38 aa, Artificial Sequence; identical to SEQ ID NO: 2314
  Cyclic GFR-binding peptide
  MOD_RES (32)..(32): Xaa is C or S

SEQ ID NO: 38946 - protein, 33 aa, Artificial Sequence; identical to SEQ ID NO: 2315
  Cyclic GFR-binding peptide
  MOD_RES (2)..(2): Xaa is C or S

SEQ ID NO: 38947 - protein, 28 aa, Artificial Sequence
  Cyclic GFR-binding peptide
RVIMRYKKLVKPKRGVFYLISIANLAQP

SEQ ID NO: 38948 - protein, 26 aa, Artificial Sequence
  Cyclic GFR-binding peptide
SKVIMQYNKLIKPTKGILYLISIASL

SEQ ID NO: 38949 - protein, 25 aa, Artificial Sequence
  Cyclic GFR-binding peptide
VVMDRYKKLVVKENEDFYLMSIANL

SEQ ID NO: 38950 - protein, 33 aa, Artificial Sequence
  Cyclic GFR-binding peptide
  MOD_RES (2)..(4): Xaa is C or S
HXGXARVVMNQYNKLIVNSSDDLYLVSIASLQT

SEQ ID NO: 38951 - protein, 36 aa, Artificial Sequence; identical to SEQ ID NO: 2318
  Cyclic GFR-binding peptide
  MOD_RES (1)..(33)..(34): Xaa is C or S

SEQ ID NO: 38952 - protein, 25 aa, Artificial Sequence
  Cyclic GFR-binding peptide
VMNRHKRLIVNSSDDYYLVSTASLK

SEQ ID NO: 38953 - protein, 32 aa, Artificial Sequence; identical to SEQ ID NO: 2319
  Cyclic GFR-binding peptide
  MOD_RES (1)..(32): Xaa is C or S

SEQ ID NO: 38954 - protein, 27 aa, Artificial Sequence
  Cyclic GFR-binding peptide
  MOD_RES (27)..(27): Xaa is C or S
NRYKKLIVNNSSDFYLVSIANLKTPAX

SEQ ID NO: 38955 - protein, 38 aa, Artificial Sequence; identical to SEQ ID NO: 2321
  Cyclic GFR-binding peptide
  MOD_RES (1)..(3)..(34)..(35): Xaa is C or S

SEQ ID NO: 38956 - protein, 24 aa, Artificial Sequence
  Cyclic GFR-binding peptide
RHKRLFIPKKRVIEYYLVSTASLQ

SEQ ID NO: 38957 - protein, 27 aa, Artificial Sequence
  Cyclic GFR-binding peptide
IVNNSSDQYNKLIVNNSSDLYLVSIAS

SEQ ID NO: 38958 - protein, 38 aa, Artificial Sequence; identical to SEQ ID NO: 2324
  Cyclic GFR-binding peptide
  MOD_RES (32)..(33): Xaa is C or S

SEQ ID NO: 38959 - protein, 22 aa, Artificial Sequence
  Cyclic GFR-binding peptide
MRYKKLVKPKRGVFYLISIANL

SEQ ID NO: 38960 - protein, 35 aa, Artificial Sequence; identical to SEQ ID NO: 2325
  Cyclic GFR-binding peptide
  MOD_RES (31)..(32): Xaa is C or S

SEQ ID NO: 38961 - protein, 34 aa, Artificial Sequence
  Cyclic GFR-binding peptide
  MOD_RES (1)..(3): Xaa is C or S
XGXEAVSMGERYKKLTPVGMDDFYLVSIANLKTP

SEQ ID NO: 38962 - protein, 29 aa, Artificial Sequence
  Cyclic GFR-binding peptide
  MOD_RES (28)..(29): Xaa is C or S
MNRYKKLIVNNSSDFYLVSIANLKTPAXX

SEQ ID NO: 38963 - protein, 32 aa, Artificial Sequence
  Cyclic GFR-binding peptide
  MOD_RES (30)..(31): Xaa is C or S
VVMNRHKRLIVNSSDDYYLVSTASLQTPAXXP

SEQ ID NO: 38964 - protein, 27 aa, Artificial Sequence
  Cyclic GFR-binding peptide
  MOD_RES (26)..(27): Xaa is C or S
RHKRLTPVGMDDYYLVSTASLKTPVXX

SEQ ID NO: 38965 - protein, 35 aa, Artificial Sequence
  Cyclic GFR-binding peptide
  MOD_RES (30)..(31): Xaa is C or S
VVMNRYKKLIVNNSSDFYLVSIANLKTPAXXAKPV

SEQ ID NO: 38966 - protein, 39 aa, Artificial Sequence; identical to SEQ ID NO: 2332
  Cyclic GFR-binding peptide
  MOD_RES (1)..(3)..(35)..(36): Xaa is C or S

SEQ ID NO: 38967 - protein, 35 aa, Artificial Sequence; identical to SEQ ID NO: 2333
  Cyclic GFR-binding peptide
  MOD_RES (1)..(32)..(33): Xaa is C or S

SEQ ID NO: 38968 - protein, 23 aa, Artificial Sequence
  Cyclic GFR-binding peptide
RHKRLVKPTRGVYYLISTASLDQ

SEQ ID NO: 38969 - protein, 32 aa, Artificial Sequence; identical to SEQ ID NO: 2334
  Cyclic GFR-binding peptide
  MOD_RES (31)..(32): Xaa is C or S

SEQ ID NO: 38970 - protein, 31 aa, Artificial Sequence
  Cyclic GFR-binding peptide
  MOD_RES (28)..(29): Xaa is C or S
MNYHYKLIVNSSDDKYLVSIPSLQTPAXXPK

SEQ ID NO: 38971 - protein, 34 aa, Artificial Sequence; identical to SEQ ID NO: 2338
  Cyclic GFR-binding peptide
  MOD_RES (32)..(33): Xaa is C or S

SEQ ID NO: 38972 - protein, 28 aa, Artificial Sequence
  Cyclic GFR-binding peptide
  MOD_RES (27)..(28): Xaa is C or S
MRHKRLVKPTRGVYYLISTASLDQPVXX

SEQ ID NO: 38973 - protein, 33 aa, Artificial Sequence
  Cyclic GFR-binding peptide
  MOD_RES (2)..(4): Xaa is C or S
SXKXSKVVMRHKRLVKPTRGVYYLISTASLDQP

SEQ ID NO: 38974 - protein, 30 aa, Artificial Sequence; identical to SEQ ID NO: 2340
  Cyclic GFR-binding peptide

SEQ ID NO: 38975 - protein, 37 aa, Artificial Sequence; identical to SEQ ID NO: 2342
  Cyclic GFR-binding peptide
  MOD_RES (31)..(32): Xaa is C or S

SEQ ID NO: 38976 - protein, 32 aa, Artificial Sequence; identical to SEQ ID NO: 2343
  Cyclic GFR-binding peptide
  MOD_RES (32)..(32): Xaa is C or S

SEQ ID NO: 38977 - protein, 35 aa, Artificial Sequence; identical to SEQ ID NO: 2344
  Cyclic GFR-binding peptide
  MOD_RES (1)..(33)..(34): Xaa is C or S

SEQ ID NO: 38978 - protein, 32 aa, Artificial Sequence
  Cyclic GFR-binding peptide
  MOD_RES (30)..(31): Xaa is C or S
KVIMRHKRLIKPTKGIYYLISTASLDQSVXXP

SEQ ID NO: 38979 - protein, 29 aa, Artificial Sequence
  Cyclic GFR-binding peptide
SRVIMRYKKLVKPKRGVFYLISIANLAQP

SEQ ID NO: 38980 - protein, 35 aa, Artificial Sequence; identical to SEQ ID NO: 2345
  Cyclic GFR-binding peptide
  MOD_RES (2)..(35): Xaa is C or S

SEQ ID NO: 38981 - protein, 36 aa, Artificial Sequence; identical to SEQ ID NO: 2346
  Cyclic GFR-binding peptide
  MOD_RES (35)..(35): Xaa is C or S

SEQ ID NO: 38982 - protein, 29 aa, Artificial Sequence
  Cyclic GFR-binding peptide
HDELTYHYKLFIPKKRVIEKYLVSIPSLQ

SEQ ID NO: 38983 - protein, 38 aa, Artificial Sequence; identical to SEQ ID NO: 2347
  Cyclic GFR-binding peptide
  MOD_RES (32)..(32): Xaa is C or S

SEQ ID NO: 38984 - protein, 35 aa, Artificial Sequence
  Cyclic GFR-binding peptide
  MOD_RES (30)..(31): Xaa is C or S
RVIMRHKRLVKPKRGVYYLISTASLAQPVXXPAAS

SEQ ID NO: 38985 - protein, 36 aa, Artificial Sequence
  Cyclic GFR-binding peptide
  MOD_RES (1)..(3): Xaa is C or S
XKXALHDELTQYNKLFIPKKRVIELYLVSIASLQVQ

SEQ ID NO: 38986 - protein, 30 aa, Artificial Sequence
  Cyclic GFR-binding peptide
  MOD_RES (27)..(28): Xaa is C or S
ERYKKLTPVGMDDFYLVSIANLKTPVXXAK

SEQ ID NO: 38987 - protein, 30 aa, Artificial Sequence
  Cyclic GFR-binding peptide
  MOD_RES (2)..(2): Xaa is C or S
KXSKVVMRYKKLVKPTRGVFYLISIANLDQ

SEQ ID NO: 38988 - protein, 35 aa, Artificial Sequence
  Cyclic GFR-binding peptide
  MOD_RES (29)..(30): Xaa is C or S
VMNYHYKLIVNNSSDKYLVSIPSLKTPAXXAKPVA

SEQ ID NO: 38989 - protein, 32 aa, Artificial Sequence; identical to SEQ ID NO: 2348
  Cyclic GFR-binding peptide
  MOD_RES (1)..(1): Xaa is C or S

SEQ ID NO: 38990 - protein, 40 aa, Artificial Sequence; identical to SEQ ID NO: 2349
  Cyclic GFR-binding peptide
  MOD_RES (2)..(35)..(36): Xaa is C or S

SEQ ID NO: 38991 - protein, 34 aa, Artificial Sequence
  Cyclic GFR-binding peptide
  MOD_RES (30)..(31): Xaa is C or S
VVMDRHKRLVVKENEDYYLMSTASLETPVXXAKP

SEQ ID NO: 38992 - protein, 33 aa, Artificial Sequence
  Cyclic GFR-binding peptide
  MOD_RES (30)..(31): Xaa is C or S
VVMDRYKKLVVKENEDFYLMSIANLETPVXXAK

SEQ ID NO: 38993 - protein, 38 aa, Artificial Sequence; identical to SEQ ID NO: 2355
  Cyclic GFR-binding peptide
  MOD_RES (2)..(34)..(35): Xaa is C or S

SEQ ID NO: 38994 - protein, 25 aa, Artificial Sequence
  Cyclic GFR-binding peptide
NRYKKLIVNNSSDFYLVSIANLKTP

SEQ ID NO: 38995 - protein, 22 aa, Artificial Sequence
  Cyclic GFR-binding peptide
MQYNKLIKPTKGILYLISIASL

SEQ ID NO: 38996 - protein, 33 aa, Artificial Sequence
  Cyclic GFR-binding peptide
  MOD_RES (29)..(30): Xaa is C or S
VMNRYKKLIVNNSSDFYLVSIANLKTPAXXAKP

SEQ ID NO: 38997 - protein, 35 aa, Artificial Sequence; identical to SEQ ID NO: 2361
  Cyclic GFR-binding peptide
  MOD_RES (2)..(4)..(35): Xaa is C or S

SEQ ID NO: 38998 - protein, 26 aa, Artificial Sequence
  Cyclic GFR-binding peptide
  MOD_RES (26)..(26): Xaa is C or S
RYKKLVVKDYEDFYLMSIANLETPVX

SEQ ID NO: 38999 - protein, 26 aa, Artificial Sequence
  Cyclic GFR-binding peptide
VMNRHKRLIVNSSDDYYLVSTASLQT

SEQ ID NO: 39000 - protein, 31 aa, Artificial Sequence
  Cyclic GFR-binding peptide
  MOD_RES (28)..(29): Xaa is C or S
MNRHKRLIVNSSDDYYLVSTASLQTPAXXPK

SEQ ID NO: 39001 - protein, 40 aa, Artificial Sequence; identical to SEQ ID NO: 2362
  Cyclic GFR-binding peptide
  MOD_RES (1)..(3)..(36)..(37): Xaa is C or S

SEQ ID NO: 39002 - protein, 32 aa, Artificial Sequence
  Cyclic GFR-binding peptide
  MOD_RES (28)..(29): Xaa is C or S
IMQYNKLIKPTKGILYLISIASLDQSVXXPSA

SEQ ID NO: 39003 - protein, 20 aa, Artificial Sequence
  Cyclic GFR-binding peptide
RHKRLVKPTRGVYYLISTAS

SEQ ID NO: 39004 - protein, 34 aa, Artificial Sequence
  Cyclic GFR-binding peptide
  MOD_RES (1)..(1): Xaa is C or S
XALHDELTRYKKLFIPKKRVIEFYLVSIANLQVQ

SEQ ID NO: 39005 - protein, 28 aa, Artificial Sequence
  Cyclic GFR-binding peptide
  MOD_RES (2)..(2): Xaa is C or S
GXSRVVMNQYNKLIVNSSDDLYLVSIAS

SEQ ID NO: 39006 - protein, 37 aa, Artificial Sequence; identical to SEQ ID NO: 2365
  Cyclic GFR-binding peptide
  MOD_RES (1)..(3)..(35)..(36): Xaa is C or S

SEQ ID NO: 39007 - protein, 25 aa, Artificial Sequence
  Cyclic GFR-binding peptide
IMRYKKLIKPTKGIFYLISIANLDQ

SEQ ID NO: 39008 - protein, 30 aa, Artificial Sequence
  Cyclic GFR-binding peptide
  MOD_RES (1)..(1): Xaa is C or S
XALHDELTQYNKLFIPKKRVIELYLVSIAS

SEQ ID NO: 39009 - protein, 27 aa, Artificial Sequence
  Cyclic GFR-binding peptide
IVNSSDDQYNKLIVNSSDDLYLVSIAS

SEQ ID NO: 39010 - protein, 31 aa, Artificial Sequence
  Cyclic GFR-binding peptide
  MOD_RES (1)..(3): Xaa is C or S
XGXSRVVMNRHKRLIVNSSDDYYLVSTASLK

SEQ ID NO: 39011 - protein, 38 aa, Artificial Sequence; identical to SEQ ID NO: 2366
  Cyclic GFR-binding peptide
  MOD_RES (1)..(38): Xaa is C or S

SEQ ID NO: 39012 - protein, 37 aa, Artificial Sequence; identical to SEQ ID NO: 2367
  Cyclic GFR-binding peptide
  MOD_RES (1)..(33)..(34): Xaa is C or S

SEQ ID NO: 39013 - protein, 26 aa, Artificial Sequence
  Cyclic GFR-binding peptide
  MOD_RES (26)..(26): Xaa is C or S
YHYKLVVKENEDKYLMSIPSLETPVX

SEQ ID NO: 39014 - protein, 30 aa, Artificial Sequence; identical to SEQ ID NO: 2369
  Cyclic GFR-binding peptide

SEQ ID NO: 39015 - protein, 33 aa, Artificial Sequence
  Cyclic GFR-binding peptide
  MOD_RES (2)..(4): Xaa is C or S
SXKXSRVIMRYKKLVKPKRGVFYLISIANLAQP

SEQ ID NO: 39016 - protein, 26 aa, Artificial Sequence
  Cyclic GFR-binding peptide
SRVIMQYNKLVKPKRGVLYLISIASL

SEQ ID NO: 39017 - protein, 35 aa, Artificial Sequence
  Cyclic GFR-binding peptide
  MOD_RES (29)..(30): Xaa is C or S
VMNQYNKLIVNSSDDLYLVSIASLKTPAXXPKPVY

SEQ ID NO: 39018 - protein, 30 aa, Artificial Sequence
  Cyclic GFR-binding peptide
  MOD_RES (2)..(2): Xaa is C or S
GXEAVSMGERHKRLTPVGMDDYYLVSTASL

SEQ ID NO: 39019 - protein, 34 aa, Artificial Sequence; identical to SEQ ID NO: 2371
  Cyclic GFR-binding peptide
  MOD_RES (31)..(32): Xaa is C or S

SEQ ID NO: 39020 - protein, 28 aa, Artificial Sequence
  Cyclic GFR-binding peptide
VVMDYHYKLVVKENEDKYLMSIPSLETP

SEQ ID NO: 39021 - protein, 32 aa, Artificial Sequence
  Cyclic GFR-binding peptide
  MOD_RES (2)..(4): Xaa is C or S
RXGXGEVVMERYKKLVVKDYEDFYLMSIANLE

SEQ ID NO: 39022 - protein, 33 aa, Artificial Sequence; identical to SEQ ID NO: 2376
  Cyclic GFR-binding peptide
  MOD_RES (2)..(33): Xaa is C or S

SEQ ID NO: 39023 - protein, 27 aa, Artificial Sequence
  Cyclic GFR-binding peptide
RVVMNRHKRLIVNSSDDYYLVSTASLQ

SEQ ID NO: 39024 - protein, 36 aa, Artificial Sequence; identical to SEQ ID NO: 2378
  Cyclic GFR-binding peptide
  MOD_RES (36)..(36): Xaa is C or S

SEQ ID NO: 39025 - protein, 30 aa, Artificial Sequence
  Cyclic GFR-binding peptide
  MOD_RES (29)..(30): Xaa is C or S
VMDRYKKLVVKENEDFYLMSIANLETPVXX

SEQ ID NO: 39026 - protein, 27 aa, Artificial Sequence
  Cyclic GFR-binding peptide
GEVVMERYKKLVVKDYEDFYLMSIANL

SEQ ID NO: 39027 - protein, 20 aa, Artificial Sequence
  Cyclic GFR-binding peptide
RYKKLIKPTKGIFYLISIAN

SEQ ID NO: 39028 - protein, 21 aa, Artificial Sequence
  Cyclic GFR-binding peptide
DRHKRLVVKENEDYYLMSTAS

SEQ ID NO: 39029 - protein, 31 aa, Artificial Sequence
  Cyclic GFR-binding peptide
  MOD_RES (29)..(30): Xaa is C or S
VIMQYNKLIKPTKGILYLISIASLDQSVXXP

SEQ ID NO: 39030 - protein, 27 aa, Artificial Sequence
  Cyclic GFR-binding peptide
  MOD_RES (2)..(2): Xaa is C or S
KXSKVIMRYKKLIKPTKGIFYLISIAN

SEQ ID NO: 39031 - protein, 21 aa, Artificial Sequence
  Cyclic GFR-binding peptide
MQYNKLVKPKRGVLYLISIAS

SEQ ID NO: 39032 - protein, 28 aa, Artificial Sequence
  Cyclic GFR-binding peptide
RYKKLFIPKKRVIEFYLVSIANLQVQTP

SEQ ID NO: 39033 - protein, 31 aa, Artificial Sequence
  Cyclic GFR-binding peptide
  MOD_RES (2)..(4): Xaa is C or S
SXKXSKVVMRHKRLVKPTRGVYYLISTASLD

SEQ ID NO: 39034 - protein, 34 aa, Artificial Sequence; identical to SEQ ID NO: 2384
  Cyclic GFR-binding peptide
  MOD_RES (1)..(33)..(34): Xaa is C or S

SEQ ID NO: 39035 - protein, 29 aa, Artificial Sequence
  Cyclic GFR-binding peptide
VSMGERHKRLTPVGMDDYYLVSTASLKTP

SEQ ID NO: 39036 - protein, 42 aa, Artificial Sequence; identical to SEQ ID NO: 2387
  Cyclic GFR-binding peptide
  MOD_RES (1)..(3)..(40): Xaa is C or S

SEQ ID NO: 39037 - protein, 30 aa, Artificial Sequence
  Cyclic GFR-binding peptide
  MOD_RES (29)..(30): Xaa is C or S
VIMQYNKLVKPKRGVLYLISIASLAQPVXX

SEQ ID NO: 39038 - protein, 33 aa, Artificial Sequence; identical to SEQ ID NO: 2388
  Cyclic GFR-binding peptide

SEQ ID NO: 39039 - protein, 30 aa, Artificial Sequence
  Cyclic GFR-binding peptide
  MOD_RES (30)..(30): Xaa is C or S
SMGERYKKLTPVGMDDFYLVSIANLKTPVX

SEQ ID NO: 39040 - protein, 31 aa, Artificial Sequence
  Cyclic GFR-binding peptide
EAVSMGERYKKLTPVGMDDFYLVSIANLKTP

SEQ ID NO: 39041 - protein, 33 aa, Artificial Sequence; identical to SEQ ID NO: 2390
  Cyclic GFR-binding peptide
  MOD_RES (2)..(2): Xaa is C or S

SEQ ID NO: 39042 - protein, 26 aa, Artificial Sequence
  Cyclic GFR-binding peptide
VVMNYHYKLIVNNSSDKYLVSIPSLK

SEQ ID NO: 39043 - protein, 37 aa, Artificial Sequence; identical to SEQ ID NO: 2391
  Cyclic GFR-binding peptide
  MOD_RES (32)..(33): Xaa is C or S

SEQ ID NO: 39044 - protein, 34 aa, Artificial Sequence
  Cyclic GFR-binding peptide
  MOD_RES (28)..(29): Xaa is C or S
VMQYNKLVKPTRGVLYLISIASLDQPVXXPSASA

SEQ ID NO: 39045 - protein, 34 aa, Artificial Sequence
  Cyclic GFR-binding peptide
  MOD_RES (30)..(30): Xaa is C or S
VVMNQYNKLIVNSSDDLYLVSIASLKTPAXTPKT

SEQ ID NO: 39046 - protein, 34 aa, Artificial Sequence; identical to SEQ ID NO: 2394
  Cyclic GFR-binding peptide

SEQ ID NO: 39047 - protein, 29 aa, Artificial Sequence
  Cyclic GFR-binding peptide
  MOD_RES (2)..(2): Xaa is C or S
GXSRVVMNQYNKLIVNSSDDLYLVSIASL

SEQ ID NO: 39048 - protein, 38 aa, Artificial Sequence; identical to SEQ ID NO: 2395
  Cyclic GFR-binding peptide
  MOD_RES (1)..(33)..(34): Xaa is C or S

SEQ ID NO: 39049 - protein, 31 aa, Artificial Sequence
  Cyclic GFR-binding peptide
  MOD_RES (27)..(28): Xaa is C or S
MRYKKLVKPTRGVFYLISIANLDQPVXXPSA

SEQ ID NO: 39050 - protein, 31 aa, Artificial Sequence
  Cyclic GFR-binding peptide
  MOD_RES (28)..(29): Xaa is C or S
GEQYNKLTPVGMDDLYLVSIASLKTPVXXAK

SEQ ID NO: 39051 - protein, 39 aa, Artificial Sequence; identical to SEQ ID NO: 2397
  Cyclic GFR-binding peptide
  MOD_RES (2)..(34)..(35): Xaa is C or S

SEQ ID NO: 39052 - protein, 37 aa, Artificial Sequence; identical to SEQ ID NO: 2398
  Cyclic GFR-binding peptide
  MOD_RES (2)..(4)..(37): Xaa is C or S

SEQ ID NO: 39053 - protein, 28 aa, Artificial Sequence
  Cyclic GFR-binding peptide
  MOD_RES (26)..(27): Xaa is C or S
YHYKLVKPKRGVKYLISIPSLAQPVXXP

SEQ ID NO: 39054 - protein, 36 aa, Artificial Sequence
  Cyclic GFR-binding peptide
  MOD_RES (30)..(31): Xaa is C or S
VVMERHKRLVVKDYEDYYLMSTASLETPVXXAKPIS

SEQ ID NO: 39055 - protein, 26 aa, Artificial Sequence
  Cyclic GFR-binding peptide
KVVMYHYKLVKPTRGVKYLISIPSLD

SEQ ID NO: 39056 - protein, 30 aa, Artificial Sequence
  Cyclic GFR-binding peptide
  MOD_RES (28)..(29): Xaa is C or S
GERYKKLTPVGMDDFYLVSIANLKTPVXXA

SEQ ID NO: 39057 - protein, 37 aa, Artificial Sequence; identical to SEQ ID NO: 2403
  Cyclic GFR-binding peptide
  MOD_RES (31)..(32): Xaa is C or S

SEQ ID NO: 39058 - protein, 36 aa, Artificial Sequence; identical to SEQ ID NO: 2404
  Cyclic GFR-binding peptide
  MOD_RES (1)..(3)..(34)..(35): Xaa is C or S

SEQ ID NO: 39059 - protein, 23 aa, Artificial Sequence
  Cyclic GFR-binding peptide
QYNKLTPVGMDDLYLVSIASLKT

SEQ ID NO: 39060 - protein, 28 aa, Artificial Sequence
  Cyclic GFR-binding peptide
SRVIMRYKKLVKPKRGVFYLISIANLAQ

SEQ ID NO: 39061 - protein, 27 aa, Artificial Sequence
  Cyclic GFR-binding peptide
  MOD_RES (1)..(1): Xaa is C or S
XAKVVMNRYKKLIVNNSSDFYLVSIAN

SEQ ID NO: 39062 - protein, 30 aa, Artificial Sequence
  Cyclic GFR-binding peptide
  MOD_RES (2)..(2): Xaa is C or S
GXARVVMNYHYKLIVNSSDDKYLVSIPSLQ

SEQ ID NO: 39063 - protein, 28 aa, Artificial Sequence
  Cyclic GFR-binding peptide
VVMNYHYKLIVNSSDDKYLVSIPSLKTP

SEQ ID NO: 39064 - protein, 26 aa, Artificial Sequence
  Cyclic GFR-binding peptide
VSMGEQYNKLTPVGMDDLYLVSIASL

SEQ ID NO: 39065 - protein, 35 aa, Artificial Sequence; identical to SEQ ID NO: 2407
  Cyclic GFR-binding peptide
  MOD_RES (1)..(32)..(33): Xaa is C or S

SEQ ID NO: 39066 - protein, 40 aa, Artificial Sequence; identical to SEQ ID NO: 2408
  Cyclic GFR-binding peptide
  MOD_RES (36)..(36): Xaa is C or S

SEQ ID NO: 39067 - protein, 35 aa, Artificial Sequence; identical to SEQ ID NO: 2409
  Cyclic GFR-binding peptide
  MOD_RES (1)..(3)..(35): Xaa is C or S

SEQ ID NO: 39068 - protein, 31 aa, Artificial Sequence
  Cyclic GFR-binding peptide
  MOD_RES (26)..(27): Xaa is C or S
RHKRLVVKDYEDYYLMSTASLETPVXXAKPI

SEQ ID NO: 39069 - protein, 31 aa, Artificial Sequence
  Cyclic GFR-binding peptide
EAVSMGEQYNKLTPVGMDDLYLVSIASLKTP

SEQ ID NO: 39070 - protein, 23 aa, Artificial Sequence
  Cyclic GFR-binding peptide
EYHYKLVVKDYEDKYLMSIPSLE

SEQ ID NO: 39071 - protein, 32 aa, Artificial Sequence
  Cyclic GFR-binding peptide
  MOD_RES (2)..(2): Xaa is C or S
GXGEVVMERYKKLVVKDYEDFYLMSIANLETP

SEQ ID NO: 39072 - protein, 38 aa, Artificial Sequence; identical to SEQ ID NO: 2412
  Cyclic GFR-binding peptide
  MOD_RES (37)..(37): Xaa is C or S

SEQ ID NO: 39073 - protein, 27 aa, Artificial Sequence
  Cyclic GFR-binding peptide
VMNYHYKLIVNNSSDKYLVSIPSLKTP

SEQ ID NO: 39074 - protein, 34 aa, Artificial Sequence; identical to SEQ ID NO: 2415
  Cyclic GFR-binding peptide
  MOD_RES (1)..(32)..(33): Xaa is C or S

SEQ ID NO: 39075 - protein, 25 aa, Artificial Sequence
  Cyclic GFR-binding peptide
VMNQYNKLIVNSSDDLYLVSIASLK

SEQ ID NO: 39076 - protein, 30 aa, Artificial Sequence; identical to SEQ ID NO: 1871
  Cyclic GFR-binding peptide

SEQ ID NO: 39077 - protein, 41 aa, Artificial Sequence; identical to SEQ ID NO: 2417
  Cyclic GFR-binding peptide
  MOD_RES (1)..(3)..(35)..(36): Xaa is C or S

SEQ ID NO: 39078 - protein, 38 aa, Artificial Sequence; identical to SEQ ID NO: 2418
  Cyclic GFR-binding peptide
  MOD_RES (2)..(4)..(36)..(37): Xaa is C or S

SEQ ID NO: 39079 - protein, 22 aa, Artificial Sequence
  Cyclic GFR-binding peptide
MRHKRLVKPKRGVYYLISTASL

SEQ ID NO: 39080 - protein, 25 aa, Artificial Sequence
  Cyclic GFR-binding peptide
MNRHKRLIVNSSDDYYLVSTASLQT

SEQ ID NO: 39081 - protein, 25 aa, Artificial Sequence
  Cyclic GFR-binding peptide
RVIMYHYKLVKPKRGVKYLISIPSL

SEQ ID NO: 39082 - protein, 27 aa, Artificial Sequence
  Cyclic GFR-binding peptide
VVMNQYNKLIVNNSSDLYLVSIASLKT

SEQ ID NO: 39083 - protein, 36 aa, Artificial Sequence; identical to SEQ ID NO: 2420
  Cyclic GFR-binding peptide
  MOD_RES (2)..(34)..(35): Xaa is C or S

SEQ ID NO: 39084 - protein, 23 aa, Artificial Sequence
  Cyclic GFR-binding peptide
MDRYKKLVVKENEDFYLMSIANL

SEQ ID NO: 39085 - protein, 40 aa, Artificial Sequence; identical to SEQ ID NO: 2421
  Cyclic GFR-binding peptide
  MOD_RES (2)..(4)..(36)..(37): Xaa is C or S

SEQ ID NO: 39086 - protein, 32 aa, Artificial Sequence
  Cyclic GFR-binding peptide
  MOD_RES (30)..(31): Xaa is C or S
VVMNQYNKLIVNNSSDLYLVSIASLKTPAXXA

SEQ ID NO: 39087 - protein, 28 aa, Artificial Sequence
  Cyclic GFR-binding peptide
EAVSMGERHKRLTPVGMDDYYLVSTASL

SEQ ID NO: 39088 - protein, 29 aa, Artificial Sequence
  Cyclic GFR-binding peptide
KVVMRYKKLVKPTRGVFYLISIANLDQPV

SEQ ID NO: 39089 - protein, 25 aa, Artificial Sequence
  Cyclic GFR-binding peptide
SKVIMYHYKLIKPTKGIKYLISIPS

SEQ ID NO: 39090 - protein, 29 aa, Artificial Sequence
  Cyclic GFR-binding peptide
  MOD_RES (2)..(2): Xaa is C or S
KXSRVIMQYNKLVKPKRGVLYLISIASLA

SEQ ID NO: 39091 - protein, 22 aa, Artificial Sequence
  Cyclic GFR-binding peptide
RHKRLFIPKKRVIEYYLVSTAS

SEQ ID NO: 39092 - protein, 32 aa, Artificial Sequence; identical to SEQ ID NO: 2424
  Cyclic GFR-binding peptide
  MOD_RES (31)..(31): Xaa is C or S

SEQ ID NO: 39093 - protein, 34 aa, Artificial Sequence; identical to SEQ ID NO: 2425
  Cyclic GFR-binding peptide
  MOD_RES (31)..(32): Xaa is C or S

SEQ ID NO: 39094 - protein, 38 aa, Artificial Sequence; identical to SEQ ID NO: 2426
  Cyclic GFR-binding peptide
  MOD_RES (2)..(4)..(36)..(37): Xaa is C or S

SEQ ID NO: 39095 - protein, 32 aa, Artificial Sequence
  Cyclic GFR-binding peptide
DELTYHYKLFIPKKRVIEKYLVSIPSLQVQTP

SEQ ID NO: 39096 - protein, 41 aa, Artificial Sequence
  Cyclic GFR-binding peptide
  MOD_RES (37)..(37): Xaa is C or S
ALHDELTRHKRLFIPKKRVIEYYLVSTASLQVQTPRXQVNR

SEQ ID NO: 39097 - protein, 36 aa, Artificial Sequence; identical to SEQ ID NO: 2429
  Cyclic GFR-binding peptide
  MOD_RES (35)..(35): Xaa is C or S

SEQ ID NO: 39098 - protein, 39 aa, Artificial Sequence; identical to SEQ ID NO: 2428
  Cyclic GFR-binding peptide
  MOD_RES (1)..(3)..(35)..(36): Xaa is C or S

SEQ ID NO: 39099 - protein, 29 aa, Artificial Sequence
  Cyclic GFR-binding peptide
  MOD_RES (1)..(3): Xaa is C or S
XGXSRVVMNQYNKLIVNSSDDLYLVSIAS

SEQ ID NO: 39100 - protein, 32 aa, Artificial Sequence
  Cyclic GFR-binding peptide
  MOD_RES (31)..(32): Xaa is C or S
VSMGERYKKLTPVGMDDFYLVSIANLKTPVXX

SEQ ID NO: 39101 - protein, 38 aa, Artificial Sequence; identical to SEQ ID NO: 2430
  Cyclic GFR-binding peptide
  MOD_RES (1)..(33)..(34): Xaa is C or S

SEQ ID NO: 39102 - protein, 32 aa, Artificial Sequence
  Cyclic GFR-binding peptide
  MOD_RES (29)..(30): Xaa is C or S
VMNYHYKLIVNNSSDKYLVSIPSLKTPAXXAK

SEQ ID NO: 39103 - protein, 36 aa, Artificial Sequence; identical to SEQ ID NO: 2431
  Cyclic GFR-binding peptide
  MOD_RES (1)..(32)..(33): Xaa is C or S

SEQ ID NO: 39104 - protein, 26 aa, Artificial Sequence
  Cyclic GFR-binding peptide
MDRYKKLVVKENEDFYLMSIANLETP

SEQ ID NO: 39105 - protein, 37 aa, Artificial Sequence; identical to SEQ ID NO: 2432
  Cyclic GFR-binding peptide
  MOD_RES (1)..(3)..(34)..(35): Xaa is C or S

SEQ ID NO: 39106 - protein, 40 aa, Artificial Sequence; identical to SEQ ID NO: 2433
  Cyclic GFR-binding peptide
  MOD_RES (2)..(4)..(36)..(37): Xaa is C or S

SEQ ID NO: 39107 - protein, 29 aa, Artificial Sequence
  Cyclic GFR-binding peptide
ARVVMNRHKRLIVNSSDDYYLVSTASLQT

SEQ ID NO: 39108 - protein, 41 aa, Artificial Sequence; identical to SEQ ID NO: 2435
  Cyclic GFR-binding peptide
  MOD_RES (1)..(38): Xaa is C or S

SEQ ID NO: 39109 - protein, 35 aa, Artificial Sequence
  Cyclic GFR-binding peptide
  MOD_RES (29)..(30): Xaa is C or S
VMDRYKKLVVKENEDFYLMSIANLETPVXXAKPIK

SEQ ID NO: 39110 - protein, 29 aa, Artificial Sequence
  Cyclic GFR-binding peptide
ARVVMNQYNKLIVNSSDDLYLVSIASLQT

SEQ ID NO: 39111 - protein, 34 aa, Artificial Sequence
  Cyclic GFR-binding peptide
  MOD_RES (29)..(30): Xaa is C or S
VVMRHKRLVKPTRGVYYLISTASLDQPVXXPSAS

SEQ ID NO: 39112 - protein, 24 aa, Artificial Sequence
  Cyclic GFR-binding peptide
SMGEQYNKLTPVGMDDLYLVSIAS

SEQ ID NO: 39113 - protein, 28 aa, Artificial Sequence
  Cyclic GFR-binding peptide
  MOD_RES (26)..(27): Xaa is C or S
YHYKLIVNSSDDKYLVSIPSLKTPAXXP

SEQ ID NO: 39114 - protein, 33 aa, Artificial Sequence
  Cyclic GFR-binding peptide
  MOD_RES (29)..(30): Xaa is C or S
VMNYHYKLIVNSSDDKYLVSIPSLQTPAXXPKP

SEQ ID NO: 39115 - protein, 36 aa, Artificial Sequence; identical to SEQ ID NO: 2439
  Cyclic GFR-binding peptide
  MOD_RES (1)..(33)..(34): Xaa is C or S

SEQ ID NO: 39116 - protein, 32 aa, Artificial Sequence; identical to SEQ ID NO: 2440
  Cyclic GFR-binding peptide
  MOD_RES (32)..(32): Xaa is C or S

SEQ ID NO: 39117 - protein, 37 aa, Artificial Sequence; identical to SEQ ID NO: 2441
  Cyclic GFR-binding peptide
  MOD_RES (2)..(4)..(36)..(37): Xaa is C or S

SEQ ID NO: 39118 - protein, 41 aa, Artificial Sequence; identical to SEQ ID NO: 2442
  Cyclic GFR-binding peptide
  MOD_RES (37)..(37): Xaa is C or S

SEQ ID NO: 39119 - protein, 25 aa, Artificial Sequence
  Cyclic GFR-binding peptide
VIMQYNKLIKPTKGILYLISIASLD

SEQ ID NO: 39120 - protein, 26 aa, Artificial Sequence
  Cyclic GFR-binding peptide
  MOD_RES (26)..(26): Xaa is C or S
RHKRLVVKENEDYYLMSTASLETPVX

SEQ ID NO: 39121 - protein, 27 aa, Artificial Sequence
  Cyclic GFR-binding peptide
  MOD_RES (26)..(27): Xaa is C or S
RYKKLVKPTRGVFYLISIANLDQPVXX

SEQ ID NO: 39122 - protein, 35 aa, Artificial Sequence; identical to SEQ ID NO: 2444
  Cyclic GFR-binding peptide
  MOD_RES (1)..(33)..(34): Xaa is C or S

SEQ ID NO: 39123 - protein, 32 aa, Artificial Sequence
  Cyclic GFR-binding peptide
  MOD_RES (31)..(31): Xaa is C or S
TRHKRLFIPKKRVIEYYLVSTASLQVQTPRXQ

SEQ ID NO: 39124 - protein, 31 aa, Artificial Sequence
  Cyclic GFR-binding peptide
  MOD_RES (26)..(27): Xaa is C or S
YHYKLVVKDYEDKYLMSIPSLETPVXXAKPI

SEQ ID NO: 39125 - protein, 25 aa, Artificial Sequence
  Cyclic GFR-binding peptide
SRVIMQYNKLVKPKRGVLYLISIAS

SEQ ID NO: 39126 - protein, 34 aa, Artificial Sequence
  Cyclic GFR-binding peptide
  MOD_RES (1)..(3): Xaa is C or S
XKXALHDELTRYKKLFIPKKRVIEFYLVSIANLQ

SEQ ID NO: 39127 - protein, 27 aa, Artificial Sequence
  Cyclic GFR-binding peptide
VMYHYKLVKPTRGVKYLISIPSLDQPV

SEQ ID NO: 39128 - protein, 32 aa, Artificial Sequence
  Cyclic GFR-binding peptide
  MOD_RES (30)..(30): Xaa is C or S
RHKRLFIPKKRVIEYYLVSTASLQVQTPRXQV

SEQ ID NO: 39129 - protein, 31 aa, Artificial Sequence
  Cyclic GFR-binding peptide
  MOD_RES (2)..(4): Xaa is C or S
SXKXSKVVMQYNKLVKPTRGVLYLISIASLD

SEQ ID NO: 39130 - protein, 33 aa, Artificial Sequence; identical to SEQ ID NO: 2450
  Cyclic GFR-binding peptide
  MOD_RES (31)..(32): Xaa is C or S

SEQ ID NO: 39131 - protein, 29 aa, Artificial Sequence
  Cyclic GFR-binding peptide
LTRYKKLFIPKKRVIEFYLVSIANLQVQT

SEQ ID NO: 39132 - protein, 34 aa, Artificial Sequence; identical to SEQ ID NO: 2449
  Cyclic GFR-binding peptide
  MOD_RES (1)..(3)..(34): Xaa is C or S

SEQ ID NO: 39133 - protein, 35 aa, Artificial Sequence
  Cyclic GFR-binding peptide
  MOD_RES (29)..(30): Xaa is C or S
VMNQYNKLIVNNSSDLYLVSIASLKTPAXXAKPVA

SEQ ID NO: 39134 - protein, 31 aa, Artificial Sequence
  Cyclic GFR-binding peptide
  MOD_RES (30)..(30): Xaa is C or S
YHYKLFIPKKRVIEKYLVSIPSLQVQTPRXQ

SEQ ID NO: 39135 - protein, 36 aa, Artificial Sequence; identical to SEQ ID NO: 2451
  Cyclic GFR-binding peptide
  MOD_RES (33)..(34): Xaa is C or S

SEQ ID NO: 39136 - protein, 34 aa, Artificial Sequence
  Cyclic GFR-binding peptide
  MOD_RES (29)..(30): Xaa is C or S
VMEYHYKLVVKDYEDKYLMSIPSLETPVXXAKPI

SEQ ID NO: 39137 - protein, 29 aa, Artificial Sequence
  Cyclic GFR-binding peptide
KVIMQYNKLIKPTKGILYLISIASLDQSV

SEQ ID NO: 39138 - protein, 30 aa, Artificial Sequence
  Cyclic GFR-binding peptide
  MOD_RES (2)..(2): Xaa is C or S
KXSKVIMQYNKLIKPTKGILYLISIASLDQ

SEQ ID NO: 39139 - protein, 25 aa, Artificial Sequence
  Cyclic GFR-binding peptide
SKVIMQYNKLIKPTKGILYLISIAS

SEQ ID NO: 39140 - protein, 35 aa, Artificial Sequence; identical to SEQ ID NO: 2453
  Cyclic GFR-binding peptide
  MOD_RES (31)..(32): Xaa is C or S

SEQ ID NO: 39141 - protein, 37 aa, Artificial Sequence; identical to SEQ ID NO: 2455
  Cyclic GFR-binding peptide
  MOD_RES (2)..(2): Xaa is C or S

SEQ ID NO: 39142 - protein, 26 aa, Artificial Sequence
  Cyclic GFR-binding peptide
NYHYKLIVNSSDDKYLVSIPSLQTPA

SEQ ID NO: 39143 - protein, 25 aa, Artificial Sequence
  Cyclic GFR-binding peptide
VVMNQYNKLIVNNSSDLYLVSIASL

SEQ ID NO: 39144 - protein, 28 aa, Artificial Sequence
  Cyclic GFR-binding peptide
  MOD_RES (28)..(28): Xaa is C or S
GERYKKLTPVGMDDFYLVSIANLKTPVX

SEQ ID NO: 39145 - protein, 35 aa, Artificial Sequence
  Cyclic GFR-binding peptide
  MOD_RES (2)..(2): Xaa is C or S
KXALHDELTYHYKLFIPKKRVIEKYLVSIPSLQVQ

SEQ ID NO: 39146 - protein, 29 aa, Artificial Sequence
  Cyclic GFR-binding peptide
TQYNKLFIPKKRVIELYLVSIASLQVQTP

SEQ ID NO: 39147 - protein, 25 aa, Artificial Sequence
  Cyclic GFR-binding peptide
VSMGEQYNKLTPVGMDDLYLVSIAS

SEQ ID NO: 39148 - protein, 41 aa, Artificial Sequence; identical to SEQ ID NO: 2458
  Cyclic GFR-binding peptide
  MOD_RES (1)..(3)..(40): Xaa is C or S

SEQ ID NO: 39149 - protein, 31 aa, Artificial Sequence; identical to SEQ ID NO: 2459
  Cyclic GFR-binding peptide
  MOD_RES (31)..(31): Xaa is C or S

SEQ ID NO: 39150 - protein, 26 aa, Artificial Sequence
  Cyclic GFR-binding peptide
MQYNKLIKPTKGILYLISIASLDQSV

SEQ ID NO: 39151 - protein, 31 aa, Artificial Sequence
  Cyclic GFR-binding peptide
  MOD_RES (27)..(28): Xaa is C or S
DRYKKLVVKENEDFYLMSIANLETPVXXAKP

SEQ ID NO: 39152 - protein, 28 aa, Artificial Sequence
  Cyclic GFR-binding peptide
  MOD_RES (27)..(28): Xaa is C or S
MRHKRLIKPTKGIYYLISTASLDQSVXX

SEQ ID NO: 39153 - protein, 34 aa, Artificial Sequence
  Cyclic GFR-binding peptide
  MOD_RES (31)..(32): Xaa is C or S
VSMGEQYNKLTPVGMDDLYLVSIASLKTPVXXAK

SEQ ID NO: 39154 - protein, 33 aa, Artificial Sequence; identical to SEQ ID NO: 2460
  Cyclic GFR-binding peptide
  MOD_RES (32)..(32): Xaa is C or S

SEQ ID NO: 39155 - protein, 40 aa, Artificial Sequence; identical to SEQ ID NO: 2463
  Cyclic GFR-binding peptide
  MOD_RES (2)..(4)..(36)..(37): Xaa is C or S

SEQ ID NO: 39156 - protein, 34 aa, Artificial Sequence; identical to SEQ ID NO: 2464
  Cyclic GFR-binding peptide
  MOD_RES (1)..(3): Xaa is C or S

SEQ ID NO: 39157 - protein, 24 aa, Artificial Sequence
  Cyclic GFR-binding peptide
IMQYNKLIKPTKGILYLISIASLD

SEQ ID NO: 39158 - protein, 28 aa, Artificial Sequence
  Cyclic GFR-binding peptide
  MOD_RES (28)..(28): Xaa is C or S
IMRYKKLVKPKRGVFYLISIANLAQPVX

SEQ ID NO: 39159 - protein, 32 aa, Artificial Sequence
  Cyclic GFR-binding peptide
  MOD_RES (29)..(30): Xaa is C or S
VMNRHKRLIVNSSDDYYLVSTASLKTPAXXPK

SEQ ID NO: 39160 - protein, 33 aa, Artificial Sequence
  Cyclic GFR-binding peptide
  MOD_RES (29)..(30): Xaa is C or S
VIMRYKKLVKPKRGVFYLISIANLAQPVXXPAA

SEQ ID NO: 39161 - protein, 34 aa, Artificial Sequence
  Cyclic GFR-binding peptide
  MOD_RES (28)..(29): Xaa is C or S
IMQYNKLIKPTKGILYLISIASLDQSVXXPSASA

SEQ ID NO: 39162 - protein, 32 aa, Artificial Sequence; identical to SEQ ID NO: 2465
  Cyclic GFR-binding peptide
  MOD_RES (31)..(32): Xaa is C or S

SEQ ID NO: 39163 - protein, 30 aa, Artificial Sequence
  Cyclic GFR-binding peptide
  MOD_RES (26)..(27): Xaa is C or S
RYKKLVVKENEDFYLMSIANLETPVXXAKP

SEQ ID NO: 39164 - protein, 42 aa, Artificial Sequence; identical to SEQ ID NO: 2468
  Cyclic GFR-binding peptide
  MOD_RES (1)..(38): Xaa is C or S

SEQ ID NO: 39165 - protein, 25 aa, Artificial Sequence
  Cyclic GFR-binding peptide
VMNQYNKLIVNNSSDLYLVSIASLK

SEQ ID NO: 39166 - protein, 27 aa, Artificial Sequence
  Cyclic GFR-binding peptide
VVMERHKRLVVKDYEDYYLMSTASLET

SEQ ID NO: 39167 - protein, 38 aa, Artificial Sequence; identical to SEQ ID NO: 2470
  Cyclic GFR-binding peptide
  MOD_RES (1)..(32)..(33): Xaa is C or S

SEQ ID NO: 39168 - protein, 26 aa, Artificial Sequence
  Cyclic GFR-binding peptide
RVIMRHKRLVKPKRGVYYLISTASLA

SEQ ID NO: 39169 - protein, 26 aa, Artificial Sequence
  Cyclic GFR-binding peptide
LTQYNKLFIPKKRVIELYLVSIASLQ

SEQ ID NO: 39170 - protein, 35 aa, Artificial Sequence
  Cyclic GFR-binding peptide
  MOD_RES (31)..(31): Xaa is C or S
TRHKRLFIPKKRVIEYYLVSTASLQVQTPRXQVNR

SEQ ID NO: 39171 - protein, 27 aa, Artificial Sequence
  Cyclic GFR-binding peptide
  MOD_RES (26)..(27): Xaa is C or S
YHYKLVKPTRGVKYLISIPSLDQPVXX

SEQ ID NO: 39172 - protein, 32 aa, Artificial Sequence; identical to SEQ ID NO: 2474
  Cyclic GFR-binding peptide
  MOD_RES (1)..(32): Xaa is C or S

SEQ ID NO: 39173 - protein, 31 aa, Artificial Sequence
  Cyclic GFR-binding peptide
  MOD_RES (26)..(27): Xaa is C or S
YHYKLIKPTKGIKYLISIPSLDQSVXXPSAS

SEQ ID NO: 39174 - protein, 26 aa, Artificial Sequence
  Cyclic GFR-binding peptide
TRYKKLFIPKKRVIEFYLVSIANLQV

SEQ ID NO: 39175 - protein, 27 aa, Artificial Sequence
  Cyclic GFR-binding peptide
VMNQYNKLIVNSSDDLYLVSIASLKTP

SEQ ID NO: 39176 - protein, 37 aa, Artificial Sequence; identical to SEQ ID NO: 2479
  Cyclic GFR-binding peptide
  MOD_RES (32)..(33): Xaa is C or S

SEQ ID NO: 39177 - protein, 30 aa, Artificial Sequence
  Cyclic GFR-binding peptide
  MOD_RES (1)..(1): Xaa is C or S
XSKVIMQYNKLIKPTKGILYLISIASLDQS

SEQ ID NO: 39178 - protein, 31 aa, Artificial Sequence; identical to SEQ ID NO: 2481
  Cyclic GFR-binding peptide
  MOD_RES (1)..(1): Xaa is C or S

SEQ ID NO: 39179 - protein, 33 aa, Artificial Sequence
  Cyclic GFR-binding peptide
  MOD_RES (27)..(28): Xaa is C or S
ERHKRLVVKDYEDYYLMSTASLETPVXXAKPIS

SEQ ID NO: 39180 - protein, 40 aa, Artificial Sequence; identical to SEQ ID NO: 2482
  Cyclic GFR-binding peptide
  MOD_RES (1)..(3)..(34)..(35): Xaa is C or S

SEQ ID NO: 39181 - protein, 20 aa, Artificial Sequence
  Cyclic GFR-binding peptide
YHYKLVVKDYEDKYLMSIPS

SEQ ID NO: 39182 - protein, 35 aa, Artificial Sequence; identical to SEQ ID NO: 2484
  Cyclic GFR-binding peptide
  MOD_RES (31)..(32): Xaa is C or S

SEQ ID NO: 39183 - protein, 33 aa, Artificial Sequence
  Cyclic GFR-binding peptide
  MOD_RES (29)..(30): Xaa is C or S
VMNRHKRLIVNSSDDYYLVSTASLQTPAXXPKP

SEQ ID NO: 39184 - protein, 37 aa, Artificial Sequence; identical to SEQ ID NO: 2486
  Cyclic GFR-binding peptide
  MOD_RES (1)..(3)..(35)..(36): Xaa is C or S

SEQ ID NO: 39185 - protein, 25 aa, Artificial Sequence
  Cyclic GFR-binding peptide
KVIMRYKKLIKPTKGIFYLISIANL

SEQ ID NO: 39186 - protein, 38 aa, Artificial Sequence; identical to SEQ ID NO: 2489
  Cyclic GFR-binding peptide
  MOD_RES (32)..(33): Xaa is C or S

SEQ ID NO: 39187 - protein, 39 aa, Artificial Sequence; identical to SEQ ID NO: 2490
  Cyclic GFR-binding peptide
  MOD_RES (2)..(4)..(35)..(36): Xaa is C or S

SEQ ID NO: 39188 - protein, 22 aa, Artificial Sequence
  Cyclic GFR-binding peptide
IMRHKRLIKPTKGIYYLISTAS

SEQ ID NO: 39189 - protein, 31 aa, Artificial Sequence
  Cyclic GFR-binding peptide
  MOD_RES (27)..(28): Xaa is C or S
ERHKRLTPVGMDDYYLVSTASLKTPVXXAKG

SEQ ID NO: 39190 - protein, 32 aa, Artificial Sequence
  Cyclic GFR-binding peptide
ALHDELTYHYKLFIPKKRVIEKYLVSIPSLQV

SEQ ID NO: 39191 - protein, 23 aa, Artificial Sequence
  Cyclic GFR-binding peptide
IMYHYKLVKPKRGVKYLISIPSL

SEQ ID NO: 39192 - protein, 40 aa, Artificial Sequence; identical to SEQ ID NO: 2493
  Cyclic GFR-binding peptide
  MOD_RES (2)..(4)..(35)..(36): Xaa is C or S

SEQ ID NO: 39193 - protein, 31 aa, Artificial Sequence
  Cyclic GFR-binding peptide
  MOD_RES (1)..(3): Xaa is C or S
XKXSKVVMQYNKLVKPTRGVLYLISIASLDQ

SEQ ID NO: 39194 - protein, 28 aa, Artificial Sequence
  Cyclic GFR-binding peptide
SMGERYKKLTPVGMDDFYLVSIANLKTP

SEQ ID NO: 39195 - protein, 40 aa, Artificial Sequence; identical to SEQ ID NO: 2495
  Cyclic GFR-binding peptide
  MOD_RES (2)..(34): Xaa is C or S

SEQ ID NO: 39196 - protein, 33 aa, Artificial Sequence; identical to SEQ ID NO: 2496
  Cyclic GFR-binding peptide

SEQ ID NO: 39197 - protein, 34 aa, Artificial Sequence; identical to SEQ ID NO: 2497
  Cyclic GFR-binding peptide
  MOD_RES (1)..(32)..(33): Xaa is C or S

SEQ ID NO: 39198 - protein, 29 aa, Artificial Sequence
  Cyclic GFR-binding peptide
LTRHKRLFIPKKRVIEYYLVSTASLQVQT

SEQ ID NO: 39199 - protein, 38 aa, Artificial Sequence; identical to SEQ ID NO: 2499
  Cyclic GFR-binding peptide
  MOD_RES (2)..(34)..(35): Xaa is C or S

SEQ ID NO: 39200 - protein, 34 aa, Artificial Sequence; identical to SEQ ID NO: 2500
  Cyclic GFR-binding peptide
  MOD_RES (1)..(3): Xaa is C or S

SEQ ID NO: 39201 - protein, 33 aa, Artificial Sequence; identical to SEQ ID NO: 2501
  Cyclic GFR-binding peptide

SEQ ID NO: 39202 - protein, 38 aa, Artificial Sequence; identical to SEQ ID NO: 2502
  Cyclic GFR-binding peptide
  MOD_RES (2)..(4)..(35)..(36): Xaa is C or S

SEQ ID NO: 39203 - protein, 20 aa, Artificial Sequence
  Cyclic GFR-binding peptide
YHYKLVKPTRGVKYLISIPS

SEQ ID NO: 39204 - protein, 34 aa, Artificial Sequence; identical to SEQ ID NO: 2504
  Cyclic GFR-binding peptide
  MOD_RES (2)..(4): Xaa is C or S

SEQ ID NO: 39205 - protein, 29 aa, Artificial Sequence
  Cyclic GFR-binding peptide
  MOD_RES (2)..(2): Xaa is C or S
KXSKVVMRHKRLVKPTRGVYYLISTASLD

SEQ ID NO: 39206 - protein, 36 aa, Artificial Sequence
  Cyclic GFR-binding peptide
  MOD_RES (31)..(32): Xaa is C or S
VSMGEQYNKLTPVGMDDLYLVSIASLKTPVXXAKGV

SEQ ID NO: 39207 - protein, 30 aa, Artificial Sequence
  Cyclic GFR-binding peptide
  MOD_RES (26)..(26): Xaa is C or S
YHYKLIVNSSDDKYLVSIPSLKTPAXTPKT

SEQ ID NO: 39208 - protein, 32 aa, Artificial Sequence; identical to SEQ ID NO: 2508
  Cyclic GFR-binding peptide
  MOD_RES (31)..(31): Xaa is C or S

SEQ ID NO: 39209 - protein, 29 aa, Artificial Sequence
  Cyclic GFR-binding peptide
  MOD_RES (1)..(1): Xaa is C or S
XSRVVMNYHYKLIVNSSDDKYLVSIPSLK

SEQ ID NO: 39210 - protein, 31 aa, Artificial Sequence
  Cyclic GFR-binding peptide
  MOD_RES (2)..(2): Xaa is C or S
GXEAVSMGEQYNKLTPVGMDDLYLVSIASLK

SEQ ID NO: 39211 - protein, 25 aa, Artificial Sequence
  Cyclic GFR-binding peptide
VMDRYKKLVVKENEDFYLMSIANLE

SEQ ID NO: 39212 - protein, 29 aa, Artificial Sequence
  Cyclic GFR-binding peptide
DELTQYNKLFIPKKRVIELYLVSIASLQV

SEQ ID NO: 39213 - protein, 35 aa, Artificial Sequence
  Cyclic GFR-binding peptide
  MOD_RES (29)..(30): Xaa is C or S
VIMRYKKLIKPTKGIFYLISIANLDQSVXXPSASA

SEQ ID NO: 39214 - protein, 38 aa, Artificial Sequence; identical to SEQ ID NO: 2513
  Cyclic GFR-binding peptide
  MOD_RES (2)..(35)..(36): Xaa is C or S

SEQ ID NO: 39215 - protein, 39 aa, Artificial Sequence; identical to SEQ ID NO: 2514
  Cyclic GFR-binding peptide
  MOD_RES (1)..(33)..(34): Xaa is C or S

SEQ ID NO: 39216 - protein, 29 aa, Artificial Sequence
  Cyclic GFR-binding peptide
RHKRLFIPKKRVIEYYLVSTASLQVQTPR

SEQ ID NO: 39217 - protein, 32 aa, Artificial Sequence
  Cyclic GFR-binding peptide
  MOD_RES (1)..(3): Xaa is C or S
XGXARVVMNYHYKLIVNSSDDKYLVSIPSLQT

SEQ ID NO: 39218 - protein, 35 aa, Artificial Sequence
  Cyclic GFR-binding peptide
  MOD_RES (30)..(31): Xaa is C or S
KVVMYHYKLVKPTRGVKYLISIPSLDQPVXXPSAS

SEQ ID NO: 39219 - protein, 32 aa, Artificial Sequence
  Cyclic GFR-binding peptide
  MOD_RES (28)..(29): Xaa is C or S
MNRHKRLIVNSSDDYYLVSTASLKTPAXXPKP

SEQ ID NO: 39220 - protein, 31 aa, Artificial Sequence
  Cyclic GFR-binding peptide
  MOD_RES (2)..(2): Xaa is C or S
GXSRVVMNYHYKLIVNSSDDKYLVSIPSLKT

SEQ ID NO: 39221 - protein, 23 aa, Artificial Sequence
  Cyclic GFR-binding peptide
IMRHKRLVKPKRGVYYLISTASL

SEQ ID NO: 39222 - protein, 38 aa, Artificial Sequence; identical to SEQ ID NO: 2515
  Cyclic GFR-binding peptide
  MOD_RES (1)..(3)..(35)..(36): Xaa is C or S

SEQ ID NO: 39223 - protein, 28 aa, Artificial Sequence
  Cyclic GFR-binding peptide
GEVVMEYHYKLVVKDYEDKYLMSIPSLE

SEQ ID NO: 39224 - protein, 33 aa, Artificial Sequence; identical to SEQ ID NO: 2517
  Cyclic GFR-binding peptide
  MOD_RES (32)..(32): Xaa is C or S

SEQ ID NO: 39225 - protein, 23 aa, Artificial Sequence
  Cyclic GFR-binding peptide
TQYNKLFIPKKRVIELYLVSIAS

SEQ ID NO: 39226 - protein, 31 aa, Artificial Sequence
  Cyclic GFR-binding peptide
  MOD_RES (26)..(27): Xaa is C or S
QYNKLVKPTRGVLYLISIASLDQPVXXPSAS

SEQ ID NO: 39227 - protein, 24 aa, Artificial Sequence
  Cyclic GFR-binding peptide
MRHKRLIKPTKGIYYLISTASLDQ

SEQ ID NO: 39228 - protein, 22 aa, Artificial Sequence
  Cyclic GFR-binding peptide
IMYHYKLIKPTKGIKYLISIPS

SEQ ID NO: 39229 - protein, 31 aa, Artificial Sequence
  Cyclic GFR-binding peptide
  MOD_RES (26)..(27): Xaa is C or S
RHKRLVKPTRGVYYLISTASLDQPVXXPSAS

SEQ ID NO: 39230 - protein, 32 aa, Artificial Sequence; identical to SEQ ID NO: 2520
  Cyclic GFR-binding peptide
  MOD_RES (2)..(2): Xaa is C or S

SEQ ID NO: 39231 - protein, 29 aa, Artificial Sequence
  Cyclic GFR-binding peptide
  MOD_RES (26)..(27): Xaa is C or S
RYKKLIVNNSSDFYLVSIANLKTPAXXAK

SEQ ID NO: 39232 - protein, 23 aa, Artificial Sequence
  Cyclic GFR-binding peptide
MQYNKLIKPTKGILYLISIASLD

SEQ ID NO: 39233 - protein, 25 aa, Artificial Sequence
  Cyclic GFR-binding peptide
MNYHYKLIVNSSDDKYLVSIPSLQT

SEQ ID NO: 39234 - protein, 39 aa, Artificial Sequence; identical to SEQ ID NO: 2525
  Cyclic GFR-binding peptide
  MOD_RES (1)..(3)..(34)..(35): Xaa is C or S

SEQ ID NO: 39235 - protein, 30 aa, Artificial Sequence
  Cyclic GFR-binding peptide
  MOD_RES (1)..(3): Xaa is C or S
XGXAKVVMNYHYKLIVNNSSDKYLVSIPSL

SEQ ID NO: 39236 - protein, 32 aa, Artificial Sequence
  Cyclic GFR-binding peptide
  MOD_RES (26)..(27): Xaa is C or S
RYKKLVVKDYEDFYLMSIANLETPVXXAKPIS

SEQ ID NO: 39237 - protein, 27 aa, Artificial Sequence
  Cyclic GFR-binding peptide
  MOD_RES (1)..(1): Xaa is C or S
XSKVIMYHYKLIKPTKGIKYLISIPSL

SEQ ID NO: 39238 - protein, 28 aa, Artificial Sequence
  Cyclic GFR-binding peptide
MGERYKKLTPVGMDDFYLVSIANLKTPV

SEQ ID NO: 39239 - protein, 28 aa, Artificial Sequence
  Cyclic GFR-binding peptide
  MOD_RES (1)..(1): Xaa is C or S
XSKVVMRHKRLVKPTRGVYYLISTASLD

SEQ ID NO: 39240 - protein, 28 aa, Artificial Sequence
  Cyclic GFR-binding peptide
  MOD_RES (27)..(28): Xaa is C or S
MRYKKLIKPTKGIFYLISIANLDQSVXX

SEQ ID NO: 39241 - protein, 33 aa, Artificial Sequence; identical to SEQ ID NO: 2527
  Cyclic GFR-binding peptide

SEQ ID NO: 39242 - protein, 24 aa, Artificial Sequence
  Cyclic GFR-binding peptide
MNYHYKLIVNNSSDKYLVSIPSLK

SEQ ID NO: 39243 - protein, 35 aa, Artificial Sequence; identical to SEQ ID NO: 2528
  Cyclic GFR-binding peptide
  MOD_RES (2)..(34): Xaa is C or S

SEQ ID NO: 39244 - protein, 30 aa, Artificial Sequence
  Cyclic GFR-binding peptide
AKVVMNRYKKLIVNNSSDFYLVSIANLKTP

SEQ ID NO: 39245 - protein, 36 aa, Artificial Sequence; identical to SEQ ID NO: 2529
  Cyclic GFR-binding peptide
  MOD_RES (1)..(33)..(34): Xaa is C or S

SEQ ID NO: 39246 - protein, 28 aa, Artificial Sequence
  Cyclic GFR-binding peptide
EVVMERYKKLVVKDYEDFYLMSIANLET

SEQ ID NO: 39247 - protein, 28 aa, Artificial Sequence
  Cyclic GFR-binding peptide
LHDELTRYKKLFIPKKRVIEFYLVSIAN

SEQ ID NO: 39248 - protein, 34 aa, Artificial Sequence; identical to SEQ ID NO: 2533
  Cyclic GFR-binding peptide
  MOD_RES (32)..(33): Xaa is C or S

SEQ ID NO: 39249 - protein, 34 aa, Artificial Sequence
  Cyclic GFR-binding peptide
  MOD_RES (29)..(30): Xaa is C or S
VMNQYNKLIVNSSDDLYLVSIASLQTPAXXPKPV

SEQ ID NO: 39250 - protein, 29 aa, Artificial Sequence
  Cyclic GFR-binding peptide
  MOD_RES (1)..(1): Xaa is C or S
XGEVVMDYHYKLVVKENEDKYLMSIPSLE

SEQ ID NO: 39251 - protein, 36 aa, Artificial Sequence
  Cyclic GFR-binding peptide
  MOD_RES (30)..(31): Xaa is C or S
VVMNYHYKLIVNSSDDKYLVSIPSLQTPAXXPKPVT

SEQ ID NO: 39252 - protein, 39 aa, Artificial Sequence; identical to SEQ ID NO: 2536
  Cyclic GFR-binding peptide
  MOD_RES (35)..(35): Xaa is C or S

SEQ ID NO: 39253 - protein, 33 aa, Artificial Sequence; identical to SEQ ID NO: 2537
  Cyclic GFR-binding peptide
  MOD_RES (2)..(2): Xaa is C or S

SEQ ID NO: 39254 - protein, 27 aa, Artificial Sequence
  Cyclic GFR-binding peptide
  MOD_RES (2)..(2): Xaa is C or S
KXSKVIMRHKRLIKPTKGIYYLISTAS

SEQ ID NO: 39255 - protein, 36 aa, Artificial Sequence; identical to SEQ ID NO: 2538
  Cyclic GFR-binding peptide
  MOD_RES (1)..(3)..(35)..(36): Xaa is C or S

SEQ ID NO: 39256 - protein, 30 aa, Artificial Sequence
  Cyclic GFR-binding peptide
  MOD_RES (2)..(4): Xaa is C or S
RXGXGEVVMERHKRLVVKDYEDYYLMSTAS

SEQ ID NO: 39257 - protein, 28 aa, Artificial Sequence
  Cyclic GFR-binding peptide
KVVMNYHYKLIVNNSSDKYLVSIPSLKT

SEQ ID NO: 39258 - protein, 37 aa, Artificial Sequence; identical to SEQ ID NO: 2539
  Cyclic GFR-binding peptide
  MOD_RES (2)..(33)..(34): Xaa is C or S

SEQ ID NO: 39259 - protein, 33 aa, Artificial Sequence
  Cyclic GFR-binding peptide
DELTQYNKLFIPKKRVIELYLVSIASLQVQTPR

SEQ ID NO: 39260 - protein, 26 aa, Artificial Sequence
  Cyclic GFR-binding peptide
  MOD_RES (1)..(1): Xaa is C or S
XSKVVMRYKKLVKPTRGVFYLISIAN

SEQ ID NO: 39261 - protein, 41 aa, Artificial Sequence; identical to SEQ ID NO: 2542
  Cyclic GFR-binding peptide
  MOD_RES (2)..(4)..(36)..(37): Xaa is C or S

SEQ ID NO: 39262 - protein, 28 aa, Artificial Sequence
  Cyclic GFR-binding peptide
VVMNYHYKLIVNNSSDKYLVSIPSLKTP

SEQ ID NO: 39263 - protein, 35 aa, Artificial Sequence; identical to SEQ ID NO: 2544
  Cyclic GFR-binding peptide
  MOD_RES (2)..(34)..(35): Xaa is C or S

SEQ ID NO: 39264 - protein, 35 aa, Artificial Sequence; identical to SEQ ID NO: 2545
  Cyclic GFR-binding peptide
  MOD_RES (32)..(33): Xaa is C or S

SEQ ID NO: 39265 - protein, 24 aa, Artificial Sequence
  Cyclic GFR-binding peptide
VIMRYKKLIKPTKGIFYLISIANL

SEQ ID NO: 39266 - protein, 25 aa, Artificial Sequence
  Cyclic GFR-binding peptide
VMNYHYKLIVNNSSDKYLVSIPSLK

SEQ ID NO: 39267 - protein, 34 aa, Artificial Sequence; identical to SEQ ID NO: 2547
  Cyclic GFR-binding peptide
  MOD_RES (1)..(33): Xaa is C or S

SEQ ID NO: 39268 - protein, 28 aa, Artificial Sequence
  Cyclic GFR-binding peptide
  MOD_RES (2)..(2): Xaa is C or S
KXSKVVMQYNKLVKPTRGVLYLISIASL

SEQ ID NO: 39269 - protein, 35 aa, Artificial Sequence; identical to SEQ ID NO: 2549
  Cyclic GFR-binding peptide
  MOD_RES (2)..(34)..(35): Xaa is C or S

SEQ ID NO: 39270 - protein, 33 aa, Artificial Sequence; identical to SEQ ID NO: 2551
  Cyclic GFR-binding peptide
  MOD_RES (31)..(32): Xaa is C or S

SEQ ID NO: 39271 - protein, 36 aa, Artificial Sequence; identical to SEQ ID NO: 2550
  Cyclic GFR-binding peptide
  MOD_RES (32)..(33): Xaa is C or S

SEQ ID NO: 39272 - protein, 23 aa, Artificial Sequence
  Cyclic GFR-binding peptide
RHKRLTPVGMDDYYLVSTASLKT

SEQ ID NO: 39273 - protein, 36 aa, Artificial Sequence
  Cyclic GFR-binding peptide
  MOD_RES (30)..(31): Xaa is C or S
VVMNRHKRLIVNSSDDYYLVSTASLQTPAXXPKPVT

SEQ ID NO: 39274 - protein, 27 aa, Artificial Sequence
  Cyclic GFR-binding peptide
GEQYNKLTPVGMDDLYLVSIASLKTPV

SEQ ID NO: 39275 - protein, 27 aa, Artificial Sequence
  Cyclic GFR-binding peptide
VIMYHYKLVKPKRGVKYLISIPSLAQP

SEQ ID NO: 39276 - protein, 34 aa, Artificial Sequence; identical to SEQ ID NO: 2554
  Cyclic GFR-binding peptide
  MOD_RES (2)..(4): Xaa is C or S

SEQ ID NO: 39277 - protein, 38 aa, Artificial Sequence; identical to SEQ ID NO: 2555
  Cyclic GFR-binding peptide
  MOD_RES (33)..(34): Xaa is C or S

SEQ ID NO: 39278 - protein, 29 aa, Artificial Sequence
  Cyclic GFR-binding peptide
KVVMNQYNKLIVNNSSDLYLVSIASLKTP

SEQ ID NO: 39279 - protein, 28 aa, Artificial Sequence
  Cyclic GFR-binding peptide
  MOD_RES (2)..(2): Xaa is C or S
KXSRVIMYHYKLVKPKRGVKYLISIPSL

SEQ ID NO: 39280 - protein, 38 aa, Artificial Sequence; identical to SEQ ID NO: 2557
  Cyclic GFR-binding peptide
  MOD_RES (1)..(3)..(35)..(36): Xaa is C or S

SEQ ID NO: 39281 - protein, 36 aa, Artificial Sequence; identical to SEQ ID NO: 2558
  Cyclic GFR-binding peptide
  MOD_RES (2)..(4)..(36): Xaa is C or S

SEQ ID NO: 39282 - protein, 31 aa, Artificial Sequence
  Cyclic GFR-binding peptide
  MOD_RES (1)..(3): Xaa is C or S
XGXEAVSMGEQYNKLTPVGMDDLYLVSIASL

SEQ ID NO: 39283 - protein, 33 aa, Artificial Sequence
  Cyclic GFR-binding peptide
  MOD_RES (27)..(28): Xaa is C or S
NYHYKLIVNSSDDKYLVSIPSLQTPAXXPKPVT

SEQ ID NO: 39284 - protein, 30 aa, Artificial Sequence
  Cyclic GFR-binding peptide
  MOD_RES (30)..(30): Xaa is C or S
VVMNRHKRLIVNSSDDYYLVSTASLKTPAX

SEQ ID NO: 39285 - protein, 32 aa, Artificial Sequence
  Cyclic GFR-binding peptide
  MOD_RES (28)..(29): Xaa is C or S
MNYHYKLIVNSSDDKYLVSIPSLKTPAXXPKP

SEQ ID NO: 39286 - protein, 40 aa, Artificial Sequence; identical to SEQ ID NO: 2559
  Cyclic GFR-binding peptide
  MOD_RES (1)..(3)..(35)..(36): Xaa is C or S

SEQ ID NO: 39287 - protein, 26 aa, Artificial Sequence
  Cyclic GFR-binding peptide
MQYNKLVKPTRGVLYLISIASLDQPV

SEQ ID NO: 39288 - protein, 34 aa, Artificial Sequence; identical to SEQ ID NO: 2561
  Cyclic GFR-binding peptide
  MOD_RES (32)..(33): Xaa is C or S

SEQ ID NO: 39289 - protein, 27 aa, Artificial Sequence
  Cyclic GFR-binding peptide
  MOD_RES (27)..(27): Xaa is C or S
MQYNKLIKPTKGILYLISIASLDQSVX

SEQ ID NO: 39290 - protein, 27 aa, Artificial Sequence
  Cyclic GFR-binding peptide
ELTYHYKLFIPKKRVIEKYLVSIPSLQ

SEQ ID NO: 39291 - protein, 27 aa, Artificial Sequence
  Cyclic GFR-binding peptide
  MOD_RES (1)..(1): Xaa is C or S
XARVVMNRHKRLIVNSSDDYYLVSTAS

SEQ ID NO: 39292 - protein, 39 aa, Artificial Sequence; identical to SEQ ID NO: 2562
  Cyclic GFR-binding peptide
  MOD_RES (2)..(35)..(36): Xaa is C or S

SEQ ID NO: 39293 - protein, 29 aa, Artificial Sequence
  Cyclic GFR-binding peptide
  MOD_RES (28)..(29): Xaa is C or S
IMRYKKLVKPKRGVFYLISIANLAQPVXX

SEQ ID NO: 39294 - protein, 35 aa, Artificial Sequence; identical to SEQ ID NO: 2563
  Cyclic GFR-binding peptide
  MOD_RES (1)..(33)..(34): Xaa is C or S

SEQ ID NO: 39295 - protein, 27 aa, Artificial Sequence
  Cyclic GFR-binding peptide
KVIMRYKKLIKPTKGIFYLISIANLDQ

SEQ ID NO: 39296 - protein, 39 aa, Artificial Sequence; identical to SEQ ID NO: 2566
  Cyclic GFR-binding peptide
  MOD_RES (1)..(3)..(34)..(35): Xaa is C or S

SEQ ID NO: 39297 - protein, 25 aa, Artificial Sequence
  Cyclic GFR-binding peptide
VIMRHKRLIKPTKGIYYLISTASLD

SEQ ID NO: 39298 - protein, 32 aa, Artificial Sequence
  Cyclic GFR-binding peptide
  MOD_RES (27)..(27): Xaa is C or S
NRHKRLIVNSSDDYYLVSTASLKTPAXTPKTV

SEQ ID NO: 39299 - protein, 36 aa, Artificial Sequence
  Cyclic GFR-binding peptide
  MOD_RES (30)..(31): Xaa is C or S
VVMDRYKKLVVKENEDFYLMSIANLETPVXXAKPIK

SEQ ID NO: 39300 - protein, 31 aa, Artificial Sequence
  Cyclic GFR-binding peptide
  MOD_RES (1)..(1): Xaa is C or S
XGEVVMEYHYKLVVKDYEDKYLMSIPSLETP

SEQ ID NO: 39301 - protein, 31 aa, Artificial Sequence
  Cyclic GFR-binding peptide
  MOD_RES (30)..(31): Xaa is C or S
RVIMRHKRLVKPKRGVYYLISTASLAQPVXX

SEQ ID NO: 39302 - protein, 30 aa, Artificial Sequence
  Cyclic GFR-binding peptide
  MOD_RES (2)..(2): Xaa is C or S
KXSRVIMQYNKLVKPKRGVLYLISIASLAQ

SEQ ID NO: 39303 - protein, 34 aa, Artificial Sequence; identical to SEQ ID NO: 2572
  Cyclic GFR-binding peptide

SEQ ID NO: 39304 - protein, 31 aa, Artificial Sequence
  Cyclic GFR-binding peptide
  MOD_RES (27)..(28): Xaa is C or S
MQYNKLVKPKRGVLYLISIASLAQPVXXPAA

SEQ ID NO: 39305 - protein, 36 aa, Artificial Sequence; identical to SEQ ID NO: 2577
  Cyclic GFR-binding peptide
  MOD_RES (1)..(32)..(33): Xaa is C or S

SEQ ID NO: 39306 - protein, 38 aa, Artificial Sequence; identical to SEQ ID NO: 2579
  Cyclic GFR-binding peptide
  MOD_RES (2)..(4)..(35)..(36): Xaa is C or S

SEQ ID NO: 39307 - protein, 43 aa, Artificial Sequence; identical to SEQ ID NO: 2580
  Cyclic GFR-binding peptide
  MOD_RES (2)..(39): Xaa is C or S

SEQ ID NO: 39308 - protein, 30 aa, Artificial Sequence
  Cyclic GFR-binding peptide
  MOD_RES (27)..(28): Xaa is C or S
MRHKRLVKPKRGVYYLISTASLAQPVXXPA

SEQ ID NO: 39309 - protein, 33 aa, Artificial Sequence; identical to SEQ ID NO: 2582
  Cyclic GFR-binding peptide
  MOD_RES (31)..(32): Xaa is C or S

SEQ ID NO: 39310 - protein, 33 aa, Artificial Sequence
  Cyclic GFR-binding peptide
  MOD_RES (27)..(28): Xaa is C or S
MRYKKLVKPKRGVFYLISIANLAQPVXXPAASA

SEQ ID NO: 39311 - protein, 29 aa, Artificial Sequence
  Cyclic GFR-binding peptide
AVSMGERHKRLTPVGMDDYYLVSTASLKT

SEQ ID NO: 39312 - protein, 30 aa, Artificial Sequence
  Cyclic GFR-binding peptide
  MOD_RES (2)..(4): Xaa is C or S
SXKXSKVVMRHKRLVKPTRGVYYLISTASL

SEQ ID NO: 39313 - protein, 42 aa, Artificial Sequence; identical to SEQ ID NO: 2583
  Cyclic GFR-binding peptide
  MOD_RES (2)..(4)..(36): Xaa is C or S

SEQ ID NO: 39314 - protein, 36 aa, Artificial Sequence; identical to SEQ ID NO: 2585
  Cyclic GFR-binding peptide
  MOD_RES (36)..(36): Xaa is C or S

SEQ ID NO: 39315 - protein, 32 aa, Artificial Sequence
  Cyclic GFR-binding peptide
  MOD_RES (1)..(3): Xaa is C or S
XGXGEVVMERYKKLVVKDYEDFYLMSIANLET

SEQ ID NO: 39316 - protein, 32 aa, Artificial Sequence
  Cyclic GFR-binding peptide
  MOD_RES (30)..(31): Xaa is C or S
RVIMQYNKLVKPKRGVLYLISIASLAQPVXXP

SEQ ID NO: 39317 - protein, 27 aa, Artificial Sequence
  Cyclic GFR-binding peptide
IMQYNKLVKPKRGVLYLISIASLAQPV

SEQ ID NO: 39318 - protein, 30 aa, Artificial Sequence
  Cyclic GFR-binding peptide
  MOD_RES (27)..(28): Xaa is C or S
NQYNKLIVNSSDDLYLVSIASLKTPAXXPK

SEQ ID NO: 39319 - protein, 39 aa, Artificial Sequence; identical to SEQ ID NO: 2586
  Cyclic GFR-binding peptide
  MOD_RES (1)..(38): Xaa is C or S

SEQ ID NO: 39320 - protein, 34 aa, Artificial Sequence
  Cyclic GFR-binding peptide
  MOD_RES (29)..(30): Xaa is C or S
VVMQYNKLVKPTRGVLYLISIASLDQPVXXPSAS

SEQ ID NO: 39321 - protein, 25 aa, Artificial Sequence
  Cyclic GFR-binding peptide
QYNKLFIPKKRVIELYLVSIASLQV

SEQ ID NO: 39322 - protein, 29 aa, Artificial Sequence
  Cyclic GFR-binding peptide
  MOD_RES (1)..(1): Xaa is C or S
XEAVSMGERYKKLTPVGMDDFYLVSIANL

SEQ ID NO: 39323 - protein, 34 aa, Artificial Sequence; identical to SEQ ID NO: 2587
  Cyclic GFR-binding peptide
  MOD_RES (2)..(4): Xaa is C or S

SEQ ID NO: 39324 - protein, 29 aa, Artificial Sequence
  Cyclic GFR-binding peptide
VVMNQYNKLIVNSSDDLYLVSIASLQTPA

SEQ ID NO: 39325 - protein, 32 aa, Artificial Sequence
  Cyclic GFR-binding peptide
  MOD_RES (27)..(28): Xaa is C or S
MQYNKLVKPKRGVLYLISIASLAQPVXXPAAS

SEQ ID NO: 39326 - protein, 27 aa, Artificial Sequence
  Cyclic GFR-binding peptide
GEVVMDRYKKLVVKENEDFYLMSIANL

SEQ ID NO: 39327 - protein, 26 aa, Artificial Sequence
  Cyclic GFR-binding peptide
VVMNRHKRLIVNSSDDYYLVSTASLK

SEQ ID NO: 39328 - protein, 34 aa, Artificial Sequence; identical to SEQ ID NO: 2588
  Cyclic GFR-binding peptide
  MOD_RES (1)..(33)..(34): Xaa is C or S

SEQ ID NO: 39329 - protein, 27 aa, Artificial Sequence
  Cyclic GFR-binding peptide
  MOD_RES (27)..(27): Xaa is C or S
DRYKKLVVKENEDFYLMSIANLETPVX

SEQ ID NO: 39330 - protein, 30 aa, Artificial Sequence
  Cyclic GFR-binding peptide
  MOD_RES (30)..(30): Xaa is C or S
YHYKLFIPKKRVIEKYLVSIPSLQVQTPRX

SEQ ID NO: 39331 - protein, 36 aa, Artificial Sequence; identical to SEQ ID NO: 2589
  Cyclic GFR-binding peptide
  MOD_RES (32)..(33): Xaa is C or S

SEQ ID NO: 39332 - protein, 35 aa, Artificial Sequence
  Cyclic GFR-binding peptide
  MOD_RES (31)..(32): Xaa is C or S
VSMGERYKKLTPVGMDDFYLVSIANLKTPVXXAKG

SEQ ID NO: 39333 - protein, 36 aa, Artificial Sequence
  Cyclic GFR-binding peptide
  MOD_RES (1)..(3): Xaa is C or S
XKXALHDELTYHYKLFIPKKRVIEKYLVSIPSLQVQ

SEQ ID NO: 39334 - protein, 31 aa, Artificial Sequence
  Cyclic GFR-binding peptide
  MOD_RES (1)..(1): Xaa is C or S
XGEVVMDYHYKLVVKENEDKYLMSIPSLETP

SEQ ID NO: 39335 - protein, 29 aa, Artificial Sequence
  Cyclic GFR-binding peptide
  MOD_RES (26)..(27): Xaa is C or S
YHYKLVVKDYEDKYLMSIPSLETPVXXAK

SEQ ID NO: 39336 - protein, 27 aa, Artificial Sequence
  Cyclic GFR-binding peptide
ELTRYKKLFIPKKRVIEFYLVSIANLQ

SEQ ID NO: 39337 - protein, 29 aa, Artificial Sequence
  Cyclic GFR-binding peptide
ELTQYNKLFIPKKRVIELYLVSIASLQVQ

SEQ ID NO: 39338 - protein, 27 aa, Artificial Sequence
  Cyclic GFR-binding peptide
VMRHKRLVKPTRGVYYLISTASLDQPV

SEQ ID NO: 39339 - protein, 28 aa, Artificial Sequence
  Cyclic GFR-binding peptide
  MOD_RES (28)..(28): Xaa is C or S
MNRYKKLIVNNSSDFYLVSIANLKTPAX

SEQ ID NO: 39340 - protein, 27 aa, Artificial Sequence
  Cyclic GFR-binding peptide
VMNQYNKLIVNNSSDLYLVSIASLKTP

SEQ ID NO: 39341 - protein, 30 aa, Artificial Sequence
  Cyclic GFR-binding peptide
  MOD_RES (1)..(1): Xaa is C or S
XAKVVMNRYKKLIVNNSSDFYLVSIANLKT

SEQ ID NO: 39342 - protein, 29 aa, Artificial Sequence
  Cyclic GFR-binding peptide
  MOD_RES (28)..(29): Xaa is C or S
GERYKKLTPVGMDDFYLVSIANLKTPVXX

SEQ ID NO: 39343 - protein, 29 aa, Artificial Sequence
  Cyclic GFR-binding peptide
EAVSMGERYKKLTPVGMDDFYLVSIANLK

SEQ ID NO: 39344 - protein, 29 aa, Artificial Sequence
  Cyclic GFR-binding peptide
  MOD_RES (26)..(27): Xaa is C or S
RHKRLVVKENEDYYLMSTASLETPVXXAK

SEQ ID NO: 39345 - protein, 27 aa, Artificial Sequence
  Cyclic GFR-binding peptide
  MOD_RES (1)..(1): Xaa is C or S
XSKVVMYHYKLVKPTRGVKYLISIPSL

SEQ ID NO: 39346 - protein, 26 aa, Artificial Sequence
  Cyclic GFR-binding peptide
SMGERYKKLTPVGMDDFYLVSIANLK

SEQ ID NO: 39347 - protein, 32 aa, Artificial Sequence
  Cyclic GFR-binding peptide
  MOD_RES (2)..(4): Xaa is C or S
SXKXSRVIMYHYKLVKPKRGVKYLISIPSLAQ

SEQ ID NO: 39348 - protein, 28 aa, Artificial Sequence
  Cyclic GFR-binding peptide
LTYHYKLFIPKKRVIEKYLVSIPSLQVQ

SEQ ID NO: 39349 - protein, 28 aa, Artificial Sequence
  Cyclic GFR-binding peptide
  MOD_RES (2)..(2): Xaa is C or S
GXGEVVMDRYKKLVVKENEDFYLMSIAN

SEQ ID NO: 39350 - protein, 20 aa, Artificial Sequence
  Cyclic GFR-binding peptide
RYKKLTPVGMDDFYLVSIAN

SEQ ID NO: 39351 - protein, 35 aa, Artificial Sequence; identical to SEQ ID NO: 2592
  Cyclic GFR-binding peptide
  MOD_RES (2)..(4)..(35): Xaa is C or S

SEQ ID NO: 39352 - protein, 36 aa, Artificial Sequence; identical to SEQ ID NO: 2593
  Cyclic GFR-binding peptide
  MOD_RES (2)..(34): Xaa is C or S

SEQ ID NO: 39353 - protein, 29 aa, Artificial Sequence
  Cyclic GFR-binding peptide
  MOD_RES (2)..(2): Xaa is C or S
GXEAVSMGERHKRLTPVGMDDYYLVSTAS

SEQ ID NO: 39354 - protein, 30 aa, Artificial Sequence
  Cyclic GFR-binding peptide
  MOD_RES (28)..(29): Xaa is C or S
MNQYNKLIVNSSDDLYLVSIASLKTPAXXP

SEQ ID NO: 39355 - protein, 38 aa, Artificial Sequence; identical to SEQ ID NO: 2599
  Cyclic GFR-binding peptide
  MOD_RES (2)..(2): Xaa is C or S

SEQ ID NO: 39356 - protein, 38 aa, Artificial Sequence; identical to SEQ ID NO: 2600
  Cyclic GFR-binding peptide
  MOD_RES (35)..(35): Xaa is C or S

SEQ ID NO: 39357 - protein, 37 aa, Artificial Sequence; identical to SEQ ID NO: 2601
  Cyclic GFR-binding peptide
  MOD_RES (1)..(1): Xaa is C or S

SEQ ID NO: 39358 - protein, 31 aa, Artificial Sequence
  Cyclic GFR-binding peptide
  MOD_RES (27)..(28): Xaa is C or S
DRHKRLVVKENEDYYLMSTASLETPVXXAKP

SEQ ID NO: 39359 - protein, 32 aa, Artificial Sequence
  Cyclic GFR-binding peptide
  MOD_RES (2)..(2): Xaa is C or S
GXARVVMNQYNKLIVNSSDDLYLVSIASLQTP

SEQ ID NO: 39360 - protein, 40 aa, Artificial Sequence; identical to SEQ ID NO: 2602
  Cyclic GFR-binding peptide
  MOD_RES (2)..(4)..(35)..(36): Xaa is C or S

SEQ ID NO: 39361 - protein, 39 aa, Artificial Sequence; identical to SEQ ID NO: 2603
  Cyclic GFR-binding peptide
  MOD_RES (1)..(3)..(35)..(36): Xaa is C or S

SEQ ID NO: 39362 - protein, 25 aa, Artificial Sequence
  Cyclic GFR-binding peptide
NYHYKLIVNSSDDKYLVSIPSLKTP

SEQ ID NO: 39363 - protein, 31 aa, Artificial Sequence
  Cyclic GFR-binding peptide
  MOD_RES (30)..(31): Xaa is C or S
RVIMYHYKLVKPKRGVKYLISIPSLAQPVXX

SEQ ID NO: 39364 - protein, 41 aa, Artificial Sequence; identical to SEQ ID NO: 2605
  Cyclic GFR-binding peptide
  MOD_RES (1)..(3)..(35)..(36): Xaa is C or S

SEQ ID NO: 39365 - protein, 30 aa, Artificial Sequence
  Cyclic GFR-binding peptide
  MOD_RES (30)..(30): Xaa is C or S
RVIMRYKKLVKPKRGVFYLISIANLAQPVX

SEQ ID NO: 39366 - protein, 28 aa, Artificial Sequence
  Cyclic GFR-binding peptide
  MOD_RES (27)..(28): Xaa is C or S
NQYNKLIVNSSDDLYLVSIASLKTPAXX

SEQ ID NO: 39367 - protein, 29 aa, Artificial Sequence
  Cyclic GFR-binding peptide
  MOD_RES (2)..(2): Xaa is C or S
GXARVVMNYHYKLIVNSSDDKYLVSIPSL

SEQ ID NO: 39368 - protein, 33 aa, Artificial Sequence; identical to SEQ ID NO: 2606
  Cyclic GFR-binding peptide
  MOD_RES (1)..(33): Xaa is C or S

SEQ ID NO: 39369 - protein, 33 aa, Artificial Sequence; identical to SEQ ID NO: 2608
  Cyclic GFR-binding peptide
  MOD_RES (31)..(32): Xaa is C or S

SEQ ID NO: 39370 - protein, 33 aa, Artificial Sequence
  Cyclic GFR-binding peptide
  MOD_RES (30)..(31): Xaa is C or S
KVIMRYKKLIKPTKGIFYLISIANLDQSVXXPS

SEQ ID NO: 39371 - protein, 23 aa, Artificial Sequence
  Cyclic GFR-binding peptide
QYNKLVKPTRGVLYLISIASLDQ

SEQ ID NO: 39372 - protein, 41 aa, Artificial Sequence; identical to SEQ ID NO: 2610
  Cyclic GFR-binding peptide
  MOD_RES (2)..(4)..(35)..(36): Xaa is C or S

SEQ ID NO: 39373 - protein, 37 aa, Artificial Sequence; identical to SEQ ID NO: 2612
  Cyclic GFR-binding peptide
  MOD_RES (32)..(32): Xaa is C or S

SEQ ID NO: 39374 - protein, 30 aa, Artificial Sequence
  Cyclic GFR-binding peptide
  MOD_RES (1)..(3): Xaa is C or S
XGXGEVVMERHKRLVVKDYEDYYLMSTASL

SEQ ID NO: 39375 - protein, 31 aa, Artificial Sequence; identical to SEQ ID NO: 2611
  Cyclic GFR-binding peptide
  MOD_RES (31)..(31): Xaa is C or S

SEQ ID NO: 39376 - protein, 34 aa, Artificial Sequence
  Cyclic GFR-binding peptide
  MOD_RES (29)..(30): Xaa is C or S
VMNRHKRLIVNSSDDYYLVSTASLQTPAXXPKPV

SEQ ID NO: 39377 - protein, 35 aa, Artificial Sequence; identical to SEQ ID NO: 2615
  Cyclic GFR-binding peptide

SEQ ID NO: 39378 - protein, 37 aa, Artificial Sequence; identical to SEQ ID NO: 2617
  Cyclic GFR-binding peptide
  MOD_RES (2)..(2): Xaa is C or S

SEQ ID NO: 39379 - protein, 26 aa, Artificial Sequence
  Cyclic GFR-binding peptide
KVIMQYNKLIKPTKGILYLISIASLD

SEQ ID NO: 39380 - protein, 37 aa, Artificial Sequence; identical to SEQ ID NO: 2619
  Cyclic GFR-binding peptide
  MOD_RES (1)..(33)..(34): Xaa is C or S

SEQ ID NO: 39381 - protein, 37 aa, Artificial Sequence; identical to SEQ ID NO: 2622
  Cyclic GFR-binding peptide
  MOD_RES (32)..(33): Xaa is C or S

SEQ ID NO: 39382 - protein, 32 aa, Artificial Sequence
  Cyclic GFR-binding peptide
  MOD_RES (1)..(3): Xaa is C or S
XGXEAVSMGERHKRLTPVGMDDYYLVSTASLK

SEQ ID NO: 39383 - protein, 30 aa, Artificial Sequence
  Cyclic GFR-binding peptide
  MOD_RES (30)..(30): Xaa is C or S
RHKRLFIPKKRVIEYYLVSTASLQVQTPRX

SEQ ID NO: 39384 - protein, 32 aa, Artificial Sequence
  Cyclic GFR-binding peptide
  MOD_RES (2)..(2): Xaa is C or S
GXSRVVMNQYNKLIVNSSDDLYLVSIASLKTP

SEQ ID NO: 39385 - protein, 33 aa, Artificial Sequence
  Cyclic GFR-binding peptide
  MOD_RES (28)..(29): Xaa is C or S
MNQYNKLIVNSSDDLYLVSIASLKTPAXXPKPV

SEQ ID NO: 39386 - protein, 37 aa, Artificial Sequence; identical to SEQ ID NO: 2623
  Cyclic GFR-binding peptide
  MOD_RES (31)..(32): Xaa is C or S

SEQ ID NO: 39387 - protein, 34 aa, Artificial Sequence
  Cyclic GFR-binding peptide
  MOD_RES (2)..(4): Xaa is C or S
HXGXARVVMNRHKRLIVNSSDDYYLVSTASLQTP

SEQ ID NO: 39388 - protein, 35 aa, Artificial Sequence; identical to SEQ ID NO: 2625
  Cyclic GFR-binding peptide

SEQ ID NO: 39389 - protein, 32 aa, Artificial Sequence; identical to SEQ ID NO: 2627
  Cyclic GFR-binding peptide
  MOD_RES (1)..(1): Xaa is C or S

SEQ ID NO: 39390 - protein, 37 aa, Artificial Sequence; identical to SEQ ID NO: 2626
  Cyclic GFR-binding peptide
  MOD_RES (1)..(33): Xaa is C or S

SEQ ID NO: 39391 - protein, 39 aa, Artificial Sequence; identical to SEQ ID NO: 2629
  Cyclic GFR-binding peptide
  MOD_RES (2)..(34)..(35): Xaa is C or S

SEQ ID NO: 39392 - protein, 28 aa, Artificial Sequence
  Cyclic GFR-binding peptide
SRVVMNYHYKLIVNSSDDKYLVSIPSLK

SEQ ID NO: 39393 - protein, 31 aa, Artificial Sequence
  Cyclic GFR-binding peptide
  MOD_RES (28)..(29): Xaa is C or S
MNQYNKLIVNNSSDLYLVSIASLKTPAXXAK

SEQ ID NO: 39394 - protein, 39 aa, Artificial Sequence; identical to SEQ ID NO: 2631
  Cyclic GFR-binding peptide
  MOD_RES (2)..(4)..(35)..(36): Xaa is C or S

SEQ ID NO: 39395 - protein, 33 aa, Artificial Sequence
  Cyclic GFR-binding peptide
  MOD_RES (27)..(28): Xaa is C or S
NQYNKLIVNNSSDLYLVSIASLKTPAXXAKPVA

SEQ ID NO: 39396 - protein, 27 aa, Artificial Sequence
  Cyclic GFR-binding peptide
IMRHKRLIKPTKGIYYLISTASLDQSV

SEQ ID NO: 39397 - protein, 29 aa, Artificial Sequence
  Cyclic GFR-binding peptide
RVIMYHYKLVKPKRGVKYLISIPSLAQPV

SEQ ID NO: 39398 - protein, 31 aa, Artificial Sequence
  Cyclic GFR-binding peptide
  MOD_RES (2)..(4): Xaa is C or S
HXGXARVVMNQYNKLIVNSSDDLYLVSIASL

SEQ ID NO: 39399 - protein, 24 aa, Artificial Sequence
  Cyclic GFR-binding peptide
RVIMYHYKLVKPKRGVKYLISIPS

SEQ ID NO: 39400 - protein, 22 aa, Artificial Sequence
  Cyclic GFR-binding peptide
RHKRLIVNSSDDYYLVSTASLK

SEQ ID NO: 39401 - protein, 35 aa, Artificial Sequence; identical to SEQ ID NO: 2637
  Cyclic GFR-binding peptide
  MOD_RES (2)..(4)..(35): Xaa is C or S

SEQ ID NO: 39402 - protein, 35 aa, Artificial Sequence; identical to SEQ ID NO: 2639
  Cyclic GFR-binding peptide
  MOD_RES (1)..(3)..(34)..(35): Xaa is C or S

SEQ ID NO: 39403 - protein, 28 aa, Artificial Sequence
  Cyclic GFR-binding peptide
  MOD_RES (27)..(28): Xaa is C or S
MRYKKLVKPTRGVFYLISIANLDQPVXX

SEQ ID NO: 39404 - protein, 37 aa, Artificial Sequence; identical to SEQ ID NO: 2638
  Cyclic GFR-binding peptide
  MOD_RES (2)..(33)..(34): Xaa is C or S

SEQ ID NO: 39405 - protein, 32 aa, Artificial Sequence
  Cyclic GFR-binding peptide
  MOD_RES (2)..(4): Xaa is C or S
RXGXGEVVMDYHYKLVVKENEDKYLMSIPSLE

SEQ ID NO: 39406 - protein, 28 aa, Artificial Sequence
  Cyclic GFR-binding peptide
VIMQYNKLIKPTKGILYLISIASLDQSV

SEQ ID NO: 39407 - protein, 37 aa, Artificial Sequence
  Cyclic GFR-binding peptide
  MOD_RES (32)..(33): Xaa is C or S
AVSMGERYKKLTPVGMDDFYLVSIANLKTPVXXAKGV

SEQ ID NO: 39408 - protein, 28 aa, Artificial Sequence
  Cyclic GFR-binding peptide
  MOD_RES (27)..(28): Xaa is C or S
MYHYKLVKPKRGVKYLISIPSLAQPVXX

SEQ ID NO: 39409 - protein, 38 aa, Artificial Sequence; identical to SEQ ID NO: 2643
  Cyclic GFR-binding peptide
  MOD_RES (1)..(38): Xaa is C or S

SEQ ID NO: 39410 - protein, 29 aa, Artificial Sequence
  Cyclic GFR-binding peptide
  MOD_RES (2)..(4): Xaa is C or S
SXKXSRVIMRHKRLVKPKRGVYYLISTAS

SEQ ID NO: 39411 - protein, 24 aa, Artificial Sequence
  Cyclic GFR-binding peptide
VVMNQYNKLIVNNSSDLYLVSIAS

SEQ ID NO: 39412 - protein, 23 aa, Artificial Sequence
  Cyclic GFR-binding peptide
RYKKLFIPKKRVIEFYLVSIANL

SEQ ID NO: 39413 - protein, 34 aa, Artificial Sequence; identical to SEQ ID NO: 2646
  Cyclic GFR-binding peptide
  MOD_RES (31)..(31): Xaa is C or S

SEQ ID NO: 39414 - protein, 31 aa, Artificial Sequence; identical to SEQ ID NO: 2648
  Cyclic GFR-binding peptide
  MOD_RES (31)..(31): Xaa is C or S

SEQ ID NO: 39415 - protein, 24 aa, Artificial Sequence
  Cyclic GFR-binding peptide
MQYNKLVKPKRGVLYLISIASLAQ

SEQ ID NO: 39416 - protein, 35 aa, Artificial Sequence
  Cyclic GFR-binding peptide
  MOD_RES (29)..(30): Xaa is C or S
VIMRHKRLIKPTKGIYYLISTASLDQSVXXPSASA

SEQ ID NO: 39417 - protein, 26 aa, Artificial Sequence
  Cyclic GFR-binding peptide
SKVIMRHKRLIKPTKGIYYLISTASL

SEQ ID NO: 39418 - protein, 35 aa, Artificial Sequence
  Cyclic GFR-binding peptide
  MOD_RES (30)..(31): Xaa is C or S
VVMNRHKRLIVNSSDDYYLVSTASLKTPAXXPKPV

SEQ ID NO: 39419 - protein, 24 aa, Artificial Sequence
  Cyclic GFR-binding peptide
MNQYNKLIVNNSSDLYLVSIASLK

SEQ ID NO: 39420 - protein, 30 aa, Artificial Sequence
  Cyclic GFR-binding peptide
  MOD_RES (30)..(30): Xaa is C or S
VVMNQYNKLIVNSSDDLYLVSIASLQTPAX

SEQ ID NO: 39421 - protein, 34 aa, Artificial Sequence
  Cyclic GFR-binding peptide
  MOD_RES (28)..(29): Xaa is C or S
MNQYNKLIVNNSSDLYLVSIASLKTPAXXAKPVA

SEQ ID NO: 39422 - protein, 34 aa, Artificial Sequence
  Cyclic GFR-binding peptide
  MOD_RES (29)..(30): Xaa is C or S
VMNRYKKLIVNNSSDFYLVSIANLKTPAXXAKPV

SEQ ID NO: 39423 - protein, 37 aa, Artificial Sequence; identical to SEQ ID NO: 2651
  Cyclic GFR-binding peptide
  MOD_RES (31)..(32): Xaa is C or S

SEQ ID NO: 39424 - protein, 30 aa, Artificial Sequence
  Cyclic GFR-binding peptide
  MOD_RES (1)..(1): Xaa is C or S
XSRVIMQYNKLVKPKRGVLYLISIASLAQP

SEQ ID NO: 39425 - protein, 28 aa, Artificial Sequence
  Cyclic GFR-binding peptide
  MOD_RES (1)..(1): Xaa is C or S
XSRVIMQYNKLVKPKRGVLYLISIASLA

SEQ ID NO: 39426 - protein, 29 aa, Artificial Sequence
  Cyclic GFR-binding peptide
  MOD_RES (1)..(1): Xaa is C or S
XSKVVMQYNKLVKPTRGVLYLISIASLDQ

SEQ ID NO: 39427 - protein, 29 aa, Artificial Sequence
  Cyclic GFR-binding peptide
  MOD_RES (27)..(27): Xaa is C or S
NQYNKLIVNSSDDLYLVSIASLKTPAXTP

SEQ ID NO: 39428 - protein, 24 aa, Artificial Sequence
  Cyclic GFR-binding peptide
RVIMRHKRLVKPKRGVYYLISTAS

SEQ ID NO: 39429 - protein, 33 aa, Artificial Sequence
  Cyclic GFR-binding peptide
  MOD_RES (30)..(31): Xaa is C or S
RVIMRHKRLVKPKRGVYYLISTASLAQPVXXPA

SEQ ID NO: 39430 - protein, 35 aa, Artificial Sequence
  Cyclic GFR-binding peptide
  MOD_RES (34)..(34): Xaa is C or S
DELTYHYKLFIPKKRVIEKYLVSIPSLQVQTPRXQ

SEQ ID NO: 39431 - protein, 26 aa, Artificial Sequence
  Cyclic GFR-binding peptide
TYHYKLFIPKKRVIEKYLVSIPSLQV

SEQ ID NO: 39432 - protein, 31 aa, Artificial Sequence
  Cyclic GFR-binding peptide
  MOD_RES (26)..(27): Xaa is C or S
RHKRLIKPTKGIYYLISTASLDQSVXXPSAS

SEQ ID NO: 39433 - protein, 35 aa, Artificial Sequence
  Cyclic GFR-binding peptide
  MOD_RES (33)..(33): Xaa is C or S
ELTRHKRLFIPKKRVIEYYLVSTASLQVQTPRXQV

SEQ ID NO: 39434 - protein, 29 aa, Artificial Sequence
  Cyclic GFR-binding peptide
  MOD_RES (28)..(29): Xaa is C or S
MNRHKRLIVNSSDDYYLVSTASLQTPAXX

SEQ ID NO: 39435 - protein, 35 aa, Artificial Sequence; identical to SEQ ID NO: 2655
  Cyclic GFR-binding peptide
  MOD_RES (1)..(33)..(34): Xaa is C or S

SEQ ID NO: 39436 - protein, 29 aa, Artificial Sequence
  Cyclic GFR-binding peptide
  MOD_RES (2)..(2): Xaa is C or S
GXGEVVMDRYKKLVVKENEDFYLMSIANL

SEQ ID NO: 39437 - protein, 30 aa, Artificial Sequence
  Cyclic GFR-binding peptide
ARVVMNYHYKLIVNSSDDKYLVSIPSLQTP

SEQ ID NO: 39438 - protein, 32 aa, Artificial Sequence
  Cyclic GFR-binding peptide
  MOD_RES (29)..(30): Xaa is C or S
MGERYKKLTPVGMDDFYLVSIANLKTPVXXAK

SEQ ID NO: 39439 - protein, 36 aa, Artificial Sequence
  Cyclic GFR-binding peptide
  MOD_RES (30)..(31): Xaa is C or S
VVMNYHYKLIVNSSDDKYLVSIPSLKTPAXXPKPVY

SEQ ID NO: 39440 - protein, 24 aa, Artificial Sequence
  Cyclic GFR-binding peptide
RHKRLTPVGMDDYYLVSTASLKTP

SEQ ID NO: 39441 - protein, 26 aa, Artificial Sequence
  Cyclic GFR-binding peptide
  MOD_RES (1)..(1): Xaa is C or S
XSRVIMQYNKLVKPKRGVLYLISIAS

SEQ ID NO: 39442 - protein, 35 aa, Artificial Sequence; identical to SEQ ID NO: 2656
  Cyclic GFR-binding peptide
  MOD_RES (32)..(32): Xaa is C or S

SEQ ID NO: 39443 - protein, 29 aa, Artificial Sequence
  Cyclic GFR-binding peptide
  MOD_RES (27)..(28): Xaa is C or S
NYHYKLIVNSSDDKYLVSIPSLQTPAXXP

SEQ ID NO: 39444 - protein, 33 aa, Artificial Sequence
  Cyclic GFR-binding peptide
  MOD_RES (31)..(31): Xaa is C or S
TQYNKLFIPKKRVIELYLVSIASLQVQTPRXQV

SEQ ID NO: 39445 - protein, 36 aa, Artificial Sequence
  Cyclic GFR-binding peptide
  MOD_RES (30)..(31): Xaa is C or S
KVVMQYNKLVKPTRGVLYLISIASLDQPVXXPSASA

SEQ ID NO: 39446 - protein, 36 aa, Artificial Sequence; identical to SEQ ID NO: 2658
  Cyclic GFR-binding peptide
  MOD_RES (1)..(3)..(35): Xaa is C or S

SEQ ID NO: 39447 - protein, 36 aa, Artificial Sequence; identical to SEQ ID NO: 2659
  Cyclic GFR-binding peptide
  MOD_RES (1)..(1): Xaa is C or S

SEQ ID NO: 39448 - protein, 38 aa, Artificial Sequence; identical to SEQ ID NO: 2661
  Cyclic GFR-binding peptide
  MOD_RES (1)..(33)..(34): Xaa is C or S

SEQ ID NO: 39449 - protein, 21 aa, Artificial Sequence
  Cyclic GFR-binding peptide
DRYKKLVVKENEDFYLMSIAN

SEQ ID NO: 39450 - protein, 30 aa, Artificial Sequence
  Cyclic GFR-binding peptide
  MOD_RES (1)..(3): Xaa is C or S
XGXGEVVMEYHYKLVVKDYEDKYLMSIPSL

SEQ ID NO: 39451 - protein, 36 aa, Artificial Sequence
  Cyclic GFR-binding peptide
  MOD_RES (2)..(4): Xaa is C or S
EXKXALHDELTQYNKLFIPKKRVIELYLVSIASLQV

SEQ ID NO: 39452 - protein, 32 aa, Artificial Sequence; identical to SEQ ID NO: 2664
  Cyclic GFR-binding peptide
  MOD_RES (31)..(32): Xaa is C or S

SEQ ID NO: 39453 - protein, 28 aa, Artificial Sequence
  Cyclic GFR-binding peptide
  MOD_RES (26)..(27): Xaa is C or S
RHKRLIVNSSDDYYLVSTASLKTPAXXP

SEQ ID NO: 39454 - protein, 36 aa, Artificial Sequence; identical to SEQ ID NO: 2665
  Cyclic GFR-binding peptide
  MOD_RES (32)..(33): Xaa is C or S

SEQ ID NO: 39455 - protein, 30 aa, Artificial Sequence
  Cyclic GFR-binding peptide
  MOD_RES (27)..(28): Xaa is C or S
ERYKKLVVKDYEDFYLMSIANLETPVXXAK

SEQ ID NO: 39456 - protein, 29 aa, Artificial Sequence
  Cyclic GFR-binding peptide
  MOD_RES (27)..(28): Xaa is C or S
MQYNKLVKPTRGVLYLISIASLDQPVXXP

SEQ ID NO: 39457 - protein, 28 aa, Artificial Sequence
  Cyclic GFR-binding peptide
MGERHKRLTPVGMDDYYLVSTASLKTPV

SEQ ID NO: 39458 - protein, 36 aa, Artificial Sequence
  Cyclic GFR-binding peptide
  MOD_RES (30)..(31): Xaa is C or S
VVMNRHKRLIVNSSDDYYLVSTASLKTPAXXPKPVY

SEQ ID NO: 39459 - protein, 27 aa, Artificial Sequence
  Cyclic GFR-binding peptide
MNQYNKLIVNNSSDLYLVSIASLKTPA

SEQ ID NO: 39460 - protein, 29 aa, Artificial Sequence
  Cyclic GFR-binding peptide
HDELTRHKRLFIPKKRVIEYYLVSTASLQ

SEQ ID NO: 39461 - protein, 24 aa, Artificial Sequence
  Cyclic GFR-binding peptide
MERYKKLVVKDYEDFYLMSIANLE

SEQ ID NO: 39462 - protein, 34 aa, Artificial Sequence; identical to SEQ ID NO: 2667
  Cyclic GFR-binding peptide
  MOD_RES (2)..(4): Xaa is C or S

SEQ ID NO: 39463 - protein, 33 aa, Artificial Sequence
  Cyclic GFR-binding peptide
  MOD_RES (32)..(33): Xaa is C or S
AVSMGERYKKLTPVGMDDFYLVSIANLKTPVXX

SEQ ID NO: 39464 - protein, 34 aa, Artificial Sequence; identical to SEQ ID NO: 2671
  Cyclic GFR-binding peptide
  MOD_RES (2)..(33)..(34): Xaa is C or S

SEQ ID NO: 39465 - protein, 28 aa, Artificial Sequence
  Cyclic GFR-binding peptide
  MOD_RES (26)..(27): Xaa is C or S
QYNKLVKPKRGVLYLISIASLAQPVXXP

SEQ ID NO: 39466 - protein, 29 aa, Artificial Sequence
  Cyclic GFR-binding peptide
KVVMNYHYKLIVNNSSDKYLVSIPSLKTP

SEQ ID NO: 39467 - protein, 28 aa, Artificial Sequence
  Cyclic GFR-binding peptide
  MOD_RES (1)..(1): Xaa is C or S
XGEVVMDRYKKLVVKENEDFYLMSIANL

SEQ ID NO: 39468 - protein, 30 aa, Artificial Sequence; identical to SEQ ID NO: 2672
  Cyclic GFR-binding peptide

SEQ ID NO: 39469 - protein, 25 aa, Artificial Sequence
  Cyclic GFR-binding peptide
MDRHKRLVVKENEDYYLMSTASLET

SEQ ID NO: 39470 - protein, 21 aa, Artificial Sequence
  Cyclic GFR-binding peptide
MYHYKLIKPTKGIKYLISIPS

SEQ ID NO: 39471 - protein, 30 aa, Artificial Sequence
  Cyclic GFR-binding peptide
  MOD_RES (29)..(30): Xaa is C or S
VMNYHYKLIVNSSDDKYLVSIPSLQTPAXX

SEQ ID NO: 39472 - protein, 28 aa, Artificial Sequence
  Cyclic GFR-binding peptide
  MOD_RES (2)..(2): Xaa is C or S
GXARVVMNYHYKLIVNSSDDKYLVSIPS

SEQ ID NO: 39473 - protein, 28 aa, Artificial Sequence
  Cyclic GFR-binding peptide
VSMGERHKRLTPVGMDDYYLVSTASLKT

SEQ ID NO: 39474 - protein, 25 aa, Artificial Sequence
  Cyclic GFR-binding peptide
VIMYHYKLIKPTKGIKYLISIPSLD

SEQ ID NO: 39475 - protein, 30 aa, Artificial Sequence
  Cyclic GFR-binding peptide
  MOD_RES (26)..(26): Xaa is C or S
QYNKLIVNSSDDLYLVSIASLKTPAXTPKT

SEQ ID NO: 39476 - protein, 34 aa, Artificial Sequence
  Cyclic GFR-binding peptide
  MOD_RES (30)..(31): Xaa is C or S
SMGERYKKLTPVGMDDFYLVSIANLKTPVXXAKG

SEQ ID NO: 39477 - protein, 30 aa, Artificial Sequence; identical to SEQ ID NO: 1903
  Cyclic GFR-binding peptide

SEQ ID NO: 39478 - protein, 25 aa, Artificial Sequence
  Cyclic GFR-binding peptide
RYKKLVVKENEDFYLMSIANLETPV

SEQ ID NO: 39479 - protein, 23 aa, Artificial Sequence
  Cyclic GFR-binding peptide
MYHYKLVKPKRGVKYLISIPSLA

SEQ ID NO: 39480 - protein, 31 aa, Artificial Sequence
  Cyclic GFR-binding peptide
  MOD_RES (27)..(28): Xaa is C or S
MRHKRLIKPTKGIYYLISTASLDQSVXXPSA

SEQ ID NO: 39481 - protein, 30 aa, Artificial Sequence
  Cyclic GFR-binding peptide
  MOD_RES (29)..(30): Xaa is C or S
VVMRYKKLVKPTRGVFYLISIANLDQPVXX

SEQ ID NO: 39482 - protein, 27 aa, Artificial Sequence
  Cyclic GFR-binding peptide
VVMNQYNKLIVNSSDDLYLVSIASLKT

SEQ ID NO: 39483 - protein, 34 aa, Artificial Sequence; identical to SEQ ID NO: 2681
  Cyclic GFR-binding peptide
  MOD_RES (1)..(34): Xaa is C or S

SEQ ID NO: 39484 - protein, 24 aa, Artificial Sequence
  Cyclic GFR-binding peptide
NYHYKLIVNSSDDKYLVSIPSLKT

SEQ ID NO: 39485 - protein, 33 aa, Artificial Sequence
  Cyclic GFR-binding peptide
  MOD_RES (30)..(31): Xaa is C or S
VVMNYHYKLIVNNSSDKYLVSIPSLKTPAXXAK

SEQ ID NO: 39486 - protein, 34 aa, Artificial Sequence; identical to SEQ ID NO: 2683
  Cyclic GFR-binding peptide
  MOD_RES (31)..(31): Xaa is C or S

SEQ ID NO: 39487 - protein, 32 aa, Artificial Sequence
  Cyclic GFR-binding peptide
  MOD_RES (27)..(28): Xaa is C or S
MQYNKLIKPTKGILYLISIASLDQSVXXPSAS

SEQ ID NO: 39488 - protein, 29 aa, Artificial Sequence
  Cyclic GFR-binding peptide
LHDELTRHKRLFIPKKRVIEYYLVSTASL

SEQ ID NO: 39489 - protein, 25 aa, Artificial Sequence
  Cyclic GFR-binding peptide
EVVMDRYKKLVVKENEDFYLMSIAN

SEQ ID NO: 39490 - protein, 22 aa, Artificial Sequence
  Cyclic GFR-binding peptide
ERHKRLVVKDYEDYYLMSTASL

SEQ ID NO: 39491 - protein, 25 aa, Artificial Sequence
  Cyclic GFR-binding peptide
MDYHYKLVVKENEDKYLMSIPSLET

SEQ ID NO: 39492 - protein, 28 aa, Artificial Sequence
  Cyclic GFR-binding peptide
VIMRYKKLIKPTKGIFYLISIANLDQSV

SEQ ID NO: 39493 - protein, 34 aa, Artificial Sequence
  Cyclic GFR-binding peptide
  MOD_RES (30)..(31): Xaa is C or S
KVIMRHKRLIKPTKGIYYLISTASLDQSVXXPSA

SEQ ID NO: 39494 - protein, 32 aa, Artificial Sequence
  Cyclic GFR-binding peptide
  MOD_RES (1)..(3): Xaa is C or S
XGXGEVVMDRHKRLVVKENEDYYLMSTASLET

SEQ ID NO: 39495 - protein, 35 aa, Artificial Sequence
  Cyclic GFR-binding peptide
  MOD_RES (30)..(30): Xaa is C or S
VVMNQYNKLIVNSSDDLYLVSIASLKTPAXTPKTV

SEQ ID NO: 39496 - protein, 44 aa, Artificial Sequence; identical to SEQ ID NO: 2688
  Cyclic GFR-binding peptide
  MOD_RES (1)..(3)..(40): Xaa is C or S

SEQ ID NO: 39497 - protein, 29 aa, Artificial Sequence
  Cyclic GFR-binding peptide
  MOD_RES (2)..(2): Xaa is C or S
KXSKVIMQYNKLIKPTKGILYLISIASLD

SEQ ID NO: 39498 - protein, 41 aa, Artificial Sequence; identical to SEQ ID NO: 2693
  Cyclic GFR-binding peptide
  MOD_RES (1)..(38): Xaa is C or S

SEQ ID NO: 39499 - protein, 39 aa, Artificial Sequence; identical to SEQ ID NO: 2691
  Cyclic GFR-binding peptide
  MOD_RES (1)..(3)..(35): Xaa is C or S

SEQ ID NO: 39500 - protein, 34 aa, Artificial Sequence
  Cyclic GFR-binding peptide
  MOD_RES (30)..(31): Xaa is C or S
RVIMQYNKLVKPKRGVLYLISIASLAQPVXXPAA

SEQ ID NO: 39501 - protein, 36 aa, Artificial Sequence; identical to SEQ ID NO: 2695
  Cyclic GFR-binding peptide
  MOD_RES (1)..(3)..(35)..(36): Xaa is C or S

SEQ ID NO: 39502 - protein, 31 aa, Artificial Sequence
  Cyclic GFR-binding peptide
  MOD_RES (1)..(1): Xaa is C or S
XSRVVMNYHYKLIVNSSDDKYLVSIPSLKTP

SEQ ID NO: 39503 - protein, 28 aa, Artificial Sequence
  Cyclic GFR-binding peptide
  MOD_RES (27)..(27): Xaa is C or S
NRHKRLIVNSSDDYYLVSTASLKTPAXT

SEQ ID NO: 39504 - protein, 26 aa, Artificial Sequence
  Cyclic GFR-binding peptide
VMNQYNKLIVNSSDDLYLVSIASLQT

SEQ ID NO: 39505 - protein, 34 aa, Artificial Sequence
  Cyclic GFR-binding peptide
  MOD_RES (30)..(30): Xaa is C or S
QYNKLFIPKKRVIELYLVSIASLQVQTPRXQVNR

SEQ ID NO: 39506 - protein, 36 aa, Artificial Sequence; identical to SEQ ID NO: 2697
  Cyclic GFR-binding peptide
  MOD_RES (2)..(34)..(35): Xaa is C or S

SEQ ID NO: 39507 - protein, 32 aa, Artificial Sequence
  Cyclic GFR-binding peptide
  MOD_RES (27)..(28): Xaa is C or S
DRYKKLVVKENEDFYLMSIANLETPVXXAKPI

SEQ ID NO: 39508 - protein, 39 aa, Artificial Sequence; identical to SEQ ID NO: 2698
  Cyclic GFR-binding peptide
  MOD_RES (2)..(4)..(35)..(36): Xaa is C or S

SEQ ID NO: 39509 - protein, 30 aa, Artificial Sequence; identical to SEQ ID NO: 2699
  Cyclic GFR-binding peptide

SEQ ID NO: 39510 - protein, 33 aa, Artificial Sequence; identical to SEQ ID NO: 2700
  Cyclic GFR-binding peptide
  MOD_RES (32)..(33): Xaa is C or S

SEQ ID NO: 39511 - protein, 33 aa, Artificial Sequence
  Cyclic GFR-binding peptide
  MOD_RES (30)..(31): Xaa is C or S
VVMNQYNKLIVNSSDDLYLVSIASLQTPAXXPK

SEQ ID NO: 39512 - protein, 38 aa, Artificial Sequence; identical to SEQ ID NO: 2701
  Cyclic GFR-binding peptide
  MOD_RES (1)..(33)..(34): Xaa is C or S

SEQ ID NO: 39513 - protein, 32 aa, Artificial Sequence
  Cyclic GFR-binding peptide
  MOD_RES (30)..(31): Xaa is C or S
VVMEYHYKLVVKDYEDKYLMSIPSLETPVXXA

SEQ ID NO: 39514 - protein, 41 aa, Artificial Sequence; identical to SEQ ID NO: 2703
  Cyclic GFR-binding peptide
  MOD_RES (1)..(3)..(36)..(37): Xaa is C or S

SEQ ID NO: 39515 - protein, 31 aa, Artificial Sequence; identical to SEQ ID NO: 2702
  Cyclic GFR-binding peptide
  MOD_RES (31)..(31): Xaa is C or S

SEQ ID NO: 39516 - protein, 36 aa, Artificial Sequence
  Cyclic GFR-binding peptide
  MOD_RES (34)..(34): Xaa is C or S
DELTRHKRLFIPKKRVIEYYLVSTASLQVQTPRXQV

SEQ ID NO: 39517 - protein, 29 aa, Artificial Sequence
  Cyclic GFR-binding peptide
YHYKLFIPKKRVIEKYLVSIPSLQVQTPR

SEQ ID NO: 39518 - protein, 35 aa, Artificial Sequence; identical to SEQ ID NO: 2704
  Cyclic GFR-binding peptide
  MOD_RES (1)..(33)..(34): Xaa is C or S

SEQ ID NO: 39519 - protein, 31 aa, Artificial Sequence; identical to SEQ ID NO: 2705
  Cyclic GFR-binding peptide
  MOD_RES (1)..(1): Xaa is C or S

SEQ ID NO: 39520 - protein, 28 aa, Artificial Sequence
  Cyclic GFR-binding peptide
  MOD_RES (26)..(27): Xaa is C or S
RYKKLVKPKRGVFYLISIANLAQPVXXP

SEQ ID NO: 39521 - protein, 29 aa, Artificial Sequence
  Cyclic GFR-binding peptide
  MOD_RES (27)..(28): Xaa is C or S
EYHYKLVVKDYEDKYLMSIPSLETPVXXA

SEQ ID NO: 39522 - protein, 29 aa, Artificial Sequence
  Cyclic GFR-binding peptide
  MOD_RES (1)..(1): Xaa is C or S
XGEVVMEYHYKLVVKDYEDKYLMSIPSLE

SEQ ID NO: 39523 - protein, 34 aa, Artificial Sequence
  Cyclic GFR-binding peptide
  MOD_RES (30)..(31): Xaa is C or S
KVIMYHYKLIKPTKGIKYLISIPSLDQSVXXPSA

SEQ ID NO: 39524 - protein, 28 aa, Artificial Sequence
  Cyclic GFR-binding peptide
SKVIMYHYKLIKPTKGIKYLISIPSLDQ

SEQ ID NO: 39525 - protein, 36 aa, Artificial Sequence; identical to SEQ ID NO: 2707
  Cyclic GFR-binding peptide
  MOD_RES (1)..(3)..(34)..(35): Xaa is C or S

SEQ ID NO: 39526 - protein, 26 aa, Artificial Sequence
  Cyclic GFR-binding peptide
SRVVMNRHKRLIVNSSDDYYLVSTAS

SEQ ID NO: 39527 - protein, 39 aa, Artificial Sequence; identical to SEQ ID NO: 2709
  Cyclic GFR-binding peptide
  MOD_RES (33)..(34): Xaa is C or S

SEQ ID NO: 39528 - protein, 39 aa, Artificial Sequence; identical to SEQ ID NO: 2711
  Cyclic GFR-binding peptide
  MOD_RES (2)..(4)..(35)..(36): Xaa is C or S

SEQ ID NO: 39529 - protein, 36 aa, Artificial Sequence
  Cyclic GFR-binding peptide
  MOD_RES (2)..(4): Xaa is C or S
RXGXEAVSMGEQYNKLTPVGMDDLYLVSIASLKTPV

SEQ ID NO: 39530 - protein, 36 aa, Artificial Sequence
  Cyclic GFR-binding peptide
  MOD_RES (32)..(32): Xaa is C or S
LTQYNKLFIPKKRVIELYLVSIASLQVQTPRXQVNR

SEQ ID NO: 39531 - protein, 33 aa, Artificial Sequence
  Cyclic GFR-binding peptide
  MOD_RES (1)..(3): Xaa is C or S
XGXGEVVMDYHYKLVVKENEDKYLMSIPSLETP

SEQ ID NO: 39532 - protein, 37 aa, Artificial Sequence; identical to SEQ ID NO: 2713
  Cyclic GFR-binding peptide
  MOD_RES (2)..(35)..(36): Xaa is C or S

SEQ ID NO: 39533 - protein, 26 aa, Artificial Sequence
  Cyclic GFR-binding peptide
ARVVMNRHKRLIVNSSDDYYLVSTAS

SEQ ID NO: 39534 - protein, 33 aa, Artificial Sequence
  Cyclic GFR-binding peptide
  MOD_RES (2)..(4): Xaa is C or S
RXGXEAVSMGEQYNKLTPVGMDDLYLVSIASLK

SEQ ID NO: 39535 - protein, 27 aa, Artificial Sequence
  Cyclic GFR-binding peptide
  MOD_RES (27)..(27): Xaa is C or S
NYHYKLIVNSSDDKYLVSIPSLKTPAX

SEQ ID NO: 39536 - protein, 27 aa, Artificial Sequence
  Cyclic GFR-binding peptide
SRVIMRYKKLVKPKRGVFYLISIANLA

SEQ ID NO: 39537 - protein, 28 aa, Artificial Sequence
  Cyclic GFR-binding peptide
RVVMNYHYKLIVNSSDDKYLVSIPSLKT

SEQ ID NO: 39538 - protein, 24 aa, Artificial Sequence
  Cyclic GFR-binding peptide
RYKKLVKPTRGVFYLISIANLDQP

SEQ ID NO: 39539 - protein, 37 aa, Artificial Sequence
  Cyclic GFR-binding peptide
  MOD_RES (34)..(34): Xaa is C or S
DELTYHYKLFIPKKRVIEKYLVSIPSLQVQTPRXQVN

SEQ ID NO: 39540 - protein, 29 aa, Artificial Sequence
  Cyclic GFR-binding peptide
  MOD_RES (1)..(1): Xaa is C or S
XARVVMNYHYKLIVNSSDDKYLVSIPSLQ

SEQ ID NO: 39541 - protein, 31 aa, Artificial Sequence
  Cyclic GFR-binding peptide
  MOD_RES (1)..(3): Xaa is C or S
XGXGEVVMEYHYKLVVKDYEDKYLMSIPSLE

SEQ ID NO: 39542 - protein, 28 aa, Artificial Sequence
  Cyclic GFR-binding peptide
  MOD_RES (27)..(28): Xaa is C or S
EQYNKLTPVGMDDLYLVSIASLKTPVXX

SEQ ID NO: 39543 - protein, 24 aa, Artificial Sequence
  Cyclic GFR-binding peptide
ERHKRLVVKDYEDYYLMSTASLET

SEQ ID NO: 39544 - protein, 29 aa, Artificial Sequence
  Cyclic GFR-binding peptide
  MOD_RES (28)..(29): Xaa is C or S
MNYHYKLIVNSSDDKYLVSIPSLQTPAXX

SEQ ID NO: 39545 - protein, 33 aa, Artificial Sequence
  Cyclic GFR-binding peptide
  MOD_RES (1)..(3): Xaa is C or S
XKXALHDELTQYNKLFIPKKRVIELYLVSIASL

SEQ ID NO: 39546 - protein, 22 aa, Artificial Sequence
  Cyclic GFR-binding peptide
RHKRLVKPTRGVYYLISTASLD

SEQ ID NO: 39547 - protein, 41 aa, Artificial Sequence; identical to SEQ ID NO: 2721
  Cyclic GFR-binding peptide
  MOD_RES (1)..(3)..(35)..(36): Xaa is C or S

SEQ ID NO: 39548 - protein, 25 aa, Artificial Sequence
  Cyclic GFR-binding peptide
VSMGERHKRLTPVGMDDYYLVSTAS

SEQ ID NO: 39549 - protein, 36 aa, Artificial Sequence; identical to SEQ ID NO: 2723
  Cyclic GFR-binding peptide
  MOD_RES (1)..(1): Xaa is C or S

SEQ ID NO: 39550 - protein, 37 aa, Artificial Sequence; identical to SEQ ID NO: 2725
  Cyclic GFR-binding peptide
  MOD_RES (1)..(33)..(34): Xaa is C or S

SEQ ID NO: 39551 - protein, 30 aa, Artificial Sequence
  Cyclic GFR-binding peptide
  MOD_RES (26)..(27): Xaa is C or S
RHKRLTPVGMDDYYLVSTASLKTPVXXAKG

SEQ ID NO: 39552 - protein, 33 aa, Artificial Sequence; identical to SEQ ID NO: 2727
  Cyclic GFR-binding peptide
  MOD_RES (1)..(3): Xaa is C or S

SEQ ID NO: 39553 - protein, 40 aa, Artificial Sequence; identical to SEQ ID NO: 2728
  Cyclic GFR-binding peptide
  MOD_RES (2)..(4)..(35)..(36): Xaa is C or S

SEQ ID NO: 39554 - protein, 30 aa, Artificial Sequence
  Cyclic GFR-binding peptide
ELTYHYKLFIPKKRVIEKYLVSIPSLQVQT

SEQ ID NO: 39555 - protein, 34 aa, Artificial Sequence
  Cyclic GFR-binding peptide
  MOD_RES (2)..(4): Xaa is C or S
HXGXSRVVMNYHYKLIVNSSDDKYLVSIPSLKTP

SEQ ID NO: 39556 - protein, 25 aa, Artificial Sequence
  Cyclic GFR-binding peptide
MQYNKLVKPKRGVLYLISIASLAQP

SEQ ID NO: 39557 - protein, 32 aa, Artificial Sequence
  Cyclic GFR-binding peptide
  MOD_RES (30)..(31): Xaa is C or S
VVMNYHYKLIVNSSDDKYLVSIPSLQTPAXXP

SEQ ID NO: 39558 - protein, 34 aa, Artificial Sequence; identical to SEQ ID NO: 2732
  Cyclic GFR-binding peptide
  MOD_RES (2)..(33)..(34): Xaa is C or S

SEQ ID NO: 39559 - protein, 26 aa, Artificial Sequence
  Cyclic GFR-binding peptide
VMERHKRLVVKDYEDYYLMSTASLET

SEQ ID NO: 39560 - protein, 39 aa, Artificial Sequence; identical to SEQ ID NO: 2733
  Cyclic GFR-binding peptide
  MOD_RES (1)..(38): Xaa is C or S

SEQ ID NO: 39561 - protein, 24 aa, Artificial Sequence
  Cyclic GFR-binding peptide
MGERHKRLTPVGMDDYYLVSTASL

SEQ ID NO: 39562 - protein, 28 aa, Artificial Sequence
  Cyclic GFR-binding peptide
DELTQYNKLFIPKKRVIELYLVSIASLQ

SEQ ID NO: 39563 - protein, 33 aa, Artificial Sequence; identical to SEQ ID NO: 2735
  Cyclic GFR-binding peptide
  MOD_RES (32)..(33): Xaa is C or S

SEQ ID NO: 39564 - protein, 41 aa, Artificial Sequence; identical to SEQ ID NO: 2736
  Cyclic GFR-binding peptide
  MOD_RES (37)..(37): Xaa is C or S

SEQ ID NO: 39565 - protein, 23 aa, Artificial Sequence
  Cyclic GFR-binding peptide
IMQYNKLIKPTKGILYLISIASL

SEQ ID NO: 39566 - protein, 35 aa, Artificial Sequence
  Cyclic GFR-binding peptide
  MOD_RES (32)..(33): Xaa is C or S
AVSMGERHKRLTPVGMDDYYLVSTASLKTPVXXAK

SEQ ID NO: 39567 - protein, 35 aa, Artificial Sequence; identical to SEQ ID NO: 2738
  Cyclic GFR-binding peptide
  MOD_RES (2)..(4)..(35): Xaa is C or S

SEQ ID NO: 39568 - protein, 32 aa, Artificial Sequence
  Cyclic GFR-binding peptide
  MOD_RES (26)..(27): Xaa is C or S
RHKRLVKPKRGVYYLISTASLAQPVXXPAASA

SEQ ID NO: 39569 - protein, 32 aa, Artificial Sequence
  Cyclic GFR-binding peptide
  MOD_RES (2)..(4): Xaa is C or S
HXGXSRVVMNQYNKLIVNSSDDLYLVSIASLK

SEQ ID NO: 39570 - protein, 29 aa, Artificial Sequence
  Cyclic GFR-binding peptide
  MOD_RES (2)..(2): Xaa is C or S
GXGEVVMEYHYKLVVKDYEDKYLMSIPSL

SEQ ID NO: 39571 - protein, 37 aa, Artificial Sequence; identical to SEQ ID NO: 2739
  Cyclic GFR-binding peptide
  MOD_RES (1)..(3)..(34)..(35): Xaa is C or S

SEQ ID NO: 39572 - protein, 36 aa, Artificial Sequence; identical to SEQ ID NO: 2740
  Cyclic GFR-binding peptide
  MOD_RES (32)..(33): Xaa is C or S

SEQ ID NO: 39573 - protein, 32 aa, Artificial Sequence; identical to SEQ ID NO: 2742
  Cyclic GFR-binding peptide
  MOD_RES (31)..(32): Xaa is C or S

SEQ ID NO: 39574 - protein, 21 aa, Artificial Sequence
  Cyclic GFR-binding peptide
NYHYKLIVNNSSDKYLVSIPS

SEQ ID NO: 39575 - protein, 30 aa, Artificial Sequence
  Cyclic GFR-binding peptide
  MOD_RES (2)..(4): Xaa is C or S
SXKXSKVVMQYNKLVKPTRGVLYLISIASL

SEQ ID NO: 39576 - protein, 34 aa, Artificial Sequence; identical to SEQ ID NO: 2744
  Cyclic GFR-binding peptide
  MOD_RES (31)..(32): Xaa is C or S

SEQ ID NO: 39577 - protein, 29 aa, Artificial Sequence
  Cyclic GFR-binding peptide
  MOD_RES (1)..(3): Xaa is C or S
XKXSKVIMRHKRLIKPTKGIYYLISTASL

SEQ ID NO: 39578 - protein, 33 aa, Artificial Sequence; identical to SEQ ID NO: 2745
  Cyclic GFR-binding peptide
  MOD_RES (1)..(33): Xaa is C or S

SEQ ID NO: 39579 - protein, 39 aa, Artificial Sequence; identical to SEQ ID NO: 2746
  Cyclic GFR-binding peptide
  MOD_RES (1)..(33)..(34): Xaa is C or S

SEQ ID NO: 39580 - protein, 26 aa, Artificial Sequence
  Cyclic GFR-binding peptide
VMQYNKLVKPTRGVLYLISIASLDQP

SEQ ID NO: 39581 - protein, 26 aa, Artificial Sequence
  Cyclic GFR-binding peptide
KVVMRHKRLVKPTRGVYYLISTASLD

SEQ ID NO: 39582 - protein, 37 aa, Artificial Sequence; identical to SEQ ID NO: 2749
  Cyclic GFR-binding peptide
  MOD_RES (33)..(34): Xaa is C or S

SEQ ID NO: 39583 - protein, 33 aa, Artificial Sequence
  Cyclic GFR-binding peptide
  MOD_RES (29)..(30): Xaa is C or S
VMDYHYKLVVKENEDKYLMSIPSLETPVXXAKP

SEQ ID NO: 39584 - protein, 34 aa, Artificial Sequence; identical to SEQ ID NO: 2750
  Cyclic GFR-binding peptide
  MOD_RES (1)..(33)..(34): Xaa is C or S

SEQ ID NO: 39585 - protein, 30 aa, Artificial Sequence
  Cyclic GFR-binding peptide
TRHKRLFIPKKRVIEYYLVSTASLQVQTPR

SEQ ID NO: 39586 - protein, 36 aa, Artificial Sequence; identical to SEQ ID NO: 2751
  Cyclic GFR-binding peptide
  MOD_RES (2)..(33)..(34): Xaa is C or S

SEQ ID NO: 39587 - protein, 28 aa, Artificial Sequence
  Cyclic GFR-binding peptide
  MOD_RES (28)..(28): Xaa is C or S
MNRHKRLIVNSSDDYYLVSTASLQTPAX

SEQ ID NO: 39588 - protein, 32 aa, Artificial Sequence
  Cyclic GFR-binding peptide
  MOD_RES (26)..(27): Xaa is C or S
QYNKLIVNSSDDLYLVSIASLQTPAXXPKPVT

SEQ ID NO: 39589 - protein, 35 aa, Artificial Sequence
  Cyclic GFR-binding peptide
  MOD_RES (29)..(30): Xaa is C or S
VIMQYNKLIKPTKGILYLISIASLDQSVXXPSASA

SEQ ID NO: 39590 - protein, 36 aa, Artificial Sequence; identical to SEQ ID NO: 2753
  Cyclic GFR-binding peptide
  MOD_RES (1)..(33): Xaa is C or S

SEQ ID NO: 39591 - protein, 31 aa, Artificial Sequence
  Cyclic GFR-binding peptide
  MOD_RES (27)..(27): Xaa is C or S
NRHKRLIVNSSDDYYLVSTASLKTPAXTPKT

SEQ ID NO: 39592 - protein, 29 aa, Artificial Sequence
  Cyclic GFR-binding peptide
  MOD_RES (1)..(3): Xaa is C or S
XKXSKVVMRHKRLVKPTRGVYYLISTASL

SEQ ID NO: 39593 - protein, 32 aa, Artificial Sequence
  Cyclic GFR-binding peptide
  MOD_RES (29)..(30): Xaa is C or S
VIMRHKRLIKPTKGIYYLISTASLDQSVXXPS

SEQ ID NO: 39594 - protein, 25 aa, Artificial Sequence
  Cyclic GFR-binding peptide
IMRHKRLIKPTKGIYYLISTASLDQ

SEQ ID NO: 39595 - protein, 20 aa, Artificial Sequence
  Cyclic GFR-binding peptide
QYNKLIVNNSSDLYLVSIAS

SEQ ID NO: 39596 - protein, 29 aa, Artificial Sequence
  Cyclic GFR-binding peptide
  MOD_RES (1)..(3): Xaa is C or S
XGXAKVVMNQYNKLIVNNSSDLYLVSIAS

SEQ ID NO: 39597 - protein, 35 aa, Artificial Sequence; identical to SEQ ID NO: 2755
  Cyclic GFR-binding peptide
  MOD_RES (32)..(33): Xaa is C or S

SEQ ID NO: 39598 - protein, 32 aa, Artificial Sequence
  Cyclic GFR-binding peptide
  MOD_RES (2)..(4): Xaa is C or S
HXGXAKVVMNQYNKLIVNNSSDLYLVSIASLK

SEQ ID NO: 39599 - protein, 26 aa, Artificial Sequence
  Cyclic GFR-binding peptide
GEVVMERHKRLVVKDYEDYYLMSTAS

SEQ ID NO: 39600 - protein, 27 aa, Artificial Sequence
  Cyclic GFR-binding peptide
VMQYNKLVKPTRGVLYLISIASLDQPV

SEQ ID NO: 39601 - protein, 30 aa, Artificial Sequence
  Cyclic GFR-binding peptide
  MOD_RES (27)..(27): Xaa is C or S
NYHYKLIVNSSDDKYLVSIPSLKTPAXTPK

SEQ ID NO: 39602 - protein, 32 aa, Artificial Sequence
  Cyclic GFR-binding peptide
  MOD_RES (28)..(29): Xaa is C or S
VMRHKRLVKPTRGVYYLISTASLDQPVXXPSA

SEQ ID NO: 39603 - protein, 32 aa, Artificial Sequence
  Cyclic GFR-binding peptide
  MOD_RES (29)..(30): Xaa is C or S
VMDYHYKLVVKENEDKYLMSIPSLETPVXXAK

SEQ ID NO: 39604 - protein, 25 aa, Artificial Sequence
  Cyclic GFR-binding peptide
KVIMYHYKLIKPTKGIKYLISIPSL

SEQ ID NO: 39605 - protein, 34 aa, Artificial Sequence; identical to SEQ ID NO: 2761
  Cyclic GFR-binding peptide
  MOD_RES (1)..(3)..(34): Xaa is C or S

SEQ ID NO: 39606 - protein, 24 aa, Artificial Sequence
  Cyclic GFR-binding peptide
NQYNKLIVNSSDDLYLVSIASLQT

SEQ ID NO: 39607 - protein, 26 aa, Artificial Sequence
  Cyclic GFR-binding peptide
MGERHKRLTPVGMDDYYLVSTASLKT

SEQ ID NO: 39608 - protein, 36 aa, Artificial Sequence; identical to SEQ ID NO: 2763
  Cyclic GFR-binding peptide
  MOD_RES (2)..(4)..(36): Xaa is C or S

SEQ ID NO: 39609 - protein, 33 aa, Artificial Sequence; identical to SEQ ID NO: 2764
  Cyclic GFR-binding peptide
  MOD_RES (32)..(33): Xaa is C or S

SEQ ID NO: 39610 - protein, 24 aa, Artificial Sequence
  Cyclic GFR-binding peptide
MERHKRLVVKDYEDYYLMSTASLE

SEQ ID NO: 39611 - protein, 26 aa, Artificial Sequence
  Cyclic GFR-binding peptide
  MOD_RES (1)..(1): Xaa is C or S
XSRVIMRYKKLVKPKRGVFYLISIAN

SEQ ID NO: 39612 - protein, 28 aa, Artificial Sequence
  Cyclic GFR-binding peptide
VVMNRHKRLIVNSSDDYYLVSTASLKTP

SEQ ID NO: 39613 - protein, 34 aa, Artificial Sequence
  Cyclic GFR-binding peptide
  MOD_RES (2)..(4): Xaa is C or S
HXGXAKVVMNYHYKLIVNNSSDKYLVSIPSLKTP

SEQ ID NO: 39614 - protein, 36 aa, Artificial Sequence; identical to SEQ ID NO: 2766
  Cyclic GFR-binding peptide
  MOD_RES (1)..(3)..(34)..(35): Xaa is C or S

SEQ ID NO: 39615 - protein, 24 aa, Artificial Sequence
  Cyclic GFR-binding peptide
LTRYKKLFIPKKRVIEFYLVSIAN

SEQ ID NO: 39616 - protein, 30 aa, Artificial Sequence
  Cyclic GFR-binding peptide
  MOD_RES (30)..(30): Xaa is C or S
VVMDRHKRLVVKENEDYYLMSTASLETPVX

SEQ ID NO: 39617 - protein, 25 aa, Artificial Sequence
  Cyclic GFR-binding peptide
KVVMNRYKKLIVNNSSDFYLVSIAN

SEQ ID NO: 39618 - protein, 33 aa, Artificial Sequence; identical to SEQ ID NO: 2768
  Cyclic GFR-binding peptide
  MOD_RES (31)..(32): Xaa is C or S

SEQ ID NO: 39619 - protein, 34 aa, Artificial Sequence
  Cyclic GFR-binding peptide
  MOD_RES (28)..(29): Xaa is C or S
VMYHYKLVKPTRGVKYLISIPSLDQPVXXPSASA

SEQ ID NO: 39620 - protein, 20 aa, Artificial Sequence
  Cyclic GFR-binding peptide
RYKKLVVKDYEDFYLMSIAN

SEQ ID NO: 39621 - protein, 32 aa, Artificial Sequence; identical to SEQ ID NO: 2770
  Cyclic GFR-binding peptide
  MOD_RES (1)..(32): Xaa is C or S

SEQ ID NO: 39622 - protein, 32 aa, Artificial Sequence; identical to SEQ ID NO: 2771
  Cyclic GFR-binding peptide
  MOD_RES (31)..(32): Xaa is C or S

SEQ ID NO: 39623 - protein, 29 aa, Artificial Sequence
  Cyclic GFR-binding peptide
VSMGEQYNKLTPVGMDDLYLVSIASLKTP

SEQ ID NO: 39624 - protein, 39 aa, Artificial Sequence; identical to SEQ ID NO: 2774
  Cyclic GFR-binding peptide
  MOD_RES (1)..(3)..(34)..(35): Xaa is C or S

SEQ ID NO: 39625 - protein, 39 aa, Artificial Sequence; identical to SEQ ID NO: 2777
  Cyclic GFR-binding peptide
  MOD_RES (2)..(4)..(36)..(37): Xaa is C or S

SEQ ID NO: 39626 - protein, 27 aa, Artificial Sequence
  Cyclic GFR-binding peptide
AKVVMNYHYKLIVNNSSDKYLVSIPSL

SEQ ID NO: 39627 - protein, 33 aa, Artificial Sequence; identical to SEQ ID NO: 2778
  Cyclic GFR-binding peptide

SEQ ID NO: 39628 - protein, 35 aa, Artificial Sequence
  Cyclic GFR-binding peptide
  MOD_RES (29)..(30): Xaa is C or S
VMDRHKRLVVKENEDYYLMSTASLETPVXXAKPIK

SEQ ID NO: 39629 - protein, 33 aa, Artificial Sequence
  Cyclic GFR-binding peptide
  MOD_RES (30)..(31): Xaa is C or S
VVMNRHKRLIVNSSDDYYLVSTASLKTPAXXPK

SEQ ID NO: 39630 - protein, 28 aa, Artificial Sequence
  Cyclic GFR-binding peptide
KVVMRYKKLVKPTRGVFYLISIANLDQP

SEQ ID NO: 39631 - protein, 33 aa, Artificial Sequence
  Cyclic GFR-binding peptide
ALHDELTRYKKLFIPKKRVIEFYLVSIANLQVQ

SEQ ID NO: 39632 - protein, 34 aa, Artificial Sequence
  Cyclic GFR-binding peptide
  MOD_RES (29)..(30): Xaa is C or S
VMNYHYKLIVNSSDDKYLVSIPSLQTPAXXPKPV

SEQ ID NO: 39633 - protein, 30 aa, Artificial Sequence
  Cyclic GFR-binding peptide
  MOD_RES (26)..(27): Xaa is C or S
RYKKLVVKDYEDFYLMSIANLETPVXXAKP

SEQ ID NO: 39634 - protein, 39 aa, Artificial Sequence; identical to SEQ ID NO: 2782
  Cyclic GFR-binding peptide
  MOD_RES (1)..(3)..(34)..(35): Xaa is C or S

SEQ ID NO: 39635 - protein, 30 aa, Artificial Sequence
  Cyclic GFR-binding peptide
VSMGERYKKLTPVGMDDFYLVSIANLKTPV

SEQ ID NO: 39636 - protein, 38 aa, Artificial Sequence; identical to SEQ ID NO: 2786
  Cyclic GFR-binding peptide
  MOD_RES (2)..(4)..(36): Xaa is C or S

SEQ ID NO: 39637 - protein, 37 aa, Artificial Sequence; identical to SEQ ID NO: 2787
  Cyclic GFR-binding peptide
  MOD_RES (1)..(32)..(33): Xaa is C or S

SEQ ID NO: 39638 - protein, 22 aa, Artificial Sequence
  Cyclic GFR-binding peptide
MRHKRLVKPTRGVYYLISTASL

SEQ ID NO: 39639 - protein, 32 aa, Artificial Sequence
  Cyclic GFR-binding peptide
  MOD_RES (2)..(2): Xaa is C or S
GXAKVVMNYHYKLIVNNSSDKYLVSIPSLKTP

SEQ ID NO: 39640 - protein, 33 aa, Artificial Sequence; identical to SEQ ID NO: 2788
  Cyclic GFR-binding peptide
  MOD_RES (1)..(3): Xaa is C or S

SEQ ID NO: 39641 - protein, 32 aa, Artificial Sequence
  Cyclic GFR-binding peptide
  MOD_RES (27)..(28): Xaa is C or S
MRYKKLIKPTKGIFYLISIANLDQSVXXPSAS

SEQ ID NO: 39642 - protein, 31 aa, Artificial Sequence
  Cyclic GFR-binding peptide
  MOD_RES (2)..(2): Xaa is C or S
KXSRVIMQYNKLVKPKRGVLYLISIASLAQP

SEQ ID NO: 39643 - protein, 28 aa, Artificial Sequence
  Cyclic GFR-binding peptide
  MOD_RES (1)..(1): Xaa is C or S
XGEVVMERYKKLVVKDYEDFYLMSIANL

SEQ ID NO: 39644 - protein, 38 aa, Artificial Sequence; identical to SEQ ID NO: 2791
  Cyclic GFR-binding peptide
  MOD_RES (32)..(33): Xaa is C or S

SEQ ID NO: 39645 - protein, 32 aa, Artificial Sequence
  Cyclic GFR-binding peptide
  MOD_RES (30)..(31): Xaa is C or S
VVMERHKRLVVKDYEDYYLMSTASLETPVXXA

SEQ ID NO: 39646 - protein, 24 aa, Artificial Sequence
  Cyclic GFR-binding peptide
VVMDYHYKLVVKENEDKYLMSIPS

SEQ ID NO: 39647 - protein, 24 aa, Artificial Sequence
  Cyclic GFR-binding peptide
YHYKLVKPTRGVKYLISIPSLDQP

SEQ ID NO: 39648 - protein, 32 aa, Artificial Sequence
  Cyclic GFR-binding peptide
  MOD_RES (28)..(29): Xaa is C or S
MNQYNKLIVNSSDDLYLVSIASLKTPAXXPKP

SEQ ID NO: 39649 - protein, 34 aa, Artificial Sequence
  Cyclic GFR-binding peptide
  MOD_RES (28)..(29): Xaa is C or S
GEQYNKLTPVGMDDLYLVSIASLKTPVXXAKGVK

SEQ ID NO: 39650 - protein, 33 aa, Artificial Sequence
  Cyclic GFR-binding peptide
  MOD_RES (2)..(4): Xaa is C or S
HXGXSRVVMNRHKRLIVNSSDDYYLVSTASLKT

SEQ ID NO: 39651 - protein, 32 aa, Artificial Sequence
  Cyclic GFR-binding peptide
  MOD_RES (2)..(4): Xaa is C or S
SXKXSKVIMRYKKLIKPTKGIFYLISIANLDQ

SEQ ID NO: 39652 - protein, 36 aa, Artificial Sequence
  Cyclic GFR-binding peptide
  MOD_RES (31)..(32): Xaa is C or S
VSMGERHKRLTPVGMDDYYLVSTASLKTPVXXAKGV

SEQ ID NO: 39653 - protein, 37 aa, Artificial Sequence; identical to SEQ ID NO: 2793
  Cyclic GFR-binding peptide
  MOD_RES (1)..(3): Xaa is C or S

SEQ ID NO: 39654 - protein, 30 aa, Artificial Sequence
  Cyclic GFR-binding peptide
  MOD_RES (1)..(1): Xaa is C or S
XEAVSMGERHKRLTPVGMDDYYLVSTASLK

SEQ ID NO: 39655 - protein, 38 aa, Artificial Sequence; identical to SEQ ID NO: 2794
  Cyclic GFR-binding peptide
  MOD_RES (2)..(4)..(36)..(37): Xaa is C or S

SEQ ID NO: 39656 - protein, 35 aa, Artificial Sequence; identical to SEQ ID NO: 2795
  Cyclic GFR-binding peptide
  MOD_RES (1)..(3)..(35): Xaa is C or S

SEQ ID NO: 39657 - protein, 28 aa, Artificial Sequence
  Cyclic GFR-binding peptide
  MOD_RES (26)..(27): Xaa is C or S
RHKRLIVNSSDDYYLVSTASLQTPAXXP

SEQ ID NO: 39658 - protein, 26 aa, Artificial Sequence
  Cyclic GFR-binding peptide
SRVIMRHKRLVKPKRGVYYLISTASL

SEQ ID NO: 39659 - protein, 36 aa, Artificial Sequence
  Cyclic GFR-binding peptide
  MOD_RES (30)..(31): Xaa is C or S
VVMEYHYKLVVKDYEDKYLMSIPSLETPVXXAKPIS

SEQ ID NO: 39660 - protein, 29 aa, Artificial Sequence
  Cyclic GFR-binding peptide
  MOD_RES (27)..(28): Xaa is C or S
DRHKRLVVKENEDYYLMSTASLETPVXXA

SEQ ID NO: 39661 - protein, 24 aa, Artificial Sequence
  Cyclic GFR-binding peptide
MRHKRLVKPTRGVYYLISTASLDQ

SEQ ID NO: 39662 - protein, 21 aa, Artificial Sequence
  Cyclic GFR-binding peptide
QYNKLIVNSSDDLYLVSIASL

SEQ ID NO: 39663 - protein, 29 aa, Artificial Sequence
  Cyclic GFR-binding peptide
  MOD_RES (1)..(3): Xaa is C or S
XGXGEVVMDYHYKLVVKENEDKYLMSIPS

SEQ ID NO: 39664 - protein, 28 aa, Artificial Sequence
  Cyclic GFR-binding peptide
RVVMNQYNKLIVNSSDDLYLVSIASLKT

SEQ ID NO: 39665 - protein, 33 aa, Artificial Sequence
  Cyclic GFR-binding peptide
  MOD_RES (28)..(29): Xaa is C or S
MNYHYKLIVNSSDDKYLVSIPSLKTPAXXPKPV

SEQ ID NO: 39666 - protein, 27 aa, Artificial Sequence
  Cyclic GFR-binding peptide
  MOD_RES (1)..(1): Xaa is C or S
XSKVIMRHKRLIKPTKGIYYLISTASL

SEQ ID NO: 39667 - protein, 24 aa, Artificial Sequence
  Cyclic GFR-binding peptide
ERHKRLTPVGMDDYYLVSTASLKT

SEQ ID NO: 39668 - protein, 35 aa, Artificial Sequence; identical to SEQ ID NO: 2799
  Cyclic GFR-binding peptide
  MOD_RES (2)..(4)..(35): Xaa is C or S

SEQ ID NO: 39669 - protein, 30 aa, Artificial Sequence
  Cyclic GFR-binding peptide
  MOD_RES (29)..(30): Xaa is C or S
VMDRHKRLVVKENEDYYLMSTASLETPVXX

SEQ ID NO: 39670 - protein, 24 aa, Artificial Sequence
  Cyclic GFR-binding peptide
YHYKLFIPKKRVIEKYLVSIPSLQ

SEQ ID NO: 39671 - protein, 25 aa, Artificial Sequence
  Cyclic GFR-binding peptide
ERYKKLTPVGMDDFYLVSIANLKTP

SEQ ID NO: 39672 - protein, 34 aa, Artificial Sequence; identical to SEQ ID NO: 2810
  Cyclic GFR-binding peptide
  MOD_RES (1)..(32)..(33): Xaa is C or S

SEQ ID NO: 39673 - protein, 33 aa, Artificial Sequence
  Cyclic GFR-binding peptide
  MOD_RES (27)..(27): Xaa is C or S
NYHYKLIVNSSDDKYLVSIPSLKTPAXTPKTVH

SEQ ID NO: 39674 - protein, 34 aa, Artificial Sequence; identical to SEQ ID NO: 2811
  Cyclic GFR-binding peptide
  MOD_RES (32)..(33): Xaa is C or S

SEQ ID NO: 39675 - protein, 33 aa, Artificial Sequence; identical to SEQ ID NO: 2812
  Cyclic GFR-binding peptide
  MOD_RES (32)..(33): Xaa is C or S

SEQ ID NO: 39676 - protein, 33 aa, Artificial Sequence; identical to SEQ ID NO: 2813
  Cyclic GFR-binding peptide
  MOD_RES (2)..(2): Xaa is C or S

SEQ ID NO: 39677 - protein, 36 aa, Artificial Sequence
  Cyclic GFR-binding peptide
  MOD_RES (34)..(34): Xaa is C or S
DELTRYKKLFIPKKRVIEFYLVSIANLQVQTPRXQV

SEQ ID NO: 39678 - protein, 33 aa, Artificial Sequence; identical to SEQ ID NO: 2814
  Cyclic GFR-binding peptide
  MOD_RES (1)..(33): Xaa is C or S

SEQ ID NO: 39679 - protein, 24 aa, Artificial Sequence
  Cyclic GFR-binding peptide
MGEQYNKLTPVGMDDLYLVSIASL

SEQ ID NO: 39680 - protein, 31 aa, Artificial Sequence; identical to SEQ ID NO: 2815
  Cyclic GFR-binding peptide

SEQ ID NO: 39681 - protein, 37 aa, Artificial Sequence; identical to SEQ ID NO: 2816
  Cyclic GFR-binding peptide
  MOD_RES (2)..(33)..(34): Xaa is C or S

SEQ ID NO: 39682 - protein, 29 aa, Artificial Sequence
  Cyclic GFR-binding peptide
  MOD_RES (28)..(29): Xaa is C or S
VMRYKKLVKPTRGVFYLISIANLDQPVXX

SEQ ID NO: 39683 - protein, 29 aa, Artificial Sequence
  Cyclic GFR-binding peptide
  MOD_RES (2)..(2): Xaa is C or S
KXSKVIMRYKKLIKPTKGIFYLISIANLD

SEQ ID NO: 39684 - protein, 25 aa, Artificial Sequence
  Cyclic GFR-binding peptide
SRVIMRHKRLVKPKRGVYYLISTAS

SEQ ID NO: 39685 - protein, 38 aa, Artificial Sequence
  Cyclic GFR-binding peptide
  MOD_RES (32)..(33): Xaa is C or S
AVSMGEQYNKLTPVGMDDLYLVSIASLKTPVXXAKGVK

SEQ ID NO: 39686 - protein, 32 aa, Artificial Sequence
  Cyclic GFR-binding peptide
  MOD_RES (30)..(31): Xaa is C or S
VVMNYHYKLIVNSSDDKYLVSIPSLKTPAXXP

SEQ ID NO: 39687 - protein, 32 aa, Artificial Sequence
  Cyclic GFR-binding peptide
  MOD_RES (1)..(3): Xaa is C or S
XGXARVVMNQYNKLIVNSSDDLYLVSIASLQT

SEQ ID NO: 39688 - protein, 34 aa, Artificial Sequence; identical to SEQ ID NO: 2820
  Cyclic GFR-binding peptide
  MOD_RES (1)..(3): Xaa is C or S

SEQ ID NO: 39689 - protein, 32 aa, Artificial Sequence
  Cyclic GFR-binding peptide
  MOD_RES (2)..(4): Xaa is C or S
SXKXSRVIMRHKRLVKPKRGVYYLISTASLAQ

SEQ ID NO: 39690 - protein, 23 aa, Artificial Sequence
  Cyclic GFR-binding peptide
MNRHKRLIVNSSDDYYLVSTASL

SEQ ID NO: 39691 - protein, 31 aa, Artificial Sequence
  Cyclic GFR-binding peptide
  MOD_RES (28)..(29): Xaa is C or S
MNQYNKLIVNSSDDLYLVSIASLQTPAXXPK

SEQ ID NO: 39692 - protein, 34 aa, Artificial Sequence
  Cyclic GFR-binding peptide
  MOD_RES (30)..(31): Xaa is C or S
VVMDYHYKLVVKENEDKYLMSIPSLETPVXXAKP

SEQ ID NO: 39693 - protein, 31 aa, Artificial Sequence
  Cyclic GFR-binding peptide
  MOD_RES (30)..(30): Xaa is C or S
QYNKLFIPKKRVIELYLVSIASLQVQTPRXQ

SEQ ID NO: 39694 - protein, 33 aa, Artificial Sequence
  Cyclic GFR-binding peptide
  MOD_RES (2)..(4): Xaa is C or S
SXKXSKVIMRHKRLIKPTKGIYYLISTASLDQS

SEQ ID NO: 39695 - protein, 33 aa, Artificial Sequence
  Cyclic GFR-binding peptide
  MOD_RES (2)..(4): Xaa is C or S
RXGXGEVVMEYHYKLVVKDYEDKYLMSIPSLET

SEQ ID NO: 39696 - protein, 30 aa, Artificial Sequence
  Cyclic GFR-binding peptide
  MOD_RES (28)..(29): Xaa is C or S
GERHKRLTPVGMDDYYLVSTASLKTPVXXA

SEQ ID NO: 39697 - protein, 31 aa, Artificial Sequence
  Cyclic GFR-binding peptide
  MOD_RES (26)..(27): Xaa is C or S
RYKKLVKPTRGVFYLISIANLDQPVXXPSAS

SEQ ID NO: 39698 - protein, 24 aa, Artificial Sequence
  Cyclic GFR-binding peptide
VMDYHYKLVVKENEDKYLMSIPSL

SEQ ID NO: 39699 - protein, 30 aa, Artificial Sequence
  Cyclic GFR-binding peptide
  MOD_RES (2)..(4): Xaa is C or S
HXGXAKVVMNYHYKLIVNNSSDKYLVSIPS

SEQ ID NO: 39700 - protein, 33 aa, Artificial Sequence
  Cyclic GFR-binding peptide
  MOD_RES (27)..(28): Xaa is C or S
EQYNKLTPVGMDDLYLVSIASLKTPVXXAKGVK

SEQ ID NO: 39701 - protein, 37 aa, Artificial Sequence; identical to SEQ ID NO: 2826
  Cyclic GFR-binding peptide
  MOD_RES (2)..(4)..(35)..(36): Xaa is C or S

SEQ ID NO: 39702 - protein, 29 aa, Artificial Sequence
  Cyclic GFR-binding peptide
  MOD_RES (1)..(3): Xaa is C or S
XGXSRVVMNYHYKLIVNSSDDKYLVSIPS

SEQ ID NO: 39703 - protein, 31 aa, Artificial Sequence
  Cyclic GFR-binding peptide
  MOD_RES (2)..(2): Xaa is C or S
KXALHDELTRYKKLFIPKKRVIEFYLVSIAN

SEQ ID NO: 39704 - protein, 25 aa, Artificial Sequence
  Cyclic GFR-binding peptide
ERHKRLTPVGMDDYYLVSTASLKTP

SEQ ID NO: 39705 - protein, 27 aa, Artificial Sequence
  Cyclic GFR-binding peptide
IMYHYKLIKPTKGIKYLISIPSLDQSV

SEQ ID NO: 39706 - protein, 30 aa, Artificial Sequence
  Cyclic GFR-binding peptide
GEVVMERHKRLVVKDYEDYYLMSTASLETP

SEQ ID NO: 39707 - protein, 27 aa, Artificial Sequence
  Cyclic GFR-binding peptide
GEVVMDRHKRLVVKENEDYYLMSTASL

SEQ ID NO: 39708 - protein, 30 aa, Artificial Sequence; identical to SEQ ID NO: 1905
  Cyclic GFR-binding peptide

SEQ ID NO: 39709 - protein, 31 aa, Artificial Sequence
  Cyclic GFR-binding peptide
LHDELTQYNKLFIPKKRVIELYLVSIASLQV

SEQ ID NO: 39710 - protein, 24 aa, Artificial Sequence
  Cyclic GFR-binding peptide
RYKKLIKPTKGIFYLISIANLDQS

SEQ ID NO: 39711 - protein, 28 aa, Artificial Sequence
  Cyclic GFR-binding peptide
AKVVMNQYNKLIVNNSSDLYLVSIASLK

SEQ ID NO: 39712 - protein, 32 aa, Artificial Sequence; identical to SEQ ID NO: 2832
  Cyclic GFR-binding peptide
  MOD_RES (32)..(32): Xaa is C or S

SEQ ID NO: 39713 - protein, 25 aa, Artificial Sequence
  Cyclic GFR-binding peptide
TQYNKLFIPKKRVIELYLVSIASLQ

SEQ ID NO: 39714 - protein, 31 aa, Artificial Sequence
  Cyclic GFR-binding peptide
  MOD_RES (29)..(30): Xaa is C or S
VMEYHYKLVVKDYEDKYLMSIPSLETPVXXA

SEQ ID NO: 39715 - protein, 35 aa, Artificial Sequence
  Cyclic GFR-binding peptide
  MOD_RES (30)..(31): Xaa is C or S
KVVMRHKRLVKPTRGVYYLISTASLDQPVXXPSAS

SEQ ID NO: 39716 - protein, 23 aa, Artificial Sequence
  Cyclic GFR-binding peptide
RYKKLIVNNSSDFYLVSIANLKT

SEQ ID NO: 39717 - protein, 25 aa, Artificial Sequence
  Cyclic GFR-binding peptide
YHYKLVVKDYEDKYLMSIPSLETPV

SEQ ID NO: 39718 - protein, 38 aa, Artificial Sequence
  Cyclic GFR-binding peptide
  MOD_RES (34)..(34): Xaa is C or S
DELTRYKKLFIPKKRVIEFYLVSIANLQVQTPRXQVNR

SEQ ID NO: 39719 - protein, 31 aa, Artificial Sequence; identical to SEQ ID NO: 2834
  Cyclic GFR-binding peptide
  MOD_RES (31)..(31): Xaa is C or S

SEQ ID NO: 39720 - protein, 26 aa, Artificial Sequence
  Cyclic GFR-binding peptide
  MOD_RES (26)..(26): Xaa is C or S
QYNKLIKPTKGILYLISIASLDQSVX

SEQ ID NO: 39721 - protein, 38 aa, Artificial Sequence; identical to SEQ ID NO: 2835
  Cyclic GFR-binding peptide
  MOD_RES (2)..(4)..(36)..(37): Xaa is C or S

SEQ ID NO: 39722 - protein, 35 aa, Artificial Sequence; identical to SEQ ID NO: 2838
  Cyclic GFR-binding peptide
  MOD_RES (31)..(32): Xaa is C or S

SEQ ID NO: 39723 - protein, 23 aa, Artificial Sequence
  Cyclic GFR-binding peptide
MGEQYNKLTPVGMDDLYLVSIAS

SEQ ID NO: 39724 - protein, 27 aa, Artificial Sequence
  Cyclic GFR-binding peptide
  MOD_RES (26)..(27): Xaa is C or S
RYKKLTPVGMDDFYLVSIANLKTPVXX

SEQ ID NO: 39725 - protein, 30 aa, Artificial Sequence
  Cyclic GFR-binding peptide
  MOD_RES (29)..(30): Xaa is C or S
VMNQYNKLIVNSSDDLYLVSIASLQTPAXX

SEQ ID NO: 39726 - protein, 40 aa, Artificial Sequence; identical to SEQ ID NO: 2841
  Cyclic GFR-binding peptide
  MOD_RES (1)..(3)..(36)..(37): Xaa is C or S

SEQ ID NO: 39727 - protein, 33 aa, Artificial Sequence; identical to SEQ ID NO: 2842
  Cyclic GFR-binding peptide
  MOD_RES (33)..(33): Xaa is C or S

SEQ ID NO: 39728 - protein, 31 aa, Artificial Sequence
  Cyclic GFR-binding peptide
  MOD_RES (26)..(27): Xaa is C or S
RYKKLVVKDYEDFYLMSIANLETPVXXAKPI

SEQ ID NO: 39729 - protein, 31 aa, Artificial Sequence
  Cyclic GFR-binding peptide
  MOD_RES (1)..(3): Xaa is C or S
XGXEAVSMGERYKKLTPVGMDDFYLVSIANL

SEQ ID NO: 39730 - protein, 34 aa, Artificial Sequence
  Cyclic GFR-binding peptide
  MOD_RES (34)..(34): Xaa is C or S
DELTRHKRLFIPKKRVIEYYLVSTASLQVQTPRX

SEQ ID NO: 39731 - protein, 24 aa, Artificial Sequence
  Cyclic GFR-binding peptide
KVVMQYNKLVKPTRGVLYLISIAS

SEQ ID NO: 39732 - protein, 41 aa, Artificial Sequence; identical to SEQ ID NO: 2844
  Cyclic GFR-binding peptide
  MOD_RES (2)..(35)..(36): Xaa is C or S

SEQ ID NO: 39733 - protein, 28 aa, Artificial Sequence
  Cyclic GFR-binding peptide
VVMNRHKRLIVNSSDDYYLVSTASLQTP

SEQ ID NO: 39734 - protein, 27 aa, Artificial Sequence
  Cyclic GFR-binding peptide
  MOD_RES (27)..(27): Xaa is C or S
MYHYKLVKPKRGVKYLISIPSLAQPVX

SEQ ID NO: 39735 - protein, 32 aa, Artificial Sequence
  Cyclic GFR-binding peptide
  MOD_RES (30)..(31): Xaa is C or S
VVMERYKKLVVKDYEDFYLMSIANLETPVXXA

SEQ ID NO: 39736 - protein, 30 aa, Artificial Sequence
  Cyclic GFR-binding peptide
  MOD_RES (2)..(2): Xaa is C or S
KXSKVVMQYNKLVKPTRGVLYLISIASLDQ

SEQ ID NO: 39737 - protein, 31 aa, Artificial Sequence
  Cyclic GFR-binding peptide
LTRYKKLFIPKKRVIEFYLVSIANLQVQTPR

SEQ ID NO: 39738 - protein, 36 aa, Artificial Sequence
  Cyclic GFR-binding peptide
  MOD_RES (30)..(31): Xaa is C or S
SMGEQYNKLTPVGMDDLYLVSIASLKTPVXXAKGVK

SEQ ID NO: 39739 - protein, 27 aa, Artificial Sequence
  Cyclic GFR-binding peptide
KVIMYHYKLIKPTKGIKYLISIPSLDQ

SEQ ID NO: 39740 - protein, 40 aa, Artificial Sequence; identical to SEQ ID NO: 2851
  Cyclic GFR-binding peptide
  MOD_RES (2)..(4)..(35)..(36): Xaa is C or S

SEQ ID NO: 39741 - protein, 40 aa, Artificial Sequence; identical to SEQ ID NO: 2852
  Cyclic GFR-binding peptide
  MOD_RES (1)..(3)..(34)..(35): Xaa is C or S

SEQ ID NO: 39742 - protein, 34 aa, Artificial Sequence
  Cyclic GFR-binding peptide
  MOD_RES (1)..(3): Xaa is C or S
XGXEAVSMGEQYNKLTPVGMDDLYLVSIASLKTP

SEQ ID NO: 39743 - protein, 35 aa, Artificial Sequence; identical to SEQ ID NO: 2854
  Cyclic GFR-binding peptide
  MOD_RES (1)..(34)..(35): Xaa is C or S

SEQ ID NO: 39744 - protein, 32 aa, Artificial Sequence
  Cyclic GFR-binding peptide
  MOD_RES (32)..(32): Xaa is C or S
LTRHKRLFIPKKRVIEYYLVSTASLQVQTPRX

SEQ ID NO: 39745 - protein, 36 aa, Artificial Sequence; identical to SEQ ID NO: 2855
  Cyclic GFR-binding peptide
  MOD_RES (2)..(2): Xaa is C or S

SEQ ID NO: 39746 - protein, 38 aa, Artificial Sequence; identical to SEQ ID NO: 2856
  Cyclic GFR-binding peptide
  MOD_RES (2)..(34)..(35): Xaa is C or S

SEQ ID NO: 39747 - protein, 20 aa, Artificial Sequence
  Cyclic GFR-binding peptide
RYKKLVKPTRGVFYLISIAN

SEQ ID NO: 39748 - protein, 30 aa, Artificial Sequence
  Cyclic GFR-binding peptide
  MOD_RES (2)..(2): Xaa is C or S
GXGEVVMEYHYKLVVKDYEDKYLMSIPSLE

SEQ ID NO: 39749 - protein, 41 aa, Artificial Sequence; identical to SEQ ID NO: 2859
  Cyclic GFR-binding peptide
  MOD_RES (1)..(3)..(35)..(36): Xaa is C or S

SEQ ID NO: 39750 - protein, 30 aa, Artificial Sequence
  Cyclic GFR-binding peptide
  MOD_RES (2)..(4): Xaa is C or S
HXGXSRVVMNQYNKLIVNSSDDLYLVSIAS

SEQ ID NO: 39751 - protein, 37 aa, Artificial Sequence; identical to SEQ ID NO: 2860
  Cyclic GFR-binding peptide
  MOD_RES (1)..(33)..(34): Xaa is C or S

SEQ ID NO: 39752 - protein, 35 aa, Artificial Sequence; identical to SEQ ID NO: 2861
  Cyclic GFR-binding peptide
  MOD_RES (1)..(3)..(34)..(35): Xaa is C or S

SEQ ID NO: 39753 - protein, 32 aa, Artificial Sequence
  Cyclic GFR-binding peptide
  MOD_RES (28)..(29): Xaa is C or S
IMQYNKLVKPKRGVLYLISIASLAQPVXXPAA

SEQ ID NO: 39754 - protein, 38 aa, Artificial Sequence; identical to SEQ ID NO: 2862
  Cyclic GFR-binding peptide
  MOD_RES (2)..(34)..(35): Xaa is C or S

SEQ ID NO: 39755 - protein, 29 aa, Artificial Sequence
  Cyclic GFR-binding peptide
VVMNRHKRLIVNSSDDYYLVSTASLKTPA

SEQ ID NO: 39756 - protein, 35 aa, Artificial Sequence; identical to SEQ ID NO: 2865
  Cyclic GFR-binding peptide
  MOD_RES (32)..(33): Xaa is C or S

SEQ ID NO: 39757 - protein, 20 aa, Artificial Sequence
  Cyclic GFR-binding peptide
RHKRLVVKENEDYYLMSTAS

SEQ ID NO: 39758 - protein, 38 aa, Artificial Sequence
  Cyclic GFR-binding peptide
  MOD_RES (32)..(33): Xaa is C or S
AVSMGERHKRLTPVGMDDYYLVSTASLKTPVXXAKGVK

SEQ ID NO: 39759 - protein, 23 aa, Artificial Sequence
  Cyclic GFR-binding peptide
MDYHYKLVVKENEDKYLMSIPSL

SEQ ID NO: 39760 - protein, 29 aa, Artificial Sequence
  Cyclic GFR-binding peptide
HDELTRYKKLFIPKKRVIEFYLVSIANLQ

SEQ ID NO: 39761 - protein, 30 aa, Artificial Sequence
  Cyclic GFR-binding peptide
  MOD_RES (28)..(28): Xaa is C or S
MNQYNKLIVNSSDDLYLVSIASLKTPAXTP

SEQ ID NO: 39762 - protein, 34 aa, Artificial Sequence; identical to SEQ ID NO: 2867
  Cyclic GFR-binding peptide
  MOD_RES (2)..(4): Xaa is C or S

SEQ ID NO: 39763 - protein, 27 aa, Artificial Sequence
  Cyclic GFR-binding peptide
SMGEQYNKLTPVGMDDLYLVSIASLKT

SEQ ID NO: 39764 - protein, 38 aa, Artificial Sequence; identical to SEQ ID NO: 2868
  Cyclic GFR-binding peptide
  MOD_RES (2)..(4)..(35)..(36): Xaa is C or S

SEQ ID NO: 39765 - protein, 29 aa, Artificial Sequence
  Cyclic GFR-binding peptide
  MOD_RES (1)..(3): Xaa is C or S
XKXSKVIMYHYKLIKPTKGIKYLISIPSL

SEQ ID NO: 39766 - protein, 32 aa, Artificial Sequence
  Cyclic GFR-binding peptide
  MOD_RES (29)..(30): Xaa is C or S
VMNYHYKLIVNSSDDKYLVSIPSLKTPAXXPK

SEQ ID NO: 39767 - protein, 22 aa, Artificial Sequence
  Cyclic GFR-binding peptide
DYHYKLVVKENEDKYLMSIPSL

SEQ ID NO: 39768 - protein, 41 aa, Artificial Sequence; identical to SEQ ID NO: 2871
  Cyclic GFR-binding peptide
  MOD_RES (1)..(3)..(35): Xaa is C or S

SEQ ID NO: 39769 - protein, 31 aa, Artificial Sequence; identical to SEQ ID NO: 2873
  Cyclic GFR-binding peptide
  MOD_RES (31)..(31): Xaa is C or S

SEQ ID NO: 39770 - protein, 32 aa, Artificial Sequence
  Cyclic GFR-binding peptide
  MOD_RES (26)..(27): Xaa is C or S
YHYKLVVKDYEDKYLMSIPSLETPVXXAKPIS

SEQ ID NO: 39771 - protein, 41 aa, Artificial Sequence; identical to SEQ ID NO: 2874
  Cyclic GFR-binding peptide
  MOD_RES (1)..(3)..(35)..(36): Xaa is C or S

SEQ ID NO: 39772 - protein, 34 aa, Artificial Sequence
  Cyclic GFR-binding peptide
  MOD_RES (29)..(30): Xaa is C or S
VIMQYNKLVKPKRGVLYLISIASLAQPVXXPAAS

SEQ ID NO: 39773 - protein, 25 aa, Artificial Sequence
  Cyclic GFR-binding peptide
EVVMERYKKLVVKDYEDFYLMSIAN

SEQ ID NO: 39774 - protein, 39 aa, Artificial Sequence; identical to SEQ ID NO: 2875
  Cyclic GFR-binding peptide
  MOD_RES (2)..(34): Xaa is C or S

SEQ ID NO: 39775 - protein, 28 aa, Artificial Sequence
  Cyclic GFR-binding peptide
MGEQYNKLTPVGMDDLYLVSIASLKTPV

SEQ ID NO: 39776 - protein, 31 aa, Artificial Sequence; identical to SEQ ID NO: 2876
  Cyclic GFR-binding peptide
  MOD_RES (31)..(31): Xaa is C or S

SEQ ID NO: 39777 - protein, 41 aa, Artificial Sequence; identical to SEQ ID NO: 2877
  Cyclic GFR-binding peptide
  MOD_RES (2)..(4)..(36): Xaa is C or S

SEQ ID NO: 39778 - protein, 24 aa, Artificial Sequence
  Cyclic GFR-binding peptide
MNRHKRLIVNSSDDYYLVSTASLQ

SEQ ID NO: 39779 - protein, 25 aa, Artificial Sequence
  Cyclic GFR-binding peptide
MNYHYKLIVNNSSDKYLVSIPSLKT

SEQ ID NO: 39780 - protein, 35 aa, Artificial Sequence; identical to SEQ ID NO: 2878
  Cyclic GFR-binding peptide
  MOD_RES (31)..(32): Xaa is C or S

SEQ ID NO: 39781 - protein, 32 aa, Artificial Sequence
  Cyclic GFR-binding peptide
  MOD_RES (31)..(31): Xaa is C or S
TQYNKLFIPKKRVIELYLVSIASLQVQTPRXQ

SEQ ID NO: 39782 - protein, 35 aa, Artificial Sequence; identical to SEQ ID NO: 2881
  Cyclic GFR-binding peptide
  MOD_RES (2)..(4): Xaa is C or S

SEQ ID NO: 39783 - protein, 34 aa, Artificial Sequence; identical to SEQ ID NO: 2882
  Cyclic GFR-binding peptide
  MOD_RES (32)..(33): Xaa is C or S

SEQ ID NO: 39784 - protein, 32 aa, Artificial Sequence
  Cyclic GFR-binding peptide
  MOD_RES (1)..(3): Xaa is C or S
XGXAKVVMNQYNKLIVNNSSDLYLVSIASLKT

SEQ ID NO: 39785 - protein, 31 aa, Artificial Sequence
  Cyclic GFR-binding peptide
  MOD_RES (2)..(2): Xaa is C or S
GXARVVMNYHYKLIVNSSDDKYLVSIPSLQT

SEQ ID NO: 39786 - protein, 22 aa, Artificial Sequence
  Cyclic GFR-binding peptide
RYKKLFIPKKRVIEFYLVSIAN

SEQ ID NO: 39787 - protein, 41 aa, Artificial Sequence; identical to SEQ ID NO: 2884
  Cyclic GFR-binding peptide
  MOD_RES (2)..(4)..(36)..(37): Xaa is C or S

SEQ ID NO: 39788 - protein, 29 aa, Artificial Sequence
  Cyclic GFR-binding peptide
  MOD_RES (29)..(29): Xaa is C or S
MGERHKRLTPVGMDDYYLVSTASLKTPVX

SEQ ID NO: 39789 - protein, 33 aa, Artificial Sequence
  Cyclic GFR-binding peptide
  MOD_RES (30)..(30): Xaa is C or S
YHYKLFIPKKRVIEKYLVSIPSLQVQTPRXQVN

SEQ ID NO: 39790 - protein, 22 aa, Artificial Sequence
  Cyclic GFR-binding peptide
RHKRLVVKDYEDYYLMSTASLE

SEQ ID NO: 39791 - protein, 37 aa, Artificial Sequence; identical to SEQ ID NO: 2887
  Cyclic GFR-binding peptide
  MOD_RES (1)..(34)..(35): Xaa is C or S

SEQ ID NO: 39792 - protein, 30 aa, Artificial Sequence
  Cyclic GFR-binding peptide
GEVVMDYHYKLVVKENEDKYLMSIPSLETP

SEQ ID NO: 39793 - protein, 23 aa, Artificial Sequence
  Cyclic GFR-binding peptide
VVMRYKKLVKPTRGVFYLISIAN

SEQ ID NO: 39794 - protein, 32 aa, Artificial Sequence; identical to SEQ ID NO: 2889
  Cyclic GFR-binding peptide
  MOD_RES (31)..(32): Xaa is C or S

SEQ ID NO: 39795 - protein, 29 aa, Artificial Sequence
  Cyclic GFR-binding peptide
LHDELTQYNKLFIPKKRVIELYLVSIASL

SEQ ID NO: 39796 - protein, 21 aa, Artificial Sequence
  Cyclic GFR-binding peptide
YHYKLVKPTRGVKYLISIPSL

SEQ ID NO: 39797 - protein, 26 aa, Artificial Sequence
  Cyclic GFR-binding peptide
VVMDYHYKLVVKENEDKYLMSIPSLE

SEQ ID NO: 39798 - protein, 40 aa, Artificial Sequence; identical to SEQ ID NO: 2890
  Cyclic GFR-binding peptide
  MOD_RES (2)..(34)..(35): Xaa is C or S

SEQ ID NO: 39799 - protein, 29 aa, Artificial Sequence
  Cyclic GFR-binding peptide
RVVMNRHKRLIVNSSDDYYLVSTASLQTP

SEQ ID NO: 39800 - protein, 29 aa, Artificial Sequence
  Cyclic GFR-binding peptide
  MOD_RES (26)..(27): Xaa is C or S
RYKKLVVKENEDFYLMSIANLETPVXXAK

SEQ ID NO: 39801 - protein, 31 aa, Artificial Sequence
  Cyclic GFR-binding peptide
  MOD_RES (26)..(27): Xaa is C or S
YHYKLVVKENEDKYLMSIPSLETPVXXAKPI

SEQ ID NO: 39802 - protein, 26 aa, Artificial Sequence
  Cyclic GFR-binding peptide
VIMRYKKLVKPKRGVFYLISIANLAQ

SEQ ID NO: 39803 - protein, 40 aa, Artificial Sequence; identical to SEQ ID NO: 2898
  Cyclic GFR-binding peptide
  MOD_RES (1)..(3)..(34)..(35): Xaa is C or S

SEQ ID NO: 39804 - protein, 28 aa, Artificial Sequence
  Cyclic GFR-binding peptide
KVIMQYNKLIKPTKGILYLISIASLDQS

SEQ ID NO: 39805 - protein, 23 aa, Artificial Sequence
  Cyclic GFR-binding peptide
MRHKRLVKPTRGVYYLISTASLD

SEQ ID NO: 39806 - protein, 26 aa, Artificial Sequence
  Cyclic GFR-binding peptide
MDYHYKLVVKENEDKYLMSIPSLETP

SEQ ID NO: 39807 - protein, 23 aa, Artificial Sequence
  Cyclic GFR-binding peptide
RYKKLVKPTRGVFYLISIANLDQ

SEQ ID NO: 39808 - protein, 34 aa, Artificial Sequence
  Cyclic GFR-binding peptide
  MOD_RES (30)..(31): Xaa is C or S
VVMERYKKLVVKDYEDFYLMSIANLETPVXXAKP

SEQ ID NO: 39809 - protein, 28 aa, Artificial Sequence
  Cyclic GFR-binding peptide
  MOD_RES (1)..(1): Xaa is C or S
XSRVIMRYKKLVKPKRGVFYLISIANLA

SEQ ID NO: 39810 - protein, 36 aa, Artificial Sequence; identical to SEQ ID NO: 2900
  Cyclic GFR-binding peptide
  MOD_RES (1)..(32)..(33): Xaa is C or S

SEQ ID NO: 39811 - protein, 29 aa, Artificial Sequence
  Cyclic GFR-binding peptide
AKVVMNYHYKLIVNNSSDKYLVSIPSLKT

SEQ ID NO: 39812 - protein, 28 aa, Artificial Sequence
  Cyclic GFR-binding peptide
VSMGEQYNKLTPVGMDDLYLVSIASLKT

SEQ ID NO: 39813 - protein, 24 aa, Artificial Sequence
  Cyclic GFR-binding peptide
VMDRHKRLVVKENEDYYLMSTASL

SEQ ID NO: 39814 - protein, 27 aa, Artificial Sequence
  Cyclic GFR-binding peptide
SKVIMRYKKLIKPTKGIFYLISIANLD

SEQ ID NO: 39815 - protein, 20 aa, Artificial Sequence
  Cyclic GFR-binding peptide
RHKRLTPVGMDDYYLVSTAS

SEQ ID NO: 39816 - protein, 26 aa, Artificial Sequence
  Cyclic GFR-binding peptide
VVMNYHYKLIVNSSDDKYLVSIPSLK

SEQ ID NO: 39817 - protein, 33 aa, Artificial Sequence
  Cyclic GFR-binding peptide
  MOD_RES (33)..(33): Xaa is C or S
ELTQYNKLFIPKKRVIELYLVSIASLQVQTPRX

SEQ ID NO: 39818 - protein, 27 aa, Artificial Sequence
  Cyclic GFR-binding peptide
VVMRYKKLVKPTRGVFYLISIANLDQP

SEQ ID NO: 39819 - protein, 27 aa, Artificial Sequence
  Cyclic GFR-binding peptide
MNYHYKLIVNNSSDKYLVSIPSLKTPA

SEQ ID NO: 39820 - protein, 41 aa, Artificial Sequence; identical to SEQ ID NO: 2902
  Cyclic GFR-binding peptide
  MOD_RES (1)..(3)..(40): Xaa is C or S

SEQ ID NO: 39821 - protein, 26 aa, Artificial Sequence
  Cyclic GFR-binding peptide
RYKKLFIPKKRVIEFYLVSIANLQVQ

SEQ ID NO: 39822 - protein, 32 aa, Artificial Sequence; identical to SEQ ID NO: 2903
  Cyclic GFR-binding peptide
  MOD_RES (32)..(32): Xaa is C or S

SEQ ID NO: 39823 - protein, 22 aa, Artificial Sequence
  Cyclic GFR-binding peptide
YHYKLIVNSSDDKYLVSIPSLK

SEQ ID NO: 39824 - protein, 33 aa, Artificial Sequence; identical to SEQ ID NO: 2904
  Cyclic GFR-binding peptide
  MOD_RES (1)..(32)..(33): Xaa is C or S

SEQ ID NO: 39825 - protein, 20 aa, Artificial Sequence
  Cyclic GFR-binding peptide
YHYKLIKPTKGIKYLISIPS

SEQ ID NO: 39826 - protein, 37 aa, Artificial Sequence; identical to SEQ ID NO: 2906
  Cyclic GFR-binding peptide
  MOD_RES (36)..(36): Xaa is C or S

SEQ ID NO: 39827 - protein, 30 aa, Artificial Sequence
  Cyclic GFR-binding peptide
LHDELTQYNKLFIPKKRVIELYLVSIASLQ

SEQ ID NO: 39828 - protein, 30 aa, Artificial Sequence; identical to SEQ ID NO: 2907
  Cyclic GFR-binding peptide

SEQ ID NO: 39829 - protein, 37 aa, Artificial Sequence; identical to SEQ ID NO: 2910
  Cyclic GFR-binding peptide
  MOD_RES (2)..(4)..(35)..(36): Xaa is C or S

SEQ ID NO: 39830 - protein, 25 aa, Artificial Sequence
  Cyclic GFR-binding peptide
YHYKLIKPTKGIKYLISIPSLDQSV

SEQ ID NO: 39831 - protein, 39 aa, Artificial Sequence; identical to SEQ ID NO: 2912
  Cyclic GFR-binding peptide
  MOD_RES (2)..(34)..(35): Xaa is C or S

SEQ ID NO: 39832 - protein, 37 aa, Artificial Sequence; identical to SEQ ID NO: 2911
  Cyclic GFR-binding peptide
  MOD_RES (2)..(34)..(35): Xaa is C or S

SEQ ID NO: 39833 - protein, 28 aa, Artificial Sequence
  Cyclic GFR-binding peptide
  MOD_RES (28)..(28): Xaa is C or S
IMYHYKLVKPKRGVKYLISIPSLAQPVX

SEQ ID NO: 39834 - protein, 26 aa, Artificial Sequence
  Cyclic GFR-binding peptide
EVVMDRYKKLVVKENEDFYLMSIANL

SEQ ID NO: 39835 - protein, 27 aa, Artificial Sequence
  Cyclic GFR-binding peptide
  MOD_RES (1)..(1): Xaa is C or S
XAKVVMNQYNKLIVNNSSDLYLVSIAS

SEQ ID NO: 39836 - protein, 27 aa, Artificial Sequence
  Cyclic GFR-binding peptide
RVIMQYNKLVKPKRGVLYLISIASLAQ

SEQ ID NO: 39837 - protein, 36 aa, Artificial Sequence; identical to SEQ ID NO: 2915
  Cyclic GFR-binding peptide
  MOD_RES (2)..(4)..(36): Xaa is C or S

SEQ ID NO: 39838 - protein, 39 aa, Artificial Sequence; identical to SEQ ID NO: 2916
  Cyclic GFR-binding peptide
  MOD_RES (1)..(3)..(35)..(36): Xaa is C or S

SEQ ID NO: 39839 - protein, 27 aa, Artificial Sequence
  Cyclic GFR-binding peptide
VVMNYHYKLIVNSSDDKYLVSIPSLQT

SEQ ID NO: 39840 - protein, 32 aa, Artificial Sequence
  Cyclic GFR-binding peptide
  MOD_RES (29)..(30): Xaa is C or S
VMERYKKLVVKDYEDFYLMSIANLETPVXXAK

SEQ ID NO: 39841 - protein, 24 aa, Artificial Sequence
  Cyclic GFR-binding peptide
DYHYKLVVKENEDKYLMSIPSLET

SEQ ID NO: 39842 - protein, 34 aa, Artificial Sequence; identical to SEQ ID NO: 2918
  Cyclic GFR-binding peptide
  MOD_RES (2)..(2): Xaa is C or S

SEQ ID NO: 39843 - protein, 30 aa, Artificial Sequence
  Cyclic GFR-binding peptide
  MOD_RES (26)..(27): Xaa is C or S
RHKRLVVKENEDYYLMSTASLETPVXXAKP

SEQ ID NO: 39844 - protein, 26 aa, Artificial Sequence
  Cyclic GFR-binding peptide
RVIMYHYKLVKPKRGVKYLISIPSLA

SEQ ID NO: 39845 - protein, 31 aa, Artificial Sequence
  Cyclic GFR-binding peptide
  MOD_RES (30)..(31): Xaa is C or S
VVMDRHKRLVVKENEDYYLMSTASLETPVXX

SEQ ID NO: 39846 - protein, 26 aa, Artificial Sequence
  Cyclic GFR-binding peptide
DELTRHKRLFIPKKRVIEYYLVSTAS

SEQ ID NO: 39847 - protein, 27 aa, Artificial Sequence
  Cyclic GFR-binding peptide
  MOD_RES (2)..(2): Xaa is C or S
KXSKVIMQYNKLIKPTKGILYLISIAS

SEQ ID NO: 39848 - protein, 28 aa, Artificial Sequence
  Cyclic GFR-binding peptide
GEVVMDYHYKLVVKENEDKYLMSIPSLE

SEQ ID NO: 39849 - protein, 35 aa, Artificial Sequence
  Cyclic GFR-binding peptide
  MOD_RES (2)..(4): Xaa is C or S
EXKXALHDELTRHKRLFIPKKRVIEYYLVSTASLQ

SEQ ID NO: 39850 - protein, 33 aa, Artificial Sequence; identical to SEQ ID NO: 2920
  Cyclic GFR-binding peptide
  MOD_RES (2)..(2): Xaa is C or S

SEQ ID NO: 39851 - protein, 24 aa, Artificial Sequence
  Cyclic GFR-binding peptide
KVIMYHYKLIKPTKGIKYLISIPS

SEQ ID NO: 39852 - protein, 36 aa, Artificial Sequence; identical to SEQ ID NO: 2921
  Cyclic GFR-binding peptide

SEQ ID NO: 39853 - protein, 22 aa, Artificial Sequence
  Cyclic GFR-binding peptide
RYKKLFIPKKRVIEFYLVSIAN

SEQ ID NO: 39854 - protein, 27 aa, Artificial Sequence
  Cyclic GFR-binding peptide
  MOD_RES (26)..(27): Xaa is C or S
RYKKLIKPTKGIFYLISIANLDQSVXX

SEQ ID NO: 39855 - protein, 27 aa, Artificial Sequence
  Cyclic GFR-binding peptide
  MOD_RES (26)..(27): Xaa is C or S
QYNKLTPVGMDDLYLVSIASLKTPVXX

SEQ ID NO: 39856 - protein, 31 aa, Artificial Sequence
  Cyclic GFR-binding peptide
  MOD_RES (27)..(28): Xaa is C or S
NYHYKLIVNSSDDKYLVSIPSLKTPAXXPKP

SEQ ID NO: 39857 - protein, 35 aa, Artificial Sequence; identical to SEQ ID NO: 2922
  Cyclic GFR-binding peptide
  MOD_RES (1)..(32)..(33): Xaa is C or S

SEQ ID NO: 39858 - protein, 34 aa, Artificial Sequence; identical to SEQ ID NO: 2923
  Cyclic GFR-binding peptide
  MOD_RES (32)..(33): Xaa is C or S

SEQ ID NO: 39859 - protein, 29 aa, Artificial Sequence
  Cyclic GFR-binding peptide
  MOD_RES (2)..(2): Xaa is C or S
GXAKVVMNRYKKLIVNNSSDFYLVSIANL

SEQ ID NO: 39860 - protein, 26 aa, Artificial Sequence
  Cyclic GFR-binding peptide
KVVMNQYNKLIVNNSSDLYLVSIASL

SEQ ID NO: 39861 - protein, 32 aa, Artificial Sequence
  Cyclic GFR-binding peptide
  MOD_RES (2)..(2): Xaa is C or S
GXARVVMNRHKRLIVNSSDDYYLVSTASLQTP

SEQ ID NO: 39862 - protein, 33 aa, Artificial Sequence
  Cyclic GFR-binding peptide
  MOD_RES (1)..(1): Xaa is C or S
XALHDELTRYKKLFIPKKRVIEFYLVSIANLQV

SEQ ID NO: 39863 - protein, 33 aa, Artificial Sequence; identical to SEQ ID NO: 2929
  Cyclic GFR-binding peptide
  MOD_RES (31)..(32): Xaa is C or S

SEQ ID NO: 39864 - protein, 38 aa, Artificial Sequence; identical to SEQ ID NO: 2928
  Cyclic GFR-binding peptide
  MOD_RES (2)..(34): Xaa is C or S

SEQ ID NO: 39865 - protein, 33 aa, Artificial Sequence
  Cyclic GFR-binding peptide
  MOD_RES (29)..(30): Xaa is C or S
VMDRHKRLVVKENEDYYLMSTASLETPVXXAKP

SEQ ID NO: 39866 - protein, 37 aa, Artificial Sequence; identical to SEQ ID NO: 2930
  Cyclic GFR-binding peptide
  MOD_RES (32)..(32): Xaa is C or S

SEQ ID NO: 39867 - protein, 29 aa, Artificial Sequence
  Cyclic GFR-binding peptide
SMGERYKKLTPVGMDDFYLVSIANLKTPV

SEQ ID NO: 39868 - protein, 35 aa, Artificial Sequence; identical to SEQ ID NO: 2932
  Cyclic GFR-binding peptide
  MOD_RES (1)..(3)..(35): Xaa is C or S

SEQ ID NO: 39869 - protein, 28 aa, Artificial Sequence
  Cyclic GFR-binding peptide
VMNYHYKLIVNNSSDKYLVSIPSLKTPA

SEQ ID NO: 39870 - protein, 28 aa, Artificial Sequence
  Cyclic GFR-binding peptide
  MOD_RES (27)..(28): Xaa is C or S
DRYKKLVVKENEDFYLMSIANLETPVXX

SEQ ID NO: 39871 - protein, 34 aa, Artificial Sequence
  Cyclic GFR-binding peptide
  MOD_RES (30)..(31): Xaa is C or S
VVMNYHYKLIVNSSDDKYLVSIPSLQTPAXXPKP

SEQ ID NO: 39872 - protein, 30 aa, Artificial Sequence
  Cyclic GFR-binding peptide
  MOD_RES (27)..(28): Xaa is C or S
NRHKRLIVNSSDDYYLVSTASLQTPAXXPK

SEQ ID NO: 39873 - protein, 35 aa, Artificial Sequence; identical to SEQ ID NO: 2934
  Cyclic GFR-binding peptide
  MOD_RES (32)..(33): Xaa is C or S

SEQ ID NO: 39874 - protein, 31 aa, Artificial Sequence
  Cyclic GFR-binding peptide
  MOD_RES (28)..(29): Xaa is C or S
MNYHYKLIVNNSSDKYLVSIPSLKTPAXXAK

SEQ ID NO: 39875 - protein, 33 aa, Artificial Sequence
  Cyclic GFR-binding peptide
  MOD_RES (27)..(28): Xaa is C or S
MYHYKLIKPTKGIKYLISIPSLDQSVXXPSASA

SEQ ID NO: 39876 - protein, 24 aa, Artificial Sequence
  Cyclic GFR-binding peptide
VMDRYKKLVVKENEDFYLMSIANL

SEQ ID NO: 39877 - protein, 31 aa, Artificial Sequence
  Cyclic GFR-binding peptide
  MOD_RES (27)..(28): Xaa is C or S
MRHKRLVKPTRGVYYLISTASLDQPVXXPSA

SEQ ID NO: 39878 - protein, 39 aa, Artificial Sequence; identical to SEQ ID NO: 2936
  Cyclic GFR-binding peptide
  MOD_RES (36)..(36): Xaa is C or S

SEQ ID NO: 39879 - protein, 23 aa, Artificial Sequence
  Cyclic GFR-binding peptide
RYKKLVVKENEDFYLMSIANLET

SEQ ID NO: 39880 - protein, 25 aa, Artificial Sequence
  Cyclic GFR-binding peptide
MRHKRLVKPTRGVYYLISTASLDQP

SEQ ID NO: 39881 - protein, 26 aa, Artificial Sequence
  Cyclic GFR-binding peptide
GEVVMDRHKRLVVKENEDYYLMSTAS

SEQ ID NO: 39882 - protein, 25 aa, Artificial Sequence
  Cyclic GFR-binding peptide
MNRYKKLIVNNSSDFYLVSIANLKT

SEQ ID NO: 39883 - protein, 40 aa, Artificial Sequence; identical to SEQ ID NO: 2938
  Cyclic GFR-binding peptide
  MOD_RES (2)..(4)..(35)..(36): Xaa is C or S

SEQ ID NO: 39884 - protein, 35 aa, Artificial Sequence; identical to SEQ ID NO: 2939
  Cyclic GFR-binding peptide
  MOD_RES (2)..(33)..(34): Xaa is C or S

SEQ ID NO: 39885 - protein, 24 aa, Artificial Sequence
  Cyclic GFR-binding peptide
VVMQYNKLVKPTRGVLYLISIASL

SEQ ID NO: 39886 - protein, 27 aa, Artificial Sequence
  Cyclic GFR-binding peptide
  MOD_RES (1)..(1): Xaa is C or S
XSRVVMNRHKRLIVNSSDDYYLVSTAS

SEQ ID NO: 39887 - protein, 29 aa, Artificial Sequence
  Cyclic GFR-binding peptide
SKVVMRHKRLVKPTRGVYYLISTASLDQP

SEQ ID NO: 39888 - protein, 24 aa, Artificial Sequence
  Cyclic GFR-binding peptide
VVMDRYKKLVVKENEDFYLMSIAN

SEQ ID NO: 39889 - protein, 27 aa, Artificial Sequence
  Cyclic GFR-binding peptide
  MOD_RES (26)..(27): Xaa is C or S
RHKRLVKPTRGVYYLISTASLDQPVXX

SEQ ID NO: 39890 - protein, 31 aa, Artificial Sequence
  Cyclic GFR-binding peptide
  MOD_RES (26)..(27): Xaa is C or S
RHKRLVVKENEDYYLMSTASLETPVXXAKPI

SEQ ID NO: 39891 - protein, 45 aa, Artificial Sequence; identical to SEQ ID NO: 2941
  Cyclic GFR-binding peptide
  MOD_RES (2)..(4)..(41): Xaa is C or S

SEQ ID NO: 39892 - protein, 26 aa, Artificial Sequence
  Cyclic GFR-binding peptide
VMEYHYKLVVKDYEDKYLMSIPSLET

SEQ ID NO: 39893 - protein, 30 aa, Artificial Sequence
  Cyclic GFR-binding peptide
  MOD_RES (29)..(30): Xaa is C or S
VIMRYKKLVKPKRGVFYLISIANLAQPVXX

SEQ ID NO: 39894 - protein, 29 aa, Artificial Sequence
  Cyclic GFR-binding peptide
VVMDYHYKLVVKENEDKYLMSIPSLETPV

SEQ ID NO: 39895 - protein, 41 aa, Artificial Sequence; identical to SEQ ID NO: 2942
  Cyclic GFR-binding peptide
  MOD_RES (2)..(4)..(36)..(37): Xaa is C or S

SEQ ID NO: 39896 - protein, 42 aa, Artificial Sequence; identical to SEQ ID NO: 2943
  Cyclic GFR-binding peptide
  MOD_RES (2)..(4)..(36)..(37): Xaa is C or S

SEQ ID NO: 39897 - protein, 35 aa, Artificial Sequence
  Cyclic GFR-binding peptide
  MOD_RES (2)..(2): Xaa is C or S
KXALHDELTRHKRLFIPKKRVIEYYLVSTASLQVQ

SEQ ID NO: 39898 - protein, 29 aa, Artificial Sequence
  Cyclic GFR-binding peptide
  MOD_RES (1)..(3): Xaa is C or S
XGXARVVMNRHKRLIVNSSDDYYLVSTAS

SEQ ID NO: 39899 - protein, 40 aa, Artificial Sequence; identical to SEQ ID NO: 2946
  Cyclic GFR-binding peptide
  MOD_RES (2)..(39): Xaa is C or S

SEQ ID NO: 39900 - protein, 38 aa, Artificial Sequence; identical to SEQ ID NO: 2947
  Cyclic GFR-binding peptide
  MOD_RES (1)..(3)..(35): Xaa is C or S

SEQ ID NO: 39901 - protein, 35 aa, Artificial Sequence; identical to SEQ ID NO: 2948
  Cyclic GFR-binding peptide
  MOD_RES (32)..(33): Xaa is C or S

SEQ ID NO: 39902 - protein, 29 aa, Artificial Sequence
  Cyclic GFR-binding peptide
  MOD_RES (26)..(27): Xaa is C or S
RHKRLIVNSSDDYYLVSTASLQTPAXXPK

SEQ ID NO: 39903 - protein, 37 aa, Artificial Sequence; identical to SEQ ID NO: 2949
  Cyclic GFR-binding peptide
  MOD_RES (2)..(2): Xaa is C or S

SEQ ID NO: 39904 - protein, 32 aa, Artificial Sequence
  Cyclic GFR-binding peptide
  MOD_RES (2)..(2): Xaa is C or S
GXGEVVMDRYKKLVVKENEDFYLMSIANLETP

SEQ ID NO: 39905 - protein, 37 aa, Artificial Sequence; identical to SEQ ID NO: 2950
  Cyclic GFR-binding peptide
  MOD_RES (2)..(33)..(34): Xaa is C or S

SEQ ID NO: 39906 - protein, 33 aa, Artificial Sequence
  Cyclic GFR-binding peptide
  MOD_RES (1)..(3): Xaa is C or S
XKXALHDELTRHKRLFIPKKRVIEYYLVSTASL

SEQ ID NO: 39907 - protein, 28 aa, Artificial Sequence
  Cyclic GFR-binding peptide
  MOD_RES (26)..(27): Xaa is C or S
YHYKLIVNSSDDKYLVSIPSLQTPAXXP

SEQ ID NO: 39908 - protein, 33 aa, Artificial Sequence
  Cyclic GFR-binding peptide
  MOD_RES (28)..(29): Xaa is C or S
MEYHYKLVVKDYEDKYLMSIPSLETPVXXAKPI

SEQ ID NO: 39909 - protein, 25 aa, Artificial Sequence
  Cyclic GFR-binding peptide
RHKRLIKPTKGIYYLISTASLDQSV

SEQ ID NO: 39910 - protein, 31 aa, Artificial Sequence
  Cyclic GFR-binding peptide
  MOD_RES (27)..(28): Xaa is C or S
NRYKKLIVNNSSDFYLVSIANLKTPAXXAKP

SEQ ID NO: 39911 - protein, 28 aa, Artificial Sequence
  Cyclic GFR-binding peptide
  MOD_RES (27)..(28): Xaa is C or S
ERYKKLVVKDYEDFYLMSIANLETPVXX

SEQ ID NO: 39912 - protein, 29 aa, Artificial Sequence
  Cyclic GFR-binding peptide
VVMDRHKRLVVKENEDYYLMSTASLETPV

SEQ ID NO: 39913 - protein, 37 aa, Artificial Sequence; identical to SEQ ID NO: 2952
  Cyclic GFR-binding peptide
  MOD_RES (2)..(33)..(34): Xaa is C or S

SEQ ID NO: 39914 - protein, 41 aa, Artificial Sequence; identical to SEQ ID NO: 2954
  Cyclic GFR-binding peptide
  MOD_RES (2)..(4)..(35)..(36): Xaa is C or S

SEQ ID NO: 39915 - protein, 26 aa, Artificial Sequence
  Cyclic GFR-binding peptide
VVMNRHKRLIVNSSDDYYLVSTASLQ

SEQ ID NO: 39916 - protein, 27 aa, Artificial Sequence
  Cyclic GFR-binding peptide
IMQYNKLIKPTKGILYLISIASLDQSV

SEQ ID NO: 39917 - protein, 31 aa, Artificial Sequence
  Cyclic GFR-binding peptide
  MOD_RES (30)..(31): Xaa is C or S
VVMNQYNKLIVNNSSDLYLVSIASLKTPAXX

SEQ ID NO: 39918 - protein, 30 aa, Artificial Sequence
  Cyclic GFR-binding peptide
  MOD_RES (2)..(2): Xaa is C or S
KXSKVVMRHKRLVKPTRGVYYLISTASLDQ

SEQ ID NO: 39919 - protein, 27 aa, Artificial Sequence
  Cyclic GFR-binding peptide
IKPTKGIQYNKLIKPTKGILYLISIAS

SEQ ID NO: 39920 - protein, 27 aa, Artificial Sequence
  Cyclic GFR-binding peptide
RVVMNYHYKLIVNSSDDKYLVSIPSLQ

SEQ ID NO: 39921 - protein, 33 aa, Artificial Sequence; identical to SEQ ID NO: 2959
  Cyclic GFR-binding peptide
  MOD_RES (32)..(33): Xaa is C or S

SEQ ID NO: 39922 - protein, 27 aa, Artificial Sequence
  Cyclic GFR-binding peptide
VSMGEQYNKLTPVGMDDLYLVSIASLK

SEQ ID NO: 39923 - protein, 22 aa, Artificial Sequence
  Cyclic GFR-binding peptide
YHYKLVKPTRGVKYLISIPSLD

SEQ ID NO: 39924 - protein, 26 aa, Artificial Sequence
  Cyclic GFR-binding peptide
VVMDRHKRLVVKENEDYYLMSTASLE

SEQ ID NO: 39925 - protein, 26 aa, Artificial Sequence
  Cyclic GFR-binding peptide
VMNYHYKLIVNSSDDKYLVSIPSLQT

SEQ ID NO: 39926 - protein, 29 aa, Artificial Sequence
  Cyclic GFR-binding peptide
TRHKRLFIPKKRVIEYYLVSTASLQVQTP

SEQ ID NO: 39927 - protein, 27 aa, Artificial Sequence
  Cyclic GFR-binding peptide
KVVMNRYKKLIVNNSSDFYLVSIANLK

SEQ ID NO: 39928 - protein, 36 aa, Artificial Sequence; identical to SEQ ID NO: 2963
  Cyclic GFR-binding peptide
  MOD_RES (2)..(34): Xaa is C or S

SEQ ID NO: 39929 - protein, 40 aa, Artificial Sequence; identical to SEQ ID NO: 2967
  Cyclic GFR-binding peptide
  MOD_RES (2)..(34)..(35): Xaa is C or S

SEQ ID NO: 39930 - protein, 39 aa, Artificial Sequence; identical to SEQ ID NO: 2968
  Cyclic GFR-binding peptide
  MOD_RES (2)..(33)..(34): Xaa is C or S

SEQ ID NO: 39931 - protein, 32 aa, Artificial Sequence
  Cyclic GFR-binding peptide
  MOD_RES (29)..(30): Xaa is C or S
VIMYHYKLIKPTKGIKYLISIPSLDQSVXXPS

SEQ ID NO: 39932 - protein, 32 aa, Artificial Sequence
  Cyclic GFR-binding peptide
  MOD_RES (26)..(27): Xaa is C or S
RYKKLVKPTRGVFYLISIANLDQPVXXPSASA

SEQ ID NO: 39933 - protein, 35 aa, Artificial Sequence
  Cyclic GFR-binding peptide
  MOD_RES (29)..(30): Xaa is C or S
VMDYHYKLVVKENEDKYLMSIPSLETPVXXAKPIK

SEQ ID NO: 39934 - protein, 36 aa, Artificial Sequence
  Cyclic GFR-binding peptide
  MOD_RES (30)..(31): Xaa is C or S
KVIMYHYKLIKPTKGIKYLISIPSLDQSVXXPSASA

SEQ ID NO: 39935 - protein, 28 aa, Artificial Sequence
  Cyclic GFR-binding peptide
RVVMNRHKRLIVNSSDDYYLVSTASLKT

SEQ ID NO: 39936 - protein, 39 aa, Artificial Sequence; identical to SEQ ID NO: 2973
  Cyclic GFR-binding peptide
  MOD_RES (1)..(33)..(34): Xaa is C or S

SEQ ID NO: 39937 - protein, 31 aa, Artificial Sequence; identical to SEQ ID NO: 2975
  Cyclic GFR-binding peptide
  MOD_RES (31)..(31): Xaa is C or S

SEQ ID NO: 39938 - protein, 32 aa, Artificial Sequence
  Cyclic GFR-binding peptide
ELTYHYKLFIPKKRVIEKYLVSIPSLQVQTPR

SEQ ID NO: 39939 - protein, 29 aa, Artificial Sequence
  Cyclic GFR-binding peptide
  MOD_RES (2)..(2): Xaa is C or S
GXAKVVMNYHYKLIVNNSSDKYLVSIPSL

SEQ ID NO: 39940 - protein, 32 aa, Artificial Sequence; identical to SEQ ID NO: 2978
  Cyclic GFR-binding peptide
  MOD_RES (31)..(32): Xaa is C or S

SEQ ID NO: 39941 - protein, 26 aa, Artificial Sequence
  Cyclic GFR-binding peptide
VVMERYKKLVVKDYEDFYLMSIANLE

SEQ ID NO: 39942 - protein, 37 aa, Artificial Sequence
  Cyclic GFR-binding peptide
  MOD_RES (2)..(4): Xaa is C or S
EXKXALHDELTQYNKLFIPKKRVIELYLVSIASLQVQ

SEQ ID NO: 39943 - protein, 27 aa, Artificial Sequence
  Cyclic GFR-binding peptide
  MOD_RES (27)..(27): Xaa is C or S
NQYNKLIVNSSDDLYLVSIASLQTPAX

SEQ ID NO: 39944 - protein, 41 aa, Artificial Sequence; identical to SEQ ID NO: 2982
  Cyclic GFR-binding peptide
  MOD_RES (1)..(3)..(40): Xaa is C or S

SEQ ID NO: 39945 - protein, 35 aa, Artificial Sequence
  Cyclic GFR-binding peptide
  MOD_RES (30)..(31): Xaa is C or S
VVMDRYKKLVVKENEDFYLMSIANLETPVXXAKPI

SEQ ID NO: 39946 - protein, 29 aa, Artificial Sequence
  Cyclic GFR-binding peptide
  MOD_RES (28)..(29): Xaa is C or S
IMRYKKLIKPTKGIFYLISIANLDQSVXX

SEQ ID NO: 39947 - protein, 35 aa, Artificial Sequence; identical to SEQ ID NO: 2983
  Cyclic GFR-binding peptide
  MOD_RES (1)..(33)..(34): Xaa is C or S

SEQ ID NO: 39948 - protein, 32 aa, Artificial Sequence
  Cyclic GFR-binding peptide
  MOD_RES (27)..(28): Xaa is C or S
MQYNKLVKPTRGVLYLISIASLDQPVXXPSAS

SEQ ID NO: 39949 - protein, 36 aa, Artificial Sequence
  Cyclic GFR-binding peptide
  MOD_RES (1)..(3): Xaa is C or S
XKXALHDELTRHKRLFIPKKRVIEYYLVSTASLQVQ

SEQ ID NO: 39950 - protein, 26 aa, Artificial Sequence
  Cyclic GFR-binding peptide
IMQYNKLIKPTKGILYLISIASLDQS

SEQ ID NO: 39951 - protein, 26 aa, Artificial Sequence
  Cyclic GFR-binding peptide
IMYHYKLIKPTKGIKYLISIPSLDQS

SEQ ID NO: 39952 - protein, 35 aa, Artificial Sequence; identical to SEQ ID NO: 2986
  Cyclic GFR-binding peptide
  MOD_RES (31)..(32): Xaa is C or S

SEQ ID NO: 39953 - protein, 30 aa, Artificial Sequence
  Cyclic GFR-binding peptide
  MOD_RES (26)..(27): Xaa is C or S
YHYKLVVKENEDKYLMSIPSLETPVXXAKP

SEQ ID NO: 39954 - protein, 25 aa, Artificial Sequence
  Cyclic GFR-binding peptide
VMQYNKLVKPTRGVLYLISIASLDQ

SEQ ID NO: 39955 - protein, 21 aa, Artificial Sequence
  Cyclic GFR-binding peptide
RHKRLIVNSSDDYYLVSTASL

SEQ ID NO: 39956 - protein, 34 aa, Artificial Sequence; identical to SEQ ID NO: 2987
  Cyclic GFR-binding peptide
  MOD_RES (1)..(3): Xaa is C or S

SEQ ID NO: 39957 - protein, 34 aa, Artificial Sequence; identical to SEQ ID NO: 2988
  Cyclic GFR-binding peptide
  MOD_RES (1)..(32)..(33): Xaa is C or S

SEQ ID NO: 39958 - protein, 30 aa, Artificial Sequence
  Cyclic GFR-binding peptide
  MOD_RES (27)..(28): Xaa is C or S
MRHKRLVKPTRGVYYLISTASLDQPVXXPS

SEQ ID NO: 39959 - protein, 28 aa, Artificial Sequence
  Cyclic GFR-binding peptide
KVVMNQYNKLIVNNSSDLYLVSIASLKT

SEQ ID NO: 39960 - protein, 31 aa, Artificial Sequence
  Cyclic GFR-binding peptide
  MOD_RES (2)..(2): Xaa is C or S
KXSKVIMRHKRLIKPTKGIYYLISTASLDQS

SEQ ID NO: 39961 - protein, 38 aa, Artificial Sequence; identical to SEQ ID NO: 2989
  Cyclic GFR-binding peptide
  MOD_RES (1)..(32)..(33): Xaa is C or S

SEQ ID NO: 39962 - protein, 26 aa, Artificial Sequence
  Cyclic GFR-binding peptide
MRHKRLVKPKRGVYYLISTASLAQPV

SEQ ID NO: 39963 - protein, 30 aa, Artificial Sequence
  Cyclic GFR-binding peptide
  MOD_RES (1)..(3): Xaa is C or S
XGXEAVSMGERHKRLTPVGMDDYYLVSTAS

SEQ ID NO: 39964 - protein, 32 aa, Artificial Sequence
  Cyclic GFR-binding peptide
  MOD_RES (27)..(28): Xaa is C or S
NYHYKLIVNNSSDKYLVSIPSLKTPAXXAKPV

SEQ ID NO: 39965 - protein, 28 aa, Artificial Sequence
  Cyclic GFR-binding peptide
  MOD_RES (1)..(1): Xaa is C or S
XSKVIMRHKRLIKPTKGIYYLISTASLD

SEQ ID NO: 39966 - protein, 41 aa, Artificial Sequence; identical to SEQ ID NO: 2999
  Cyclic GFR-binding peptide
  MOD_RES (2)..(39): Xaa is C or S

SEQ ID NO: 39967 - protein, 29 aa, Artificial Sequence
  Cyclic GFR-binding peptide
EVVMERYKKLVVKDYEDFYLMSIANLETP

SEQ ID NO: 39968 - protein, 33 aa, Artificial Sequence
  Cyclic GFR-binding peptide
  MOD_RES (29)..(30): Xaa is C or S
VIMRHKRLVKPKRGVYYLISTASLAQPVXXPAA

SEQ ID NO: 39969 - protein, 28 aa, Artificial Sequence
  Cyclic GFR-binding peptide
RVIMYHYKLVKPKRGVKYLISIPSLAQP

SEQ ID NO: 39970 - protein, 37 aa, Artificial Sequence; identical to SEQ ID NO: 3000
  Cyclic GFR-binding peptide
  MOD_RES (1)..(3)..(35)..(36): Xaa is C or S

SEQ ID NO: 39971 - protein, 22 aa, Artificial Sequence
  Cyclic GFR-binding peptide
NYHYKLIVNSSDDKYLVSIPSL

SEQ ID NO: 39972 - protein, 29 aa, Artificial Sequence
  Cyclic GFR-binding peptide
  MOD_RES (2)..(2): Xaa is C or S
KXSKVVMRYKKLVKPTRGVFYLISIANLD

SEQ ID NO: 39973 - protein, 36 aa, Artificial Sequence; identical to SEQ ID NO: 3004
  Cyclic GFR-binding peptide
  MOD_RES (1)..(3)..(35)..(36): Xaa is C or S

SEQ ID NO: 39974 - protein, 32 aa, Artificial Sequence
  Cyclic GFR-binding peptide
  MOD_RES (2)..(2): Xaa is C or S
GXEAVSMGEQYNKLTPVGMDDLYLVSIASLKT

SEQ ID NO: 39975 - protein, 40 aa, Artificial Sequence; identical to SEQ ID NO: 3005
  Cyclic GFR-binding peptide
  MOD_RES (1)..(3)..(34)..(35): Xaa is C or S

SEQ ID NO: 39976 - protein, 27 aa, Artificial Sequence
  Cyclic GFR-binding peptide
  MOD_RES (27)..(27): Xaa is C or S
MRYKKLIKPTKGIFYLISIANLDQSVX

SEQ ID NO: 39977 - protein, 32 aa, Artificial Sequence
  Cyclic GFR-binding peptide
  MOD_RES (1)..(3): Xaa is C or S
XGXSRVVMNYHYKLIVNSSDDKYLVSIPSLKT

SEQ ID NO: 39978 - protein, 36 aa, Artificial Sequence; identical to SEQ ID NO: 3007
  Cyclic GFR-binding peptide
  MOD_RES (32)..(33): Xaa is C or S

SEQ ID NO: 39979 - protein, 31 aa, Artificial Sequence
  Cyclic GFR-binding peptide
  MOD_RES (27)..(28): Xaa is C or S
MRYKKLVKPKRGVFYLISIANLAQPVXXPAA

SEQ ID NO: 39980 - protein, 35 aa, Artificial Sequence; identical to SEQ ID NO: 3010
  Cyclic GFR-binding peptide
  MOD_RES (33)..(34): Xaa is C or S

SEQ ID NO: 39981 - protein, 31 aa, Artificial Sequence
  Cyclic GFR-binding peptide
  MOD_RES (29)..(30): Xaa is C or S
VMERHKRLVVKDYEDYYLMSTASLETPVXXA

SEQ ID NO: 39982 - protein, 30 aa, Artificial Sequence
  Cyclic GFR-binding peptide
  MOD_RES (1)..(1): Xaa is C or S
XALHDELTYHYKLFIPKKRVIEKYLVSIPS

SEQ ID NO: 39983 - protein, 34 aa, Artificial Sequence; identical to SEQ ID NO: 3013
  Cyclic GFR-binding peptide
  MOD_RES (31)..(32): Xaa is C or S

SEQ ID NO: 39984 - protein, 32 aa, Artificial Sequence
  Cyclic GFR-binding peptide
  MOD_RES (26)..(27): Xaa is C or S
QYNKLVKPTRGVLYLISIASLDQPVXXPSASA

SEQ ID NO: 39985 - protein, 34 aa, Artificial Sequence; identical to SEQ ID NO: 3016
  Cyclic GFR-binding peptide
  MOD_RES (32)..(32): Xaa is C or S

SEQ ID NO: 39986 - protein, 33 aa, Artificial Sequence; identical to SEQ ID NO: 3017
  Cyclic GFR-binding peptide
  MOD_RES (2)..(2): Xaa is C or S

SEQ ID NO: 39987 - protein, 34 aa, Artificial Sequence
  Cyclic GFR-binding peptide
  MOD_RES (30)..(30): Xaa is C or S
YHYKLFIPKKRVIEKYLVSIPSLQVQTPRXQVNR

SEQ ID NO: 39988 - protein, 28 aa, Artificial Sequence
  Cyclic GFR-binding peptide
  MOD_RES (28)..(28): Xaa is C or S
MNYHYKLIVNNSSDKYLVSIPSLKTPAX

SEQ ID NO: 39989 - protein, 32 aa, Artificial Sequence
  Cyclic GFR-binding peptide
  MOD_RES (1)..(1): Xaa is C or S
XEAVSMGERYKKLTPVGMDDFYLVSIANLKTP

SEQ ID NO: 39990 - protein, 34 aa, Artificial Sequence
  Cyclic GFR-binding peptide
  MOD_RES (1)..(1): Xaa is C or S
XALHDELTRHKRLFIPKKRVIEYYLVSTASLQVQ

SEQ ID NO: 39991 - protein, 20 aa, Artificial Sequence
  Cyclic GFR-binding peptide
YHYKLVVKENEDKYLMSIPS

SEQ ID NO: 39992 - protein, 27 aa, Artificial Sequence
  Cyclic GFR-binding peptide
VMRYKKLVKPTRGVFYLISIANLDQPV

SEQ ID NO: 39993 - protein, 32 aa, Artificial Sequence
  Cyclic GFR-binding peptide
  MOD_RES (1)..(3): Xaa is C or S
XGXAKVVMNYHYKLIVNNSSDKYLVSIPSLKT

SEQ ID NO: 39994 - protein, 26 aa, Artificial Sequence
  Cyclic GFR-binding peptide
KVVMNYHYKLIVNNSSDKYLVSIPSL

SEQ ID NO: 39995 - protein, 32 aa, Artificial Sequence
  Cyclic GFR-binding peptide
  MOD_RES (26)..(27): Xaa is C or S
QYNKLVKPKRGVLYLISIASLAQPVXXPAASA

SEQ ID NO: 39996 - protein, 29 aa, Artificial Sequence
  Cyclic GFR-binding peptide
  MOD_RES (28)..(29): Xaa is C or S
IMYHYKLVKPKRGVKYLISIPSLAQPVXX

SEQ ID NO: 39997 - protein, 27 aa, Artificial Sequence
  Cyclic GFR-binding peptide
KVVMRHKRLVKPTRGVYYLISTASLDQ

SEQ ID NO: 39998 - protein, 30 aa, Artificial Sequence
  Cyclic GFR-binding peptide
  MOD_RES (29)..(30): Xaa is C or S
VIMRHKRLVKPKRGVYYLISTASLAQPVXX

SEQ ID NO: 39999 - protein, 36 aa, Artificial Sequence
  Cyclic GFR-binding peptide
  MOD_RES (30)..(31): Xaa is C or S
RVIMQYNKLVKPKRGVLYLISIASLAQPVXXPAASA

SEQ ID NO: 40000 - protein, 37 aa, Artificial Sequence; identical to SEQ ID NO: 3025
  Cyclic GFR-binding peptide
  MOD_RES (2)..(34)..(35): Xaa is C or S

SEQ ID NO: 40001 - protein, 23 aa, Artificial Sequence
  Cyclic GFR-binding peptide
NRHKRLIVNSSDDYYLVSTASLK

SEQ ID NO: 40002 - protein, 36 aa, Artificial Sequence
  Cyclic GFR-binding peptide
  MOD_RES (30)..(31): Xaa is C or S
KVIMRHKRLIKPTKGIYYLISTASLDQSVXXPSASA

SEQ ID NO: 40003 - protein, 30 aa, Artificial Sequence
  Cyclic GFR-binding peptide
  MOD_RES (29)..(30): Xaa is C or S
VMDYHYKLVVKENEDKYLMSIPSLETPVXX

SEQ ID NO: 40004 - protein, 30 aa, Artificial Sequence
  Cyclic GFR-binding peptide
  MOD_RES (29)..(30): Xaa is C or S
VIMYHYKLVKPKRGVKYLISIPSLAQPVXX

SEQ ID NO: 40005 - protein, 29 aa, Artificial Sequence
  Cyclic GFR-binding peptide
  MOD_RES (26)..(27): Xaa is C or S
YHYKLIVNNSSDKYLVSIPSLKTPAXXAK

SEQ ID NO: 40006 - protein, 32 aa, Artificial Sequence; identical to SEQ ID NO: 3028
  Cyclic GFR-binding peptide
  MOD_RES (31)..(32): Xaa is C or S

SEQ ID NO: 40007 - protein, 31 aa, Artificial Sequence
  Cyclic GFR-binding peptide
  MOD_RES (2)..(4): Xaa is C or S
RXGXGEVVMERYKKLVVKDYEDFYLMSIANL

SEQ ID NO: 40008 - protein, 37 aa, Artificial Sequence; identical to SEQ ID NO: 3030
  Cyclic GFR-binding peptide
  MOD_RES (1)..(3)..(35)..(36): Xaa is C or S

SEQ ID NO: 40009 - protein, 30 aa, Artificial Sequence
  Cyclic GFR-binding peptide
  MOD_RES (27)..(28): Xaa is C or S
MRYKKLVKPKRGVFYLISIANLAQPVXXPA

SEQ ID NO: 40010 - protein, 38 aa, Artificial Sequence; identical to SEQ ID NO: 3033
  Cyclic GFR-binding peptide
  MOD_RES (2)..(33)..(34): Xaa is C or S

SEQ ID NO: 40011 - protein, 27 aa, Artificial Sequence
  Cyclic GFR-binding peptide
  MOD_RES (2)..(2): Xaa is C or S
KXSKVVMRYKKLVKPTRGVFYLISIAN

SEQ ID NO: 40012 - protein, 24 aa, Artificial Sequence
  Cyclic GFR-binding peptide
MDYHYKLVVKENEDKYLMSIPSLE

SEQ ID NO: 40013 - protein, 41 aa, Artificial Sequence; identical to SEQ ID NO: 3035
  Cyclic GFR-binding peptide
  MOD_RES (2)..(39): Xaa is C or S

SEQ ID NO: 40014 - protein, 24 aa, Artificial Sequence
  Cyclic GFR-binding peptide
QYNKLTPVGMDDLYLVSIASLKTP

SEQ ID NO: 40015 - protein, 32 aa, Artificial Sequence; identical to SEQ ID NO: 3038
  Cyclic GFR-binding peptide
  MOD_RES (1)..(32): Xaa is C or S

SEQ ID NO: 40016 - protein, 32 aa, Artificial Sequence; identical to SEQ ID NO: 3039
  Cyclic GFR-binding peptide
  MOD_RES (31)..(32): Xaa is C or S

SEQ ID NO: 40017 - protein, 25 aa, Artificial Sequence
  Cyclic GFR-binding peptide
VMDRHKRLVVKENEDYYLMSTASLE

SEQ ID NO: 40018 - protein, 20 aa, Artificial Sequence
  Cyclic GFR-binding peptide
RHKRLVKPKRGVYYLISTAS

SEQ ID NO: 40019 - protein, 34 aa, Artificial Sequence; identical to SEQ ID NO: 3040
  Cyclic GFR-binding peptide
  MOD_RES (31)..(32): Xaa is C or S

SEQ ID NO: 40020 - protein, 33 aa, Artificial Sequence; identical to SEQ ID NO: 3041
  Cyclic GFR-binding peptide
  MOD_RES (1)..(3): Xaa is C or S

SEQ ID NO: 40021 - protein, 31 aa, Artificial Sequence
  Cyclic GFR-binding peptide
  MOD_RES (2)..(2): Xaa is C or S
KXSRVIMRHKRLVKPKRGVYYLISTASLAQP

SEQ ID NO: 40022 - protein, 28 aa, Artificial Sequence
  Cyclic GFR-binding peptide
VVMDRYKKLVVKENEDFYLMSIANLETP

SEQ ID NO: 40023 - protein, 26 aa, Artificial Sequence
  Cyclic GFR-binding peptide
SRVIMYHYKLVKPKRGVKYLISIPSL

SEQ ID NO: 40024 - protein, 26 aa, Artificial Sequence
  Cyclic GFR-binding peptide
  MOD_RES (1)..(1): Xaa is C or S
XSKVIMQYNKLIKPTKGILYLISIAS

SEQ ID NO: 40025 - protein, 34 aa, Artificial Sequence
  Cyclic GFR-binding peptide
  MOD_RES (2)..(4): Xaa is C or S
RXGXGEVVMEYHYKLVVKDYEDKYLMSIPSLETP

SEQ ID NO: 40026 - protein, 31 aa, Artificial Sequence; identical to SEQ ID NO: 3042
  Cyclic GFR-binding peptide
  MOD_RES (31)..(31): Xaa is C or S

SEQ ID NO: 40027 - protein, 29 aa, Artificial Sequence
  Cyclic GFR-binding peptide
GEVVMDRYKKLVVKENEDFYLMSIANLET

SEQ ID NO: 40028 - protein, 33 aa, Artificial Sequence
  Cyclic GFR-binding peptide
  MOD_RES (27)..(28): Xaa is C or S
ERYKKLTPVGMDDFYLVSIANLKTPVXXAKGVK

SEQ ID NO: 40029 - protein, 30 aa, Artificial Sequence
  Cyclic GFR-binding peptide
  MOD_RES (26)..(26): Xaa is C or S
RHKRLIVNSSDDYYLVSTASLKTPAXTPKT

SEQ ID NO: 40030 - protein, 25 aa, Artificial Sequence
  Cyclic GFR-binding peptide
MDRYKKLVVKENEDFYLMSIANLET

SEQ ID NO: 40031 - protein, 32 aa, Artificial Sequence
  Cyclic GFR-binding peptide
  MOD_RES (29)..(30): Xaa is C or S
VIMRYKKLIKPTKGIFYLISIANLDQSVXXPS

SEQ ID NO: 40032 - protein, 36 aa, Artificial Sequence; identical to SEQ ID NO: 3043
  Cyclic GFR-binding peptide
  MOD_RES (2)..(4)..(35)..(36): Xaa is C or S

SEQ ID NO: 40033 - protein, 24 aa, Artificial Sequence
  Cyclic GFR-binding peptide
VVMNQYNKLIVNSSDDLYLVSIAS

SEQ ID NO: 40034 - protein, 30 aa, Artificial Sequence
  Cyclic GFR-binding peptide
  MOD_RES (27)..(28): Xaa is C or S
ERHKRLTPVGMDDYYLVSTASLKTPVXXAK

SEQ ID NO: 40035 - protein, 32 aa, Artificial Sequence
  Cyclic GFR-binding peptide
  MOD_RES (26)..(27): Xaa is C or S
RHKRLVVKDYEDYYLMSTASLETPVXXAKPIS

SEQ ID NO: 40036 - protein, 25 aa, Artificial Sequence
  Cyclic GFR-binding peptide
SMGEQYNKLTPVGMDDLYLVSIASL

SEQ ID NO: 40037 - protein, 34 aa, Artificial Sequence; identical to SEQ ID NO: 3047
  Cyclic GFR-binding peptide
  MOD_RES (31)..(32): Xaa is C or S

SEQ ID NO: 40038 - protein, 38 aa, Artificial Sequence; identical to SEQ ID NO: 3045
  Cyclic GFR-binding peptide
  MOD_RES (2)..(34)..(35): Xaa is C or S

SEQ ID NO: 40039 - protein, 38 aa, Artificial Sequence; identical to SEQ ID NO: 3048
  Cyclic GFR-binding peptide
  MOD_RES (1)..(32)..(33): Xaa is C or S

SEQ ID NO: 40040 - protein, 28 aa, Artificial Sequence
  Cyclic GFR-binding peptide
  MOD_RES (2)..(2): Xaa is C or S
KXSKVIMYHYKLIKPTKGIKYLISIPSL

SEQ ID NO: 40041 - protein, 32 aa, Artificial Sequence
  Cyclic GFR-binding peptide
  MOD_RES (1)..(1): Xaa is C or S
XALHDELTRHKRLFIPKKRVIEYYLVSTASLQ

SEQ ID NO: 40042 - protein, 29 aa, Artificial Sequence
  Cyclic GFR-binding peptide
  MOD_RES (27)..(28): Xaa is C or S
NRYKKLIVNNSSDFYLVSIANLKTPAXXA

SEQ ID NO: 40043 - protein, 31 aa, Artificial Sequence
  Cyclic GFR-binding peptide
  MOD_RES (30)..(30): Xaa is C or S
RHKRLFIPKKRVIEYYLVSTASLQVQTPRXQ

SEQ ID NO: 40044 - protein, 38 aa, Artificial Sequence; identical to SEQ ID NO: 3049
  Cyclic GFR-binding peptide
  MOD_RES (32)..(33): Xaa is C or S

SEQ ID NO: 40045 - protein, 28 aa, Artificial Sequence
  Cyclic GFR-binding peptide
  MOD_RES (27)..(28): Xaa is C or S
NQYNKLIVNSSDDLYLVSIASLQTPAXX

SEQ ID NO: 40046 - protein, 27 aa, Artificial Sequence
  Cyclic GFR-binding peptide
  MOD_RES (26)..(27): Xaa is C or S
QYNKLIKPTKGILYLISIASLDQSVXX

SEQ ID NO: 40047 - protein, 38 aa, Artificial Sequence; identical to SEQ ID NO: 3051
  Cyclic GFR-binding peptide
  MOD_RES (2)..(4): Xaa is C or S

SEQ ID NO: 40048 - protein, 44 aa, Artificial Sequence; identical to SEQ ID NO: 3053
  Cyclic GFR-binding peptide
  MOD_RES (2)..(4)..(41): Xaa is C or S

SEQ ID NO: 40049 - protein, 38 aa, Artificial Sequence; identical to SEQ ID NO: 3055
  Cyclic GFR-binding peptide
  MOD_RES (2)..(4)..(36)..(37): Xaa is C or S

SEQ ID NO: 40050 - protein, 34 aa, Artificial Sequence; identical to SEQ ID NO: 3056
  Cyclic GFR-binding peptide
  MOD_RES (1)..(3)..(34): Xaa is C or S

SEQ ID NO: 40051 - protein, 37 aa, Artificial Sequence; identical to SEQ ID NO: 3058
  Cyclic GFR-binding peptide
  MOD_RES (2)..(34)..(35): Xaa is C or S

SEQ ID NO: 40052 - protein, 30 aa, Artificial Sequence
  Cyclic GFR-binding peptide
  MOD_RES (2)..(4): Xaa is C or S
SXKXSRVIMQYNKLVKPKRGVLYLISIASL

SEQ ID NO: 40053 - protein, 33 aa, Artificial Sequence
  Cyclic GFR-binding peptide
  MOD_RES (2)..(4): Xaa is C or S
RXGXGEVVMERHKRLVVKDYEDYYLMSTASLET

SEQ ID NO: 40054 - protein, 29 aa, Artificial Sequence
  Cyclic GFR-binding peptide
GEVVMERYKKLVVKDYEDFYLMSIANLET

SEQ ID NO: 40055 - protein, 20 aa, Artificial Sequence
  Cyclic GFR-binding peptide
YHYKLVKPKRGVKYLISIPS

SEQ ID NO: 40056 - protein, 30 aa, Artificial Sequence
  Cyclic GFR-binding peptide
  MOD_RES (1)..(1): Xaa is C or S
XSRVVMNYHYKLIVNSSDDKYLVSIPSLKT

SEQ ID NO: 40057 - protein, 28 aa, Artificial Sequence
  Cyclic GFR-binding peptide
  MOD_RES (28)..(28): Xaa is C or S
IMRYKKLIKPTKGIFYLISIANLDQSVX

SEQ ID NO: 40058 - protein, 37 aa, Artificial Sequence; identical to SEQ ID NO: 3060
  Cyclic GFR-binding peptide
  MOD_RES (2)..(4)..(36): Xaa is C or S

SEQ ID NO: 40059 - protein, 31 aa, Artificial Sequence
  Cyclic GFR-binding peptide
DELTRHKRLFIPKKRVIEYYLVSTASLQVQT

SEQ ID NO: 40060 - protein, 25 aa, Artificial Sequence
  Cyclic GFR-binding peptide
VMDYHYKLVVKENEDKYLMSIPSLE

SEQ ID NO: 40061 - protein, 36 aa, Artificial Sequence; identical to SEQ ID NO: 3062
  Cyclic GFR-binding peptide
  MOD_RES (2)..(4)..(35)..(36): Xaa is C or S

SEQ ID NO: 40062 - protein, 40 aa, Artificial Sequence; identical to SEQ ID NO: 3063
  Cyclic GFR-binding peptide
  MOD_RES (2)..(4)..(37)..(38): Xaa is C or S

SEQ ID NO: 40063 - protein, 28 aa, Artificial Sequence
  Cyclic GFR-binding peptide
  MOD_RES (1)..(1): Xaa is C or S
XAKVVMNYHYKLIVNNSSDKYLVSIPSL

SEQ ID NO: 40064 - protein, 22 aa, Artificial Sequence
  Cyclic GFR-binding peptide
YHYKLVVKDYEDKYLMSIPSLE

SEQ ID NO: 40065 - protein, 33 aa, Artificial Sequence; identical to SEQ ID NO: 3064
  Cyclic GFR-binding peptide
  MOD_RES (2)..(33): Xaa is C or S

SEQ ID NO: 40066 - protein, 34 aa, Artificial Sequence; identical to SEQ ID NO: 3065
  Cyclic GFR-binding peptide
  MOD_RES (1)..(32)..(33): Xaa is C or S

SEQ ID NO: 40067 - protein, 27 aa, Artificial Sequence
  Cyclic GFR-binding peptide
IMRYKKLIKPTKGIFYLISIANLDQSV

SEQ ID NO: 40068 - protein, 38 aa, Artificial Sequence; identical to SEQ ID NO: 3066
  Cyclic GFR-binding peptide
  MOD_RES (2)..(4)..(35)..(36): Xaa is C or S

SEQ ID NO: 40069 - protein, 34 aa, Artificial Sequence; identical to SEQ ID NO: 3067
  Cyclic GFR-binding peptide
  MOD_RES (2)..(34): Xaa is C or S

SEQ ID NO: 40070 - protein, 25 aa, Artificial Sequence
  Cyclic GFR-binding peptide
RVIMRHKRLVKPKRGVYYLISTASL

SEQ ID NO: 40071 - protein, 22 aa, Artificial Sequence
  Cyclic GFR-binding peptide
NQYNKLIVNNSSDLYLVSIASL

SEQ ID NO: 40072 - protein, 34 aa, Artificial Sequence; identical to SEQ ID NO: 3070
  Cyclic GFR-binding peptide
  MOD_RES (2)..(34): Xaa is C or S

SEQ ID NO: 40073 - protein, 37 aa, Artificial Sequence; identical to SEQ ID NO: 3071
  Cyclic GFR-binding peptide
  MOD_RES (2)..(4)..(36)..(37): Xaa is C or S

SEQ ID NO: 40074 - protein, 36 aa, Artificial Sequence; identical to SEQ ID NO: 3072
  Cyclic GFR-binding peptide
  MOD_RES (1)..(34)..(35): Xaa is C or S

SEQ ID NO: 40075 - protein, 32 aa, Artificial Sequence
  Cyclic GFR-binding peptide
  MOD_RES (30)..(30): Xaa is C or S
YHYKLFIPKKRVIEKYLVSIPSLQVQTPRXQV

SEQ ID NO: 40076 - protein, 20 aa, Artificial Sequence
  Cyclic GFR-binding peptide
RYKKLVVKENEDFYLMSIAN

SEQ ID NO: 40077 - protein, 26 aa, Artificial Sequence
  Cyclic GFR-binding peptide
VMYHYKLVKPTRGVKYLISIPSLDQP

SEQ ID NO: 40078 - protein, 28 aa, Artificial Sequence
  Cyclic GFR-binding peptide
  MOD_RES (26)..(27): Xaa is C or S
RYKKLTPVGMDDFYLVSIANLKTPVXXA

SEQ ID NO: 40079 - protein, 31 aa, Artificial Sequence
  Cyclic GFR-binding peptide
  MOD_RES (30)..(31): Xaa is C or S
KVVMRHKRLVKPTRGVYYLISTASLDQPVXX

SEQ ID NO: 40080 - protein, 27 aa, Artificial Sequence
  Cyclic GFR-binding peptide
  MOD_RES (27)..(27): Xaa is C or S
MQYNKLVKPTRGVLYLISIASLDQPVX

SEQ ID NO: 40081 - protein, 22 aa, Artificial Sequence
  Cyclic GFR-binding peptide
RYKKLIKPTKGIFYLISIANLD

SEQ ID NO: 40082 - protein, 24 aa, Artificial Sequence
  Cyclic GFR-binding peptide
RHKRLVKPTRGVYYLISTASLDQP

SEQ ID NO: 40083 - protein, 36 aa, Artificial Sequence; identical to SEQ ID NO: 3078
  Cyclic GFR-binding peptide
  MOD_RES (1)..(3)..(35)..(36): Xaa is C or S

SEQ ID NO: 40084 - protein, 27 aa, Artificial Sequence
  Cyclic GFR-binding peptide
VVMYHYKLVKPTRGVKYLISIPSLDQP

SEQ ID NO: 40085 - protein, 27 aa, Artificial Sequence
  Cyclic GFR-binding peptide
VVMRHKRLVKPTRGVYYLISTASLDQP

SEQ ID NO: 40086 - protein, 35 aa, Artificial Sequence; identical to SEQ ID NO: 3082
  Cyclic GFR-binding peptide

SEQ ID NO: 40087 - protein, 31 aa, Artificial Sequence
  Cyclic GFR-binding peptide
EAVSMGERHKRLTPVGMDDYYLVSTASLKTP

SEQ ID NO: 40088 - protein, 31 aa, Artificial Sequence
  Cyclic GFR-binding peptide
  MOD_RES (2)..(4): Xaa is C or S
SXKXSKVVMYHYKLVKPTRGVKYLISIPSLD

SEQ ID NO: 40089 - protein, 37 aa, Artificial Sequence; identical to SEQ ID NO: 3086
  Cyclic GFR-binding peptide
  MOD_RES (1)..(3)..(35)..(36): Xaa is C or S

SEQ ID NO: 40090 - protein, 30 aa, Artificial Sequence
  Cyclic GFR-binding peptide
  MOD_RES (1)..(3): Xaa is C or S
XKXSKVIMQYNKLIKPTKGILYLISIASLD

SEQ ID NO: 40091 - protein, 31 aa, Artificial Sequence
  Cyclic GFR-binding peptide
  MOD_RES (28)..(29): Xaa is C or S
MDRYKKLVVKENEDFYLMSIANLETPVXXAK

SEQ ID NO: 40092 - protein, 38 aa, Artificial Sequence; identical to SEQ ID NO: 3090
  Cyclic GFR-binding peptide
  MOD_RES (33)..(34): Xaa is C or S

SEQ ID NO: 40093 - protein, 36 aa, Artificial Sequence; identical to SEQ ID NO: 3089
  Cyclic GFR-binding peptide
  MOD_RES (2)..(33)..(34): Xaa is C or S

SEQ ID NO: 40094 - protein, 33 aa, Artificial Sequence; identical to SEQ ID NO: 3091
  Cyclic GFR-binding peptide

SEQ ID NO: 40095 - protein, 23 aa, Artificial Sequence
  Cyclic GFR-binding peptide
VIMQYNKLVKPKRGVLYLISIAS

SEQ ID NO: 40096 - protein, 36 aa, Artificial Sequence
  Cyclic GFR-binding peptide
  MOD_RES (30)..(30): Xaa is C or S
VVMNQYNKLIVNSSDDLYLVSIASLKTPAXTPKTVH

SEQ ID NO: 40097 - protein, 40 aa, Artificial Sequence; identical to SEQ ID NO: 3092
  Cyclic GFR-binding peptide
  MOD_RES (2)..(4)..(36)..(37): Xaa is C or S

SEQ ID NO: 40098 - protein, 27 aa, Artificial Sequence
  Cyclic GFR-binding peptide
MDRYKKLVVKENEDFYLMSIANLETPV

SEQ ID NO: 40099 - protein, 33 aa, Artificial Sequence; identical to SEQ ID NO: 3093
  Cyclic GFR-binding peptide
  MOD_RES (2)..(33): Xaa is C or S

SEQ ID NO: 40100 - protein, 33 aa, Artificial Sequence
  Cyclic GFR-binding peptide
  MOD_RES (30)..(30): Xaa is C or S
RHKRLFIPKKRVIEYYLVSTASLQVQTPRXQVN

SEQ ID NO: 40101 - protein, 40 aa, Artificial Sequence; identical to SEQ ID NO: 3094
  Cyclic GFR-binding peptide
  MOD_RES (2)..(4)..(36)..(37): Xaa is C or S

SEQ ID NO: 40102 - protein, 35 aa, Artificial Sequence
  Cyclic GFR-binding peptide
  MOD_RES (2)..(2): Xaa is C or S
KXALHDELTQYNKLFIPKKRVIELYLVSIASLQVQ

SEQ ID NO: 40103 - protein, 27 aa, Artificial Sequence
  Cyclic GFR-binding peptide
  MOD_RES (1)..(1): Xaa is C or S
XGEVVMERHKRLVVKDYEDYYLMSTAS

SEQ ID NO: 40104 - protein, 30 aa, Artificial Sequence
  Cyclic GFR-binding peptide
  MOD_RES (2)..(4): Xaa is C or S
SXKXSRVIMYHYKLVKPKRGVKYLISIPSL

SEQ ID NO: 40105 - protein, 33 aa, Artificial Sequence
  Cyclic GFR-binding peptide
  MOD_RES (27)..(28): Xaa is C or S
MRHKRLIKPTKGIYYLISTASLDQSVXXPSASA

SEQ ID NO: 40106 - protein, 31 aa, Artificial Sequence
  Cyclic GFR-binding peptide
  MOD_RES (30)..(31): Xaa is C or S
VVMERYKKLVVKDYEDFYLMSIANLETPVXX

SEQ ID NO: 40107 - protein, 38 aa, Artificial Sequence
  Cyclic GFR-binding peptide
  MOD_RES (34)..(34): Xaa is C or S
DELTQYNKLFIPKKRVIELYLVSIASLQVQTPRXQVNR

SEQ ID NO: 40108 - protein, 35 aa, Artificial Sequence; identical to SEQ ID NO: 3100
  Cyclic GFR-binding peptide
  MOD_RES (1)..(34)..(35): Xaa is C or S

SEQ ID NO: 40109 - protein, 40 aa, Artificial Sequence; identical to SEQ ID NO: 3101
  Cyclic GFR-binding peptide
  MOD_RES (1)..(3)..(35)..(36): Xaa is C or S

SEQ ID NO: 40110 - protein, 25 aa, Artificial Sequence
  Cyclic GFR-binding peptide
EVVMEYHYKLVVKDYEDKYLMSIPS

SEQ ID NO: 40111 - protein, 32 aa, Artificial Sequence
  Cyclic GFR-binding peptide
  MOD_RES (28)..(29): Xaa is C or S
MEYHYKLVVKDYEDKYLMSIPSLETPVXXAKP

SEQ ID NO: 40112 - protein, 33 aa, Artificial Sequence
  Cyclic GFR-binding peptide
  MOD_RES (32)..(32): Xaa is C or S
LTRYKKLFIPKKRVIEFYLVSIANLQVQTPRXQ

SEQ ID NO: 40113 - protein, 30 aa, Artificial Sequence
  Cyclic GFR-binding peptide
  MOD_RES (30)..(30): Xaa is C or S
VVMDYHYKLVVKENEDKYLMSIPSLETPVX

SEQ ID NO: 40114 - protein, 35 aa, Artificial Sequence; identical to SEQ ID NO: 3103
  Cyclic GFR-binding peptide

SEQ ID NO: 40115 - protein, 36 aa, Artificial Sequence
  Cyclic GFR-binding peptide
  MOD_RES (33)..(33): Xaa is C or S
ELTQYNKLFIPKKRVIELYLVSIASLQVQTPRXQVN

SEQ ID NO: 40116 - protein, 26 aa, Artificial Sequence
  Cyclic GFR-binding peptide
AKVVMNRYKKLIVNNSSDFYLVSIAN

SEQ ID NO: 40117 - protein, 29 aa, Artificial Sequence
  Cyclic GFR-binding peptide
SRVVMNRHKRLIVNSSDDYYLVSTASLKT

SEQ ID NO: 40118 - protein, 41 aa, Artificial Sequence; identical to SEQ ID NO: 3106
  Cyclic GFR-binding peptide
  MOD_RES (2)..(4)..(35)..(36): Xaa is C or S

SEQ ID NO: 40119 - protein, 22 aa, Artificial Sequence
  Cyclic GFR-binding peptide
MRYKKLVKPTRGVFYLISIANL

SEQ ID NO: 40120 - protein, 34 aa, Artificial Sequence
  Cyclic GFR-binding peptide
  MOD_RES (2)..(4): Xaa is C or S
HXGXSRVVMNRHKRLIVNSSDDYYLVSTASLKTP

SEQ ID NO: 40121 - protein, 26 aa, Artificial Sequence
  Cyclic GFR-binding peptide
RVVMNQYNKLIVNSSDDLYLVSIASL

SEQ ID NO: 40122 - protein, 36 aa, Artificial Sequence; identical to SEQ ID NO: 3107
  Cyclic GFR-binding peptide
  MOD_RES (2)..(35)..(36): Xaa is C or S

SEQ ID NO: 40123 - protein, 35 aa, Artificial Sequence
  Cyclic GFR-binding peptide
  MOD_RES (32)..(32): Xaa is C or S
LTRYKKLFIPKKRVIEFYLVSIANLQVQTPRXQVN

SEQ ID NO: 40124 - protein, 36 aa, Artificial Sequence; identical to SEQ ID NO: 3109
  Cyclic GFR-binding peptide
  MOD_RES (31)..(32): Xaa is C or S

SEQ ID NO: 40125 - protein, 42 aa, Artificial Sequence; identical to SEQ ID NO: 3110
  Cyclic GFR-binding peptide
  MOD_RES (2)..(4)..(36)..(37): Xaa is C or S

SEQ ID NO: 40126 - protein, 39 aa, Artificial Sequence; identical to SEQ ID NO: 3111
  Cyclic GFR-binding peptide
  MOD_RES (1)..(33)..(34): Xaa is C or S

SEQ ID NO: 40127 - protein, 24 aa, Artificial Sequence
  Cyclic GFR-binding peptide
ERYKKLTPVGMDDFYLVSIANLKT

SEQ ID NO: 40128 - protein, 25 aa, Artificial Sequence
  Cyclic GFR-binding peptide
NQYNKLIVNSSDDLYLVSIASLQTP

SEQ ID NO: 40129 - protein, 33 aa, Artificial Sequence; identical to SEQ ID NO: 3115
  Cyclic GFR-binding peptide
  MOD_RES (32)..(33): Xaa is C or S

SEQ ID NO: 40130 - protein, 33 aa, Artificial Sequence; identical to SEQ ID NO: 3119
  Cyclic GFR-binding peptide
  MOD_RES (1)..(32)..(33): Xaa is C or S

SEQ ID NO: 40131 - protein, 29 aa, Artificial Sequence
  Cyclic GFR-binding peptide
  MOD_RES (28)..(29): Xaa is C or S
MNYHYKLIVNNSSDKYLVSIPSLKTPAXX

SEQ ID NO: 40132 - protein, 28 aa, Artificial Sequence
  Cyclic GFR-binding peptide
  MOD_RES (26)..(27): Xaa is C or S
QYNKLIVNSSDDLYLVSIASLKTPAXXP

SEQ ID NO: 40133 - protein, 28 aa, Artificial Sequence
  Cyclic GFR-binding peptide
SKVVMRHKRLVKPTRGVYYLISTASLDQ

SEQ ID NO: 40134 - protein, 31 aa, Artificial Sequence; identical to SEQ ID NO: 3120
  Cyclic GFR-binding peptide
  MOD_RES (1)..(1): Xaa is C or S

SEQ ID NO: 40135 - protein, 38 aa, Artificial Sequence; identical to SEQ ID NO: 3121
  Cyclic GFR-binding peptide
  MOD_RES (1)..(32)..(33): Xaa is C or S

SEQ ID NO: 40136 - protein, 25 aa, Artificial Sequence
  Cyclic GFR-binding peptide
RHKRLVVKDYEDYYLMSTASLETPV

SEQ ID NO: 40137 - protein, 27 aa, Artificial Sequence
  Cyclic GFR-binding peptide
RVVMNQYNKLIVNSSDDLYLVSIASLQ

SEQ ID NO: 40138 - protein, 33 aa, Artificial Sequence
  Cyclic GFR-binding peptide
  MOD_RES (29)..(30): Xaa is C or S
VMNQYNKLIVNSSDDLYLVSIASLQTPAXXPKP

SEQ ID NO: 40139 - protein, 28 aa, Artificial Sequence
  Cyclic GFR-binding peptide
  MOD_RES (1)..(1): Xaa is C or S
XARVVMNYHYKLIVNSSDDKYLVSIPSL

SEQ ID NO: 40140 - protein, 22 aa, Artificial Sequence
  Cyclic GFR-binding peptide
IMRYKKLVKPKRGVFYLISIAN

SEQ ID NO: 40141 - protein, 33 aa, Artificial Sequence; identical to SEQ ID NO: 3122
  Cyclic GFR-binding peptide
  MOD_RES (33)..(33): Xaa is C or S

SEQ ID NO: 40142 - protein, 36 aa, Artificial Sequence; identical to SEQ ID NO: 3123
  Cyclic GFR-binding peptide
  MOD_RES (1)..(3)..(34)..(35): Xaa is C or S

SEQ ID NO: 40143 - protein, 30 aa, Artificial Sequence
  Cyclic GFR-binding peptide
  MOD_RES (1)..(1): Xaa is C or S
XSKVIMRYKKLIKPTKGIFYLISIANLDQS

SEQ ID NO: 40144 - protein, 27 aa, Artificial Sequence
  Cyclic GFR-binding peptide
  MOD_RES (2)..(2): Xaa is C or S
KXSRVIMRYKKLVKPKRGVFYLISIAN

SEQ ID NO: 40145 - protein, 34 aa, Artificial Sequence; identical to SEQ ID NO: 3127
  Cyclic GFR-binding peptide
  MOD_RES (2)..(33)..(34): Xaa is C or S

SEQ ID NO: 40146 - protein, 33 aa, Artificial Sequence; identical to SEQ ID NO: 3126
  Cyclic GFR-binding peptide
  MOD_RES (31)..(32): Xaa is C or S

SEQ ID NO: 40147 - protein, 28 aa, Artificial Sequence
  Cyclic GFR-binding peptide
TRHKRLFIPKKRVIEYYLVSTASLQVQT

SEQ ID NO: 40148 - protein, 33 aa, Artificial Sequence; identical to SEQ ID NO: 3128
  Cyclic GFR-binding peptide
  MOD_RES (31)..(32): Xaa is C or S

SEQ ID NO: 40149 - protein, 27 aa, Artificial Sequence
  Cyclic GFR-binding peptide
VIMQYNKLVKPKRGVLYLISIASLAQP

SEQ ID NO: 40150 - protein, 31 aa, Artificial Sequence
  Cyclic GFR-binding peptide
  MOD_RES (1)..(3): Xaa is C or S
XKXSKVIMRHKRLIKPTKGIYYLISTASLDQ

SEQ ID NO: 40151 - protein, 32 aa, Artificial Sequence; identical to SEQ ID NO: 3131
  Cyclic GFR-binding peptide
  MOD_RES (1)..(1): Xaa is C or S

SEQ ID NO: 40152 - protein, 32 aa, Artificial Sequence; identical to SEQ ID NO: 3133
  Cyclic GFR-binding peptide
  MOD_RES (2)..(2): Xaa is C or S

SEQ ID NO: 40153 - protein, 30 aa, Artificial Sequence
  Cyclic GFR-binding peptide
  MOD_RES (28)..(29): Xaa is C or S
IMRYKKLVKPKRGVFYLISIANLAQPVXXP

SEQ ID NO: 40154 - protein, 27 aa, Artificial Sequence
  Cyclic GFR-binding peptide
LTQYNKLFIPKKRVIELYLVSIASLQV

SEQ ID NO: 40155 - protein, 33 aa, Artificial Sequence
  Cyclic GFR-binding peptide
  MOD_RES (29)..(30): Xaa is C or S
VMDRYKKLVVKENEDFYLMSIANLETPVXXAKP

SEQ ID NO: 40156 - protein, 34 aa, Artificial Sequence
  Cyclic GFR-binding peptide
  MOD_RES (30)..(31): Xaa is C or S
VVMNQYNKLIVNSSDDLYLVSIASLKTPAXXPKP

SEQ ID NO: 40157 - protein, 36 aa, Artificial Sequence; identical to SEQ ID NO: 3137
  Cyclic GFR-binding peptide
  MOD_RES (2)..(4)..(36): Xaa is C or S

SEQ ID NO: 40158 - protein, 28 aa, Artificial Sequence
  Cyclic GFR-binding peptide
AVSMGERYKKLTPVGMDDFYLVSIANLK

SEQ ID NO: 40159 - protein, 24 aa, Artificial Sequence
  Cyclic GFR-binding peptide
RYKKLTPVGMDDFYLVSIANLKTP

SEQ ID NO: 40160 - protein, 32 aa, Artificial Sequence; identical to SEQ ID NO: 3138
  Cyclic GFR-binding peptide
  MOD_RES (2)..(2): Xaa is C or S

SEQ ID NO: 40161 - protein, 36 aa, Artificial Sequence; identical to SEQ ID NO: 3139
  Cyclic GFR-binding peptide
  MOD_RES (1)..(33)..(34): Xaa is C or S

SEQ ID NO: 40162 - protein, 33 aa, Artificial Sequence
  Cyclic GFR-binding peptide
  MOD_RES (29)..(30): Xaa is C or S
VMNQYNKLIVNNSSDLYLVSIASLKTPAXXAKP

SEQ ID NO: 40163 - protein, 30 aa, Artificial Sequence
  Cyclic GFR-binding peptide
  MOD_RES (27)..(28): Xaa is C or S
NYHYKLIVNNSSDKYLVSIPSLKTPAXXAK

SEQ ID NO: 40164 - protein, 32 aa, Artificial Sequence
  Cyclic GFR-binding peptide
  MOD_RES (29)..(30): Xaa is C or S
VMNQYNKLIVNNSSDLYLVSIASLKTPAXXAK

SEQ ID NO: 40165 - protein, 30 aa, Artificial Sequence
  Cyclic GFR-binding peptide
ALHDELTRYKKLFIPKKRVIEFYLVSIANL

SEQ ID NO: 40166 - protein, 30 aa, Artificial Sequence; identical to SEQ ID NO: 3142
  Cyclic GFR-binding peptide

SEQ ID NO: 40167 - protein, 42 aa, Artificial Sequence; identical to SEQ ID NO: 3143
  Cyclic GFR-binding peptide
  MOD_RES (2)..(4)..(36)..(37): Xaa is C or S

SEQ ID NO: 40168 - protein, 28 aa, Artificial Sequence
  Cyclic GFR-binding peptide
  MOD_RES (28)..(28): Xaa is C or S
VMRYKKLVKPTRGVFYLISIANLDQPVX

SEQ ID NO: 40169 - protein, 35 aa, Artificial Sequence; identical to SEQ ID NO: 3144
  Cyclic GFR-binding peptide
  MOD_RES (2)..(4): Xaa is C or S

SEQ ID NO: 40170 - protein, 29 aa, Artificial Sequence
  Cyclic GFR-binding peptide
  MOD_RES (27)..(28): Xaa is C or S
NYHYKLIVNSSDDKYLVSIPSLKTPAXXP

SEQ ID NO: 40171 - protein, 27 aa, Artificial Sequence
  Cyclic GFR-binding peptide
VMNRHKRLIVNSSDDYYLVSTASLKTP

SEQ ID NO: 40172 - protein, 32 aa, Artificial Sequence
  Cyclic GFR-binding peptide
  MOD_RES (30)..(31): Xaa is C or S
KVVMQYNKLVKPTRGVLYLISIASLDQPVXXP

SEQ ID NO: 40173 - protein, 42 aa, Artificial Sequence; identical to SEQ ID NO: 3145
  Cyclic GFR-binding peptide
  MOD_RES (2)..(4)..(36)..(37): Xaa is C or S

SEQ ID NO: 40174 - protein, 31 aa, Artificial Sequence
  Cyclic GFR-binding peptide
  MOD_RES (30)..(31): Xaa is C or S
KVVMYHYKLVKPTRGVKYLISIPSLDQPVXX

SEQ ID NO: 40175 - protein, 32 aa, Artificial Sequence
  Cyclic GFR-binding peptide
  MOD_RES (2)..(2): Xaa is C or S
KXALHDELTYHYKLFIPKKRVIEKYLVSIPSL

SEQ ID NO: 40176 - protein, 32 aa, Artificial Sequence
  Cyclic GFR-binding peptide
  MOD_RES (28)..(29): Xaa is C or S
IMYHYKLVKPKRGVKYLISIPSLAQPVXXPAA

SEQ ID NO: 40177 - protein, 32 aa, Artificial Sequence
  Cyclic GFR-binding peptide
  MOD_RES (26)..(27): Xaa is C or S
RHKRLIKPTKGIYYLISTASLDQSVXXPSASA

SEQ ID NO: 40178 - protein, 30 aa, Artificial Sequence
  Cyclic GFR-binding peptide
  MOD_RES (2)..(4): Xaa is C or S
SXKXSKVVMYHYKLVKPTRGVKYLISIPSL

SEQ ID NO: 40179 - protein, 39 aa, Artificial Sequence; identical to SEQ ID NO: 3148
  Cyclic GFR-binding peptide
  MOD_RES (1)..(33)..(34): Xaa is C or S

SEQ ID NO: 40180 - protein, 41 aa, Artificial Sequence; identical to SEQ ID NO: 3149
  Cyclic GFR-binding peptide
  MOD_RES (2)..(35)..(36): Xaa is C or S

SEQ ID NO: 40181 - protein, 30 aa, Artificial Sequence
  Cyclic GFR-binding peptide
  MOD_RES (2)..(2): Xaa is C or S
GXGEVVMDRHKRLVVKENEDYYLMSTASLE

SEQ ID NO: 40182 - protein, 31 aa, Artificial Sequence
  Cyclic GFR-binding peptide
  MOD_RES (2)..(2): Xaa is C or S
KXALHDELTYHYKLFIPKKRVIEKYLVSIPS

SEQ ID NO: 40183 - protein, 34 aa, Artificial Sequence
  Cyclic GFR-binding peptide
  MOD_RES (28)..(29): Xaa is C or S
MNYHYKLIVNSSDDKYLVSIPSLQTPAXXPKPVT

SEQ ID NO: 40184 - protein, 33 aa, Artificial Sequence; identical to SEQ ID NO: 3151
  Cyclic GFR-binding peptide
  MOD_RES (2)..(33): Xaa is C or S

SEQ ID NO: 40185 - protein, 31 aa, Artificial Sequence
  Cyclic GFR-binding peptide
  MOD_RES (2)..(2): Xaa is C or S
KXSKVIMRYKKLIKPTKGIFYLISIANLDQS

SEQ ID NO: 40186 - protein, 30 aa, Artificial Sequence
  Cyclic GFR-binding peptide
  MOD_RES (29)..(30): Xaa is C or S
VMNQYNKLIVNNSSDLYLVSIASLKTPAXX

SEQ ID NO: 40187 - protein, 32 aa, Artificial Sequence
  Cyclic GFR-binding peptide
  MOD_RES (27)..(28): Xaa is C or S
ERHKRLTPVGMDDYYLVSTASLKTPVXXAKGV

SEQ ID NO: 40188 - protein, 29 aa, Artificial Sequence
  Cyclic GFR-binding peptide
  MOD_RES (26)..(26): Xaa is C or S
RHKRLIVNSSDDYYLVSTASLKTPAXTPK

SEQ ID NO: 40189 - protein, 32 aa, Artificial Sequence
  Cyclic GFR-binding peptide
  MOD_RES (30)..(31): Xaa is C or S
SMGEQYNKLTPVGMDDLYLVSIASLKTPVXXA

SEQ ID NO: 40190 - protein, 22 aa, Artificial Sequence
  Cyclic GFR-binding peptide
RHKRLVVKENEDYYLMSTASLE

SEQ ID NO: 40191 - protein, 34 aa, Artificial Sequence; identical to SEQ ID NO: 3153
  Cyclic GFR-binding peptide
  MOD_RES (31)..(32): Xaa is C or S

SEQ ID NO: 40192 - protein, 31 aa, Artificial Sequence
  Cyclic GFR-binding peptide
  MOD_RES (2)..(4): Xaa is C or S
SXKXSRVIMYHYKLVKPKRGVKYLISIPSLA

SEQ ID NO: 40193 - protein, 29 aa, Artificial Sequence
  Cyclic GFR-binding peptide
  MOD_RES (26)..(27): Xaa is C or S
QYNKLIVNSSDDLYLVSIASLQTPAXXPK

SEQ ID NO: 40194 - protein, 35 aa, Artificial Sequence; identical to SEQ ID NO: 3155
  Cyclic GFR-binding peptide
  MOD_RES (1)..(3)..(34)..(35): Xaa is C or S

SEQ ID NO: 40195 - protein, 36 aa, Artificial Sequence; identical to SEQ ID NO: 3156
  Cyclic GFR-binding peptide
  MOD_RES (2)..(4)..(36): Xaa is C or S

SEQ ID NO: 40196 - protein, 35 aa, Artificial Sequence
  Cyclic GFR-binding peptide
  MOD_RES (29)..(29): Xaa is C or S
VMNRHKRLIVNSSDDYYLVSTASLKTPAXTPKTVH

SEQ ID NO: 40197 - protein, 25 aa, Artificial Sequence
  Cyclic GFR-binding peptide
VVMERHKRLVVKDYEDYYLMSTASL

SEQ ID NO: 40198 - protein, 26 aa, Artificial Sequence
  Cyclic GFR-binding peptide
  MOD_RES (26)..(26): Xaa is C or S
RYKKLVKPKRGVFYLISIANLAQPVX

SEQ ID NO: 40199 - protein, 37 aa, Artificial Sequence; identical to SEQ ID NO: 3157
  Cyclic GFR-binding peptide
  MOD_RES (1)..(33)..(34): Xaa is C or S

SEQ ID NO: 40200 - protein, 23 aa, Artificial Sequence
  Cyclic GFR-binding peptide
GERHKRLTPVGMDDYYLVSTASL

SEQ ID NO: 40201 - protein, 26 aa, Artificial Sequence
  Cyclic GFR-binding peptide
KVIMRYKKLIKPTKGIFYLISIANLD

SEQ ID NO: 40202 - protein, 29 aa, Artificial Sequence
  Cyclic GFR-binding peptide
  MOD_RES (27)..(28): Xaa is C or S
MYHYKLIKPTKGIKYLISIPSLDQSVXXP

SEQ ID NO: 40203 - protein, 32 aa, Artificial Sequence; identical to SEQ ID NO: 3159
  Cyclic GFR-binding peptide
  MOD_RES (1)..(1): Xaa is C or S

SEQ ID NO: 40204 - protein, 23 aa, Artificial Sequence
  Cyclic GFR-binding peptide
VVMQYNKLVKPTRGVLYLISIAS

SEQ ID NO: 40205 - protein, 34 aa, Artificial Sequence
  Cyclic GFR-binding peptide
  MOD_RES (2)..(2): Xaa is C or S
KXALHDELTRHKRLFIPKKRVIEYYLVSTASLQV

SEQ ID NO: 40206 - protein, 33 aa, Artificial Sequence; identical to SEQ ID NO: 3162
  Cyclic GFR-binding peptide
  MOD_RES (2)..(33): Xaa is C or S

SEQ ID NO: 40207 - protein, 35 aa, Artificial Sequence; identical to SEQ ID NO: 3163
  Cyclic GFR-binding peptide
  MOD_RES (1)..(1): Xaa is C or S

SEQ ID NO: 40208 - protein, 31 aa, Artificial Sequence
  Cyclic GFR-binding peptide
  MOD_RES (29)..(30): Xaa is C or S
VMDRYKKLVVKENEDFYLMSIANLETPVXXA

SEQ ID NO: 40209 - protein, 29 aa, Artificial Sequence
  Cyclic GFR-binding peptide
SMGERHKRLTPVGMDDYYLVSTASLKTPV

SEQ ID NO: 40210 - protein, 28 aa, Artificial Sequence
  Cyclic GFR-binding peptide
  MOD_RES (28)..(28): Xaa is C or S
GEQYNKLTPVGMDDLYLVSIASLKTPVX

SEQ ID NO: 40211 - protein, 26 aa, Artificial Sequence
  Cyclic GFR-binding peptide
VVMDRYKKLVVKENEDFYLMSIANLE

SEQ ID NO: 40212 - protein, 29 aa, Artificial Sequence
  Cyclic GFR-binding peptide
  MOD_RES (28)..(29): Xaa is C or S
MNQYNKLIVNSSDDLYLVSIASLQTPAXX

SEQ ID NO: 40213 - protein, 22 aa, Artificial Sequence
  Cyclic GFR-binding peptide
DRHKRLVVKENEDYYLMSTASL

SEQ ID NO: 40214 - protein, 31 aa, Artificial Sequence
  Cyclic GFR-binding peptide
  MOD_RES (1)..(1): Xaa is C or S
XALHDELTRHKRLFIPKKRVIEYYLVSTASL

SEQ ID NO: 40215 - protein, 30 aa, Artificial Sequence
  Cyclic GFR-binding peptide
  MOD_RES (1)..(1): Xaa is C or S
XGEVVMERYKKLVVKDYEDFYLMSIANLET

SEQ ID NO: 40216 - protein, 33 aa, Artificial Sequence
  Cyclic GFR-binding peptide
  MOD_RES (29)..(30): Xaa is C or S
VIMYHYKLVKPKRGVKYLISIPSLAQPVXXPAA

SEQ ID NO: 40217 - protein, 31 aa, Artificial Sequence
  Cyclic GFR-binding peptide
  MOD_RES (30)..(31): Xaa is C or S
RVIMRYKKLVKPKRGVFYLISIANLAQPVXX

SEQ ID NO: 40218 - protein, 29 aa, Artificial Sequence
  Cyclic GFR-binding peptide
SKVIMRYKKLIKPTKGIFYLISIANLDQS

SEQ ID NO: 40219 - protein, 28 aa, Artificial Sequence
  Cyclic GFR-binding peptide
DELTYHYKLFIPKKRVIEKYLVSIPSLQ

SEQ ID NO: 40220 - protein, 27 aa, Artificial Sequence
  Cyclic GFR-binding peptide
  MOD_RES (1)..(1): Xaa is C or S
XSRVVMNYHYKLIVNSSDDKYLVSIPS

SEQ ID NO: 40221 - protein, 36 aa, Artificial Sequence; identical to SEQ ID NO: 3167
  Cyclic GFR-binding peptide
  MOD_RES (2)..(34)..(35): Xaa is C or S

SEQ ID NO: 40222 - protein, 28 aa, Artificial Sequence
  Cyclic GFR-binding peptide
  MOD_RES (28)..(28): Xaa is C or S
MNQYNKLIVNSSDDLYLVSIASLKTPAX

SEQ ID NO: 40223 - protein, 34 aa, Artificial Sequence
  Cyclic GFR-binding peptide
  MOD_RES (28)..(29): Xaa is C or S
MNYHYKLIVNNSSDKYLVSIPSLKTPAXXAKPVA

SEQ ID NO: 40224 - protein, 37 aa, Artificial Sequence; identical to SEQ ID NO: 3168
  Cyclic GFR-binding peptide
  MOD_RES (31)..(31): Xaa is C or S

SEQ ID NO: 40225 - protein, 43 aa, Artificial Sequence; identical to SEQ ID NO: 3169
  Cyclic GFR-binding peptide
  MOD_RES (2)..(39): Xaa is C or S

SEQ ID NO: 40226 - protein, 30 aa, Artificial Sequence
  Cyclic GFR-binding peptide
  MOD_RES (2)..(4): Xaa is C or S
RXGXGEVVMEYHYKLVVKDYEDKYLMSIPS

SEQ ID NO: 40227 - protein, 28 aa, Artificial Sequence
  Cyclic GFR-binding peptide
  MOD_RES (27)..(28): Xaa is C or S
NRYKKLIVNNSSDFYLVSIANLKTPAXX

SEQ ID NO: 40228 - protein, 31 aa, Artificial Sequence; identical to SEQ ID NO: 3171
  Cyclic GFR-binding peptide
  MOD_RES (31)..(31): Xaa is C or S

SEQ ID NO: 40229 - protein, 36 aa, Artificial Sequence; identical to SEQ ID NO: 3172
  Cyclic GFR-binding peptide
  MOD_RES (1)..(3)..(34)..(35): Xaa is C or S

SEQ ID NO: 40230 - protein, 29 aa, Artificial Sequence
  Cyclic GFR-binding peptide
RVVMNYHYKLIVNSSDDKYLVSIPSLQTP

SEQ ID NO: 40231 - protein, 34 aa, Artificial Sequence; identical to SEQ ID NO: 3175
  Cyclic GFR-binding peptide
  MOD_RES (1)..(34): Xaa is C or S

SEQ ID NO: 40232 - protein, 31 aa, Artificial Sequence
  Cyclic GFR-binding peptide
  MOD_RES (27)..(28): Xaa is C or S
MQYNKLIKPTKGILYLISIASLDQSVXXPSA

SEQ ID NO: 40233 - protein, 38 aa, Artificial Sequence; identical to SEQ ID NO: 3176
  Cyclic GFR-binding peptide
  MOD_RES (1)..(3): Xaa is C or S

SEQ ID NO: 40234 - protein, 24 aa, Artificial Sequence
  Cyclic GFR-binding peptide
DRHKRLVVKENEDYYLMSTASLET

SEQ ID NO: 40235 - protein, 37 aa, Artificial Sequence; identical to SEQ ID NO: 3177
  Cyclic GFR-binding peptide
  MOD_RES (31)..(32): Xaa is C or S

SEQ ID NO: 40236 - protein, 26 aa, Artificial Sequence
  Cyclic GFR-binding peptide
MNYHYKLIVNNSSDKYLVSIPSLKTP

SEQ ID NO: 40237 - protein, 38 aa, Artificial Sequence; identical to SEQ ID NO: 3179
  Cyclic GFR-binding peptide
  MOD_RES (2)..(4): Xaa is C or S

SEQ ID NO: 40238 - protein, 29 aa, Artificial Sequence
  Cyclic GFR-binding peptide
KVVMNRYKKLIVNNSSDFYLVSIANLKTP

SEQ ID NO: 40239 - protein, 30 aa, Artificial Sequence
  Cyclic GFR-binding peptide
  MOD_RES (30)..(30): Xaa is C or S
KVVMYHYKLVKPTRGVKYLISIPSLDQPVX

SEQ ID NO: 40240 - protein, 30 aa, Artificial Sequence
  Cyclic GFR-binding peptide
  MOD_RES (27)..(28): Xaa is C or S
NRHKRLIVNSSDDYYLVSTASLKTPAXXPK

SEQ ID NO: 40241 - protein, 31 aa, Artificial Sequence
  Cyclic GFR-binding peptide
  MOD_RES (2)..(2): Xaa is C or S
KXSKVIMYHYKLIKPTKGIKYLISIPSLDQS

SEQ ID NO: 40242 - protein, 37 aa, Artificial Sequence; identical to SEQ ID NO: 3181
  Cyclic GFR-binding peptide
  MOD_RES (32)..(33): Xaa is C or S

SEQ ID NO: 40243 - protein, 29 aa, Artificial Sequence
  Cyclic GFR-binding peptide
  MOD_RES (1)..(1): Xaa is C or S
XAKVVMNYHYKLIVNNSSDKYLVSIPSLK

SEQ ID NO: 40244 - protein, 34 aa, Artificial Sequence; identical to SEQ ID NO: 3182
  Cyclic GFR-binding peptide
  MOD_RES (2)..(2): Xaa is C or S

SEQ ID NO: 40245 - protein, 42 aa, Artificial Sequence; identical to SEQ ID NO: 3183
  Cyclic GFR-binding peptide
  MOD_RES (2)..(4)..(36): Xaa is C or S

SEQ ID NO: 40246 - protein, 33 aa, Artificial Sequence; identical to SEQ ID NO: 3185
  Cyclic GFR-binding peptide
  MOD_RES (1)..(1): Xaa is C or S

SEQ ID NO: 40247 - protein, 30 aa, Artificial Sequence
  Cyclic GFR-binding peptide
  MOD_RES (28)..(29): Xaa is C or S
MNYHYKLIVNNSSDKYLVSIPSLKTPAXXA

SEQ ID NO: 40248 - protein, 21 aa, Artificial Sequence
  Cyclic GFR-binding peptide
MQYNKLIKPTKGILYLISIAS

SEQ ID NO: 40249 - protein, 27 aa, Artificial Sequence
  Cyclic GFR-binding peptide
KVVMNQYNKLIVNNSSDLYLVSIASLK

SEQ ID NO: 40250 - protein, 30 aa, Artificial Sequence; identical to SEQ ID NO: 3186
  Cyclic GFR-binding peptide

SEQ ID NO: 40251 - protein, 22 aa, Artificial Sequence
  Cyclic GFR-binding peptide
MQYNKLVKPKRGVLYLISIASL

SEQ ID NO: 40252 - protein, 29 aa, Artificial Sequence
  Cyclic GFR-binding peptide
  MOD_RES (1)..(3): Xaa is C or S
XKXSRVIMQYNKLVKPKRGVLYLISIASL

SEQ ID NO: 40253 - protein, 36 aa, Artificial Sequence
  Cyclic GFR-binding peptide
  MOD_RES (30)..(31): Xaa is C or S
VVMDYHYKLVVKENEDKYLMSIPSLETPVXXAKPIK

SEQ ID NO: 40254 - protein, 36 aa, Artificial Sequence; identical to SEQ ID NO: 3189
  Cyclic GFR-binding peptide
  MOD_RES (2)..(4)..(36): Xaa is C or S

SEQ ID NO: 40255 - protein, 27 aa, Artificial Sequence
  Cyclic GFR-binding peptide
  MOD_RES (27)..(27): Xaa is C or S
MRHKRLVKPKRGVYYLISTASLAQPVX

SEQ ID NO: 40256 - protein, 40 aa, Artificial Sequence; identical to SEQ ID NO: 3191
  Cyclic GFR-binding peptide
  MOD_RES (1)..(38): Xaa is C or S

SEQ ID NO: 40257 - protein, 39 aa, Artificial Sequence; identical to SEQ ID NO: 3192
  Cyclic GFR-binding peptide
  MOD_RES (33)..(34): Xaa is C or S

SEQ ID NO: 40258 - protein, 23 aa, Artificial Sequence
  Cyclic GFR-binding peptide
MRYKKLIKPTKGIFYLISIANLD

SEQ ID NO: 40259 - protein, 35 aa, Artificial Sequence; identical to SEQ ID NO: 3195
  Cyclic GFR-binding peptide
  MOD_RES (2)..(4): Xaa is C or S

SEQ ID NO: 40260 - protein, 39 aa, Artificial Sequence; identical to SEQ ID NO: 3196
  Cyclic GFR-binding peptide
  MOD_RES (1)..(33)..(34): Xaa is C or S

SEQ ID NO: 40261 - protein, 31 aa, Artificial Sequence
  Cyclic GFR-binding peptide
LHDELTRHKRLFIPKKRVIEYYLVSTASLQV

SEQ ID NO: 40262 - protein, 25 aa, Artificial Sequence
  Cyclic GFR-binding peptide
RYKKLVKPTRGVFYLISIANLDQPV

SEQ ID NO: 40263 - protein, 34 aa, Artificial Sequence
  Cyclic GFR-binding peptide
  MOD_RES (1)..(3): Xaa is C or S
XKXALHDELTRHKRLFIPKKRVIEYYLVSTASLQ

SEQ ID NO: 40264 - protein, 41 aa, Artificial Sequence; identical to SEQ ID NO: 3199
  Cyclic GFR-binding peptide
  MOD_RES (2)..(4)..(35)..(36): Xaa is C or S

SEQ ID NO: 40265 - protein, 39 aa, Artificial Sequence; identical to SEQ ID NO: 3200
  Cyclic GFR-binding peptide
  MOD_RES (2)..(33)..(34): Xaa is C or S

SEQ ID NO: 40266 - protein, 34 aa, Artificial Sequence
  Cyclic GFR-binding peptide
  MOD_RES (31)..(31): Xaa is C or S
TYHYKLFIPKKRVIEKYLVSIPSLQVQTPRXQVN

SEQ ID NO: 40267 - protein, 32 aa, Artificial Sequence
  Cyclic GFR-binding peptide
  MOD_RES (27)..(28): Xaa is C or S
NRYKKLIVNNSSDFYLVSIANLKTPAXXAKPV

SEQ ID NO: 40268 - protein, 30 aa, Artificial Sequence
  Cyclic GFR-binding peptide
  MOD_RES (28)..(29): Xaa is C or S
MNYHYKLIVNSSDDKYLVSIPSLKTPAXXP

SEQ ID NO: 40269 - protein, 29 aa, Artificial Sequence
  Cyclic GFR-binding peptide
  MOD_RES (26)..(27): Xaa is C or S
QYNKLIKPTKGILYLISIASLDQSVXXPS

SEQ ID NO: 40270 - protein, 23 aa, Artificial Sequence
  Cyclic GFR-binding peptide
VIMRYKKLIKPTKGIFYLISIAN

SEQ ID NO: 40271 - protein, 32 aa, Artificial Sequence
  Cyclic GFR-binding peptide
  MOD_RES (29)..(30): Xaa is C or S
VMNRYKKLIVNNSSDFYLVSIANLKTPAXXAK

SEQ ID NO: 40272 - protein, 37 aa, Artificial Sequence; identical to SEQ ID NO: 3205
  Cyclic GFR-binding peptide
  MOD_RES (1)..(32)..(33): Xaa is C or S

SEQ ID NO: 40273 - protein, 22 aa, Artificial Sequence
  Cyclic GFR-binding peptide
QYNKLFIPKKRVIELYLVSIAS

SEQ ID NO: 40274 - protein, 28 aa, Artificial Sequence
  Cyclic GFR-binding peptide
  MOD_RES (2)..(2): Xaa is C or S
GXSRVVMNRHKRLIVNSSDDYYLVSTAS

SEQ ID NO: 40275 - protein, 33 aa, Artificial Sequence
  Cyclic GFR-binding peptide
  MOD_RES (31)..(31): Xaa is C or S
TRHKRLFIPKKRVIEYYLVSTASLQVQTPRXQV

SEQ ID NO: 40276 - protein, 37 aa, Artificial Sequence; identical to SEQ ID NO: 3208
  Cyclic GFR-binding peptide
  MOD_RES (1)..(32)..(33): Xaa is C or S

SEQ ID NO: 40277 - protein, 29 aa, Artificial Sequence
  Cyclic GFR-binding peptide
  MOD_RES (27)..(28): Xaa is C or S
NRHKRLIVNSSDDYYLVSTASLKTPAXXP

SEQ ID NO: 40278 - protein, 24 aa, Artificial Sequence
  Cyclic GFR-binding peptide
KVVMRHKRLVKPTRGVYYLISTAS

SEQ ID NO: 40279 - protein, 40 aa, Artificial Sequence; identical to SEQ ID NO: 3209
  Cyclic GFR-binding peptide
  MOD_RES (2)..(4)..(36)..(37): Xaa is C or S

SEQ ID NO: 40280 - protein, 30 aa, Artificial Sequence
  Cyclic GFR-binding peptide
  MOD_RES (29)..(30): Xaa is C or S
VMNRHKRLIVNSSDDYYLVSTASLKTPAXX

SEQ ID NO: 40281 - protein, 34 aa, Artificial Sequence
  Cyclic GFR-binding peptide
  MOD_RES (32)..(33): Xaa is C or S
AVSMGEQYNKLTPVGMDDLYLVSIASLKTPVXXA

SEQ ID NO: 40282 - protein, 28 aa, Artificial Sequence
  Cyclic GFR-binding peptide
VVMNYHYKLIVNSSDDKYLVSIPSLQTP

SEQ ID NO: 40283 - protein, 28 aa, Artificial Sequence
  Cyclic GFR-binding peptide
  MOD_RES (28)..(28): Xaa is C or S
MERHKRLVVKDYEDYYLMSTASLETPVX

SEQ ID NO: 40284 - protein, 35 aa, Artificial Sequence
  Cyclic GFR-binding peptide
  MOD_RES (29)..(30): Xaa is C or S
MGERHKRLTPVGMDDYYLVSTASLKTPVXXAKGVK

SEQ ID NO: 40285 - protein, 28 aa, Artificial Sequence
  Cyclic GFR-binding peptide
VVMYHYKLVKPTRGVKYLISIPSLDQPV

SEQ ID NO: 40286 - protein, 30 aa, Artificial Sequence
  Cyclic GFR-binding peptide
  MOD_RES (2)..(4): Xaa is C or S
RXGXGEVVMDRYKKLVVKENEDFYLMSIAN

SEQ ID NO: 40287 - protein, 40 aa, Artificial Sequence; identical to SEQ ID NO: 3212
  Cyclic GFR-binding peptide
  MOD_RES (1)..(38): Xaa is C or S

SEQ ID NO: 40288 - protein, 35 aa, Artificial Sequence; identical to SEQ ID NO: 3214
  Cyclic GFR-binding peptide
  MOD_RES (1)..(3)..(34)..(35): Xaa is C or S

SEQ ID NO: 40289 - protein, 33 aa, Artificial Sequence
  Cyclic GFR-binding peptide
  MOD_RES (33)..(33): Xaa is C or S
ELTRYKKLFIPKKRVIEFYLVSIANLQVQTPRX

SEQ ID NO: 40290 - protein, 24 aa, Artificial Sequence
  Cyclic GFR-binding peptide
RVIMRYKKLVKPKRGVFYLISIAN

SEQ ID NO: 40291 - protein, 27 aa, Artificial Sequence
  Cyclic GFR-binding peptide
VVKENEDQYNKLVVKENEDLYLMSIAS

SEQ ID NO: 40292 - protein, 36 aa, Artificial Sequence; identical to SEQ ID NO: 3218
  Cyclic GFR-binding peptide
  MOD_RES (2)..(34)..(35): Xaa is C or S

SEQ ID NO: 40293 - protein, 28 aa, Artificial Sequence
  Cyclic GFR-binding peptide
VMNQYNKLIVNNSSDLYLVSIASLKTPA

SEQ ID NO: 40294 - protein, 35 aa, Artificial Sequence; identical to SEQ ID NO: 3219
  Cyclic GFR-binding peptide
  MOD_RES (2)..(4): Xaa is C or S

SEQ ID NO: 40295 - protein, 31 aa, Artificial Sequence; identical to SEQ ID NO: 3222
  Cyclic GFR-binding peptide
  MOD_RES (31)..(31): Xaa is C or S

SEQ ID NO: 40296 - protein, 36 aa, Artificial Sequence
  Cyclic GFR-binding peptide
  MOD_RES (30)..(31): Xaa is C or S
SMGERHKRLTPVGMDDYYLVSTASLKTPVXXAKGVK

SEQ ID NO: 40297 - protein, 30 aa, Artificial Sequence
  Cyclic GFR-binding peptide
  MOD_RES (29)..(29): Xaa is C or S
VMNRHKRLIVNSSDDYYLVSTASLKTPAXT

SEQ ID NO: 40298 - protein, 26 aa, Artificial Sequence
  Cyclic GFR-binding peptide
SMGERHKRLTPVGMDDYYLVSTASLK

SEQ ID NO: 40299 - protein, 34 aa, Artificial Sequence; identical to SEQ ID NO: 3224
  Cyclic GFR-binding peptide
  MOD_RES (1)..(32)..(33): Xaa is C or S

SEQ ID NO: 40300 - protein, 23 aa, Artificial Sequence
  Cyclic GFR-binding peptide
YHYKLVVKENEDKYLMSIPSLET

SEQ ID NO: 40301 - protein, 31 aa, Artificial Sequence; identical to SEQ ID NO: 3227
  Cyclic GFR-binding peptide

SEQ ID NO: 40302 - protein, 33 aa, Artificial Sequence; identical to SEQ ID NO: 3228
  Cyclic GFR-binding peptide
  MOD_RES (31)..(32): Xaa is C or S

SEQ ID NO: 40303 - protein, 24 aa, Artificial Sequence
  Cyclic GFR-binding peptide
VIMQYNKLIKPTKGILYLISIASL

SEQ ID NO: 40304 - protein, 32 aa, Artificial Sequence
  Cyclic GFR-binding peptide
  MOD_RES (26)..(27): Xaa is C or S
RYKKLVVKENEDFYLMSIANLETPVXXAKPIK

SEQ ID NO: 40305 - protein, 33 aa, Artificial Sequence; identical to SEQ ID NO: 3229
  Cyclic GFR-binding peptide

SEQ ID NO: 40306 - protein, 29 aa, Artificial Sequence
  Cyclic GFR-binding peptide
  MOD_RES (1)..(1): Xaa is C or S
XSKVVMRHKRLVKPTRGVYYLISTASLDQ

SEQ ID NO: 40307 - protein, 29 aa, Artificial Sequence
  Cyclic GFR-binding peptide
  MOD_RES (2)..(4): Xaa is C or S
SXKXSKVVMRYKKLVKPTRGVFYLISIAN

SEQ ID NO: 40308 - protein, 37 aa, Artificial Sequence; identical to SEQ ID NO: 3230
  Cyclic GFR-binding peptide
  MOD_RES (2)..(4)..(36)..(37): Xaa is C or S

SEQ ID NO: 40309 - protein, 37 aa, Artificial Sequence; identical to SEQ ID NO: 3231
  Cyclic GFR-binding peptide
  MOD_RES (2)..(4)..(36)..(37): Xaa is C or S

SEQ ID NO: 40310 - protein, 35 aa, Artificial Sequence
  Cyclic GFR-binding peptide
  MOD_RES (29)..(30): Xaa is C or S
VVMQYNKLVKPTRGVLYLISIASLDQPVXXPSASA

SEQ ID NO: 40311 - protein, 35 aa, Artificial Sequence
  Cyclic GFR-binding peptide
  MOD_RES (2)..(4): Xaa is C or S
EXKXALHDELTQYNKLFIPKKRVIELYLVSIASLQ

SEQ ID NO: 40312 - protein, 32 aa, Artificial Sequence
  Cyclic GFR-binding peptide
  MOD_RES (30)..(30): Xaa is C or S
VVMNYHYKLIVNSSDDKYLVSIPSLKTPAXTP

SEQ ID NO: 40313 - protein, 37 aa, Artificial Sequence; identical to SEQ ID NO: 3232
  Cyclic GFR-binding peptide
  MOD_RES (1)..(3)..(34)..(35): Xaa is C or S

SEQ ID NO: 40314 - protein, 33 aa, Artificial Sequence
  Cyclic GFR-binding peptide
  MOD_RES (2)..(4): Xaa is C or S
SXKXSRVIMYHYKLVKPKRGVKYLISIPSLAQP

SEQ ID NO: 40315 - protein, 36 aa, Artificial Sequence; identical to SEQ ID NO: 3235
  Cyclic GFR-binding peptide
  MOD_RES (2)..(33)..(34): Xaa is C or S

SEQ ID NO: 40316 - protein, 34 aa, Artificial Sequence
  Cyclic GFR-binding peptide
  MOD_RES (29)..(30): Xaa is C or S
VMERYKKLVVKDYEDFYLMSIANLETPVXXAKPI

SEQ ID NO: 40317 - protein, 34 aa, Artificial Sequence
  Cyclic GFR-binding peptide
  MOD_RES (1)..(3): Xaa is C or S
XGXEAVSMGERHKRLTPVGMDDYYLVSTASLKTP

SEQ ID NO: 40318 - protein, 40 aa, Artificial Sequence; identical to SEQ ID NO: 3236
  Cyclic GFR-binding peptide
  MOD_RES (2)..(34)..(35): Xaa is C or S

SEQ ID NO: 40319 - protein, 37 aa, Artificial Sequence; identical to SEQ ID NO: 3237
  Cyclic GFR-binding peptide
  MOD_RES (1)..(33)..(34): Xaa is C or S

SEQ ID NO: 40320 - protein, 26 aa, Artificial Sequence
  Cyclic GFR-binding peptide
NQYNKLIVNSSDDLYLVSIASLQTPA

SEQ ID NO: 40321 - protein, 26 aa, Artificial Sequence
  Cyclic GFR-binding peptide
EVVMDYHYKLVVKENEDKYLMSIPSL

SEQ ID NO: 40322 - protein, 36 aa, Artificial Sequence; identical to SEQ ID NO: 3238
  Cyclic GFR-binding peptide
  MOD_RES (1)..(3)..(34)..(35): Xaa is C or S

SEQ ID NO: 40323 - protein, 28 aa, Artificial Sequence
  Cyclic GFR-binding peptide
  MOD_RES (27)..(28): Xaa is C or S
ERHKRLTPVGMDDYYLVSTASLKTPVXX

SEQ ID NO: 40324 - protein, 25 aa, Artificial Sequence
  Cyclic GFR-binding peptide
RYKKLIVNNSSDFYLVSIANLKTPA

SEQ ID NO: 40325 - protein, 30 aa, Artificial Sequence
  Cyclic GFR-binding peptide
  MOD_RES (30)..(30): Xaa is C or S
VVMERYKKLVVKDYEDFYLMSIANLETPVX

SEQ ID NO: 40326 - protein, 25 aa, Artificial Sequence
  Cyclic GFR-binding peptide
RHKRLIVNSSDDYYLVSTASLQTPA

SEQ ID NO: 40327 - protein, 32 aa, Artificial Sequence
  Cyclic GFR-binding peptide
  MOD_RES (29)..(30): Xaa is C or S
VVMQYNKLVKPTRGVLYLISIASLDQPVXXPS

SEQ ID NO: 40328 - protein, 40 aa, Artificial Sequence; identical to SEQ ID NO: 3242
  Cyclic GFR-binding peptide
  MOD_RES (1)..(3)..(40): Xaa is C or S

SEQ ID NO: 40329 - protein, 37 aa, Artificial Sequence; identical to SEQ ID NO: 3243
  Cyclic GFR-binding peptide
  MOD_RES (31)..(32): Xaa is C or S

SEQ ID NO: 40330 - protein, 30 aa, Artificial Sequence
  Cyclic GFR-binding peptide
  MOD_RES (27)..(28): Xaa is C or S
MRYKKLVKPTRGVFYLISIANLDQPVXXPS

SEQ ID NO: 40331 - protein, 36 aa, Artificial Sequence; identical to SEQ ID NO: 3244
  Cyclic GFR-binding peptide
  MOD_RES (2)..(4)..(36): Xaa is C or S

SEQ ID NO: 40332 - protein, 32 aa, Artificial Sequence
  Cyclic GFR-binding peptide
  MOD_RES (29)..(30): Xaa is C or S
VVMRHKRLVKPTRGVYYLISTASLDQPVXXPS

SEQ ID NO: 40333 - protein, 31 aa, Artificial Sequence
  Cyclic GFR-binding peptide
  MOD_RES (31)..(31): Xaa is C or S
TRYKKLFIPKKRVIEFYLVSIANLQVQTPRX

SEQ ID NO: 40334 - protein, 24 aa, Artificial Sequence
  Cyclic GFR-binding peptide
VVMDRHKRLVVKENEDYYLMSTAS

SEQ ID NO: 40335 - protein, 28 aa, Artificial Sequence
  Cyclic GFR-binding peptide
  MOD_RES (2)..(2): Xaa is C or S
KXSKVVMRYKKLVKPTRGVFYLISIANL

SEQ ID NO: 40336 - protein, 31 aa, Artificial Sequence
  Cyclic GFR-binding peptide
  MOD_RES (1)..(1): Xaa is C or S
XALHDELTQYNKLFIPKKRVIELYLVSIASL

SEQ ID NO: 40337 - protein, 28 aa, Artificial Sequence
  Cyclic GFR-binding peptide
  MOD_RES (28)..(28): Xaa is C or S
MEYHYKLVVKDYEDKYLMSIPSLETPVX

SEQ ID NO: 40338 - protein, 28 aa, Artificial Sequence
  Cyclic GFR-binding peptide
ELTRHKRLFIPKKRVIEYYLVSTASLQV

SEQ ID NO: 40339 - protein, 23 aa, Artificial Sequence
  Cyclic GFR-binding peptide
QYNKLIVNSSDDLYLVSIASLQT

SEQ ID NO: 40340 - protein, 33 aa, Artificial Sequence
  Cyclic GFR-binding peptide
  MOD_RES (33)..(33): Xaa is C or S
ELTRHKRLFIPKKRVIEYYLVSTASLQVQTPRX

SEQ ID NO: 40341 - protein, 36 aa, Artificial Sequence; identical to SEQ ID NO: 3246
  Cyclic GFR-binding peptide
  MOD_RES (31)..(32): Xaa is C or S

SEQ ID NO: 40342 - protein, 29 aa, Artificial Sequence
  Cyclic GFR-binding peptide
  MOD_RES (1)..(1): Xaa is C or S
XAKVVMNRYKKLIVNNSSDFYLVSIANLK

SEQ ID NO: 40343 - protein, 31 aa, Artificial Sequence
  Cyclic GFR-binding peptide
  MOD_RES (26)..(27): Xaa is C or S
QYNKLIVNSSDDLYLVSIASLKTPAXXPKPV

SEQ ID NO: 40344 - protein, 35 aa, Artificial Sequence; identical to SEQ ID NO: 3247
  Cyclic GFR-binding peptide

SEQ ID NO: 40345 - protein, 29 aa, Artificial Sequence
  Cyclic GFR-binding peptide
RVVMNQYNKLIVNSSDDLYLVSIASLQTP

SEQ ID NO: 40346 - protein, 36 aa, Artificial Sequence; identical to SEQ ID NO: 3248
  Cyclic GFR-binding peptide
  MOD_RES (33)..(34): Xaa is C or S

SEQ ID NO: 40347 - protein, 30 aa, Artificial Sequence
  Cyclic GFR-binding peptide
  MOD_RES (30)..(30): Xaa is C or S
KVVMQYNKLVKPTRGVLYLISIASLDQPVX

SEQ ID NO: 40348 - protein, 25 aa, Artificial Sequence
  Cyclic GFR-binding peptide
SKVVMRYKKLVKPTRGVFYLISIAN

SEQ ID NO: 40349 - protein, 34 aa, Artificial Sequence; identical to SEQ ID NO: 3251
  Cyclic GFR-binding peptide
  MOD_RES (1)..(33)..(34): Xaa is C or S

SEQ ID NO: 40350 - protein, 29 aa, Artificial Sequence
  Cyclic GFR-binding peptide
  MOD_RES (29)..(29): Xaa is C or S
VIMQYNKLVKPKRGVLYLISIASLAQPVX

SEQ ID NO: 40351 - protein, 34 aa, Artificial Sequence; identical to SEQ ID NO: 3253
  Cyclic GFR-binding peptide
  MOD_RES (1)..(33)..(34): Xaa is C or S

SEQ ID NO: 40352 - protein, 28 aa, Artificial Sequence
  Cyclic GFR-binding peptide
SKVIMRYKKLIKPTKGIFYLISIANLDQ

SEQ ID NO: 40353 - protein, 40 aa, Artificial Sequence; identical to SEQ ID NO: 3257
  Cyclic GFR-binding peptide
  MOD_RES (37)..(37): Xaa is C or S

SEQ ID NO: 40354 - protein, 35 aa, Artificial Sequence
  Cyclic GFR-binding peptide
  MOD_RES (29)..(30): Xaa is C or S
MGEQYNKLTPVGMDDLYLVSIASLKTPVXXAKGVK

SEQ ID NO: 40355 - protein, 22 aa, Artificial Sequence
  Cyclic GFR-binding peptide
MRHKRLIKPTKGIYYLISTASL

SEQ ID NO: 40356 - protein, 27 aa, Artificial Sequence
  Cyclic GFR-binding peptide
  MOD_RES (1)..(1): Xaa is C or S
XGEVVMERYKKLVVKDYEDFYLMSIAN

SEQ ID NO: 40357 - protein, 29 aa, Artificial Sequence
  Cyclic GFR-binding peptide
KVVMQYNKLVKPTRGVLYLISIASLDQPV

SEQ ID NO: 40358 - protein, 34 aa, Artificial Sequence
  Cyclic GFR-binding peptide
  MOD_RES (29)..(30): Xaa is C or S
VIMRYKKLVKPKRGVFYLISIANLAQPVXXPAAS

SEQ ID NO: 40359 - protein, 32 aa, Artificial Sequence
  Cyclic GFR-binding peptide
  MOD_RES (30)..(31): Xaa is C or S
VVMNRYKKLIVNNSSDFYLVSIANLKTPAXXA

SEQ ID NO: 40360 - protein, 27 aa, Artificial Sequence
  Cyclic GFR-binding peptide
MNRHKRLIVNSSDDYYLVSTASLKTPA

SEQ ID NO: 40361 - protein, 34 aa, Artificial Sequence
  Cyclic GFR-binding peptide
  MOD_RES (28)..(28): Xaa is C or S
MNYHYKLIVNSSDDKYLVSIPSLKTPAXTPKTVH

SEQ ID NO: 40362 - protein, 34 aa, Artificial Sequence
  Cyclic GFR-binding peptide
  MOD_RES (28)..(28): Xaa is C or S
MNRHKRLIVNSSDDYYLVSTASLKTPAXTPKTVH

SEQ ID NO: 40363 - protein, 39 aa, Artificial Sequence; identical to SEQ ID NO: 3259
  Cyclic GFR-binding peptide
  MOD_RES (2)..(34)..(35): Xaa is C or S

SEQ ID NO: 40364 - protein, 41 aa, Artificial Sequence; identical to SEQ ID NO: 3260
  Cyclic GFR-binding peptide
  MOD_RES (2)..(4)..(36)..(37): Xaa is C or S

SEQ ID NO: 40365 - protein, 37 aa, Artificial Sequence; identical to SEQ ID NO: 3261
  Cyclic GFR-binding peptide
  MOD_RES (31)..(32): Xaa is C or S

SEQ ID NO: 40366 - protein, 35 aa, Artificial Sequence
  Cyclic GFR-binding peptide
  MOD_RES (30)..(31): Xaa is C or S
VVMDYHYKLVVKENEDKYLMSIPSLETPVXXAKPI

SEQ ID NO: 40367 - protein, 34 aa, Artificial Sequence; identical to SEQ ID NO: 3262
  Cyclic GFR-binding peptide
  MOD_RES (1)..(33): Xaa is C or S

SEQ ID NO: 40368 - protein, 28 aa, Artificial Sequence
  Cyclic GFR-binding peptide
  MOD_RES (1)..(1): Xaa is C or S
XGEVVMERHKRLVVKDYEDYYLMSTASL

SEQ ID NO: 40369 - protein, 27 aa, Artificial Sequence
  Cyclic GFR-binding peptide
  MOD_RES (1)..(1): Xaa is C or S
XGEVVMEYHYKLVVKDYEDKYLMSIPS

SEQ ID NO: 40370 - protein, 27 aa, Artificial Sequence
  Cyclic GFR-binding peptide
VVMNRHKRLIVNSSDDYYLVSTASLQT

SEQ ID NO: 40371 - protein, 32 aa, Artificial Sequence
  Cyclic GFR-binding peptide
  MOD_RES (2)..(2): Xaa is C or S
GXAKVVMNRYKKLIVNNSSDFYLVSIANLKTP

SEQ ID NO: 40372 - protein, 31 aa, Artificial Sequence; identical to SEQ ID NO: 3267
  Cyclic GFR-binding peptide

SEQ ID NO: 40373 - protein, 36 aa, Artificial Sequence; identical to SEQ ID NO: 3266
  Cyclic GFR-binding peptide
  MOD_RES (2)..(33)..(34): Xaa is C or S

SEQ ID NO: 40374 - protein, 35 aa, Artificial Sequence; identical to SEQ ID NO: 3270
  Cyclic GFR-binding peptide
  MOD_RES (32)..(33): Xaa is C or S

SEQ ID NO: 40375 - protein, 30 aa, Artificial Sequence
  Cyclic GFR-binding peptide
  MOD_RES (26)..(27): Xaa is C or S
RYKKLIVNNSSDFYLVSIANLKTPAXXAKP

SEQ ID NO: 40376 - protein, 29 aa, Artificial Sequence
  Cyclic GFR-binding peptide
RVVMNRHKRLIVNSSDDYYLVSTASLKTP

SEQ ID NO: 40377 - protein, 35 aa, Artificial Sequence
  Cyclic GFR-binding peptide
  MOD_RES (30)..(31): Xaa is C or S
KVIMYHYKLIKPTKGIKYLISIPSLDQSVXXPSAS

SEQ ID NO: 40378 - protein, 30 aa, Artificial Sequence
  Cyclic GFR-binding peptide
GEVVMDRHKRLVVKENEDYYLMSTASLETP

SEQ ID NO: 40379 - protein, 27 aa, Artificial Sequence
  Cyclic GFR-binding peptide
GEVVMERHKRLVVKDYEDYYLMSTASL

SEQ ID NO: 40380 - protein, 31 aa, Artificial Sequence; identical to SEQ ID NO: 3271
  Cyclic GFR-binding peptide

SEQ ID NO: 40381 - protein, 27 aa, Artificial Sequence
  Cyclic GFR-binding peptide
GERHKRLTPVGMDDYYLVSTASLKTPV

SEQ ID NO: 40382 - protein, 26 aa, Artificial Sequence
  Cyclic GFR-binding peptide
VIMQYNKLVKPKRGVLYLISIASLAQ

SEQ ID NO: 40383 - protein, 23 aa, Artificial Sequence
  Cyclic GFR-binding peptide
MNYHYKLIVNNSSDKYLVSIPSL

SEQ ID NO: 40384 - protein, 29 aa, Artificial Sequence
  Cyclic GFR-binding peptide
RVIMRHKRLVKPKRGVYYLISTASLAQPV

SEQ ID NO: 40385 - protein, 34 aa, Artificial Sequence; identical to SEQ ID NO: 3275
  Cyclic GFR-binding peptide

SEQ ID NO: 40386 - protein, 22 aa, Artificial Sequence
  Cyclic GFR-binding peptide
RYKKLVVKDYEDFYLMSIANLE

SEQ ID NO: 40387 - protein, 35 aa, Artificial Sequence
  Cyclic GFR-binding peptide
  MOD_RES (33)..(33): Xaa is C or S
ELTYHYKLFIPKKRVIEKYLVSIPSLQVQTPRXQV

SEQ ID NO: 40388 - protein, 35 aa, Artificial Sequence
  Cyclic GFR-binding peptide
  MOD_RES (29)..(30): Xaa is C or S
VVMYHYKLVKPTRGVKYLISIPSLDQPVXXPSASA

SEQ ID NO: 40389 - protein, 40 aa, Artificial Sequence; identical to SEQ ID NO: 3276
  Cyclic GFR-binding peptide
  MOD_RES (2)..(4)..(36): Xaa is C or S

SEQ ID NO: 40390 - protein, 37 aa, Artificial Sequence; identical to SEQ ID NO: 3279
  Cyclic GFR-binding peptide
  MOD_RES (1)..(33): Xaa is C or S

SEQ ID NO: 40391 - protein, 31 aa, Artificial Sequence
  Cyclic GFR-binding peptide
  MOD_RES (30)..(31): Xaa is C or S
VVMDYHYKLVVKENEDKYLMSIPSLETPVXX

SEQ ID NO: 40392 - protein, 35 aa, Artificial Sequence; identical to SEQ ID NO: 3281
  Cyclic GFR-binding peptide
  MOD_RES (1)..(33)..(34): Xaa is C or S

SEQ ID NO: 40393 - protein, 24 aa, Artificial Sequence
  Cyclic GFR-binding peptide
QYNKLFIPKKRVIELYLVSIASLQ

SEQ ID NO: 40394 - protein, 31 aa, Artificial Sequence
  Cyclic GFR-binding peptide
  MOD_RES (2)..(4): Xaa is C or S
HXGXARVVMNYHYKLIVNSSDDKYLVSIPSL

SEQ ID NO: 40395 - protein, 31 aa, Artificial Sequence
  Cyclic GFR-binding peptide
  MOD_RES (27)..(28): Xaa is C or S
MQYNKLVKPTRGVLYLISIASLDQPVXXPSA

SEQ ID NO: 40396 - protein, 29 aa, Artificial Sequence
  Cyclic GFR-binding peptide
QYNKLFIPKKRVIELYLVSIASLQVQTPR

SEQ ID NO: 40397 - protein, 31 aa, Artificial Sequence
  Cyclic GFR-binding peptide
  MOD_RES (28)..(29): Xaa is C or S
GERYKKLTPVGMDDFYLVSIANLKTPVXXAK

SEQ ID NO: 40398 - protein, 31 aa, Artificial Sequence
  Cyclic GFR-binding peptide
  MOD_RES (1)..(3): Xaa is C or S
XGXARVVMNQYNKLIVNSSDDLYLVSIASLQ

SEQ ID NO: 40399 - protein, 31 aa, Artificial Sequence
  Cyclic GFR-binding peptide
  MOD_RES (2)..(2): Xaa is C or S
KXSKVVMYHYKLVKPTRGVKYLISIPSLDQP

SEQ ID NO: 40400 - protein, 23 aa, Artificial Sequence
  Cyclic GFR-binding peptide
VMEYHYKLVVKDYEDKYLMSIPS

SEQ ID NO: 40401 - protein, 40 aa, Artificial Sequence; identical to SEQ ID NO: 3283
  Cyclic GFR-binding peptide
  MOD_RES (2)..(4)..(35)..(36): Xaa is C or S

SEQ ID NO: 40402 - protein, 22 aa, Artificial Sequence
  Cyclic GFR-binding peptide
RYKKLVKPTRGVFYLISIANLD

SEQ ID NO: 40403 - protein, 28 aa, Artificial Sequence
  Cyclic GFR-binding peptide
SMGEQYNKLTPVGMDDLYLVSIASLKTP

SEQ ID NO: 40404 - protein, 30 aa, Artificial Sequence
  Cyclic GFR-binding peptide
  MOD_RES (30)..(30): Xaa is C or S
SMGERHKRLTPVGMDDYYLVSTASLKTPVX

SEQ ID NO: 40405 - protein, 30 aa, Artificial Sequence; identical to SEQ ID NO: 3284
  Cyclic GFR-binding peptide

SEQ ID NO: 40406 - protein, 32 aa, Artificial Sequence
  Cyclic GFR-binding peptide
  MOD_RES (1)..(1): Xaa is C or S
XEAVSMGEQYNKLTPVGMDDLYLVSIASLKTP

SEQ ID NO: 40407 - protein, 33 aa, Artificial Sequence
  Cyclic GFR-binding peptide
  MOD_RES (2)..(4): Xaa is C or S
EXKXALHDELTRYKKLFIPKKRVIEFYLVSIAN

SEQ ID NO: 40408 - protein, 34 aa, Artificial Sequence
  Cyclic GFR-binding peptide
  MOD_RES (30)..(31): Xaa is C or S
VVMNYHYKLIVNNSSDKYLVSIPSLKTPAXXAKP

SEQ ID NO: 40409 - protein, 40 aa, Artificial Sequence; identical to SEQ ID NO: 3288
  Cyclic GFR-binding peptide
  MOD_RES (2)..(4)..(37)..(38): Xaa is C or S

SEQ ID NO: 40410 - protein, 27 aa, Artificial Sequence
  Cyclic GFR-binding peptide
  MOD_RES (27)..(27): Xaa is C or S
MRHKRLIKPTKGIYYLISTASLDQSVX

SEQ ID NO: 40411 - protein, 40 aa, Artificial Sequence; identical to SEQ ID NO: 3289
  Cyclic GFR-binding peptide
  MOD_RES (1)..(3)..(36)..(37): Xaa is C or S

SEQ ID NO: 40412 - protein, 32 aa, Artificial Sequence
  Cyclic GFR-binding peptide
  MOD_RES (1)..(3): Xaa is C or S
XKXSRVIMQYNKLVKPKRGVLYLISIASLAQP

SEQ ID NO: 40413 - protein, 24 aa, Artificial Sequence
  Cyclic GFR-binding peptide
VIMRHKRLIKPTKGIYYLISTASL

SEQ ID NO: 40414 - protein, 33 aa, Artificial Sequence; identical to SEQ ID NO: 3290
  Cyclic GFR-binding peptide
  MOD_RES (32)..(33): Xaa is C or S

SEQ ID NO: 40415 - protein, 22 aa, Artificial Sequence
  Cyclic GFR-binding peptide
NRHKRLIVNSSDDYYLVSTASL

SEQ ID NO: 40416 - protein, 28 aa, Artificial Sequence
  Cyclic GFR-binding peptide
  MOD_RES (2)..(2): Xaa is C or S
GXAKVVMNQYNKLIVNNSSDLYLVSIAS

SEQ ID NO: 40417 - protein, 37 aa, Artificial Sequence; identical to SEQ ID NO: 3293
  Cyclic GFR-binding peptide
  MOD_RES (36)..(36): Xaa is C or S

SEQ ID NO: 40418 - protein, 27 aa, Artificial Sequence
  Cyclic GFR-binding peptide
DELTQYNKLFIPKKRVIELYLVSIASL

SEQ ID NO: 40419 - protein, 23 aa, Artificial Sequence
  Cyclic GFR-binding peptide
MYHYKLIKPTKGIKYLISIPSLD

SEQ ID NO: 40420 - protein, 38 aa, Artificial Sequence; identical to SEQ ID NO: 3297
  Cyclic GFR-binding peptide
  MOD_RES (1)..(32)..(33): Xaa is C or S

SEQ ID NO: 40421 - protein, 38 aa, Artificial Sequence; identical to SEQ ID NO: 3299
  Cyclic GFR-binding peptide
  MOD_RES (1)..(3): Xaa is C or S

SEQ ID NO: 40422 - protein, 34 aa, Artificial Sequence
  Cyclic GFR-binding peptide
  MOD_RES (30)..(31): Xaa is C or S
VVMNQYNKLIVNSSDDLYLVSIASLQTPAXXPKP

SEQ ID NO: 40423 - protein, 20 aa, Artificial Sequence
  Cyclic GFR-binding peptide
QYNKLTPVGMDDLYLVSIAS

SEQ ID NO: 40424 - protein, 28 aa, Artificial Sequence
  Cyclic GFR-binding peptide
KVVMQYNKLVKPTRGVLYLISIASLDQP

SEQ ID NO: 40425 - protein, 21 aa, Artificial Sequence
  Cyclic GFR-binding peptide
RYKKLTPVGMDDFYLVSIANL

SEQ ID NO: 40426 - protein, 28 aa, Artificial Sequence
  Cyclic GFR-binding peptide
  MOD_RES (1)..(1): Xaa is C or S
XSRVVMNRHKRLIVNSSDDYYLVSTASL

SEQ ID NO: 40427 - protein, 34 aa, Artificial Sequence; identical to SEQ ID NO: 3301
  Cyclic GFR-binding peptide
  MOD_RES (31)..(32): Xaa is C or S

SEQ ID NO: 40428 - protein, 30 aa, Artificial Sequence
  Cyclic GFR-binding peptide
  MOD_RES (30)..(30): Xaa is C or S
RVIMRHKRLVKPKRGVYYLISTASLAQPVX

SEQ ID NO: 40429 - protein, 33 aa, Artificial Sequence
  Cyclic GFR-binding peptide
  MOD_RES (29)..(30): Xaa is C or S
VMNYHYKLIVNNSSDKYLVSIPSLKTPAXXAKP

SEQ ID NO: 40430 - protein, 36 aa, Artificial Sequence; identical to SEQ ID NO: 3302
  Cyclic GFR-binding peptide
  MOD_RES (2)..(4)..(36): Xaa is C or S

SEQ ID NO: 40431 - protein, 39 aa, Artificial Sequence; identical to SEQ ID NO: 3303
  Cyclic GFR-binding peptide
  MOD_RES (2)..(34)..(35): Xaa is C or S

SEQ ID NO: 40432 - protein, 36 aa, Artificial Sequence; identical to SEQ ID NO: 3304
  Cyclic GFR-binding peptide
  MOD_RES (1)..(34)..(35): Xaa is C or S

SEQ ID NO: 40433 - protein, 25 aa, Artificial Sequence
  Cyclic GFR-binding peptide
ELTRYKKLFIPKKRVIEFYLVSIAN

SEQ ID NO: 40434 - protein, 33 aa, Artificial Sequence; identical to SEQ ID NO: 3305
  Cyclic GFR-binding peptide
  MOD_RES (2)..(2): Xaa is C or S

SEQ ID NO: 40435 - protein, 31 aa, Artificial Sequence
  Cyclic GFR-binding peptide
  MOD_RES (2)..(2): Xaa is C or S
GXGEVVMERHKRLVVKDYEDYYLMSTASLET

SEQ ID NO: 40436 - protein, 27 aa, Artificial Sequence
  Cyclic GFR-binding peptide
KVVMNYHYKLIVNNSSDKYLVSIPSLK

SEQ ID NO: 40437 - protein, 29 aa, Artificial Sequence
  Cyclic GFR-binding peptide
  MOD_RES (29)..(29): Xaa is C or S
VMNYHYKLIVNSSDDKYLVSIPSLQTPAX

SEQ ID NO: 40438 - protein, 26 aa, Artificial Sequence
  Cyclic GFR-binding peptide
VIMYHYKLIKPTKGIKYLISIPSLDQ

SEQ ID NO: 40439 - protein, 38 aa, Artificial Sequence; identical to SEQ ID NO: 3306
  Cyclic GFR-binding peptide
  MOD_RES (1)..(3)..(35)..(36): Xaa is C or S

SEQ ID NO: 40440 - protein, 34 aa, Artificial Sequence; identical to SEQ ID NO: 3307
  Cyclic GFR-binding peptide
  MOD_RES (2)..(33)..(34): Xaa is C or S

SEQ ID NO: 40441 - protein, 25 aa, Artificial Sequence
  Cyclic GFR-binding peptide
SKVVMRHKRLVKPTRGVYYLISTAS

SEQ ID NO: 40442 - protein, 34 aa, Artificial Sequence; identical to SEQ ID NO: 3310
  Cyclic GFR-binding peptide
  MOD_RES (2)..(4): Xaa is C or S

SEQ ID NO: 40443 - protein, 39 aa, Artificial Sequence; identical to SEQ ID NO: 3311
  Cyclic GFR-binding peptide
  MOD_RES (1)..(3)..(35)..(36): Xaa is C or S

SEQ ID NO: 40444 - protein, 37 aa, Artificial Sequence; identical to SEQ ID NO: 3312
  Cyclic GFR-binding peptide
  MOD_RES (31)..(32): Xaa is C or S

SEQ ID NO: 40445 - protein, 35 aa, Artificial Sequence; identical to SEQ ID NO: 3314
  Cyclic GFR-binding peptide
  MOD_RES (31)..(32): Xaa is C or S

SEQ ID NO: 40446 - protein, 33 aa, Artificial Sequence
  Cyclic GFR-binding peptide
  MOD_RES (29)..(30): Xaa is C or S
VIMQYNKLIKPTKGILYLISIASLDQSVXXPSA

SEQ ID NO: 40447 - protein, 35 aa, Artificial Sequence; identical to SEQ ID NO: 3315
  Cyclic GFR-binding peptide
  MOD_RES (1)..(3): Xaa is C or S

SEQ ID NO: 40448 - protein, 27 aa, Artificial Sequence
  Cyclic GFR-binding peptide
EVVMERYKKLVVKDYEDFYLMSIANLE

SEQ ID NO: 40449 - protein, 32 aa, Artificial Sequence
  Cyclic GFR-binding peptide
  MOD_RES (26)..(27): Xaa is C or S
RYKKLVKPKRGVFYLISIANLAQPVXXPAASA

SEQ ID NO: 40450 - protein, 41 aa, Artificial Sequence; identical to SEQ ID NO: 3316
  Cyclic GFR-binding peptide
  MOD_RES (2)..(4)..(41): Xaa is C or S

SEQ ID NO: 40451 - protein, 35 aa, Artificial Sequence; identical to SEQ ID NO: 3317
  Cyclic GFR-binding peptide
  MOD_RES (2)..(34): Xaa is C or S

SEQ ID NO: 40452 - protein, 29 aa, Artificial Sequence
  Cyclic GFR-binding peptide
KVVMYHYKLVKPTRGVKYLISIPSLDQPV

SEQ ID NO: 40453 - protein, 29 aa, Artificial Sequence
  Cyclic GFR-binding peptide
  MOD_RES (28)..(29): Xaa is C or S
MERHKRLVVKDYEDYYLMSTASLETPVXX

SEQ ID NO: 40454 - protein, 29 aa, Artificial Sequence
  Cyclic GFR-binding peptide
  MOD_RES (28)..(29): Xaa is C or S
MDRYKKLVVKENEDFYLMSIANLETPVXX

SEQ ID NO: 40455 - protein, 30 aa, Artificial Sequence
  Cyclic GFR-binding peptide
  MOD_RES (1)..(1): Xaa is C or S
XGEVVMEYHYKLVVKDYEDKYLMSIPSLET

SEQ ID NO: 40456 - protein, 30 aa, Artificial Sequence; identical to SEQ ID NO: 3325
  Cyclic GFR-binding peptide

SEQ ID NO: 40457 - protein, 35 aa, Artificial Sequence
  Cyclic GFR-binding peptide
  MOD_RES (29)..(30): Xaa is C or S
VMNRYKKLIVNNSSDFYLVSIANLKTPAXXAKPVA

SEQ ID NO: 40458 - protein, 20 aa, Artificial Sequence
  Cyclic GFR-binding peptide
QYNKLVKPTRGVLYLISIAS

SEQ ID NO: 40459 - protein, 28 aa, Artificial Sequence
  Cyclic GFR-binding peptide
  MOD_RES (27)..(28): Xaa is C or S
DYHYKLVVKENEDKYLMSIPSLETPVXX

SEQ ID NO: 40460 - protein, 37 aa, Artificial Sequence; identical to SEQ ID NO: 3331
  Cyclic GFR-binding peptide
  MOD_RES (1)..(3)..(34)..(35): Xaa is C or S

SEQ ID NO: 40461 - protein, 31 aa, Artificial Sequence
  Cyclic GFR-binding peptide
  MOD_RES (1)..(3): Xaa is C or S
XKXSRVIMQYNKLVKPKRGVLYLISIASLAQ

SEQ ID NO: 40462 - protein, 31 aa, Artificial Sequence
  Cyclic GFR-binding peptide
  MOD_RES (2)..(2): Xaa is C or S
KXSKVVMRYKKLVKPTRGVFYLISIANLDQP

SEQ ID NO: 40463 - protein, 23 aa, Artificial Sequence
  Cyclic GFR-binding peptide
MERYKKLVVKDYEDFYLMSIANL

SEQ ID NO: 40464 - protein, 26 aa, Artificial Sequence
  Cyclic GFR-binding peptide
AKVVMNYHYKLIVNNSSDKYLVSIPS

SEQ ID NO: 40465 - protein, 29 aa, Artificial Sequence
  Cyclic GFR-binding peptide
  MOD_RES (28)..(29): Xaa is C or S
MEYHYKLVVKDYEDKYLMSIPSLETPVXX

SEQ ID NO: 40466 - protein, 40 aa, Artificial Sequence; identical to SEQ ID NO: 3332
  Cyclic GFR-binding peptide
  MOD_RES (2)..(4)..(35)..(36): Xaa is C or S

SEQ ID NO: 40467 - protein, 20 aa, Artificial Sequence
  Cyclic GFR-binding peptide
RYKKLVVKENEDFYLMSIAN

SEQ ID NO: 40468 - protein, 38 aa, Artificial Sequence; identical to SEQ ID NO: 3333
  Cyclic GFR-binding peptide
  MOD_RES (1)..(3)..(34)..(35): Xaa is C or S

SEQ ID NO: 40469 - protein, 29 aa, Artificial Sequence
  Cyclic GFR-binding peptide
VVMERYKKLVVKDYEDFYLMSIANLETPV

SEQ ID NO: 40470 - protein, 40 aa, Artificial Sequence; identical to SEQ ID NO: 3334
  Cyclic GFR-binding peptide
  MOD_RES (2)..(4)..(36)..(37): Xaa is C or S

SEQ ID NO: 40471 - protein, 32 aa, Artificial Sequence
  Cyclic GFR-binding peptide
  MOD_RES (28)..(29): Xaa is C or S
GERYKKLTPVGMDDFYLVSIANLKTPVXXAKG

SEQ ID NO: 40472 - protein, 40 aa, Artificial Sequence; identical to SEQ ID NO: 3339
  Cyclic GFR-binding peptide
  MOD_RES (1)..(3)..(40): Xaa is C or S

SEQ ID NO: 40473 - protein, 34 aa, Artificial Sequence; identical to SEQ ID NO: 3338
  Cyclic GFR-binding peptide
  MOD_RES (32)..(32): Xaa is C or S

SEQ ID NO: 40474 - protein, 37 aa, Artificial Sequence; identical to SEQ ID NO: 3341
  Cyclic GFR-binding peptide
  MOD_RES (2)..(4)..(35)..(36): Xaa is C or S

SEQ ID NO: 40475 - protein, 30 aa, Artificial Sequence
  Cyclic GFR-binding peptide
  MOD_RES (28)..(29): Xaa is C or S
IMRYKKLIKPTKGIFYLISIANLDQSVXXP

SEQ ID NO: 40476 - protein, 34 aa, Artificial Sequence
  Cyclic GFR-binding peptide
  MOD_RES (2)..(2): Xaa is C or S
KXALHDELTQYNKLFIPKKRVIELYLVSIASLQV

SEQ ID NO: 40477 - protein, 33 aa, Artificial Sequence
  Cyclic GFR-binding peptide
  MOD_RES (28)..(29): Xaa is C or S
MERHKRLVVKDYEDYYLMSTASLETPVXXAKPI

SEQ ID NO: 40478 - protein, 34 aa, Artificial Sequence; identical to SEQ ID NO: 3343
  Cyclic GFR-binding peptide
  MOD_RES (2)..(34): Xaa is C or S

SEQ ID NO: 40479 - protein, 38 aa, Artificial Sequence; identical to SEQ ID NO: 3344
  Cyclic GFR-binding peptide
  MOD_RES (35)..(35): Xaa is C or S

SEQ ID NO: 40480 - protein, 25 aa, Artificial Sequence
  Cyclic GFR-binding peptide
RHKRLTPVGMDDYYLVSTASLKTPV

SEQ ID NO: 40481 - protein, 23 aa, Artificial Sequence
  Cyclic GFR-binding peptide
NQYNKLIVNSSDDLYLVSIASLK

SEQ ID NO: 40482 - protein, 40 aa, Artificial Sequence; identical to SEQ ID NO: 3346
  Cyclic GFR-binding peptide
  MOD_RES (2)..(34)..(35): Xaa is C or S

SEQ ID NO: 40483 - protein, 26 aa, Artificial Sequence
  Cyclic GFR-binding peptide
SRVIMRYKKLVKPKRGVFYLISIANL

SEQ ID NO: 40484 - protein, 30 aa, Artificial Sequence
  Cyclic GFR-binding peptide
LHDELTYHYKLFIPKKRVIEKYLVSIPSLQ

SEQ ID NO: 40485 - protein, 34 aa, Artificial Sequence; identical to SEQ ID NO: 3347
  Cyclic GFR-binding peptide
  MOD_RES (1)..(32)..(33): Xaa is C or S

SEQ ID NO: 40486 - protein, 35 aa, Artificial Sequence; identical to SEQ ID NO: 3348
  Cyclic GFR-binding peptide
  MOD_RES (1)..(1): Xaa is C or S

SEQ ID NO: 40487 - protein, 32 aa, Artificial Sequence; identical to SEQ ID NO: 3349
  Cyclic GFR-binding peptide
  MOD_RES (1)..(1): Xaa is C or S

SEQ ID NO: 40488 - protein, 36 aa, Artificial Sequence; identical to SEQ ID NO: 3350
  Cyclic GFR-binding peptide
  MOD_RES (1)..(3)..(34)..(35): Xaa is C or S

SEQ ID NO: 40489 - protein, 38 aa, Artificial Sequence; identical to SEQ ID NO: 3351
  Cyclic GFR-binding peptide
  MOD_RES (2)..(4)..(35)..(36): Xaa is C or S

SEQ ID NO: 40490 - protein, 32 aa, Artificial Sequence
  Cyclic GFR-binding peptide
  MOD_RES (29)..(30): Xaa is C or S
VMNRHKRLIVNSSDDYYLVSTASLQTPAXXPK

SEQ ID NO: 40491 - protein, 30 aa, Artificial Sequence
  Cyclic GFR-binding peptide
  MOD_RES (30)..(30): Xaa is C or S
QYNKLFIPKKRVIELYLVSIASLQVQTPRX

SEQ ID NO: 40492 - protein, 32 aa, Artificial Sequence
  Cyclic GFR-binding peptide
  MOD_RES (2)..(4): Xaa is C or S
SXKXSKVVMRYKKLVKPTRGVFYLISIANLDQ

SEQ ID NO: 40493 - protein, 36 aa, Artificial Sequence; identical to SEQ ID NO: 3353
  Cyclic GFR-binding peptide
  MOD_RES (32)..(33): Xaa is C or S

SEQ ID NO: 40494 - protein, 43 aa, Artificial Sequence; identical to SEQ ID NO: 3354
  Cyclic GFR-binding peptide
  MOD_RES (2)..(4)..(37)..(38): Xaa is C or S

SEQ ID NO: 40495 - protein, 39 aa, Artificial Sequence; identical to SEQ ID NO: 3356
  Cyclic GFR-binding peptide
  MOD_RES (37)..(37): Xaa is C or S

SEQ ID NO: 40496 - protein, 28 aa, Artificial Sequence
  Cyclic GFR-binding peptide
VMNYHYKLIVNSSDDKYLVSIPSLKTPA

SEQ ID NO: 40497 - protein, 36 aa, Artificial Sequence; identical to SEQ ID NO: 3360
  Cyclic GFR-binding peptide
  MOD_RES (32)..(33): Xaa is C or S

SEQ ID NO: 40498 - protein, 31 aa, Artificial Sequence
  Cyclic GFR-binding peptide
  MOD_RES (26)..(27): Xaa is C or S
RHKRLIVNSSDDYYLVSTASLKTPAXXPKPV

SEQ ID NO: 40499 - protein, 34 aa, Artificial Sequence
  Cyclic GFR-binding peptide
  MOD_RES (2)..(4): Xaa is C or S
HXGXARVVMNQYNKLIVNSSDDLYLVSIASLQTP

SEQ ID NO: 40500 - protein, 30 aa, Artificial Sequence
  Cyclic GFR-binding peptide
  MOD_RES (2)..(4): Xaa is C or S
RXGXGEVVMDYHYKLVVKENEDKYLMSIPS

SEQ ID NO: 40501 - protein, 30 aa, Artificial Sequence
  Cyclic GFR-binding peptide
  MOD_RES (30)..(30): Xaa is C or S
VVMDRYKKLVVKENEDFYLMSIANLETPVX

SEQ ID NO: 40502 - protein, 33 aa, Artificial Sequence
  Cyclic GFR-binding peptide
  MOD_RES (30)..(31): Xaa is C or S
SMGERYKKLTPVGMDDFYLVSIANLKTPVXXAK

SEQ ID NO: 40503 - protein, 28 aa, Artificial Sequence
  Cyclic GFR-binding peptide
EVVMDRYKKLVVKENEDFYLMSIANLET

SEQ ID NO: 40504 - protein, 32 aa, Artificial Sequence
  Cyclic GFR-binding peptide
ELTRYKKLFIPKKRVIEFYLVSIANLQVQTPR

SEQ ID NO: 40505 - protein, 35 aa, Artificial Sequence; identical to SEQ ID NO: 3361
  Cyclic GFR-binding peptide
  MOD_RES (2)..(33)..(34): Xaa is C or S

SEQ ID NO: 40506 - protein, 37 aa, Artificial Sequence; identical to SEQ ID NO: 3362
  Cyclic GFR-binding peptide
  MOD_RES (2)..(35)..(36): Xaa is C or S

SEQ ID NO: 40507 - protein, 24 aa, Artificial Sequence
  Cyclic GFR-binding peptide
VVMERHKRLVVKDYEDYYLMSTAS

SEQ ID NO: 40508 - protein, 33 aa, Artificial Sequence
  Cyclic GFR-binding peptide
  MOD_RES (1)..(3): Xaa is C or S
XGXGEVVMDRYKKLVVKENEDFYLMSIANLETP

SEQ ID NO: 40509 - protein, 30 aa, Artificial Sequence
  Cyclic GFR-binding peptide
  MOD_RES (27)..(28): Xaa is C or S
MYHYKLIKPTKGIKYLISIPSLDQSVXXPS

SEQ ID NO: 40510 - protein, 25 aa, Artificial Sequence
  Cyclic GFR-binding peptide
MNQYNKLIVNSSDDLYLVSIASLQT

SEQ ID NO: 40511 - protein, 39 aa, Artificial Sequence; identical to SEQ ID NO: 3364
  Cyclic GFR-binding peptide
  MOD_RES (2)..(4): Xaa is C or S

SEQ ID NO: 40512 - protein, 24 aa, Artificial Sequence
  Cyclic GFR-binding peptide
IMYHYKLIKPTKGIKYLISIPSLD

SEQ ID NO: 40513 - protein, 30 aa, Artificial Sequence
  Cyclic GFR-binding peptide
  MOD_RES (2)..(4): Xaa is C or S
SXKXSKVIMRYKKLIKPTKGIFYLISIANL

SEQ ID NO: 40514 - protein, 38 aa, Artificial Sequence; identical to SEQ ID NO: 3365
  Cyclic GFR-binding peptide
  MOD_RES (1)..(3)..(35)..(36): Xaa is C or S

SEQ ID NO: 40515 - protein, 29 aa, Artificial Sequence
  Cyclic GFR-binding peptide
  MOD_RES (28)..(29): Xaa is C or S
IMYHYKLIKPTKGIKYLISIPSLDQSVXX

SEQ ID NO: 40516 - protein, 34 aa, Artificial Sequence; identical to SEQ ID NO: 3368
  Cyclic GFR-binding peptide
  MOD_RES (2)..(33)..(34): Xaa is C or S

SEQ ID NO: 40517 - protein, 30 aa, Artificial Sequence
  Cyclic GFR-binding peptide
  MOD_RES (28)..(29): Xaa is C or S
VMRYKKLVKPTRGVFYLISIANLDQPVXXP

SEQ ID NO: 40518 - protein, 26 aa, Artificial Sequence
  Cyclic GFR-binding peptide
GEVVMDYHYKLVVKENEDKYLMSIPS

SEQ ID NO: 40519 - protein, 27 aa, Artificial Sequence
  Cyclic GFR-binding peptide
MNRHKRLIVNSSDDYYLVSTASLQTPA

SEQ ID NO: 40520 - protein, 26 aa, Artificial Sequence
  Cyclic GFR-binding peptide
AVSMGEQYNKLTPVGMDDLYLVSIAS

SEQ ID NO: 40521 - protein, 26 aa, Artificial Sequence
  Cyclic GFR-binding peptide
  MOD_RES (1)..(1): Xaa is C or S
XSKVIMRYKKLIKPTKGIFYLISIAN

SEQ ID NO: 40522 - protein, 28 aa, Artificial Sequence
  Cyclic GFR-binding peptide
AKVVMNRYKKLIVNNSSDFYLVSIANLK

SEQ ID NO: 40523 - protein, 29 aa, Artificial Sequence
  Cyclic GFR-binding peptide
  MOD_RES (1)..(1): Xaa is C or S
XEAVSMGEQYNKLTPVGMDDLYLVSIASL

SEQ ID NO: 40524 - protein, 30 aa, Artificial Sequence
  Cyclic GFR-binding peptide
  MOD_RES (1)..(3): Xaa is C or S
XKXSKVIMYHYKLIKPTKGIKYLISIPSLD

SEQ ID NO: 40525 - protein, 24 aa, Artificial Sequence
  Cyclic GFR-binding peptide
RYKKLIVNNSSDFYLVSIANLKTP

SEQ ID NO: 40526 - protein, 29 aa, Artificial Sequence
  Cyclic GFR-binding peptide
  MOD_RES (26)..(26): Xaa is C or S
YHYKLIVNSSDDKYLVSIPSLKTPAXTPK

SEQ ID NO: 40527 - protein, 30 aa, Artificial Sequence
  Cyclic GFR-binding peptide
LTYHYKLFIPKKRVIEKYLVSIPSLQVQTP

SEQ ID NO: 40528 - protein, 24 aa, Artificial Sequence
  Cyclic GFR-binding peptide
KVIMRHKRLIKPTKGIYYLISTAS

SEQ ID NO: 40529 - protein, 30 aa, Artificial Sequence
  Cyclic GFR-binding peptide
  MOD_RES (2)..(2): Xaa is C or S
KXSKVIMYHYKLIKPTKGIKYLISIPSLDQ

SEQ ID NO: 40530 - protein, 26 aa, Artificial Sequence
  Cyclic GFR-binding peptide
  MOD_RES (26)..(26): Xaa is C or S
QYNKLVKPTRGVLYLISIASLDQPVX

SEQ ID NO: 40531 - protein, 29 aa, Artificial Sequence
  Cyclic GFR-binding peptide
SRVVMNQYNKLIVNSSDDLYLVSIASLKT

SEQ ID NO: 40532 - protein, 34 aa, Artificial Sequence; identical to SEQ ID NO: 3371
  Cyclic GFR-binding peptide
  MOD_RES (32)..(33): Xaa is C or S

SEQ ID NO: 40533 - protein, 37 aa, Artificial Sequence; identical to SEQ ID NO: 3372
  Cyclic GFR-binding peptide
  MOD_RES (2)..(4)..(37): Xaa is C or S

SEQ ID NO: 40534 - protein, 33 aa, Artificial Sequence; identical to SEQ ID NO: 3373
  Cyclic GFR-binding peptide
  MOD_RES (2)..(2): Xaa is C or S

SEQ ID NO: 40535 - protein, 39 aa, Artificial Sequence; identical to SEQ ID NO: 3374
  Cyclic GFR-binding peptide
  MOD_RES (1)..(33)..(34): Xaa is C or S

SEQ ID NO: 40536 - protein, 33 aa, Artificial Sequence
  Cyclic GFR-binding peptide
  MOD_RES (30)..(31): Xaa is C or S
VVMDYHYKLVVKENEDKYLMSIPSLETPVXXAK

SEQ ID NO: 40537 - protein, 27 aa, Artificial Sequence
  Cyclic GFR-binding peptide
RVVMNQYNKLIVNSSDDLYLVSIASLK

SEQ ID NO: 40538 - protein, 41 aa, Artificial Sequence; identical to SEQ ID NO: 3375
  Cyclic GFR-binding peptide
  MOD_RES (1)..(3)..(36)..(37): Xaa is C or S

SEQ ID NO: 40539 - protein, 31 aa, Artificial Sequence
  Cyclic GFR-binding peptide
  MOD_RES (1)..(3): Xaa is C or S
XGXEAVSMGERHKRLTPVGMDDYYLVSTASL

SEQ ID NO: 40540 - protein, 39 aa, Artificial Sequence; identical to SEQ ID NO: 3376
  Cyclic GFR-binding peptide
  MOD_RES (2)..(33)..(34): Xaa is C or S

SEQ ID NO: 40541 - protein, 23 aa, Artificial Sequence
  Cyclic GFR-binding peptide
VVMYHYKLVKPTRGVKYLISIPS

SEQ ID NO: 40542 - protein, 35 aa, Artificial Sequence; identical to SEQ ID NO: 3377
  Cyclic GFR-binding peptide
  MOD_RES (32)..(33): Xaa is C or S

SEQ ID NO: 40543 - protein, 28 aa, Artificial Sequence
  Cyclic GFR-binding peptide
SMGERHKRLTPVGMDDYYLVSTASLKTP

SEQ ID NO: 40544 - protein, 23 aa, Artificial Sequence
  Cyclic GFR-binding peptide
EQYNKLTPVGMDDLYLVSIASLK

SEQ ID NO: 40545 - protein, 39 aa, Artificial Sequence; identical to SEQ ID NO: 3379
  Cyclic GFR-binding peptide
  MOD_RES (2)..(4)..(36)..(37): Xaa is C or S

SEQ ID NO: 40546 - protein, 24 aa, Artificial Sequence
  Cyclic GFR-binding peptide
QYNKLVKPKRGVLYLISIASLAQP

SEQ ID NO: 40547 - protein, 33 aa, Artificial Sequence; identical to SEQ ID NO: 3380
  Cyclic GFR-binding peptide
  MOD_RES (1)..(33): Xaa is C or S

SEQ ID NO: 40548 - protein, 35 aa, Artificial Sequence; identical to SEQ ID NO: 3381
  Cyclic GFR-binding peptide
  MOD_RES (2)..(4): Xaa is C or S

SEQ ID NO: 40549 - protein, 36 aa, Artificial Sequence; identical to SEQ ID NO: 3382
  Cyclic GFR-binding peptide
  MOD_RES (31)..(32): Xaa is C or S

SEQ ID NO: 40550 - protein, 28 aa, Artificial Sequence
  Cyclic GFR-binding peptide
ELTRYKKLFIPKKRVIEFYLVSIANLQV

SEQ ID NO: 40551 - protein, 28 aa, Artificial Sequence
  Cyclic GFR-binding peptide
  MOD_RES (27)..(28): Xaa is C or S
MQYNKLVKPKRGVLYLISIASLAQPVXX

SEQ ID NO: 40552 - protein, 26 aa, Artificial Sequence
  Cyclic GFR-binding peptide
MRHKRLIKPTKGIYYLISTASLDQSV

SEQ ID NO: 40553 - protein, 31 aa, Artificial Sequence
  Cyclic GFR-binding peptide
  MOD_RES (28)..(28): Xaa is C or S
MNRHKRLIVNSSDDYYLVSTASLKTPAXTPK

SEQ ID NO: 40554 - protein, 33 aa, Artificial Sequence
  Cyclic GFR-binding peptide
  MOD_RES (31)..(32): Xaa is C or S
VSMGERHKRLTPVGMDDYYLVSTASLKTPVXXA

SEQ ID NO: 40555 - protein, 32 aa, Artificial Sequence
  Cyclic GFR-binding peptide
  MOD_RES (27)..(28): Xaa is C or S
MRYKKLVKPTRGVFYLISIANLDQPVXXPSAS

SEQ ID NO: 40556 - protein, 33 aa, Artificial Sequence
  Cyclic GFR-binding peptide
  MOD_RES (2)..(2): Xaa is C or S
KXALHDELTRYKKLFIPKKRVIEFYLVSIANLQ

SEQ ID NO: 40557 - protein, 32 aa, Artificial Sequence
  Cyclic GFR-binding peptide
  MOD_RES (2)..(4): Xaa is C or S
HXGXSRVVMNYHYKLIVNSSDDKYLVSIPSLK

SEQ ID NO: 40558 - protein, 27 aa, Artificial Sequence
  Cyclic GFR-binding peptide
EVVMERHKRLVVKDYEDYYLMSTASLE

SEQ ID NO: 40559 - protein, 26 aa, Artificial Sequence
  Cyclic GFR-binding peptide
DELTRYKKLFIPKKRVIEFYLVSIAN

SEQ ID NO: 40560 - protein, 35 aa, Artificial Sequence; identical to SEQ ID NO: 3384
  Cyclic GFR-binding peptide
  MOD_RES (1)..(33): Xaa is C or S

SEQ ID NO: 40561 - protein, 25 aa, Artificial Sequence
  Cyclic GFR-binding peptide
LTQYNKLFIPKKRVIELYLVSIASL

SEQ ID NO: 40562 - protein, 35 aa, Artificial Sequence; identical to SEQ ID NO: 3387
  Cyclic GFR-binding peptide
  MOD_RES (2)..(34)..(35): Xaa is C or S

SEQ ID NO: 40563 - protein, 30 aa, Artificial Sequence; identical to SEQ ID NO: 3388
  Cyclic GFR-binding peptide

SEQ ID NO: 40564 - protein, 29 aa, Artificial Sequence
  Cyclic GFR-binding peptide
SKVIMRHKRLIKPTKGIYYLISTASLDQS

SEQ ID NO: 40565 - protein, 25 aa, Artificial Sequence
  Cyclic GFR-binding peptide
YHYKLVKPTRGVKYLISIPSLDQPV

SEQ ID NO: 40566 - protein, 21 aa, Artificial Sequence
  Cyclic GFR-binding peptide
QYNKLIVNNSSDLYLVSIASL

SEQ ID NO: 40567 - protein, 38 aa, Artificial Sequence; identical to SEQ ID NO: 3390
  Cyclic GFR-binding peptide
  MOD_RES (2)..(4)..(35)..(36): Xaa is C or S

SEQ ID NO: 40568 - protein, 20 aa, Artificial Sequence
  Cyclic GFR-binding peptide
QYNKLIVNSSDDLYLVSIAS

SEQ ID NO: 40569 - protein, 29 aa, Artificial Sequence
  Cyclic GFR-binding peptide
  MOD_RES (26)..(27): Xaa is C or S
QYNKLIVNNSSDLYLVSIASLKTPAXXAK

SEQ ID NO: 40570 - protein, 32 aa, Artificial Sequence; identical to SEQ ID NO: 3394
  Cyclic GFR-binding peptide
  MOD_RES (1)..(1): Xaa is C or S

SEQ ID NO: 40571 - protein, 44 aa, Artificial Sequence; identical to SEQ ID NO: 3395
  Cyclic GFR-binding peptide
  MOD_RES (1)..(3)..(40): Xaa is C or S

SEQ ID NO: 40572 - protein, 30 aa, Artificial Sequence
  Cyclic GFR-binding peptide
  MOD_RES (2)..(4): Xaa is C or S
RXGXGEVVMERYKKLVVKDYEDFYLMSIAN

SEQ ID NO: 40573 - protein, 38 aa, Artificial Sequence; identical to SEQ ID NO: 3398
  Cyclic GFR-binding peptide
  MOD_RES (32)..(33): Xaa is C or S

SEQ ID NO: 40574 - protein, 35 aa, Artificial Sequence
  Cyclic GFR-binding peptide
  MOD_RES (31)..(31): Xaa is C or S
TYHYKLFIPKKRVIEKYLVSIPSLQVQTPRXQVNR

SEQ ID NO: 40575 - protein, 35 aa, Artificial Sequence
  Cyclic GFR-binding peptide
  MOD_RES (30)..(31): Xaa is C or S
VVMNYHYKLIVNNSSDKYLVSIPSLKTPAXXAKPV

SEQ ID NO: 40576 - protein, 28 aa, Artificial Sequence
  Cyclic GFR-binding peptide
AVSMGERHKRLTPVGMDDYYLVSTASLK

SEQ ID NO: 40577 - protein, 33 aa, Artificial Sequence
  Cyclic GFR-binding peptide
  MOD_RES (28)..(28): Xaa is C or S
MNRHKRLIVNSSDDYYLVSTASLKTPAXTPKTV

SEQ ID NO: 40578 - protein, 34 aa, Artificial Sequence; identical to SEQ ID NO: 3400
  Cyclic GFR-binding peptide
  MOD_RES (1)..(33)..(34): Xaa is C or S

SEQ ID NO: 40579 - protein, 39 aa, Artificial Sequence; identical to SEQ ID NO: 3401
  Cyclic GFR-binding peptide
  MOD_RES (2)..(4)..(36)..(37): Xaa is C or S

SEQ ID NO: 40580 - protein, 39 aa, Artificial Sequence; identical to SEQ ID NO: 3405
  Cyclic GFR-binding peptide
  MOD_RES (2)..(34)..(35): Xaa is C or S

SEQ ID NO: 40581 - protein, 40 aa, Artificial Sequence; identical to SEQ ID NO: 3407
  Cyclic GFR-binding peptide
  MOD_RES (1)..(3)..(34)..(35): Xaa is C or S

SEQ ID NO: 40582 - protein, 41 aa, Artificial Sequence; identical to SEQ ID NO: 3408
  Cyclic GFR-binding peptide
  MOD_RES (1)..(3)..(36)..(37): Xaa is C or S

SEQ ID NO: 40583 - protein, 25 aa, Artificial Sequence
  Cyclic GFR-binding peptide
QYNKLIVNSSDDLYLVSIASLQTPA

SEQ ID NO: 40584 - protein, 32 aa, Artificial Sequence
  Cyclic GFR-binding peptide
  MOD_RES (2)..(2): Xaa is C or S
GXEAVSMGERHKRLTPVGMDDYYLVSTASLKT

SEQ ID NO: 40585 - protein, 34 aa, Artificial Sequence
  Cyclic GFR-binding peptide
  MOD_RES (2)..(4): Xaa is C or S
RXGXGEVVMERYKKLVVKDYEDFYLMSIANLETP

SEQ ID NO: 40586 - protein, 31 aa, Artificial Sequence
  Cyclic GFR-binding peptide
  MOD_RES (28)..(29): Xaa is C or S
VMRHKRLVKPTRGVYYLISTASLDQPVXXPS

SEQ ID NO: 40587 - protein, 38 aa, Artificial Sequence; identical to SEQ ID NO: 3411
  Cyclic GFR-binding peptide
  MOD_RES (2)..(4)..(36): Xaa is C or S

SEQ ID NO: 40588 - protein, 36 aa, Artificial Sequence; identical to SEQ ID NO: 3412
  Cyclic GFR-binding peptide
  MOD_RES (1)..(3)..(35)..(36): Xaa is C or S

SEQ ID NO: 40589 - protein, 35 aa, Artificial Sequence
  Cyclic GFR-binding peptide
  MOD_RES (30)..(31): Xaa is C or S
VVMNYHYKLIVNSSDDKYLVSIPSLKTPAXXPKPV

SEQ ID NO: 40590 - protein, 26 aa, Artificial Sequence
  Cyclic GFR-binding peptide
GERHKRLTPVGMDDYYLVSTASLKTP

SEQ ID NO: 40591 - protein, 34 aa, Artificial Sequence; identical to SEQ ID NO: 3413
  Cyclic GFR-binding peptide

SEQ ID NO: 40592 - protein, 38 aa, Artificial Sequence; identical to SEQ ID NO: 3414
  Cyclic GFR-binding peptide
  MOD_RES (1)..(3)..(36)..(37): Xaa is C or S

SEQ ID NO: 40593 - protein, 33 aa, Artificial Sequence
  Cyclic GFR-binding peptide
  MOD_RES (1)..(3): Xaa is C or S
XGXEAVSMGEQYNKLTPVGMDDLYLVSIASLKT

SEQ ID NO: 40594 - protein, 28 aa, Artificial Sequence
  Cyclic GFR-binding peptide
SRVIMQYNKLVKPKRGVLYLISIASLAQ

SEQ ID NO: 40595 - protein, 25 aa, Artificial Sequence
  Cyclic GFR-binding peptide
VMRHKRLVKPTRGVYYLISTASLDQ

SEQ ID NO: 40596 - protein, 30 aa, Artificial Sequence
  Cyclic GFR-binding peptide
AKVVMNQYNKLIVNNSSDLYLVSIASLKTP

SEQ ID NO: 40597 - protein, 38 aa, Artificial Sequence; identical to SEQ ID NO: 3421
  Cyclic GFR-binding peptide
  MOD_RES (1)..(34)..(35): Xaa is C or S

SEQ ID NO: 40598 - protein, 28 aa, Artificial Sequence
  Cyclic GFR-binding peptide
RVVMNRHKRLIVNSSDDYYLVSTASLQT

SEQ ID NO: 40599 - protein, 31 aa, Artificial Sequence
  Cyclic GFR-binding peptide
  MOD_RES (2)..(4): Xaa is C or S
HXGXSRVVMNYHYKLIVNSSDDKYLVSIPSL

SEQ ID NO: 40600 - protein, 29 aa, Artificial Sequence
  Cyclic GFR-binding peptide
  MOD_RES (1)..(1): Xaa is C or S
XSKVIMQYNKLIKPTKGILYLISIASLDQ

SEQ ID NO: 40601 - protein, 39 aa, Artificial Sequence; identical to SEQ ID NO: 3422
  Cyclic GFR-binding peptide
  MOD_RES (1)..(3)..(34)..(35): Xaa is C or S

SEQ ID NO: 40602 - protein, 36 aa, Artificial Sequence; identical to SEQ ID NO: 3423
  Cyclic GFR-binding peptide
  MOD_RES (31)..(32): Xaa is C or S

SEQ ID NO: 40603 - protein, 30 aa, Artificial Sequence
  Cyclic GFR-binding peptide
  MOD_RES (2)..(2): Xaa is C or S
KXSKVIMRYKKLIKPTKGIFYLISIANLDQ

SEQ ID NO: 40604 - protein, 35 aa, Artificial Sequence; identical to SEQ ID NO: 3424
  Cyclic GFR-binding peptide
  MOD_RES (31)..(32): Xaa is C or S

SEQ ID NO: 40605 - protein, 20 aa, Artificial Sequence
  Cyclic GFR-binding peptide
QYNKLTPVGMDDLYLVSIAS

SEQ ID NO: 40606 - protein, 25 aa, Artificial Sequence
  Cyclic GFR-binding peptide
KVVMYHYKLVKPTRGVKYLISIPSL

SEQ ID NO: 40607 - protein, 34 aa, Artificial Sequence; identical to SEQ ID NO: 3426
  Cyclic GFR-binding peptide

SEQ ID NO: 40608 - protein, 30 aa, Artificial Sequence
  Cyclic GFR-binding peptide
  MOD_RES (2)..(2): Xaa is C or S
GXSRVVMNYHYKLIVNSSDDKYLVSIPSLK

SEQ ID NO: 40609 - protein, 34 aa, Artificial Sequence; identical to SEQ ID NO: 3427
  Cyclic GFR-binding peptide
  MOD_RES (31)..(32): Xaa is C or S

SEQ ID NO: 40610 - protein, 32 aa, Artificial Sequence
  Cyclic GFR-binding peptide
  MOD_RES (26)..(27): Xaa is C or S
YHYKLIKPTKGIKYLISIPSLDQSVXXPSASA

SEQ ID NO: 40611 - protein, 35 aa, Artificial Sequence
  Cyclic GFR-binding peptide
  MOD_RES (30)..(31): Xaa is C or S
KVVMRYKKLVKPTRGVFYLISIANLDQPVXXPSAS

SEQ ID NO: 40612 - protein, 34 aa, Artificial Sequence
  Cyclic GFR-binding peptide
  MOD_RES (30)..(31): Xaa is C or S
RVIMRYKKLVKPKRGVFYLISIANLAQPVXXPAA

SEQ ID NO: 40613 - protein, 34 aa, Artificial Sequence; identical to SEQ ID NO: 3428
  Cyclic GFR-binding peptide

SEQ ID NO: 40614 - protein, 42 aa, Artificial Sequence; identical to SEQ ID NO: 3429
  Cyclic GFR-binding peptide
  MOD_RES (2)..(4)..(36)..(37): Xaa is C or S

SEQ ID NO: 40615 - protein, 28 aa, Artificial Sequence
  Cyclic GFR-binding peptide
  MOD_RES (27)..(28): Xaa is C or S
NYHYKLIVNSSDDKYLVSIPSLKTPAXX

SEQ ID NO: 40616 - protein, 29 aa, Artificial Sequence
  Cyclic GFR-binding peptide
  MOD_RES (1)..(3): Xaa is C or S
XKXSKVIMRYKKLIKPTKGIFYLISIANL

SEQ ID NO: 40617 - protein, 33 aa, Artificial Sequence
  Cyclic GFR-binding peptide
  MOD_RES (32)..(32): Xaa is C or S
LTYHYKLFIPKKRVIEKYLVSIPSLQVQTPRXQ

SEQ ID NO: 40618 - protein, 31 aa, Artificial Sequence
  Cyclic GFR-binding peptide
  MOD_RES (27)..(28): Xaa is C or S
NQYNKLIVNSSDDLYLVSIASLQTPAXXPKP

SEQ ID NO: 40619 - protein, 39 aa, Artificial Sequence; identical to SEQ ID NO: 3431
  Cyclic GFR-binding peptide
  MOD_RES (2)..(4)..(36)..(37): Xaa is C or S

SEQ ID NO: 40620 - protein, 33 aa, Artificial Sequence
  Cyclic GFR-binding peptide
  MOD_RES (28)..(29): Xaa is C or S
IMRYKKLVKPKRGVFYLISIANLAQPVXXPAAS

SEQ ID NO: 40621 - protein, 27 aa, Artificial Sequence
  Cyclic GFR-binding peptide
  MOD_RES (27)..(27): Xaa is C or S
EQYNKLTPVGMDDLYLVSIASLKTPVX

SEQ ID NO: 40622 - protein, 29 aa, Artificial Sequence
  Cyclic GFR-binding peptide
  MOD_RES (27)..(28): Xaa is C or S
MRYKKLIKPTKGIFYLISIANLDQSVXXP

SEQ ID NO: 40623 - protein, 35 aa, Artificial Sequence; identical to SEQ ID NO: 3433
  Cyclic GFR-binding peptide
  MOD_RES (2)..(35): Xaa is C or S

SEQ ID NO: 40624 - protein, 32 aa, Artificial Sequence
  Cyclic GFR-binding peptide
LHDELTQYNKLFIPKKRVIELYLVSIASLQVQ

SEQ ID NO: 40625 - protein, 33 aa, Artificial Sequence
  Cyclic GFR-binding peptide
  MOD_RES (27)..(28): Xaa is C or S
MRHKRLVKPTRGVYYLISTASLDQPVXXPSASA

SEQ ID NO: 40626 - protein, 43 aa, Artificial Sequence; identical to SEQ ID NO: 3434
  Cyclic GFR-binding peptide
  MOD_RES (2)..(39): Xaa is C or S

SEQ ID NO: 40627 - protein, 31 aa, Artificial Sequence
  Cyclic GFR-binding peptide
  MOD_RES (2)..(2): Xaa is C or S
GXGEVVMDRYKKLVVKENEDFYLMSIANLET

SEQ ID NO: 40628 - protein, 29 aa, Artificial Sequence
  Cyclic GFR-binding peptide
  MOD_RES (28)..(28): Xaa is C or S
MNRHKRLIVNSSDDYYLVSTASLKTPAXT

SEQ ID NO: 40629 - protein, 33 aa, Artificial Sequence
  Cyclic GFR-binding peptide
  MOD_RES (2)..(2): Xaa is C or S
GXEAVSMGERYKKLTPVGMDDFYLVSIANLKTP

SEQ ID NO: 40630 - protein, 33 aa, Artificial Sequence; identical to SEQ ID NO: 3436
  Cyclic GFR-binding peptide
  MOD_RES (1)..(33): Xaa is C or S

SEQ ID NO: 40631 - protein, 34 aa, Artificial Sequence
  Cyclic GFR-binding peptide
  MOD_RES (29)..(30): Xaa is C or S
VMNYHYKLIVNNSSDKYLVSIPSLKTPAXXAKPV

SEQ ID NO: 40632 - protein, 31 aa, Artificial Sequence
  Cyclic GFR-binding peptide
  MOD_RES (2)..(2): Xaa is C or S
GXEAVSMGERYKKLTPVGMDDFYLVSIANLK

SEQ ID NO: 40633 - protein, 32 aa, Artificial Sequence
  Cyclic GFR-binding peptide
  MOD_RES (27)..(27): Xaa is C or S
NQYNKLIVNSSDDLYLVSIASLKTPAXTPKTV

SEQ ID NO: 40634 - protein, 32 aa, Artificial Sequence
  Cyclic GFR-binding peptide
  MOD_RES (27)..(28): Xaa is C or S
ERYKKLVVKDYEDFYLMSIANLETPVXXAKPI

SEQ ID NO: 40635 - protein, 31 aa, Artificial Sequence
  Cyclic GFR-binding peptide
ELTRHKRLFIPKKRVIEYYLVSTASLQVQTP

SEQ ID NO: 40636 - protein, 34 aa, Artificial Sequence; identical to SEQ ID NO: 3440
  Cyclic GFR-binding peptide
  MOD_RES (1)..(33)..(34): Xaa is C or S

SEQ ID NO: 40637 - protein, 39 aa, Artificial Sequence; identical to SEQ ID NO: 3441
  Cyclic GFR-binding peptide
  MOD_RES (33)..(34): Xaa is C or S

SEQ ID NO: 40638 - protein, 31 aa, Artificial Sequence
  Cyclic GFR-binding peptide
  MOD_RES (29)..(30): Xaa is C or S
VMNQYNKLIVNSSDDLYLVSIASLKTPAXXP

SEQ ID NO: 40639 - protein, 24 aa, Artificial Sequence
  Cyclic GFR-binding peptide
RYKKLVKPKRGVFYLISIANLAQP

SEQ ID NO: 40640 - protein, 35 aa, Artificial Sequence; identical to SEQ ID NO: 3442
  Cyclic GFR-binding peptide
  MOD_RES (2)..(34)..(35): Xaa is C or S

SEQ ID NO: 40641 - protein, 25 aa, Artificial Sequence
  Cyclic GFR-binding peptide
IMQYNKLVKPKRGVLYLISIASLAQ

SEQ ID NO: 40642 - protein, 29 aa, Artificial Sequence
  Cyclic GFR-binding peptide
  MOD_RES (29)..(29): Xaa is C or S
VIMRHKRLVKPKRGVYYLISTASLAQPVX

SEQ ID NO: 40643 - protein, 27 aa, Artificial Sequence
  Cyclic GFR-binding peptide
SKVVMQYNKLVKPTRGVLYLISIASLD

SEQ ID NO: 40644 - protein, 37 aa, Artificial Sequence; identical to SEQ ID NO: 3443
  Cyclic GFR-binding peptide
  MOD_RES (1)..(3)..(34)..(35): Xaa is C or S

SEQ ID NO: 40645 - protein, 36 aa, Artificial Sequence
  Cyclic GFR-binding peptide
  MOD_RES (30)..(31): Xaa is C or S
KVIMQYNKLIKPTKGILYLISIASLDQSVXXPSASA

SEQ ID NO: 40646 - protein, 28 aa, Artificial Sequence
  Cyclic GFR-binding peptide
  MOD_RES (28)..(28): Xaa is C or S
IMYHYKLIKPTKGIKYLISIPSLDQSVX

SEQ ID NO: 40647 - protein, 34 aa, Artificial Sequence; identical to SEQ ID NO: 3447
  Cyclic GFR-binding peptide
  MOD_RES (1)..(33)..(34): Xaa is C or S

SEQ ID NO: 40648 - protein, 27 aa, Artificial Sequence
  Cyclic GFR-binding peptide
  MOD_RES (27)..(27): Xaa is C or S
NQYNKLIVNSSDDLYLVSIASLKTPAX

SEQ ID NO: 40649 - protein, 36 aa, Artificial Sequence; identical to SEQ ID NO: 3448
  Cyclic GFR-binding peptide
  MOD_RES (2)..(4)..(35)..(36): Xaa is C or S

SEQ ID NO: 40650 - protein, 24 aa, Artificial Sequence
  Cyclic GFR-binding peptide
NQYNKLIVNNSSDLYLVSIASLKT

SEQ ID NO: 40651 - protein, 26 aa, Artificial Sequence
  Cyclic GFR-binding peptide
  MOD_RES (26)..(26): Xaa is C or S
RYKKLVKPTRGVFYLISIANLDQPVX

SEQ ID NO: 40652 - protein, 29 aa, Artificial Sequence
  Cyclic GFR-binding peptide
  MOD_RES (26)..(27): Xaa is C or S
RYKKLVKPKRGVFYLISIANLAQPVXXPA

SEQ ID NO: 40653 - protein, 32 aa, Artificial Sequence; identical to SEQ ID NO: 3451
  Cyclic GFR-binding peptide
  MOD_RES (1)..(1): Xaa is C or S

SEQ ID NO: 40654 - protein, 27 aa, Artificial Sequence
  Cyclic GFR-binding peptide
MDYHYKLVVKENEDKYLMSIPSLETPV

SEQ ID NO: 40655 - protein, 32 aa, Artificial Sequence
  Cyclic GFR-binding peptide
DELTQYNKLFIPKKRVIELYLVSIASLQVQTP

SEQ ID NO: 40656 - protein, 38 aa, Artificial Sequence; identical to SEQ ID NO: 3452
  Cyclic GFR-binding peptide
  MOD_RES (1)..(33)..(34): Xaa is C or S

SEQ ID NO: 40657 - protein, 37 aa, Artificial Sequence; identical to SEQ ID NO: 3453
  Cyclic GFR-binding peptide
  MOD_RES (31)..(32): Xaa is C or S

SEQ ID NO: 40658 - protein, 28 aa, Artificial Sequence
  Cyclic GFR-binding peptide
  MOD_RES (27)..(28): Xaa is C or S
ERHKRLVVKDYEDYYLMSTASLETPVXX

SEQ ID NO: 40659 - protein, 39 aa, Artificial Sequence; identical to SEQ ID NO: 3458
  Cyclic GFR-binding peptide
  MOD_RES (1)..(3)..(35): Xaa is C or S

SEQ ID NO: 40660 - protein, 24 aa, Artificial Sequence
  Cyclic GFR-binding peptide
QYNKLVKPTRGVLYLISIASLDQP

SEQ ID NO: 40661 - protein, 29 aa, Artificial Sequence
  Cyclic GFR-binding peptide
SKVVMYHYKLVKPTRGVKYLISIPSLDQP

SEQ ID NO: 40662 - protein, 24 aa, Artificial Sequence
  Cyclic GFR-binding peptide
RYKKLFIPKKRVIEFYLVSIANLQ

SEQ ID NO: 40663 - protein, 31 aa, Artificial Sequence
  Cyclic GFR-binding peptide
  MOD_RES (30)..(31): Xaa is C or S
VVMEYHYKLVVKDYEDKYLMSIPSLETPVXX

SEQ ID NO: 40664 - protein, 25 aa, Artificial Sequence
  Cyclic GFR-binding peptide
DRHKRLVVKENEDYYLMSTASLETP

SEQ ID NO: 40665 - protein, 30 aa, Artificial Sequence
  Cyclic GFR-binding peptide
TYHYKLFIPKKRVIEKYLVSIPSLQVQTPR

SEQ ID NO: 40666 - protein, 31 aa, Artificial Sequence
  Cyclic GFR-binding peptide
  MOD_RES (26)..(27): Xaa is C or S
RHKRLVKPKRGVYYLISTASLAQPVXXPAAS

SEQ ID NO: 40667 - protein, 32 aa, Artificial Sequence
  Cyclic GFR-binding peptide
LHDELTRYKKLFIPKKRVIEFYLVSIANLQVQ

SEQ ID NO: 40668 - protein, 23 aa, Artificial Sequence
  Cyclic GFR-binding peptide
RHKRLVVKENEDYYLMSTASLET

SEQ ID NO: 40669 - protein, 35 aa, Artificial Sequence; identical to SEQ ID NO: 3460
  Cyclic GFR-binding peptide
  MOD_RES (32)..(33): Xaa is C or S

SEQ ID NO: 40670 - protein, 27 aa, Artificial Sequence
  Cyclic GFR-binding peptide
  MOD_RES (26)..(27): Xaa is C or S
QYNKLVKPKRGVLYLISIASLAQPVXX

SEQ ID NO: 40671 - protein, 29 aa, Artificial Sequence
  Cyclic GFR-binding peptide
  MOD_RES (29)..(29): Xaa is C or S
VIMQYNKLIKPTKGILYLISIASLDQSVX

SEQ ID NO: 40672 - protein, 31 aa, Artificial Sequence
  Cyclic GFR-binding peptide
  MOD_RES (30)..(31): Xaa is C or S
SMGERYKKLTPVGMDDFYLVSIANLKTPVXX

SEQ ID NO: 40673 - protein, 40 aa, Artificial Sequence; identical to SEQ ID NO: 3461
  Cyclic GFR-binding peptide
  MOD_RES (1)..(3)..(34)..(35): Xaa is C or S

SEQ ID NO: 40674 - protein, 28 aa, Artificial Sequence
  Cyclic GFR-binding peptide
  MOD_RES (28)..(28): Xaa is C or S
VMYHYKLVKPTRGVKYLISIPSLDQPVX

SEQ ID NO: 40675 - protein, 39 aa, Artificial Sequence; identical to SEQ ID NO: 3462
  Cyclic GFR-binding peptide
  MOD_RES (1)..(3)..(34)..(35): Xaa is C or S

SEQ ID NO: 40676 - protein, 28 aa, Artificial Sequence
  Cyclic GFR-binding peptide
  MOD_RES (2)..(2): Xaa is C or S
KXSKVVMYHYKLVKPTRGVKYLISIPSL

SEQ ID NO: 40677 - protein, 30 aa, Artificial Sequence
  Cyclic GFR-binding peptide
  MOD_RES (28)..(29): Xaa is C or S
IMYHYKLVKPKRGVKYLISIPSLAQPVXXP

SEQ ID NO: 40678 - protein, 32 aa, Artificial Sequence
  Cyclic GFR-binding peptide
  MOD_RES (27)..(28): Xaa is C or S
NQYNKLIVNSSDDLYLVSIASLKTPAXXPKPV

SEQ ID NO: 40679 - protein, 32 aa, Artificial Sequence; identical to SEQ ID NO: 3463
  Cyclic GFR-binding peptide
  MOD_RES (32)..(32): Xaa is C or S

SEQ ID NO: 40680 - protein, 23 aa, Artificial Sequence
  Cyclic GFR-binding peptide
MQYNKLVKPKRGVLYLISIASLA

SEQ ID NO: 40681 - protein, 32 aa, Artificial Sequence
  Cyclic GFR-binding peptide
  MOD_RES (28)..(29): Xaa is C or S
MERYKKLVVKDYEDFYLMSIANLETPVXXAKP

SEQ ID NO: 40682 - protein, 24 aa, Artificial Sequence
  Cyclic GFR-binding peptide
MGERYKKLTPVGMDDFYLVSIANL

SEQ ID NO: 40683 - protein, 36 aa, Artificial Sequence; identical to SEQ ID NO: 3464
  Cyclic GFR-binding peptide
  MOD_RES (1)..(3)..(35)..(36): Xaa is C or S

SEQ ID NO: 40684 - protein, 28 aa, Artificial Sequence
  Cyclic GFR-binding peptide
  MOD_RES (1)..(1): Xaa is C or S
XSRVVMNYHYKLIVNSSDDKYLVSIPSL

SEQ ID NO: 40685 - protein, 26 aa, Artificial Sequence
  Cyclic GFR-binding peptide
  MOD_RES (1)..(1): Xaa is C or S
XSKVVMRHKRLVKPTRGVYYLISTAS

SEQ ID NO: 40686 - protein, 26 aa, Artificial Sequence
  Cyclic GFR-binding peptide
DRYKKLVVKENEDFYLMSIANLETPV

SEQ ID NO: 40687 - protein, 29 aa, Artificial Sequence
  Cyclic GFR-binding peptide
ARVVMNYHYKLIVNSSDDKYLVSIPSLQT

SEQ ID NO: 40688 - protein, 29 aa, Artificial Sequence
  Cyclic GFR-binding peptide
  MOD_RES (28)..(29): Xaa is C or S
GEQYNKLTPVGMDDLYLVSIASLKTPVXX

SEQ ID NO: 40689 - protein, 36 aa, Artificial Sequence; identical to SEQ ID NO: 3469
  Cyclic GFR-binding peptide
  MOD_RES (32)..(32): Xaa is C or S

SEQ ID NO: 40690 - protein, 41 aa, Artificial Sequence; identical to SEQ ID NO: 3471
  Cyclic GFR-binding peptide
  MOD_RES (1)..(3)..(35)..(36): Xaa is C or S

SEQ ID NO: 40691 - protein, 31 aa, Artificial Sequence
  Cyclic GFR-binding peptide
  MOD_RES (30)..(30): Xaa is C or S
VVMNQYNKLIVNSSDDLYLVSIASLKTPAXT

SEQ ID NO: 40692 - protein, 36 aa, Artificial Sequence
  Cyclic GFR-binding peptide
  MOD_RES (30)..(30): Xaa is C or S
VVMNRHKRLIVNSSDDYYLVSTASLKTPAXTPKTVH

SEQ ID NO: 40693 - protein, 29 aa, Artificial Sequence
  Cyclic GFR-binding peptide
  MOD_RES (2)..(2): Xaa is C or S
GXGEVVMERHKRLVVKDYEDYYLMSTASL

SEQ ID NO: 40694 - protein, 31 aa, Artificial Sequence
  Cyclic GFR-binding peptide
  MOD_RES (27)..(28): Xaa is C or S
EYHYKLVVKDYEDKYLMSIPSLETPVXXAKP

SEQ ID NO: 40695 - protein, 35 aa, Artificial Sequence; identical to SEQ ID NO: 3473
  Cyclic GFR-binding peptide
  MOD_RES (2)..(34)..(35): Xaa is C or S

SEQ ID NO: 40696 - protein, 24 aa, Artificial Sequence
  Cyclic GFR-binding peptide
VVMNRYKKLIVNNSSDFYLVSIAN

SEQ ID NO: 40697 - protein, 27 aa, Artificial Sequence
  Cyclic GFR-binding peptide
SKVIMYHYKLIKPTKGIKYLISIPSLD

SEQ ID NO: 40698 - protein, 33 aa, Artificial Sequence
  Cyclic GFR-binding peptide
  MOD_RES (29)..(30): Xaa is C or S
VIMYHYKLIKPTKGIKYLISIPSLDQSVXXPSA

SEQ ID NO: 40699 - protein, 40 aa, Artificial Sequence; identical to SEQ ID NO: 3476
  Cyclic GFR-binding peptide
  MOD_RES (1)..(3)..(35)..(36): Xaa is C or S

SEQ ID NO: 40700 - protein, 27 aa, Artificial Sequence
  Cyclic GFR-binding peptide
AKVVMNQYNKLIVNNSSDLYLVSIASL

SEQ ID NO: 40701 - protein, 41 aa, Artificial Sequence; identical to SEQ ID NO: 3479
  Cyclic GFR-binding peptide
  MOD_RES (2)..(4)..(41): Xaa is C or S

SEQ ID NO: 40702 - protein, 24 aa, Artificial Sequence
  Cyclic GFR-binding peptide
MDRYKKLVVKENEDFYLMSIANLE

SEQ ID NO: 40703 - protein, 34 aa, Artificial Sequence; identical to SEQ ID NO: 3482
  Cyclic GFR-binding peptide
  MOD_RES (1)..(32)..(33): Xaa is C or S

SEQ ID NO: 40704 - protein, 29 aa, Artificial Sequence
  Cyclic GFR-binding peptide
  MOD_RES (29)..(29): Xaa is C or S
VMNQYNKLIVNSSDDLYLVSIASLQTPAX

SEQ ID NO: 40705 - protein, 38 aa, Artificial Sequence; identical to SEQ ID NO: 3484
  Cyclic GFR-binding peptide
  MOD_RES (2)..(33)..(34): Xaa is C or S

SEQ ID NO: 40706 - protein, 31 aa, Artificial Sequence
  Cyclic GFR-binding peptide
  MOD_RES (27)..(28): Xaa is C or S
MRHKRLVKPKRGVYYLISTASLAQPVXXPAA

SEQ ID NO: 40707 - protein, 23 aa, Artificial Sequence
  Cyclic GFR-binding peptide
RHKRLVVKDYEDYYLMSTASLET

SEQ ID NO: 40708 - protein, 28 aa, Artificial Sequence
  Cyclic GFR-binding peptide
  MOD_RES (2)..(2): Xaa is C or S
GXGEVVMERYKKLVVKDYEDFYLMSIAN

SEQ ID NO: 40709 - protein, 35 aa, Artificial Sequence
  Cyclic GFR-binding peptide
  MOD_RES (34)..(34): Xaa is C or S
DELTRHKRLFIPKKRVIEYYLVSTASLQVQTPRXQ

SEQ ID NO: 40710 - protein, 28 aa, Artificial Sequence
  Cyclic GFR-binding peptide
VVMDRHKRLVVKENEDYYLMSTASLETP

SEQ ID NO: 40711 - protein, 23 aa, Artificial Sequence
  Cyclic GFR-binding peptide
VMDYHYKLVVKENEDKYLMSIPS

SEQ ID NO: 40712 - protein, 26 aa, Artificial Sequence
  Cyclic GFR-binding peptide
VVMRYKKLVKPTRGVFYLISIANLDQ

SEQ ID NO: 40713 - protein, 21 aa, Artificial Sequence
  Cyclic GFR-binding peptide
MYHYKLVKPKRGVKYLISIPS

SEQ ID NO: 40714 - protein, 32 aa, Artificial Sequence
  Cyclic GFR-binding peptide
  MOD_RES (32)..(32): Xaa is C or S
AVSMGERHKRLTPVGMDDYYLVSTASLKTPVX

SEQ ID NO: 40715 - protein, 31 aa, Artificial Sequence
  Cyclic GFR-binding peptide
  MOD_RES (2)..(4): Xaa is C or S
RXGXEAVSMGERYKKLTPVGMDDFYLVSIAN

SEQ ID NO: 40716 - protein, 41 aa, Artificial Sequence; identical to SEQ ID NO: 3488
  Cyclic GFR-binding peptide
  MOD_RES (2)..(4)..(35)..(36): Xaa is C or S

SEQ ID NO: 40717 - protein, 25 aa, Artificial Sequence
  Cyclic GFR-binding peptide
RVIMRYKKLVKPKRGVFYLISIANL

SEQ ID NO: 40718 - protein, 30 aa, Artificial Sequence
  Cyclic GFR-binding peptide
  MOD_RES (1)..(3): Xaa is C or S
XGXARVVMNYHYKLIVNSSDDKYLVSIPSL

SEQ ID NO: 40719 - protein, 28 aa, Artificial Sequence
  Cyclic GFR-binding peptide
  MOD_RES (1)..(1): Xaa is C or S
XGEVVMEYHYKLVVKDYEDKYLMSIPSL

SEQ ID NO: 40720 - protein, 40 aa, Artificial Sequence; identical to SEQ ID NO: 3490
  Cyclic GFR-binding peptide
  MOD_RES (1)..(3)..(34)..(35): Xaa is C or S

SEQ ID NO: 40721 - protein, 34 aa, Artificial Sequence; identical to SEQ ID NO: 3491
  Cyclic GFR-binding peptide
  MOD_RES (2)..(34): Xaa is C or S

SEQ ID NO: 40722 - protein, 30 aa, Artificial Sequence
  Cyclic GFR-binding peptide
  MOD_RES (30)..(30): Xaa is C or S
VVMNRYKKLIVNNSSDFYLVSIANLKTPAX

SEQ ID NO: 40723 - protein, 27 aa, Artificial Sequence
  Cyclic GFR-binding peptide
SKVVMYHYKLVKPTRGVKYLISIPSLD

SEQ ID NO: 40724 - protein, 35 aa, Artificial Sequence
  Cyclic GFR-binding peptide
  MOD_RES (1)..(3): Xaa is C or S
XKXALHDELTYHYKLFIPKKRVIEKYLVSIPSLQV

SEQ ID NO: 40725 - protein, 29 aa, Artificial Sequence
  Cyclic GFR-binding peptide
  MOD_RES (2)..(2): Xaa is C or S
GXSRVVMNRHKRLIVNSSDDYYLVSTASL

SEQ ID NO: 40726 - protein, 37 aa, Artificial Sequence; identical to SEQ ID NO: 3495
  Cyclic GFR-binding peptide
  MOD_RES (31)..(32): Xaa is C or S

SEQ ID NO: 40727 - protein, 29 aa, Artificial Sequence
  Cyclic GFR-binding peptide
  MOD_RES (28)..(29): Xaa is C or S
VMYHYKLVKPTRGVKYLISIPSLDQPVXX

SEQ ID NO: 40728 - protein, 41 aa, Artificial Sequence; identical to SEQ ID NO: 3497
  Cyclic GFR-binding peptide
  MOD_RES (2)..(4)..(37)..(38): Xaa is C or S

SEQ ID NO: 40729 - protein, 29 aa, Artificial Sequence
  Cyclic GFR-binding peptide
VVMDRYKKLVVKENEDFYLMSIANLETPV

SEQ ID NO: 40730 - protein, 36 aa, Artificial Sequence; identical to SEQ ID NO: 3500
  Cyclic GFR-binding peptide
  MOD_RES (2)..(4)..(35)..(36): Xaa is C or S

SEQ ID NO: 40731 - protein, 36 aa, Artificial Sequence; identical to SEQ ID NO: 3502
  Cyclic GFR-binding peptide
  MOD_RES (31)..(32): Xaa is C or S

SEQ ID NO: 40732 - protein, 31 aa, Artificial Sequence; identical to SEQ ID NO: 3501
  Cyclic GFR-binding peptide

SEQ ID NO: 40733 - protein, 22 aa, Artificial Sequence
  Cyclic GFR-binding peptide
MEYHYKLVVKDYEDKYLMSIPS

SEQ ID NO: 40734 - protein, 33 aa, Artificial Sequence
  Cyclic GFR-binding peptide
  MOD_RES (27)..(28): Xaa is C or S
MRYKKLIKPTKGIFYLISIANLDQSVXXPSASA

SEQ ID NO: 40735 - protein, 37 aa, Artificial Sequence
  Cyclic GFR-binding peptide
  MOD_RES (2)..(4): Xaa is C or S
EXKXALHDELTRYKKLFIPKKRVIEFYLVSIANLQVQ

SEQ ID NO: 40736 - protein, 33 aa, Artificial Sequence; identical to SEQ ID NO: 3503
  Cyclic GFR-binding peptide
  MOD_RES (32)..(33): Xaa is C or S

SEQ ID NO: 40737 - protein, 29 aa, Artificial Sequence
  Cyclic GFR-binding peptide
  MOD_RES (27)..(27): Xaa is C or S
NYHYKLIVNSSDDKYLVSIPSLKTPAXTP

SEQ ID NO: 40738 - protein, 29 aa, Artificial Sequence
  Cyclic GFR-binding peptide
  MOD_RES (27)..(28): Xaa is C or S
EQYNKLTPVGMDDLYLVSIASLKTPVXXA

SEQ ID NO: 40739 - protein, 32 aa, Artificial Sequence
  Cyclic GFR-binding peptide
  MOD_RES (30)..(31): Xaa is C or S
RVIMRYKKLVKPKRGVFYLISIANLAQPVXXP

SEQ ID NO: 40740 - protein, 23 aa, Artificial Sequence
  Cyclic GFR-binding peptide
DYHYKLVVKENEDKYLMSIPSLE

SEQ ID NO: 40741 - protein, 32 aa, Artificial Sequence
  Cyclic GFR-binding peptide
  MOD_RES (29)..(29): Xaa is C or S
VMNYHYKLIVNSSDDKYLVSIPSLKTPAXTPK

SEQ ID NO: 40742 - protein, 28 aa, Artificial Sequence
  Cyclic GFR-binding peptide
  MOD_RES (1)..(1): Xaa is C or S
XEAVSMGEQYNKLTPVGMDDLYLVSIAS

SEQ ID NO: 40743 - protein, 33 aa, Artificial Sequence
  Cyclic GFR-binding peptide
  MOD_RES (2)..(4): Xaa is C or S
HXGXAKVVMNQYNKLIVNNSSDLYLVSIASLKT

SEQ ID NO: 40744 - protein, 26 aa, Artificial Sequence
  Cyclic GFR-binding peptide
KVVMNRYKKLIVNNSSDFYLVSIANL

SEQ ID NO: 40745 - protein, 37 aa, Artificial Sequence; identical to SEQ ID NO: 3506
  Cyclic GFR-binding peptide
  MOD_RES (2)..(4)..(36)..(37): Xaa is C or S

SEQ ID NO: 40746 - protein, 31 aa, Artificial Sequence
  Cyclic GFR-binding peptide
AVSMGERYKKLTPVGMDDFYLVSIANLKTPV

SEQ ID NO: 40747 - protein, 34 aa, Artificial Sequence
  Cyclic GFR-binding peptide
  MOD_RES (28)..(29): Xaa is C or S
VMRHKRLVKPTRGVYYLISTASLDQPVXXPSASA

SEQ ID NO: 40748 - protein, 30 aa, Artificial Sequence
  Cyclic GFR-binding peptide
  MOD_RES (1)..(1): Xaa is C or S
XGEVVMERHKRLVVKDYEDYYLMSTASLET

SEQ ID NO: 40749 - protein, 38 aa, Artificial Sequence; identical to SEQ ID NO: 3508
  Cyclic GFR-binding peptide
  MOD_RES (2)..(4)..(36)..(37): Xaa is C or S

SEQ ID NO: 40750 - protein, 35 aa, Artificial Sequence
  Cyclic GFR-binding peptide
  MOD_RES (29)..(30): Xaa is C or S
VMNRHKRLIVNSSDDYYLVSTASLQTPAXXPKPVT

SEQ ID NO: 40751 - protein, 29 aa, Artificial Sequence
  Cyclic GFR-binding peptide
LTYHYKLFIPKKRVIEKYLVSIPSLQVQT

SEQ ID NO: 40752 - protein, 37 aa, Artificial Sequence; identical to SEQ ID NO: 3509
  Cyclic GFR-binding peptide
  MOD_RES (1)..(3): Xaa is C or S

SEQ ID NO: 40753 - protein, 36 aa, Artificial Sequence; identical to SEQ ID NO: 3510
  Cyclic GFR-binding peptide
  MOD_RES (31)..(32): Xaa is C or S

SEQ ID NO: 40754 - protein, 30 aa, Artificial Sequence
  Cyclic GFR-binding peptide
  MOD_RES (26)..(27): Xaa is C or S
YHYKLIVNNSSDKYLVSIPSLKTPAXXAKP

SEQ ID NO: 40755 - protein, 32 aa, Artificial Sequence
  Cyclic GFR-binding peptide
  MOD_RES (29)..(30): Xaa is C or S
VMEYHYKLVVKDYEDKYLMSIPSLETPVXXAK

SEQ ID NO: 40756 - protein, 31 aa, Artificial Sequence
  Cyclic GFR-binding peptide
  MOD_RES (28)..(28): Xaa is C or S
MNYHYKLIVNSSDDKYLVSIPSLKTPAXTPK

SEQ ID NO: 40757 - protein, 32 aa, Artificial Sequence
  Cyclic GFR-binding peptide
  MOD_RES (29)..(30): Xaa is C or S
MGEQYNKLTPVGMDDLYLVSIASLKTPVXXAK

SEQ ID NO: 40758 - protein, 35 aa, Artificial Sequence; identical to SEQ ID NO: 3511
  Cyclic GFR-binding peptide
  MOD_RES (2)..(4)..(35): Xaa is C or S

SEQ ID NO: 40759 - protein, 20 aa, Artificial Sequence
  Cyclic GFR-binding peptide
YHYKLIKPTKGIKYLISIPS

SEQ ID NO: 40760 - protein, 26 aa, Artificial Sequence
  Cyclic GFR-binding peptide
VVMNRYKKLIVNNSSDFYLVSIANLK

SEQ ID NO: 40761 - protein, 35 aa, Artificial Sequence; identical to SEQ ID NO: 3512
  Cyclic GFR-binding peptide
  MOD_RES (1)..(3)..(35): Xaa is C or S

SEQ ID NO: 40762 - protein, 31 aa, Artificial Sequence
  Cyclic GFR-binding peptide
  MOD_RES (27)..(28): Xaa is C or S
NQYNKLIVNNSSDLYLVSIASLKTPAXXAKP

SEQ ID NO: 40763 - protein, 35 aa, Artificial Sequence; identical to SEQ ID NO: 3513
  Cyclic GFR-binding peptide
  MOD_RES (2)..(4)..(35): Xaa is C or S

SEQ ID NO: 40764 - protein, 27 aa, Artificial Sequence
  Cyclic GFR-binding peptide
RVVMNYHYKLIVNSSDDKYLVSIPSLK

SEQ ID NO: 40765 - protein, 26 aa, Artificial Sequence
  Cyclic GFR-binding peptide
KVVMRYKKLVKPTRGVFYLISIANLD

SEQ ID NO: 40766 - protein, 39 aa, Artificial Sequence; identical to SEQ ID NO: 3515
  Cyclic GFR-binding peptide
  MOD_RES (1)..(3)..(34)..(35): Xaa is C or S

SEQ ID NO: 40767 - protein, 39 aa, Artificial Sequence; identical to SEQ ID NO: 3516
  Cyclic GFR-binding peptide
  MOD_RES (2)..(34)..(35): Xaa is C or S

SEQ ID NO: 40768 - protein, 29 aa, Artificial Sequence
  Cyclic GFR-binding peptide
  MOD_RES (2)..(2): Xaa is C or S
GXAKVVMNQYNKLIVNNSSDLYLVSIASL

SEQ ID NO: 40769 - protein, 39 aa, Artificial Sequence; identical to SEQ ID NO: 3518
  Cyclic GFR-binding peptide
  MOD_RES (2)..(33)..(34): Xaa is C or S

SEQ ID NO: 40770 - protein, 22 aa, Artificial Sequence
  Cyclic GFR-binding peptide
NRYKKLIVNNSSDFYLVSIANL

SEQ ID NO: 40771 - protein, 28 aa, Artificial Sequence
  Cyclic GFR-binding peptide
ARVVMNYHYKLIVNSSDDKYLVSIPSLQ

SEQ ID NO: 40772 - protein, 37 aa, Artificial Sequence
  Cyclic GFR-binding peptide
  MOD_RES (32)..(33): Xaa is C or S
AVSMGEQYNKLTPVGMDDLYLVSIASLKTPVXXAKGV

SEQ ID NO: 40773 - protein, 22 aa, Artificial Sequence
  Cyclic GFR-binding peptide
MNRYKKLIVNNSSDFYLVSIAN

SEQ ID NO: 40774 - protein, 29 aa, Artificial Sequence
  Cyclic GFR-binding peptide
AKVVMNRYKKLIVNNSSDFYLVSIANLKT

SEQ ID NO: 40775 - protein, 28 aa, Artificial Sequence
  Cyclic GFR-binding peptide
  MOD_RES (27)..(28): Xaa is C or S
NYHYKLIVNNSSDKYLVSIPSLKTPAXX

SEQ ID NO: 40776 - protein, 33 aa, Artificial Sequence
  Cyclic GFR-binding peptide
  MOD_RES (30)..(31): Xaa is C or S
KVIMQYNKLIKPTKGILYLISIASLDQSVXXPS

SEQ ID NO: 40777 - protein, 40 aa, Artificial Sequence; identical to SEQ ID NO: 3521
  Cyclic GFR-binding peptide
  MOD_RES (1)..(3)..(35): Xaa is C or S

SEQ ID NO: 40778 - protein, 32 aa, Artificial Sequence
  Cyclic GFR-binding peptide
  MOD_RES (27)..(28): Xaa is C or S
MRHKRLVKPKRGVYYLISTASLAQPVXXPAAS

SEQ ID NO: 40779 - protein, 27 aa, Artificial Sequence
  Cyclic GFR-binding peptide
SKVIMQYNKLIKPTKGILYLISIASLD

SEQ ID NO: 40780 - protein, 29 aa, Artificial Sequence
  Cyclic GFR-binding peptide
  MOD_RES (2)..(4): Xaa is C or S
SXKXSRVIMQYNKLVKPKRGVLYLISIAS

SEQ ID NO: 40781 - protein, 25 aa, Artificial Sequence
  Cyclic GFR-binding peptide
SMGERHKRLTPVGMDDYYLVSTASL

SEQ ID NO: 40782 - protein, 30 aa, Artificial Sequence
  Cyclic GFR-binding peptide
ELTQYNKLFIPKKRVIELYLVSIASLQVQT

SEQ ID NO: 40783 - protein, 40 aa, Artificial Sequence; identical to SEQ ID NO: 3522
  Cyclic GFR-binding peptide
  MOD_RES (2)..(4)..(36)..(37): Xaa is C or S

SEQ ID NO: 40784 - protein, 24 aa, Artificial Sequence
  Cyclic GFR-binding peptide
VMNRYKKLIVNNSSDFYLVSIANL

SEQ ID NO: 40785 - protein, 32 aa, Artificial Sequence
  Cyclic GFR-binding peptide
  MOD_RES (30)..(31): Xaa is C or S
KVVMRHKRLVKPTRGVYYLISTASLDQPVXXP

SEQ ID NO: 40786 - protein, 34 aa, Artificial Sequence
  Cyclic GFR-binding peptide
  MOD_RES (28)..(29): Xaa is C or S
GERYKKLTPVGMDDFYLVSIANLKTPVXXAKGVK

SEQ ID NO: 40787 - protein, 28 aa, Artificial Sequence
  Cyclic GFR-binding peptide
  MOD_RES (1)..(3): Xaa is C or S
XKXSKVIMQYNKLIKPTKGILYLISIAS

SEQ ID NO: 40788 - protein, 37 aa, Artificial Sequence; identical to SEQ ID NO: 3526
  Cyclic GFR-binding peptide
  MOD_RES (31)..(31): Xaa is C or S

SEQ ID NO: 40789 - protein, 33 aa, Artificial Sequence; identical to SEQ ID NO: 3527
  Cyclic GFR-binding peptide
  MOD_RES (1)..(1): Xaa is C or S

SEQ ID NO: 40790 - protein, 31 aa, Artificial Sequence
  Cyclic GFR-binding peptide
  MOD_RES (28)..(29): Xaa is C or S
MDYHYKLVVKENEDKYLMSIPSLETPVXXAK

SEQ ID NO: 40791 - protein, 33 aa, Artificial Sequence
  Cyclic GFR-binding peptide
  MOD_RES (27)..(27): Xaa is C or S
NRHKRLIVNSSDDYYLVSTASLKTPAXTPKTVH

SEQ ID NO: 40792 - protein, 40 aa, Artificial Sequence; identical to SEQ ID NO: 3529
  Cyclic GFR-binding peptide
  MOD_RES (1)..(34)..(35): Xaa is C or S

SEQ ID NO: 40793 - protein, 29 aa, Artificial Sequence
  Cyclic GFR-binding peptide
SKVVMQYNKLVKPTRGVLYLISIASLDQP

SEQ ID NO: 40794 - protein, 34 aa, Artificial Sequence
  Cyclic GFR-binding peptide
  MOD_RES (30)..(31): Xaa is C or S
VVMDRYKKLVVKENEDFYLMSIANLETPVXXAKP

SEQ ID NO: 40795 - protein, 45 aa, Artificial Sequence; identical to SEQ ID NO: 3531
  Cyclic GFR-binding peptide
  MOD_RES (2)..(4)..(41): Xaa is C or S

SEQ ID NO: 40796 - protein, 37 aa, Artificial Sequence; identical to SEQ ID NO: 3532
  Cyclic GFR-binding peptide
  MOD_RES (31)..(32): Xaa is C or S

SEQ ID NO: 40797 - protein, 25 aa, Artificial Sequence
  Cyclic GFR-binding peptide
NQYNKLIVNNSSDLYLVSIASLKTP

SEQ ID NO: 40798 - protein, 33 aa, Artificial Sequence
  Cyclic GFR-binding peptide
  MOD_RES (2)..(2): Xaa is C or S
KXALHDELTRHKRLFIPKKRVIEYYLVSTASLQ

SEQ ID NO: 40799 - protein, 22 aa, Artificial Sequence
  Cyclic GFR-binding peptide
IMRHKRLVKPKRGVYYLISTAS

SEQ ID NO: 40800 - protein, 32 aa, Artificial Sequence; identical to SEQ ID NO: 3533
  Cyclic GFR-binding peptide
  MOD_RES (2)..(2): Xaa is C or S

SEQ ID NO: 40801 - protein, 36 aa, Artificial Sequence
  Cyclic GFR-binding peptide
  MOD_RES (31)..(32): Xaa is C or S
VSMGERYKKLTPVGMDDFYLVSIANLKTPVXXAKGV

SEQ ID NO: 40802 - protein, 38 aa, Artificial Sequence
  Cyclic GFR-binding peptide
  MOD_RES (32)..(33): Xaa is C or S
AVSMGERYKKLTPVGMDDFYLVSIANLKTPVXXAKGVK

SEQ ID NO: 40803 - protein, 38 aa, Artificial Sequence; identical to SEQ ID NO: 3534
  Cyclic GFR-binding peptide
  MOD_RES (32)..(33): Xaa is C or S

SEQ ID NO: 40804 - protein, 34 aa, Artificial Sequence
  Cyclic GFR-binding peptide
  MOD_RES (28)..(29): Xaa is C or S
IMRHKRLIKPTKGIYYLISTASLDQSVXXPSASA

SEQ ID NO: 40805 - protein, 28 aa, Artificial Sequence
  Cyclic GFR-binding peptide
  MOD_RES (1)..(3): Xaa is C or S
XKXSRVIMQYNKLVKPKRGVLYLISIAS

SEQ ID NO: 40806 - protein, 27 aa, Artificial Sequence
  Cyclic GFR-binding peptide
  MOD_RES (26)..(27): Xaa is C or S
YHYKLVVKDYEDKYLMSIPSLETPVXX

SEQ ID NO: 40807 - protein, 26 aa, Artificial Sequence
  Cyclic GFR-binding peptide
DELTQYNKLFIPKKRVIELYLVSIAS

SEQ ID NO: 40808 - protein, 35 aa, Artificial Sequence
  Cyclic GFR-binding peptide
  MOD_RES (30)..(31): Xaa is C or S
RVIMQYNKLVKPKRGVLYLISIASLAQPVXXPAAS

SEQ ID NO: 40809 - protein, 30 aa, Artificial Sequence
  Cyclic GFR-binding peptide
  MOD_RES (26)..(27): Xaa is C or S
YHYKLVKPKRGVKYLISIPSLAQPVXXPAA

SEQ ID NO: 40810 - protein, 30 aa, Artificial Sequence
  Cyclic GFR-binding peptide
  MOD_RES (30)..(30): Xaa is C or S
VVMNYHYKLIVNNSSDKYLVSIPSLKTPAX

SEQ ID NO: 40811 - protein, 21 aa, Artificial Sequence
  Cyclic GFR-binding peptide
ERHKRLVVKDYEDYYLMSTAS

SEQ ID NO: 40812 - protein, 39 aa, Artificial Sequence; identical to SEQ ID NO: 3538
  Cyclic GFR-binding peptide
  MOD_RES (1)..(3)..(34)..(35): Xaa is C or S

SEQ ID NO: 40813 - protein, 36 aa, Artificial Sequence; identical to SEQ ID NO: 3539
  Cyclic GFR-binding peptide

SEQ ID NO: 40814 - protein, 34 aa, Artificial Sequence
  Cyclic GFR-binding peptide
  MOD_RES (31)..(31): Xaa is C or S
TRYKKLFIPKKRVIEFYLVSIANLQVQTPRXQVN

SEQ ID NO: 40815 - protein, 30 aa, Artificial Sequence
  Cyclic GFR-binding peptide
  MOD_RES (26)..(27): Xaa is C or S
QYNKLIVNNSSDLYLVSIASLKTPAXXAKP

SEQ ID NO: 40816 - protein, 34 aa, Artificial Sequence; identical to SEQ ID NO: 3541
  Cyclic GFR-binding peptide
  MOD_RES (1)..(3): Xaa is C or S

SEQ ID NO: 40817 - protein, 22 aa, Artificial Sequence
  Cyclic GFR-binding peptide
RYKKLVKPKRGVFYLISIANLA

SEQ ID NO: 40818 - protein, 25 aa, Artificial Sequence
  Cyclic GFR-binding peptide
NYHYKLIVNSSDDKYLVSIPSLQTP

SEQ ID NO: 40819 - protein, 32 aa, Artificial Sequence
  Cyclic GFR-binding peptide
  MOD_RES (28)..(28): Xaa is C or S
MNYHYKLIVNSSDDKYLVSIPSLKTPAXTPKT

SEQ ID NO: 40820 - protein, 21 aa, Artificial Sequence
  Cyclic GFR-binding peptide
MQYNKLVKPTRGVLYLISIAS

SEQ ID NO: 40821 - protein, 37 aa, Artificial Sequence; identical to SEQ ID NO: 3548
  Cyclic GFR-binding peptide
  MOD_RES (31)..(32): Xaa is C or S

SEQ ID NO: 40822 - protein, 35 aa, Artificial Sequence; identical to SEQ ID NO: 3549
  Cyclic GFR-binding peptide
  MOD_RES (2)..(4): Xaa is C or S

SEQ ID NO: 40823 - protein, 32 aa, Artificial Sequence
  Cyclic GFR-binding peptide
LHDELTYHYKLFIPKKRVIEKYLVSIPSLQVQ

SEQ ID NO: 40824 - protein, 34 aa, Artificial Sequence
  Cyclic GFR-binding peptide
  MOD_RES (2)..(4): Xaa is C or S
RXGXEAVSMGERHKRLTPVGMDDYYLVSTASLKT

SEQ ID NO: 40825 - protein, 25 aa, Artificial Sequence
  Cyclic GFR-binding peptide
SKVVMYHYKLVKPTRGVKYLISIPS

SEQ ID NO: 40826 - protein, 25 aa, Artificial Sequence
  Cyclic GFR-binding peptide
IMRHKRLVKPKRGVYYLISTASLAQ

SEQ ID NO: 40827 - protein, 28 aa, Artificial Sequence
  Cyclic GFR-binding peptide
  MOD_RES (1)..(1): Xaa is C or S
XSKVIMQYNKLIKPTKGILYLISIASLD

SEQ ID NO: 40828 - protein, 31 aa, Artificial Sequence
  Cyclic GFR-binding peptide
  MOD_RES (30)..(31): Xaa is C or S
VVMNQYNKLIVNSSDDLYLVSIASLKTPAXX

SEQ ID NO: 40829 - protein, 38 aa, Artificial Sequence; identical to SEQ ID NO: 3554
  Cyclic GFR-binding peptide
  MOD_RES (2)..(34)..(35): Xaa is C or S

SEQ ID NO: 40830 - protein, 32 aa, Artificial Sequence
  Cyclic GFR-binding peptide
  MOD_RES (30)..(31): Xaa is C or S
KVIMQYNKLIKPTKGILYLISIASLDQSVXXP

SEQ ID NO: 40831 - protein, 31 aa, Artificial Sequence
  Cyclic GFR-binding peptide
  MOD_RES (30)..(31): Xaa is C or S
KVIMQYNKLIKPTKGILYLISIASLDQSVXX

SEQ ID NO: 40832 - protein, 31 aa, Artificial Sequence
  Cyclic GFR-binding peptide
  MOD_RES (2)..(2): Xaa is C or S
KXSKVVMQYNKLVKPTRGVLYLISIASLDQP

SEQ ID NO: 40833 - protein, 28 aa, Artificial Sequence
  Cyclic GFR-binding peptide
ELTQYNKLFIPKKRVIELYLVSIASLQV

SEQ ID NO: 40834 - protein, 33 aa, Artificial Sequence
  Cyclic GFR-binding peptide
  MOD_RES (31)..(32): Xaa is C or S
VSMGERYKKLTPVGMDDFYLVSIANLKTPVXXA

SEQ ID NO: 40835 - protein, 29 aa, Artificial Sequence
  Cyclic GFR-binding peptide
SMGEQYNKLTPVGMDDLYLVSIASLKTPV

SEQ ID NO: 40836 - protein, 33 aa, Artificial Sequence
  Cyclic GFR-binding peptide
  MOD_RES (27)..(28): Xaa is C or S
MYHYKLVKPKRGVKYLISIPSLAQPVXXPAASA

SEQ ID NO: 40837 - protein, 36 aa, Artificial Sequence; identical to SEQ ID NO: 3558
  Cyclic GFR-binding peptide

SEQ ID NO: 40838 - protein, 31 aa, Artificial Sequence
  Cyclic GFR-binding peptide
  MOD_RES (1)..(3): Xaa is C or S
XGXGEVVMERHKRLVVKDYEDYYLMSTASLE

SEQ ID NO: 40839 - protein, 38 aa, Artificial Sequence; identical to SEQ ID NO: 3557
  Cyclic GFR-binding peptide
  MOD_RES (2)..(34)..(35): Xaa is C or S

SEQ ID NO: 40840 - protein, 23 aa, Artificial Sequence
  Cyclic GFR-binding peptide
GERYKKLTPVGMDDFYLVSIANL

SEQ ID NO: 40841 - protein, 40 aa, Artificial Sequence; identical to SEQ ID NO: 3559
  Cyclic GFR-binding peptide
  MOD_RES (1)..(3)..(35)..(36): Xaa is C or S

SEQ ID NO: 40842 - protein, 28 aa, Artificial Sequence
  Cyclic GFR-binding peptide
TYHYKLFIPKKRVIEKYLVSIPSLQVQT

SEQ ID NO: 40843 - protein, 31 aa, Artificial Sequence; identical to SEQ ID NO: 3560
  Cyclic GFR-binding peptide
  MOD_RES (1)..(1): Xaa is C or S

SEQ ID NO: 40844 - protein, 44 aa, Artificial Sequence; identical to SEQ ID NO: 3561
  Cyclic GFR-binding peptide
  MOD_RES (2)..(4)..(41): Xaa is C or S

SEQ ID NO: 40845 - protein, 31 aa, Artificial Sequence
  Cyclic GFR-binding peptide
  MOD_RES (28)..(29): Xaa is C or S
IMYHYKLIKPTKGIKYLISIPSLDQSVXXPS

SEQ ID NO: 40846 - protein, 34 aa, Artificial Sequence
  Cyclic GFR-binding peptide
  MOD_RES (32)..(32): Xaa is C or S
LTYHYKLFIPKKRVIEKYLVSIPSLQVQTPRXQV

SEQ ID NO: 40847 - protein, 35 aa, Artificial Sequence
  Cyclic GFR-binding peptide
  MOD_RES (32)..(33): Xaa is C or S
AVSMGEQYNKLTPVGMDDLYLVSIASLKTPVXXAK

SEQ ID NO: 40848 - protein, 30 aa, Artificial Sequence
  Cyclic GFR-binding peptide
  MOD_RES (27)..(28): Xaa is C or S
MYHYKLVKPKRGVKYLISIPSLAQPVXXPA

SEQ ID NO: 40849 - protein, 34 aa, Artificial Sequence; identical to SEQ ID NO: 3564
  Cyclic GFR-binding peptide
  MOD_RES (1)..(34): Xaa is C or S

SEQ ID NO: 40850 - protein, 33 aa, Artificial Sequence
  Cyclic GFR-binding peptide
  MOD_RES (1)..(1): Xaa is C or S
XALHDELTQYNKLFIPKKRVIELYLVSIASLQV

SEQ ID NO: 40851 - protein, 26 aa, Artificial Sequence
  Cyclic GFR-binding peptide
MNRYKKLIVNNSSDFYLVSIANLKTP

SEQ ID NO: 40852 - protein, 41 aa, Artificial Sequence; identical to SEQ ID NO: 3565
  Cyclic GFR-binding peptide
  MOD_RES (2)..(4)..(36)..(37): Xaa is C or S

SEQ ID NO: 40853 - protein, 32 aa, Artificial Sequence
  Cyclic GFR-binding peptide
  MOD_RES (27)..(28): Xaa is C or S
MYHYKLVKPTRGVKYLISIPSLDQPVXXPSAS

SEQ ID NO: 40854 - protein, 31 aa, Artificial Sequence
  Cyclic GFR-binding peptide
DELTRYKKLFIPKKRVIEFYLVSIANLQVQT

SEQ ID NO: 40855 - protein, 33 aa, Artificial Sequence
  Cyclic GFR-binding peptide
  MOD_RES (30)..(31): Xaa is C or S
VVMEYHYKLVVKDYEDKYLMSIPSLETPVXXAK

SEQ ID NO: 40856 - protein, 35 aa, Artificial Sequence; identical to SEQ ID NO: 3566
  Cyclic GFR-binding peptide
  MOD_RES (1)..(3)..(35): Xaa is C or S

SEQ ID NO: 40857 - protein, 30 aa, Artificial Sequence
  Cyclic GFR-binding peptide
  MOD_RES (1)..(1): Xaa is C or S
XSKVVMRHKRLVKPTRGVYYLISTASLDQP

SEQ ID NO: 40858 - protein, 35 aa, Artificial Sequence; identical to SEQ ID NO: 3568
  Cyclic GFR-binding peptide
  MOD_RES (1)..(3)..(35): Xaa is C or S

SEQ ID NO: 40859 - protein, 35 aa, Artificial Sequence
  Cyclic GFR-binding peptide
  MOD_RES (29)..(30): Xaa is C or S
VIMYHYKLVKPKRGVKYLISIPSLAQPVXXPAASA

SEQ ID NO: 40860 - protein, 34 aa, Artificial Sequence
  Cyclic GFR-binding peptide
  MOD_RES (28)..(29): Xaa is C or S
MERYKKLVVKDYEDFYLMSIANLETPVXXAKPIS

SEQ ID NO: 40861 - protein, 37 aa, Artificial Sequence; identical to SEQ ID NO: 3569
  Cyclic GFR-binding peptide
  MOD_RES (1)..(3)..(35)..(36): Xaa is C or S

SEQ ID NO: 40862 - protein, 30 aa, Artificial Sequence
  Cyclic GFR-binding peptide
  MOD_RES (27)..(28): Xaa is C or S
DRYKKLVVKENEDFYLMSIANLETPVXXAK

SEQ ID NO: 40863 - protein, 33 aa, Artificial Sequence; identical to SEQ ID NO: 3570
  Cyclic GFR-binding peptide
  MOD_RES (1)..(33): Xaa is C or S

SEQ ID NO: 40864 - protein, 31 aa, Artificial Sequence; identical to SEQ ID NO: 3572
  Cyclic GFR-binding peptide

SEQ ID NO: 40865 - protein, 26 aa, Artificial Sequence
  Cyclic GFR-binding peptide
SMGEQYNKLTPVGMDDLYLVSIASLK

SEQ ID NO: 40866 - protein, 34 aa, Artificial Sequence
  Cyclic GFR-binding peptide
  MOD_RES (2)..(4): Xaa is C or S
EXKXALHDELTQYNKLFIPKKRVIELYLVSIASL

SEQ ID NO: 40867 - protein, 40 aa, Artificial Sequence; identical to SEQ ID NO: 3575
  Cyclic GFR-binding peptide
  MOD_RES (2)..(4)..(35)..(36): Xaa is C or S

SEQ ID NO: 40868 - protein, 31 aa, Artificial Sequence
  Cyclic GFR-binding peptide
  MOD_RES (30)..(31): Xaa is C or S
VVMNQYNKLIVNSSDDLYLVSIASLQTPAXX

SEQ ID NO: 40869 - protein, 27 aa, Artificial Sequence
  Cyclic GFR-binding peptide
  MOD_RES (26)..(27): Xaa is C or S
QYNKLVKPTRGVLYLISIASLDQPVXX

SEQ ID NO: 40870 - protein, 25 aa, Artificial Sequence
  Cyclic GFR-binding peptide
MRYKKLIKPTKGIFYLISIANLDQS

SEQ ID NO: 40871 - protein, 35 aa, Artificial Sequence; identical to SEQ ID NO: 3578
  Cyclic GFR-binding peptide
  MOD_RES (2)..(4): Xaa is C or S

SEQ ID NO: 40872 - protein, 31 aa, Artificial Sequence
  Cyclic GFR-binding peptide
  MOD_RES (2)..(4): Xaa is C or S
RXGXGEVVMDRHKRLVVKENEDYYLMSTASL

SEQ ID NO: 40873 - protein, 29 aa, Artificial Sequence
  Cyclic GFR-binding peptide
  MOD_RES (1)..(1): Xaa is C or S
XARVVMNRHKRLIVNSSDDYYLVSTASLQ

SEQ ID NO: 40874 - protein, 42 aa, Artificial Sequence; identical to SEQ ID NO: 3579
  Cyclic GFR-binding peptide
  MOD_RES (2)..(4)..(41): Xaa is C or S

SEQ ID NO: 40875 - protein, 34 aa, Artificial Sequence
  Cyclic GFR-binding peptide
  MOD_RES (28)..(28): Xaa is C or S
MNQYNKLIVNSSDDLYLVSIASLKTPAXTPKTVH

SEQ ID NO: 40876 - protein, 35 aa, Artificial Sequence; identical to SEQ ID NO: 3582
  Cyclic GFR-binding peptide
  MOD_RES (1)..(32)..(33): Xaa is C or S

SEQ ID NO: 40877 - protein, 36 aa, Artificial Sequence; identical to SEQ ID NO: 3583
  Cyclic GFR-binding peptide
  MOD_RES (1)..(3)..(34)..(35): Xaa is C or S

SEQ ID NO: 40878 - protein, 27 aa, Artificial Sequence
  Cyclic GFR-binding peptide
HDELTQYNKLFIPKKRVIELYLVSIAS

SEQ ID NO: 40879 - protein, 33 aa, Artificial Sequence; identical to SEQ ID NO: 3585
  Cyclic GFR-binding peptide
  MOD_RES (2)..(2): Xaa is C or S

SEQ ID NO: 40880 - protein, 38 aa, Artificial Sequence; identical to SEQ ID NO: 3588
  Cyclic GFR-binding peptide
  MOD_RES (2)..(33)..(34): Xaa is C or S

SEQ ID NO: 40881 - protein, 22 aa, Artificial Sequence
  Cyclic GFR-binding peptide
MNQYNKLIVNNSSDLYLVSIAS

SEQ ID NO: 40882 - protein, 30 aa, Artificial Sequence
  Cyclic GFR-binding peptide
  MOD_RES (28)..(29): Xaa is C or S
IMYHYKLIKPTKGIKYLISIPSLDQSVXXP

SEQ ID NO: 40883 - protein, 29 aa, Artificial Sequence
  Cyclic GFR-binding peptide
RVVMNQYNKLIVNSSDDLYLVSIASLKTP

SEQ ID NO: 40884 - protein, 23 aa, Artificial Sequence
  Cyclic GFR-binding peptide
MNQYNKLIVNNSSDLYLVSIASL

SEQ ID NO: 40885 - protein, 40 aa, Artificial Sequence; identical to SEQ ID NO: 3589
  Cyclic GFR-binding peptide
  MOD_RES (1)..(3)..(35)..(36): Xaa is C or S

SEQ ID NO: 40886 - protein, 31 aa, Artificial Sequence
  Cyclic GFR-binding peptide
  MOD_RES (26)..(27): Xaa is C or S
YHYKLIVNSSDDKYLVSIPSLKTPAXXPKPV

SEQ ID NO: 40887 - protein, 38 aa, Artificial Sequence; identical to SEQ ID NO: 3591
  Cyclic GFR-binding peptide
  MOD_RES (2)..(4)..(36)..(37): Xaa is C or S

SEQ ID NO: 40888 - protein, 24 aa, Artificial Sequence
  Cyclic GFR-binding peptide
MRYKKLVKPTRGVFYLISIANLDQ

SEQ ID NO: 40889 - protein, 23 aa, Artificial Sequence
  Cyclic GFR-binding peptide
MQYNKLVKPTRGVLYLISIASLD

SEQ ID NO: 40890 - protein, 33 aa, Artificial Sequence
  Cyclic GFR-binding peptide
  MOD_RES (27)..(28): Xaa is C or S
NYHYKLIVNSSDDKYLVSIPSLKTPAXXPKPVY

SEQ ID NO: 40891 - protein, 29 aa, Artificial Sequence
  Cyclic GFR-binding peptide
  MOD_RES (27)..(28): Xaa is C or S
DRYKKLVVKENEDFYLMSIANLETPVXXA

SEQ ID NO: 40892 - protein, 30 aa, Artificial Sequence
  Cyclic GFR-binding peptide
  MOD_RES (1)..(3): Xaa is C or S
XKXSKVIMRYKKLIKPTKGIFYLISIANLD

SEQ ID NO: 40893 - protein, 29 aa, Artificial Sequence
  Cyclic GFR-binding peptide
  MOD_RES (29)..(29): Xaa is C or S
VMEYHYKLVVKDYEDKYLMSIPSLETPVX

SEQ ID NO: 40894 - protein, 39 aa, Artificial Sequence; identical to SEQ ID NO: 3593
  Cyclic GFR-binding peptide
  MOD_RES (1)..(33)..(34): Xaa is C or S

SEQ ID NO: 40895 - protein, 25 aa, Artificial Sequence
  Cyclic GFR-binding peptide
SKVVMQYNKLVKPTRGVLYLISIAS

SEQ ID NO: 40896 - protein, 35 aa, Artificial Sequence; identical to SEQ ID NO: 3595
  Cyclic GFR-binding peptide
  MOD_RES (2)..(33)..(34): Xaa is C or S

SEQ ID NO: 40897 - protein, 31 aa, Artificial Sequence; identical to SEQ ID NO: 3596
  Cyclic GFR-binding peptide

SEQ ID NO: 40898 - protein, 38 aa, Artificial Sequence; identical to SEQ ID NO: 3597
  Cyclic GFR-binding peptide
  MOD_RES (1)..(32)..(33): Xaa is C or S

SEQ ID NO: 40899 - protein, 34 aa, Artificial Sequence; identical to SEQ ID NO: 3598
  Cyclic GFR-binding peptide
  MOD_RES (1)..(3): Xaa is C or S

SEQ ID NO: 40900 - protein, 35 aa, Artificial Sequence; identical to SEQ ID NO: 3599
  Cyclic GFR-binding peptide
  MOD_RES (31)..(32): Xaa is C or S

SEQ ID NO: 40901 - protein, 35 aa, Artificial Sequence; identical to SEQ ID NO: 3600
  Cyclic GFR-binding peptide
  MOD_RES (2)..(33)..(34): Xaa is C or S

SEQ ID NO: 40902 - protein, 24 aa, Artificial Sequence
  Cyclic GFR-binding peptide
VVMYHYKLVKPTRGVKYLISIPSL

SEQ ID NO: 40903 - protein, 31 aa, Artificial Sequence
  Cyclic GFR-binding peptide
  MOD_RES (29)..(30): Xaa is C or S
MGEQYNKLTPVGMDDLYLVSIASLKTPVXXA

SEQ ID NO: 40904 - protein, 29 aa, Artificial Sequence
  Cyclic GFR-binding peptide
GEVVMDRHKRLVVKENEDYYLMSTASLET

SEQ ID NO: 40905 - protein, 30 aa, Artificial Sequence
  Cyclic GFR-binding peptide
  MOD_RES (1)..(3): Xaa is C or S
XKXSKVVMRYKKLVKPTRGVFYLISIANLD

SEQ ID NO: 40906 - protein, 36 aa, Artificial Sequence
  Cyclic GFR-binding peptide
  MOD_RES (30)..(31): Xaa is C or S
KVVMRHKRLVKPTRGVYYLISTASLDQPVXXPSASA

SEQ ID NO: 40907 - protein, 32 aa, Artificial Sequence
  Cyclic GFR-binding peptide
  MOD_RES (28)..(29): Xaa is C or S
MNQYNKLIVNSSDDLYLVSIASLQTPAXXPKP

SEQ ID NO: 40908 - protein, 25 aa, Artificial Sequence
  Cyclic GFR-binding peptide
TRHKRLFIPKKRVIEYYLVSTASLQ

SEQ ID NO: 40909 - protein, 27 aa, Artificial Sequence
  Cyclic GFR-binding peptide
RVIMRYKKLVKPKRGVFYLISIANLAQ

SEQ ID NO: 40910 - protein, 31 aa, Artificial Sequence
  Cyclic GFR-binding peptide
  MOD_RES (27)..(28): Xaa is C or S
NYHYKLIVNSSDDKYLVSIPSLQTPAXXPKP

SEQ ID NO: 40911 - protein, 28 aa, Artificial Sequence
  Cyclic GFR-binding peptide
VVMNRYKKLIVNNSSDFYLVSIANLKTP

SEQ ID NO: 40912 - protein, 32 aa, Artificial Sequence; identical to SEQ ID NO: 3603
  Cyclic GFR-binding peptide
  MOD_RES (1)..(1): Xaa is C or S

SEQ ID NO: 40913 - protein, 33 aa, Artificial Sequence
  Cyclic GFR-binding peptide
  MOD_RES (2)..(4): Xaa is C or S
RXGXGEVVMDRHKRLVVKENEDYYLMSTASLET

SEQ ID NO: 40914 - protein, 30 aa, Artificial Sequence
  Cyclic GFR-binding peptide
  MOD_RES (1)..(3): Xaa is C or S
XGXAKVVMNQYNKLIVNNSSDLYLVSIASL

SEQ ID NO: 40915 - protein, 35 aa, Artificial Sequence; identical to SEQ ID NO: 3605
  Cyclic GFR-binding peptide
  MOD_RES (2)..(34)..(35): Xaa is C or S

SEQ ID NO: 40916 - protein, 32 aa, Artificial Sequence
  Cyclic GFR-binding peptide
DELTRHKRLFIPKKRVIEYYLVSTASLQVQTP

SEQ ID NO: 40917 - protein, 34 aa, Artificial Sequence
  Cyclic GFR-binding peptide
  MOD_RES (33)..(33): Xaa is C or S
ELTYHYKLFIPKKRVIEKYLVSIPSLQVQTPRXQ

SEQ ID NO: 40918 - protein, 31 aa, Artificial Sequence
  Cyclic GFR-binding peptide
  MOD_RES (28)..(29): Xaa is C or S
MERYKKLVVKDYEDFYLMSIANLETPVXXAK

SEQ ID NO: 40919 - protein, 35 aa, Artificial Sequence
  Cyclic GFR-binding peptide
  MOD_RES (30)..(31): Xaa is C or S
KVIMRYKKLIKPTKGIFYLISIANLDQSVXXPSAS

SEQ ID NO: 40920 - protein, 25 aa, Artificial Sequence
  Cyclic GFR-binding peptide
RYKKLFIPKKRVIEFYLVSIANLQV

SEQ ID NO: 40921 - protein, 35 aa, Artificial Sequence
  Cyclic GFR-binding peptide
  MOD_RES (32)..(33): Xaa is C or S
AVSMGERYKKLTPVGMDDFYLVSIANLKTPVXXAK

SEQ ID NO: 40922 - protein, 25 aa, Artificial Sequence
  Cyclic GFR-binding peptide
MRYKKLVKPTRGVFYLISIANLDQP

SEQ ID NO: 40923 - protein, 29 aa, Artificial Sequence
  Cyclic GFR-binding peptide
RVVMNYHYKLIVNSSDDKYLVSIPSLKTP

SEQ ID NO: 40924 - protein, 29 aa, Artificial Sequence
  Cyclic GFR-binding peptide
  MOD_RES (1)..(1): Xaa is C or S
XSKVIMRYKKLIKPTKGIFYLISIANLDQ

SEQ ID NO: 40925 - protein, 36 aa, Artificial Sequence; identical to SEQ ID NO: 3609
  Cyclic GFR-binding peptide
  MOD_RES (32)..(33): Xaa is C or S

SEQ ID NO: 40926 - protein, 34 aa, Artificial Sequence
  Cyclic GFR-binding peptide
  MOD_RES (2)..(4): Xaa is C or S
RXGXGEVVMDRYKKLVVKENEDFYLMSIANLETP

SEQ ID NO: 40927 - protein, 31 aa, Artificial Sequence
  Cyclic GFR-binding peptide
  MOD_RES (2)..(4): Xaa is C or S
SXKXSKVVMRYKKLVKPTRGVFYLISIANLD

SEQ ID NO: 40928 - protein, 26 aa, Artificial Sequence
  Cyclic GFR-binding peptide
DYHYKLVVKENEDKYLMSIPSLETPV

SEQ ID NO: 40929 - protein, 38 aa, Artificial Sequence; identical to SEQ ID NO: 3610
  Cyclic GFR-binding peptide
  MOD_RES (1)..(33)..(34): Xaa is C or S

SEQ ID NO: 40930 - protein, 36 aa, Artificial Sequence
  Cyclic GFR-binding peptide
  MOD_RES (2)..(4): Xaa is C or S
EXKXALHDELTYHYKLFIPKKRVIEKYLVSIPSLQV

SEQ ID NO: 40931 - protein, 30 aa, Artificial Sequence
  Cyclic GFR-binding peptide
  MOD_RES (28)..(29): Xaa is C or S
VMQYNKLVKPTRGVLYLISIASLDQPVXXP

SEQ ID NO: 40932 - protein, 39 aa, Artificial Sequence; identical to SEQ ID NO: 3611
  Cyclic GFR-binding peptide
  MOD_RES (2)..(34): Xaa is C or S

SEQ ID NO: 40933 - protein, 39 aa, Artificial Sequence; identical to SEQ ID NO: 3612
  Cyclic GFR-binding peptide
  MOD_RES (35)..(35): Xaa is C or S

SEQ ID NO: 40934 - protein, 32 aa, Artificial Sequence
  Cyclic GFR-binding peptide
  MOD_RES (2)..(4): Xaa is C or S
SXKXSKVIMYHYKLIKPTKGIKYLISIPSLDQ

SEQ ID NO: 40935 - protein, 39 aa, Artificial Sequence; identical to SEQ ID NO: 3613
  Cyclic GFR-binding peptide
  MOD_RES (37)..(37): Xaa is C or S

SEQ ID NO: 40936 - protein, 32 aa, Artificial Sequence
  Cyclic GFR-binding peptide
  MOD_RES (2)..(2): Xaa is C or S
KXALHDELTRHKRLFIPKKRVIEYYLVSTASL

SEQ ID NO: 40937 - protein, 29 aa, Artificial Sequence
  Cyclic GFR-binding peptide
  MOD_RES (29)..(29): Xaa is C or S
VIMYHYKLIKPTKGIKYLISIPSLDQSVX

SEQ ID NO: 40938 - protein, 27 aa, Artificial Sequence
  Cyclic GFR-binding peptide
ELTRHKRLFIPKKRVIEYYLVSTASLQ

SEQ ID NO: 40939 - protein, 27 aa, Artificial Sequence
  Cyclic GFR-binding peptide
SKVVMRHKRLVKPTRGVYYLISTASLD

SEQ ID NO: 40940 - protein, 28 aa, Artificial Sequence
  Cyclic GFR-binding peptide
  MOD_RES (28)..(28): Xaa is C or S
MNYHYKLIVNSSDDKYLVSIPSLQTPAX

SEQ ID NO: 40941 - protein, 35 aa, Artificial Sequence; identical to SEQ ID NO: 3615
  Cyclic GFR-binding peptide
  MOD_RES (1)..(33): Xaa is C or S

SEQ ID NO: 40942 - protein, 26 aa, Artificial Sequence
  Cyclic GFR-binding peptide
ELTYHYKLFIPKKRVIEKYLVSIPSL

SEQ ID NO: 40943 - protein, 40 aa, Artificial Sequence; identical to SEQ ID NO: 3616
  Cyclic GFR-binding peptide
  MOD_RES (2)..(34)..(35): Xaa is C or S

SEQ ID NO: 40944 - protein, 34 aa, Artificial Sequence; identical to SEQ ID NO: 3617
  Cyclic GFR-binding peptide
  MOD_RES (2)..(33)..(34): Xaa is C or S

SEQ ID NO: 40945 - protein, 27 aa, Artificial Sequence
  Cyclic GFR-binding peptide
VMNYHYKLIVNSSDDKYLVSIPSLQTP

SEQ ID NO: 40946 - protein, 31 aa, Artificial Sequence
  Cyclic GFR-binding peptide
  MOD_RES (31)..(31): Xaa is C or S
TYHYKLFIPKKRVIEKYLVSIPSLQVQTPRX

SEQ ID NO: 40947 - protein, 29 aa, Artificial Sequence
  Cyclic GFR-binding peptide
  MOD_RES (26)..(27): Xaa is C or S
QYNKLTPVGMDDLYLVSIASLKTPVXXAK

SEQ ID NO: 40948 - protein, 28 aa, Artificial Sequence
  Cyclic GFR-binding peptide
SKVIMQYNKLIKPTKGILYLISIASLDQ

SEQ ID NO: 40949 - protein, 34 aa, Artificial Sequence
  Cyclic GFR-binding peptide
  MOD_RES (29)..(30): Xaa is C or S
VVMRYKKLVKPTRGVFYLISIANLDQPVXXPSAS

SEQ ID NO: 40950 - protein, 32 aa, Artificial Sequence
  Cyclic GFR-binding peptide
  MOD_RES (30)..(31): Xaa is C or S
SMGERHKRLTPVGMDDYYLVSTASLKTPVXXA

SEQ ID NO: 40951 - protein, 33 aa, Artificial Sequence
  Cyclic GFR-binding peptide
  MOD_RES (2)..(4): Xaa is C or S
HXGXAKVVMNRYKKLIVNNSSDFYLVSIANLKT

SEQ ID NO: 40952 - protein, 40 aa, Artificial Sequence; identical to SEQ ID NO: 3622
  Cyclic GFR-binding peptide
  MOD_RES (36)..(36): Xaa is C or S

SEQ ID NO: 40953 - protein, 26 aa, Artificial Sequence
  Cyclic GFR-binding peptide
  MOD_RES (1)..(1): Xaa is C or S
XSRVIMRHKRLVKPKRGVYYLISTAS

SEQ ID NO: 40954 - protein, 37 aa, Artificial Sequence; identical to SEQ ID NO: 3623
  Cyclic GFR-binding peptide
  MOD_RES (37)..(37): Xaa is C or S

SEQ ID NO: 40955 - protein, 29 aa, Artificial Sequence
  Cyclic GFR-binding peptide
  MOD_RES (26)..(27): Xaa is C or S
YHYKLIKPTKGIKYLISIPSLDQSVXXPS

SEQ ID NO: 40956 - protein, 22 aa, Artificial Sequence
  Cyclic GFR-binding peptide
MNRHKRLIVNSSDDYYLVSTAS

SEQ ID NO: 40957 - protein, 32 aa, Artificial Sequence
  Cyclic GFR-binding peptide
  MOD_RES (26)..(27): Xaa is C or S
RHKRLVKPTRGVYYLISTASLDQPVXXPSASA

SEQ ID NO: 40958 - protein, 33 aa, Artificial Sequence
  Cyclic GFR-binding peptide
  MOD_RES (27)..(27): Xaa is C or S
NQYNKLIVNSSDDLYLVSIASLKTPAXTPKTVH

SEQ ID NO: 40959 - protein, 32 aa, Artificial Sequence
  Cyclic GFR-binding peptide
  MOD_RES (32)..(32): Xaa is C or S
LTRYKKLFIPKKRVIEFYLVSIANLQVQTPRX

SEQ ID NO: 40960 - protein, 31 aa, Artificial Sequence; identical to SEQ ID NO: 3624
  Cyclic GFR-binding peptide
  MOD_RES (31)..(31): Xaa is C or S

SEQ ID NO: 40961 - protein, 25 aa, Artificial Sequence
  Cyclic GFR-binding peptide
MNQYNKLIVNSSDDLYLVSIASLKT

SEQ ID NO: 40962 - protein, 36 aa, Artificial Sequence; identical to SEQ ID NO: 3626
  Cyclic GFR-binding peptide
  MOD_RES (1)..(3)..(34)..(35): Xaa is C or S

SEQ ID NO: 40963 - protein, 27 aa, Artificial Sequence
  Cyclic GFR-binding peptide
AVSMGEQYNKLTPVGMDDLYLVSIASL

SEQ ID NO: 40964 - protein, 37 aa, Artificial Sequence; identical to SEQ ID NO: 3627
  Cyclic GFR-binding peptide
  MOD_RES (2)..(34)..(35): Xaa is C or S

SEQ ID NO: 40965 - protein, 30 aa, Artificial Sequence
  Cyclic GFR-binding peptide
LTRYKKLFIPKKRVIEFYLVSIANLQVQTP

SEQ ID NO: 40966 - protein, 35 aa, Artificial Sequence
  Cyclic GFR-binding peptide
  MOD_RES (30)..(31): Xaa is C or S
VVMNYHYKLIVNSSDDKYLVSIPSLQTPAXXPKPV

SEQ ID NO: 40967 - protein, 39 aa, Artificial Sequence; identical to SEQ ID NO: 3629
  Cyclic GFR-binding peptide
  MOD_RES (2)..(39): Xaa is C or S

SEQ ID NO: 40968 - protein, 30 aa, Artificial Sequence
  Cyclic GFR-binding peptide
  MOD_RES (1)..(3): Xaa is C or S
XGXSRVVMNYHYKLIVNSSDDKYLVSIPSL

SEQ ID NO: 40969 - protein, 34 aa, Artificial Sequence; identical to SEQ ID NO: 3633
  Cyclic GFR-binding peptide
  MOD_RES (31)..(32): Xaa is C or S

SEQ ID NO: 40970 - protein, 36 aa, Artificial Sequence
  Cyclic GFR-binding peptide
  MOD_RES (30)..(31): Xaa is C or S
KVIMRYKKLIKPTKGIFYLISIANLDQSVXXPSASA

SEQ ID NO: 40971 - protein, 30 aa, Artificial Sequence
  Cyclic GFR-binding peptide
  MOD_RES (28)..(29): Xaa is C or S
MNQYNKLIVNNSSDLYLVSIASLKTPAXXA

SEQ ID NO: 40972 - protein, 32 aa, Artificial Sequence
  Cyclic GFR-binding peptide
  MOD_RES (2)..(2): Xaa is C or S
GXSRVVMNYHYKLIVNSSDDKYLVSIPSLKTP

SEQ ID NO: 40973 - protein, 25 aa, Artificial Sequence
  Cyclic GFR-binding peptide
QYNKLVKPTRGVLYLISIASLDQPV

SEQ ID NO: 40974 - protein, 33 aa, Artificial Sequence
  Cyclic GFR-binding peptide
  MOD_RES (2)..(2): Xaa is C or S
GXEAVSMGERHKRLTPVGMDDYYLVSTASLKTP

SEQ ID NO: 40975 - protein, 33 aa, Artificial Sequence
  Cyclic GFR-binding peptide
  MOD_RES (27)..(28): Xaa is C or S
NRHKRLIVNSSDDYYLVSTASLQTPAXXPKPVT

SEQ ID NO: 40976 - protein, 28 aa, Artificial Sequence
  Cyclic GFR-binding peptide
  MOD_RES (1)..(1): Xaa is C or S
XARVVMNRHKRLIVNSSDDYYLVSTASL

SEQ ID NO: 40977 - protein, 31 aa, Artificial Sequence
  Cyclic GFR-binding peptide
  MOD_RES (29)..(30): Xaa is C or S
VMNRYKKLIVNNSSDFYLVSIANLKTPAXXA

SEQ ID NO: 40978 - protein, 32 aa, Artificial Sequence
  Cyclic GFR-binding peptide
  MOD_RES (26)..(27): Xaa is C or S
RYKKLIKPTKGIFYLISIANLDQSVXXPSASA

SEQ ID NO: 40979 - protein, 38 aa, Artificial Sequence; identical to SEQ ID NO: 3638
  Cyclic GFR-binding peptide
  MOD_RES (1)..(3)..(35)..(36): Xaa is C or S

SEQ ID NO: 40980 - protein, 33 aa, Artificial Sequence; identical to SEQ ID NO: 3639
  Cyclic GFR-binding peptide
  MOD_RES (2)..(33): Xaa is C or S

SEQ ID NO: 40981 - protein, 28 aa, Artificial Sequence
  Cyclic GFR-binding peptide
VVMERHKRLVVKDYEDYYLMSTASLETP

SEQ ID NO: 40982 - protein, 25 aa, Artificial Sequence
  Cyclic GFR-binding peptide
RYKKLVKPKRGVFYLISIANLAQPV

SEQ ID NO: 40983 - protein, 39 aa, Artificial Sequence; identical to SEQ ID NO: 3640
  Cyclic GFR-binding peptide
  MOD_RES (1)..(3)..(35)..(36): Xaa is C or S

SEQ ID NO: 40984 - protein, 37 aa, Artificial Sequence; identical to SEQ ID NO: 3641
  Cyclic GFR-binding peptide
  MOD_RES (1)..(1): Xaa is C or S

SEQ ID NO: 40985 - protein, 31 aa, Artificial Sequence
  Cyclic GFR-binding peptide
  MOD_RES (27)..(28): Xaa is C or S
ERYKKLTPVGMDDFYLVSIANLKTPVXXAKG

SEQ ID NO: 40986 - protein, 33 aa, Artificial Sequence
  Cyclic GFR-binding peptide
  MOD_RES (1)..(3): Xaa is C or S
XGXSRVVMNRHKRLIVNSSDDYYLVSTASLKTP

SEQ ID NO: 40987 - protein, 26 aa, Artificial Sequence
  Cyclic GFR-binding peptide
GEVVMERYKKLVVKDYEDFYLMSIAN

SEQ ID NO: 40988 - protein, 35 aa, Artificial Sequence; identical to SEQ ID NO: 3643
  Cyclic GFR-binding peptide
  MOD_RES (1)..(1): Xaa is C or S

SEQ ID NO: 40989 - protein, 28 aa, Artificial Sequence
  Cyclic GFR-binding peptide
  MOD_RES (26)..(27): Xaa is C or S
RHKRLVVKDYEDYYLMSTASLETPVXXA

SEQ ID NO: 40990 - protein, 31 aa, Artificial Sequence
  Cyclic GFR-binding peptide
FIPKKRVIEQYNKLFIPKKRVIELYLVSIAS

SEQ ID NO: 40991 - protein, 29 aa, Artificial Sequence
  Cyclic GFR-binding peptide
VVMNRYKKLIVNNSSDFYLVSIANLKTPA

SEQ ID NO: 40992 - protein, 30 aa, Artificial Sequence
  Cyclic GFR-binding peptide
  MOD_RES (1)..(3): Xaa is C or S
XKXSRVIMYHYKLVKPKRGVKYLISIPSLA

SEQ ID NO: 40993 - protein, 25 aa, Artificial Sequence
  Cyclic GFR-binding peptide
RYKKLIKPTKGIFYLISIANLDQSV

SEQ ID NO: 40994 - protein, 31 aa, Artificial Sequence
  Cyclic GFR-binding peptide
  MOD_RES (26)..(27): Xaa is C or S
RYKKLVVKENEDFYLMSIANLETPVXXAKPI

SEQ ID NO: 40995 - protein, 26 aa, Artificial Sequence
  Cyclic GFR-binding peptide
VMNYHYKLIVNNSSDKYLVSIPSLKT

SEQ ID NO: 40996 - protein, 39 aa, Artificial Sequence; identical to SEQ ID NO: 3646
  Cyclic GFR-binding peptide
  MOD_RES (36)..(36): Xaa is C or S

SEQ ID NO: 40997 - protein, 30 aa, Artificial Sequence
  Cyclic GFR-binding peptide
  MOD_RES (2)..(2): Xaa is C or S
GXSRVVMNQYNKLIVNSSDDLYLVSIASLK

SEQ ID NO: 40998 - protein, 37 aa, Artificial Sequence; identical to SEQ ID NO: 3647
  Cyclic GFR-binding peptide
  MOD_RES (1)..(34)..(35): Xaa is C or S

SEQ ID NO: 40999 - protein, 24 aa, Artificial Sequence
  Cyclic GFR-binding peptide
SMGERHKRLTPVGMDDYYLVSTAS

SEQ ID NO: 41000 - protein, 29 aa, Artificial Sequence
  Cyclic GFR-binding peptide
DELTRHKRLFIPKKRVIEYYLVSTASLQV

SEQ ID NO: 41001 - protein, 28 aa, Artificial Sequence
  Cyclic GFR-binding peptide
  MOD_RES (28)..(28): Xaa is C or S
GERHKRLTPVGMDDYYLVSTASLKTPVX

SEQ ID NO: 41002 - protein, 23 aa, Artificial Sequence
  Cyclic GFR-binding peptide
NRHKRLIVNSSDDYYLVSTASLQ

SEQ ID NO: 41003 - protein, 36 aa, Artificial Sequence; identical to SEQ ID NO: 3648
  Cyclic GFR-binding peptide
  MOD_RES (35)..(35): Xaa is C or S

SEQ ID NO: 41004 - protein, 23 aa, Artificial Sequence
  Cyclic GFR-binding peptide
NYHYKLIVNNSSDKYLVSIPSLK

SEQ ID NO: 41005 - protein, 36 aa, Artificial Sequence; identical to SEQ ID NO: 3649
  Cyclic GFR-binding peptide
  MOD_RES (31)..(32): Xaa is C or S

SEQ ID NO: 41006 - protein, 28 aa, Artificial Sequence
  Cyclic GFR-binding peptide
VMEYHYKLVVKDYEDKYLMSIPSLETPV

SEQ ID NO: 41007 - protein, 28 aa, Artificial Sequence
  Cyclic GFR-binding peptide
  MOD_RES (28)..(28): Xaa is C or S
MERYKKLVVKDYEDFYLMSIANLETPVX

SEQ ID NO: 41008 - protein, 39 aa, Artificial Sequence; identical to SEQ ID NO: 3650
  Cyclic GFR-binding peptide
  MOD_RES (1)..(3)..(35)..(36): Xaa is C or S

SEQ ID NO: 41009 - protein, 23 aa, Artificial Sequence
  Cyclic GFR-binding peptide
VIMRHKRLVKPKRGVYYLISTAS

SEQ ID NO: 41010 - protein, 20 aa, Artificial Sequence
  Cyclic GFR-binding peptide
RYKKLTPVGMDDFYLVSIAN

SEQ ID NO: 41011 - protein, 38 aa, Artificial Sequence; identical to SEQ ID NO: 3652
  Cyclic GFR-binding peptide
  MOD_RES (1)..(3)..(35)..(36): Xaa is C or S

SEQ ID NO: 41012 - protein, 32 aa, Artificial Sequence
  Cyclic GFR-binding peptide
  MOD_RES (29)..(30): Xaa is C or S
VVMRYKKLVKPTRGVFYLISIANLDQPVXXPS

SEQ ID NO: 41013 - protein, 38 aa, Artificial Sequence; identical to SEQ ID NO: 3654
  Cyclic GFR-binding peptide
  MOD_RES (1)..(3)..(34)..(35): Xaa is C or S

SEQ ID NO: 41014 - protein, 26 aa, Artificial Sequence
  Cyclic GFR-binding peptide
NRYKKLIVNNSSDFYLVSIANLKTPA

SEQ ID NO: 41015 - protein, 26 aa, Artificial Sequence
  Cyclic GFR-binding peptide
VMNRHKRLIVNSSDDYYLVSTASLKT

SEQ ID NO: 41016 - protein, 23 aa, Artificial Sequence
  Cyclic GFR-binding peptide
ERHKRLVVKDYEDYYLMSTASLE

SEQ ID NO: 41017 - protein, 37 aa, Artificial Sequence; identical to SEQ ID NO: 3657
  Cyclic GFR-binding peptide
  MOD_RES (2)..(4)..(35)..(36): Xaa is C or S

SEQ ID NO: 41018 - protein, 27 aa, Artificial Sequence
  Cyclic GFR-binding peptide
QYNKLFIPKKRVIELYLVSIASLQVQT

SEQ ID NO: 41019 - protein, 40 aa, Artificial Sequence; identical to SEQ ID NO: 3661
  Cyclic GFR-binding peptide
  MOD_RES (1)..(3)..(35)..(36): Xaa is C or S

SEQ ID NO: 41020 - protein, 42 aa, Artificial Sequence; identical to SEQ ID NO: 3662
  Cyclic GFR-binding peptide
  MOD_RES (2)..(4)..(36)..(37): Xaa is C or S

SEQ ID NO: 41021 - protein, 26 aa, Artificial Sequence
  Cyclic GFR-binding peptide
MRHKRLVKPTRGVYYLISTASLDQPV

SEQ ID NO: 41022 - protein, 37 aa, Artificial Sequence; identical to SEQ ID NO: 3664
  Cyclic GFR-binding peptide
  MOD_RES (32)..(33): Xaa is C or S

SEQ ID NO: 41023 - protein, 34 aa, Artificial Sequence; identical to SEQ ID NO: 3663
  Cyclic GFR-binding peptide
  MOD_RES (1)..(3): Xaa is C or S

SEQ ID NO: 41024 - protein, 28 aa, Artificial Sequence
  Cyclic GFR-binding peptide
VMNQYNKLIVNSSDDLYLVSIASLQTPA

SEQ ID NO: 41025 - protein, 34 aa, Artificial Sequence
  Cyclic GFR-binding peptide
  MOD_RES (29)..(30): Xaa is C or S
VMERHKRLVVKDYEDYYLMSTASLETPVXXAKPI

SEQ ID NO: 41026 - protein, 30 aa, Artificial Sequence
  Cyclic GFR-binding peptide
  MOD_RES (2)..(2): Xaa is C or S
GXAKVVMNRYKKLIVNNSSDFYLVSIANLK

SEQ ID NO: 41027 - protein, 28 aa, Artificial Sequence
  Cyclic GFR-binding peptide
DELTRHKRLFIPKKRVIEYYLVSTASLQ

SEQ ID NO: 41028 - protein, 30 aa, Artificial Sequence
  Cyclic GFR-binding peptide
  MOD_RES (30)..(30): Xaa is C or S
SMGEQYNKLTPVGMDDLYLVSIASLKTPVX

SEQ ID NO: 41029 - protein, 36 aa, Artificial Sequence; identical to SEQ ID NO: 3665
  Cyclic GFR-binding peptide
  MOD_RES (2)..(34)..(35): Xaa is C or S

SEQ ID NO: 41030 - protein, 27 aa, Artificial Sequence
  Cyclic GFR-binding peptide
GERYKKLTPVGMDDFYLVSIANLKTPV

SEQ ID NO: 41031 - protein, 37 aa, Artificial Sequence; identical to SEQ ID NO: 3667
  Cyclic GFR-binding peptide
  MOD_RES (2)..(4)..(35)..(36): Xaa is C or S

SEQ ID NO: 41032 - protein, 34 aa, Artificial Sequence
  Cyclic GFR-binding peptide
  MOD_RES (30)..(31): Xaa is C or S
VVMNRYKKLIVNNSSDFYLVSIANLKTPAXXAKP

SEQ ID NO: 41033 - protein, 36 aa, Artificial Sequence; identical to SEQ ID NO: 3668
  Cyclic GFR-binding peptide
  MOD_RES (31)..(32): Xaa is C or S

SEQ ID NO: 41034 - protein, 31 aa, Artificial Sequence
  Cyclic GFR-binding peptide
  MOD_RES (28)..(29): Xaa is C or S
GERHKRLTPVGMDDYYLVSTASLKTPVXXAK

SEQ ID NO: 41035 - protein, 29 aa, Artificial Sequence
  Cyclic GFR-binding peptide
SKVIMYHYKLIKPTKGIKYLISIPSLDQS

SEQ ID NO: 41036 - protein, 31 aa, Artificial Sequence
  Cyclic GFR-binding peptide
  MOD_RES (28)..(29): Xaa is C or S
VMYHYKLVKPTRGVKYLISIPSLDQPVXXPS

SEQ ID NO: 41037 - protein, 33 aa, Artificial Sequence
  Cyclic GFR-binding peptide
  MOD_RES (1)..(3): Xaa is C or S
XGXARVVMNRHKRLIVNSSDDYYLVSTASLQTP

SEQ ID NO: 41038 - protein, 20 aa, Artificial Sequence
  Cyclic GFR-binding peptide
RYKKLVKPKRGVFYLISIAN

SEQ ID NO: 41039 - protein, 34 aa, Artificial Sequence; identical to SEQ ID NO: 3669
  Cyclic GFR-binding peptide
  MOD_RES (1)..(33)..(34): Xaa is C or S

SEQ ID NO: 41040 - protein, 35 aa, Artificial Sequence
  Cyclic GFR-binding peptide
  MOD_RES (29)..(30): Xaa is C or S
MGERYKKLTPVGMDDFYLVSIANLKTPVXXAKGVK

SEQ ID NO: 41041 - protein, 32 aa, Artificial Sequence
  Cyclic GFR-binding peptide
  MOD_RES (2)..(2): Xaa is C or S
KXALHDELTQYNKLFIPKKRVIELYLVSIASL

SEQ ID NO: 41042 - protein, 32 aa, Artificial Sequence; identical to SEQ ID NO: 3670
  Cyclic GFR-binding peptide
  MOD_RES (1)..(1): Xaa is C or S

SEQ ID NO: 41043 - protein, 32 aa, Artificial Sequence
  Cyclic GFR-binding peptide
  MOD_RES (2)..(4): Xaa is C or S
SXKXSRVIMQYNKLVKPKRGVLYLISIASLAQ

SEQ ID NO: 41044 - protein, 35 aa, Artificial Sequence; identical to SEQ ID NO: 3674
  Cyclic GFR-binding peptide
  MOD_RES (31)..(32): Xaa is C or S

SEQ ID NO: 41045 - protein, 33 aa, Artificial Sequence; identical to SEQ ID NO: 3677
  Cyclic GFR-binding peptide
  MOD_RES (31)..(32): Xaa is C or S

SEQ ID NO: 41046 - protein, 40 aa, Artificial Sequence; identical to SEQ ID NO: 3678
  Cyclic GFR-binding peptide
  MOD_RES (2)..(35)..(36): Xaa is C or S

SEQ ID NO: 41047 - protein, 24 aa, Artificial Sequence
  Cyclic GFR-binding peptide
VMNQYNKLIVNSSDDLYLVSIASL

SEQ ID NO: 41048 - protein, 35 aa, Artificial Sequence; identical to SEQ ID NO: 3680
  Cyclic GFR-binding peptide
  MOD_RES (1)..(34)..(35): Xaa is C or S

SEQ ID NO: 41049 - protein, 34 aa, Artificial Sequence; identical to SEQ ID NO: 3683
  Cyclic GFR-binding peptide
  MOD_RES (2)..(33)..(34): Xaa is C or S

SEQ ID NO: 41050 - protein, 33 aa, Artificial Sequence
  Cyclic GFR-binding peptide
  MOD_RES (2)..(2): Xaa is C or S
KXALHDELTQYNKLFIPKKRVIELYLVSIASLQ

SEQ ID NO: 41051 - protein, 33 aa, Artificial Sequence
  Cyclic GFR-binding peptide
  MOD_RES (2)..(4): Xaa is C or S
EXKXALHDELTQYNKLFIPKKRVIELYLVSIAS

SEQ ID NO: 41052 - protein, 37 aa, Artificial Sequence; identical to SEQ ID NO: 3685
  Cyclic GFR-binding peptide
  MOD_RES (2)..(4)..(36): Xaa is C or S

SEQ ID NO: 41053 - protein, 36 aa, Artificial Sequence; identical to SEQ ID NO: 3686
  Cyclic GFR-binding peptide
  MOD_RES (31)..(32): Xaa is C or S

SEQ ID NO: 41054 - protein, 32 aa, Artificial Sequence
  Cyclic GFR-binding peptide
  MOD_RES (2)..(2): Xaa is C or S
GXARVVMNYHYKLIVNSSDDKYLVSIPSLQTP

SEQ ID NO: 41055 - protein, 28 aa, Artificial Sequence
  Cyclic GFR-binding peptide
VIMYHYKLIKPTKGIKYLISIPSLDQSV

SEQ ID NO: 41056 - protein, 29 aa, Artificial Sequence
  Cyclic GFR-binding peptide
  MOD_RES (28)..(29): Xaa is C or S
MDYHYKLVVKENEDKYLMSIPSLETPVXX

SEQ ID NO: 41057 - protein, 28 aa, Artificial Sequence
  Cyclic GFR-binding peptide
  MOD_RES (1)..(1): Xaa is C or S
XSKVVMYHYKLVKPTRGVKYLISIPSLD

SEQ ID NO: 41058 - protein, 27 aa, Artificial Sequence
  Cyclic GFR-binding peptide
  MOD_RES (2)..(2): Xaa is C or S
KXSKVVMQYNKLVKPTRGVLYLISIAS

SEQ ID NO: 41059 - protein, 28 aa, Artificial Sequence
  Cyclic GFR-binding peptide
  MOD_RES (2)..(2): Xaa is C or S
GXGEVVMERHKRLVVKDYEDYYLMSTAS

SEQ ID NO: 41060 - protein, 24 aa, Artificial Sequence
  Cyclic GFR-binding peptide
MNYHYKLIVNSSDDKYLVSIPSLQ

SEQ ID NO: 41061 - protein, 35 aa, Artificial Sequence; identical to SEQ ID NO: 3689
  Cyclic GFR-binding peptide
  MOD_RES (1)..(33)..(34): Xaa is C or S

SEQ ID NO: 41062 - protein, 27 aa, Artificial Sequence
  Cyclic GFR-binding peptide
VVMNQYNKLIVNSSDDLYLVSIASLQT

SEQ ID NO: 41063 - protein, 31 aa, Artificial Sequence
  Cyclic GFR-binding peptide
  MOD_RES (26)..(27): Xaa is C or S
YHYKLVKPKRGVKYLISIPSLAQPVXXPAAS

SEQ ID NO: 41064 - protein, 35 aa, Artificial Sequence; identical to SEQ ID NO: 3691
  Cyclic GFR-binding peptide
  MOD_RES (1)..(33)..(34): Xaa is C or S

SEQ ID NO: 41065 - protein, 29 aa, Artificial Sequence
  Cyclic GFR-binding peptide
VVMNYHYKLIVNNSSDKYLVSIPSLKTPA

SEQ ID NO: 41066 - protein, 23 aa, Artificial Sequence
  Cyclic GFR-binding peptide
MGERYKKLTPVGMDDFYLVSIAN

SEQ ID NO: 41067 - protein, 35 aa, Artificial Sequence; identical to SEQ ID NO: 3692
  Cyclic GFR-binding peptide
  MOD_RES (1)..(3)..(34)..(35): Xaa is C or S

SEQ ID NO: 41068 - protein, 29 aa, Artificial Sequence
  Cyclic GFR-binding peptide
SKVIMQYNKLIKPTKGILYLISIASLDQS

SEQ ID NO: 41069 - protein, 27 aa, Artificial Sequence
  Cyclic GFR-binding peptide
VIMRHKRLVKPKRGVYYLISTASLAQP

SEQ ID NO: 41070 - protein, 32 aa, Artificial Sequence
  Cyclic GFR-binding peptide
  MOD_RES (1)..(1): Xaa is C or S
XALHDELTRYKKLFIPKKRVIEFYLVSIANLQ

SEQ ID NO: 41071 - protein, 32 aa, Artificial Sequence; identical to SEQ ID NO: 3695
  Cyclic GFR-binding peptide
  MOD_RES (31)..(32): Xaa is C or S

SEQ ID NO: 41072 - protein, 43 aa, Artificial Sequence; identical to SEQ ID NO: 3698
  Cyclic GFR-binding peptide
  MOD_RES (1)..(3)..(40): Xaa is C or S

SEQ ID NO: 41073 - protein, 33 aa, Artificial Sequence; identical to SEQ ID NO: 3699
  Cyclic GFR-binding peptide
  MOD_RES (1)..(32)..(33): Xaa is C or S

SEQ ID NO: 41074 - protein, 27 aa, Artificial Sequence
  Cyclic GFR-binding peptide
AVSMGERYKKLTPVGMDDFYLVSIANL

SEQ ID NO: 41075 - protein, 38 aa, Artificial Sequence; identical to SEQ ID NO: 3700
  Cyclic GFR-binding peptide
  MOD_RES (1)..(33): Xaa is C or S

SEQ ID NO: 41076 - protein, 20 aa, Artificial Sequence
  Cyclic GFR-binding peptide
RYKKLIVNNSSDFYLVSIAN

SEQ ID NO: 41077 - protein, 35 aa, Artificial Sequence; identical to SEQ ID NO: 3702
  Cyclic GFR-binding peptide
  MOD_RES (1)..(3)..(34)..(35): Xaa is C or S

SEQ ID NO: 41078 - protein, 27 aa, Artificial Sequence
  Cyclic GFR-binding peptide
MNYHYKLIVNSSDDKYLVSIPSLQTPA

SEQ ID NO: 41079 - protein, 30 aa, Artificial Sequence
  Cyclic GFR-binding peptide
  MOD_RES (27)..(28): Xaa is C or S
DYHYKLVVKENEDKYLMSIPSLETPVXXAK

SEQ ID NO: 41080 - protein, 25 aa, Artificial Sequence
  Cyclic GFR-binding peptide
VVMRYKKLVKPTRGVFYLISIANLD

SEQ ID NO: 41081 - protein, 32 aa, Artificial Sequence
  Cyclic GFR-binding peptide
  MOD_RES (26)..(27): Xaa is C or S
QYNKLIVNNSSDLYLVSIASLKTPAXXAKPVA

SEQ ID NO: 41082 - protein, 25 aa, Artificial Sequence
  Cyclic GFR-binding peptide
MYHYKLIKPTKGIKYLISIPSLDQS

SEQ ID NO: 41083 - protein, 27 aa, Artificial Sequence
  Cyclic GFR-binding peptide
VVMEYHYKLVVKDYEDKYLMSIPSLET

SEQ ID NO: 41084 - protein, 44 aa, Artificial Sequence; identical to SEQ ID NO: 3704
  Cyclic GFR-binding peptide
  MOD_RES (1)..(3)..(40): Xaa is C or S

SEQ ID NO: 41085 - protein, 27 aa, Artificial Sequence
  Cyclic GFR-binding peptide
RHKRLFIPKKRVIEYYLVSTASLQVQT

SEQ ID NO: 41086 - protein, 23 aa, Artificial Sequence
  Cyclic GFR-binding peptide
MNRYKKLIVNNSSDFYLVSIANL

SEQ ID NO: 41087 - protein, 30 aa, Artificial Sequence
  Cyclic GFR-binding peptide
  MOD_RES (1)..(3): Xaa is C or S
XKXSRVIMRHKRLVKPKRGVYYLISTASLA

SEQ ID NO: 41088 - protein, 27 aa, Artificial Sequence
  Cyclic GFR-binding peptide
  MOD_RES (1)..(1): Xaa is C or S
XARVVMNYHYKLIVNSSDDKYLVSIPS

SEQ ID NO: 41089 - protein, 33 aa, Artificial Sequence
  Cyclic GFR-binding peptide
  MOD_RES (32)..(33): Xaa is C or S
AVSMGERHKRLTPVGMDDYYLVSTASLKTPVXX

SEQ ID NO: 41090 - protein, 24 aa, Artificial Sequence
  Cyclic GFR-binding peptide
VIMQYNKLVKPKRGVLYLISIASL

SEQ ID NO: 41091 - protein, 41 aa, Artificial Sequence; identical to SEQ ID NO: 3706
  Cyclic GFR-binding peptide
  MOD_RES (1)..(3)..(35): Xaa is C or S

SEQ ID NO: 41092 - protein, 34 aa, Artificial Sequence; identical to SEQ ID NO: 3708
  Cyclic GFR-binding peptide
  MOD_RES (1)..(3): Xaa is C or S

SEQ ID NO: 41093 - protein, 22 aa, Artificial Sequence
  Cyclic GFR-binding peptide
QYNKLVKPTRGVLYLISIASLD

SEQ ID NO: 41094 - protein, 28 aa, Artificial Sequence
  Cyclic GFR-binding peptide
KVIMYHYKLIKPTKGIKYLISIPSLDQS

SEQ ID NO: 41095 - protein, 34 aa, Artificial Sequence; identical to SEQ ID NO: 3710
  Cyclic GFR-binding peptide
  MOD_RES (31)..(32): Xaa is C or S

SEQ ID NO: 41096 - protein, 38 aa, Artificial Sequence; identical to SEQ ID NO: 3711
  Cyclic GFR-binding peptide
  MOD_RES (2)..(2): Xaa is C or S

SEQ ID NO: 41097 - protein, 39 aa, Artificial Sequence; identical to SEQ ID NO: 3712
  Cyclic GFR-binding peptide
  MOD_RES (2)..(4)..(36)..(37): Xaa is C or S

SEQ ID NO: 41098 - protein, 25 aa, Artificial Sequence
  Cyclic GFR-binding peptide
QYNKLTPVGMDDLYLVSIASLKTPV

SEQ ID NO: 41099 - protein, 28 aa, Artificial Sequence
  Cyclic GFR-binding peptide
LTRYKKLFIPKKRVIEFYLVSIANLQVQ

SEQ ID NO: 41100 - protein, 27 aa, Artificial Sequence
  Cyclic GFR-binding peptide
SRVVMNQYNKLIVNSSDDLYLVSIASL

SEQ ID NO: 41101 - protein, 28 aa, Artificial Sequence
  Cyclic GFR-binding peptide
  MOD_RES (28)..(28): Xaa is C or S
MNYHYKLIVNSSDDKYLVSIPSLKTPAX

SEQ ID NO: 41102 - protein, 41 aa, Artificial Sequence; identical to SEQ ID NO: 3715
  Cyclic GFR-binding peptide
  MOD_RES (1)..(3)..(35)..(36): Xaa is C or S

SEQ ID NO: 41103 - protein, 28 aa, Artificial Sequence
  Cyclic GFR-binding peptide
SRVIMYHYKLVKPKRGVKYLISIPSLAQ

SEQ ID NO: 41104 - protein, 26 aa, Artificial Sequence
  Cyclic GFR-binding peptide
NYHYKLIVNSSDDKYLVSIPSLKTPA

SEQ ID NO: 41105 - protein, 26 aa, Artificial Sequence
  Cyclic GFR-binding peptide
  MOD_RES (26)..(26): Xaa is C or S
RHKRLVVKDYEDYYLMSTASLETPVX

SEQ ID NO: 41106 - protein, 37 aa, Artificial Sequence; identical to SEQ ID NO: 3717
  Cyclic GFR-binding peptide
  MOD_RES (37)..(37): Xaa is C or S

SEQ ID NO: 41107 - protein, 39 aa, Artificial Sequence; identical to SEQ ID NO: 3720
  Cyclic GFR-binding peptide
  MOD_RES (36)..(36): Xaa is C or S

SEQ ID NO: 41108 - protein, 37 aa, Artificial Sequence; identical to SEQ ID NO: 3719
  Cyclic GFR-binding peptide
  MOD_RES (2)..(34)..(35): Xaa is C or S

SEQ ID NO: 41109 - protein, 27 aa, Artificial Sequence
  Cyclic GFR-binding peptide
ARVVMNQYNKLIVNSSDDLYLVSIASL

SEQ ID NO: 41110 - protein, 25 aa, Artificial Sequence
  Cyclic GFR-binding peptide
RHKRLVKPTRGVYYLISTASLDQPV

SEQ ID NO: 41111 - protein, 33 aa, Artificial Sequence
  Cyclic GFR-binding peptide
  MOD_RES (28)..(29): Xaa is C or S
MDRYKKLVVKENEDFYLMSIANLETPVXXAKPI

SEQ ID NO: 41112 - protein, 26 aa, Artificial Sequence
  Cyclic GFR-binding peptide
MEYHYKLVVKDYEDKYLMSIPSLETP

SEQ ID NO: 41113 - protein, 34 aa, Artificial Sequence
  Cyclic GFR-binding peptide
  MOD_RES (28)..(29): Xaa is C or S
MNRYKKLIVNNSSDFYLVSIANLKTPAXXAKPVA

SEQ ID NO: 41114 - protein, 26 aa, Artificial Sequence
  Cyclic GFR-binding peptide
  MOD_RES (1)..(1): Xaa is C or S
XSKVVMQYNKLVKPTRGVLYLISIAS

SEQ ID NO: 41115 - protein, 31 aa, Artificial Sequence
  Cyclic GFR-binding peptide
  MOD_RES (28)..(28): Xaa is C or S
MNQYNKLIVNSSDDLYLVSIASLKTPAXTPK

SEQ ID NO: 41116 - protein, 33 aa, Artificial Sequence
  Cyclic GFR-binding peptide
  MOD_RES (27)..(28): Xaa is C or S
DYHYKLVVKENEDKYLMSIPSLETPVXXAKPIK

SEQ ID NO: 41117 - protein, 26 aa, Artificial Sequence
  Cyclic GFR-binding peptide
ERHKRLVVKDYEDYYLMSTASLETPV

SEQ ID NO: 41118 - protein, 29 aa, Artificial Sequence
  Cyclic GFR-binding peptide
  MOD_RES (2)..(4): Xaa is C or S
SXKXSKVIMRYKKLIKPTKGIFYLISIAN

SEQ ID NO: 41119 - protein, 23 aa, Artificial Sequence
  Cyclic GFR-binding peptide
MEYHYKLVVKDYEDKYLMSIPSL

SEQ ID NO: 41120 - protein, 34 aa, Artificial Sequence; identical to SEQ ID NO: 3729
  Cyclic GFR-binding peptide
  MOD_RES (31)..(32): Xaa is C or S

SEQ ID NO: 41121 - protein, 42 aa, Artificial Sequence; identical to SEQ ID NO: 3730
  Cyclic GFR-binding peptide
  MOD_RES (1)..(3)..(40): Xaa is C or S

SEQ ID NO: 41122 - protein, 30 aa, Artificial Sequence
  Cyclic GFR-binding peptide
  MOD_RES (29)..(30): Xaa is C or S
VVMRHKRLVKPTRGVYYLISTASLDQPVXX

SEQ ID NO: 41123 - protein, 36 aa, Artificial Sequence; identical to SEQ ID NO: 3731
  Cyclic GFR-binding peptide
  MOD_RES (1)..(3)..(34)..(35): Xaa is C or S

SEQ ID NO: 41124 - protein, 34 aa, Artificial Sequence; identical to SEQ ID NO: 3732
  Cyclic GFR-binding peptide
  MOD_RES (1)..(3): Xaa is C or S

SEQ ID NO: 41125 - protein, 29 aa, Artificial Sequence
  Cyclic GFR-binding peptide
ELTRHKRLFIPKKRVIEYYLVSTASLQVQ

SEQ ID NO: 41126 - protein, 26 aa, Artificial Sequence
  Cyclic GFR-binding peptide
  MOD_RES (26)..(26): Xaa is C or S
YHYKLVVKDYEDKYLMSIPSLETPVX

SEQ ID NO: 41127 - protein, 29 aa, Artificial Sequence
  Cyclic GFR-binding peptide
AVSMGERYKKLTPVGMDDFYLVSIANLKT

SEQ ID NO: 41128 - protein, 32 aa, Artificial Sequence; identical to SEQ ID NO: 3739
  Cyclic GFR-binding peptide
  MOD_RES (32)..(32): Xaa is C or S

SEQ ID NO: 41129 - protein, 31 aa, Artificial Sequence
  Cyclic GFR-binding peptide
  MOD_RES (29)..(30): Xaa is C or S
VIMRYKKLIKPTKGIFYLISIANLDQSVXXP

SEQ ID NO: 41130 - protein, 23 aa, Artificial Sequence
  Cyclic GFR-binding peptide
DRYKKLVVKENEDFYLMSIANLE

SEQ ID NO: 41131 - protein, 33 aa, Artificial Sequence; identical to SEQ ID NO: 3741
  Cyclic GFR-binding peptide
  MOD_RES (31)..(32): Xaa is C or S

SEQ ID NO: 41132 - protein, 25 aa, Artificial Sequence
  Cyclic GFR-binding peptide
VIMQYNKLVKPKRGVLYLISIASLA

SEQ ID NO: 41133 - protein, 30 aa, Artificial Sequence
  Cyclic GFR-binding peptide
  MOD_RES (26)..(27): Xaa is C or S
QYNKLTPVGMDDLYLVSIASLKTPVXXAKG

SEQ ID NO: 41134 - protein, 33 aa, Artificial Sequence
  Cyclic GFR-binding peptide
  MOD_RES (2)..(4): Xaa is C or S
SXKXSKVVMQYNKLVKPTRGVLYLISIASLDQP

SEQ ID NO: 41135 - protein, 38 aa, Artificial Sequence; identical to SEQ ID NO: 3743
  Cyclic GFR-binding peptide
  MOD_RES (2)..(4)..(35)..(36): Xaa is C or S

SEQ ID NO: 41136 - protein, 30 aa, Artificial Sequence
  Cyclic GFR-binding peptide
  MOD_RES (28)..(29): Xaa is C or S
VMYHYKLVKPTRGVKYLISIPSLDQPVXXP

SEQ ID NO: 41137 - protein, 36 aa, Artificial Sequence; identical to SEQ ID NO: 3744
  Cyclic GFR-binding peptide
  MOD_RES (1)..(1): Xaa is C or S

SEQ ID NO: 41138 - protein, 26 aa, Artificial Sequence
  Cyclic GFR-binding peptide
  MOD_RES (1)..(1): Xaa is C or S
XSRVIMYHYKLVKPKRGVKYLISIPS

SEQ ID NO: 41139 - protein, 39 aa, Artificial Sequence; identical to SEQ ID NO: 3745
  Cyclic GFR-binding peptide
  MOD_RES (2)..(4)..(37)..(38): Xaa is C or S

SEQ ID NO: 41140 - protein, 30 aa, Artificial Sequence
  Cyclic GFR-binding peptide
  MOD_RES (1)..(1): Xaa is C or S
XSRVVMNQYNKLIVNSSDDLYLVSIASLKT

SEQ ID NO: 41141 - protein, 32 aa, Artificial Sequence
  Cyclic GFR-binding peptide
  MOD_RES (30)..(31): Xaa is C or S
RVIMYHYKLVKPKRGVKYLISIPSLAQPVXXP

SEQ ID NO: 41142 - protein, 32 aa, Artificial Sequence; identical to SEQ ID NO: 3746
  Cyclic GFR-binding peptide
  MOD_RES (32)..(32): Xaa is C or S

SEQ ID NO: 41143 - protein, 32 aa, Artificial Sequence
  Cyclic GFR-binding peptide
  MOD_RES (29)..(30): Xaa is C or S
VMNQYNKLIVNSSDDLYLVSIASLKTPAXXPK

SEQ ID NO: 41144 - protein, 37 aa, Artificial Sequence
  Cyclic GFR-binding peptide
  MOD_RES (33)..(33): Xaa is C or S
ELTYHYKLFIPKKRVIEKYLVSIPSLQVQTPRXQVNR

SEQ ID NO: 41145 - protein, 28 aa, Artificial Sequence
  Cyclic GFR-binding peptide
  MOD_RES (1)..(3): Xaa is C or S
XKXSKVVMQYNKLVKPTRGVLYLISIAS

SEQ ID NO: 41146 - protein, 30 aa, Artificial Sequence
  Cyclic GFR-binding peptide
  MOD_RES (1)..(1): Xaa is C or S
XSKVIMRHKRLIKPTKGIYYLISTASLDQS

SEQ ID NO: 41147 - protein, 38 aa, Artificial Sequence; identical to SEQ ID NO: 3749
  Cyclic GFR-binding peptide
  MOD_RES (1)..(3)..(34)..(35): Xaa is C or S

SEQ ID NO: 41148 - protein, 41 aa, Artificial Sequence; identical to SEQ ID NO: 3750
  Cyclic GFR-binding peptide
  MOD_RES (2)..(4)..(35)..(36): Xaa is C or S

SEQ ID NO: 41149 - protein, 30 aa, Artificial Sequence
  Cyclic GFR-binding peptide
  MOD_RES (1)..(3): Xaa is C or S
XKXSKVVMYHYKLVKPTRGVKYLISIPSLD

SEQ ID NO: 41150 - protein, 39 aa, Artificial Sequence; identical to SEQ ID NO: 3752
  Cyclic GFR-binding peptide
  MOD_RES (1)..(3)..(35)..(36): Xaa is C or S

SEQ ID NO: 41151 - protein, 29 aa, Artificial Sequence
  Cyclic GFR-binding peptide
GEVVMEYHYKLVVKDYEDKYLMSIPSLET

SEQ ID NO: 41152 - protein, 25 aa, Artificial Sequence
  Cyclic GFR-binding peptide
RYKKLTPVGMDDFYLVSIANLKTPV

SEQ ID NO: 41153 - protein, 32 aa, Artificial Sequence
  Cyclic GFR-binding peptide
  MOD_RES (26)..(27): Xaa is C or S
QYNKLIKPTKGILYLISIASLDQSVXXPSASA

SEQ ID NO: 41154 - protein, 24 aa, Artificial Sequence
  Cyclic GFR-binding peptide
MNQYNKLIVNSSDDLYLVSIASLQ

SEQ ID NO: 41155 - protein, 37 aa, Artificial Sequence; identical to SEQ ID NO: 3754
  Cyclic GFR-binding peptide
  MOD_RES (1)..(3)..(34)..(35): Xaa is C or S

SEQ ID NO: 41156 - protein, 36 aa, Artificial Sequence; identical to SEQ ID NO: 3755
  Cyclic GFR-binding peptide
  MOD_RES (1)..(32)..(33): Xaa is C or S

SEQ ID NO: 41157 - protein, 42 aa, Artificial Sequence; identical to SEQ ID NO: 3756
  Cyclic GFR-binding peptide
  MOD_RES (1)..(3)..(36)..(37): Xaa is C or S

SEQ ID NO: 41158 - protein, 29 aa, Artificial Sequence
  Cyclic GFR-binding peptide
  MOD_RES (2)..(2): Xaa is C or S
KXSKVVMQYNKLVKPTRGVLYLISIASLD

SEQ ID NO: 41159 - protein, 29 aa, Artificial Sequence
  Cyclic GFR-binding peptide
  MOD_RES (1)..(3): Xaa is C or S
XGXGEVVMDRHKRLVVKENEDYYLMSTAS

SEQ ID NO: 41160 - protein, 32 aa, Artificial Sequence
  Cyclic GFR-binding peptide
  MOD_RES (29)..(29): Xaa is C or S
VMNQYNKLIVNSSDDLYLVSIASLKTPAXTPK

SEQ ID NO: 41161 - protein, 30 aa, Artificial Sequence
  Cyclic GFR-binding peptide
  MOD_RES (30)..(30): Xaa is C or S
KVVMRYKKLVKPTRGVFYLISIANLDQPVX

SEQ ID NO: 41162 - protein, 25 aa, Artificial Sequence
  Cyclic GFR-binding peptide
VVMDRHKRLVVKENEDYYLMSTASL

SEQ ID NO: 41163 - protein, 21 aa, Artificial Sequence
  Cyclic GFR-binding peptide
DYHYKLVVKENEDKYLMSIPS

SEQ ID NO: 41164 - protein, 27 aa, Artificial Sequence
  Cyclic GFR-binding peptide
MNQYNKLIVNSSDDLYLVSIASLKTPA

SEQ ID NO: 41165 - protein, 33 aa, Artificial Sequence
  Cyclic GFR-binding peptide
  MOD_RES (1)..(3): Xaa is C or S
XGXEAVSMGERYKKLTPVGMDDFYLVSIANLKT

SEQ ID NO: 41166 - protein, 30 aa, Artificial Sequence
  Cyclic GFR-binding peptide
  MOD_RES (29)..(30): Xaa is C or S
VMNYHYKLIVNNSSDKYLVSIPSLKTPAXX

SEQ ID NO: 41167 - protein, 36 aa, Artificial Sequence; identical to SEQ ID NO: 3759
  Cyclic GFR-binding peptide
  MOD_RES (2)..(34)..(35): Xaa is C or S

SEQ ID NO: 41168 - protein, 38 aa, Artificial Sequence; identical to SEQ ID NO: 3760
  Cyclic GFR-binding peptide
  MOD_RES (2)..(33)..(34): Xaa is C or S

SEQ ID NO: 41169 - protein, 38 aa, Artificial Sequence; identical to SEQ ID NO: 3762
  Cyclic GFR-binding peptide
  MOD_RES (1)..(3)..(35)..(36): Xaa is C or S

SEQ ID NO: 41170 - protein, 31 aa, Artificial Sequence
  Cyclic GFR-binding peptide
DELTYHYKLFIPKKRVIEKYLVSIPSLQVQT

SEQ ID NO: 41171 - protein, 33 aa, Artificial Sequence
  Cyclic GFR-binding peptide
  MOD_RES (32)..(32): Xaa is C or S
LTRHKRLFIPKKRVIEYYLVSTASLQVQTPRXQ

SEQ ID NO: 41172 - protein, 26 aa, Artificial Sequence
  Cyclic GFR-binding peptide
MERYKKLVVKDYEDFYLMSIANLETP

SEQ ID NO: 41173 - protein, 28 aa, Artificial Sequence
  Cyclic GFR-binding peptide
VIMRYKKLVKPKRGVFYLISIANLAQPV

SEQ ID NO: 41174 - protein, 37 aa, Artificial Sequence; identical to SEQ ID NO: 3764
  Cyclic GFR-binding peptide
  MOD_RES (1)..(32)..(33): Xaa is C or S

SEQ ID NO: 41175 - protein, 29 aa, Artificial Sequence
  Cyclic GFR-binding peptide
  MOD_RES (29)..(29): Xaa is C or S
VIMRYKKLVKPKRGVFYLISIANLAQPVX

SEQ ID NO: 41176 - protein, 38 aa, Artificial Sequence; identical to SEQ ID NO: 3766
  Cyclic GFR-binding peptide
  MOD_RES (1)..(38): Xaa is C or S

SEQ ID NO: 41177 - protein, 37 aa, Artificial Sequence; identical to SEQ ID NO: 3768
  Cyclic GFR-binding peptide
  MOD_RES (1)..(3)..(34)..(35): Xaa is C or S

SEQ ID NO: 41178 - protein, 24 aa, Artificial Sequence
  Cyclic GFR-binding peptide
ERYKKLVVKDYEDFYLMSIANLET

SEQ ID NO: 41179 - protein, 30 aa, Artificial Sequence
  Cyclic GFR-binding peptide
  MOD_RES (1)..(3): Xaa is C or S
XKXSKVVMRHKRLVKPTRGVYYLISTASLD

SEQ ID NO: 41180 - protein, 40 aa, Artificial Sequence; identical to SEQ ID NO: 3770
  Cyclic GFR-binding peptide
  MOD_RES (37)..(37): Xaa is C or S

SEQ ID NO: 41181 - protein, 31 aa, Artificial Sequence
  Cyclic GFR-binding peptide
DELTQYNKLFIPKKRVIELYLVSIASLQVQT

SEQ ID NO: 41182 - protein, 23 aa, Artificial Sequence
  Cyclic GFR-binding peptide
NRYKKLIVNNSSDFYLVSIANLK

SEQ ID NO: 41183 - protein, 31 aa, Artificial Sequence
  Cyclic GFR-binding peptide
  MOD_RES (1)..(3): Xaa is C or S
XGXAKVVMNYHYKLIVNNSSDKYLVSIPSLK

SEQ ID NO: 41184 - protein, 33 aa, Artificial Sequence
  Cyclic GFR-binding peptide
  MOD_RES (1)..(3): Xaa is C or S
XGXAKVVMNRYKKLIVNNSSDFYLVSIANLKTP

SEQ ID NO: 41185 - protein, 32 aa, Artificial Sequence; identical to SEQ ID NO: 3772
  Cyclic GFR-binding peptide
  MOD_RES (1)..(1): Xaa is C or S

SEQ ID NO: 41186 - protein, 34 aa, Artificial Sequence; identical to SEQ ID NO: 3773
  Cyclic GFR-binding peptide
  MOD_RES (2)..(34): Xaa is C or S

SEQ ID NO: 41187 - protein, 27 aa, Artificial Sequence
  Cyclic GFR-binding peptide
VKPKRGVQYNKLVKPKRGVLYLISIAS

SEQ ID NO: 41188 - protein, 25 aa, Artificial Sequence
  Cyclic GFR-binding peptide
EVVMDYHYKLVVKENEDKYLMSIPS

SEQ ID NO: 41189 - protein, 29 aa, Artificial Sequence
  Cyclic GFR-binding peptide
  MOD_RES (29)..(29): Xaa is C or S
VMDYHYKLVVKENEDKYLMSIPSLETPVX

SEQ ID NO: 41190 - protein, 26 aa, Artificial Sequence
  Cyclic GFR-binding peptide
GEQYNKLTPVGMDDLYLVSIASLKTP

SEQ ID NO: 41191 - protein, 39 aa, Artificial Sequence; identical to SEQ ID NO: 3778
  Cyclic GFR-binding peptide
  MOD_RES (1)..(34)..(35): Xaa is C or S

SEQ ID NO: 41192 - protein, 28 aa, Artificial Sequence
  Cyclic GFR-binding peptide
  MOD_RES (28)..(28): Xaa is C or S
MNQYNKLIVNSSDDLYLVSIASLQTPAX

SEQ ID NO: 41193 - protein, 32 aa, Artificial Sequence
  Cyclic GFR-binding peptide
  MOD_RES (2)..(2): Xaa is C or S
GXEAVSMGERYKKLTPVGMDDFYLVSIANLKT

SEQ ID NO: 41194 - protein, 27 aa, Artificial Sequence
  Cyclic GFR-binding peptide
  MOD_RES (26)..(26): Xaa is C or S
QYNKLIVNSSDDLYLVSIASLKTPAXT

SEQ ID NO: 41195 - protein, 30 aa, Artificial Sequence
  Cyclic GFR-binding peptide
  MOD_RES (1)..(1): Xaa is C or S
XSKVVMYHYKLVKPTRGVKYLISIPSLDQP

SEQ ID NO: 41196 - protein, 33 aa, Artificial Sequence
  Cyclic GFR-binding peptide
  MOD_RES (2)..(4): Xaa is C or S
SXKXSKVIMYHYKLIKPTKGIKYLISIPSLDQS

SEQ ID NO: 41197 - protein, 36 aa, Artificial Sequence; identical to SEQ ID NO: 3781
  Cyclic GFR-binding peptide
  MOD_RES (36)..(36): Xaa is C or S

SEQ ID NO: 41198 - protein, 27 aa, Artificial Sequence
  Cyclic GFR-binding peptide
TPVGMDDQYNKLTPVGMDDLYLVSIAS

SEQ ID NO: 41199 - protein, 33 aa, Artificial Sequence; identical to SEQ ID NO: 3782
  Cyclic GFR-binding peptide
  MOD_RES (1)..(32)..(33): Xaa is C or S

SEQ ID NO: 41200 - protein, 35 aa, Artificial Sequence
  Cyclic GFR-binding peptide
  MOD_RES (30)..(31): Xaa is C or S
VVMEYHYKLVVKDYEDKYLMSIPSLETPVXXAKPI

SEQ ID NO: 41201 - protein, 37 aa, Artificial Sequence; identical to SEQ ID NO: 3783
  Cyclic GFR-binding peptide
  MOD_RES (1)..(3)..(36)..(37): Xaa is C or S

SEQ ID NO: 41202 - protein, 24 aa, Artificial Sequence
  Cyclic GFR-binding peptide
QYNKLIVNSSDDLYLVSIASLQTP

SEQ ID NO: 41203 - protein, 28 aa, Artificial Sequence
  Cyclic GFR-binding peptide
EAVSMGEQYNKLTPVGMDDLYLVSIASL

SEQ ID NO: 41204 - protein, 29 aa, Artificial Sequence
  Cyclic GFR-binding peptide
  MOD_RES (26)..(27): Xaa is C or S
RHKRLTPVGMDDYYLVSTASLKTPVXXAK

SEQ ID NO: 41205 - protein, 36 aa, Artificial Sequence
  Cyclic GFR-binding peptide
  MOD_RES (30)..(31): Xaa is C or S
VVMNQYNKLIVNSSDDLYLVSIASLQTPAXXPKPVT

SEQ ID NO: 41206 - protein, 41 aa, Artificial Sequence; identical to SEQ ID NO: 3787
  Cyclic GFR-binding peptide
  MOD_RES (2)..(39): Xaa is C or S

SEQ ID NO: 41207 - protein, 32 aa, Artificial Sequence
  Cyclic GFR-binding peptide
  MOD_RES (2)..(4): Xaa is C or S
HXGXARVVMNYHYKLIVNSSDDKYLVSIPSLQ

SEQ ID NO: 41208 - protein, 30 aa, Artificial Sequence
  Cyclic GFR-binding peptide
  MOD_RES (28)..(29): Xaa is C or S
IMQYNKLIKPTKGILYLISIASLDQSVXXP

SEQ ID NO: 41209 - protein, 32 aa, Artificial Sequence
  Cyclic GFR-binding peptide
  MOD_RES (27)..(28): Xaa is C or S
EYHYKLVVKDYEDKYLMSIPSLETPVXXAKPI

SEQ ID NO: 41210 - protein, 34 aa, Artificial Sequence
  Cyclic GFR-binding peptide
  MOD_RES (29)..(30): Xaa is C or S
VMDRYKKLVVKENEDFYLMSIANLETPVXXAKPI

SEQ ID NO: 41211 - protein, 38 aa, Artificial Sequence; identical to SEQ ID NO: 3794
  Cyclic GFR-binding peptide
  MOD_RES (2)..(4)..(36)..(37): Xaa is C or S

SEQ ID NO: 41212 - protein, 35 aa, Artificial Sequence; identical to SEQ ID NO: 3796
  Cyclic GFR-binding peptide
  MOD_RES (2)..(34): Xaa is C or S

SEQ ID NO: 41213 - protein, 34 aa, Artificial Sequence; identical to SEQ ID NO: 3797
  Cyclic GFR-binding peptide
  MOD_RES (31)..(31): Xaa is C or S

SEQ ID NO: 41214 - protein, 28 aa, Artificial Sequence
  Cyclic GFR-binding peptide
  MOD_RES (27)..(28): Xaa is C or S
NRHKRLIVNSSDDYYLVSTASLQTPAXX

SEQ ID NO: 41215 - protein, 26 aa, Artificial Sequence
  Cyclic GFR-binding peptide
EQYNKLTPVGMDDLYLVSIASLKTPV

SEQ ID NO: 41216 - protein, 32 aa, Artificial Sequence; identical to SEQ ID NO: 3800
  Cyclic GFR-binding peptide
  MOD_RES (2)..(2): Xaa is C or S

SEQ ID NO: 41217 - protein, 45 aa, Artificial Sequence; identical to SEQ ID NO: 3801
  Cyclic GFR-binding peptide
  MOD_RES (2)..(4)..(41): Xaa is C or S

SEQ ID NO: 41218 - protein, 23 aa, Artificial Sequence
  Cyclic GFR-binding peptide
GEQYNKLTPVGMDDLYLVSIASL

SEQ ID NO: 41219 - protein, 35 aa, Artificial Sequence; identical to SEQ ID NO: 3802
  Cyclic GFR-binding peptide
  MOD_RES (1)..(32)..(33): Xaa is C or S

SEQ ID NO: 41220 - protein, 31 aa, Artificial Sequence
  Cyclic GFR-binding peptide
ELTQYNKLFIPKKRVIELYLVSIASLQVQTP

SEQ ID NO: 41221 - protein, 22 aa, Artificial Sequence
  Cyclic GFR-binding peptide
YHYKLVVKENEDKYLMSIPSLE

SEQ ID NO: 41222 - protein, 31 aa, Artificial Sequence
  Cyclic GFR-binding peptide
  MOD_RES (1)..(3): Xaa is C or S
XGXSRVVMNQYNKLIVNSSDDLYLVSIASLK

SEQ ID NO: 41223 - protein, 35 aa, Artificial Sequence; identical to SEQ ID NO: 3803
  Cyclic GFR-binding peptide
  MOD_RES (32)..(33): Xaa is C or S

SEQ ID NO: 41224 - protein, 35 aa, Artificial Sequence; identical to SEQ ID NO: 3807
  Cyclic GFR-binding peptide
  MOD_RES (32)..(33): Xaa is C or S

SEQ ID NO: 41225 - protein, 33 aa, Artificial Sequence
  Cyclic GFR-binding peptide
  MOD_RES (27)..(28): Xaa is C or S
ERYKKLVVKDYEDFYLMSIANLETPVXXAKPIS

SEQ ID NO: 41226 - protein, 33 aa, Artificial Sequence; identical to SEQ ID NO: 3808
  Cyclic GFR-binding peptide

SEQ ID NO: 41227 - protein, 30 aa, Artificial Sequence
  Cyclic GFR-binding peptide
  MOD_RES (26)..(27): Xaa is C or S
QYNKLIVNSSDDLYLVSIASLQTPAXXPKP

SEQ ID NO: 41228 - protein, 30 aa, Artificial Sequence
  Cyclic GFR-binding peptide
  MOD_RES (2)..(2): Xaa is C or S
GXGEVVMERHKRLVVKDYEDYYLMSTASLE

SEQ ID NO: 41229 - protein, 29 aa, Artificial Sequence
  Cyclic GFR-binding peptide
  MOD_RES (28)..(29): Xaa is C or S
GERHKRLTPVGMDDYYLVSTASLKTPVXX

SEQ ID NO: 41230 - protein, 43 aa, Artificial Sequence; identical to SEQ ID NO: 3811
  Cyclic GFR-binding peptide
  MOD_RES (2)..(4)..(41): Xaa is C or S

SEQ ID NO: 41231 - protein, 26 aa, Artificial Sequence
  Cyclic GFR-binding peptide
VSMGERYKKLTPVGMDDFYLVSIANL

SEQ ID NO: 41232 - protein, 31 aa, Artificial Sequence
  Cyclic GFR-binding peptide
  MOD_RES (28)..(29): Xaa is C or S
VMRYKKLVKPTRGVFYLISIANLDQPVXXPS

SEQ ID NO: 41233 - protein, 37 aa, Artificial Sequence; identical to SEQ ID NO: 3812
  Cyclic GFR-binding peptide
  MOD_RES (1)..(32)..(33): Xaa is C or S

SEQ ID NO: 41234 - protein, 22 aa, Artificial Sequence
  Cyclic GFR-binding peptide
ERYKKLVVKDYEDFYLMSIANL

SEQ ID NO: 41235 - protein, 25 aa, Artificial Sequence
  Cyclic GFR-binding peptide
VVMNRYKKLIVNNSSDFYLVSIANL

SEQ ID NO: 41236 - protein, 27 aa, Artificial Sequence
  Cyclic GFR-binding peptide
  MOD_RES (2)..(2): Xaa is C or S
KXSRVIMRHKRLVKPKRGVYYLISTAS

SEQ ID NO: 41237 - protein, 30 aa, Artificial Sequence
  Cyclic GFR-binding peptide
  MOD_RES (28)..(29): Xaa is C or S
MNRHKRLIVNSSDDYYLVSTASLQTPAXXP

SEQ ID NO: 41238 - protein, 38 aa, Artificial Sequence
  Cyclic GFR-binding peptide
  MOD_RES (34)..(34): Xaa is C or S
DELTRHKRLFIPKKRVIEYYLVSTASLQVQTPRXQVNR

SEQ ID NO: 41239 - protein, 28 aa, Artificial Sequence
  Cyclic GFR-binding peptide
EAVSMGERYKKLTPVGMDDFYLVSIANL

SEQ ID NO: 41240 - protein, 23 aa, Artificial Sequence
  Cyclic GFR-binding peptide
VIMRYKKLVKPKRGVFYLISIAN

SEQ ID NO: 41241 - protein, 38 aa, Artificial Sequence; identical to SEQ ID NO: 3817
  Cyclic GFR-binding peptide
  MOD_RES (1)..(3)..(34)..(35): Xaa is C or S

SEQ ID NO: 41242 - protein, 30 aa, Artificial Sequence; identical to SEQ ID NO: 3820
  Cyclic GFR-binding peptide

SEQ ID NO: 41243 - protein, 24 aa, Artificial Sequence
  Cyclic GFR-binding peptide
YHYKLVVKDYEDKYLMSIPSLETP

SEQ ID NO: 41244 - protein, 39 aa, Artificial Sequence; identical to SEQ ID NO: 3823
  Cyclic GFR-binding peptide
  MOD_RES (2)..(34): Xaa is C or S

SEQ ID NO: 41245 - protein, 35 aa, Artificial Sequence; identical to SEQ ID NO: 3824
  Cyclic GFR-binding peptide
  MOD_RES (32)..(32): Xaa is C or S

SEQ ID NO: 41246 - protein, 38 aa, Artificial Sequence; identical to SEQ ID NO: 3825
  Cyclic GFR-binding peptide
  MOD_RES (2)..(4)..(36)..(37): Xaa is C or S

SEQ ID NO: 41247 - protein, 41 aa, Artificial Sequence; identical to SEQ ID NO: 3826
  Cyclic GFR-binding peptide
  MOD_RES (1)..(38): Xaa is C or S

SEQ ID NO: 41248 - protein, 30 aa, Artificial Sequence
  Cyclic GFR-binding peptide
ALHDELTRHKRLFIPKKRVIEYYLVSTASL

SEQ ID NO: 41249 - protein, 28 aa, Artificial Sequence
  Cyclic GFR-binding peptide
EVVMDYHYKLVVKENEDKYLMSIPSLET

SEQ ID NO: 41250 - protein, 29 aa, Artificial Sequence
  Cyclic GFR-binding peptide
  MOD_RES (1)..(3): Xaa is C or S
XKXSKVVMRYKKLVKPTRGVFYLISIANL

SEQ ID NO: 41251 - protein, 28 aa, Artificial Sequence
  Cyclic GFR-binding peptide
  MOD_RES (1)..(1): Xaa is C or S
XSKVIMRYKKLIKPTKGIFYLISIANLD

SEQ ID NO: 41252 - protein, 40 aa, Artificial Sequence; identical to SEQ ID NO: 3829
  Cyclic GFR-binding peptide
  MOD_RES (1)..(3)..(34)..(35): Xaa is C or S

SEQ ID NO: 41253 - protein, 38 aa, Artificial Sequence; identical to SEQ ID NO: 3830
  Cyclic GFR-binding peptide
  MOD_RES (1)..(33)..(34): Xaa is C or S

SEQ ID NO: 41254 - protein, 38 aa, Artificial Sequence; identical to SEQ ID NO: 3832
  Cyclic GFR-binding peptide
  MOD_RES (1)..(32)..(33): Xaa is C or S

SEQ ID NO: 41255 - protein, 27 aa, Artificial Sequence
  Cyclic GFR-binding peptide
VMDYHYKLVVKENEDKYLMSIPSLETP

SEQ ID NO: 41256 - protein, 35 aa, Artificial Sequence
  Cyclic GFR-binding peptide
  MOD_RES (29)..(30): Xaa is C or S
VMNRHKRLIVNSSDDYYLVSTASLKTPAXXPKPVY

SEQ ID NO: 41257 - protein, 39 aa, Artificial Sequence; identical to SEQ ID NO: 3835
  Cyclic GFR-binding peptide
  MOD_RES (1)..(3)..(34)..(35): Xaa is C or S

SEQ ID NO: 41258 - protein, 38 aa, Artificial Sequence; identical to SEQ ID NO: 3836
  Cyclic GFR-binding peptide
  MOD_RES (2)..(35)..(36): Xaa is C or S

SEQ ID NO: 41259 - protein, 26 aa, Artificial Sequence
  Cyclic GFR-binding peptide
GERYKKLTPVGMDDFYLVSIANLKTP

SEQ ID NO: 41260 - protein, 26 aa, Artificial Sequence
  Cyclic GFR-binding peptide
SRVVMNQYNKLIVNSSDDLYLVSIAS

SEQ ID NO: 41261 - protein, 31 aa, Artificial Sequence
  Cyclic GFR-binding peptide
  MOD_RES (29)..(30): Xaa is C or S
VIMRHKRLIKPTKGIYYLISTASLDQSVXXP

SEQ ID NO: 41262 - protein, 27 aa, Artificial Sequence
  Cyclic GFR-binding peptide
MNYHYKLIVNSSDDKYLVSIPSLKTPA

SEQ ID NO: 41263 - protein, 33 aa, Artificial Sequence
  Cyclic GFR-binding peptide
  MOD_RES (30)..(30): Xaa is C or S
VVMNYHYKLIVNSSDDKYLVSIPSLKTPAXTPK

SEQ ID NO: 41264 - protein, 29 aa, Artificial Sequence
  Cyclic GFR-binding peptide
  MOD_RES (27)..(28): Xaa is C or S
MRHKRLVKPKRGVYYLISTASLAQPVXXP

SEQ ID NO: 41265 - protein, 29 aa, Artificial Sequence
  Cyclic GFR-binding peptide
  MOD_RES (1)..(3): Xaa is C or S
XGXGEVVMERHKRLVVKDYEDYYLMSTAS

SEQ ID NO: 41266 - protein, 34 aa, Artificial Sequence; identical to SEQ ID NO: 3838
  Cyclic GFR-binding peptide
  MOD_RES (31)..(32): Xaa is C or S

SEQ ID NO: 41267 - protein, 38 aa, Artificial Sequence; identical to SEQ ID NO: 3841
  Cyclic GFR-binding peptide
  MOD_RES (1)..(3)..(34)..(35): Xaa is C or S

SEQ ID NO: 41268 - protein, 30 aa, Artificial Sequence
  Cyclic GFR-binding peptide
ALHDELTQYNKLFIPKKRVIELYLVSIASL

SEQ ID NO: 41269 - protein, 37 aa, Artificial Sequence; identical to SEQ ID NO: 3844
  Cyclic GFR-binding peptide
  MOD_RES (1)..(33)..(34): Xaa is C or S

SEQ ID NO: 41270 - protein, 37 aa, Artificial Sequence; identical to SEQ ID NO: 3847
  Cyclic GFR-binding peptide
  MOD_RES (1)..(33): Xaa is C or S

SEQ ID NO: 41271 - protein, 31 aa, Artificial Sequence
  Cyclic GFR-binding peptide
  MOD_RES (2)..(4): Xaa is C or S
SXKXSKVIMRYKKLIKPTKGIFYLISIANLD

SEQ ID NO: 41272 - protein, 32 aa, Artificial Sequence
  Cyclic GFR-binding peptide
  MOD_RES (28)..(29): Xaa is C or S
MDYHYKLVVKENEDKYLMSIPSLETPVXXAKP

SEQ ID NO: 41273 - protein, 24 aa, Artificial Sequence
  Cyclic GFR-binding peptide
NYHYKLIVNSSDDKYLVSIPSLQT

SEQ ID NO: 41274 - protein, 36 aa, Artificial Sequence; identical to SEQ ID NO: 3848
  Cyclic GFR-binding peptide
  MOD_RES (2)..(4)..(35)..(36): Xaa is C or S

SEQ ID NO: 41275 - protein, 34 aa, Artificial Sequence
  Cyclic GFR-binding peptide
  MOD_RES (2)..(4): Xaa is C or S
RXGXGEVVMDYHYKLVVKENEDKYLMSIPSLETP

SEQ ID NO: 41276 - protein, 36 aa, Artificial Sequence; identical to SEQ ID NO: 3849
  Cyclic GFR-binding peptide
  MOD_RES (1)..(33)..(34): Xaa is C or S

SEQ ID NO: 41277 - protein, 32 aa, Artificial Sequence
  Cyclic GFR-binding peptide
  MOD_RES (32)..(32): Xaa is C or S
LTYHYKLFIPKKRVIEKYLVSIPSLQVQTPRX

SEQ ID NO: 41278 - protein, 37 aa, Artificial Sequence; identical to SEQ ID NO: 3850
  Cyclic GFR-binding peptide
  MOD_RES (1)..(3): Xaa is C or S

SEQ ID NO: 41279 - protein, 24 aa, Artificial Sequence
  Cyclic GFR-binding peptide
MDRHKRLVVKENEDYYLMSTASLE

SEQ ID NO: 41280 - protein, 36 aa, Artificial Sequence; identical to SEQ ID NO: 3851
  Cyclic GFR-binding peptide
  MOD_RES (31)..(32): Xaa is C or S

SEQ ID NO: 41281 - protein, 37 aa, Artificial Sequence; identical to SEQ ID NO: 3853
  Cyclic GFR-binding peptide
  MOD_RES (2)..(4)..(36)..(37): Xaa is C or S

SEQ ID NO: 41282 - protein, 35 aa, Artificial Sequence; identical to SEQ ID NO: 3854
  Cyclic GFR-binding peptide
  MOD_RES (1)..(32)..(33): Xaa is C or S

SEQ ID NO: 41283 - protein, 35 aa, Artificial Sequence; identical to SEQ ID NO: 3855
  Cyclic GFR-binding peptide
  MOD_RES (31)..(32): Xaa is C or S

SEQ ID NO: 41284 - protein, 35 aa, Artificial Sequence; identical to SEQ ID NO: 3856
  Cyclic GFR-binding peptide

SEQ ID NO: 41285 - protein, 37 aa, Artificial Sequence; identical to SEQ ID NO: 3858
  Cyclic GFR-binding peptide
  MOD_RES (1)..(32)..(33): Xaa is C or S

SEQ ID NO: 41286 - protein, 39 aa, Artificial Sequence; identical to SEQ ID NO: 3860
  Cyclic GFR-binding peptide
  MOD_RES (2)..(4)..(37)..(38): Xaa is C or S

SEQ ID NO: 41287 - protein, 34 aa, Artificial Sequence
  Cyclic GFR-binding peptide
  MOD_RES (31)..(31): Xaa is C or S
TRHKRLFIPKKRVIEYYLVSTASLQVQTPRXQVN

SEQ ID NO: 41288 - protein, 37 aa, Artificial Sequence; identical to SEQ ID NO: 3862
  Cyclic GFR-binding peptide
  MOD_RES (1)..(33)..(34): Xaa is C or S

SEQ ID NO: 41289 - protein, 26 aa, Artificial Sequence
  Cyclic GFR-binding peptide
VSMGERHKRLTPVGMDDYYLVSTASL

SEQ ID NO: 41290 - protein, 28 aa, Artificial Sequence
  Cyclic GFR-binding peptide
VMDYHYKLVVKENEDKYLMSIPSLETPV

SEQ ID NO: 41291 - protein, 31 aa, Artificial Sequence
  Cyclic GFR-binding peptide
  MOD_RES (29)..(30): Xaa is C or S
VMNRHKRLIVNSSDDYYLVSTASLQTPAXXP

SEQ ID NO: 41292 - protein, 29 aa, Artificial Sequence
  Cyclic GFR-binding peptide
AVSMGEQYNKLTPVGMDDLYLVSIASLKT

SEQ ID NO: 41293 - protein, 42 aa, Artificial Sequence; identical to SEQ ID NO: 3865
  Cyclic GFR-binding peptide
  MOD_RES (2)..(4)..(36)..(37): Xaa is C or S

SEQ ID NO: 41294 - protein, 38 aa, Artificial Sequence; identical to SEQ ID NO: 3866
  Cyclic GFR-binding peptide
  MOD_RES (2)..(34)..(35): Xaa is C or S

SEQ ID NO: 41295 - protein, 39 aa, Artificial Sequence; identical to SEQ ID NO: 3867
  Cyclic GFR-binding peptide
  MOD_RES (2)..(34)..(35): Xaa is C or S

SEQ ID NO: 41296 - protein, 38 aa, Artificial Sequence; identical to SEQ ID NO: 3869
  Cyclic GFR-binding peptide
  MOD_RES (1)..(3)..(34)..(35): Xaa is C or S

SEQ ID NO: 41297 - protein, 21 aa, Artificial Sequence
  Cyclic GFR-binding peptide
NYHYKLIVNSSDDKYLVSIPS

SEQ ID NO: 41298 - protein, 35 aa, Artificial Sequence; identical to SEQ ID NO: 3872
  Cyclic GFR-binding peptide
  MOD_RES (1)..(32)..(33): Xaa is C or S

SEQ ID NO: 41299 - protein, 27 aa, Artificial Sequence
  Cyclic GFR-binding peptide
VIMRYKKLVKPKRGVFYLISIANLAQP

SEQ ID NO: 41300 - protein, 37 aa, Artificial Sequence; identical to SEQ ID NO: 3876
  Cyclic GFR-binding peptide
  MOD_RES (2)..(4)..(36)..(37): Xaa is C or S

SEQ ID NO: 41301 - protein, 35 aa, Artificial Sequence
  Cyclic GFR-binding peptide
  MOD_RES (29)..(30): Xaa is C or S
VMEYHYKLVVKDYEDKYLMSIPSLETPVXXAKPIS

SEQ ID NO: 41302 - protein, 24 aa, Artificial Sequence
  Cyclic GFR-binding peptide
VVMNYHYKLIVNNSSDKYLVSIPS

SEQ ID NO: 41303 - protein, 34 aa, Artificial Sequence
  Cyclic GFR-binding peptide
  MOD_RES (32)..(32): Xaa is C or S
LTRYKKLFIPKKRVIEFYLVSIANLQVQTPRXQV

SEQ ID NO: 41304 - protein, 29 aa, Artificial Sequence
  Cyclic GFR-binding peptide
  MOD_RES (2)..(2): Xaa is C or S
GXEAVSMGERYKKLTPVGMDDFYLVSIAN

SEQ ID NO: 41305 - protein, 34 aa, Artificial Sequence
  Cyclic GFR-binding peptide
  MOD_RES (29)..(30): Xaa is C or S
VMDRHKRLVVKENEDYYLMSTASLETPVXXAKPI

SEQ ID NO: 41306 - protein, 35 aa, Artificial Sequence; identical to SEQ ID NO: 3878
  Cyclic GFR-binding peptide
  MOD_RES (1)..(3)..(35): Xaa is C or S

SEQ ID NO: 41307 - protein, 32 aa, Artificial Sequence; identical to SEQ ID NO: 3880
  Cyclic GFR-binding peptide
  MOD_RES (2)..(2): Xaa is C or S

SEQ ID NO: 41308 - protein, 29 aa, Artificial Sequence
  Cyclic GFR-binding peptide
LHDELTYHYKLFIPKKRVIEKYLVSIPSL

SEQ ID NO: 41309 - protein, 29 aa, Artificial Sequence
  Cyclic GFR-binding peptide
  MOD_RES (1)..(3): Xaa is C or S
XGXARVVMNYHYKLIVNSSDDKYLVSIPS

SEQ ID NO: 41310 - protein, 26 aa, Artificial Sequence
  Cyclic GFR-binding peptide
ARVVMNQYNKLIVNSSDDLYLVSIAS

SEQ ID NO: 41311 - protein, 31 aa, Artificial Sequence
  Cyclic GFR-binding peptide
  MOD_RES (30)..(30): Xaa is C or S
VVMNRHKRLIVNSSDDYYLVSTASLKTPAXT

SEQ ID NO: 41312 - protein, 27 aa, Artificial Sequence
  Cyclic GFR-binding peptide
DELTYHYKLFIPKKRVIEKYLVSIPSL

SEQ ID NO: 41313 - protein, 32 aa, Artificial Sequence
  Cyclic GFR-binding peptide
  MOD_RES (26)..(27): Xaa is C or S
YHYKLVKPTRGVKYLISIPSLDQPVXXPSASA

SEQ ID NO: 41314 - protein, 36 aa, Artificial Sequence; identical to SEQ ID NO: 3882
  Cyclic GFR-binding peptide
  MOD_RES (31)..(32): Xaa is C or S

SEQ ID NO: 41315 - protein, 35 aa, Artificial Sequence; identical to SEQ ID NO: 3883
  Cyclic GFR-binding peptide
  MOD_RES (1)..(33)..(34): Xaa is C or S

SEQ ID NO: 41316 - protein, 39 aa, Artificial Sequence; identical to SEQ ID NO: 3884
  Cyclic GFR-binding peptide
  MOD_RES (2)..(4)..(36): Xaa is C or S

SEQ ID NO: 41317 - protein, 24 aa, Artificial Sequence
  Cyclic GFR-binding peptide
MNYHYKLIVNSSDDKYLVSIPSLK

SEQ ID NO: 41318 - protein, 42 aa, Artificial Sequence; identical to SEQ ID NO: 3886
  Cyclic GFR-binding peptide
  MOD_RES (2)..(4)..(36)..(37): Xaa is C or S

SEQ ID NO: 41319 - protein, 31 aa, Artificial Sequence
  Cyclic GFR-binding peptide
  MOD_RES (28)..(29): Xaa is C or S
IMQYNKLIKPTKGILYLISIASLDQSVXXPS

SEQ ID NO: 41320 - protein, 36 aa, Artificial Sequence
  Cyclic GFR-binding peptide
  MOD_RES (30)..(31): Xaa is C or S
VVMNYHYKLIVNNSSDKYLVSIPSLKTPAXXAKPVA

SEQ ID NO: 41321 - protein, 33 aa, Artificial Sequence
  Cyclic GFR-binding peptide
  MOD_RES (28)..(29): Xaa is C or S
IMYHYKLVKPKRGVKYLISIPSLAQPVXXPAAS

SEQ ID NO: 41322 - protein, 40 aa, Artificial Sequence; identical to SEQ ID NO: 3887
  Cyclic GFR-binding peptide
  MOD_RES (2)..(34)..(35): Xaa is C or S

SEQ ID NO: 41323 - protein, 27 aa, Artificial Sequence
  Cyclic GFR-binding peptide
TQYNKLFIPKKRVIELYLVSIASLQVQ

SEQ ID NO: 41324 - protein, 27 aa, Artificial Sequence
  Cyclic GFR-binding peptide
MERYKKLVVKDYEDFYLMSIANLETPV

SEQ ID NO: 41325 - protein, 37 aa, Artificial Sequence; identical to SEQ ID NO: 3888
  Cyclic GFR-binding peptide
  MOD_RES (2)..(4)..(36)..(37): Xaa is C or S

SEQ ID NO: 41326 - protein, 29 aa, Artificial Sequence
  Cyclic GFR-binding peptide
  MOD_RES (28)..(29): Xaa is C or S
MNQYNKLIVNSSDDLYLVSIASLKTPAXX

SEQ ID NO: 41327 - protein, 35 aa, Artificial Sequence; identical to SEQ ID NO: 3889
  Cyclic GFR-binding peptide
  MOD_RES (31)..(32): Xaa is C or S

SEQ ID NO: 41328 - protein, 42 aa, Artificial Sequence; identical to SEQ ID NO: 3891
  Cyclic GFR-binding peptide
  MOD_RES (2)..(39): Xaa is C or S

SEQ ID NO: 41329 - protein, 37 aa, Artificial Sequence; identical to SEQ ID NO: 3892
  Cyclic GFR-binding peptide
  MOD_RES (1)..(32)..(33): Xaa is C or S

SEQ ID NO: 41330 - protein, 30 aa, Artificial Sequence
  Cyclic GFR-binding peptide
  MOD_RES (27)..(28): Xaa is C or S
ERHKRLVVKDYEDYYLMSTASLETPVXXAK

SEQ ID NO: 41331 - protein, 30 aa, Artificial Sequence
  Cyclic GFR-binding peptide
GEVVMERYKKLVVKDYEDFYLMSIANLETP

SEQ ID NO: 41332 - protein, 40 aa, Artificial Sequence; identical to SEQ ID NO: 3893
  Cyclic GFR-binding peptide
  MOD_RES (37)..(37): Xaa is C or S

SEQ ID NO: 41333 - protein, 33 aa, Artificial Sequence
  Cyclic GFR-binding peptide
  MOD_RES (31)..(32): Xaa is C or S
VSMGEQYNKLTPVGMDDLYLVSIASLKTPVXXA

SEQ ID NO: 41334 - protein, 32 aa, Artificial Sequence
  Cyclic GFR-binding peptide
  MOD_RES (1)..(3): Xaa is C or S
XKXALHDELTYHYKLFIPKKRVIEKYLVSIPS

SEQ ID NO: 41335 - protein, 34 aa, Artificial Sequence; identical to SEQ ID NO: 3895
  Cyclic GFR-binding peptide
  MOD_RES (33)..(34): Xaa is C or S

SEQ ID NO: 41336 - protein, 32 aa, Artificial Sequence
  Cyclic GFR-binding peptide
  MOD_RES (27)..(28): Xaa is C or S
DRHKRLVVKENEDYYLMSTASLETPVXXAKPI

SEQ ID NO: 41337 - protein, 35 aa, Artificial Sequence
  Cyclic GFR-binding peptide
  MOD_RES (2)..(4): Xaa is C or S
EXKXALHDELTRYKKLFIPKKRVIEFYLVSIANLQ

SEQ ID NO: 41338 - protein, 30 aa, Artificial Sequence
  Cyclic GFR-binding peptide
  MOD_RES (28)..(29): Xaa is C or S
MNRYKKLIVNNSSDFYLVSIANLKTPAXXA

SEQ ID NO: 41339 - protein, 26 aa, Artificial Sequence
  Cyclic GFR-binding peptide
MQYNKLVKPKRGVLYLISIASLAQPV

SEQ ID NO: 41340 - protein, 35 aa, Artificial Sequence; identical to SEQ ID NO: 3896
  Cyclic GFR-binding peptide
  MOD_RES (32)..(33): Xaa is C or S

SEQ ID NO: 41341 - protein, 29 aa, Artificial Sequence
  Cyclic GFR-binding peptide
  MOD_RES (26)..(27): Xaa is C or S
RHKRLIKPTKGIYYLISTASLDQSVXXPS

SEQ ID NO: 41342 - protein, 28 aa, Artificial Sequence
  Cyclic GFR-binding peptide
SKVIMRHKRLIKPTKGIYYLISTASLDQ

SEQ ID NO: 41343 - protein, 27 aa, Artificial Sequence
  Cyclic GFR-binding peptide
  MOD_RES (27)..(27): Xaa is C or S
NRHKRLIVNSSDDYYLVSTASLQTPAX

SEQ ID NO: 41344 - protein, 28 aa, Artificial Sequence
  Cyclic GFR-binding peptide
  MOD_RES (26)..(27): Xaa is C or S
YHYKLVVKDYEDKYLMSIPSLETPVXXA

SEQ ID NO: 41345 - protein, 28 aa, Artificial Sequence
  Cyclic GFR-binding peptide
  MOD_RES (1)..(1): Xaa is C or S
XAKVVMNQYNKLIVNNSSDLYLVSIASL

SEQ ID NO: 41346 - protein, 27 aa, Artificial Sequence
  Cyclic GFR-binding peptide
  MOD_RES (27)..(27): Xaa is C or S
MRHKRLVKPTRGVYYLISTASLDQPVX

SEQ ID NO: 41347 - protein, 28 aa, Artificial Sequence
  Cyclic GFR-binding peptide
  MOD_RES (2)..(2): Xaa is C or S
GXAKVVMNYHYKLIVNNSSDKYLVSIPS

SEQ ID NO: 41348 - protein, 38 aa, Artificial Sequence; identical to SEQ ID NO: 3902
  Cyclic GFR-binding peptide
  MOD_RES (2)..(4)..(35)..(36): Xaa is C or S

SEQ ID NO: 41349 - protein, 30 aa, Artificial Sequence
  Cyclic GFR-binding peptide
  MOD_RES (1)..(1): Xaa is C or S
XEAVSMGERYKKLTPVGMDDFYLVSIANLK

SEQ ID NO: 41350 - protein, 28 aa, Artificial Sequence
  Cyclic GFR-binding peptide
SRVVMNRHKRLIVNSSDDYYLVSTASLK

SEQ ID NO: 41351 - protein, 32 aa, Artificial Sequence
  Cyclic GFR-binding peptide
  MOD_RES (28)..(29): Xaa is C or S
MERHKRLVVKDYEDYYLMSTASLETPVXXAKP

SEQ ID NO: 41352 - protein, 30 aa, Artificial Sequence
  Cyclic GFR-binding peptide
  MOD_RES (28)..(29): Xaa is C or S
MNRHKRLIVNSSDDYYLVSTASLKTPAXXP

SEQ ID NO: 41353 - protein, 25 aa, Artificial Sequence
  Cyclic GFR-binding peptide
VVMRHKRLVKPTRGVYYLISTASLD

SEQ ID NO: 41354 - protein, 29 aa, Artificial Sequence
  Cyclic GFR-binding peptide
  MOD_RES (27)..(28): Xaa is C or S
NQYNKLIVNSSDDLYLVSIASLKTPAXXP

SEQ ID NO: 41355 - protein, 31 aa, Artificial Sequence
  Cyclic GFR-binding peptide
  MOD_RES (2)..(4): Xaa is C or S
SXKXSRVIMRHKRLVKPKRGVYYLISTASLA

SEQ ID NO: 41356 - protein, 38 aa, Artificial Sequence; identical to SEQ ID NO: 3904
  Cyclic GFR-binding peptide
  MOD_RES (1)..(32)..(33): Xaa is C or S

SEQ ID NO: 41357 - protein, 30 aa, Artificial Sequence
  Cyclic GFR-binding peptide
SRVVMNRHKRLIVNSSDDYYLVSTASLKTP

SEQ ID NO: 41358 - protein, 34 aa, Artificial Sequence; identical to SEQ ID NO: 3906
  Cyclic GFR-binding peptide
  MOD_RES (32)..(33): Xaa is C or S

SEQ ID NO: 41359 - protein, 31 aa, Artificial Sequence
  Cyclic GFR-binding peptide
  MOD_RES (2)..(2): Xaa is C or S
GXGEVVMDRHKRLVVKENEDYYLMSTASLET

SEQ ID NO: 41360 - protein, 36 aa, Artificial Sequence; identical to SEQ ID NO: 3908
  Cyclic GFR-binding peptide
  MOD_RES (31)..(32): Xaa is C or S

SEQ ID NO: 41361 - protein, 22 aa, Artificial Sequence
  Cyclic GFR-binding peptide
MNYHYKLIVNNSSDKYLVSIPS

SEQ ID NO: 41362 - protein, 31 aa, Artificial Sequence
  Cyclic GFR-binding peptide
  MOD_RES (28)..(29): Xaa is C or S
VMQYNKLVKPTRGVLYLISIASLDQPVXXPS

SEQ ID NO: 41363 - protein, 21 aa, Artificial Sequence
  Cyclic GFR-binding peptide
MRYKKLVKPKRGVFYLISIAN

SEQ ID NO: 41364 - protein, 31 aa, Artificial Sequence
  Cyclic GFR-binding peptide
  MOD_RES (29)..(30): Xaa is C or S
VVMQYNKLVKPTRGVLYLISIASLDQPVXXP

SEQ ID NO: 41365 - protein, 27 aa, Artificial Sequence
  Cyclic GFR-binding peptide
DELTRYKKLFIPKKRVIEFYLVSIANL

SEQ ID NO: 41366 - protein, 37 aa, Artificial Sequence; identical to SEQ ID NO: 3911
  Cyclic GFR-binding peptide
  MOD_RES (2)..(34)..(35): Xaa is C or S

SEQ ID NO: 41367 - protein, 38 aa, Artificial Sequence; identical to SEQ ID NO: 3913
  Cyclic GFR-binding peptide
  MOD_RES (1)..(3)..(35): Xaa is C or S

SEQ ID NO: 41368 - protein, 30 aa, Artificial Sequence
  Cyclic GFR-binding peptide
  MOD_RES (2)..(4): Xaa is C or S
SXKXSRVIMRYKKLVKPKRGVFYLISIANL

SEQ ID NO: 41369 - protein, 35 aa, Artificial Sequence; identical to SEQ ID NO: 3915
  Cyclic GFR-binding peptide
  MOD_RES (1)..(33)..(34): Xaa is C or S

SEQ ID NO: 41370 - protein, 34 aa, Artificial Sequence
  Cyclic GFR-binding peptide
  MOD_RES (2)..(4): Xaa is C or S
HXGXSRVVMNQYNKLIVNSSDDLYLVSIASLKTP

SEQ ID NO: 41371 - protein, 33 aa, Artificial Sequence; identical to SEQ ID NO: 3916
  Cyclic GFR-binding peptide
  MOD_RES (31)..(32): Xaa is C or S

SEQ ID NO: 41372 - protein, 30 aa, Artificial Sequence
  Cyclic GFR-binding peptide
  MOD_RES (27)..(28): Xaa is C or S
EQYNKLTPVGMDDLYLVSIASLKTPVXXAK

SEQ ID NO: 41373 - protein, 31 aa, Artificial Sequence
  Cyclic GFR-binding peptide
  MOD_RES (1)..(1): Xaa is C or S
XEAVSMGERHKRLTPVGMDDYYLVSTASLKT

SEQ ID NO: 41374 - protein, 41 aa, Artificial Sequence; identical to SEQ ID NO: 3917
  Cyclic GFR-binding peptide
  MOD_RES (2)..(4)..(35)..(36): Xaa is C or S

SEQ ID NO: 41375 - protein, 38 aa, Artificial Sequence; identical to SEQ ID NO: 3919
  Cyclic GFR-binding peptide
  MOD_RES (33)..(34): Xaa is C or S

SEQ ID NO: 41376 - protein, 23 aa, Artificial Sequence
  Cyclic GFR-binding peptide
VIMRHKRLIKPTKGIYYLISTAS

SEQ ID NO: 41377 - protein, 22 aa, Artificial Sequence
  Cyclic GFR-binding peptide
NYHYKLIVNNSSDKYLVSIPSL

SEQ ID NO: 41378 - protein, 34 aa, Artificial Sequence
  Cyclic GFR-binding peptide
  MOD_RES (28)..(29): Xaa is C or S
GERHKRLTPVGMDDYYLVSTASLKTPVXXAKGVK

SEQ ID NO: 41379 - protein, 34 aa, Artificial Sequence; identical to SEQ ID NO: 3920
  Cyclic GFR-binding peptide
  MOD_RES (31)..(32): Xaa is C or S

SEQ ID NO: 41380 - protein, 27 aa, Artificial Sequence
  Cyclic GFR-binding peptide
YHYKLFIPKKRVIEKYLVSIPSLQVQT

SEQ ID NO: 41381 - protein, 28 aa, Artificial Sequence
  Cyclic GFR-binding peptide
GEVVMERYKKLVVKDYEDFYLMSIANLE

SEQ ID NO: 41382 - protein, 31 aa, Artificial Sequence
  Cyclic GFR-binding peptide
  MOD_RES (27)..(28): Xaa is C or S
ERYKKLVVKDYEDFYLMSIANLETPVXXAKP

SEQ ID NO: 41383 - protein, 41 aa, Artificial Sequence; identical to SEQ ID NO: 3925
  Cyclic GFR-binding peptide
  MOD_RES (2)..(4)..(41): Xaa is C or S

SEQ ID NO: 41384 - protein, 33 aa, Artificial Sequence
  Cyclic GFR-binding peptide
  MOD_RES (30)..(31): Xaa is C or S
KVVMRHKRLVKPTRGVYYLISTASLDQPVXXPS

SEQ ID NO: 41385 - protein, 34 aa, Artificial Sequence
  Cyclic GFR-binding peptide
  MOD_RES (29)..(30): Xaa is C or S
VIMRHKRLVKPKRGVYYLISTASLAQPVXXPAAS

SEQ ID NO: 41386 - protein, 27 aa, Artificial Sequence
  Cyclic GFR-binding peptide
MNQYNKLIVNSSDDLYLVSIASLQTPA

SEQ ID NO: 41387 - protein, 30 aa, Artificial Sequence
  Cyclic GFR-binding peptide
  MOD_RES (28)..(28): Xaa is C or S
MNRHKRLIVNSSDDYYLVSTASLKTPAXTP

SEQ ID NO: 41388 - protein, 38 aa, Artificial Sequence; identical to SEQ ID NO: 3932
  Cyclic GFR-binding peptide
  MOD_RES (1)..(32)..(33): Xaa is C or S

SEQ ID NO: 41389 - protein, 30 aa, Artificial Sequence
  Cyclic GFR-binding peptide
  MOD_RES (1)..(1): Xaa is C or S
XSKVIMYHYKLIKPTKGIKYLISIPSLDQS

SEQ ID NO: 41390 - protein, 30 aa, Artificial Sequence; identical to SEQ ID NO: 3933
  Cyclic GFR-binding peptide

SEQ ID NO: 41391 - protein, 36 aa, Artificial Sequence; identical to SEQ ID NO: 3934
  Cyclic GFR-binding peptide
  MOD_RES (36)..(36): Xaa is C or S

SEQ ID NO: 41392 - protein, 25 aa, Artificial Sequence
  Cyclic GFR-binding peptide
ERYKKLVVKDYEDFYLMSIANLETP

SEQ ID NO: 41393 - protein, 30 aa, Artificial Sequence
  Cyclic GFR-binding peptide
  MOD_RES (2)..(4): Xaa is C or S
HXGXARVVMNRHKRLIVNSSDDYYLVSTAS

SEQ ID NO: 41394 - protein, 34 aa, Artificial Sequence
  Cyclic GFR-binding peptide
  MOD_RES (2)..(4): Xaa is C or S
RXGXEAVSMGEQYNKLTPVGMDDLYLVSIASLKT

SEQ ID NO: 41395 - protein, 32 aa, Artificial Sequence; identical to SEQ ID NO: 3935
  Cyclic GFR-binding peptide
  MOD_RES (1)..(32): Xaa is C or S

SEQ ID NO: 41396 - protein, 31 aa, Artificial Sequence; identical to SEQ ID NO: 3936
  Cyclic GFR-binding peptide
  MOD_RES (1)..(1): Xaa is C or S

SEQ ID NO: 41397 - protein, 23 aa, Artificial Sequence
  Cyclic GFR-binding peptide
RYKKLVVKDYEDFYLMSIANLET

SEQ ID NO: 41398 - protein, 30 aa, Artificial Sequence
  Cyclic GFR-binding peptide
  MOD_RES (26)..(27): Xaa is C or S
RYKKLTPVGMDDFYLVSIANLKTPVXXAKG

SEQ ID NO: 41399 - protein, 22 aa, Artificial Sequence
  Cyclic GFR-binding peptide
EQYNKLTPVGMDDLYLVSIASL

SEQ ID NO: 41400 - protein, 28 aa, Artificial Sequence
  Cyclic GFR-binding peptide
  MOD_RES (2)..(2): Xaa is C or S
KXSKVIMQYNKLIKPTKGILYLISIASL

SEQ ID NO: 41401 - protein, 23 aa, Artificial Sequence
  Cyclic GFR-binding peptide
MGERHKRLTPVGMDDYYLVSTAS

SEQ ID NO: 41402 - protein, 30 aa, Artificial Sequence
  Cyclic GFR-binding peptide
  MOD_RES (27)..(28): Xaa is C or S
MRYKKLIKPTKGIFYLISIANLDQSVXXPS

SEQ ID NO: 41403 - protein, 36 aa, Artificial Sequence; identical to SEQ ID NO: 3939
  Cyclic GFR-binding peptide
  MOD_RES (2)..(4)..(35)..(36): Xaa is C or S

SEQ ID NO: 41404 - protein, 35 aa, Artificial Sequence; identical to SEQ ID NO: 3940
  Cyclic GFR-binding peptide
  MOD_RES (2)..(4)..(35): Xaa is C or S

SEQ ID NO: 41405 - protein, 40 aa, Artificial Sequence; identical to SEQ ID NO: 3941
  Cyclic GFR-binding peptide
  MOD_RES (1)..(3)..(34)..(35): Xaa is C or S

SEQ ID NO: 41406 - protein, 34 aa, Artificial Sequence
  Cyclic GFR-binding peptide
  MOD_RES (30)..(31): Xaa is C or S
RVIMYHYKLVKPKRGVKYLISIPSLAQPVXXPAA

SEQ ID NO: 41407 - protein, 36 aa, Artificial Sequence
  Cyclic GFR-binding peptide
  MOD_RES (32)..(32): Xaa is C or S
LTYHYKLFIPKKRVIEKYLVSIPSLQVQTPRXQVNR

SEQ ID NO: 41408 - protein, 30 aa, Artificial Sequence
  Cyclic GFR-binding peptide
  MOD_RES (2)..(2): Xaa is C or S
GXGEVVMDRYKKLVVKENEDFYLMSIANLE

SEQ ID NO: 41409 - protein, 28 aa, Artificial Sequence
  Cyclic GFR-binding peptide
  MOD_RES (2)..(2): Xaa is C or S
GXSRVVMNYHYKLIVNSSDDKYLVSIPS

SEQ ID NO: 41410 - protein, 34 aa, Artificial Sequence
  Cyclic GFR-binding peptide
  MOD_RES (28)..(29): Xaa is C or S
MERHKRLVVKDYEDYYLMSTASLETPVXXAKPIS

SEQ ID NO: 41411 - protein, 32 aa, Artificial Sequence
  Cyclic GFR-binding peptide
  MOD_RES (27)..(28): Xaa is C or S
NQYNKLIVNNSSDLYLVSIASLKTPAXXAKPV

SEQ ID NO: 41412 - protein, 37 aa, Artificial Sequence; identical to SEQ ID NO: 3943
  Cyclic GFR-binding peptide
  MOD_RES (2)..(4)..(35)..(36): Xaa is C or S

SEQ ID NO: 41413 - protein, 31 aa, Artificial Sequence
  Cyclic GFR-binding peptide
  MOD_RES (30)..(31): Xaa is C or S
VVMNRHKRLIVNSSDDYYLVSTASLQTPAXX

SEQ ID NO: 41414 - protein, 35 aa, Artificial Sequence; identical to SEQ ID NO: 3945
  Cyclic GFR-binding peptide
  MOD_RES (1)..(3)..(34)..(35): Xaa is C or S

SEQ ID NO: 41415 - protein, 30 aa, Artificial Sequence
  Cyclic GFR-binding peptide
  MOD_RES (2)..(2): Xaa is C or S
KXSKVVMYHYKLVKPTRGVKYLISIPSLDQ

SEQ ID NO: 41416 - protein, 36 aa, Artificial Sequence; identical to SEQ ID NO: 3947
  Cyclic GFR-binding peptide
  MOD_RES (2)..(4)..(36): Xaa is C or S

SEQ ID NO: 41417 - protein, 38 aa, Artificial Sequence; identical to SEQ ID NO: 3948
  Cyclic GFR-binding peptide
  MOD_RES (1)..(33)..(34): Xaa is C or S

SEQ ID NO: 41418 - protein, 36 aa, Artificial Sequence
  Cyclic GFR-binding peptide
  MOD_RES (33)..(33): Xaa is C or S
ELTRYKKLFIPKKRVIEFYLVSIANLQVQTPRXQVN

SEQ ID NO: 41419 - protein, 30 aa, Artificial Sequence
  Cyclic GFR-binding peptide
  MOD_RES (2)..(2): Xaa is C or S
GXEAVSMGEQYNKLTPVGMDDLYLVSIASL

SEQ ID NO: 41420 - protein, 29 aa, Artificial Sequence
  Cyclic GFR-binding peptide
  MOD_RES (2)..(2): Xaa is C or S
GXSRVVMNYHYKLIVNSSDDKYLVSIPSL

SEQ ID NO: 41421 - protein, 29 aa, Artificial Sequence
  Cyclic GFR-binding peptide
  MOD_RES (2)..(4): Xaa is C or S
SXKXSKVVMYHYKLVKPTRGVKYLISIPS

SEQ ID NO: 41422 - protein, 25 aa, Artificial Sequence
  Cyclic GFR-binding peptide
MNYHYKLIVNSSDDKYLVSIPSLKT

SEQ ID NO: 41423 - protein, 29 aa, Artificial Sequence
  Cyclic GFR-binding peptide
  MOD_RES (2)..(4): Xaa is C or S
SXKXSRVIMRYKKLVKPKRGVFYLISIAN

SEQ ID NO: 41424 - protein, 30 aa, Artificial Sequence; identical to SEQ ID NO: 1840
  Cyclic GFR-binding peptide

SEQ ID NO: 41425 - protein, 29 aa, Artificial Sequence
  Cyclic GFR-binding peptide
  MOD_RES (29)..(29): Xaa is C or S
VMNQYNKLIVNNSSDLYLVSIASLKTPAX

SEQ ID NO: 41426 - protein, 23 aa, Artificial Sequence
  Cyclic GFR-binding peptide
NYHYKLIVNSSDDKYLVSIPSLK

SEQ ID NO: 41427 - protein, 37 aa, Artificial Sequence; identical to SEQ ID NO: 3953
  Cyclic GFR-binding peptide
  MOD_RES (1)..(3)..(35)..(36): Xaa is C or S

SEQ ID NO: 41428 - protein, 26 aa, Artificial Sequence
  Cyclic GFR-binding peptide
DELTYHYKLFIPKKRVIEKYLVSIPS

SEQ ID NO: 41429 - protein, 33 aa, Artificial Sequence
  Cyclic GFR-binding peptide
  MOD_RES (29)..(30): Xaa is C or S
MGERHKRLTPVGMDDYYLVSTASLKTPVXXAKG

SEQ ID NO: 41430 - protein, 38 aa, Artificial Sequence; identical to SEQ ID NO: 3958
  Cyclic GFR-binding peptide
  MOD_RES (2)..(35)..(36): Xaa is C or S

SEQ ID NO: 41431 - protein, 31 aa, Artificial Sequence; identical to SEQ ID NO: 3961
  Cyclic GFR-binding peptide
  MOD_RES (31)..(31): Xaa is C or S

SEQ ID NO: 41432 - protein, 33 aa, Artificial Sequence
  Cyclic GFR-binding peptide
  MOD_RES (29)..(30): Xaa is C or S
VMERHKRLVVKDYEDYYLMSTASLETPVXXAKP

SEQ ID NO: 41433 - protein, 38 aa, Artificial Sequence; identical to SEQ ID NO: 3962
  Cyclic GFR-binding peptide
  MOD_RES (1)..(33): Xaa is C or S

SEQ ID NO: 41434 - protein, 31 aa, Artificial Sequence
  Cyclic GFR-binding peptide
  MOD_RES (28)..(29): Xaa is C or S
MEYHYKLVVKDYEDKYLMSIPSLETPVXXAK

SEQ ID NO: 41435 - protein, 27 aa, Artificial Sequence
  Cyclic GFR-binding peptide
SRVIMRHKRLVKPKRGVYYLISTASLA

SEQ ID NO: 41436 - protein, 35 aa, Artificial Sequence; identical to SEQ ID NO: 3963
  Cyclic GFR-binding peptide
  MOD_RES (2)..(4)..(35): Xaa is C or S

SEQ ID NO: 41437 - protein, 30 aa, Artificial Sequence
  Cyclic GFR-binding peptide
  MOD_RES (1)..(1): Xaa is C or S
XALHDELTRHKRLFIPKKRVIEYYLVSTAS

SEQ ID NO: 41438 - protein, 29 aa, Artificial Sequence
  Cyclic GFR-binding peptide
  MOD_RES (26)..(27): Xaa is C or S
RYKKLVKPTRGVFYLISIANLDQPVXXPS

SEQ ID NO: 41439 - protein, 21 aa, Artificial Sequence
  Cyclic GFR-binding peptide
RHKRLIKPTKGIYYLISTASL

SEQ ID NO: 41440 - protein, 35 aa, Artificial Sequence; identical to SEQ ID NO: 3964
  Cyclic GFR-binding peptide
  MOD_RES (1)..(3)..(35): Xaa is C or S

SEQ ID NO: 41441 - protein, 35 aa, Artificial Sequence; identical to SEQ ID NO: 3965
  Cyclic GFR-binding peptide
  MOD_RES (2)..(35): Xaa is C or S

SEQ ID NO: 41442 - protein, 37 aa, Artificial Sequence; identical to SEQ ID NO: 3966
  Cyclic GFR-binding peptide
  MOD_RES (31)..(32): Xaa is C or S

SEQ ID NO: 41443 - protein, 29 aa, Artificial Sequence
  Cyclic GFR-binding peptide
  MOD_RES (28)..(28): Xaa is C or S
MNQYNKLIVNSSDDLYLVSIASLKTPAXT

SEQ ID NO: 41444 - protein, 29 aa, Artificial Sequence
  Cyclic GFR-binding peptide
  MOD_RES (27)..(28): Xaa is C or S
NYHYKLIVNNSSDKYLVSIPSLKTPAXXA

SEQ ID NO: 41445 - protein, 32 aa, Artificial Sequence
  Cyclic GFR-binding peptide
  MOD_RES (2)..(4): Xaa is C or S
HXGXSRVVMNRHKRLIVNSSDDYYLVSTASLK

SEQ ID NO: 41446 - protein, 27 aa, Artificial Sequence
  Cyclic GFR-binding peptide
MGEQYNKLTPVGMDDLYLVSIASLKTP

SEQ ID NO: 41447 - protein, 27 aa, Artificial Sequence
  Cyclic GFR-binding peptide
  MOD_RES (1)..(1): Xaa is C or S
XSKVVMRYKKLVKPTRGVFYLISIANL

SEQ ID NO: 41448 - protein, 22 aa, Artificial Sequence
  Cyclic GFR-binding peptide
NQYNKLIVNSSDDLYLVSIASL

SEQ ID NO: 41449 - protein, 26 aa, Artificial Sequence
  Cyclic GFR-binding peptide
VVMERHKRLVVKDYEDYYLMSTASLE

SEQ ID NO: 41450 - protein, 41 aa, Artificial Sequence; identical to SEQ ID NO: 3967
  Cyclic GFR-binding peptide
  MOD_RES (1)..(38): Xaa is C or S

SEQ ID NO: 41451 - protein, 28 aa, Artificial Sequence
  Cyclic GFR-binding peptide
VMDRYKKLVVKENEDFYLMSIANLETPV

SEQ ID NO: 41452 - protein, 41 aa, Artificial Sequence; identical to SEQ ID NO: 3968
  Cyclic GFR-binding peptide
  MOD_RES (2)..(4)..(36)..(37): Xaa is C or S

SEQ ID NO: 41453 - protein, 29 aa, Artificial Sequence
  Cyclic GFR-binding peptide
  MOD_RES (29)..(29): Xaa is C or S
VVMYHYKLVKPTRGVKYLISIPSLDQPVX

SEQ ID NO: 41454 - protein, 26 aa, Artificial Sequence
  Cyclic GFR-binding peptide
  MOD_RES (1)..(1): Xaa is C or S
XSKVVMYHYKLVKPTRGVKYLISIPS

SEQ ID NO: 41455 - protein, 27 aa, Artificial Sequence
  Cyclic GFR-binding peptide
DELTRHKRLFIPKKRVIEYYLVSTASL

SEQ ID NO: 41456 - protein, 27 aa, Artificial Sequence
  Cyclic GFR-binding peptide
  MOD_RES (2)..(2): Xaa is C or S
KXSKVIMYHYKLIKPTKGIKYLISIPS

SEQ ID NO: 41457 - protein, 24 aa, Artificial Sequence
  Cyclic GFR-binding peptide
VIMRYKKLVKPKRGVFYLISIANL

SEQ ID NO: 41458 - protein, 29 aa, Artificial Sequence
  Cyclic GFR-binding peptide
  MOD_RES (27)..(28): Xaa is C or S
ERHKRLVVKDYEDYYLMSTASLETPVXXA

SEQ ID NO: 41459 - protein, 37 aa, Artificial Sequence; identical to SEQ ID NO: 3970
  Cyclic GFR-binding peptide
  MOD_RES (2)..(4)..(35)..(36): Xaa is C or S

SEQ ID NO: 41460 - protein, 44 aa, Artificial Sequence; identical to SEQ ID NO: 3971
  Cyclic GFR-binding peptide
  MOD_RES (2)..(4)..(41): Xaa is C or S

SEQ ID NO: 41461 - protein, 29 aa, Artificial Sequence
  Cyclic GFR-binding peptide
  MOD_RES (29)..(29): Xaa is C or S
VMNQYNKLIVNSSDDLYLVSIASLKTPAX

SEQ ID NO: 41462 - protein, 31 aa, Artificial Sequence
  Cyclic GFR-binding peptide
  MOD_RES (2)..(2): Xaa is C or S
GXEAVSMGERHKRLTPVGMDDYYLVSTASLK

SEQ ID NO: 41463 - protein, 27 aa, Artificial Sequence
  Cyclic GFR-binding peptide
KVVMRYKKLVKPTRGVFYLISIANLDQ

SEQ ID NO: 41464 - protein, 29 aa, Artificial Sequence
  Cyclic GFR-binding peptide
EVVMERHKRLVVKDYEDYYLMSTASLETP

SEQ ID NO: 41465 - protein, 34 aa, Artificial Sequence; identical to SEQ ID NO: 3975
  Cyclic GFR-binding peptide
  MOD_RES (1)..(3)..(34): Xaa is C or S

SEQ ID NO: 41466 - protein, 36 aa, Artificial Sequence; identical to SEQ ID NO: 3976
  Cyclic GFR-binding peptide
  MOD_RES (2)..(33)..(34): Xaa is C or S

SEQ ID NO: 41467 - protein, 35 aa, Artificial Sequence
  Cyclic GFR-binding peptide
  MOD_RES (30)..(31): Xaa is C or S
VVMERYKKLVVKDYEDFYLMSIANLETPVXXAKPI

SEQ ID NO: 41468 - protein, 27 aa, Artificial Sequence
  Cyclic GFR-binding peptide
  MOD_RES (2)..(2): Xaa is C or S
KXSRVIMYHYKLVKPKRGVKYLISIPS

SEQ ID NO: 41469 - protein, 36 aa, Artificial Sequence; identical to SEQ ID NO: 3977
  Cyclic GFR-binding peptide
  MOD_RES (2)..(35)..(36): Xaa is C or S

SEQ ID NO: 41470 - protein, 34 aa, Artificial Sequence
  Cyclic GFR-binding peptide
  MOD_RES (29)..(29): Xaa is C or S
VMNQYNKLIVNSSDDLYLVSIASLKTPAXTPKTV

SEQ ID NO: 41471 - protein, 30 aa, Artificial Sequence
  Cyclic GFR-binding peptide
  MOD_RES (27)..(28): Xaa is C or S
MQYNKLVKPTRGVLYLISIASLDQPVXXPS

SEQ ID NO: 41472 - protein, 32 aa, Artificial Sequence
  Cyclic GFR-binding peptide
  MOD_RES (26)..(27): Xaa is C or S
RYKKLIVNNSSDFYLVSIANLKTPAXXAKPVA

SEQ ID NO: 41473 - protein, 27 aa, Artificial Sequence
  Cyclic GFR-binding peptide
  MOD_RES (26)..(27): Xaa is C or S
RHKRLIVNSSDDYYLVSTASLQTPAXX

SEQ ID NO: 41474 - protein, 34 aa, Artificial Sequence
  Cyclic GFR-binding peptide
  MOD_RES (30)..(30): Xaa is C or S
RYKKLFIPKKRVIEFYLVSIANLQVQTPRXQVNR

SEQ ID NO: 41475 - protein, 35 aa, Artificial Sequence; identical to SEQ ID NO: 3980
  Cyclic GFR-binding peptide

SEQ ID NO: 41476 - protein, 42 aa, Artificial Sequence; identical to SEQ ID NO: 3981
  Cyclic GFR-binding peptide
  MOD_RES (1)..(38): Xaa is C or S

SEQ ID NO: 41477 - protein, 34 aa, Artificial Sequence; identical to SEQ ID NO: 3983
  Cyclic GFR-binding peptide
  MOD_RES (1)..(32)..(33): Xaa is C or S

SEQ ID NO: 41478 - protein, 29 aa, Artificial Sequence
  Cyclic GFR-binding peptide
GEVVMDYHYKLVVKENEDKYLMSIPSLET

SEQ ID NO: 41479 - protein, 28 aa, Artificial Sequence
  Cyclic GFR-binding peptide
  MOD_RES (26)..(27): Xaa is C or S
RYKKLVVKENEDFYLMSIANLETPVXXA

SEQ ID NO: 41480 - protein, 31 aa, Artificial Sequence
  Cyclic GFR-binding peptide
  MOD_RES (28)..(29): Xaa is C or S
MERHKRLVVKDYEDYYLMSTASLETPVXXAK

SEQ ID NO: 41481 - protein, 27 aa, Artificial Sequence
  Cyclic GFR-binding peptide
  MOD_RES (26)..(27): Xaa is C or S
YHYKLIVNNSSDKYLVSIPSLKTPAXX

SEQ ID NO: 41482 - protein, 42 aa, Artificial Sequence; identical to SEQ ID NO: 3985
  Cyclic GFR-binding peptide
  MOD_RES (2)..(4)..(37)..(38): Xaa is C or S

SEQ ID NO: 41483 - protein, 29 aa, Artificial Sequence
  Cyclic GFR-binding peptide
  MOD_RES (27)..(28): Xaa is C or S
ERYKKLTPVGMDDFYLVSIANLKTPVXXA

SEQ ID NO: 41484 - protein, 32 aa, Artificial Sequence
  Cyclic GFR-binding peptide
  MOD_RES (28)..(29): Xaa is C or S
MNYHYKLIVNSSDDKYLVSIPSLQTPAXXPKP

SEQ ID NO: 41485 - protein, 39 aa, Artificial Sequence; identical to SEQ ID NO: 3989
  Cyclic GFR-binding peptide
  MOD_RES (1)..(33): Xaa is C or S

SEQ ID NO: 41486 - protein, 25 aa, Artificial Sequence
  Cyclic GFR-binding peptide
RVIMQYNKLVKPKRGVLYLISIASL

SEQ ID NO: 41487 - protein, 37 aa, Artificial Sequence; identical to SEQ ID NO: 3990
  Cyclic GFR-binding peptide
  MOD_RES (2)..(4)..(36): Xaa is C or S

SEQ ID NO: 41488 - protein, 30 aa, Artificial Sequence
  Cyclic GFR-binding peptide
  MOD_RES (1)..(3): Xaa is C or S
XKXSRVIMRYKKLVKPKRGVFYLISIANLA

SEQ ID NO: 41489 - protein, 34 aa, Artificial Sequence
  Cyclic GFR-binding peptide
  MOD_RES (1)..(1): Xaa is C or S
XALHDELTYHYKLFIPKKRVIEKYLVSIPSLQVQ

SEQ ID NO: 41490 - protein, 27 aa, Artificial Sequence
  Cyclic GFR-binding peptide
GEVVMDYHYKLVVKENEDKYLMSIPSL

SEQ ID NO: 41491 - protein, 29 aa, Artificial Sequence
  Cyclic GFR-binding peptide
  MOD_RES (29)..(29): Xaa is C or S
VMNRHKRLIVNSSDDYYLVSTASLKTPAX

SEQ ID NO: 41492 - protein, 33 aa, Artificial Sequence
  Cyclic GFR-binding peptide
  MOD_RES (27)..(28): Xaa is C or S
MQYNKLIKPTKGILYLISIASLDQSVXXPSASA

SEQ ID NO: 41493 - protein, 33 aa, Artificial Sequence; identical to SEQ ID NO: 3992
  Cyclic GFR-binding peptide
  MOD_RES (31)..(31): Xaa is C or S

SEQ ID NO: 41494 - protein, 32 aa, Artificial Sequence
  Cyclic GFR-binding peptide
  MOD_RES (28)..(29): Xaa is C or S
MNRHKRLIVNSSDDYYLVSTASLQTPAXXPKP

SEQ ID NO: 41495 - protein, 22 aa, Artificial Sequence
  Cyclic GFR-binding peptide
VMRYKKLVKPTRGVFYLISIAN

SEQ ID NO: 41496 - protein, 30 aa, Artificial Sequence
  Cyclic GFR-binding peptide
  MOD_RES (27)..(28): Xaa is C or S
NYHYKLIVNSSDDKYLVSIPSLQTPAXXPK

SEQ ID NO: 41497 - protein, 30 aa, Artificial Sequence
  Cyclic GFR-binding peptide
  MOD_RES (26)..(27): Xaa is C or S
QYNKLVKPKRGVLYLISIASLAQPVXXPAA

SEQ ID NO: 41498 - protein, 37 aa, Artificial Sequence
  Cyclic GFR-binding peptide
  MOD_RES (33)..(33): Xaa is C or S
ELTRHKRLFIPKKRVIEYYLVSTASLQVQTPRXQVNR

SEQ ID NO: 41499 - protein, 31 aa, Artificial Sequence
  Cyclic GFR-binding peptide
  MOD_RES (29)..(30): Xaa is C or S
VMNQYNKLIVNNSSDLYLVSIASLKTPAXXA

SEQ ID NO: 41500 - protein, 39 aa, Artificial Sequence; identical to SEQ ID NO: 3994
  Cyclic GFR-binding peptide
  MOD_RES (2)..(33)..(34): Xaa is C or S

SEQ ID NO: 41501 - protein, 35 aa, Artificial Sequence; identical to SEQ ID NO: 3995
  Cyclic GFR-binding peptide
  MOD_RES (1)..(3)..(34)..(35): Xaa is C or S

SEQ ID NO: 41502 - protein, 28 aa, Artificial Sequence
  Cyclic GFR-binding peptide
TRYKKLFIPKKRVIEFYLVSIANLQVQT

SEQ ID NO: 41503 - protein, 20 aa, Artificial Sequence
  Cyclic GFR-binding peptide
QYNKLVVKENEDLYLMSIAS

SEQ ID NO: 41504 - protein, 30 aa, Artificial Sequence
  Cyclic GFR-binding peptide
TRYKKLFIPKKRVIEFYLVSIANLQVQTPR

SEQ ID NO: 41505 - protein, 31 aa, Artificial Sequence
  Cyclic GFR-binding peptide
  MOD_RES (2)..(2): Xaa is C or S
KXALHDELTQYNKLFIPKKRVIELYLVSIAS

SEQ ID NO: 41506 - protein, 31 aa, Artificial Sequence
  Cyclic GFR-binding peptide
  MOD_RES (2)..(4): Xaa is C or S
HXGXSRVVMNQYNKLIVNSSDDLYLVSIASL

SEQ ID NO: 41507 - protein, 40 aa, Artificial Sequence; identical to SEQ ID NO: 4002
  Cyclic GFR-binding peptide
  MOD_RES (2)..(4)..(36)..(37): Xaa is C or S

SEQ ID NO: 41508 - protein, 31 aa, Artificial Sequence
  Cyclic GFR-binding peptide
  MOD_RES (28)..(29): Xaa is C or S
IMRYKKLIKPTKGIFYLISIANLDQSVXXPS

SEQ ID NO: 41509 - protein, 32 aa, Artificial Sequence
  Cyclic GFR-binding peptide
ALHDELTRYKKLFIPKKRVIEFYLVSIANLQV

SEQ ID NO: 41510 - protein, 26 aa, Artificial Sequence
  Cyclic GFR-binding peptide
KVVMQYNKLVKPTRGVLYLISIASLD

SEQ ID NO: 41511 - protein, 26 aa, Artificial Sequence
  Cyclic GFR-binding peptide
VVMRHKRLVKPTRGVYYLISTASLDQ

SEQ ID NO: 41512 - protein, 26 aa, Artificial Sequence
  Cyclic GFR-binding peptide
TQYNKLFIPKKRVIELYLVSIASLQV

SEQ ID NO: 41513 - protein, 31 aa, Artificial Sequence
  Cyclic GFR-binding peptide
  MOD_RES (30)..(31): Xaa is C or S
KVIMRHKRLIKPTKGIYYLISTASLDQSVXX

SEQ ID NO: 41514 - protein, 31 aa, Artificial Sequence
  Cyclic GFR-binding peptide
  MOD_RES (2)..(2): Xaa is C or S
GXSRVVMNQYNKLIVNSSDDLYLVSIASLKT

SEQ ID NO: 41515 - protein, 33 aa, Artificial Sequence; identical to SEQ ID NO: 4005
  Cyclic GFR-binding peptide
  MOD_RES (2)..(33): Xaa is C or S

SEQ ID NO: 41516 - protein, 26 aa, Artificial Sequence
  Cyclic GFR-binding peptide
LTRYKKLFIPKKRVIEFYLVSIANLQ

SEQ ID NO: 41517 - protein, 30 aa, Artificial Sequence
  Cyclic GFR-binding peptide
  MOD_RES (2)..(4): Xaa is C or S
SXKXSKVVMRYKKLVKPTRGVFYLISIANL

SEQ ID NO: 41518 - protein, 33 aa, Artificial Sequence
  Cyclic GFR-binding peptide
  MOD_RES (28)..(29): Xaa is C or S
VMYHYKLVKPTRGVKYLISIPSLDQPVXXPSAS

SEQ ID NO: 41519 - protein, 28 aa, Artificial Sequence
  Cyclic GFR-binding peptide
EVVMERHKRLVVKDYEDYYLMSTASLET

SEQ ID NO: 41520 - protein, 33 aa, Artificial Sequence; identical to SEQ ID NO: 4007
  Cyclic GFR-binding peptide
  MOD_RES (2)..(33): Xaa is C or S

SEQ ID NO: 41521 - protein, 36 aa, Artificial Sequence; identical to SEQ ID NO: 4009
  Cyclic GFR-binding peptide
  MOD_RES (2)..(33)..(34): Xaa is C or S

SEQ ID NO: 41522 - protein, 26 aa, Artificial Sequence
  Cyclic GFR-binding peptide
VVMNQYNKLIVNNSSDLYLVSIASLK

SEQ ID NO: 41523 - protein, 40 aa, Artificial Sequence; identical to SEQ ID NO: 4010
  Cyclic GFR-binding peptide
  MOD_RES (2)..(34): Xaa is C or S

SEQ ID NO: 41524 - protein, 29 aa, Artificial Sequence
  Cyclic GFR-binding peptide
  MOD_RES (1)..(1): Xaa is C or S
XGEVVMDRHKRLVVKENEDYYLMSTASLE

SEQ ID NO: 41525 - protein, 24 aa, Artificial Sequence
  Cyclic GFR-binding peptide
EYHYKLVVKDYEDKYLMSIPSLET

SEQ ID NO: 41526 - protein, 20 aa, Artificial Sequence
  Cyclic GFR-binding peptide
RHKRLVKPKRGVYYLISTAS

SEQ ID NO: 41527 - protein, 36 aa, Artificial Sequence; identical to SEQ ID NO: 4013
  Cyclic GFR-binding peptide
  MOD_RES (2)..(4)..(35)..(36): Xaa is C or S

SEQ ID NO: 41528 - protein, 40 aa, Artificial Sequence; identical to SEQ ID NO: 4014
  Cyclic GFR-binding peptide
  MOD_RES (2)..(4)..(36)..(37): Xaa is C or S

SEQ ID NO: 41529 - protein, 40 aa, Artificial Sequence; identical to SEQ ID NO: 4015
  Cyclic GFR-binding peptide
  MOD_RES (2)..(35)..(36): Xaa is C or S

SEQ ID NO: 41530 - protein, 32 aa, Artificial Sequence; identical to SEQ ID NO: 4016
  Cyclic GFR-binding peptide
  MOD_RES (31)..(32): Xaa is C or S

SEQ ID NO: 41531 - protein, 27 aa, Artificial Sequence
  Cyclic GFR-binding peptide
  MOD_RES (27)..(27): Xaa is C or S
ERHKRLVVKDYEDYYLMSTASLETPVX

SEQ ID NO: 41532 - protein, 27 aa, Artificial Sequence
  Cyclic GFR-binding peptide
LTRYKKLFIPKKRVIEFYLVSIANLQV

SEQ ID NO: 41533 - protein, 36 aa, Artificial Sequence; identical to SEQ ID NO: 4020
  Cyclic GFR-binding peptide
  MOD_RES (1)..(34)..(35): Xaa is C or S

SEQ ID NO: 41534 - protein, 32 aa, Artificial Sequence
  Cyclic GFR-binding peptide
  MOD_RES (2)..(4): Xaa is C or S
SXKXSKVIMRHKRLIKPTKGIYYLISTASLDQ

SEQ ID NO: 41535 - protein, 32 aa, Artificial Sequence; identical to SEQ ID NO: 4021
  Cyclic GFR-binding peptide
  MOD_RES (1)..(1): Xaa is C or S

SEQ ID NO: 41536 - protein, 30 aa, Artificial Sequence; identical to SEQ ID NO: 1904
  Cyclic GFR-binding peptide

SEQ ID NO: 41537 - protein, 39 aa, Artificial Sequence; identical to SEQ ID NO: 4023
  Cyclic GFR-binding peptide
  MOD_RES (2)..(33)..(34): Xaa is C or S

SEQ ID NO: 41538 - protein, 31 aa, Artificial Sequence
  Cyclic GFR-binding peptide
  MOD_RES (30)..(31): Xaa is C or S
VVMNRYKKLIVNNSSDFYLVSIANLKTPAXX

SEQ ID NO: 41539 - protein, 23 aa, Artificial Sequence
  Cyclic GFR-binding peptide
RYKKLVKPKRGVFYLISIANLAQ

SEQ ID NO: 41540 - protein, 38 aa, Artificial Sequence; identical to SEQ ID NO: 4024
  Cyclic GFR-binding peptide
  MOD_RES (1)..(3)..(35)..(36): Xaa is C or S

SEQ ID NO: 41541 - protein, 33 aa, Artificial Sequence
  Cyclic GFR-binding peptide
  MOD_RES (29)..(30): Xaa is C or S
MGEQYNKLTPVGMDDLYLVSIASLKTPVXXAKG

SEQ ID NO: 41542 - protein, 33 aa, Artificial Sequence
  Cyclic GFR-binding peptide
  MOD_RES (28)..(29): Xaa is C or S
MNQYNKLIVNNSSDLYLVSIASLKTPAXXAKPV

SEQ ID NO: 41543 - protein, 36 aa, Artificial Sequence; identical to SEQ ID NO: 4026
  Cyclic GFR-binding peptide
  MOD_RES (1)..(3)..(35)..(36): Xaa is C or S

SEQ ID NO: 41544 - protein, 28 aa, Artificial Sequence
  Cyclic GFR-binding peptide
  MOD_RES (26)..(27): Xaa is C or S
RHKRLIKPTKGIYYLISTASLDQSVXXP

SEQ ID NO: 41545 - protein, 33 aa, Artificial Sequence
  Cyclic GFR-binding peptide
  MOD_RES (1)..(3): Xaa is C or S
XGXSRVVMNYHYKLIVNSSDDKYLVSIPSLKTP

SEQ ID NO: 41546 - protein, 32 aa, Artificial Sequence
  Cyclic GFR-binding peptide
  MOD_RES (1)..(3): Xaa is C or S
XGXGEVVMERHKRLVVKDYEDYYLMSTASLET

SEQ ID NO: 41547 - protein, 34 aa, Artificial Sequence; identical to SEQ ID NO: 4030
  Cyclic GFR-binding peptide
  MOD_RES (2)..(34): Xaa is C or S

SEQ ID NO: 41548 - protein, 38 aa, Artificial Sequence; identical to SEQ ID NO: 4031
  Cyclic GFR-binding peptide
  MOD_RES (2)..(34)..(35): Xaa is C or S

SEQ ID NO: 41549 - protein, 37 aa, Artificial Sequence; identical to SEQ ID NO: 4032
  Cyclic GFR-binding peptide
  MOD_RES (31)..(32): Xaa is C or S

SEQ ID NO: 41550 - protein, 26 aa, Artificial Sequence
  Cyclic GFR-binding peptide
VVMQYNKLVKPTRGVLYLISIASLDQ

SEQ ID NO: 41551 - protein, 33 aa, Artificial Sequence; identical to SEQ ID NO: 4033
  Cyclic GFR-binding peptide
  MOD_RES (31)..(32): Xaa is C or S

SEQ ID NO: 41552 - protein, 33 aa, Artificial Sequence
  Cyclic GFR-binding peptide
  MOD_RES (28)..(29): Xaa is C or S
GEQYNKLTPVGMDDLYLVSIASLKTPVXXAKGV

SEQ ID NO: 41553 - protein, 35 aa, Artificial Sequence; identical to SEQ ID NO: 4034
  Cyclic GFR-binding peptide
  MOD_RES (31)..(32): Xaa is C or S

SEQ ID NO: 41554 - protein, 25 aa, Artificial Sequence
  Cyclic GFR-binding peptide
MNRHKRLIVNSSDDYYLVSTASLKT

SEQ ID NO: 41555 - protein, 21 aa, Artificial Sequence
  Cyclic GFR-binding peptide
RHKRLVVKDYEDYYLMSTASL

SEQ ID NO: 41556 - protein, 28 aa, Artificial Sequence
  Cyclic GFR-binding peptide
  MOD_RES (2)..(2): Xaa is C or S
KXSRVIMRHKRLVKPKRGVYYLISTASL

SEQ ID NO: 41557 - protein, 29 aa, Artificial Sequence
  Cyclic GFR-binding peptide
ALHDELTRHKRLFIPKKRVIEYYLVSTAS

SEQ ID NO: 41558 - protein, 25 aa, Artificial Sequence
  Cyclic GFR-binding peptide
QYNKLVKPKRGVLYLISIASLAQPV

SEQ ID NO: 41559 - protein, 22 aa, Artificial Sequence
  Cyclic GFR-binding peptide
QYNKLVKPKRGVLYLISIASLA

SEQ ID NO: 41560 - protein, 34 aa, Artificial Sequence
  Cyclic GFR-binding peptide
  MOD_RES (28)..(29): Xaa is C or S
MEYHYKLVVKDYEDKYLMSIPSLETPVXXAKPIS

SEQ ID NO: 41561 - protein, 30 aa, Artificial Sequence
  Cyclic GFR-binding peptide
AKVVMNYHYKLIVNNSSDKYLVSIPSLKTP

SEQ ID NO: 41562 - protein, 24 aa, Artificial Sequence
  Cyclic GFR-binding peptide
GERHKRLTPVGMDDYYLVSTASLK

SEQ ID NO: 41563 - protein, 37 aa, Artificial Sequence; identical to SEQ ID NO: 4036
  Cyclic GFR-binding peptide
  MOD_RES (2)..(4)..(35)..(36): Xaa is C or S

SEQ ID NO: 41564 - protein, 27 aa, Artificial Sequence
  Cyclic GFR-binding peptide
  MOD_RES (27)..(27): Xaa is C or S
DYHYKLVVKENEDKYLMSIPSLETPVX

SEQ ID NO: 41565 - protein, 33 aa, Artificial Sequence
  Cyclic GFR-binding peptide
  MOD_RES (28)..(29): Xaa is C or S
MDRHKRLVVKENEDYYLMSTASLETPVXXAKPI

SEQ ID NO: 41566 - protein, 39 aa, Artificial Sequence; identical to SEQ ID NO: 4041
  Cyclic GFR-binding peptide
  MOD_RES (2)..(39): Xaa is C or S

SEQ ID NO: 41567 - protein, 22 aa, Artificial Sequence
  Cyclic GFR-binding peptide
EYHYKLVVKDYEDKYLMSIPSL

SEQ ID NO: 41568 - protein, 28 aa, Artificial Sequence
  Cyclic GFR-binding peptide
  MOD_RES (1)..(3): Xaa is C or S
XKXSRVIMRYKKLVKPKRGVFYLISIAN

SEQ ID NO: 41569 - protein, 25 aa, Artificial Sequence
  Cyclic GFR-binding peptide
VMERHKRLVVKDYEDYYLMSTASLE

SEQ ID NO: 41570 - protein, 30 aa, Artificial Sequence
  Cyclic GFR-binding peptide
  MOD_RES (28)..(29): Xaa is C or S
MDYHYKLVVKENEDKYLMSIPSLETPVXXA

SEQ ID NO: 41571 - protein, 36 aa, Artificial Sequence; identical to SEQ ID NO: 4043
  Cyclic GFR-binding peptide
  MOD_RES (32)..(33): Xaa is C or S

SEQ ID NO: 41572 - protein, 39 aa, Artificial Sequence; identical to SEQ ID NO: 4044
  Cyclic GFR-binding peptide
  MOD_RES (2)..(33)..(34): Xaa is C or S

SEQ ID NO: 41573 - protein, 37 aa, Artificial Sequence; identical to SEQ ID NO: 4045
  Cyclic GFR-binding peptide
  MOD_RES (37)..(37): Xaa is C or S

SEQ ID NO: 41574 - protein, 27 aa, Artificial Sequence
  Cyclic GFR-binding peptide
VMEYHYKLVVKDYEDKYLMSIPSLETP

SEQ ID NO: 41575 - protein, 24 aa, Artificial Sequence
  Cyclic GFR-binding peptide
IMQYNKLVKPKRGVLYLISIASLA

SEQ ID NO: 41576 - protein, 26 aa, Artificial Sequence
  Cyclic GFR-binding peptide
YHYKLFIPKKRVIEKYLVSIPSLQVQ

SEQ ID NO: 41577 - protein, 31 aa, Artificial Sequence
  Cyclic GFR-binding peptide
  MOD_RES (2)..(2): Xaa is C or S
KXALHDELTRHKRLFIPKKRVIEYYLVSTAS

SEQ ID NO: 41578 - protein, 36 aa, Artificial Sequence; identical to SEQ ID NO: 4046
  Cyclic GFR-binding peptide
  MOD_RES (2)..(34)..(35): Xaa is C or S

SEQ ID NO: 41579 - protein, 28 aa, Artificial Sequence
  Cyclic GFR-binding peptide
LHDELTRHKRLFIPKKRVIEYYLVSTAS

SEQ ID NO: 41580 - protein, 36 aa, Artificial Sequence; identical to SEQ ID NO: 4048
  Cyclic GFR-binding peptide
  MOD_RES (1)..(32)..(33): Xaa is C or S

SEQ ID NO: 41581 - protein, 22 aa, Artificial Sequence
  Cyclic GFR-binding peptide
RHKRLVKPKRGVYYLISTASLA

SEQ ID NO: 41582 - protein, 31 aa, Artificial Sequence
  Cyclic GFR-binding peptide
  MOD_RES (29)..(29): Xaa is C or S
VMNRHKRLIVNSSDDYYLVSTASLKTPAXTP

SEQ ID NO: 41583 - protein, 32 aa, Artificial Sequence
  Cyclic GFR-binding peptide
  MOD_RES (28)..(28): Xaa is C or S
MNQYNKLIVNSSDDLYLVSIASLKTPAXTPKT

SEQ ID NO: 41584 - protein, 32 aa, Artificial Sequence
  Cyclic GFR-binding peptide
  MOD_RES (2)..(4): Xaa is C or S
SXKXSKVIMQYNKLIKPTKGILYLISIASLDQ

SEQ ID NO: 41585 - protein, 34 aa, Artificial Sequence
  Cyclic GFR-binding peptide
  MOD_RES (34)..(34): Xaa is C or S
DELTYHYKLFIPKKRVIEKYLVSIPSLQVQTPRX

SEQ ID NO: 41586 - protein, 35 aa, Artificial Sequence; identical to SEQ ID NO: 4052
  Cyclic GFR-binding peptide
  MOD_RES (35)..(35): Xaa is C or S

SEQ ID NO: 41587 - protein, 34 aa, Artificial Sequence; identical to SEQ ID NO: 4054
  Cyclic GFR-binding peptide
  MOD_RES (1)..(32)..(33): Xaa is C or S

SEQ ID NO: 41588 - protein, 25 aa, Artificial Sequence
  Cyclic GFR-binding peptide
VVMNRHKRLIVNSSDDYYLVSTASL

SEQ ID NO: 41589 - protein, 38 aa, Artificial Sequence; identical to SEQ ID NO: 4055
  Cyclic GFR-binding peptide
  MOD_RES (37)..(37): Xaa is C or S

SEQ ID NO: 41590 - protein, 37 aa, Artificial Sequence; identical to SEQ ID NO: 4056
  Cyclic GFR-binding peptide
  MOD_RES (2)..(4)..(36)..(37): Xaa is C or S

SEQ ID NO: 41591 - protein, 30 aa, Artificial Sequence
  Cyclic GFR-binding peptide
  MOD_RES (28)..(29): Xaa is C or S
MDRHKRLVVKENEDYYLMSTASLETPVXXA

SEQ ID NO: 41592 - protein, 33 aa, Artificial Sequence; identical to SEQ ID NO: 4057
  Cyclic GFR-binding peptide
  MOD_RES (1)..(1): Xaa is C or S

SEQ ID NO: 41593 - protein, 37 aa, Artificial Sequence; identical to SEQ ID NO: 4058
  Cyclic GFR-binding peptide
  MOD_RES (2)..(4)..(36)..(37): Xaa is C or S

SEQ ID NO: 41594 - protein, 34 aa, Artificial Sequence
  Cyclic GFR-binding peptide
  MOD_RES (29)..(30): Xaa is C or S
VIMYHYKLIKPTKGIKYLISIPSLDQSVXXPSAS

SEQ ID NO: 41595 - protein, 34 aa, Artificial Sequence
  Cyclic GFR-binding peptide
  MOD_RES (2)..(4): Xaa is C or S
RXGXGEVVMERHKRLVVKDYEDYYLMSTASLETP

SEQ ID NO: 41596 - protein, 32 aa, Artificial Sequence
  Cyclic GFR-binding peptide
  MOD_RES (27)..(28): Xaa is C or S
EQYNKLTPVGMDDLYLVSIASLKTPVXXAKGV

SEQ ID NO: 41597 - protein, 32 aa, Artificial Sequence; identical to SEQ ID NO: 4063
  Cyclic GFR-binding peptide
  MOD_RES (32)..(32): Xaa is C or S

SEQ ID NO: 41598 - protein, 35 aa, Artificial Sequence; identical to SEQ ID NO: 4062
  Cyclic GFR-binding peptide
  MOD_RES (31)..(32): Xaa is C or S

SEQ ID NO: 41599 - protein, 25 aa, Artificial Sequence
  Cyclic GFR-binding peptide
GERYKKLTPVGMDDFYLVSIANLKT

SEQ ID NO: 41600 - protein, 40 aa, Artificial Sequence; identical to SEQ ID NO: 4064
  Cyclic GFR-binding peptide
  MOD_RES (1)..(3)..(35)..(36): Xaa is C or S

SEQ ID NO: 41601 - protein, 35 aa, Artificial Sequence
  Cyclic GFR-binding peptide
  MOD_RES (30)..(31): Xaa is C or S
KVVMQYNKLVKPTRGVLYLISIASLDQPVXXPSAS

SEQ ID NO: 41602 - protein, 23 aa, Artificial Sequence
  Cyclic GFR-binding peptide
QYNKLFIPKKRVIELYLVSIASL

SEQ ID NO: 41603 - protein, 34 aa, Artificial Sequence
  Cyclic GFR-binding peptide
  MOD_RES (30)..(30): Xaa is C or S
VVMNYHYKLIVNSSDDKYLVSIPSLKTPAXTPKT

SEQ ID NO: 41604 - protein, 24 aa, Artificial Sequence
  Cyclic GFR-binding peptide
VMRHKRLVKPTRGVYYLISTASLD

SEQ ID NO: 41605 - protein, 30 aa, Artificial Sequence
  Cyclic GFR-binding peptide
  MOD_RES (28)..(29): Xaa is C or S
MNQYNKLIVNSSDDLYLVSIASLQTPAXXP

SEQ ID NO: 41606 - protein, 32 aa, Artificial Sequence
  Cyclic GFR-binding peptide
  MOD_RES (2)..(2): Xaa is C or S
KXALHDELTRYKKLFIPKKRVIEFYLVSIANL

SEQ ID NO: 41607 - protein, 27 aa, Artificial Sequence
  Cyclic GFR-binding peptide
  MOD_RES (1)..(1): Xaa is C or S
XAKVVMNYHYKLIVNNSSDKYLVSIPS

SEQ ID NO: 41608 - protein, 27 aa, Artificial Sequence
  Cyclic GFR-binding peptide
  MOD_RES (27)..(27): Xaa is C or S
MQYNKLVKPKRGVLYLISIASLAQPVX

SEQ ID NO: 41609 - protein, 32 aa, Artificial Sequence
  Cyclic GFR-binding peptide
  MOD_RES (26)..(26): Xaa is C or S
RHKRLIVNSSDDYYLVSTASLKTPAXTPKTVH

SEQ ID NO: 41610 - protein, 24 aa, Artificial Sequence
  Cyclic GFR-binding peptide
QYNKLIVNNSSDLYLVSIASLKTP

SEQ ID NO: 41611 - protein, 38 aa, Artificial Sequence; identical to SEQ ID NO: 4065
  Cyclic GFR-binding peptide
  MOD_RES (37)..(37): Xaa is C or S

SEQ ID NO: 41612 - protein, 30 aa, Artificial Sequence
  Cyclic GFR-binding peptide
  MOD_RES (2)..(4): Xaa is C or S
HXGXSRVVMNRHKRLIVNSSDDYYLVSTAS

SEQ ID NO: 41613 - protein, 39 aa, Artificial Sequence; identical to SEQ ID NO: 4067
  Cyclic GFR-binding peptide
  MOD_RES (2)..(35)..(36): Xaa is C or S

SEQ ID NO: 41614 - protein, 29 aa, Artificial Sequence
  Cyclic GFR-binding peptide
  MOD_RES (2)..(2): Xaa is C or S
GXGEVVMDRHKRLVVKENEDYYLMSTASL

SEQ ID NO: 41615 - protein, 24 aa, Artificial Sequence
  Cyclic GFR-binding peptide
VMYHYKLVKPTRGVKYLISIPSLD

SEQ ID NO: 41616 - protein, 29 aa, Artificial Sequence
  Cyclic GFR-binding peptide
  MOD_RES (27)..(28): Xaa is C or S
ERHKRLTPVGMDDYYLVSTASLKTPVXXA

SEQ ID NO: 41617 - protein, 29 aa, Artificial Sequence
  Cyclic GFR-binding peptide
TRYKKLFIPKKRVIEFYLVSIANLQVQTP

SEQ ID NO: 41618 - protein, 27 aa, Artificial Sequence
  Cyclic GFR-binding peptide
LTRHKRLFIPKKRVIEYYLVSTASLQV

SEQ ID NO: 41619 - protein, 31 aa, Artificial Sequence
  Cyclic GFR-binding peptide
  MOD_RES (27)..(28): Xaa is C or S
DYHYKLVVKENEDKYLMSIPSLETPVXXAKP

SEQ ID NO: 41620 - protein, 24 aa, Artificial Sequence
  Cyclic GFR-binding peptide
RHKRLVVKDYEDYYLMSTASLETP

SEQ ID NO: 41621 - protein, 31 aa, Artificial Sequence
  Cyclic GFR-binding peptide
  MOD_RES (1)..(1): Xaa is C or S
XGEVVMDRHKRLVVKENEDYYLMSTASLETP

SEQ ID NO: 41622 - protein, 33 aa, Artificial Sequence
  Cyclic GFR-binding peptide
  MOD_RES (1)..(3): Xaa is C or S
XGXEAVSMGERHKRLTPVGMDDYYLVSTASLKT

SEQ ID NO: 41623 - protein, 31 aa, Artificial Sequence
  Cyclic GFR-binding peptide
  MOD_RES (27)..(28): Xaa is C or S
MYHYKLVKPTRGVKYLISIPSLDQPVXXPSA

SEQ ID NO: 41624 - protein, 26 aa, Artificial Sequence
  Cyclic GFR-binding peptide
ERYKKLTPVGMDDFYLVSIANLKTPV

SEQ ID NO: 41625 - protein, 31 aa, Artificial Sequence
  Cyclic GFR-binding peptide
  MOD_RES (29)..(29): Xaa is C or S
VMNYHYKLIVNSSDDKYLVSIPSLKTPAXTP

SEQ ID NO: 41626 - protein, 36 aa, Artificial Sequence; identical to SEQ ID NO: 4070
  Cyclic GFR-binding peptide
  MOD_RES (2)..(34): Xaa is C or S

SEQ ID NO: 41627 - protein, 37 aa, Artificial Sequence; identical to SEQ ID NO: 4071
  Cyclic GFR-binding peptide
  MOD_RES (37)..(37): Xaa is C or S

SEQ ID NO: 41628 - protein, 28 aa, Artificial Sequence
  Cyclic GFR-binding peptide
GEVVMDRHKRLVVKENEDYYLMSTASLE

SEQ ID NO: 41629 - protein, 29 aa, Artificial Sequence
  Cyclic GFR-binding peptide
VVMERHKRLVVKDYEDYYLMSTASLETPV

SEQ ID NO: 41630 - protein, 39 aa, Artificial Sequence; identical to SEQ ID NO: 4072
  Cyclic GFR-binding peptide
  MOD_RES (1)..(33)..(34): Xaa is C or S

SEQ ID NO: 41631 - protein, 29 aa, Artificial Sequence
  Cyclic GFR-binding peptide
ELTRYKKLFIPKKRVIEFYLVSIANLQVQ

SEQ ID NO: 41632 - protein, 27 aa, Artificial Sequence
  Cyclic GFR-binding peptide
VMERHKRLVVKDYEDYYLMSTASLETP

SEQ ID NO: 41633 - protein, 39 aa, Artificial Sequence; identical to SEQ ID NO: 4073
  Cyclic GFR-binding peptide
  MOD_RES (1)..(3)..(36)..(37): Xaa is C or S

SEQ ID NO: 41634 - protein, 39 aa, Artificial Sequence; identical to SEQ ID NO: 4074
  Cyclic GFR-binding peptide
  MOD_RES (2)..(4)..(35)..(36): Xaa is C or S

SEQ ID NO: 41635 - protein, 33 aa, Artificial Sequence
  Cyclic GFR-binding peptide
  MOD_RES (28)..(29): Xaa is C or S
MDYHYKLVVKENEDKYLMSIPSLETPVXXAKPI

SEQ ID NO: 41636 - protein, 20 aa, Artificial Sequence
  Cyclic GFR-binding peptide
QYNKLIVNNSSDLYLVSIAS

SEQ ID NO: 41637 - protein, 25 aa, Artificial Sequence
  Cyclic GFR-binding peptide
TRYKKLFIPKKRVIEFYLVSIANLQ

SEQ ID NO: 41638 - protein, 27 aa, Artificial Sequence
  Cyclic GFR-binding peptide
AKVVMNRYKKLIVNNSSDFYLVSIANL

SEQ ID NO: 41639 - protein, 33 aa, Artificial Sequence; identical to SEQ ID NO: 4082
  Cyclic GFR-binding peptide
  MOD_RES (32)..(33): Xaa is C or S

SEQ ID NO: 41640 - protein, 33 aa, Artificial Sequence; identical to SEQ ID NO: 4083
  Cyclic GFR-binding peptide
  MOD_RES (1)..(3): Xaa is C or S

SEQ ID NO: 41641 - protein, 30 aa, Artificial Sequence
  Cyclic GFR-binding peptide
  MOD_RES (2)..(2): Xaa is C or S
GXARVVMNQYNKLIVNSSDDLYLVSIASLQ

SEQ ID NO: 41642 - protein, 34 aa, Artificial Sequence; identical to SEQ ID NO: 4084
  Cyclic GFR-binding peptide

SEQ ID NO: 41643 - protein, 37 aa, Artificial Sequence; identical to SEQ ID NO: 4085
  Cyclic GFR-binding peptide
  MOD_RES (35)..(35): Xaa is C or S

SEQ ID NO: 41644 - protein, 33 aa, Artificial Sequence; identical to SEQ ID NO: 4086
  Cyclic GFR-binding peptide
  MOD_RES (32)..(33): Xaa is C or S

SEQ ID NO: 41645 - protein, 34 aa, Artificial Sequence
  Cyclic GFR-binding peptide
  MOD_RES (28)..(29): Xaa is C or S
MNQYNKLIVNSSDDLYLVSIASLKTPAXXPKPVY

SEQ ID NO: 41646 - protein, 28 aa, Artificial Sequence
  Cyclic GFR-binding peptide
VVMRYKKLVKPTRGVFYLISIANLDQPV

SEQ ID NO: 41647 - protein, 31 aa, Artificial Sequence
  Cyclic GFR-binding peptide
ELTYHYKLFIPKKRVIEKYLVSIPSLQVQTP

SEQ ID NO: 41648 - protein, 35 aa, Artificial Sequence; identical to SEQ ID NO: 4088
  Cyclic GFR-binding peptide
  MOD_RES (2)..(33)..(34): Xaa is C or S

SEQ ID NO: 41649 - protein, 24 aa, Artificial Sequence
  Cyclic GFR-binding peptide
MNQYNKLIVNSSDDLYLVSIASLK

SEQ ID NO: 41650 - protein, 33 aa, Artificial Sequence
  Cyclic GFR-binding peptide
  MOD_RES (27)..(28): Xaa is C or S
MQYNKLVKPTRGVLYLISIASLDQPVXXPSASA

SEQ ID NO: 41651 - protein, 21 aa, Artificial Sequence
  Cyclic GFR-binding peptide
QYNKLIKPTKGILYLISIASL

SEQ ID NO: 41652 - protein, 27 aa, Artificial Sequence
  Cyclic GFR-binding peptide
SKVVMRYKKLVKPTRGVFYLISIANLD

SEQ ID NO: 41653 - protein, 41 aa, Artificial Sequence; identical to SEQ ID NO: 4090
  Cyclic GFR-binding peptide
  MOD_RES (2)..(4)..(36)..(37): Xaa is C or S

SEQ ID NO: 41654 - protein, 33 aa, Artificial Sequence; identical to SEQ ID NO: 4091
  Cyclic GFR-binding peptide
  MOD_RES (1)..(33): Xaa is C or S

SEQ ID NO: 41655 - protein, 31 aa, Artificial Sequence
  Cyclic GFR-binding peptide
  MOD_RES (26)..(27): Xaa is C or S
QYNKLIVNSSDDLYLVSIASLQTPAXXPKPV

SEQ ID NO: 41656 - protein, 29 aa, Artificial Sequence
  Cyclic GFR-binding peptide
  MOD_RES (1)..(3): Xaa is C or S
XKXSRVIMYHYKLVKPKRGVKYLISIPSL

SEQ ID NO: 41657 - protein, 38 aa, Artificial Sequence; identical to SEQ ID NO: 4093
  Cyclic GFR-binding peptide
  MOD_RES (1)..(3)..(34)..(35): Xaa is C or S

SEQ ID NO: 41658 - protein, 34 aa, Artificial Sequence; identical to SEQ ID NO: 4094
  Cyclic GFR-binding peptide
  MOD_RES (1)..(3): Xaa is C or S

SEQ ID NO: 41659 - protein, 28 aa, Artificial Sequence
  Cyclic GFR-binding peptide
VIMYHYKLVKPKRGVKYLISIPSLAQPV

SEQ ID NO: 41660 - protein, 30 aa, Artificial Sequence
  Cyclic GFR-binding peptide
  MOD_RES (2)..(4): Xaa is C or S
SXKXSKVIMYHYKLIKPTKGIKYLISIPSL

SEQ ID NO: 41661 - protein, 25 aa, Artificial Sequence
  Cyclic GFR-binding peptide
IMRYKKLVKPKRGVFYLISIANLAQ

SEQ ID NO: 41662 - protein, 24 aa, Artificial Sequence
  Cyclic GFR-binding peptide
YHYKLIVNSSDDKYLVSIPSLKTP

SEQ ID NO: 41663 - protein, 32 aa, Artificial Sequence
  Cyclic GFR-binding peptide
  MOD_RES (1)..(3): Xaa is C or S
XKXSKVVMQYNKLVKPTRGVLYLISIASLDQP

SEQ ID NO: 41664 - protein, 28 aa, Artificial Sequence
  Cyclic GFR-binding peptide
  MOD_RES (2)..(2): Xaa is C or S
KXSKVIMRHKRLIKPTKGIYYLISTASL

SEQ ID NO: 41665 - protein, 34 aa, Artificial Sequence; identical to SEQ ID NO: 4095
  Cyclic GFR-binding peptide
  MOD_RES (31)..(32): Xaa is C or S

SEQ ID NO: 41666 - protein, 43 aa, Artificial Sequence; identical to SEQ ID NO: 4097
  Cyclic GFR-binding peptide
  MOD_RES (2)..(39): Xaa is C or S

SEQ ID NO: 41667 - protein, 34 aa, Artificial Sequence; identical to SEQ ID NO: 4098
  Cyclic GFR-binding peptide
  MOD_RES (2)..(34): Xaa is C or S

SEQ ID NO: 41668 - protein, 42 aa, Artificial Sequence; identical to SEQ ID NO: 4101
  Cyclic GFR-binding peptide
  MOD_RES (2)..(4)..(36)..(37): Xaa is C or S

SEQ ID NO: 41669 - protein, 35 aa, Artificial Sequence; identical to SEQ ID NO: 4102
  Cyclic GFR-binding peptide
  MOD_RES (2)..(33)..(34): Xaa is C or S

SEQ ID NO: 41670 - protein, 33 aa, Artificial Sequence; identical to SEQ ID NO: 4103
  Cyclic GFR-binding peptide
  MOD_RES (1)..(32)..(33): Xaa is C or S

SEQ ID NO: 41671 - protein, 35 aa, Artificial Sequence; identical to SEQ ID NO: 4104
  Cyclic GFR-binding peptide
  MOD_RES (1)..(3)..(34)..(35): Xaa is C or S

SEQ ID NO: 41672 - protein, 35 aa, Artificial Sequence; identical to SEQ ID NO: 4105
  Cyclic GFR-binding peptide
  MOD_RES (31)..(32): Xaa is C or S

SEQ ID NO: 41673 - protein, 32 aa, Artificial Sequence; identical to SEQ ID NO: 1917
  Cyclic GFR-binding peptide

SEQ ID NO: 41674 - protein, 21 aa, Artificial Sequence
  Cyclic GFR-binding peptide
RYKKLIVNNSSDFYLVSIANL

SEQ ID NO: 41675 - protein, 23 aa, Artificial Sequence
  Cyclic GFR-binding peptide
YHYKLVKPKRGVKYLISIPSLAQ

SEQ ID NO: 41676 - protein, 28 aa, Artificial Sequence
  Cyclic GFR-binding peptide
  MOD_RES (2)..(2): Xaa is C or S
GXARVVMNQYNKLIVNSSDDLYLVSIAS

SEQ ID NO: 41677 - protein, 28 aa, Artificial Sequence
  Cyclic GFR-binding peptide
  MOD_RES (26)..(26): Xaa is C or S
YHYKLIVNSSDDKYLVSIPSLKTPAXTP

SEQ ID NO: 41678 - protein, 29 aa, Artificial Sequence
  Cyclic GFR-binding peptide
  MOD_RES (29)..(29): Xaa is C or S
VVMQYNKLVKPTRGVLYLISIASLDQPVX

SEQ ID NO: 41679 - protein, 33 aa, Artificial Sequence; identical to SEQ ID NO: 4108
  Cyclic GFR-binding peptide
  MOD_RES (31)..(32): Xaa is C or S

SEQ ID NO: 41680 - protein, 33 aa, Artificial Sequence; identical to SEQ ID NO: 4110
  Cyclic GFR-binding peptide
  MOD_RES (31)..(32): Xaa is C or S

SEQ ID NO: 41681 - protein, 28 aa, Artificial Sequence
  Cyclic GFR-binding peptide
HDELTQYNKLFIPKKRVIELYLVSIASL

SEQ ID NO: 41682 - protein, 36 aa, Artificial Sequence
  Cyclic GFR-binding peptide
  MOD_RES (32)..(33): Xaa is C or S
AVSMGEQYNKLTPVGMDDLYLVSIASLKTPVXXAKG

SEQ ID NO: 41683 - protein, 34 aa, Artificial Sequence; identical to SEQ ID NO: 4112
  Cyclic GFR-binding peptide
  MOD_RES (2)..(4): Xaa is C or S

SEQ ID NO: 41684 - protein, 31 aa, Artificial Sequence
  Cyclic GFR-binding peptide
  MOD_RES (28)..(29): Xaa is C or S
MNRHKRLIVNSSDDYYLVSTASLKTPAXXPK

SEQ ID NO: 41685 - protein, 33 aa, Artificial Sequence
  Cyclic GFR-binding peptide
  MOD_RES (28)..(29): Xaa is C or S
IMQYNKLVKPKRGVLYLISIASLAQPVXXPAAS

SEQ ID NO: 41686 - protein, 36 aa, Artificial Sequence
  Cyclic GFR-binding peptide
  MOD_RES (2)..(4): Xaa is C or S
RXGXEAVSMGERYKKLTPVGMDDFYLVSIANLKTPV

SEQ ID NO: 41687 - protein, 36 aa, Artificial Sequence
  Cyclic GFR-binding peptide
  MOD_RES (30)..(31): Xaa is C or S
SMGERYKKLTPVGMDDFYLVSIANLKTPVXXAKGVK

SEQ ID NO: 41688 - protein, 33 aa, Artificial Sequence; identical to SEQ ID NO: 4116
  Cyclic GFR-binding peptide
  MOD_RES (31)..(32): Xaa is C or S

SEQ ID NO: 41689 - protein, 38 aa, Artificial Sequence; identical to SEQ ID NO: 4117
  Cyclic GFR-binding peptide
  MOD_RES (2)..(33)..(34): Xaa is C or S

SEQ ID NO: 41690 - protein, 28 aa, Artificial Sequence
  Cyclic GFR-binding peptide
  MOD_RES (1)..(3): Xaa is C or S
XKXSRVIMYHYKLVKPKRGVKYLISIPS

SEQ ID NO: 41691 - protein, 25 aa, Artificial Sequence
  Cyclic GFR-binding peptide
VVMERYKKLVVKDYEDFYLMSIANL

SEQ ID NO: 41692 - protein, 28 aa, Artificial Sequence
  Cyclic GFR-binding peptide
VIMRHKRLVKPKRGVYYLISTASLAQPV

SEQ ID NO: 41693 - protein, 31 aa, Artificial Sequence
  Cyclic GFR-binding peptide
  MOD_RES (26)..(27): Xaa is C or S
RHKRLIVNSSDDYYLVSTASLQTPAXXPKPV

SEQ ID NO: 41694 - protein, 25 aa, Artificial Sequence
  Cyclic GFR-binding peptide
RHKRLIVNSSDDYYLVSTASLKTPA

SEQ ID NO: 41695 - protein, 34 aa, Artificial Sequence
  Cyclic GFR-binding peptide
  MOD_RES (2)..(4): Xaa is C or S
RXGXEAVSMGERYKKLTPVGMDDFYLVSIANLKT

SEQ ID NO: 41696 - protein, 25 aa, Artificial Sequence
  Cyclic GFR-binding peptide
KVVMRYKKLVKPTRGVFYLISIANL

SEQ ID NO: 41697 - protein, 29 aa, Artificial Sequence
  Cyclic GFR-binding peptide
  MOD_RES (1)..(3): Xaa is C or S
XGXAKVVMNRYKKLIVNNSSDFYLVSIAN

SEQ ID NO: 41698 - protein, 35 aa, Artificial Sequence; identical to SEQ ID NO: 4119
  Cyclic GFR-binding peptide
  MOD_RES (2)..(4): Xaa is C or S

SEQ ID NO: 41699 - protein, 23 aa, Artificial Sequence
  Cyclic GFR-binding peptide
QYNKLIVNSSDDLYLVSIASLKT

SEQ ID NO: 41700 - protein, 34 aa, Artificial Sequence; identical to SEQ ID NO: 4121
  Cyclic GFR-binding peptide
  MOD_RES (1)..(33)..(34): Xaa is C or S

SEQ ID NO: 41701 - protein, 31 aa, Artificial Sequence
  Cyclic GFR-binding peptide
HDELTRYKKLFIPKKRVIEFYLVSIANLQVQ

SEQ ID NO: 41702 - protein, 29 aa, Artificial Sequence
  Cyclic GFR-binding peptide
KVIMYHYKLIKPTKGIKYLISIPSLDQSV

SEQ ID NO: 41703 - protein, 34 aa, Artificial Sequence
  Cyclic GFR-binding peptide
  MOD_RES (2)..(4): Xaa is C or S
EXKXALHDELTRHKRLFIPKKRVIEYYLVSTASL

SEQ ID NO: 41704 - protein, 29 aa, Artificial Sequence
  Cyclic GFR-binding peptide
  MOD_RES (2)..(4): Xaa is C or S
SXKXSKVIMRHKRLIKPTKGIYYLISTAS

SEQ ID NO: 41705 - protein, 35 aa, Artificial Sequence; identical to SEQ ID NO: 4122
  Cyclic GFR-binding peptide
  MOD_RES (2)..(34)..(35): Xaa is C or S

SEQ ID NO: 41706 - protein, 33 aa, Artificial Sequence; identical to SEQ ID NO: 4123
  Cyclic GFR-binding peptide
  MOD_RES (1)..(32)..(33): Xaa is C or S

SEQ ID NO: 41707 - protein, 30 aa, Artificial Sequence
  Cyclic GFR-binding peptide
  MOD_RES (2)..(2): Xaa is C or S
GXAKVVMNYHYKLIVNNSSDKYLVSIPSLK

SEQ ID NO: 41708 - protein, 38 aa, Artificial Sequence; identical to SEQ ID NO: 4125
  Cyclic GFR-binding peptide
  MOD_RES (1)..(3)..(36)..(37): Xaa is C or S

SEQ ID NO: 41709 - protein, 36 aa, Artificial Sequence; identical to SEQ ID NO: 4127
  Cyclic GFR-binding peptide
  MOD_RES (32)..(33): Xaa is C or S

SEQ ID NO: 41710 - protein, 39 aa, Artificial Sequence; identical to SEQ ID NO: 4128
  Cyclic GFR-binding peptide
  MOD_RES (2)..(34)..(35): Xaa is C or S

SEQ ID NO: 41711 - protein, 29 aa, Artificial Sequence
  Cyclic GFR-binding peptide
  MOD_RES (29)..(29): Xaa is C or S
VMNYHYKLIVNNSSDKYLVSIPSLKTPAX

SEQ ID NO: 41712 - protein, 28 aa, Artificial Sequence
  Cyclic GFR-binding peptide
  MOD_RES (1)..(1): Xaa is C or S
XSRVIMYHYKLVKPKRGVKYLISIPSLA

SEQ ID NO: 41713 - protein, 26 aa, Artificial Sequence
  Cyclic GFR-binding peptide
NRHKRLIVNSSDDYYLVSTASLQTPA

SEQ ID NO: 41714 - protein, 23 aa, Artificial Sequence
  Cyclic GFR-binding peptide
VMNQYNKLIVNNSSDLYLVSIAS

SEQ ID NO: 41715 - protein, 23 aa, Artificial Sequence
  Cyclic GFR-binding peptide
ERYKKLTPVGMDDFYLVSIANLK

SEQ ID NO: 41716 - protein, 32 aa, Artificial Sequence; identical to SEQ ID NO: 4130
  Cyclic GFR-binding peptide
  MOD_RES (2)..(2): Xaa is C or S

SEQ ID NO: 41717 - protein, 34 aa, Artificial Sequence; identical to SEQ ID NO: 4131
  Cyclic GFR-binding peptide
  MOD_RES (33)..(34): Xaa is C or S

SEQ ID NO: 41718 - protein, 26 aa, Artificial Sequence
  Cyclic GFR-binding peptide
VMDYHYKLVVKENEDKYLMSIPSLET

SEQ ID NO: 41719 - protein, 36 aa, Artificial Sequence; identical to SEQ ID NO: 4133
  Cyclic GFR-binding peptide
  MOD_RES (31)..(32): Xaa is C or S

SEQ ID NO: 41720 - protein, 38 aa, Artificial Sequence; identical to SEQ ID NO: 4134
  Cyclic GFR-binding peptide
  MOD_RES (2)..(34)..(35): Xaa is C or S

SEQ ID NO: 41721 - protein, 39 aa, Artificial Sequence; identical to SEQ ID NO: 4135
  Cyclic GFR-binding peptide
  MOD_RES (2)..(4)..(35)..(36): Xaa is C or S

SEQ ID NO: 41722 - protein, 37 aa, Artificial Sequence
  Cyclic GFR-binding peptide
  MOD_RES (2)..(4): Xaa is C or S
EXKXALHDELTRHKRLFIPKKRVIEYYLVSTASLQVQ

SEQ ID NO: 41723 - protein, 31 aa, Artificial Sequence
  Cyclic GFR-binding peptide
  MOD_RES (1)..(1): Xaa is C or S
XGEVVMERYKKLVVKDYEDFYLMSIANLETP

SEQ ID NO: 41724 - protein, 25 aa, Artificial Sequence
  Cyclic GFR-binding peptide
VVMNYHYKLIVNNSSDKYLVSIPSL

SEQ ID NO: 41725 - protein, 33 aa, Artificial Sequence; identical to SEQ ID NO: 4137
  Cyclic GFR-binding peptide
  MOD_RES (31)..(32): Xaa is C or S

SEQ ID NO: 41726 - protein, 27 aa, Artificial Sequence
  Cyclic GFR-binding peptide
VIMYHYKLIKPTKGIKYLISIPSLDQS

SEQ ID NO: 41727 - protein, 31 aa, Artificial Sequence
  Cyclic GFR-binding peptide
  MOD_RES (28)..(29): Xaa is C or S
MNYHYKLIVNSSDDKYLVSIPSLKTPAXXPK

SEQ ID NO: 41728 - protein, 27 aa, Artificial Sequence
  Cyclic GFR-binding peptide
VIMRHKRLIKPTKGIYYLISTASLDQS

SEQ ID NO: 41729 - protein, 27 aa, Artificial Sequence
  Cyclic GFR-binding peptide
  MOD_RES (26)..(27): Xaa is C or S
RYKKLVKPKRGVFYLISIANLAQPVXX

SEQ ID NO: 41730 - protein, 31 aa, Artificial Sequence
  Cyclic GFR-binding peptide
  MOD_RES (29)..(30): Xaa is C or S
VIMYHYKLVKPKRGVKYLISIPSLAQPVXXP

SEQ ID NO: 41731 - protein, 34 aa, Artificial Sequence
  Cyclic GFR-binding peptide
  MOD_RES (29)..(30): Xaa is C or S
MGERYKKLTPVGMDDFYLVSIANLKTPVXXAKGV

SEQ ID NO: 41732 - protein, 39 aa, Artificial Sequence; identical to SEQ ID NO: 4140
  Cyclic GFR-binding peptide
  MOD_RES (1)..(3): Xaa is C or S

SEQ ID NO: 41733 - protein, 38 aa, Artificial Sequence; identical to SEQ ID NO: 4141
  Cyclic GFR-binding peptide
  MOD_RES (1)..(34)..(35): Xaa is C or S

SEQ ID NO: 41734 - protein, 28 aa, Artificial Sequence
  Cyclic GFR-binding peptide
LHDELTQYNKLFIPKKRVIELYLVSIAS

SEQ ID NO: 41735 - protein, 30 aa, Artificial Sequence
  Cyclic GFR-binding peptide
  MOD_RES (30)..(30): Xaa is C or S
KVIMYHYKLIKPTKGIKYLISIPSLDQSVX

SEQ ID NO: 41736 - protein, 39 aa, Artificial Sequence; identical to SEQ ID NO: 4142
  Cyclic GFR-binding peptide
  MOD_RES (2)..(34)..(35): Xaa is C or S

SEQ ID NO: 41737 - protein, 29 aa, Artificial Sequence
  Cyclic GFR-binding peptide
  MOD_RES (28)..(29): Xaa is C or S
MERYKKLVVKDYEDFYLMSIANLETPVXX

SEQ ID NO: 41738 - protein, 25 aa, Artificial Sequence
  Cyclic GFR-binding peptide
EYHYKLVVKDYEDKYLMSIPSLETP

SEQ ID NO: 41739 - protein, 29 aa, Artificial Sequence
  Cyclic GFR-binding peptide
  MOD_RES (1)..(1): Xaa is C or S
XSKVVMYHYKLVKPTRGVKYLISIPSLDQ

SEQ ID NO: 41740 - protein, 34 aa, Artificial Sequence; identical to SEQ ID NO: 4146
  Cyclic GFR-binding peptide
  MOD_RES (1)..(3)..(34): Xaa is C or S

SEQ ID NO: 41741 - protein, 32 aa, Artificial Sequence
  Cyclic GFR-binding peptide
  MOD_RES (30)..(31): Xaa is C or S
SMGERYKKLTPVGMDDFYLVSIANLKTPVXXA

SEQ ID NO: 41742 - protein, 22 aa, Artificial Sequence
  Cyclic GFR-binding peptide
MYHYKLVKPTRGVKYLISIPSL

SEQ ID NO: 41743 - protein, 31 aa, Artificial Sequence
  Cyclic GFR-binding peptide
AVSMGEQYNKLTPVGMDDLYLVSIASLKTPV

SEQ ID NO: 41744 - protein, 34 aa, Artificial Sequence
  Cyclic GFR-binding peptide
  MOD_RES (30)..(31): Xaa is C or S
KVVMYHYKLVKPTRGVKYLISIPSLDQPVXXPSA

SEQ ID NO: 41745 - protein, 35 aa, Artificial Sequence; identical to SEQ ID NO: 4149
  Cyclic GFR-binding peptide
  MOD_RES (1)..(33)..(34): Xaa is C or S

SEQ ID NO: 41746 - protein, 30 aa, Artificial Sequence
  Cyclic GFR-binding peptide
  MOD_RES (1)..(1): Xaa is C or S
XSRVIMYHYKLVKPKRGVKYLISIPSLAQP

SEQ ID NO: 41747 - protein, 25 aa, Artificial Sequence
  Cyclic GFR-binding peptide
QYNKLIVNSSDDLYLVSIASLKTPA

SEQ ID NO: 41748 - protein, 30 aa, Artificial Sequence
  Cyclic GFR-binding peptide
  MOD_RES (29)..(30): Xaa is C or S
VIMRHKRLIKPTKGIYYLISTASLDQSVXX

SEQ ID NO: 41749 - protein, 36 aa, Artificial Sequence
  Cyclic GFR-binding peptide
  MOD_RES (32)..(32): Xaa is C or S
LTRYKKLFIPKKRVIEFYLVSIANLQVQTPRXQVNR

SEQ ID NO: 41750 - protein, 31 aa, Artificial Sequence
  Cyclic GFR-binding peptide
  MOD_RES (2)..(4): Xaa is C or S
RXGXEAVSMGERHKRLTPVGMDDYYLVSTAS

SEQ ID NO: 41751 - protein, 28 aa, Artificial Sequence
  Cyclic GFR-binding peptide
ELTYHYKLFIPKKRVIEKYLVSIPSLQV

SEQ ID NO: 41752 - protein, 26 aa, Artificial Sequence
  Cyclic GFR-binding peptide
MERHKRLVVKDYEDYYLMSTASLETP

SEQ ID NO: 41753 - protein, 21 aa, Artificial Sequence
  Cyclic GFR-binding peptide
YHYKLIKPTKGIKYLISIPSL

SEQ ID NO: 41754 - protein, 26 aa, Artificial Sequence
  Cyclic GFR-binding peptide
VVMYHYKLVKPTRGVKYLISIPSLDQ

SEQ ID NO: 41755 - protein, 33 aa, Artificial Sequence; identical to SEQ ID NO: 4155
  Cyclic GFR-binding peptide
  MOD_RES (2)..(2): Xaa is C or S

SEQ ID NO: 41756 - protein, 37 aa, Artificial Sequence; identical to SEQ ID NO: 4154
  Cyclic GFR-binding peptide
  MOD_RES (2)..(34)..(35): Xaa is C or S

SEQ ID NO: 41757 - protein, 33 aa, Artificial Sequence
  Cyclic GFR-binding peptide
  MOD_RES (29)..(30): Xaa is C or S
VIMRYKKLIKPTKGIFYLISIANLDQSVXXPSA

SEQ ID NO: 41758 - protein, 30 aa, Artificial Sequence
  Cyclic GFR-binding peptide
HDELTRHKRLFIPKKRVIEYYLVSTASLQV

SEQ ID NO: 41759 - protein, 29 aa, Artificial Sequence
  Cyclic GFR-binding peptide
SRVIMRHKRLVKPKRGVYYLISTASLAQP

SEQ ID NO: 41760 - protein, 30 aa, Artificial Sequence
  Cyclic GFR-binding peptide
  MOD_RES (1)..(3): Xaa is C or S
XGXARVVMNRHKRLIVNSSDDYYLVSTASL

SEQ ID NO: 41761 - protein, 38 aa, Artificial Sequence; identical to SEQ ID NO: 4160
  Cyclic GFR-binding peptide
  MOD_RES (2)..(2): Xaa is C or S

SEQ ID NO: 41762 - protein, 35 aa, Artificial Sequence; identical to SEQ ID NO: 4162
  Cyclic GFR-binding peptide
  MOD_RES (31)..(32): Xaa is C or S

SEQ ID NO: 41763 - protein, 29 aa, Artificial Sequence
  Cyclic GFR-binding peptide
  MOD_RES (28)..(29): Xaa is C or S
MNYHYKLIVNSSDDKYLVSIPSLKTPAXX

SEQ ID NO: 41764 - protein, 35 aa, Artificial Sequence
  Cyclic GFR-binding peptide
  MOD_RES (30)..(31): Xaa is C or S
SMGERYKKLTPVGMDDFYLVSIANLKTPVXXAKGV

SEQ ID NO: 41765 - protein, 32 aa, Artificial Sequence
  Cyclic GFR-binding peptide
  MOD_RES (1)..(3): Xaa is C or S
XKXALHDELTRYKKLFIPKKRVIEFYLVSIAN

SEQ ID NO: 41766 - protein, 32 aa, Artificial Sequence
  Cyclic GFR-binding peptide
  MOD_RES (29)..(30): Xaa is C or S
VIMRYKKLVKPKRGVFYLISIANLAQPVXXPA

SEQ ID NO: 41767 - protein, 30 aa, Artificial Sequence
  Cyclic GFR-binding peptide
  MOD_RES (1)..(3): Xaa is C or S
XKXSKVIMRHKRLIKPTKGIYYLISTASLD

SEQ ID NO: 41768 - protein, 29 aa, Artificial Sequence
  Cyclic GFR-binding peptide
  MOD_RES (26)..(27): Xaa is C or S
YHYKLVKPTRGVKYLISIPSLDQPVXXPS

SEQ ID NO: 41769 - protein, 37 aa, Artificial Sequence; identical to SEQ ID NO: 4166
  Cyclic GFR-binding peptide
  MOD_RES (2)..(33)..(34): Xaa is C or S

SEQ ID NO: 41770 - protein, 33 aa, Artificial Sequence
  Cyclic GFR-binding peptide
  MOD_RES (29)..(30): Xaa is C or S
VMEYHYKLVVKDYEDKYLMSIPSLETPVXXAKP

SEQ ID NO: 41771 - protein, 31 aa, Artificial Sequence
  Cyclic GFR-binding peptide
  MOD_RES (1)..(1): Xaa is C or S
XGEVVMDRYKKLVVKENEDFYLMSIANLETP

SEQ ID NO: 41772 - protein, 28 aa, Artificial Sequence
  Cyclic GFR-binding peptide
  MOD_RES (27)..(27): Xaa is C or S
NYHYKLIVNSSDDKYLVSIPSLKTPAXT

SEQ ID NO: 41773 - protein, 29 aa, Artificial Sequence
  Cyclic GFR-binding peptide
  MOD_RES (1)..(1): Xaa is C or S
XSKVIMYHYKLIKPTKGIKYLISIPSLDQ

SEQ ID NO: 41774 - protein, 34 aa, Artificial Sequence; identical to SEQ ID NO: 4167
  Cyclic GFR-binding peptide
  MOD_RES (2)..(33)..(34): Xaa is C or S

SEQ ID NO: 41775 - protein, 35 aa, Artificial Sequence
  Cyclic GFR-binding peptide
  MOD_RES (29)..(30): Xaa is C or S
VVMRYKKLVKPTRGVFYLISIANLDQPVXXPSASA

SEQ ID NO: 41776 - protein, 32 aa, Artificial Sequence
  Cyclic GFR-binding peptide
  MOD_RES (2)..(4): Xaa is C or S
SXKXSKVVMYHYKLVKPTRGVKYLISIPSLDQ

SEQ ID NO: 41777 - protein, 24 aa, Artificial Sequence
  Cyclic GFR-binding peptide
VVMEYHYKLVVKDYEDKYLMSIPS

SEQ ID NO: 41778 - protein, 41 aa, Artificial Sequence; identical to SEQ ID NO: 4169
  Cyclic GFR-binding peptide
  MOD_RES (1)..(3)..(35)..(36): Xaa is C or S

SEQ ID NO: 41779 - protein, 36 aa, Artificial Sequence
  Cyclic GFR-binding peptide
  MOD_RES (30)..(31): Xaa is C or S
VVMNRYKKLIVNNSSDFYLVSIANLKTPAXXAKPVA

SEQ ID NO: 41780 - protein, 38 aa, Artificial Sequence; identical to SEQ ID NO: 4170
  Cyclic GFR-binding peptide
  MOD_RES (1)..(32)..(33): Xaa is C or S

SEQ ID NO: 41781 - protein, 27 aa, Artificial Sequence
  Cyclic GFR-binding peptide
  MOD_RES (26)..(27): Xaa is C or S
RYKKLIVNNSSDFYLVSIANLKTPAXX

SEQ ID NO: 41782 - protein, 34 aa, Artificial Sequence
  Cyclic GFR-binding peptide
  MOD_RES (1)..(1): Xaa is C or S
XALHDELTQYNKLFIPKKRVIELYLVSIASLQVQ

SEQ ID NO: 41783 - protein, 35 aa, Artificial Sequence; identical to SEQ ID NO: 4171
  Cyclic GFR-binding peptide
  MOD_RES (1)..(33)..(34): Xaa is C or S

SEQ ID NO: 41784 - protein, 32 aa, Artificial Sequence; identical to SEQ ID NO: 1873
  Cyclic GFR-binding peptide

SEQ ID NO: 41785 - protein, 33 aa, Artificial Sequence
  Cyclic GFR-binding peptide
ALHDELTRHKRLFIPKKRVIEYYLVSTASLQVQ

SEQ ID NO: 41786 - protein, 33 aa, Artificial Sequence
  Cyclic GFR-binding peptide
  MOD_RES (2)..(4): Xaa is C or S
RXGXEAVSMGERHKRLTPVGMDDYYLVSTASLK

SEQ ID NO: 41787 - protein, 31 aa, Artificial Sequence
  Cyclic GFR-binding peptide
  MOD_RES (30)..(30): Xaa is C or S
RYKKLFIPKKRVIEFYLVSIANLQVQTPRXQ

SEQ ID NO: 41788 - protein, 31 aa, Artificial Sequence
  Cyclic GFR-binding peptide
  MOD_RES (30)..(31): Xaa is C or S
KVVMQYNKLVKPTRGVLYLISIASLDQPVXX

SEQ ID NO: 41789 - protein, 38 aa, Artificial Sequence; identical to SEQ ID NO: 4173
  Cyclic GFR-binding peptide
  MOD_RES (1)..(3)..(34)..(35): Xaa is C or S

SEQ ID NO: 41790 - protein, 41 aa, Artificial Sequence; identical to SEQ ID NO: 4174
  Cyclic GFR-binding peptide
  MOD_RES (1)..(3)..(35)..(36): Xaa is C or S

SEQ ID NO: 41791 - protein, 30 aa, Artificial Sequence
  Cyclic GFR-binding peptide
EAVSMGERHKRLTPVGMDDYYLVSTASLKT

SEQ ID NO: 41792 - protein, 29 aa, Artificial Sequence
  Cyclic GFR-binding peptide
VSMGERYKKLTPVGMDDFYLVSIANLKTP

SEQ ID NO: 41793 - protein, 28 aa, Artificial Sequence
  Cyclic GFR-binding peptide
LTRHKRLFIPKKRVIEYYLVSTASLQVQ

SEQ ID NO: 41794 - protein, 34 aa, Artificial Sequence
  Cyclic GFR-binding peptide
  MOD_RES (30)..(31): Xaa is C or S
VVMNYHYKLIVNSSDDKYLVSIPSLKTPAXXPKP

SEQ ID NO: 41795 - protein, 36 aa, Artificial Sequence
  Cyclic GFR-binding peptide
  MOD_RES (34)..(34): Xaa is C or S
DELTYHYKLFIPKKRVIEKYLVSIPSLQVQTPRXQV

SEQ ID NO: 41796 - protein, 29 aa, Artificial Sequence
  Cyclic GFR-binding peptide
  MOD_RES (27)..(28): Xaa is C or S
DYHYKLVVKENEDKYLMSIPSLETPVXXA

SEQ ID NO: 41797 - protein, 23 aa, Artificial Sequence
  Cyclic GFR-binding peptide
VMQYNKLVKPTRGVLYLISIASL

SEQ ID NO: 41798 - protein, 37 aa, Artificial Sequence; identical to SEQ ID NO: 4180
  Cyclic GFR-binding peptide
  MOD_RES (2)..(34)..(35): Xaa is C or S

SEQ ID NO: 41799 - protein, 29 aa, Artificial Sequence
  Cyclic GFR-binding peptide
SRVVMNYHYKLIVNSSDDKYLVSIPSLKT

SEQ ID NO: 41800 - protein, 20 aa, Artificial Sequence
  Cyclic GFR-binding peptide
YHYKLVKPKRGVKYLISIPS

SEQ ID NO: 41801 - protein, 25 aa, Artificial Sequence
  Cyclic GFR-binding peptide
VIMRHKRLVKPKRGVYYLISTASLA

SEQ ID NO: 41802 - protein, 20 aa, Artificial Sequence
  Cyclic GFR-binding peptide
YHYKLIVNSSDDKYLVSIPS

SEQ ID NO: 41803 - protein, 32 aa, Artificial Sequence
  Cyclic GFR-binding peptide
  MOD_RES (27)..(28): Xaa is C or S
NRHKRLIVNSSDDYYLVSTASLKTPAXXPKPV

SEQ ID NO: 41804 - protein, 32 aa, Artificial Sequence
  Cyclic GFR-binding peptide
  MOD_RES (1)..(3): Xaa is C or S
XKXSRVIMYHYKLVKPKRGVKYLISIPSLAQP

SEQ ID NO: 41805 - protein, 34 aa, Artificial Sequence
  Cyclic GFR-binding peptide
  MOD_RES (30)..(31): Xaa is C or S
VVMERHKRLVVKDYEDYYLMSTASLETPVXXAKP

SEQ ID NO: 41806 - protein, 30 aa, Artificial Sequence
  Cyclic GFR-binding peptide
  MOD_RES (29)..(30): Xaa is C or S
MGERHKRLTPVGMDDYYLVSTASLKTPVXX

SEQ ID NO: 41807 - protein, 26 aa, Artificial Sequence
  Cyclic GFR-binding peptide
  MOD_RES (1)..(1): Xaa is C or S
XSKVIMRHKRLIKPTKGIYYLISTAS

SEQ ID NO: 41808 - protein, 39 aa, Artificial Sequence; identical to SEQ ID NO: 4183
  Cyclic GFR-binding peptide
  MOD_RES (1)..(33)..(34): Xaa is C or S

SEQ ID NO: 41809 - protein, 37 aa, Artificial Sequence; identical to SEQ ID NO: 4184
  Cyclic GFR-binding peptide
  MOD_RES (2)..(4)..(35)..(36): Xaa is C or S

SEQ ID NO: 41810 - protein, 32 aa, Artificial Sequence
  Cyclic GFR-binding peptide
  MOD_RES (1)..(3): Xaa is C or S
XKXSKVIMQYNKLIKPTKGILYLISIASLDQS

SEQ ID NO: 41811 - protein, 41 aa, Artificial Sequence; identical to SEQ ID NO: 4186
  Cyclic GFR-binding peptide
  MOD_RES (1)..(3)..(35)..(36): Xaa is C or S

SEQ ID NO: 41812 - protein, 21 aa, Artificial Sequence
  Cyclic GFR-binding peptide
RYKKLVKPKRGVFYLISIANL

SEQ ID NO: 41813 - protein, 32 aa, Artificial Sequence
  Cyclic GFR-binding peptide
  MOD_RES (30)..(31): Xaa is C or S
VVMNYHYKLIVNNSSDKYLVSIPSLKTPAXXA

SEQ ID NO: 41814 - protein, 27 aa, Artificial Sequence
  Cyclic GFR-binding peptide
VVMNYHYKLIVNNSSDKYLVSIPSLKT

SEQ ID NO: 41815 - protein, 32 aa, Artificial Sequence
  Cyclic GFR-binding peptide
  MOD_RES (1)..(3): Xaa is C or S
XGXEAVSMGEQYNKLTPVGMDDLYLVSIASLK

SEQ ID NO: 41816 - protein, 32 aa, Artificial Sequence
  Cyclic GFR-binding peptide
  MOD_RES (1)..(1): Xaa is C or S
XALHDELTQYNKLFIPKKRVIELYLVSIASLQ

SEQ ID NO: 41817 - protein, 22 aa, Artificial Sequence
  Cyclic GFR-binding peptide
MYHYKLVKPKRGVKYLISIPSL

SEQ ID NO: 41818 - protein, 37 aa, Artificial Sequence; identical to SEQ ID NO: 4193
  Cyclic GFR-binding peptide
  MOD_RES (2)..(34): Xaa is C or S

SEQ ID NO: 41819 - protein, 37 aa, Artificial Sequence; identical to SEQ ID NO: 4196
  Cyclic GFR-binding peptide
  MOD_RES (1)..(3)..(35)..(36): Xaa is C or S

SEQ ID NO: 41820 - protein, 27 aa, Artificial Sequence
  Cyclic GFR-binding peptide
  MOD_RES (27)..(27): Xaa is C or S
NYHYKLIVNNSSDKYLVSIPSLKTPAX

SEQ ID NO: 41821 - protein, 33 aa, Artificial Sequence; identical to SEQ ID NO: 4197
  Cyclic GFR-binding peptide
  MOD_RES (31)..(32): Xaa is C or S

SEQ ID NO: 41822 - protein, 36 aa, Artificial Sequence; identical to SEQ ID NO: 4199
  Cyclic GFR-binding peptide
  MOD_RES (1)..(33): Xaa is C or S

SEQ ID NO: 41823 - protein, 31 aa, Artificial Sequence
  Cyclic GFR-binding peptide
  MOD_RES (1)..(1): Xaa is C or S
XARVVMNQYNKLIVNSSDDLYLVSIASLQTP

SEQ ID NO: 41824 - protein, 42 aa, Artificial Sequence; identical to SEQ ID NO: 4202
  Cyclic GFR-binding peptide
  MOD_RES (2)..(4)..(36): Xaa is C or S

SEQ ID NO: 41825 - protein, 24 aa, Artificial Sequence
  Cyclic GFR-binding peptide
TRHKRLFIPKKRVIEYYLVSTASL

SEQ ID NO: 41826 - protein, 35 aa, Artificial Sequence; identical to SEQ ID NO: 4204
  Cyclic GFR-binding peptide
  MOD_RES (32)..(33): Xaa is C or S

SEQ ID NO: 41827 - protein, 31 aa, Artificial Sequence
  Cyclic GFR-binding peptide
  MOD_RES (1)..(3): Xaa is C or S
XGXGEVVMDYHYKLVVKENEDKYLMSIPSLE

SEQ ID NO: 41828 - protein, 34 aa, Artificial Sequence
  Cyclic GFR-binding peptide
  MOD_RES (2)..(4): Xaa is C or S
HXGXAKVVMNQYNKLIVNNSSDLYLVSIASLKTP

SEQ ID NO: 41829 - protein, 38 aa, Artificial Sequence; identical to SEQ ID NO: 4206
  Cyclic GFR-binding peptide
  MOD_RES (2)..(4)..(36)..(37): Xaa is C or S

SEQ ID NO: 41830 - protein, 34 aa, Artificial Sequence; identical to SEQ ID NO: 4207
  Cyclic GFR-binding peptide
  MOD_RES (2)..(4): Xaa is C or S

SEQ ID NO: 41831 - protein, 31 aa, Artificial Sequence
  Cyclic GFR-binding peptide
  MOD_RES (1)..(1): Xaa is C or S
XEAVSMGERYKKLTPVGMDDFYLVSIANLKT

SEQ ID NO: 41832 - protein, 23 aa, Artificial Sequence
  Cyclic GFR-binding peptide
TYHYKLFIPKKRVIEKYLVSIPS

SEQ ID NO: 41833 - protein, 30 aa, Artificial Sequence
  Cyclic GFR-binding peptide
AVSMGERHKRLTPVGMDDYYLVSTASLKTP

SEQ ID NO: 41834 - protein, 29 aa, Artificial Sequence
  Cyclic GFR-binding peptide
  MOD_RES (29)..(29): Xaa is C or S
VMNYHYKLIVNSSDDKYLVSIPSLKTPAX

SEQ ID NO: 41835 - protein, 20 aa, Artificial Sequence
  Cyclic GFR-binding peptide
QYNKLVKPKRGVLYLISIAS

SEQ ID NO: 41836 - protein, 38 aa, Artificial Sequence; identical to SEQ ID NO: 4211
  Cyclic GFR-binding peptide
  MOD_RES (2)..(4)..(36): Xaa is C or S

SEQ ID NO: 41837 - protein, 21 aa, Artificial Sequence
  Cyclic GFR-binding peptide
NRYKKLIVNNSSDFYLVSIAN

SEQ ID NO: 41838 - protein, 35 aa, Artificial Sequence; identical to SEQ ID NO: 4213
  Cyclic GFR-binding peptide
  MOD_RES (2)..(4): Xaa is C or S

SEQ ID NO: 41839 - protein, 34 aa, Artificial Sequence; identical to SEQ ID NO: 4214
  Cyclic GFR-binding peptide
  MOD_RES (2)..(33)..(34): Xaa is C or S

SEQ ID NO: 41840 - protein, 30 aa, Artificial Sequence
  Cyclic GFR-binding peptide
  MOD_RES (29)..(30): Xaa is C or S
VIMRYKKLIKPTKGIFYLISIANLDQSVXX

SEQ ID NO: 41841 - protein, 34 aa, Artificial Sequence; identical to SEQ ID NO: 4215
  Cyclic GFR-binding peptide
  MOD_RES (32)..(33): Xaa is C or S

SEQ ID NO: 41842 - protein, 34 aa, Artificial Sequence; identical to SEQ ID NO: 4216
  Cyclic GFR-binding peptide
  MOD_RES (2)..(34): Xaa is C or S

SEQ ID NO: 41843 - protein, 25 aa, Artificial Sequence
  Cyclic GFR-binding peptide
MRHKRLVKPKRGVYYLISTASLAQP

SEQ ID NO: 41844 - protein, 38 aa, Artificial Sequence; identical to SEQ ID NO: 4218
  Cyclic GFR-binding peptide
  MOD_RES (2)..(34): Xaa is C or S

SEQ ID NO: 41845 - protein, 40 aa, Artificial Sequence; identical to SEQ ID NO: 4219
  Cyclic GFR-binding peptide
  MOD_RES (1)..(3)..(34)..(35): Xaa is C or S

SEQ ID NO: 41846 - protein, 39 aa, Artificial Sequence; identical to SEQ ID NO: 4220
  Cyclic GFR-binding peptide
  MOD_RES (2)..(4)..(36)..(37): Xaa is C or S

SEQ ID NO: 41847 - protein, 20 aa, Artificial Sequence
  Cyclic GFR-binding peptide
RYKKLIVNNSSDFYLVSIAN

SEQ ID NO: 41848 - protein, 35 aa, Artificial Sequence
  Cyclic GFR-binding peptide
  MOD_RES (29)..(30): Xaa is C or S
VIMRYKKLVKPKRGVFYLISIANLAQPVXXPAASA

SEQ ID NO: 41849 - protein, 25 aa, Artificial Sequence
  Cyclic GFR-binding peptide
RHKRLVKPKRGVYYLISTASLAQPV

SEQ ID NO: 41850 - protein, 28 aa, Artificial Sequence
  Cyclic GFR-binding peptide
  MOD_RES (28)..(28): Xaa is C or S
MDRHKRLVVKENEDYYLMSTASLETPVX

SEQ ID NO: 41851 - protein, 34 aa, Artificial Sequence; identical to SEQ ID NO: 4226
  Cyclic GFR-binding peptide
  MOD_RES (31)..(32): Xaa is C or S

SEQ ID NO: 41852 - protein, 34 aa, Artificial Sequence
  Cyclic GFR-binding peptide
  MOD_RES (29)..(30): Xaa is C or S
VIMQYNKLIKPTKGILYLISIASLDQSVXXPSAS

SEQ ID NO: 41853 - protein, 27 aa, Artificial Sequence
  Cyclic GFR-binding peptide
  MOD_RES (26)..(27): Xaa is C or S
RHKRLVVKDYEDYYLMSTASLETPVXX

SEQ ID NO: 41854 - protein, 30 aa, Artificial Sequence
  Cyclic GFR-binding peptide
  MOD_RES (26)..(27): Xaa is C or S
RHKRLVKPKRGVYYLISTASLAQPVXXPAA

SEQ ID NO: 41855 - protein, 33 aa, Artificial Sequence
  Cyclic GFR-binding peptide
  MOD_RES (2)..(4): Xaa is C or S
HXGXSRVVMNYHYKLIVNSSDDKYLVSIPSLKT

SEQ ID NO: 41856 - protein, 30 aa, Artificial Sequence
  Cyclic GFR-binding peptide
HDELTYHYKLFIPKKRVIEKYLVSIPSLQV

SEQ ID NO: 41857 - protein, 23 aa, Artificial Sequence
  Cyclic GFR-binding peptide
VMERYKKLVVKDYEDFYLMSIAN

SEQ ID NO: 41858 - protein, 26 aa, Artificial Sequence
  Cyclic GFR-binding peptide
MNQYNKLIVNNSSDLYLVSIASLKTP

SEQ ID NO: 41859 - protein, 38 aa, Artificial Sequence; identical to SEQ ID NO: 4232
  Cyclic GFR-binding peptide
  MOD_RES (1)..(33)..(34): Xaa is C or S

SEQ ID NO: 41860 - protein, 32 aa, Artificial Sequence; identical to SEQ ID NO: 1885
  Cyclic GFR-binding peptide

SEQ ID NO: 41861 - protein, 20 aa, Artificial Sequence
  Cyclic GFR-binding peptide
QYNKLVKPKRGVLYLISIAS

SEQ ID NO: 41862 - protein, 39 aa, Artificial Sequence; identical to SEQ ID NO: 4236
  Cyclic GFR-binding peptide
  MOD_RES (1)..(3): Xaa is C or S

SEQ ID NO: 41863 - protein, 28 aa, Artificial Sequence
  Cyclic GFR-binding peptide
KVIMRYKKLIKPTKGIFYLISIANLDQS

SEQ ID NO: 41864 - protein, 29 aa, Artificial Sequence
  Cyclic GFR-binding peptide
  MOD_RES (28)..(29): Xaa is C or S
MNRHKRLIVNSSDDYYLVSTASLKTPAXX

SEQ ID NO: 41865 - protein, 34 aa, Artificial Sequence
  Cyclic GFR-binding peptide
  MOD_RES (30)..(30): Xaa is C or S
VVMNRHKRLIVNSSDDYYLVSTASLKTPAXTPKT

SEQ ID NO: 41866 - protein, 36 aa, Artificial Sequence; identical to SEQ ID NO: 4240
  Cyclic GFR-binding peptide
  MOD_RES (2)..(33)..(34): Xaa is C or S

SEQ ID NO: 41867 - protein, 39 aa, Artificial Sequence; identical to SEQ ID NO: 4242
  Cyclic GFR-binding peptide
  MOD_RES (1)..(3)..(35)..(36): Xaa is C or S

SEQ ID NO: 41868 - protein, 36 aa, Artificial Sequence
  Cyclic GFR-binding peptide
  MOD_RES (30)..(31): Xaa is C or S
RVIMRHKRLVKPKRGVYYLISTASLAQPVXXPAASA

SEQ ID NO: 41869 - protein, 31 aa, Artificial Sequence
  Cyclic GFR-binding peptide
  MOD_RES (2)..(2): Xaa is C or S
KXSKVIMQYNKLIKPTKGILYLISIASLDQS

SEQ ID NO: 41870 - protein, 33 aa, Artificial Sequence
  Cyclic GFR-binding peptide
  MOD_RES (1)..(1): Xaa is C or S
XALHDELTYHYKLFIPKKRVIEKYLVSIPSLQV

SEQ ID NO: 41871 - protein, 41 aa, Artificial Sequence; identical to SEQ ID NO: 4247
  Cyclic GFR-binding peptide
  MOD_RES (1)..(3)..(35)..(36): Xaa is C or S

SEQ ID NO: 41872 - protein, 32 aa, Artificial Sequence
  Cyclic GFR-binding peptide
  MOD_RES (27)..(28): Xaa is C or S
MYHYKLIKPTKGIKYLISIPSLDQSVXXPSAS

SEQ ID NO: 41873 - protein, 21 aa, Artificial Sequence
  Cyclic GFR-binding peptide
MRHKRLVKPTRGVYYLISTAS

SEQ ID NO: 41874 - protein, 22 aa, Artificial Sequence
  Cyclic GFR-binding peptide
RHKRLTPVGMDDYYLVSTASLK

SEQ ID NO: 41875 - protein, 26 aa, Artificial Sequence
  Cyclic GFR-binding peptide
AVSMGERYKKLTPVGMDDFYLVSIAN

SEQ ID NO: 41876 - protein, 26 aa, Artificial Sequence
  Cyclic GFR-binding peptide
  MOD_RES (26)..(26): Xaa is C or S
RHKRLIVNSSDDYYLVSTASLKTPAX

SEQ ID NO: 41877 - protein, 35 aa, Artificial Sequence
  Cyclic GFR-binding peptide
  MOD_RES (31)..(32): Xaa is C or S
VSMGERHKRLTPVGMDDYYLVSTASLKTPVXXAKG

SEQ ID NO: 41878 - protein, 38 aa, Artificial Sequence; identical to SEQ ID NO: 4250
  Cyclic GFR-binding peptide
  MOD_RES (32)..(33): Xaa is C or S

SEQ ID NO: 41879 - protein, 27 aa, Artificial Sequence
  Cyclic GFR-binding peptide
HDELTYHYKLFIPKKRVIEKYLVSIPS

SEQ ID NO: 41880 - protein, 27 aa, Artificial Sequence
  Cyclic GFR-binding peptide
VVMDYHYKLVVKENEDKYLMSIPSLET

SEQ ID NO: 41881 - protein, 29 aa, Artificial Sequence
  Cyclic GFR-binding peptide
AKVVMNQYNKLIVNNSSDLYLVSIASLKT

SEQ ID NO: 41882 - protein, 20 aa, Artificial Sequence
  Cyclic GFR-binding peptide
YHYKLIVNSSDDKYLVSIPS

SEQ ID NO: 41883 - protein, 36 aa, Artificial Sequence
  Cyclic GFR-binding peptide
  MOD_RES (30)..(31): Xaa is C or S
RVIMYHYKLVKPKRGVKYLISIPSLAQPVXXPAASA

SEQ ID NO: 41884 - protein, 31 aa, Artificial Sequence
  Cyclic GFR-binding peptide
  MOD_RES (27)..(28): Xaa is C or S
NRHKRLIVNSSDDYYLVSTASLQTPAXXPKP

SEQ ID NO: 41885 - protein, 31 aa, Artificial Sequence; identical to SEQ ID NO: 4255
  Cyclic GFR-binding peptide

SEQ ID NO: 41886 - protein, 28 aa, Artificial Sequence
  Cyclic GFR-binding peptide
  MOD_RES (28)..(28): Xaa is C or S
MDYHYKLVVKENEDKYLMSIPSLETPVX

SEQ ID NO: 41887 - protein, 41 aa, Artificial Sequence; identical to SEQ ID NO: 4256
  Cyclic GFR-binding peptide
  MOD_RES (37)..(37): Xaa is C or S

SEQ ID NO: 41888 - protein, 33 aa, Artificial Sequence
  Cyclic GFR-binding peptide
  MOD_RES (2)..(2): Xaa is C or S
KXALHDELTYHYKLFIPKKRVIEKYLVSIPSLQ

SEQ ID NO: 41889 - protein, 34 aa, Artificial Sequence
  Cyclic GFR-binding peptide
  MOD_RES (29)..(29): Xaa is C or S
VMNRHKRLIVNSSDDYYLVSTASLKTPAXTPKTV

SEQ ID NO: 41890 - protein, 33 aa, Artificial Sequence
  Cyclic GFR-binding peptide
  MOD_RES (27)..(28): Xaa is C or S
EYHYKLVVKDYEDKYLMSIPSLETPVXXAKPIS

SEQ ID NO: 41891 - protein, 32 aa, Artificial Sequence
  Cyclic GFR-binding peptide
  MOD_RES (28)..(29): Xaa is C or S
GEQYNKLTPVGMDDLYLVSIASLKTPVXXAKG

SEQ ID NO: 41892 - protein, 21 aa, Artificial Sequence
  Cyclic GFR-binding peptide
ERYKKLTPVGMDDFYLVSIAN

SEQ ID NO: 41893 - protein, 27 aa, Artificial Sequence
  Cyclic GFR-binding peptide
MGERHKRLTPVGMDDYYLVSTASLKTP

SEQ ID NO: 41894 - protein, 30 aa, Artificial Sequence
  Cyclic GFR-binding peptide
  MOD_RES (26)..(27): Xaa is C or S
RHKRLIVNSSDDYYLVSTASLQTPAXXPKP

SEQ ID NO: 41895 - protein, 36 aa, Artificial Sequence; identical to SEQ ID NO: 4260
  Cyclic GFR-binding peptide

SEQ ID NO: 41896 - protein, 29 aa, Artificial Sequence
  Cyclic GFR-binding peptide
  MOD_RES (1)..(1): Xaa is C or S
XARVVMNQYNKLIVNSSDDLYLVSIASLQ

SEQ ID NO: 41897 - protein, 33 aa, Artificial Sequence
  Cyclic GFR-binding peptide
  MOD_RES (29)..(29): Xaa is C or S
VMNYHYKLIVNSSDDKYLVSIPSLKTPAXTPKT

SEQ ID NO: 41898 - protein, 25 aa, Artificial Sequence
  Cyclic GFR-binding peptide
ELTYHYKLFIPKKRVIEKYLVSIPS

SEQ ID NO: 41899 - protein, 33 aa, Artificial Sequence; identical to SEQ ID NO: 4261
  Cyclic GFR-binding peptide
  MOD_RES (31)..(31): Xaa is C or S

SEQ ID NO: 41900 - protein, 33 aa, Artificial Sequence; identical to SEQ ID NO: 4262
  Cyclic GFR-binding peptide
  MOD_RES (1)..(32)..(33): Xaa is C or S

SEQ ID NO: 41901 - protein, 28 aa, Artificial Sequence
  Cyclic GFR-binding peptide
VMNYHYKLIVNSSDDKYLVSIPSLQTPA

SEQ ID NO: 41902 - protein, 23 aa, Artificial Sequence
  Cyclic GFR-binding peptide
VMNRHKRLIVNSSDDYYLVSTAS

SEQ ID NO: 41903 - protein, 35 aa, Artificial Sequence
  Cyclic GFR-binding peptide
  MOD_RES (2)..(4): Xaa is C or S
RXGXEAVSMGEQYNKLTPVGMDDLYLVSIASLKTP

SEQ ID NO: 41904 - protein, 36 aa, Artificial Sequence; identical to SEQ ID NO: 4266
  Cyclic GFR-binding peptide
  MOD_RES (1)..(33)..(34): Xaa is C or S

SEQ ID NO: 41905 - protein, 33 aa, Artificial Sequence
  Cyclic GFR-binding peptide
  MOD_RES (29)..(29): Xaa is C or S
VMNRHKRLIVNSSDDYYLVSTASLKTPAXTPKT

SEQ ID NO: 41906 - protein, 24 aa, Artificial Sequence
  Cyclic GFR-binding peptide
VVMNRHKRLIVNSSDDYYLVSTAS

SEQ ID NO: 41907 - protein, 27 aa, Artificial Sequence
  Cyclic GFR-binding peptide
SMGERYKKLTPVGMDDFYLVSIANLKT

SEQ ID NO: 41908 - protein, 40 aa, Artificial Sequence; identical to SEQ ID NO: 4268
  Cyclic GFR-binding peptide
  MOD_RES (1)..(3)..(35)..(36): Xaa is C or S

SEQ ID NO: 41909 - protein, 36 aa, Artificial Sequence
  Cyclic GFR-binding peptide
  MOD_RES (33)..(33): Xaa is C or S
ELTRHKRLFIPKKRVIEYYLVSTASLQVQTPRXQVN

SEQ ID NO: 41910 - protein, 27 aa, Artificial Sequence
  Cyclic GFR-binding peptide
RYKKLFIPKKRVIEFYLVSIANLQVQT

SEQ ID NO: 41911 - protein, 31 aa, Artificial Sequence
  Cyclic GFR-binding peptide
  MOD_RES (28)..(29): Xaa is C or S
IMYHYKLVKPKRGVKYLISIPSLAQPVXXPA

SEQ ID NO: 41912 - protein, 31 aa, Artificial Sequence
  Cyclic GFR-binding peptide
  MOD_RES (2)..(4): Xaa is C or S
HXGXARVVMNRHKRLIVNSSDDYYLVSTASL

SEQ ID NO: 41913 - protein, 34 aa, Artificial Sequence; identical to SEQ ID NO: 4269
  Cyclic GFR-binding peptide
  MOD_RES (1)..(3)..(34): Xaa is C or S

SEQ ID NO: 41914 - protein, 34 aa, Artificial Sequence; identical to SEQ ID NO: 4270
  Cyclic GFR-binding peptide
  MOD_RES (1)..(3)..(34): Xaa is C or S

SEQ ID NO: 41915 - protein, 21 aa, Artificial Sequence
  Cyclic GFR-binding peptide
YHYKLVKPKRGVKYLISIPSL

SEQ ID NO: 41916 - protein, 28 aa, Artificial Sequence
  Cyclic GFR-binding peptide
  MOD_RES (26)..(26): Xaa is C or S
RHKRLIVNSSDDYYLVSTASLKTPAXTP

SEQ ID NO: 41917 - protein, 30 aa, Artificial Sequence
  Cyclic GFR-binding peptide
  MOD_RES (27)..(28): Xaa is C or S
MQYNKLIKPTKGILYLISIASLDQSVXXPS

SEQ ID NO: 41918 - protein, 22 aa, Artificial Sequence
  Cyclic GFR-binding peptide
MDYHYKLVVKENEDKYLMSIPS

SEQ ID NO: 41919 - protein, 36 aa, Artificial Sequence; identical to SEQ ID NO: 4275
  Cyclic GFR-binding peptide
  MOD_RES (2)..(4)..(35)..(36): Xaa is C or S

SEQ ID NO: 41920 - protein, 23 aa, Artificial Sequence
  Cyclic GFR-binding peptide
VMNYHYKLIVNSSDDKYLVSIPS

SEQ ID NO: 41921 - protein, 34 aa, Artificial Sequence; identical to SEQ ID NO: 4277
  Cyclic GFR-binding peptide
  MOD_RES (31)..(32): Xaa is C or S

SEQ ID NO: 41922 - protein, 24 aa, Artificial Sequence
  Cyclic GFR-binding peptide
RHKRLIVNSSDDYYLVSTASLKTP

SEQ ID NO: 41923 - protein, 28 aa, Artificial Sequence
  Cyclic GFR-binding peptide
VMNRHKRLIVNSSDDYYLVSTASLQTPA

SEQ ID NO: 41924 - protein, 38 aa, Artificial Sequence; identical to SEQ ID NO: 4278
  Cyclic GFR-binding peptide
  MOD_RES (36)..(36): Xaa is C or S

SEQ ID NO: 41925 - protein, 38 aa, Artificial Sequence; identical to SEQ ID NO: 4279
  Cyclic GFR-binding peptide
  MOD_RES (1)..(3): Xaa is C or S

SEQ ID NO: 41926 - protein, 30 aa, Artificial Sequence
  Cyclic GFR-binding peptide
  MOD_RES (1)..(1): Xaa is C or S
XAKVVMNYHYKLIVNNSSDKYLVSIPSLKT

SEQ ID NO: 41927 - protein, 40 aa, Artificial Sequence; identical to SEQ ID NO: 4280
  Cyclic GFR-binding peptide
  MOD_RES (1)..(3)..(35): Xaa is C or S

SEQ ID NO: 41928 - protein, 36 aa, Artificial Sequence; identical to SEQ ID NO: 4281
  Cyclic GFR-binding peptide
  MOD_RES (1)..(3)..(35)..(36): Xaa is C or S

SEQ ID NO: 41929 - protein, 26 aa, Artificial Sequence
  Cyclic GFR-binding peptide
ERYKKLVVKDYEDFYLMSIANLETPV

SEQ ID NO: 41930 - protein, 34 aa, Artificial Sequence
  Cyclic GFR-binding peptide
  MOD_RES (2)..(4): Xaa is C or S
EXKXALHDELTRYKKLFIPKKRVIEFYLVSIANL

SEQ ID NO: 41931 - protein, 37 aa, Artificial Sequence; identical to SEQ ID NO: 4283
  Cyclic GFR-binding peptide
  MOD_RES (2)..(34)..(35): Xaa is C or S

SEQ ID NO: 41932 - protein, 31 aa, Artificial Sequence
  Cyclic GFR-binding peptide
  MOD_RES (27)..(28): Xaa is C or S
NYHYKLIVNNSSDKYLVSIPSLKTPAXXAKP

SEQ ID NO: 41933 - protein, 33 aa, Artificial Sequence; identical to SEQ ID NO: 4284
  Cyclic GFR-binding peptide
  MOD_RES (1)..(33): Xaa is C or S

SEQ ID NO: 41934 - protein, 35 aa, Artificial Sequence
  Cyclic GFR-binding peptide
  MOD_RES (29)..(30): Xaa is C or S
VIMQYNKLVKPKRGVLYLISIASLAQPVXXPAASA

SEQ ID NO: 41935 - protein, 20 aa, Artificial Sequence
  Cyclic GFR-binding peptide
RYKKLVKPKRGVFYLISIAN

SEQ ID NO: 41936 - protein, 35 aa, Artificial Sequence
  Cyclic GFR-binding peptide
  MOD_RES (34)..(34): Xaa is C or S
DELTQYNKLFIPKKRVIELYLVSIASLQVQTPRXQ

SEQ ID NO: 41937 - protein, 38 aa, Artificial Sequence; identical to SEQ ID NO: 4285
  Cyclic GFR-binding peptide
  MOD_RES (1)..(3)..(36)..(37): Xaa is C or S

SEQ ID NO: 41938 - protein, 33 aa, Artificial Sequence
  Cyclic GFR-binding peptide
  MOD_RES (1)..(3): Xaa is C or S
XGXGEVVMEYHYKLVVKDYEDKYLMSIPSLETP

SEQ ID NO: 41939 - protein, 34 aa, Artificial Sequence
  Cyclic GFR-binding peptide
  MOD_RES (29)..(29): Xaa is C or S
VMNYHYKLIVNSSDDKYLVSIPSLKTPAXTPKTV

SEQ ID NO: 41940 - protein, 31 aa, Artificial Sequence; identical to SEQ ID NO: 4286
  Cyclic GFR-binding peptide
  MOD_RES (1)..(1): Xaa is C or S

SEQ ID NO: 41941 - protein, 31 aa, Artificial Sequence
  Cyclic GFR-binding peptide
  MOD_RES (27)..(27): Xaa is C or S
NQYNKLIVNSSDDLYLVSIASLKTPAXTPKT

SEQ ID NO: 41942 - protein, 37 aa, Artificial Sequence; identical to SEQ ID NO: 4289
  Cyclic GFR-binding peptide
  MOD_RES (1)..(3)..(35): Xaa is C or S

SEQ ID NO: 41943 - protein, 36 aa, Artificial Sequence; identical to SEQ ID NO: 4290
  Cyclic GFR-binding peptide
  MOD_RES (1)..(32)..(33): Xaa is C or S

SEQ ID NO: 41944 - protein, 34 aa, Artificial Sequence; identical to SEQ ID NO: 4291
  Cyclic GFR-binding peptide
  MOD_RES (31)..(32): Xaa is C or S

SEQ ID NO: 41945 - protein, 33 aa, Artificial Sequence; identical to SEQ ID NO: 4292
  Cyclic GFR-binding peptide
  MOD_RES (1)..(3): Xaa is C or S

SEQ ID NO: 41946 - protein, 29 aa, Artificial Sequence
  Cyclic GFR-binding peptide
  MOD_RES (1)..(1): Xaa is C or S
XGEVVMERYKKLVVKDYEDFYLMSIANLE

SEQ ID NO: 41947 - protein, 27 aa, Artificial Sequence
  Cyclic GFR-binding peptide
TYHYKLFIPKKRVIEKYLVSIPSLQVQ

SEQ ID NO: 41948 - protein, 32 aa, Artificial Sequence
  Cyclic GFR-binding peptide
  MOD_RES (1)..(1): Xaa is C or S
XEAVSMGERHKRLTPVGMDDYYLVSTASLKTP

SEQ ID NO: 41949 - protein, 37 aa, Artificial Sequence; identical to SEQ ID NO: 4294
  Cyclic GFR-binding peptide
  MOD_RES (2)..(34)..(35): Xaa is C or S

SEQ ID NO: 41950 - protein, 31 aa, Artificial Sequence
  Cyclic GFR-binding peptide
  MOD_RES (1)..(3): Xaa is C or S
XGXGEVVMDRHKRLVVKENEDYYLMSTASLE

SEQ ID NO: 41951 - protein, 31 aa, Artificial Sequence
  Cyclic GFR-binding peptide
  MOD_RES (1)..(3): Xaa is C or S
XKXSKVIMRYKKLIKPTKGIFYLISIANLDQ

SEQ ID NO: 41952 - protein, 34 aa, Artificial Sequence
  Cyclic GFR-binding peptide
  MOD_RES (2)..(2): Xaa is C or S
KXALHDELTYHYKLFIPKKRVIEKYLVSIPSLQV

SEQ ID NO: 41953 - protein, 31 aa, Artificial Sequence
  Cyclic GFR-binding peptide
  MOD_RES (2)..(2): Xaa is C or S
GXARVVMNRHKRLIVNSSDDYYLVSTASLQT

SEQ ID NO: 41954 - protein, 32 aa, Artificial Sequence
  Cyclic GFR-binding peptide
  MOD_RES (26)..(27): Xaa is C or S
YHYKLIVNNSSDKYLVSIPSLKTPAXXAKPVA

SEQ ID NO: 41955 - protein, 38 aa, Artificial Sequence; identical to SEQ ID NO: 4298
  Cyclic GFR-binding peptide
  MOD_RES (2)..(4)..(36)..(37): Xaa is C or S

SEQ ID NO: 41956 - protein, 28 aa, Artificial Sequence
  Cyclic GFR-binding peptide
VVMNQYNKLIVNSSDDLYLVSIASLKTP

SEQ ID NO: 41957 - protein, 27 aa, Artificial Sequence
  Cyclic GFR-binding peptide
VVMDRHKRLVVKENEDYYLMSTASLET

SEQ ID NO: 41958 - protein, 29 aa, Artificial Sequence
  Cyclic GFR-binding peptide
TYHYKLFIPKKRVIEKYLVSIPSLQVQTP

SEQ ID NO: 41959 - protein, 23 aa, Artificial Sequence
  Cyclic GFR-binding peptide
IMRYKKLIKPTKGIFYLISIANL

SEQ ID NO: 41960 - protein, 35 aa, Artificial Sequence; identical to SEQ ID NO: 4299
  Cyclic GFR-binding peptide
  MOD_RES (32)..(33): Xaa is C or S

SEQ ID NO: 41961 - protein, 29 aa, Artificial Sequence
  Cyclic GFR-binding peptide
  MOD_RES (26)..(27): Xaa is C or S
QYNKLIVNSSDDLYLVSIASLKTPAXXPK

SEQ ID NO: 41962 - protein, 27 aa, Artificial Sequence
  Cyclic GFR-binding peptide
MERHKRLVVKDYEDYYLMSTASLETPV

SEQ ID NO: 41963 - protein, 29 aa, Artificial Sequence
  Cyclic GFR-binding peptide
  MOD_RES (1)..(1): Xaa is C or S
XSRVVMNRHKRLIVNSSDDYYLVSTASLK

SEQ ID NO: 41964 - protein, 34 aa, Artificial Sequence; identical to SEQ ID NO: 4301
  Cyclic GFR-binding peptide
  MOD_RES (2)..(2): Xaa is C or S

SEQ ID NO: 41965 - protein, 28 aa, Artificial Sequence
  Cyclic GFR-binding peptide
  MOD_RES (27)..(28): Xaa is C or S
MRHKRLVKPKRGVYYLISTASLAQPVXX

SEQ ID NO: 41966 - protein, 41 aa, Artificial Sequence; identical to SEQ ID NO: 4302
  Cyclic GFR-binding peptide
  MOD_RES (2)..(4)..(36)..(37): Xaa is C or S

SEQ ID NO: 41967 - protein, 21 aa, Artificial Sequence
  Cyclic GFR-binding peptide
MRHKRLIKPTKGIYYLISTAS

SEQ ID NO: 41968 - protein, 33 aa, Artificial Sequence; identical to SEQ ID NO: 4303
  Cyclic GFR-binding peptide
  MOD_RES (2)..(2): Xaa is C or S

SEQ ID NO: 41969 - protein, 24 aa, Artificial Sequence
  Cyclic GFR-binding peptide
NYHYKLIVNNSSDKYLVSIPSLKT

SEQ ID NO: 41970 - protein, 38 aa, Artificial Sequence; identical to SEQ ID NO: 4304
  Cyclic GFR-binding peptide
  MOD_RES (1)..(3)..(34)..(35): Xaa is C or S

SEQ ID NO: 41971 - protein, 22 aa, Artificial Sequence
  Cyclic GFR-binding peptide
GERHKRLTPVGMDDYYLVSTAS

SEQ ID NO: 41972 - protein, 28 aa, Artificial Sequence
  Cyclic GFR-binding peptide
QYNKLFIPKKRVIELYLVSIASLQVQTP

SEQ ID NO: 41973 - protein, 29 aa, Artificial Sequence
  Cyclic GFR-binding peptide
ELTYHYKLFIPKKRVIEKYLVSIPSLQVQ

SEQ ID NO: 41974 - protein, 32 aa, Artificial Sequence
  Cyclic GFR-binding peptide
  MOD_RES (26)..(27): Xaa is C or S
RYKKLTPVGMDDFYLVSIANLKTPVXXAKGVK

SEQ ID NO: 41975 - protein, 40 aa, Artificial Sequence; identical to SEQ ID NO: 4307
  Cyclic GFR-binding peptide
  MOD_RES (1)..(3)..(35)..(36): Xaa is C or S

SEQ ID NO: 41976 - protein, 37 aa, Artificial Sequence
  Cyclic GFR-binding peptide
  MOD_RES (34)..(34): Xaa is C or S
DELTRHKRLFIPKKRVIEYYLVSTASLQVQTPRXQVN

SEQ ID NO: 41977 - protein, 31 aa, Artificial Sequence
  Cyclic GFR-binding peptide
  MOD_RES (27)..(28): Xaa is C or S
ERHKRLVVKDYEDYYLMSTASLETPVXXAKP

SEQ ID NO: 41978 - protein, 43 aa, Artificial Sequence; identical to SEQ ID NO: 4310
  Cyclic GFR-binding peptide
  MOD_RES (1)..(3)..(40): Xaa is C or S

SEQ ID NO: 41979 - protein, 36 aa, Artificial Sequence; identical to SEQ ID NO: 4309
  Cyclic GFR-binding peptide
  MOD_RES (1)..(33)..(34): Xaa is C or S

SEQ ID NO: 41980 - protein, 32 aa, Artificial Sequence
  Cyclic GFR-binding peptide
  MOD_RES (30)..(31): Xaa is C or S
KVVMYHYKLVKPTRGVKYLISIPSLDQPVXXP

SEQ ID NO: 41981 - protein, 32 aa, Artificial Sequence
  Cyclic GFR-binding peptide
  MOD_RES (28)..(29): Xaa is C or S
MDRYKKLVVKENEDFYLMSIANLETPVXXAKP

SEQ ID NO: 41982 - protein, 30 aa, Artificial Sequence
  Cyclic GFR-binding peptide
  MOD_RES (1)..(1): Xaa is C or S
XALHDELTRYKKLFIPKKRVIEFYLVSIAN

SEQ ID NO: 41983 - protein, 32 aa, Artificial Sequence
  Cyclic GFR-binding peptide
  MOD_RES (1)..(3): Xaa is C or S
XGXGEVVMDRYKKLVVKENEDFYLMSIANLET

SEQ ID NO: 41984 - protein, 34 aa, Artificial Sequence
  Cyclic GFR-binding peptide
  MOD_RES (29)..(30): Xaa is C or S
VMNYHYKLIVNSSDDKYLVSIPSLKTPAXXPKPV

SEQ ID NO: 41985 - protein, 33 aa, Artificial Sequence
  Cyclic GFR-binding peptide
  MOD_RES (30)..(31): Xaa is C or S
KVVMQYNKLVKPTRGVLYLISIASLDQPVXXPS

SEQ ID NO: 41986 - protein, 33 aa, Artificial Sequence
  Cyclic GFR-binding peptide
  MOD_RES (28)..(29): Xaa is C or S
MNQYNKLIVNSSDDLYLVSIASLQTPAXXPKPV

SEQ ID NO: 41987 - protein, 38 aa, Artificial Sequence; identical to SEQ ID NO: 4312
  Cyclic GFR-binding peptide
  MOD_RES (1)..(3)..(34)..(35): Xaa is C or S

SEQ ID NO: 41988 - protein, 37 aa, Artificial Sequence; identical to SEQ ID NO: 4314
  Cyclic GFR-binding peptide
  MOD_RES (32)..(32): Xaa is C or S

SEQ ID NO: 41989 - protein, 26 aa, Artificial Sequence
  Cyclic GFR-binding peptide
LTRHKRLFIPKKRVIEYYLVSTASLQ

SEQ ID NO: 41990 - protein, 37 aa, Artificial Sequence; identical to SEQ ID NO: 4313
  Cyclic GFR-binding peptide
  MOD_RES (2)..(33)..(34): Xaa is C or S

SEQ ID NO: 41991 - protein, 23 aa, Artificial Sequence
  Cyclic GFR-binding peptide
YHYKLIVNSSDDKYLVSIPSLKT

SEQ ID NO: 41992 - protein, 37 aa, Artificial Sequence; identical to SEQ ID NO: 4316
  Cyclic GFR-binding peptide
  MOD_RES (1)..(3)..(35): Xaa is C or S

SEQ ID NO: 41993 - protein, 39 aa, Artificial Sequence; identical to SEQ ID NO: 4315
  Cyclic GFR-binding peptide
  MOD_RES (1)..(3)..(34)..(35): Xaa is C or S

SEQ ID NO: 41994 - protein, 31 aa, Artificial Sequence; identical to SEQ ID NO: 4317
  Cyclic GFR-binding peptide
  MOD_RES (1)..(1): Xaa is C or S

SEQ ID NO: 41995 - protein, 27 aa, Artificial Sequence
  Cyclic GFR-binding peptide
VIMQYNKLIKPTKGILYLISIASLDQS

SEQ ID NO: 41996 - protein, 30 aa, Artificial Sequence
  Cyclic GFR-binding peptide
  MOD_RES (27)..(28): Xaa is C or S
NRYKKLIVNNSSDFYLVSIANLKTPAXXAK

SEQ ID NO: 41997 - protein, 28 aa, Artificial Sequence
  Cyclic GFR-binding peptide
  MOD_RES (26)..(27): Xaa is C or S
QYNKLVKPTRGVLYLISIASLDQPVXXP

SEQ ID NO: 41998 - protein, 34 aa, Artificial Sequence
  Cyclic GFR-binding peptide
  MOD_RES (29)..(30): Xaa is C or S
VMNRHKRLIVNSSDDYYLVSTASLKTPAXXPKPV

SEQ ID NO: 41999 - protein, 33 aa, Artificial Sequence
  Cyclic GFR-binding peptide
ALHDELTQYNKLFIPKKRVIELYLVSIASLQVQ

SEQ ID NO: 42000 - protein, 22 aa, Artificial Sequence
  Cyclic GFR-binding peptide
MDRHKRLVVKENEDYYLMSTAS

SEQ ID NO: 42001 - protein, 32 aa, Artificial Sequence; identical to SEQ ID NO: 4319
  Cyclic GFR-binding peptide
  MOD_RES (32)..(32): Xaa is C or S

SEQ ID NO: 42002 - protein, 29 aa, Artificial Sequence
  Cyclic GFR-binding peptide
  MOD_RES (26)..(27): Xaa is C or S
RYKKLTPVGMDDFYLVSIANLKTPVXXAK

SEQ ID NO: 42003 - protein, 27 aa, Artificial Sequence
  Cyclic GFR-binding peptide
  MOD_RES (1)..(1): Xaa is C or S
XSKVVMQYNKLVKPTRGVLYLISIASL

SEQ ID NO: 42004 - protein, 32 aa, Artificial Sequence
  Cyclic GFR-binding peptide
  MOD_RES (29)..(30): Xaa is C or S
VIMRHKRLVKPKRGVYYLISTASLAQPVXXPA

SEQ ID NO: 42005 - protein, 31 aa, Artificial Sequence; identical to SEQ ID NO: 4324
  Cyclic GFR-binding peptide

SEQ ID NO: 42006 - protein, 31 aa, Artificial Sequence
  Cyclic GFR-binding peptide
  MOD_RES (27)..(28): Xaa is C or S
MYHYKLIKPTKGIKYLISIPSLDQSVXXPSA

SEQ ID NO: 42007 - protein, 31 aa, Artificial Sequence
  Cyclic GFR-binding peptide
  MOD_RES (1)..(3): Xaa is C or S
XKXSKVVMRHKRLVKPTRGVYYLISTASLDQ

SEQ ID NO: 42008 - protein, 31 aa, Artificial Sequence
  Cyclic GFR-binding peptide
  MOD_RES (30)..(31): Xaa is C or S
SMGEQYNKLTPVGMDDLYLVSIASLKTPVXX

SEQ ID NO: 42009 - protein, 40 aa, Artificial Sequence; identical to SEQ ID NO: 4327
  Cyclic GFR-binding peptide
  MOD_RES (1)..(3)..(35)..(36): Xaa is C or S

SEQ ID NO: 42010 - protein, 24 aa, Artificial Sequence
  Cyclic GFR-binding peptide
VMERHKRLVVKDYEDYYLMSTASL

SEQ ID NO: 42011 - protein, 28 aa, Artificial Sequence
  Cyclic GFR-binding peptide
EVVMDRHKRLVVKENEDYYLMSTASLET

SEQ ID NO: 42012 - protein, 28 aa, Artificial Sequence
  Cyclic GFR-binding peptide
VSMGERYKKLTPVGMDDFYLVSIANLKT

SEQ ID NO: 42013 - protein, 28 aa, Artificial Sequence
  Cyclic GFR-binding peptide
SRVVMNQYNKLIVNSSDDLYLVSIASLK

SEQ ID NO: 42014 - protein, 28 aa, Artificial Sequence
  Cyclic GFR-binding peptide
  MOD_RES (27)..(28): Xaa is C or S
NQYNKLIVNNSSDLYLVSIASLKTPAXX

SEQ ID NO: 42015 - protein, 31 aa, Artificial Sequence
  Cyclic GFR-binding peptide
  MOD_RES (29)..(29): Xaa is C or S
VMNQYNKLIVNSSDDLYLVSIASLKTPAXTP

SEQ ID NO: 42016 - protein, 39 aa, Artificial Sequence; identical to SEQ ID NO: 4329
  Cyclic GFR-binding peptide
  MOD_RES (1)..(3)..(34)..(35): Xaa is C or S

SEQ ID NO: 42017 - protein, 37 aa, Artificial Sequence; identical to SEQ ID NO: 4330
  Cyclic GFR-binding peptide
  MOD_RES (32)..(33): Xaa is C or S

SEQ ID NO: 42018 - protein, 30 aa, Artificial Sequence
  Cyclic GFR-binding peptide
  MOD_RES (1)..(3): Xaa is C or S
XGXGEVVMDYHYKLVVKENEDKYLMSIPSL

SEQ ID NO: 42019 - protein, 32 aa, Artificial Sequence
  Cyclic GFR-binding peptide
  MOD_RES (1)..(3): Xaa is C or S
XKXSKVIMRYKKLIKPTKGIFYLISIANLDQS

SEQ ID NO: 42020 - protein, 29 aa, Artificial Sequence
  Cyclic GFR-binding peptide
  MOD_RES (1)..(1): Xaa is C or S
XGEVVMDRYKKLVVKENEDFYLMSIANLE

SEQ ID NO: 42021 - protein, 30 aa, Artificial Sequence
  Cyclic GFR-binding peptide
  MOD_RES (1)..(3): Xaa is C or S
XGXGEVVMDRHKRLVVKENEDYYLMSTASL

SEQ ID NO: 42022 - protein, 25 aa, Artificial Sequence
  Cyclic GFR-binding peptide
MGERHKRLTPVGMDDYYLVSTASLK

SEQ ID NO: 42023 - protein, 34 aa, Artificial Sequence
  Cyclic GFR-binding peptide
  MOD_RES (29)..(30): Xaa is C or S
MGERHKRLTPVGMDDYYLVSTASLKTPVXXAKGV

SEQ ID NO: 42024 - protein, 25 aa, Artificial Sequence
  Cyclic GFR-binding peptide
NYHYKLIVNNSSDKYLVSIPSLKTP

SEQ ID NO: 42025 - protein, 29 aa, Artificial Sequence
  Cyclic GFR-binding peptide
  MOD_RES (27)..(28): Xaa is C or S
NRHKRLIVNSSDDYYLVSTASLQTPAXXP

SEQ ID NO: 42026 - protein, 29 aa, Artificial Sequence
  Cyclic GFR-binding peptide
  MOD_RES (26)..(27): Xaa is C or S
RYKKLIKPTKGIFYLISIANLDQSVXXPS

SEQ ID NO: 42027 - protein, 40 aa, Artificial Sequence; identical to SEQ ID NO: 4336
  Cyclic GFR-binding peptide
  MOD_RES (2)..(34)..(35): Xaa is C or S

SEQ ID NO: 42028 - protein, 40 aa, Artificial Sequence; identical to SEQ ID NO: 4337
  Cyclic GFR-binding peptide
  MOD_RES (1)..(3)..(40): Xaa is C or S

SEQ ID NO: 42029 - protein, 37 aa, Artificial Sequence; identical to SEQ ID NO: 4338
  Cyclic GFR-binding peptide
  MOD_RES (1)..(3)..(34)..(35): Xaa is C or S

SEQ ID NO: 42030 - protein, 27 aa, Artificial Sequence
  Cyclic GFR-binding peptide
ELTQYNKLFIPKKRVIELYLVSIASLQ

SEQ ID NO: 42031 - protein, 36 aa, Artificial Sequence; identical to SEQ ID NO: 4339
  Cyclic GFR-binding peptide
  MOD_RES (2)..(33)..(34): Xaa is C or S

SEQ ID NO: 42032 - protein, 42 aa, Artificial Sequence; identical to SEQ ID NO: 4340
  Cyclic GFR-binding peptide
  MOD_RES (1)..(38): Xaa is C or S

SEQ ID NO: 42033 - protein, 36 aa, Artificial Sequence; identical to SEQ ID NO: 4341
  Cyclic GFR-binding peptide
  MOD_RES (2)..(2): Xaa is C or S

SEQ ID NO: 42034 - protein, 30 aa, Artificial Sequence
  Cyclic GFR-binding peptide
  MOD_RES (2)..(4): Xaa is C or S
RXGXGEVVMDRHKRLVVKENEDYYLMSTAS

SEQ ID NO: 42035 - protein, 32 aa, Artificial Sequence; identical to SEQ ID NO: 4342
  Cyclic GFR-binding peptide
  MOD_RES (1)..(32): Xaa is C or S

SEQ ID NO: 42036 - protein, 27 aa, Artificial Sequence
  Cyclic GFR-binding peptide
  MOD_RES (27)..(27): Xaa is C or S
ERHKRLTPVGMDDYYLVSTASLKTPVX

SEQ ID NO: 42037 - protein, 34 aa, Artificial Sequence
  Cyclic GFR-binding peptide
  MOD_RES (30)..(31): Xaa is C or S
VVMNRHKRLIVNSSDDYYLVSTASLKTPAXXPKP

SEQ ID NO: 42038 - protein, 27 aa, Artificial Sequence
  Cyclic GFR-binding peptide
MEYHYKLVVKDYEDKYLMSIPSLETPV

SEQ ID NO: 42039 - protein, 31 aa, Artificial Sequence
  Cyclic GFR-binding peptide
  MOD_RES (31)..(31): Xaa is C or S
TRHKRLFIPKKRVIEYYLVSTASLQVQTPRX

SEQ ID NO: 42040 - protein, 32 aa, Artificial Sequence
  Cyclic GFR-binding peptide
  MOD_RES (2)..(4): Xaa is C or S
RXGXGEVVMEYHYKLVVKDYEDKYLMSIPSLE

SEQ ID NO: 42041 - protein, 31 aa, Artificial Sequence
  Cyclic GFR-binding peptide
  MOD_RES (2)..(4): Xaa is C or S
HXGXAKVVMNQYNKLIVNNSSDLYLVSIASL

SEQ ID NO: 42042 - protein, 24 aa, Artificial Sequence
  Cyclic GFR-binding peptide
VMEYHYKLVVKDYEDKYLMSIPSL

SEQ ID NO: 42043 - protein, 31 aa, Artificial Sequence
  Cyclic GFR-binding peptide
  MOD_RES (28)..(29): Xaa is C or S
IMRHKRLVKPKRGVYYLISTASLAQPVXXPA

SEQ ID NO: 42044 - protein, 28 aa, Artificial Sequence
  Cyclic GFR-binding peptide
  MOD_RES (1)..(1): Xaa is C or S
XGEVVMDYHYKLVVKENEDKYLMSIPSL

SEQ ID NO: 42045 - protein, 31 aa, Artificial Sequence
  Cyclic GFR-binding peptide
  MOD_RES (2)..(4): Xaa is C or S
RXGXGEVVMEYHYKLVVKDYEDKYLMSIPSL

SEQ ID NO: 42046 - protein, 31 aa, Artificial Sequence
  Cyclic GFR-binding peptide
  MOD_RES (1)..(1): Xaa is C or S
XGEVVMERHKRLVVKDYEDYYLMSTASLETP

SEQ ID NO: 42047 - protein, 24 aa, Artificial Sequence
  Cyclic GFR-binding peptide
MRHKRLVKPKRGVYYLISTASLAQ

SEQ ID NO: 42048 - protein, 33 aa, Artificial Sequence
  Cyclic GFR-binding peptide
  MOD_RES (2)..(4): Xaa is C or S
HXGXARVVMNRHKRLIVNSSDDYYLVSTASLQT

SEQ ID NO: 42049 - protein, 30 aa, Artificial Sequence
  Cyclic GFR-binding peptide
  MOD_RES (1)..(1): Xaa is C or S
XARVVMNQYNKLIVNSSDDLYLVSIASLQT

SEQ ID NO: 42050 - protein, 31 aa, Artificial Sequence
  Cyclic GFR-binding peptide
  MOD_RES (26)..(26): Xaa is C or S
YHYKLIVNSSDDKYLVSIPSLKTPAXTPKTV

SEQ ID NO: 42051 - protein, 39 aa, Artificial Sequence; identical to SEQ ID NO: 4350
  Cyclic GFR-binding peptide
  MOD_RES (1)..(33)..(34): Xaa is C or S

SEQ ID NO: 42052 - protein, 34 aa, Artificial Sequence; identical to SEQ ID NO: 4351
  Cyclic GFR-binding peptide
  MOD_RES (2)..(33)..(34): Xaa is C or S

SEQ ID NO: 42053 - protein, 29 aa, Artificial Sequence
  Cyclic GFR-binding peptide
  MOD_RES (27)..(27): Xaa is C or S
NRHKRLIVNSSDDYYLVSTASLKTPAXTP

SEQ ID NO: 42054 - protein, 38 aa, Artificial Sequence; identical to SEQ ID NO: 4353
  Cyclic GFR-binding peptide
  MOD_RES (1)..(33)..(34): Xaa is C or S

SEQ ID NO: 42055 - protein, 28 aa, Artificial Sequence
  Cyclic GFR-binding peptide
  MOD_RES (27)..(28): Xaa is C or S
NRHKRLIVNSSDDYYLVSTASLKTPAXX

SEQ ID NO: 42056 - protein, 25 aa, Artificial Sequence
  Cyclic GFR-binding peptide
IMYHYKLVKPKRGVKYLISIPSLAQ

SEQ ID NO: 42057 - protein, 32 aa, Artificial Sequence
  Cyclic GFR-binding peptide
  MOD_RES (30)..(31): Xaa is C or S
VVMNQYNKLIVNSSDDLYLVSIASLKTPAXXP

SEQ ID NO: 42058 - protein, 32 aa, Artificial Sequence
  Cyclic GFR-binding peptide
  MOD_RES (28)..(28): Xaa is C or S
MNRHKRLIVNSSDDYYLVSTASLKTPAXTPKT

SEQ ID NO: 42059 - protein, 39 aa, Artificial Sequence; identical to SEQ ID NO: 4356
  Cyclic GFR-binding peptide
  MOD_RES (2)..(4)..(36)..(37): Xaa is C or S

SEQ ID NO: 42060 - protein, 35 aa, Artificial Sequence; identical to SEQ ID NO: 4357
  Cyclic GFR-binding peptide
  MOD_RES (1)..(3)..(34)..(35): Xaa is C or S

SEQ ID NO: 42061 - protein, 38 aa, Artificial Sequence; identical to SEQ ID NO: 4358
  Cyclic GFR-binding peptide
  MOD_RES (2)..(4)..(35)..(36): Xaa is C or S

SEQ ID NO: 42062 - protein, 34 aa, Artificial Sequence; identical to SEQ ID NO: 4359
  Cyclic GFR-binding peptide
  MOD_RES (1)..(33)..(34): Xaa is C or S

SEQ ID NO: 42063 - protein, 36 aa, Artificial Sequence; identical to SEQ ID NO: 4365
  Cyclic GFR-binding peptide
  MOD_RES (1)..(3)..(35)..(36): Xaa is C or S

SEQ ID NO: 42064 - protein, 36 aa, Artificial Sequence
  Cyclic GFR-binding peptide
  MOD_RES (30)..(31): Xaa is C or S
VVMDRHKRLVVKENEDYYLMSTASLETPVXXAKPIK

SEQ ID NO: 42065 - protein, 24 aa, Artificial Sequence
  Cyclic GFR-binding peptide
RHKRLIVNSSDDYYLVSTASLQTP

SEQ ID NO: 42066 - protein, 33 aa, Artificial Sequence
  Cyclic GFR-binding peptide
  MOD_RES (30)..(31): Xaa is C or S
VVMNRHKRLIVNSSDDYYLVSTASLQTPAXXPK

SEQ ID NO: 42067 - protein, 37 aa, Artificial Sequence; identical to SEQ ID NO: 4368
  Cyclic GFR-binding peptide
  MOD_RES (1)..(32)..(33): Xaa is C or S

SEQ ID NO: 42068 - protein, 29 aa, Artificial Sequence
  Cyclic GFR-binding peptide
  MOD_RES (2)..(4): Xaa is C or S
SXKXSKVVMQYNKLVKPTRGVLYLISIAS

SEQ ID NO: 42069 - protein, 37 aa, Artificial Sequence; identical to SEQ ID NO: 4371
  Cyclic GFR-binding peptide
  MOD_RES (35)..(35): Xaa is C or S

SEQ ID NO: 42070 - protein, 25 aa, Artificial Sequence
  Cyclic GFR-binding peptide
MRYKKLVKPKRGVFYLISIANLAQP

SEQ ID NO: 42071 - protein, 25 aa, Artificial Sequence
  Cyclic GFR-binding peptide
QYNKLIVNNSSDLYLVSIASLKTPA

SEQ ID NO: 42072 - protein, 22 aa, Artificial Sequence
  Cyclic GFR-binding peptide
MNYHYKLIVNSSDDKYLVSIPS

SEQ ID NO: 42073 - protein, 37 aa, Artificial Sequence; identical to SEQ ID NO: 4374
  Cyclic GFR-binding peptide
  MOD_RES (35)..(35): Xaa is C or S

SEQ ID NO: 42074 - protein, 39 aa, Artificial Sequence; identical to SEQ ID NO: 4375
  Cyclic GFR-binding peptide
  MOD_RES (1)..(3)..(35)..(36): Xaa is C or S

SEQ ID NO: 42075 - protein, 24 aa, Artificial Sequence
  Cyclic GFR-binding peptide
VMERYKKLVVKDYEDFYLMSIANL

SEQ ID NO: 42076 - protein, 37 aa, Artificial Sequence; identical to SEQ ID NO: 4376
  Cyclic GFR-binding peptide
  MOD_RES (32)..(33): Xaa is C or S

SEQ ID NO: 42077 - protein, 35 aa, Artificial Sequence
  Cyclic GFR-binding peptide
  MOD_RES (30)..(30): Xaa is C or S
VVMNYHYKLIVNSSDDKYLVSIPSLKTPAXTPKTV

SEQ ID NO: 42078 - protein, 23 aa, Artificial Sequence
  Cyclic GFR-binding peptide
MRHKRLVKPKRGVYYLISTASLA

SEQ ID NO: 42079 - protein, 24 aa, Artificial Sequence
  Cyclic GFR-binding peptide
YHYKLIVNNSSDKYLVSIPSLKTP

SEQ ID NO: 42080 - protein, 22 aa, Artificial Sequence
  Cyclic GFR-binding peptide
IMQYNKLVKPKRGVLYLISIAS

SEQ ID NO: 42081 - protein, 33 aa, Artificial Sequence; identical to SEQ ID NO: 4379
  Cyclic GFR-binding peptide
  MOD_RES (31)..(32): Xaa is C or S

SEQ ID NO: 42082 - protein, 32 aa, Artificial Sequence; identical to SEQ ID NO: 4380
  Cyclic GFR-binding peptide
  MOD_RES (31)..(32): Xaa is C or S

SEQ ID NO: 42083 - protein, 33 aa, Artificial Sequence
  Cyclic GFR-binding peptide
  MOD_RES (27)..(28): Xaa is C or S
NQYNKLIVNSSDDLYLVSIASLQTPAXXPKPVT

SEQ ID NO: 42084 - protein, 30 aa, Artificial Sequence
  Cyclic GFR-binding peptide
DELTRHKRLFIPKKRVIEYYLVSTASLQVQ

SEQ ID NO: 42085 - protein, 35 aa, Artificial Sequence; identical to SEQ ID NO: 4381
  Cyclic GFR-binding peptide
  MOD_RES (1)..(3): Xaa is C or S

SEQ ID NO: 42086 - protein, 20 aa, Artificial Sequence
  Cyclic GFR-binding peptide
RYKKLIVNSSDDFYLVSIAN

SEQ ID NO: 42087 - protein, 31 aa, Artificial Sequence
  Cyclic GFR-binding peptide
  MOD_RES (2)..(4): Xaa is C or S
SXKXSRVIMQYNKLVKPKRGVLYLISIASLA

SEQ ID NO: 42088 - protein, 27 aa, Artificial Sequence
  Cyclic GFR-binding peptide
TRHKRLFIPKKRVIEYYLVSTASLQVQ

SEQ ID NO: 42089 - protein, 37 aa, Artificial Sequence; identical to SEQ ID NO: 4384
  Cyclic GFR-binding peptide
  MOD_RES (1)..(1): Xaa is C or S

SEQ ID NO: 42090 - protein, 40 aa, Artificial Sequence; identical to SEQ ID NO: 4386
  Cyclic GFR-binding peptide
  MOD_RES (1)..(3)..(34)..(35): Xaa is C or S

SEQ ID NO: 42091 - protein, 29 aa, Artificial Sequence
  Cyclic GFR-binding peptide
  MOD_RES (27)..(28): Xaa is C or S
MRHKRLVKPTRGVYYLISTASLDQPVXXP

SEQ ID NO: 42092 - protein, 28 aa, Artificial Sequence
  Cyclic GFR-binding peptide
  MOD_RES (28)..(28): Xaa is C or S
IMQYNKLIKPTKGILYLISIASLDQSVX

SEQ ID NO: 42093 - protein, 24 aa, Artificial Sequence
  Cyclic GFR-binding peptide
VVMERYKKLVVKDYEDFYLMSIAN

SEQ ID NO: 42094 - protein, 29 aa, Artificial Sequence
  Cyclic GFR-binding peptide
DELTRYKKLFIPKKRVIEFYLVSIANLQV

SEQ ID NO: 42095 - protein, 30 aa, Artificial Sequence
  Cyclic GFR-binding peptide
  MOD_RES (29)..(30): Xaa is C or S
VIMYHYKLIKPTKGIKYLISIPSLDQSVXX

SEQ ID NO: 42096 - protein, 30 aa, Artificial Sequence
  Cyclic GFR-binding peptide
  MOD_RES (26)..(27): Xaa is C or S
RHKRLIVNSSDDYYLVSTASLKTPAXXPKP

SEQ ID NO: 42097 - protein, 25 aa, Artificial Sequence
  Cyclic GFR-binding peptide
EVVMDRHKRLVVKENEDYYLMSTAS

SEQ ID NO: 42098 - protein, 32 aa, Artificial Sequence
  Cyclic GFR-binding peptide
  MOD_RES (2)..(2): Xaa is C or S
GXGEVVMERHKRLVVKDYEDYYLMSTASLETP

SEQ ID NO: 42099 - protein, 29 aa, Artificial Sequence
  Cyclic GFR-binding peptide
  MOD_RES (1)..(3): Xaa is C or S
XKXSKVVMQYNKLVKPTRGVLYLISIASL

SEQ ID NO: 42100 - protein, 41 aa, Artificial Sequence; identical to SEQ ID NO: 4387
  Cyclic GFR-binding peptide
  MOD_RES (2)..(4)..(41): Xaa is C or S

SEQ ID NO: 42101 - protein, 27 aa, Artificial Sequence
  Cyclic GFR-binding peptide
  MOD_RES (26)..(26): Xaa is C or S
RHKRLIVNSSDDYYLVSTASLKTPAXT

SEQ ID NO: 42102 - protein, 23 aa, Artificial Sequence
  Cyclic GFR-binding peptide
VMNRYKKLIVNNSSDFYLVSIAN

SEQ ID NO: 42103 - protein, 32 aa, Artificial Sequence
  Cyclic GFR-binding peptide
  MOD_RES (30)..(31): Xaa is C or S
VVMDRYKKLVVKENEDFYLMSIANLETPVXXA

SEQ ID NO: 42104 - protein, 33 aa, Artificial Sequence
  Cyclic GFR-binding peptide
  MOD_RES (29)..(30): Xaa is C or S
VMNYHYKLIVNSSDDKYLVSIPSLKTPAXXPKP

SEQ ID NO: 42105 - protein, 31 aa, Artificial Sequence
  Cyclic GFR-binding peptide
ELTRYKKLFIPKKRVIEFYLVSIANLQVQTP

SEQ ID NO: 42106 - protein, 37 aa, Artificial Sequence; identical to SEQ ID NO: 4393
  Cyclic GFR-binding peptide
  MOD_RES (31)..(32): Xaa is C or S

SEQ ID NO: 42107 - protein, 25 aa, Artificial Sequence
  Cyclic GFR-binding peptide
VIMYHYKLVKPKRGVKYLISIPSLA

SEQ ID NO: 42108 - protein, 32 aa, Artificial Sequence
  Cyclic GFR-binding peptide
  MOD_RES (26)..(27): Xaa is C or S
QYNKLTPVGMDDLYLVSIASLKTPVXXAKGVK

SEQ ID NO: 42109 - protein, 33 aa, Artificial Sequence; identical to SEQ ID NO: 4395
  Cyclic GFR-binding peptide
  MOD_RES (31)..(32): Xaa is C or S

SEQ ID NO: 42110 - protein, 29 aa, Artificial Sequence
  Cyclic GFR-binding peptide
  MOD_RES (1)..(3): Xaa is C or S
XKXSKVIMQYNKLIKPTKGILYLISIASL

SEQ ID NO: 42111 - protein, 37 aa, Artificial Sequence; identical to SEQ ID NO: 4397
  Cyclic GFR-binding peptide
  MOD_RES (1)..(3)..(35)..(36): Xaa is C or S

SEQ ID NO: 42112 - protein, 27 aa, Artificial Sequence
  Cyclic GFR-binding peptide
  MOD_RES (26)..(27): Xaa is C or S
YHYKLVKPKRGVKYLISIPSLAQPVXX

SEQ ID NO: 42113 - protein, 31 aa, Artificial Sequence
  Cyclic GFR-binding peptide
  MOD_RES (2)..(2): Xaa is C or S
GXGEVVMERYKKLVVKDYEDFYLMSIANLET

SEQ ID NO: 42114 - protein, 23 aa, Artificial Sequence
  Cyclic GFR-binding peptide
VMYHYKLVKPTRGVKYLISIPSL

SEQ ID NO: 42115 - protein, 30 aa, Artificial Sequence
  Cyclic GFR-binding peptide
  MOD_RES (30)..(30): Xaa is C or S
VVMNQYNKLIVNNSSDLYLVSIASLKTPAX

SEQ ID NO: 42116 - protein, 26 aa, Artificial Sequence
  Cyclic GFR-binding peptide
EVVMDRHKRLVVKENEDYYLMSTASL

SEQ ID NO: 42117 - protein, 32 aa, Artificial Sequence
  Cyclic GFR-binding peptide
  MOD_RES (27)..(27): Xaa is C or S
NYHYKLIVNSSDDKYLVSIPSLKTPAXTPKTV

SEQ ID NO: 42118 - protein, 34 aa, Artificial Sequence
  Cyclic GFR-binding peptide
  MOD_RES (30)..(31): Xaa is C or S
KVVMRYKKLVKPTRGVFYLISIANLDQPVXXPSA

SEQ ID NO: 42119 - protein, 29 aa, Artificial Sequence
  Cyclic GFR-binding peptide
LHDELTRYKKLFIPKKRVIEFYLVSIANL

SEQ ID NO: 42120 - protein, 34 aa, Artificial Sequence; identical to SEQ ID NO: 4399
  Cyclic GFR-binding peptide
  MOD_RES (31)..(32): Xaa is C or S

SEQ ID NO: 42121 - protein, 38 aa, Artificial Sequence; identical to SEQ ID NO: 4401
  Cyclic GFR-binding peptide
  MOD_RES (1)..(3)..(35)..(36): Xaa is C or S

SEQ ID NO: 42122 - protein, 30 aa, Artificial Sequence
  Cyclic GFR-binding peptide
  MOD_RES (1)..(1): Xaa is C or S
XSKVVMRYKKLVKPTRGVFYLISIANLDQP

SEQ ID NO: 42123 - protein, 33 aa, Artificial Sequence
  Cyclic GFR-binding peptide
  MOD_RES (32)..(32): Xaa is C or S
LTQYNKLFIPKKRVIELYLVSIASLQVQTPRXQ

SEQ ID NO: 42124 - protein, 39 aa, Artificial Sequence; identical to SEQ ID NO: 4403
  Cyclic GFR-binding peptide
  MOD_RES (35)..(35): Xaa is C or S

SEQ ID NO: 42125 - protein, 33 aa, Artificial Sequence
  Cyclic GFR-binding peptide
DELTRHKRLFIPKKRVIEYYLVSTASLQVQTPR

SEQ ID NO: 42126 - protein, 36 aa, Artificial Sequence
  Cyclic GFR-binding peptide
  MOD_RES (33)..(33): Xaa is C or S
ELTYHYKLFIPKKRVIEKYLVSIPSLQVQTPRXQVN

SEQ ID NO: 42127 - protein, 24 aa, Artificial Sequence
  Cyclic GFR-binding peptide
LTQYNKLFIPKKRVIELYLVSIAS

SEQ ID NO: 42128 - protein, 35 aa, Artificial Sequence; identical to SEQ ID NO: 4404
  Cyclic GFR-binding peptide
  MOD_RES (35)..(35): Xaa is C or S

SEQ ID NO: 42129 - protein, 28 aa, Artificial Sequence
  Cyclic GFR-binding peptide
  MOD_RES (1)..(1): Xaa is C or S
XAKVVMNRYKKLIVNNSSDFYLVSIANL

SEQ ID NO: 42130 - protein, 38 aa, Artificial Sequence; identical to SEQ ID NO: 4405
  Cyclic GFR-binding peptide
  MOD_RES (32)..(33): Xaa is C or S

SEQ ID NO: 42131 - protein, 31 aa, Artificial Sequence
  Cyclic GFR-binding peptide
  MOD_RES (27)..(28): Xaa is C or S
NRHKRLIVNSSDDYYLVSTASLKTPAXXPKP

SEQ ID NO: 42132 - protein, 33 aa, Artificial Sequence
  Cyclic GFR-binding peptide
  MOD_RES (27)..(28): Xaa is C or S
DRYKKLVVKENEDFYLMSIANLETPVXXAKPIK

SEQ ID NO: 42133 - protein, 33 aa, Artificial Sequence; identical to SEQ ID NO: 4408
  Cyclic GFR-binding peptide
  MOD_RES (1)..(3): Xaa is C or S

SEQ ID NO: 42134 - protein, 31 aa, Artificial Sequence
  Cyclic GFR-binding peptide
  MOD_RES (29)..(30): Xaa is C or S
VMNRHKRLIVNSSDDYYLVSTASLKTPAXXP

SEQ ID NO: 42135 - protein, 24 aa, Artificial Sequence
  Cyclic GFR-binding peptide
YHYKLVVKENEDKYLMSIPSLETP

SEQ ID NO: 42136 - protein, 29 aa, Artificial Sequence
  Cyclic GFR-binding peptide
  MOD_RES (1)..(1): Xaa is C or S
XSKVIMRHKRLIKPTKGIYYLISTASLDQ

SEQ ID NO: 42137 - protein, 30 aa, Artificial Sequence
  Cyclic GFR-binding peptide
  MOD_RES (26)..(27): Xaa is C or S
RYKKLVKPTRGVFYLISIANLDQPVXXPSA

SEQ ID NO: 42138 - protein, 39 aa, Artificial Sequence; identical to SEQ ID NO: 4411
  Cyclic GFR-binding peptide
  MOD_RES (1)..(3)..(34)..(35): Xaa is C or S

SEQ ID NO: 42139 - protein, 21 aa, Artificial Sequence
  Cyclic GFR-binding peptide
RYKKLIKPTKGIFYLISIANL

SEQ ID NO: 42140 - protein, 33 aa, Artificial Sequence; identical to SEQ ID NO: 4413
  Cyclic GFR-binding peptide
  MOD_RES (1)..(3): Xaa is C or S

SEQ ID NO: 42141 - protein, 41 aa, Artificial Sequence; identical to SEQ ID NO: 4414
  Cyclic GFR-binding peptide
  MOD_RES (1)..(3)..(35)..(36): Xaa is C or S

SEQ ID NO: 42142 - protein, 26 aa, Artificial Sequence
  Cyclic GFR-binding peptide
  MOD_RES (26)..(26): Xaa is C or S
YHYKLIVNSSDDKYLVSIPSLKTPAX

SEQ ID NO: 42143 - protein, 24 aa, Artificial Sequence
  Cyclic GFR-binding peptide
MNRHKRLIVNSSDDYYLVSTASLK

SEQ ID NO: 42144 - protein, 40 aa, Artificial Sequence; identical to SEQ ID NO: 4415
  Cyclic GFR-binding peptide
  MOD_RES (2)..(4)..(35)..(36): Xaa is C or S

SEQ ID NO: 42145 - protein, 30 aa, Artificial Sequence
  Cyclic GFR-binding peptide
  MOD_RES (29)..(30): Xaa is C or S
VMEYHYKLVVKDYEDKYLMSIPSLETPVXX

SEQ ID NO: 42146 - protein, 29 aa, Artificial Sequence
  Cyclic GFR-binding peptide
  MOD_RES (1)..(3): Xaa is C or S
XKXSKVVMYHYKLVKPTRGVKYLISIPSL

SEQ ID NO: 42147 - protein, 33 aa, Artificial Sequence
  Cyclic GFR-binding peptide
  MOD_RES (2)..(4): Xaa is C or S
RXGXGEVVMERYKKLVVKDYEDFYLMSIANLET

SEQ ID NO: 42148 - protein, 23 aa, Artificial Sequence
  Cyclic GFR-binding peptide
NQYNKLIVNSSDDLYLVSIASLQ

SEQ ID NO: 42149 - protein, 25 aa, Artificial Sequence
  Cyclic GFR-binding peptide
VIMRYKKLVKPKRGVFYLISIANLA

SEQ ID NO: 42150 - protein, 32 aa, Artificial Sequence
  Cyclic GFR-binding peptide
  MOD_RES (30)..(31): Xaa is C or S
VVMNQYNKLIVNSSDDLYLVSIASLQTPAXXP

SEQ ID NO: 42151 - protein, 37 aa, Artificial Sequence
  Cyclic GFR-binding peptide
  MOD_RES (34)..(34): Xaa is C or S
DELTRYKKLFIPKKRVIEFYLVSIANLQVQTPRXQVN

SEQ ID NO: 42152 - protein, 20 aa, Artificial Sequence
  Cyclic GFR-binding peptide
RHKRLIVNSSDDYYLVSTAS

SEQ ID NO: 42153 - protein, 27 aa, Artificial Sequence
  Cyclic GFR-binding peptide
VVKDYEDQYNKLVVKDYEDLYLMSIAS

SEQ ID NO: 42154 - protein, 29 aa, Artificial Sequence
  Cyclic GFR-binding peptide
RVIMQYNKLVKPKRGVLYLISIASLAQPV

SEQ ID NO: 42155 - protein, 35 aa, Artificial Sequence; identical to SEQ ID NO: 4417
  Cyclic GFR-binding peptide
  MOD_RES (32)..(32): Xaa is C or S

SEQ ID NO: 42156 - protein, 36 aa, Artificial Sequence; identical to SEQ ID NO: 4418
  Cyclic GFR-binding peptide
  MOD_RES (2)..(4): Xaa is C or S

SEQ ID NO: 42157 - protein, 30 aa, Artificial Sequence
  Cyclic GFR-binding peptide
  MOD_RES (1)..(3): Xaa is C or S
XGXARVVMNQYNKLIVNSSDDLYLVSIASL

SEQ ID NO: 42158 - protein, 28 aa, Artificial Sequence
  Cyclic GFR-binding peptide
SKVVMRYKKLVKPTRGVFYLISIANLDQ

SEQ ID NO: 42159 - protein, 31 aa, Artificial Sequence
  Cyclic GFR-binding peptide
  MOD_RES (30)..(31): Xaa is C or S
VVMNYHYKLIVNSSDDKYLVSIPSLQTPAXX

SEQ ID NO: 42160 - protein, 38 aa, Artificial Sequence; identical to SEQ ID NO: 4420
  Cyclic GFR-binding peptide
  MOD_RES (1)..(33)..(34): Xaa is C or S

SEQ ID NO: 42161 - protein, 30 aa, Artificial Sequence; identical to SEQ ID NO: 4422
  Cyclic GFR-binding peptide

SEQ ID NO: 42162 - protein, 33 aa, Artificial Sequence
  Cyclic GFR-binding peptide
  MOD_RES (2)..(4): Xaa is C or S
SXKXSRVIMRHKRLVKPKRGVYYLISTASLAQP

SEQ ID NO: 42163 - protein, 36 aa, Artificial Sequence; identical to SEQ ID NO: 4426
  Cyclic GFR-binding peptide
  MOD_RES (31)..(32): Xaa is C or S

SEQ ID NO: 42164 - protein, 32 aa, Artificial Sequence
  Cyclic GFR-binding peptide
  MOD_RES (2)..(4): Xaa is C or S
HXGXARVVMNQYNKLIVNSSDDLYLVSIASLQ

SEQ ID NO: 42165 - protein, 22 aa, Artificial Sequence
  Cyclic GFR-binding peptide
GEQYNKLTPVGMDDLYLVSIAS

SEQ ID NO: 42166 - protein, 42 aa, Artificial Sequence; identical to SEQ ID NO: 4427
  Cyclic GFR-binding peptide
  MOD_RES (2)..(4)..(36)..(37): Xaa is C or S

SEQ ID NO: 42167 - protein, 35 aa, Artificial Sequence
  Cyclic GFR-binding peptide
  MOD_RES (32)..(32): Xaa is C or S
LTQYNKLFIPKKRVIELYLVSIASLQVQTPRXQVN

SEQ ID NO: 42168 - protein, 32 aa, Artificial Sequence
  Cyclic GFR-binding peptide
  MOD_RES (2)..(4): Xaa is C or S
RXGXEAVSMGERYKKLTPVGMDDFYLVSIANL

SEQ ID NO: 42169 - protein, 38 aa, Artificial Sequence; identical to SEQ ID NO: 4429
  Cyclic GFR-binding peptide
  MOD_RES (2)..(33)..(34): Xaa is C or S

SEQ ID NO: 42170 - protein, 27 aa, Artificial Sequence
  Cyclic GFR-binding peptide
  MOD_RES (27)..(27): Xaa is C or S
NRHKRLIVNSSDDYYLVSTASLKTPAX

SEQ ID NO: 42171 - protein, 31 aa, Artificial Sequence
  Cyclic GFR-binding peptide
  MOD_RES (28)..(29): Xaa is C or S
IMRHKRLIKPTKGIYYLISTASLDQSVXXPS

SEQ ID NO: 42172 - protein, 31 aa, Artificial Sequence
  Cyclic GFR-binding peptide
  MOD_RES (29)..(30): Xaa is C or S
VIMRHKRLVKPKRGVYYLISTASLAQPVXXP

SEQ ID NO: 42173 - protein, 38 aa, Artificial Sequence; identical to SEQ ID NO: 4430
  Cyclic GFR-binding peptide
  MOD_RES (2)..(33)..(34): Xaa is C or S

SEQ ID NO: 42174 - protein, 35 aa, Artificial Sequence; identical to SEQ ID NO: 4431
  Cyclic GFR-binding peptide
  MOD_RES (31)..(31): Xaa is C or S

SEQ ID NO: 42175 - protein, 36 aa, Artificial Sequence; identical to SEQ ID NO: 4432
  Cyclic GFR-binding peptide
  MOD_RES (31)..(32): Xaa is C or S

SEQ ID NO: 42176 - protein, 34 aa, Artificial Sequence
  Cyclic GFR-binding peptide
  MOD_RES (2)..(4): Xaa is C or S
HXGXARVVMNYHYKLIVNSSDDKYLVSIPSLQTP

SEQ ID NO: 42177 - protein, 38 aa, Artificial Sequence
  Cyclic GFR-binding peptide
  MOD_RES (34)..(34): Xaa is C or S
DELTYHYKLFIPKKRVIEKYLVSIPSLQVQTPRXQVNR

SEQ ID NO: 42178 - protein, 33 aa, Artificial Sequence; identical to SEQ ID NO: 4435
  Cyclic GFR-binding peptide
  MOD_RES (1)..(3): Xaa is C or S

SEQ ID NO: 42179 - protein, 34 aa, Artificial Sequence; identical to SEQ ID NO: 4437
  Cyclic GFR-binding peptide
  MOD_RES (31)..(32): Xaa is C or S

SEQ ID NO: 42180 - protein, 30 aa, Artificial Sequence
  Cyclic GFR-binding peptide
LHDELTRYKKLFIPKKRVIEFYLVSIANLQ

SEQ ID NO: 42181 - protein, 35 aa, Artificial Sequence; identical to SEQ ID NO: 4440
  Cyclic GFR-binding peptide
  MOD_RES (35)..(35): Xaa is C or S

SEQ ID NO: 42182 - protein, 29 aa, Artificial Sequence
  Cyclic GFR-binding peptide
KVIMRYKKLIKPTKGIFYLISIANLDQSV

SEQ ID NO: 42183 - protein, 39 aa, Artificial Sequence; identical to SEQ ID NO: 4442
  Cyclic GFR-binding peptide
  MOD_RES (2)..(4)..(35)..(36): Xaa is C or S

SEQ ID NO: 42184 - protein, 32 aa, Artificial Sequence
  Cyclic GFR-binding peptide
  MOD_RES (28)..(29): Xaa is C or S
IMRYKKLVKPKRGVFYLISIANLAQPVXXPAA

SEQ ID NO: 42185 - protein, 29 aa, Artificial Sequence
  Cyclic GFR-binding peptide
  MOD_RES (26)..(27): Xaa is C or S
RHKRLVKPTRGVYYLISTASLDQPVXXPS

SEQ ID NO: 42186 - protein, 33 aa, Artificial Sequence; identical to SEQ ID NO: 4443
  Cyclic GFR-binding peptide
  MOD_RES (1)..(3): Xaa is C or S

SEQ ID NO: 42187 - protein, 33 aa, Artificial Sequence
  Cyclic GFR-binding peptide
  MOD_RES (2)..(4): Xaa is C or S
EXKXALHDELTRHKRLFIPKKRVIEYYLVSTAS

SEQ ID NO: 42188 - protein, 37 aa, Artificial Sequence; identical to SEQ ID NO: 4444
  Cyclic GFR-binding peptide
  MOD_RES (1)..(3)..(35)..(36): Xaa is C or S

SEQ ID NO: 42189 - protein, 31 aa, Artificial Sequence
  Cyclic GFR-binding peptide
  MOD_RES (1)..(1): Xaa is C or S
XARVVMNRHKRLIVNSSDDYYLVSTASLQTP

SEQ ID NO: 42190 - protein, 22 aa, Artificial Sequence
  Cyclic GFR-binding peptide
VMRHKRLVKPTRGVYYLISTAS

SEQ ID NO: 42191 - protein, 32 aa, Artificial Sequence; identical to SEQ ID NO: 4445
  Cyclic GFR-binding peptide
  MOD_RES (1)..(1): Xaa is C or S

SEQ ID NO: 42192 - protein, 33 aa, Artificial Sequence
  Cyclic GFR-binding peptide
  MOD_RES (28)..(29): Xaa is C or S
VMQYNKLVKPTRGVLYLISIASLDQPVXXPSAS

SEQ ID NO: 42193 - protein, 25 aa, Artificial Sequence
  Cyclic GFR-binding peptide
MYHYKLVKPTRGVKYLISIPSLDQP

SEQ ID NO: 42194 - protein, 27 aa, Artificial Sequence
  Cyclic GFR-binding peptide
EVVMEYHYKLVVKDYEDKYLMSIPSLE

SEQ ID NO: 42195 - protein, 31 aa, Artificial Sequence
  Cyclic GFR-binding peptide
  MOD_RES (29)..(30): Xaa is C or S
VMDRHKRLVVKENEDYYLMSTASLETPVXXA

SEQ ID NO: 42196 - protein, 29 aa, Artificial Sequence
  Cyclic GFR-binding peptide
VVMEYHYKLVVKDYEDKYLMSIPSLETPV

SEQ ID NO: 42197 - protein, 30 aa, Artificial Sequence
  Cyclic GFR-binding peptide
  MOD_RES (30)..(30): Xaa is C or S
KVVMRHKRLVKPTRGVYYLISTASLDQPVX

SEQ ID NO: 42198 - protein, 29 aa, Artificial Sequence
  Cyclic GFR-binding peptide
  MOD_RES (26)..(27): Xaa is C or S
QYNKLVKPKRGVLYLISIASLAQPVXXPA

SEQ ID NO: 42199 - protein, 27 aa, Artificial Sequence
  Cyclic GFR-binding peptide
HDELTRHKRLFIPKKRVIEYYLVSTAS

SEQ ID NO: 42200 - protein, 33 aa, Artificial Sequence
  Cyclic GFR-binding peptide
  MOD_RES (1)..(3): Xaa is C or S
XGXARVVMNQYNKLIVNSSDDLYLVSIASLQTP

SEQ ID NO: 42201 - protein, 33 aa, Artificial Sequence
  Cyclic GFR-binding peptide
  MOD_RES (1)..(3): Xaa is C or S
XGXGEVVMERYKKLVVKDYEDFYLMSIANLETP

SEQ ID NO: 42202 - protein, 31 aa, Artificial Sequence; identical to SEQ ID NO: 4450
  Cyclic GFR-binding peptide
  MOD_RES (31)..(31): Xaa is C or S

SEQ ID NO: 42203 - protein, 31 aa, Artificial Sequence
  Cyclic GFR-binding peptide
  MOD_RES (1)..(1): Xaa is C or S
XSRVVMNQYNKLIVNSSDDLYLVSIASLKTP

SEQ ID NO: 42204 - protein, 37 aa, Artificial Sequence; identical to SEQ ID NO: 4452
  Cyclic GFR-binding peptide
  MOD_RES (1)..(33)..(34): Xaa is C or S

SEQ ID NO: 42205 - protein, 31 aa, Artificial Sequence
  Cyclic GFR-binding peptide
  MOD_RES (29)..(30): Xaa is C or S
VIMQYNKLVKPKRGVLYLISIASLAQPVXXP

SEQ ID NO: 42206 - protein, 37 aa, Artificial Sequence; identical to SEQ ID NO: 4455
  Cyclic GFR-binding peptide
  MOD_RES (32)..(33): Xaa is C or S

SEQ ID NO: 42207 - protein, 39 aa, Artificial Sequence; identical to SEQ ID NO: 4456
  Cyclic GFR-binding peptide
  MOD_RES (2)..(35)..(36): Xaa is C or S

SEQ ID NO: 42208 - protein, 33 aa, Artificial Sequence; identical to SEQ ID NO: 4457
  Cyclic GFR-binding peptide
  MOD_RES (1)..(32)..(33): Xaa is C or S

SEQ ID NO: 42209 - protein, 37 aa, Artificial Sequence; identical to SEQ ID NO: 4458
  Cyclic GFR-binding peptide
  MOD_RES (31)..(32): Xaa is C or S

SEQ ID NO: 42210 - protein, 28 aa, Artificial Sequence
  Cyclic GFR-binding peptide
ARVVMNQYNKLIVNSSDDLYLVSIASLQ

SEQ ID NO: 42211 - protein, 32 aa, Artificial Sequence
  Cyclic GFR-binding peptide
  MOD_RES (26)..(26): Xaa is C or S
QYNKLIVNSSDDLYLVSIASLKTPAXTPKTVH

SEQ ID NO: 42212 - protein, 33 aa, Artificial Sequence; identical to SEQ ID NO: 4460
  Cyclic GFR-binding peptide
  MOD_RES (2)..(33): Xaa is C or S

SEQ ID NO: 42213 - protein, 34 aa, Artificial Sequence
  Cyclic GFR-binding peptide
  MOD_RES (29)..(30): Xaa is C or S
VIMRHKRLIKPTKGIYYLISTASLDQSVXXPSAS

SEQ ID NO: 42214 - protein, 20 aa, Artificial Sequence
  Cyclic GFR-binding peptide
RHKRLVKPTRGVYYLISTAS

SEQ ID NO: 42215 - protein, 35 aa, Artificial Sequence; identical to SEQ ID NO: 4463
  Cyclic GFR-binding peptide
  MOD_RES (1)..(3)..(34)..(35): Xaa is C or S

SEQ ID NO: 42216 - protein, 41 aa, Artificial Sequence; identical to SEQ ID NO: 4464
  Cyclic GFR-binding peptide
  MOD_RES (2)..(4)..(36)..(37): Xaa is C or S

SEQ ID NO: 42217 - protein, 39 aa, Artificial Sequence; identical to SEQ ID NO: 4466
  Cyclic GFR-binding peptide
  MOD_RES (1)..(33)..(34): Xaa is C or S

SEQ ID NO: 42218 - protein, 36 aa, Artificial Sequence; identical to SEQ ID NO: 4467
  Cyclic GFR-binding peptide
  MOD_RES (31)..(32): Xaa is C or S

SEQ ID NO: 42219 - protein, 33 aa, Artificial Sequence
  Cyclic GFR-binding peptide
  MOD_RES (28)..(29): Xaa is C or S
IMQYNKLIKPTKGILYLISIASLDQSVXXPSAS

SEQ ID NO: 42220 - protein, 28 aa, Artificial Sequence
  Cyclic GFR-binding peptide
  MOD_RES (2)..(2): Xaa is C or S
KXSKVIMRYKKLIKPTKGIFYLISIANL

SEQ ID NO: 42221 - protein, 23 aa, Artificial Sequence
  Cyclic GFR-binding peptide
ERHKRLTPVGMDDYYLVSTASLK

SEQ ID NO: 42222 - protein, 26 aa, Artificial Sequence
  Cyclic GFR-binding peptide
  MOD_RES (26)..(26): Xaa is C or S
RHKRLVKPKRGVYYLISTASLAQPVX

SEQ ID NO: 42223 - protein, 37 aa, Artificial Sequence; identical to SEQ ID NO: 4469
  Cyclic GFR-binding peptide
  MOD_RES (31)..(32): Xaa is C or S

SEQ ID NO: 42224 - protein, 24 aa, Artificial Sequence
  Cyclic GFR-binding peptide
SMGERYKKLTPVGMDDFYLVSIAN

SEQ ID NO: 42225 - protein, 28 aa, Artificial Sequence
  Cyclic GFR-binding peptide
  MOD_RES (28)..(28): Xaa is C or S
MNRHKRLIVNSSDDYYLVSTASLKTPAX

SEQ ID NO: 42226 - protein, 36 aa, Artificial Sequence; identical to SEQ ID NO: 4470
  Cyclic GFR-binding peptide
  MOD_RES (1)..(32)..(33): Xaa is C or S

SEQ ID NO: 42227 - protein, 43 aa, Artificial Sequence; identical to SEQ ID NO: 4473
  Cyclic GFR-binding peptide
  MOD_RES (2)..(4)..(41): Xaa is C or S

SEQ ID NO: 42228 - protein, 38 aa, Artificial Sequence; identical to SEQ ID NO: 4474
  Cyclic GFR-binding peptide
  MOD_RES (2)..(4)..(36)..(37): Xaa is C or S

SEQ ID NO: 42229 - protein, 39 aa, Artificial Sequence; identical to SEQ ID NO: 4477
  Cyclic GFR-binding peptide
  MOD_RES (2)..(4)..(35)..(36): Xaa is C or S

SEQ ID NO: 42230 - protein, 29 aa, Artificial Sequence
  Cyclic GFR-binding peptide
  MOD_RES (1)..(3): Xaa is C or S
XKXSRVIMRYKKLVKPKRGVFYLISIANL

SEQ ID NO: 42231 - protein, 33 aa, Artificial Sequence
  Cyclic GFR-binding peptide
  MOD_RES (33)..(33): Xaa is C or S
ELTYHYKLFIPKKRVIEKYLVSIPSLQVQTPRX

SEQ ID NO: 42232 - protein, 28 aa, Artificial Sequence
  Cyclic GFR-binding peptide
  MOD_RES (1)..(3): Xaa is C or S
XKXSKVVMRYKKLVKPTRGVFYLISIAN

SEQ ID NO: 42233 - protein, 33 aa, Artificial Sequence
  Cyclic GFR-binding peptide
  MOD_RES (1)..(3): Xaa is C or S
XGXSRVVMNQYNKLIVNSSDDLYLVSIASLKTP

SEQ ID NO: 42234 - protein, 27 aa, Artificial Sequence
  Cyclic GFR-binding peptide
  MOD_RES (1)..(1): Xaa is C or S
XSKVIMQYNKLIKPTKGILYLISIASL

SEQ ID NO: 42235 - protein, 22 aa, Artificial Sequence
  Cyclic GFR-binding peptide
RYKKLVVKENEDFYLMSIANLE

SEQ ID NO: 42236 - protein, 32 aa, Artificial Sequence; identical to SEQ ID NO: 4480
  Cyclic GFR-binding peptide
  MOD_RES (32)..(32): Xaa is C or S

SEQ ID NO: 42237 - protein, 37 aa, Artificial Sequence; identical to SEQ ID NO: 4482
  Cyclic GFR-binding peptide
  MOD_RES (1)..(3)..(35)..(36): Xaa is C or S

SEQ ID NO: 42238 - protein, 27 aa, Artificial Sequence
  Cyclic GFR-binding peptide
  MOD_RES (26)..(27): Xaa is C or S
RHKRLVVKENEDYYLMSTASLETPVXX

SEQ ID NO: 42239 - protein, 38 aa, Artificial Sequence; identical to SEQ ID NO: 4484
  Cyclic GFR-binding peptide
  MOD_RES (2)..(34)..(35): Xaa is C or S

SEQ ID NO: 42240 - protein, 26 aa, Artificial Sequence
  Cyclic GFR-binding peptide
SKVVMQYNKLVKPTRGVLYLISIASL

SEQ ID NO: 42241 - protein, 33 aa, Artificial Sequence
  Cyclic GFR-binding peptide
  MOD_RES (31)..(31): Xaa is C or S
TRYKKLFIPKKRVIEFYLVSIANLQVQTPRXQV

SEQ ID NO: 42242 - protein, 31 aa, Artificial Sequence
  Cyclic GFR-binding peptide
  MOD_RES (2)..(4): Xaa is C or S
HXGXAKVVMNRYKKLIVNNSSDFYLVSIANL

SEQ ID NO: 42243 - protein, 29 aa, Artificial Sequence
  Cyclic GFR-binding peptide
  MOD_RES (1)..(1): Xaa is C or S
XSRVIMRHKRLVKPKRGVYYLISTASLAQ

SEQ ID NO: 42244 - protein, 24 aa, Artificial Sequence
  Cyclic GFR-binding peptide
NRHKRLIVNSSDDYYLVSTASLKT

SEQ ID NO: 42245 - protein, 24 aa, Artificial Sequence
  Cyclic GFR-binding peptide
VMRYKKLVKPTRGVFYLISIANLD

SEQ ID NO: 42246 - protein, 26 aa, Artificial Sequence
  Cyclic GFR-binding peptide
  MOD_RES (26)..(26): Xaa is C or S
QYNKLVKPKRGVLYLISIASLAQPVX

SEQ ID NO: 42247 - protein, 32 aa, Artificial Sequence; identical to SEQ ID NO: 4488
  Cyclic GFR-binding peptide
  MOD_RES (32)..(32): Xaa is C or S

SEQ ID NO: 42248 - protein, 36 aa, Artificial Sequence; identical to SEQ ID NO: 4491
  Cyclic GFR-binding peptide
  MOD_RES (1)..(3)..(34)..(35): Xaa is C or S

SEQ ID NO: 42249 - protein, 36 aa, Artificial Sequence; identical to SEQ ID NO: 4494
  Cyclic GFR-binding peptide
  MOD_RES (1)..(3)..(34)..(35): Xaa is C or S

SEQ ID NO: 42250 - protein, 36 aa, Artificial Sequence; identical to SEQ ID NO: 4495
  Cyclic GFR-binding peptide
  MOD_RES (1)..(3)..(36): Xaa is C or S

SEQ ID NO: 42251 - protein, 40 aa, Artificial Sequence; identical to SEQ ID NO: 4496
  Cyclic GFR-binding peptide
  MOD_RES (2)..(34)..(35): Xaa is C or S

SEQ ID NO: 42252 - protein, 25 aa, Artificial Sequence
  Cyclic GFR-binding peptide
VMEYHYKLVVKDYEDKYLMSIPSLE

SEQ ID NO: 42253 - protein, 26 aa, Artificial Sequence
  Cyclic GFR-binding peptide
RVVMNRHKRLIVNSSDDYYLVSTASL

SEQ ID NO: 42254 - protein, 36 aa, Artificial Sequence
  Cyclic GFR-binding peptide
  MOD_RES (30)..(31): Xaa is C or S
KVVMRYKKLVKPTRGVFYLISIANLDQPVXXPSASA

SEQ ID NO: 42255 - protein, 28 aa, Artificial Sequence
  Cyclic GFR-binding peptide
LHDELTYHYKLFIPKKRVIEKYLVSIPS

SEQ ID NO: 42256 - protein, 30 aa, Artificial Sequence
  Cyclic GFR-binding peptide
  MOD_RES (29)..(30): Xaa is C or S
VIMQYNKLIKPTKGILYLISIASLDQSVXX

SEQ ID NO: 42257 - protein, 27 aa, Artificial Sequence
  Cyclic GFR-binding peptide
VMNQYNKLIVNSSDDLYLVSIASLQTP

SEQ ID NO: 42258 - protein, 28 aa, Artificial Sequence
  Cyclic GFR-binding peptide
GEVVMERHKRLVVKDYEDYYLMSTASLE

SEQ ID NO: 42259 - protein, 30 aa, Artificial Sequence
  Cyclic GFR-binding peptide
ARVVMNQYNKLIVNSSDDLYLVSIASLQTP

SEQ ID NO: 42260 - protein, 34 aa, Artificial Sequence; identical to SEQ ID NO: 4498
  Cyclic GFR-binding peptide
  MOD_RES (31)..(32): Xaa is C or S

SEQ ID NO: 42261 - protein, 31 aa, Artificial Sequence
  Cyclic GFR-binding peptide
  MOD_RES (30)..(31): Xaa is C or S
VVMDRYKKLVVKENEDFYLMSIANLETPVXX

SEQ ID NO: 42262 - protein, 26 aa, Artificial Sequence
  Cyclic GFR-binding peptide
RVIMQYNKLVKPKRGVLYLISIASLA

SEQ ID NO: 42263 - protein, 35 aa, Artificial Sequence; identical to SEQ ID NO: 4499
  Cyclic GFR-binding peptide
  MOD_RES (2)..(33)..(34): Xaa is C or S

SEQ ID NO: 42264 - protein, 36 aa, Artificial Sequence
  Cyclic GFR-binding peptide
  MOD_RES (32)..(32): Xaa is C or S
LTRHKRLFIPKKRVIEYYLVSTASLQVQTPRXQVNR

SEQ ID NO: 42265 - protein, 27 aa, Artificial Sequence
  Cyclic GFR-binding peptide
KVVMYHYKLVKPTRGVKYLISIPSLDQ

SEQ ID NO: 42266 - protein, 31 aa, Artificial Sequence
  Cyclic GFR-binding peptide
  MOD_RES (29)..(30): Xaa is C or S
VVMYHYKLVKPTRGVKYLISIPSLDQPVXXP

SEQ ID NO: 42267 - protein, 30 aa, Artificial Sequence
  Cyclic GFR-binding peptide
  MOD_RES (27)..(28): Xaa is C or S
MQYNKLVKPKRGVLYLISIASLAQPVXXPA

SEQ ID NO: 42268 - protein, 20 aa, Artificial Sequence
  Cyclic GFR-binding peptide
QYNKLIKPTKGILYLISIAS

SEQ ID NO: 42269 - protein, 31 aa, Artificial Sequence
  Cyclic GFR-binding peptide
  MOD_RES (29)..(30): Xaa is C or S
VVMRHKRLVKPTRGVYYLISTASLDQPVXXP

SEQ ID NO: 42270 - protein, 25 aa, Artificial Sequence
  Cyclic GFR-binding peptide
VVMNYHYKLIVNSSDDKYLVSIPSL

SEQ ID NO: 42271 - protein, 30 aa, Artificial Sequence; identical to SEQ ID NO: 1872
  Cyclic GFR-binding peptide

SEQ ID NO: 42272 - protein, 41 aa, Artificial Sequence; identical to SEQ ID NO: 4502
  Cyclic GFR-binding peptide
  MOD_RES (1)..(3)..(35)..(36): Xaa is C or S

SEQ ID NO: 42273 - protein, 25 aa, Artificial Sequence
  Cyclic GFR-binding peptide
YHYKLVKPKRGVKYLISIPSLAQPV

SEQ ID NO: 42274 - protein, 36 aa, Artificial Sequence; identical to SEQ ID NO: 4503
  Cyclic GFR-binding peptide
  MOD_RES (31)..(32): Xaa is C or S

SEQ ID NO: 42275 - protein, 20 aa, Artificial Sequence
  Cyclic GFR-binding peptide
RHKRLIKPTKGIYYLISTAS

SEQ ID NO: 42276 - protein, 40 aa, Artificial Sequence; identical to SEQ ID NO: 4504
  Cyclic GFR-binding peptide
  MOD_RES (2)..(4)..(36)..(37): Xaa is C or S

SEQ ID NO: 42277 - protein, 37 aa, Artificial Sequence; identical to SEQ ID NO: 4505
  Cyclic GFR-binding peptide
  MOD_RES (1)..(32)..(33): Xaa is C or S

SEQ ID NO: 42278 - protein, 37 aa, Artificial Sequence; identical to SEQ ID NO: 4506
  Cyclic GFR-binding peptide
  MOD_RES (2)..(4)..(35)..(36): Xaa is C or S

SEQ ID NO: 42279 - protein, 31 aa, Artificial Sequence; identical to SEQ ID NO: 4507
  Cyclic GFR-binding peptide
  MOD_RES (31)..(31): Xaa is C or S

SEQ ID NO: 42280 - protein, 28 aa, Artificial Sequence
  Cyclic GFR-binding peptide
SRVIMRHKRLVKPKRGVYYLISTASLAQ

SEQ ID NO: 42281 - protein, 22 aa, Artificial Sequence
  Cyclic GFR-binding peptide
YHYKLFIPKKRVIEKYLVSIPS

SEQ ID NO: 42282 - protein, 29 aa, Artificial Sequence
  Cyclic GFR-binding peptide
  MOD_RES (28)..(29): Xaa is C or S
IMQYNKLIKPTKGILYLISIASLDQSVXX

SEQ ID NO: 42283 - protein, 39 aa, Artificial Sequence; identical to SEQ ID NO: 4511
  Cyclic GFR-binding peptide
  MOD_RES (2)..(4)..(36)..(37): Xaa is C or S

SEQ ID NO: 42284 - protein, 29 aa, Artificial Sequence
  Cyclic GFR-binding peptide
  MOD_RES (27)..(28): Xaa is C or S
MRHKRLIKPTKGIYYLISTASLDQSVXXP

SEQ ID NO: 42285 - protein, 34 aa, Artificial Sequence; identical to SEQ ID NO: 4512
  Cyclic GFR-binding peptide
  MOD_RES (2)..(34): Xaa is C or S

SEQ ID NO: 42286 - protein, 34 aa, Artificial Sequence; identical to SEQ ID NO: 4513
  Cyclic GFR-binding peptide
  MOD_RES (32)..(33): Xaa is C or S

SEQ ID NO: 42287 - protein, 29 aa, Artificial Sequence
  Cyclic GFR-binding peptide
  MOD_RES (1)..(1): Xaa is C or S
XAKVVMNQYNKLIVNNSSDLYLVSIASLK

SEQ ID NO: 42288 - protein, 37 aa, Artificial Sequence; identical to SEQ ID NO: 4517
  Cyclic GFR-binding peptide
  MOD_RES (31)..(32): Xaa is C or S

SEQ ID NO: 42289 - protein, 24 aa, Artificial Sequence
  Cyclic GFR-binding peptide
RYKKLVVKDYEDFYLMSIANLETP

SEQ ID NO: 42290 - protein, 32 aa, Artificial Sequence; identical to SEQ ID NO: 1841
  Cyclic GFR-binding peptide

SEQ ID NO: 42291 - protein, 31 aa, Artificial Sequence; identical to SEQ ID NO: 4520
  Cyclic GFR-binding peptide
  MOD_RES (31)..(31): Xaa is C or S

SEQ ID NO: 42292 - protein, 37 aa, Artificial Sequence; identical to SEQ ID NO: 4521
  Cyclic GFR-binding peptide
  MOD_RES (1)..(3)..(34)..(35): Xaa is C or S

SEQ ID NO: 42293 - protein, 27 aa, Artificial Sequence
  Cyclic GFR-binding peptide
  MOD_RES (26)..(27): Xaa is C or S
YHYKLIVNSSDDKYLVSIPSLKTPAXX

SEQ ID NO: 42294 - protein, 27 aa, Artificial Sequence
  Cyclic GFR-binding peptide
  MOD_RES (1)..(1): Xaa is C or S
XSRVVMNQYNKLIVNSSDDLYLVSIAS

SEQ ID NO: 42295 - protein, 25 aa, Artificial Sequence
  Cyclic GFR-binding peptide
MGERYKKLTPVGMDDFYLVSIANLK

SEQ ID NO: 42296 - protein, 33 aa, Artificial Sequence
  Cyclic GFR-binding peptide
  MOD_RES (28)..(29): Xaa is C or S
MERYKKLVVKDYEDFYLMSIANLETPVXXAKPI

SEQ ID NO: 42297 - protein, 30 aa, Artificial Sequence
  Cyclic GFR-binding peptide
  MOD_RES (1)..(3): Xaa is C or S
XGXSRVVMNRHKRLIVNSSDDYYLVSTASL

SEQ ID NO: 42298 - protein, 27 aa, Artificial Sequence
  Cyclic GFR-binding peptide
  MOD_RES (1)..(1): Xaa is C or S
XSRVIMQYNKLVKPKRGVLYLISIASL

SEQ ID NO: 42299 - protein, 34 aa, Artificial Sequence; identical to SEQ ID NO: 4522
  Cyclic GFR-binding peptide
  MOD_RES (1)..(33)..(34): Xaa is C or S

SEQ ID NO: 42300 - protein, 33 aa, Artificial Sequence
  Cyclic GFR-binding peptide
  MOD_RES (27)..(28): Xaa is C or S
MQYNKLVKPKRGVLYLISIASLAQPVXXPAASA

SEQ ID NO: 42301 - protein, 30 aa, Artificial Sequence
  Cyclic GFR-binding peptide
  MOD_RES (30)..(30): Xaa is C or S
VVMNQYNKLIVNSSDDLYLVSIASLKTPAX

SEQ ID NO: 42302 - protein, 21 aa, Artificial Sequence
  Cyclic GFR-binding peptide
QYNKLTPVGMDDLYLVSIASL

SEQ ID NO: 42303 - protein, 24 aa, Artificial Sequence
  Cyclic GFR-binding peptide
KVIMQYNKLIKPTKGILYLISIAS

SEQ ID NO: 42304 - protein, 30 aa, Artificial Sequence
  Cyclic GFR-binding peptide
  MOD_RES (29)..(30): Xaa is C or S
MGERYKKLTPVGMDDFYLVSIANLKTPVXX

SEQ ID NO: 42305 - protein, 29 aa, Artificial Sequence
  Cyclic GFR-binding peptide
  MOD_RES (28)..(29): Xaa is C or S
VMQYNKLVKPTRGVLYLISIASLDQPVXX

SEQ ID NO: 42306 - protein, 34 aa, Artificial Sequence; identical to SEQ ID NO: 4526
  Cyclic GFR-binding peptide
  MOD_RES (32)..(33): Xaa is C or S

SEQ ID NO: 42307 - protein, 34 aa, Artificial Sequence; identical to SEQ ID NO: 4527
  Cyclic GFR-binding peptide
  MOD_RES (1)..(3): Xaa is C or S

SEQ ID NO: 42308 - protein, 38 aa, Artificial Sequence; identical to SEQ ID NO: 4529
  Cyclic GFR-binding peptide
  MOD_RES (32)..(32): Xaa is C or S

SEQ ID NO: 42309 - protein, 28 aa, Artificial Sequence
  Cyclic GFR-binding peptide
  MOD_RES (27)..(28): Xaa is C or S
MYHYKLIKPTKGIKYLISIPSLDQSVXX

SEQ ID NO: 42310 - protein, 30 aa, Artificial Sequence
  Cyclic GFR-binding peptide
  MOD_RES (28)..(29): Xaa is C or S
IMRHKRLIKPTKGIYYLISTASLDQSVXXP

SEQ ID NO: 42311 - protein, 32 aa, Artificial Sequence
  Cyclic GFR-binding peptide
  MOD_RES (28)..(29): Xaa is C or S
MNYHYKLIVNNSSDKYLVSIPSLKTPAXXAKP

SEQ ID NO: 42312 - protein, 33 aa, Artificial Sequence
  Cyclic GFR-binding peptide
  MOD_RES (2)..(4): Xaa is C or S
SXKXSKVVMRYKKLVKPTRGVFYLISIANLDQP

SEQ ID NO: 42313 - protein, 36 aa, Artificial Sequence; identical to SEQ ID NO: 4535
  Cyclic GFR-binding peptide
  MOD_RES (1)..(1): Xaa is C or S

SEQ ID NO: 42314 - protein, 24 aa, Artificial Sequence
  Cyclic GFR-binding peptide
KVVMYHYKLVKPTRGVKYLISIPS

SEQ ID NO: 42315 - protein, 32 aa, Artificial Sequence
  Cyclic GFR-binding peptide
  MOD_RES (1)..(3): Xaa is C or S
XGXSRVVMNQYNKLIVNSSDDLYLVSIASLKT

SEQ ID NO: 42316 - protein, 33 aa, Artificial Sequence; identical to SEQ ID NO: 4536
  Cyclic GFR-binding peptide
  MOD_RES (1)..(33): Xaa is C or S

SEQ ID NO: 42317 - protein, 29 aa, Artificial Sequence
  Cyclic GFR-binding peptide
SKVVMRYKKLVKPTRGVFYLISIANLDQP

SEQ ID NO: 42318 - protein, 29 aa, Artificial Sequence
  Cyclic GFR-binding peptide
KVVMRHKRLVKPTRGVYYLISTASLDQPV

SEQ ID NO: 42319 - protein, 34 aa, Artificial Sequence; identical to SEQ ID NO: 4538
  Cyclic GFR-binding peptide
  MOD_RES (1)..(3)..(34): Xaa is C or S

SEQ ID NO: 42320 - protein, 28 aa, Artificial Sequence
  Cyclic GFR-binding peptide
KVVMRHKRLVKPTRGVYYLISTASLDQP

SEQ ID NO: 42321 - protein, 39 aa, Artificial Sequence; identical to SEQ ID NO: 4540
  Cyclic GFR-binding peptide
  MOD_RES (2)..(33)..(34): Xaa is C or S

SEQ ID NO: 42322 - protein, 41 aa, Artificial Sequence; identical to SEQ ID NO: 4541
  Cyclic GFR-binding peptide
  MOD_RES (2)..(4)..(35)..(36): Xaa is C or S

SEQ ID NO: 42323 - protein, 39 aa, Artificial Sequence; identical to SEQ ID NO: 4542
  Cyclic GFR-binding peptide
  MOD_RES (1)..(3): Xaa is C or S

SEQ ID NO: 42324 - protein, 28 aa, Artificial Sequence
  Cyclic GFR-binding peptide
  MOD_RES (26)..(27): Xaa is C or S
RHKRLVVKENEDYYLMSTASLETPVXXA

SEQ ID NO: 42325 - protein, 32 aa, Artificial Sequence
  Cyclic GFR-binding peptide
  MOD_RES (29)..(30): Xaa is C or S
VIMQYNKLVKPKRGVLYLISIASLAQPVXXPA

SEQ ID NO: 42326 - protein, 36 aa, Artificial Sequence; identical to SEQ ID NO: 4547
  Cyclic GFR-binding peptide
  MOD_RES (1)..(33)..(34): Xaa is C or S

SEQ ID NO: 42327 - protein, 30 aa, Artificial Sequence
  Cyclic GFR-binding peptide
EAVSMGEQYNKLTPVGMDDLYLVSIASLKT

SEQ ID NO: 42328 - protein, 36 aa, Artificial Sequence; identical to SEQ ID NO: 4549
  Cyclic GFR-binding peptide
  MOD_RES (31)..(32): Xaa is C or S

SEQ ID NO: 42329 - protein, 29 aa, Artificial Sequence
  Cyclic GFR-binding peptide
VVMNQYNKLIVNNSSDLYLVSIASLKTPA

SEQ ID NO: 42330 - protein, 30 aa, Artificial Sequence
  Cyclic GFR-binding peptide
  MOD_RES (30)..(30): Xaa is C or S
VVMEYHYKLVVKDYEDKYLMSIPSLETPVX

SEQ ID NO: 42331 - protein, 25 aa, Artificial Sequence
  Cyclic GFR-binding peptide
NRHKRLIVNSSDDYYLVSTASLKTP

SEQ ID NO: 42332 - protein, 35 aa, Artificial Sequence
  Cyclic GFR-binding peptide
  MOD_RES (1)..(3): Xaa is C or S
XKXALHDELTRYKKLFIPKKRVIEFYLVSIANLQV

SEQ ID NO: 42333 - protein, 33 aa, Artificial Sequence
  Cyclic GFR-binding peptide
  MOD_RES (29)..(30): Xaa is C or S
VVMYHYKLVKPTRGVKYLISIPSLDQPVXXPSA

SEQ ID NO: 42334 - protein, 33 aa, Artificial Sequence; identical to SEQ ID NO: 4553
  Cyclic GFR-binding peptide
  MOD_RES (32)..(33): Xaa is C or S

SEQ ID NO: 42335 - protein, 26 aa, Artificial Sequence
  Cyclic GFR-binding peptide
ERHKRLTPVGMDDYYLVSTASLKTPV

SEQ ID NO: 42336 - protein, 32 aa, Artificial Sequence
  Cyclic GFR-binding peptide
  MOD_RES (26)..(27): Xaa is C or S
RHKRLVVKENEDYYLMSTASLETPVXXAKPIK

SEQ ID NO: 42337 - protein, 33 aa, Artificial Sequence
  Cyclic GFR-binding peptide
  MOD_RES (2)..(4): Xaa is C or S
HXGXAKVVMNYHYKLIVNNSSDKYLVSIPSLKT

SEQ ID NO: 42338 - protein, 34 aa, Artificial Sequence; identical to SEQ ID NO: 4556
  Cyclic GFR-binding peptide
  MOD_RES (2)..(33)..(34): Xaa is C or S

SEQ ID NO: 42339 - protein, 37 aa, Artificial Sequence; identical to SEQ ID NO: 4557
  Cyclic GFR-binding peptide
  MOD_RES (2)..(2): Xaa is C or S

SEQ ID NO: 42340 - protein, 30 aa, Artificial Sequence
  Cyclic GFR-binding peptide
  MOD_RES (30)..(30): Xaa is C or S
RVIMQYNKLVKPKRGVLYLISIASLAQPVX

SEQ ID NO: 42341 - protein, 32 aa, Artificial Sequence
  Cyclic GFR-binding peptide
DELTRYKKLFIPKKRVIEFYLVSIANLQVQTP

SEQ ID NO: 42342 - protein, 33 aa, Artificial Sequence
  Cyclic GFR-binding peptide
  MOD_RES (29)..(30): Xaa is C or S
VVMRHKRLVKPTRGVYYLISTASLDQPVXXPSA

SEQ ID NO: 42343 - protein, 30 aa, Artificial Sequence
  Cyclic GFR-binding peptide
  MOD_RES (28)..(29): Xaa is C or S
MDRYKKLVVKENEDFYLMSIANLETPVXXA

SEQ ID NO: 42344 - protein, 27 aa, Artificial Sequence
  Cyclic GFR-binding peptide
SRVIMQYNKLVKPKRGVLYLISIASLA

SEQ ID NO: 42345 - protein, 32 aa, Artificial Sequence
  Cyclic GFR-binding peptide
  MOD_RES (28)..(29): Xaa is C or S
GERHKRLTPVGMDDYYLVSTASLKTPVXXAKG

SEQ ID NO: 42346 - protein, 35 aa, Artificial Sequence; identical to SEQ ID NO: 4564
  Cyclic GFR-binding peptide
  MOD_RES (35)..(35): Xaa is C or S

SEQ ID NO: 42347 - protein, 33 aa, Artificial Sequence
  Cyclic GFR-binding peptide
  MOD_RES (30)..(31): Xaa is C or S
VVMDRHKRLVVKENEDYYLMSTASLETPVXXAK

SEQ ID NO: 42348 - protein, 26 aa, Artificial Sequence
  Cyclic GFR-binding peptide
VMDRHKRLVVKENEDYYLMSTASLET

SEQ ID NO: 42349 - protein, 21 aa, Artificial Sequence
  Cyclic GFR-binding peptide
ERYKKLVVKDYEDFYLMSIAN

SEQ ID NO: 42350 - protein, 25 aa, Artificial Sequence
  Cyclic GFR-binding peptide
MQYNKLIKPTKGILYLISIASLDQS

SEQ ID NO: 42351 - protein, 33 aa, Artificial Sequence
  Cyclic GFR-binding peptide
  MOD_RES (29)..(30): Xaa is C or S
VMERYKKLVVKDYEDFYLMSIANLETPVXXAKP

SEQ ID NO: 42352 - protein, 29 aa, Artificial Sequence
  Cyclic GFR-binding peptide
  MOD_RES (28)..(29): Xaa is C or S
MDRHKRLVVKENEDYYLMSTASLETPVXX

SEQ ID NO: 42353 - protein, 36 aa, Artificial Sequence; identical to SEQ ID NO: 4566
  Cyclic GFR-binding peptide
  MOD_RES (1)..(33)..(34): Xaa is C or S

SEQ ID NO: 42354 - protein, 35 aa, Artificial Sequence; identical to SEQ ID NO: 4567
  Cyclic GFR-binding peptide
  MOD_RES (1)..(33)..(34): Xaa is C or S

SEQ ID NO: 42355 - protein, 23 aa, Artificial Sequence
  Cyclic GFR-binding peptide
VIMQYNKLIKPTKGILYLISIAS

SEQ ID NO: 42356 - protein, 29 aa, Artificial Sequence
  Cyclic GFR-binding peptide
EVVMEYHYKLVVKDYEDKYLMSIPSLETP

SEQ ID NO: 42357 - protein, 43 aa, Artificial Sequence; identical to SEQ ID NO: 4569
  Cyclic GFR-binding peptide
  MOD_RES (1)..(3)..(40): Xaa is C or S

SEQ ID NO: 42358 - protein, 27 aa, Artificial Sequence
  Cyclic GFR-binding peptide
  MOD_RES (26)..(26): Xaa is C or S
YHYKLIVNSSDDKYLVSIPSLKTPAXT

SEQ ID NO: 42359 - protein, 21 aa, Artificial Sequence
  Cyclic GFR-binding peptide
RYKKLVVKENEDFYLMSIANL

SEQ ID NO: 42360 - protein, 29 aa, Artificial Sequence
  Cyclic GFR-binding peptide
  MOD_RES (27)..(28): Xaa is C or S
MQYNKLVKPKRGVLYLISIASLAQPVXXP

SEQ ID NO: 42361 - protein, 30 aa, Artificial Sequence
  Cyclic GFR-binding peptide
  MOD_RES (28)..(29): Xaa is C or S
VMRHKRLVKPTRGVYYLISTASLDQPVXXP

SEQ ID NO: 42362 - protein, 31 aa, Artificial Sequence; identical to SEQ ID NO: 4570
  Cyclic GFR-binding peptide

SEQ ID NO: 42363 - protein, 33 aa, Artificial Sequence
  Cyclic GFR-binding peptide
  MOD_RES (1)..(3): Xaa is C or S
XGXAKVVMNQYNKLIVNNSSDLYLVSIASLKTP

SEQ ID NO: 42364 - protein, 28 aa, Artificial Sequence
  Cyclic GFR-binding peptide
  MOD_RES (26)..(27): Xaa is C or S
RYKKLVVKDYEDFYLMSIANLETPVXXA

SEQ ID NO: 42365 - protein, 35 aa, Artificial Sequence
  Cyclic GFR-binding peptide
  MOD_RES (30)..(31): Xaa is C or S
RVIMRYKKLVKPKRGVFYLISIANLAQPVXXPAAS

SEQ ID NO: 42366 - protein, 27 aa, Artificial Sequence
  Cyclic GFR-binding peptide
  MOD_RES (27)..(27): Xaa is C or S
ERYKKLVVKDYEDFYLMSIANLETPVX

SEQ ID NO: 42367 - protein, 33 aa, Artificial Sequence; identical to SEQ ID NO: 4571
  Cyclic GFR-binding peptide
  MOD_RES (2)..(33): Xaa is C or S

SEQ ID NO: 42368 - protein, 21 aa, Artificial Sequence
  Cyclic GFR-binding peptide
YHYKLVVKDYEDKYLMSIPSL

SEQ ID NO: 42369 - protein, 38 aa, Artificial Sequence; identical to SEQ ID NO: 4572
  Cyclic GFR-binding peptide
  MOD_RES (1)..(3)..(35): Xaa is C or S

SEQ ID NO: 42370 - protein, 34 aa, Artificial Sequence
  Cyclic GFR-binding peptide
  MOD_RES (1)..(3): Xaa is C or S
XKXALHDELTQYNKLFIPKKRVIELYLVSIASLQ

SEQ ID NO: 42371 - protein, 23 aa, Artificial Sequence
  Cyclic GFR-binding peptide
MERHKRLVVKDYEDYYLMSTASL

SEQ ID NO: 42372 - protein, 33 aa, Artificial Sequence; identical to SEQ ID NO: 4573
  Cyclic GFR-binding peptide
  MOD_RES (32)..(33): Xaa is C or S

SEQ ID NO: 42373 - protein, 35 aa, Artificial Sequence; identical to SEQ ID NO: 4574
  Cyclic GFR-binding peptide
  MOD_RES (1)..(33): Xaa is C or S

SEQ ID NO: 42374 - protein, 26 aa, Artificial Sequence
  Cyclic GFR-binding peptide
VIMQYNKLIKPTKGILYLISIASLDQ

SEQ ID NO: 42375 - protein, 33 aa, Artificial Sequence
  Cyclic GFR-binding peptide
  MOD_RES (27)..(28): Xaa is C or S
NQYNKLIVNSSDDLYLVSIASLKTPAXXPKPVY

SEQ ID NO: 42376 - protein, 29 aa, Artificial Sequence
  Cyclic GFR-binding peptide
  MOD_RES (29)..(29): Xaa is C or S
VVMRHKRLVKPTRGVYYLISTASLDQPVX

SEQ ID NO: 42377 - protein, 37 aa, Artificial Sequence; identical to SEQ ID NO: 4575
  Cyclic GFR-binding peptide
  MOD_RES (2)..(34)..(35): Xaa is C or S

SEQ ID NO: 42378 - protein, 36 aa, Artificial Sequence; identical to SEQ ID NO: 4576
  Cyclic GFR-binding peptide
  MOD_RES (2)..(34)..(35): Xaa is C or S

SEQ ID NO: 42379 - protein, 34 aa, Artificial Sequence; identical to SEQ ID NO: 4577
  Cyclic GFR-binding peptide
  MOD_RES (2)..(4): Xaa is C or S

SEQ ID NO: 42380 - protein, 35 aa, Artificial Sequence; identical to SEQ ID NO: 4578
  Cyclic GFR-binding peptide
  MOD_RES (1)..(32)..(33): Xaa is C or S

SEQ ID NO: 42381 - protein, 38 aa, Artificial Sequence; identical to SEQ ID NO: 4583
  Cyclic GFR-binding peptide
  MOD_RES (1)..(32)..(33): Xaa is C or S

SEQ ID NO: 42382 - protein, 33 aa, Artificial Sequence; identical to SEQ ID NO: 4584
  Cyclic GFR-binding peptide
  MOD_RES (1)..(32)..(33): Xaa is C or S

SEQ ID NO: 42383 - protein, 31 aa, Artificial Sequence
  Cyclic GFR-binding peptide
  MOD_RES (29)..(30): Xaa is C or S
MGERYKKLTPVGMDDFYLVSIANLKTPVXXA

SEQ ID NO: 42384 - protein, 26 aa, Artificial Sequence
  Cyclic GFR-binding peptide
NQYNKLIVNSSDDLYLVSIASLKTPA

SEQ ID NO: 42385 - protein, 31 aa, Artificial Sequence
  Cyclic GFR-binding peptide
ALHDELTRHKRLFIPKKRVIEYYLVSTASLQ

SEQ ID NO: 42386 - protein, 30 aa, Artificial Sequence
  Cyclic GFR-binding peptide
VSMGERHKRLTPVGMDDYYLVSTASLKTPV

SEQ ID NO: 42387 - protein, 28 aa, Artificial Sequence
  Cyclic GFR-binding peptide
  MOD_RES (28)..(28): Xaa is C or S
VMQYNKLVKPTRGVLYLISIASLDQPVX

SEQ ID NO: 42388 - protein, 31 aa, Artificial Sequence
  Cyclic GFR-binding peptide
  MOD_RES (26)..(27): Xaa is C or S
RYKKLVKPKRGVFYLISIANLAQPVXXPAAS

SEQ ID NO: 42389 - protein, 21 aa, Artificial Sequence
  Cyclic GFR-binding peptide
YHYKLIVNNSSDKYLVSIPSL

SEQ ID NO: 42390 - protein, 36 aa, Artificial Sequence; identical to SEQ ID NO: 4587
  Cyclic GFR-binding peptide
  MOD_RES (2)..(4)..(35)..(36): Xaa is C or S

SEQ ID NO: 42391 - protein, 26 aa, Artificial Sequence
  Cyclic GFR-binding peptide
AKVVMNQYNKLIVNNSSDLYLVSIAS

SEQ ID NO: 42392 - protein, 30 aa, Artificial Sequence
  Cyclic GFR-binding peptide
  MOD_RES (2)..(2): Xaa is C or S
GXGEVVMERYKKLVVKDYEDFYLMSIANLE

SEQ ID NO: 42393 - protein, 35 aa, Artificial Sequence
  Cyclic GFR-binding peptide
  MOD_RES (31)..(31): Xaa is C or S
TRYKKLFIPKKRVIEFYLVSIANLQVQTPRXQVNR

SEQ ID NO: 42394 - protein, 36 aa, Artificial Sequence
  Cyclic GFR-binding peptide
  MOD_RES (32)..(33): Xaa is C or S
AVSMGERHKRLTPVGMDDYYLVSTASLKTPVXXAKG

SEQ ID NO: 42395 - protein, 36 aa, Artificial Sequence; identical to SEQ ID NO: 4588
  Cyclic GFR-binding peptide
  MOD_RES (2)..(4)..(36): Xaa is C or S

SEQ ID NO: 42396 - protein, 24 aa, Artificial Sequence
  Cyclic GFR-binding peptide
YHYKLIVNSSDDKYLVSIPSLQTP

SEQ ID NO: 42397 - protein, 34 aa, Artificial Sequence
  Cyclic GFR-binding peptide
  MOD_RES (30)..(31): Xaa is C or S
VVMNRHKRLIVNSSDDYYLVSTASLQTPAXXPKP

SEQ ID NO: 42398 - protein, 31 aa, Artificial Sequence
  Cyclic GFR-binding peptide
  MOD_RES (29)..(30): Xaa is C or S
VVMRYKKLVKPTRGVFYLISIANLDQPVXXP

SEQ ID NO: 42399 - protein, 42 aa, Artificial Sequence; identical to SEQ ID NO: 4589
  Cyclic GFR-binding peptide
  MOD_RES (2)..(4)..(41): Xaa is C or S

SEQ ID NO: 42400 - protein, 30 aa, Artificial Sequence
  Cyclic GFR-binding peptide
  MOD_RES (30)..(30): Xaa is C or S
VVMERHKRLVVKDYEDYYLMSTASLETPVX

SEQ ID NO: 42401 - protein, 27 aa, Artificial Sequence
  Cyclic GFR-binding peptide
  MOD_RES (1)..(1): Xaa is C or S
XARVVMNQYNKLIVNSSDDLYLVSIAS

SEQ ID NO: 42402 - protein, 30 aa, Artificial Sequence
  Cyclic GFR-binding peptide
  MOD_RES (26)..(27): Xaa is C or S
QYNKLIVNSSDDLYLVSIASLKTPAXXPKP

SEQ ID NO: 42403 - protein, 27 aa, Artificial Sequence
  Cyclic GFR-binding peptide
RVIMYHYKLVKPKRGVKYLISIPSLAQ

SEQ ID NO: 42404 - protein, 36 aa, Artificial Sequence
  Cyclic GFR-binding peptide
  MOD_RES (30)..(31): Xaa is C or S
VVMERYKKLVVKDYEDFYLMSIANLETPVXXAKPIS

SEQ ID NO: 42405 - protein, 26 aa, Artificial Sequence
  Cyclic GFR-binding peptide
VVMNQYNKLIVNSSDDLYLVSIASLK

SEQ ID NO: 42406 - protein, 33 aa, Artificial Sequence
  Cyclic GFR-binding peptide
  MOD_RES (2)..(4): Xaa is C or S
HXGXARVVMNYHYKLIVNSSDDKYLVSIPSLQT

SEQ ID NO: 42407 - protein, 26 aa, Artificial Sequence
  Cyclic GFR-binding peptide
TRHKRLFIPKKRVIEYYLVSTASLQV

SEQ ID NO: 42408 - protein, 38 aa, Artificial Sequence; identical to SEQ ID NO: 4597
  Cyclic GFR-binding peptide
  MOD_RES (2)..(4)..(35)..(36): Xaa is C or S

SEQ ID NO: 42409 - protein, 24 aa, Artificial Sequence
  Cyclic GFR-binding peptide
RHKRLVVKENEDYYLMSTASLETP

SEQ ID NO: 42410 - protein, 33 aa, Artificial Sequence
  Cyclic GFR-binding peptide
  MOD_RES (29)..(30): Xaa is C or S
VMNRHKRLIVNSSDDYYLVSTASLKTPAXXPKP

SEQ ID NO: 42411 - protein, 31 aa, Artificial Sequence
  Cyclic GFR-binding peptide
ALHDELTQYNKLFIPKKRVIELYLVSIASLQ

SEQ ID NO: 42412 - protein, 25 aa, Artificial Sequence
  Cyclic GFR-binding peptide
VSMGERYKKLTPVGMDDFYLVSIAN

SEQ ID NO: 42413 - protein, 33 aa, Artificial Sequence
  Cyclic GFR-binding peptide
  MOD_RES (31)..(31): Xaa is C or S
TYHYKLFIPKKRVIEKYLVSIPSLQVQTPRXQV

SEQ ID NO: 42414 - protein, 38 aa, Artificial Sequence; identical to SEQ ID NO: 4603
  Cyclic GFR-binding peptide
  MOD_RES (2)..(33)..(34): Xaa is C or S

SEQ ID NO: 42415 - protein, 27 aa, Artificial Sequence
  Cyclic GFR-binding peptide
ARVVMNRHKRLIVNSSDDYYLVSTASL

SEQ ID NO: 42416 - protein, 26 aa, Artificial Sequence
  Cyclic GFR-binding peptide
KVIMYHYKLIKPTKGIKYLISIPSLD

SEQ ID NO: 42417 - protein, 28 aa, Artificial Sequence
  Cyclic GFR-binding peptide
DELTRYKKLFIPKKRVIEFYLVSIANLQ

SEQ ID NO: 42418 - protein, 24 aa, Artificial Sequence
  Cyclic GFR-binding peptide
MYHYKLVKPTRGVKYLISIPSLDQ

SEQ ID NO: 42419 - protein, 36 aa, Artificial Sequence; identical to SEQ ID NO: 4606
  Cyclic GFR-binding peptide
  MOD_RES (1)..(3)..(35)..(36): Xaa is C or S

SEQ ID NO: 42420 - protein, 31 aa, Artificial Sequence
  Cyclic GFR-binding peptide
  MOD_RES (29)..(30): Xaa is C or S
VMERYKKLVVKDYEDFYLMSIANLETPVXXA

SEQ ID NO: 42421 - protein, 42 aa, Artificial Sequence; identical to SEQ ID NO: 4607
  Cyclic GFR-binding peptide
  MOD_RES (2)..(39): Xaa is C or S

SEQ ID NO: 42422 - protein, 28 aa, Artificial Sequence
  Cyclic GFR-binding peptide
VVMRHKRLVKPTRGVYYLISTASLDQPV

SEQ ID NO: 42423 - protein, 34 aa, Artificial Sequence; identical to SEQ ID NO: 4608
  Cyclic GFR-binding peptide

SEQ ID NO: 42424 - protein, 33 aa, Artificial Sequence
  Cyclic GFR-binding peptide
  MOD_RES (28)..(29): Xaa is C or S
IMYHYKLIKPTKGIKYLISIPSLDQSVXXPSAS

SEQ ID NO: 42425 - protein, 30 aa, Artificial Sequence
  Cyclic GFR-binding peptide
  MOD_RES (28)..(29): Xaa is C or S
IMQYNKLVKPKRGVLYLISIASLAQPVXXP

SEQ ID NO: 42426 - protein, 35 aa, Artificial Sequence; identical to SEQ ID NO: 4610
  Cyclic GFR-binding peptide
  MOD_RES (2)..(34)..(35): Xaa is C or S

SEQ ID NO: 42427 - protein, 32 aa, Artificial Sequence
  Cyclic GFR-binding peptide
  MOD_RES (30)..(31): Xaa is C or S
VVMDYHYKLVVKENEDKYLMSIPSLETPVXXA

SEQ ID NO: 42428 - protein, 20 aa, Artificial Sequence
  Cyclic GFR-binding peptide
RHKRLIKPTKGIYYLISTAS

SEQ ID NO: 42429 - protein, 27 aa, Artificial Sequence
  Cyclic GFR-binding peptide
SRVVMNRHKRLIVNSSDDYYLVSTASL

SEQ ID NO: 42430 - protein, 39 aa, Artificial Sequence; identical to SEQ ID NO: 4611
  Cyclic GFR-binding peptide
  MOD_RES (2)..(4)..(36)..(37): Xaa is C or S

SEQ ID NO: 42431 - protein, 31 aa, Artificial Sequence
  Cyclic GFR-binding peptide
  MOD_RES (30)..(31): Xaa is C or S
RVIMQYNKLVKPKRGVLYLISIASLAQPVXX

SEQ ID NO: 42432 - protein, 31 aa, Artificial Sequence; identical to SEQ ID NO: 4612
  Cyclic GFR-binding peptide
  MOD_RES (31)..(31): Xaa is C or S

SEQ ID NO: 42433 - protein, 31 aa, Artificial Sequence
  Cyclic GFR-binding peptide
  MOD_RES (28)..(29): Xaa is C or S
IMQYNKLVKPKRGVLYLISIASLAQPVXXPA

SEQ ID NO: 42434 - protein, 27 aa, Artificial Sequence
  Cyclic GFR-binding peptide
  MOD_RES (2)..(2): Xaa is C or S
KXSKVVMYHYKLVKPTRGVKYLISIPS

SEQ ID NO: 42435 - protein, 31 aa, Artificial Sequence
  Cyclic GFR-binding peptide
  MOD_RES (2)..(2): Xaa is C or S
GXAKVVMNRYKKLIVNNSSDFYLVSIANLKT

SEQ ID NO: 42436 - protein, 34 aa, Artificial Sequence
  Cyclic GFR-binding peptide
  MOD_RES (31)..(31): Xaa is C or S
TQYNKLFIPKKRVIELYLVSIASLQVQTPRXQVN

SEQ ID NO: 42437 - protein, 27 aa, Artificial Sequence
  Cyclic GFR-binding peptide
  MOD_RES (1)..(1): Xaa is C or S
XGEVVMDRHKRLVVKENEDYYLMSTAS

SEQ ID NO: 42438 - protein, 39 aa, Artificial Sequence; identical to SEQ ID NO: 4613
  Cyclic GFR-binding peptide
  MOD_RES (1)..(3)..(35)..(36): Xaa is C or S

SEQ ID NO: 42439 - protein, 23 aa, Artificial Sequence
  Cyclic GFR-binding peptide
MYHYKLVKPTRGVKYLISIPSLD

SEQ ID NO: 42440 - protein, 33 aa, Artificial Sequence; identical to SEQ ID NO: 4614
  Cyclic GFR-binding peptide
  MOD_RES (31)..(32): Xaa is C or S

SEQ ID NO: 42441 - protein, 37 aa, Artificial Sequence; identical to SEQ ID NO: 4615
  Cyclic GFR-binding peptide
  MOD_RES (1)..(3)..(34)..(35): Xaa is C or S

SEQ ID NO: 42442 - protein, 31 aa, Artificial Sequence
  Cyclic GFR-binding peptide
  MOD_RES (2)..(2): Xaa is C or S
GXARVVMNQYNKLIVNSSDDLYLVSIASLQT

SEQ ID NO: 42443 - protein, 27 aa, Artificial Sequence
  Cyclic GFR-binding peptide
  MOD_RES (26)..(27): Xaa is C or S
RYKKLVVKDYEDFYLMSIANLETPVXX

SEQ ID NO: 42444 - protein, 39 aa, Artificial Sequence; identical to SEQ ID NO: 4616
  Cyclic GFR-binding peptide
  MOD_RES (1)..(38): Xaa is C or S

SEQ ID NO: 42445 - protein, 37 aa, Artificial Sequence; identical to SEQ ID NO: 4617
  Cyclic GFR-binding peptide
  MOD_RES (1)..(3)..(36)..(37): Xaa is C or S

SEQ ID NO: 42446 - protein, 33 aa, Artificial Sequence
  Cyclic GFR-binding peptide
  MOD_RES (28)..(29): Xaa is C or S
MNYHYKLIVNSSDDKYLVSIPSLQTPAXXPKPV

SEQ ID NO: 42447 - protein, 27 aa, Artificial Sequence
  Cyclic GFR-binding peptide
SRVIMYHYKLVKPKRGVKYLISIPSLA

SEQ ID NO: 42448 - protein, 24 aa, Artificial Sequence
  Cyclic GFR-binding peptide
RVIMQYNKLVKPKRGVLYLISIAS

SEQ ID NO: 42449 - protein, 29 aa, Artificial Sequence
  Cyclic GFR-binding peptide
  MOD_RES (2)..(4): Xaa is C or S
SXKXSKVIMQYNKLIKPTKGILYLISIAS

SEQ ID NO: 42450 - protein, 37 aa, Artificial Sequence; identical to SEQ ID NO: 4620
  Cyclic GFR-binding peptide
  MOD_RES (1)..(32)..(33): Xaa is C or S

SEQ ID NO: 42451 - protein, 22 aa, Artificial Sequence
  Cyclic GFR-binding peptide
YHYKLVKPKRGVKYLISIPSLA

SEQ ID NO: 42452 - protein, 37 aa, Artificial Sequence; identical to SEQ ID NO: 4621
  Cyclic GFR-binding peptide
  MOD_RES (2)..(4)..(37): Xaa is C or S

SEQ ID NO: 42453 - protein, 30 aa, Artificial Sequence
  Cyclic GFR-binding peptide
AVSMGEQYNKLTPVGMDDLYLVSIASLKTP

SEQ ID NO: 42454 - protein, 33 aa, Artificial Sequence
  Cyclic GFR-binding peptide
  MOD_RES (29)..(29): Xaa is C or S
VMNQYNKLIVNSSDDLYLVSIASLKTPAXTPKT

SEQ ID NO: 42455 - protein, 37 aa, Artificial Sequence; identical to SEQ ID NO: 4622
  Cyclic GFR-binding peptide
  MOD_RES (31)..(32): Xaa is C or S

SEQ ID NO: 42456 - protein, 36 aa, Artificial Sequence; identical to SEQ ID NO: 4625
  Cyclic GFR-binding peptide
  MOD_RES (2)..(34)..(35): Xaa is C or S

SEQ ID NO: 42457 - protein, 36 aa, Artificial Sequence
  Cyclic GFR-binding peptide
  MOD_RES (30)..(31): Xaa is C or S
VVMNQYNKLIVNSSDDLYLVSIASLKTPAXXPKPVY

SEQ ID NO: 42458 - protein, 40 aa, Artificial Sequence; identical to SEQ ID NO: 4627
  Cyclic GFR-binding peptide
  MOD_RES (2)..(4): Xaa is C or S

SEQ ID NO: 42459 - protein, 28 aa, Artificial Sequence
  Cyclic GFR-binding peptide
  MOD_RES (1)..(1): Xaa is C or S
XEAVSMGERHKRLTPVGMDDYYLVSTAS

SEQ ID NO: 42460 - protein, 26 aa, Artificial Sequence
  Cyclic GFR-binding peptide
NYHYKLIVNNSSDKYLVSIPSLKTPA

SEQ ID NO: 42461 - protein, 31 aa, Artificial Sequence
  Cyclic GFR-binding peptide
  MOD_RES (29)..(30): Xaa is C or S
VMNYHYKLIVNSSDDKYLVSIPSLKTPAXXP

SEQ ID NO: 42462 - protein, 28 aa, Artificial Sequence
  Cyclic GFR-binding peptide
AVSMGEQYNKLTPVGMDDLYLVSIASLK

SEQ ID NO: 42463 - protein, 27 aa, Artificial Sequence
  Cyclic GFR-binding peptide
SKVIMRHKRLIKPTKGIYYLISTASLD

SEQ ID NO: 42464 - protein, 34 aa, Artificial Sequence; identical to SEQ ID NO: 4632
  Cyclic GFR-binding peptide
  MOD_RES (1)..(33): Xaa is C or S

SEQ ID NO: 42465 - protein, 32 aa, Artificial Sequence
  Cyclic GFR-binding peptide
  MOD_RES (2)..(4): Xaa is C or S
RXGXGEVVMDRYKKLVVKENEDFYLMSIANLE

SEQ ID NO: 42466 - protein, 33 aa, Artificial Sequence; identical to SEQ ID NO: 4634
  Cyclic GFR-binding peptide
  MOD_RES (32)..(32): Xaa is C or S

SEQ ID NO: 42467 - protein, 33 aa, Artificial Sequence; identical to SEQ ID NO: 4635
  Cyclic GFR-binding peptide
  MOD_RES (31)..(32): Xaa is C or S

SEQ ID NO: 42468 - protein, 40 aa, Artificial Sequence; identical to SEQ ID NO: 4636
  Cyclic GFR-binding peptide
  MOD_RES (2)..(4)..(37)..(38): Xaa is C or S

SEQ ID NO: 42469 - protein, 32 aa, Artificial Sequence; identical to SEQ ID NO: 4637
  Cyclic GFR-binding peptide
  MOD_RES (32)..(32): Xaa is C or S

SEQ ID NO: 42470 - protein, 28 aa, Artificial Sequence
  Cyclic GFR-binding peptide
  MOD_RES (28)..(28): Xaa is C or S
MDRYKKLVVKENEDFYLMSIANLETPVX

SEQ ID NO: 42471 - protein, 36 aa, Artificial Sequence; identical to SEQ ID NO: 4638
  Cyclic GFR-binding peptide
  MOD_RES (32)..(32): Xaa is C or S

SEQ ID NO: 42472 - protein, 30 aa, Artificial Sequence
  Cyclic GFR-binding peptide
  MOD_RES (28)..(29): Xaa is C or S
MNYHYKLIVNSSDDKYLVSIPSLQTPAXXP

SEQ ID NO: 42473 - protein, 30 aa, Artificial Sequence
  Cyclic GFR-binding peptide
  MOD_RES (1)..(1): Xaa is C or S
XSKVVMQYNKLVKPTRGVLYLISIASLDQP

SEQ ID NO: 42474 - protein, 28 aa, Artificial Sequence
  Cyclic GFR-binding peptide
RVIMRHKRLVKPKRGVYYLISTASLAQP

SEQ ID NO: 42475 - protein, 27 aa, Artificial Sequence
  Cyclic GFR-binding peptide
VVMERYKKLVVKDYEDFYLMSIANLET

SEQ ID NO: 42476 - protein, 37 aa, Artificial Sequence; identical to SEQ ID NO: 4641
  Cyclic GFR-binding peptide
  MOD_RES (31)..(32): Xaa is C or S

SEQ ID NO: 42477 - protein, 32 aa, Artificial Sequence
  Cyclic GFR-binding peptide
  MOD_RES (1)..(1): Xaa is C or S
XALHDELTYHYKLFIPKKRVIEKYLVSIPSLQ

SEQ ID NO: 42478 - protein, 35 aa, Artificial Sequence; identical to SEQ ID NO: 4642
  Cyclic GFR-binding peptide
  MOD_RES (1)..(3)..(35): Xaa is C or S

SEQ ID NO: 42479 - protein, 29 aa, Artificial Sequence
  Cyclic GFR-binding peptide
  MOD_RES (26)..(27): Xaa is C or S
RHKRLVKPKRGVYYLISTASLAQPVXXPA

SEQ ID NO: 42480 - protein, 37 aa, Artificial Sequence; identical to SEQ ID NO: 4643
  Cyclic GFR-binding peptide
  MOD_RES (35)..(35): Xaa is C or S

SEQ ID NO: 42481 - protein, 38 aa, Artificial Sequence; identical to SEQ ID NO: 4644
  Cyclic GFR-binding peptide
  MOD_RES (2)..(4)..(37)..(38): Xaa is C or S

SEQ ID NO: 42482 - protein, 42 aa, Artificial Sequence; identical to SEQ ID NO: 4645
  Cyclic GFR-binding peptide
  MOD_RES (1)..(3)..(36)..(37): Xaa is C or S

SEQ ID NO: 42483 - protein, 34 aa, Artificial Sequence; identical to SEQ ID NO: 4646
  Cyclic GFR-binding peptide
  MOD_RES (32)..(33): Xaa is C or S

SEQ ID NO: 42484 - protein, 27 aa, Artificial Sequence
  Cyclic GFR-binding peptide
HDELTRYKKLFIPKKRVIEFYLVSIAN

SEQ ID NO: 42485 - protein, 30 aa, Artificial Sequence
  Cyclic GFR-binding peptide
  MOD_RES (29)..(30): Xaa is C or S
VMERHKRLVVKDYEDYYLMSTASLETPVXX

SEQ ID NO: 42486 - protein, 23 aa, Artificial Sequence
  Cyclic GFR-binding peptide
VMNQYNKLIVNSSDDLYLVSIAS

SEQ ID NO: 42487 - protein, 37 aa, Artificial Sequence; identical to SEQ ID NO: 4648
  Cyclic GFR-binding peptide
  MOD_RES (32)..(33): Xaa is C or S

SEQ ID NO: 42488 - protein, 36 aa, Artificial Sequence
  Cyclic GFR-binding peptide
  MOD_RES (2)..(4): Xaa is C or S
EXKXALHDELTRHKRLFIPKKRVIEYYLVSTASLQV

SEQ ID NO: 42489 - protein, 43 aa, Artificial Sequence; identical to SEQ ID NO: 4649
  Cyclic GFR-binding peptide
  MOD_RES (1)..(3)..(40): Xaa is C or S

SEQ ID NO: 42490 - protein, 33 aa, Artificial Sequence
  Cyclic GFR-binding peptide
  MOD_RES (1)..(3): Xaa is C or S
XGXAKVVMNYHYKLIVNNSSDKYLVSIPSLKTP

SEQ ID NO: 42491 - protein, 23 aa, Artificial Sequence
  Cyclic GFR-binding peptide
YHYKLVVKDYEDKYLMSIPSLET

SEQ ID NO: 42492 - protein, 31 aa, Artificial Sequence
  Cyclic GFR-binding peptide
LTQYNKLFIPKKRVIELYLVSIASLQVQTPR

SEQ ID NO: 42493 - protein, 31 aa, Artificial Sequence
  Cyclic GFR-binding peptide
  MOD_RES (1)..(3): Xaa is C or S
XGXAKVVMNRYKKLIVNNSSDFYLVSIANLK

SEQ ID NO: 42494 - protein, 31 aa, Artificial Sequence
  Cyclic GFR-binding peptide
  MOD_RES (2)..(2): Xaa is C or S
GXAKVVMNYHYKLIVNNSSDKYLVSIPSLKT

SEQ ID NO: 42495 - protein, 30 aa, Artificial Sequence
  Cyclic GFR-binding peptide
  MOD_RES (2)..(4): Xaa is C or S
HXGXAKVVMNRYKKLIVNNSSDFYLVSIAN

SEQ ID NO: 42496 - protein, 32 aa, Artificial Sequence
  Cyclic GFR-binding peptide
  MOD_RES (30)..(31): Xaa is C or S
VVMDRHKRLVVKENEDYYLMSTASLETPVXXA

SEQ ID NO: 42497 - protein, 32 aa, Artificial Sequence
  Cyclic GFR-binding peptide
  MOD_RES (2)..(2): Xaa is C or S
GXGEVVMDYHYKLVVKENEDKYLMSIPSLETP

SEQ ID NO: 42498 - protein, 42 aa, Artificial Sequence; identical to SEQ ID NO: 4652
  Cyclic GFR-binding peptide
  MOD_RES (2)..(4)..(36)..(37): Xaa is C or S

SEQ ID NO: 42499 - protein, 39 aa, Artificial Sequence; identical to SEQ ID NO: 4653
  Cyclic GFR-binding peptide
  MOD_RES (2)..(39): Xaa is C or S

SEQ ID NO: 42500 - protein, 31 aa, Artificial Sequence
  Cyclic GFR-binding peptide
  MOD_RES (29)..(30): Xaa is C or S
VMDYHYKLVVKENEDKYLMSIPSLETPVXXA

SEQ ID NO: 42501 - protein, 40 aa, Artificial Sequence; identical to SEQ ID NO: 4656
  Cyclic GFR-binding peptide
  MOD_RES (2)..(34)..(35): Xaa is C or S

SEQ ID NO: 42502 - protein, 30 aa, Artificial Sequence
  Cyclic GFR-binding peptide
  MOD_RES (29)..(29): Xaa is C or S
VMNQYNKLIVNSSDDLYLVSIASLKTPAXT

SEQ ID NO: 42503 - protein, 31 aa, Artificial Sequence
  Cyclic GFR-binding peptide
LHDELTRYKKLFIPKKRVIEFYLVSIANLQV

SEQ ID NO: 42504 - protein, 30 aa, Artificial Sequence
  Cyclic GFR-binding peptide
ELTRHKRLFIPKKRVIEYYLVSTASLQVQT

SEQ ID NO: 42505 - protein, 35 aa, Artificial Sequence; identical to SEQ ID NO: 4658
  Cyclic GFR-binding peptide
  MOD_RES (1)..(3)..(35): Xaa is C or S

SEQ ID NO: 42506 - protein, 33 aa, Artificial Sequence
  Cyclic GFR-binding peptide
  MOD_RES (2)..(4): Xaa is C or S
SXKXSKVIMRYKKLIKPTKGIFYLISIANLDQS

SEQ ID NO: 42507 - protein, 29 aa, Artificial Sequence
  Cyclic GFR-binding peptide
  MOD_RES (2)..(2): Xaa is C or S
GXEAVSMGEQYNKLTPVGMDDLYLVSIAS

SEQ ID NO: 42508 - protein, 37 aa, Artificial Sequence
  Cyclic GFR-binding peptide
  MOD_RES (33)..(33): Xaa is C or S
ELTRYKKLFIPKKRVIEFYLVSIANLQVQTPRXQVNR

SEQ ID NO: 42509 - protein, 22 aa, Artificial Sequence
  Cyclic GFR-binding peptide
ERHKRLTPVGMDDYYLVSTASL

SEQ ID NO: 42510 - protein, 26 aa, Artificial Sequence
  Cyclic GFR-binding peptide
MRYKKLIKPTKGIFYLISIANLDQSV

SEQ ID NO: 42511 - protein, 29 aa, Artificial Sequence
  Cyclic GFR-binding peptide
VVMNYHYKLIVNSSDDKYLVSIPSLQTPA

SEQ ID NO: 42512 - protein, 26 aa, Artificial Sequence
  Cyclic GFR-binding peptide
KVIMRHKRLIKPTKGIYYLISTASLD

SEQ ID NO: 42513 - protein, 32 aa, Artificial Sequence
  Cyclic GFR-binding peptide
  MOD_RES (30)..(31): Xaa is C or S
KVIMRYKKLIKPTKGIFYLISIANLDQSVXXP

SEQ ID NO: 42514 - protein, 36 aa, Artificial Sequence; identical to SEQ ID NO: 4662
  Cyclic GFR-binding peptide
  MOD_RES (31)..(32): Xaa is C or S

SEQ ID NO: 42515 - protein, 40 aa, Artificial Sequence; identical to SEQ ID NO: 4663
  Cyclic GFR-binding peptide
  MOD_RES (1)..(34)..(35): Xaa is C or S

SEQ ID NO: 42516 - protein, 20 aa, Artificial Sequence
  Cyclic GFR-binding peptide
YHYKLIVNNSSDKYLVSIPS

SEQ ID NO: 42517 - protein, 24 aa, Artificial Sequence
  Cyclic GFR-binding peptide
QYNKLIVNSSDDLYLVSIASLKTP

SEQ ID NO: 42518 - protein, 23 aa, Artificial Sequence
  Cyclic GFR-binding peptide
IMYHYKLIKPTKGIKYLISIPSL

SEQ ID NO: 42519 - protein, 33 aa, Artificial Sequence
  Cyclic GFR-binding peptide
  MOD_RES (30)..(31): Xaa is C or S
VVMNQYNKLIVNNSSDLYLVSIASLKTPAXXAK

SEQ ID NO: 42520 - protein, 24 aa, Artificial Sequence
  Cyclic GFR-binding peptide
VMNYHYKLIVNSSDDKYLVSIPSL

SEQ ID NO: 42521 - protein, 36 aa, Artificial Sequence; identical to SEQ ID NO: 4667
  Cyclic GFR-binding peptide
  MOD_RES (31)..(32): Xaa is C or S

SEQ ID NO: 42522 - protein, 28 aa, Artificial Sequence
  Cyclic GFR-binding peptide
EVVMEYHYKLVVKDYEDKYLMSIPSLET

SEQ ID NO: 42523 - protein, 32 aa, Artificial Sequence
  Cyclic GFR-binding peptide
ELTRHKRLFIPKKRVIEYYLVSTASLQVQTPR

SEQ ID NO: 42524 - protein, 20 aa, Artificial Sequence
  Cyclic GFR-binding peptide
RHKRLTPVGMDDYYLVSTAS

SEQ ID NO: 42525 - protein, 42 aa, Artificial Sequence; identical to SEQ ID NO: 4668
  Cyclic GFR-binding peptide
  MOD_RES (2)..(4)..(36)..(37): Xaa is C or S

SEQ ID NO: 42526 - protein, 36 aa, Artificial Sequence; identical to SEQ ID NO: 4669
  Cyclic GFR-binding peptide
  MOD_RES (1)..(33)..(34): Xaa is C or S

SEQ ID NO: 42527 - protein, 29 aa, Artificial Sequence
  Cyclic GFR-binding peptide
ALHDELTQYNKLFIPKKRVIELYLVSIAS

SEQ ID NO: 42528 - protein, 28 aa, Artificial Sequence
  Cyclic GFR-binding peptide
  MOD_RES (1)..(1): Xaa is C or S
XSKVIMYHYKLIKPTKGIKYLISIPSLD

SEQ ID NO: 42529 - protein, 28 aa, Artificial Sequence
  Cyclic GFR-binding peptide
RVVMNYHYKLIVNSSDDKYLVSIPSLQT

SEQ ID NO: 42530 - protein, 28 aa, Artificial Sequence
  Cyclic GFR-binding peptide
VMNRYKKLIVNNSSDFYLVSIANLKTPA

SEQ ID NO: 42531 - protein, 35 aa, Artificial Sequence; identical to SEQ ID NO: 4672
  Cyclic GFR-binding peptide
  MOD_RES (31)..(31): Xaa is C or S

SEQ ID NO: 42532 - protein, 35 aa, Artificial Sequence; identical to SEQ ID NO: 4674
  Cyclic GFR-binding peptide
  MOD_RES (1)..(3)..(34)..(35): Xaa is C or S

SEQ ID NO: 42533 - protein, 31 aa, Artificial Sequence; identical to SEQ ID NO: 4673
  Cyclic GFR-binding peptide
  MOD_RES (31)..(31): Xaa is C or S

SEQ ID NO: 42534 - protein, 28 aa, Artificial Sequence
  Cyclic GFR-binding peptide
  MOD_RES (26)..(27): Xaa is C or S
YHYKLVVKENEDKYLMSIPSLETPVXXA

SEQ ID NO: 42535 - protein, 28 aa, Artificial Sequence
  Cyclic GFR-binding peptide
KVVMNRYKKLIVNNSSDFYLVSIANLKT

SEQ ID NO: 42536 - protein, 37 aa, Artificial Sequence; identical to SEQ ID NO: 4675
  Cyclic GFR-binding peptide
  MOD_RES (2)..(4)..(36)..(37): Xaa is C or S

SEQ ID NO: 42537 - protein, 25 aa, Artificial Sequence
  Cyclic GFR-binding peptide
VMRYKKLVKPTRGVFYLISIANLDQ

SEQ ID NO: 42538 - protein, 36 aa, Artificial Sequence; identical to SEQ ID NO: 4676
  Cyclic GFR-binding peptide
  MOD_RES (2)..(34)..(35): Xaa is C or S

SEQ ID NO: 42539 - protein, 30 aa, Artificial Sequence
  Cyclic GFR-binding peptide
VSMGEQYNKLTPVGMDDLYLVSIASLKTPV

SEQ ID NO: 42540 - protein, 31 aa, Artificial Sequence
  Cyclic GFR-binding peptide
  MOD_RES (1)..(3): Xaa is C or S
XKXSKVIMYHYKLIKPTKGIKYLISIPSLDQ

SEQ ID NO: 42541 - protein, 27 aa, Artificial Sequence
  Cyclic GFR-binding peptide
  MOD_RES (26)..(27): Xaa is C or S
RHKRLVKPKRGVYYLISTASLAQPVXX

SEQ ID NO: 42542 - protein, 29 aa, Artificial Sequence
  Cyclic GFR-binding peptide
  MOD_RES (2)..(2): Xaa is C or S
KXSKVVMYHYKLVKPTRGVKYLISIPSLD

SEQ ID NO: 42543 - protein, 38 aa, Artificial Sequence; identical to SEQ ID NO: 4680
  Cyclic GFR-binding peptide
  MOD_RES (32)..(33): Xaa is C or S

SEQ ID NO: 42544 - protein, 32 aa, Artificial Sequence; identical to SEQ ID NO: 4681
  Cyclic GFR-binding peptide
  MOD_RES (1)..(1): Xaa is C or S

SEQ ID NO: 42545 - protein, 32 aa, Artificial Sequence; identical to SEQ ID NO: 1853
  Cyclic GFR-binding peptide

SEQ ID NO: 42546 - protein, 37 aa, Artificial Sequence; identical to SEQ ID NO: 4683
  Cyclic GFR-binding peptide
  MOD_RES (31)..(32): Xaa is C or S

SEQ ID NO: 42547 - protein, 27 aa, Artificial Sequence
  Cyclic GFR-binding peptide
EAVSMGERHKRLTPVGMDDYYLVSTAS

SEQ ID NO: 42548 - protein, 35 aa, Artificial Sequence; identical to SEQ ID NO: 4685
  Cyclic GFR-binding peptide
  MOD_RES (1)..(3)..(35): Xaa is C or S

SEQ ID NO: 42549 - protein, 29 aa, Artificial Sequence
  Cyclic GFR-binding peptide
  MOD_RES (26)..(27): Xaa is C or S
QYNKLVKPTRGVLYLISIASLDQPVXXPS

SEQ ID NO: 42550 - protein, 24 aa, Artificial Sequence
  Cyclic GFR-binding peptide
MRYKKLVKPKRGVFYLISIANLAQ

SEQ ID NO: 42551 - protein, 34 aa, Artificial Sequence
  Cyclic GFR-binding peptide
  MOD_RES (28)..(29): Xaa is C or S
MNQYNKLIVNSSDDLYLVSIASLQTPAXXPKPVT

SEQ ID NO: 42552 - protein, 39 aa, Artificial Sequence; identical to SEQ ID NO: 4688
  Cyclic GFR-binding peptide
  MOD_RES (2)..(4)..(36): Xaa is C or S

SEQ ID NO: 42553 - protein, 33 aa, Artificial Sequence
  Cyclic GFR-binding peptide
  MOD_RES (28)..(28): Xaa is C or S
MNQYNKLIVNSSDDLYLVSIASLKTPAXTPKTV

SEQ ID NO: 42554 - protein, 20 aa, Artificial Sequence
  Cyclic GFR-binding peptide
YHYKLVVKDYEDKYLMSIPS

SEQ ID NO: 42555 - protein, 38 aa, Artificial Sequence; identical to SEQ ID NO: 4690
  Cyclic GFR-binding peptide
  MOD_RES (2)..(4)..(36)..(37): Xaa is C or S

SEQ ID NO: 42556 - protein, 23 aa, Artificial Sequence
  Cyclic GFR-binding peptide
VMNYHYKLIVNNSSDKYLVSIPS

SEQ ID NO: 42557 - protein, 37 aa, Artificial Sequence; identical to SEQ ID NO: 4691
  Cyclic GFR-binding peptide
  MOD_RES (36)..(36): Xaa is C or S

SEQ ID NO: 42558 - protein, 38 aa, Artificial Sequence; identical to SEQ ID NO: 4692
  Cyclic GFR-binding peptide
  MOD_RES (36)..(36): Xaa is C or S

SEQ ID NO: 42559 - protein, 33 aa, Artificial Sequence
  Cyclic GFR-binding peptide
  MOD_RES (28)..(29): Xaa is C or S
IMRHKRLVKPKRGVYYLISTASLAQPVXXPAAS

SEQ ID NO: 42560 - protein, 26 aa, Artificial Sequence
  Cyclic GFR-binding peptide
  MOD_RES (26)..(26): Xaa is C or S
RYKKLTPVGMDDFYLVSIANLKTPVX

SEQ ID NO: 42561 - protein, 41 aa, Artificial Sequence; identical to SEQ ID NO: 4694
  Cyclic GFR-binding peptide
  MOD_RES (2)..(35)..(36): Xaa is C or S

SEQ ID NO: 42562 - protein, 36 aa, Artificial Sequence; identical to SEQ ID NO: 4696
  Cyclic GFR-binding peptide
  MOD_RES (1)..(32)..(33): Xaa is C or S

SEQ ID NO: 42563 - protein, 27 aa, Artificial Sequence
  Cyclic GFR-binding peptide
RVVMNRHKRLIVNSSDDYYLVSTASLK

SEQ ID NO: 42564 - protein, 23 aa, Artificial Sequence
  Cyclic GFR-binding peptide
MRYKKLVKPKRGVFYLISIANLA

SEQ ID NO: 42565 - protein, 29 aa, Artificial Sequence
  Cyclic GFR-binding peptide
VVMNRHKRLIVNSSDDYYLVSTASLQTPA

SEQ ID NO: 42566 - protein, 31 aa, Artificial Sequence; identical to SEQ ID NO: 4697
  Cyclic GFR-binding peptide

SEQ ID NO: 42567 - protein, 30 aa, Artificial Sequence
  Cyclic GFR-binding peptide
  MOD_RES (26)..(27): Xaa is C or S
YHYKLIVNSSDDKYLVSIPSLQTPAXXPKP

SEQ ID NO: 42568 - protein, 32 aa, Artificial Sequence
  Cyclic GFR-binding peptide
  MOD_RES (28)..(29): Xaa is C or S
MNQYNKLIVNNSSDLYLVSIASLKTPAXXAKP

SEQ ID NO: 42569 - protein, 27 aa, Artificial Sequence
  Cyclic GFR-binding peptide
VVMNRHKRLIVNSSDDYYLVSTASLKT

SEQ ID NO: 42570 - protein, 30 aa, Artificial Sequence
  Cyclic GFR-binding peptide
  MOD_RES (2)..(4): Xaa is C or S
HXGXARVVMNQYNKLIVNSSDDLYLVSIAS

SEQ ID NO: 42571 - protein, 34 aa, Artificial Sequence
  Cyclic GFR-binding peptide
  MOD_RES (30)..(31): Xaa is C or S
KVIMQYNKLIKPTKGILYLISIASLDQSVXXPSA

SEQ ID NO: 42572 - protein, 37 aa, Artificial Sequence; identical to SEQ ID NO: 4699
  Cyclic GFR-binding peptide
  MOD_RES (2)..(4)..(36)..(37): Xaa is C or S

SEQ ID NO: 42573 - protein, 33 aa, Artificial Sequence
  Cyclic GFR-binding peptide
  MOD_RES (29)..(30): Xaa is C or S
MGERYKKLTPVGMDDFYLVSIANLKTPVXXAKG

SEQ ID NO: 42574 - protein, 26 aa, Artificial Sequence
  Cyclic GFR-binding peptide
MGERYKKLTPVGMDDFYLVSIANLKT

SEQ ID NO: 42575 - protein, 33 aa, Artificial Sequence
  Cyclic GFR-binding peptide
  MOD_RES (30)..(31): Xaa is C or S
VVMERYKKLVVKDYEDFYLMSIANLETPVXXAK

SEQ ID NO: 42576 - protein, 35 aa, Artificial Sequence; identical to SEQ ID NO: 4702
  Cyclic GFR-binding peptide
  MOD_RES (31)..(31): Xaa is C or S

SEQ ID NO: 42577 - protein, 30 aa, Artificial Sequence; identical to SEQ ID NO: 4703
  Cyclic GFR-binding peptide

SEQ ID NO: 42578 - protein, 28 aa, Artificial Sequence
  Cyclic GFR-binding peptide
RVVMNQYNKLIVNSSDDLYLVSIASLQT

SEQ ID NO: 42579 - protein, 24 aa, Artificial Sequence
  Cyclic GFR-binding peptide
VMNRHKRLIVNSSDDYYLVSTASL

SEQ ID NO: 42580 - protein, 35 aa, Artificial Sequence; identical to SEQ ID NO: 4704
  Cyclic GFR-binding peptide
  MOD_RES (1)..(32)..(33): Xaa is C or S

SEQ ID NO: 42581 - protein, 32 aa, Artificial Sequence
  Cyclic GFR-binding peptide
  MOD_RES (26)..(27): Xaa is C or S
RHKRLTPVGMDDYYLVSTASLKTPVXXAKGVK

SEQ ID NO: 42582 - protein, 34 aa, Artificial Sequence
  Cyclic GFR-binding peptide
  MOD_RES (2)..(34): Xaa is C or S
GXARVVMNYHYKLIVNSSDDKYLVSIPSLQTPAX

SEQ ID NO: 42583 - protein, 31 aa, Artificial Sequence; identical to SEQ ID NO: 4707
  Cyclic GFR-binding peptide
  MOD_RES (1)..(1): Xaa is C or S

SEQ ID NO: 42584 - protein, 35 aa, Artificial Sequence; identical to SEQ ID NO: 4708
  Cyclic GFR-binding peptide
  MOD_RES (1)..(3): Xaa is C or S

SEQ ID NO: 42585 - protein, 26 aa, Artificial Sequence
  Cyclic GFR-binding peptide
VMNQYNKLIVNNSSDLYLVSIASLKT

SEQ ID NO: 42586 - protein, 36 aa, Artificial Sequence; identical to SEQ ID NO: 4709
  Cyclic GFR-binding peptide
  MOD_RES (31)..(32): Xaa is C or S

SEQ ID NO: 42587 - protein, 30 aa, Artificial Sequence
  Cyclic GFR-binding peptide
  MOD_RES (29)..(30): Xaa is C or S
VMERYKKLVVKDYEDFYLMSIANLETPVXX

SEQ ID NO: 42588 - protein, 37 aa, Artificial Sequence; identical to SEQ ID NO: 4710
  Cyclic GFR-binding peptide
  MOD_RES (31)..(31): Xaa is C or S

SEQ ID NO: 42589 - protein, 32 aa, Artificial Sequence; identical to SEQ ID NO: 4711
  Cyclic GFR-binding peptide
  MOD_RES (31)..(32): Xaa is C or S

SEQ ID NO: 42590 - protein, 36 aa, Artificial Sequence; identical to SEQ ID NO: 4712
  Cyclic GFR-binding peptide
  MOD_RES (1)..(3)..(36): Xaa is C or S

SEQ ID NO: 42591 - protein, 28 aa, Artificial Sequence
  Cyclic GFR-binding peptide
  MOD_RES (27)..(28): Xaa is C or S
MQYNKLVKPTRGVLYLISIASLDQPVXX

SEQ ID NO: 42592 - protein, 28 aa, Artificial Sequence
  Cyclic GFR-binding peptide
HDELTRYKKLFIPKKRVIEFYLVSIANL

SEQ ID NO: 42593 - protein, 26 aa, Artificial Sequence
  Cyclic GFR-binding peptide
SRVVMNYHYKLIVNSSDDKYLVSIPS

SEQ ID NO: 42594 - protein, 33 aa, Artificial Sequence; identical to SEQ ID NO: 4713
  Cyclic GFR-binding peptide
  MOD_RES (1)..(3): Xaa is C or S

SEQ ID NO: 42595 - protein, 22 aa, Artificial Sequence
  Cyclic GFR-binding peptide
QYNKLIVNSSDDLYLVSIASLQ

SEQ ID NO: 42596 - protein, 41 aa, Artificial Sequence; identical to SEQ ID NO: 4714
  Cyclic GFR-binding peptide
  MOD_RES (2)..(4)..(36)..(37): Xaa is C or S

SEQ ID NO: 42597 - protein, 31 aa, Artificial Sequence
  Cyclic GFR-binding peptide
  MOD_RES (30)..(31): Xaa is C or S
VVMNYHYKLIVNSSDDKYLVSIPSLKTPAXX

SEQ ID NO: 42598 - protein, 26 aa, Artificial Sequence
  Cyclic GFR-binding peptide
SKVVMYHYKLVKPTRGVKYLISIPSL

SEQ ID NO: 42599 - protein, 26 aa, Artificial Sequence
  Cyclic GFR-binding peptide
ARVVMNYHYKLIVNSSDDKYLVSIPS

SEQ ID NO: 42600 - protein, 22 aa, Artificial Sequence
  Cyclic GFR-binding peptide
MNQYNKLIVNSSDDLYLVSIAS

SEQ ID NO: 42601 - protein, 27 aa, Artificial Sequence
  Cyclic GFR-binding peptide
  MOD_RES (26)..(27): Xaa is C or S
QYNKLIVNSSDDLYLVSIASLQTPAXX

SEQ ID NO: 42602 - protein, 31 aa, Artificial Sequence
  Cyclic GFR-binding peptide
  MOD_RES (26)..(27): Xaa is C or S
YHYKLIVNSSDDKYLVSIPSLQTPAXXPKPV

SEQ ID NO: 42603 - protein, 37 aa, Artificial Sequence; identical to SEQ ID NO: 4719
  Cyclic GFR-binding peptide
  MOD_RES (2)..(34)..(35): Xaa is C or S

SEQ ID NO: 42604 - protein, 34 aa, Artificial Sequence; identical to SEQ ID NO: 4721
  Cyclic GFR-binding peptide
  MOD_RES (33)..(34): Xaa is C or S

SEQ ID NO: 42605 - protein, 28 aa, Artificial Sequence
  Cyclic GFR-binding peptide
  MOD_RES (26)..(27): Xaa is C or S
YHYKLIKPTKGIKYLISIPSLDQSVXXP

SEQ ID NO: 42606 - protein, 20 aa, Artificial Sequence
  Cyclic GFR-binding peptide
YHYKLTPVGMDDKYLVSIPS

SEQ ID NO: 42607 - protein, 40 aa, Artificial Sequence; identical to SEQ ID NO: 4723
  Cyclic GFR-binding peptide
  MOD_RES (2)..(4)..(36): Xaa is C or S

SEQ ID NO: 42608 - protein, 24 aa, Artificial Sequence
  Cyclic GFR-binding peptide
TYHYKLFIPKKRVIEKYLVSIPSL

SEQ ID NO: 42609 - protein, 30 aa, Artificial Sequence
  Cyclic GFR-binding peptide
  MOD_RES (26)..(27): Xaa is C or S
RYKKLVKPKRGVFYLISIANLAQPVXXPAA

SEQ ID NO: 42610 - protein, 37 aa, Artificial Sequence; identical to SEQ ID NO: 4725
  Cyclic GFR-binding peptide
  MOD_RES (32)..(33): Xaa is C or S

SEQ ID NO: 42611 - protein, 30 aa, Artificial Sequence
  Cyclic GFR-binding peptide
  MOD_RES (30)..(30): Xaa is C or S
KVIMRYKKLIKPTKGIFYLISIANLDQSVX

SEQ ID NO: 42612 - protein, 33 aa, Artificial Sequence
  Cyclic GFR-binding peptide
  MOD_RES (30)..(31): Xaa is C or S
RVIMQYNKLVKPKRGVLYLISIASLAQPVXXPA

SEQ ID NO: 42613 - protein, 32 aa, Artificial Sequence
  Cyclic GFR-binding peptide
  MOD_RES (2)..(2): Xaa is C or S
GXSRVVMNRHKRLIVNSSDDYYLVSTASLKTP

SEQ ID NO: 42614 - protein, 33 aa, Artificial Sequence
  Cyclic GFR-binding peptide
  MOD_RES (30)..(31): Xaa is C or S
KVIMRHKRLIKPTKGIYYLISTASLDQSVXXPS

SEQ ID NO: 42615 - protein, 25 aa, Artificial Sequence
  Cyclic GFR-binding peptide
TYHYKLFIPKKRVIEKYLVSIPSLQ

SEQ ID NO: 42616 - protein, 27 aa, Artificial Sequence
  Cyclic GFR-binding peptide
  MOD_RES (26)..(27): Xaa is C or S
YHYKLVVKENEDKYLMSIPSLETPVXX

SEQ ID NO: 42617 - protein, 38 aa, Artificial Sequence; identical to SEQ ID NO: 4728
  Cyclic GFR-binding peptide
  MOD_RES (2)..(34)..(35): Xaa is C or S

SEQ ID NO: 42618 - protein, 32 aa, Artificial Sequence; identical to SEQ ID NO: 4729
  Cyclic GFR-binding peptide
  MOD_RES (1)..(1): Xaa is C or S

SEQ ID NO: 42619 - protein, 31 aa, Artificial Sequence
  Cyclic GFR-binding peptide
  MOD_RES (30)..(31): Xaa is C or S
VVMNRHKRLIVNSSDDYYLVSTASLKTPAXX

SEQ ID NO: 42620 - protein, 24 aa, Artificial Sequence
  Cyclic GFR-binding peptide
IMRYKKLIKPTKGIFYLISIANLD

SEQ ID NO: 42621 - protein, 28 aa, Artificial Sequence
  Cyclic GFR-binding peptide
  MOD_RES (26)..(27): Xaa is C or S
QYNKLTPVGMDDLYLVSIASLKTPVXXA

SEQ ID NO: 42622 - protein, 27 aa, Artificial Sequence
  Cyclic GFR-binding peptide
VVMNYHYKLIVNSSDDKYLVSIPSLKT

SEQ ID NO: 42623 - protein, 37 aa, Artificial Sequence; identical to SEQ ID NO: 4731
  Cyclic GFR-binding peptide
  MOD_RES (31)..(32): Xaa is C or S

SEQ ID NO: 42624 - protein, 32 aa, Artificial Sequence; identical to SEQ ID NO: 4732
  Cyclic GFR-binding peptide
  MOD_RES (1)..(32): Xaa is C or S

SEQ ID NO: 42625 - protein, 29 aa, Artificial Sequence
  Cyclic GFR-binding peptide
  MOD_RES (29)..(29): Xaa is C or S
VMNRYKKLIVNNSSDFYLVSIANLKTPAX

SEQ ID NO: 42626 - protein, 29 aa, Artificial Sequence
  Cyclic GFR-binding peptide
  MOD_RES (27)..(28): Xaa is C or S
MRYKKLVKPTRGVFYLISIANLDQPVXXP

SEQ ID NO: 42627 - protein, 34 aa, Artificial Sequence
  Cyclic GFR-binding peptide
  MOD_RES (28)..(29): Xaa is C or S
MNYHYKLIVNSSDDKYLVSIPSLKTPAXXPKPVY

SEQ ID NO: 42628 - protein, 30 aa, Artificial Sequence
  Cyclic GFR-binding peptide
  MOD_RES (30)..(30): Xaa is C or S
VVMNYHYKLIVNSSDDKYLVSIPSLQTPAX

SEQ ID NO: 42629 - protein, 42 aa, Artificial Sequence; identical to SEQ ID NO: 4733
  Cyclic GFR-binding peptide
  MOD_RES (2)..(39): Xaa is C or S

SEQ ID NO: 42630 - protein, 34 aa, Artificial Sequence
  Cyclic GFR-binding peptide
  MOD_RES (28)..(29): Xaa is C or S
IMRYKKLIKPTKGIFYLISIANLDQSVXXPSASA

SEQ ID NO: 42631 - protein, 39 aa, Artificial Sequence; identical to SEQ ID NO: 4734
  Cyclic GFR-binding peptide
  MOD_RES (1)..(33)..(34): Xaa is C or S

SEQ ID NO: 42632 - protein, 36 aa, Artificial Sequence; identical to SEQ ID NO: 4735
  Cyclic GFR-binding peptide
  MOD_RES (2)..(4)..(35)..(36): Xaa is C or S

SEQ ID NO: 42633 - protein, 30 aa, Artificial Sequence
  Cyclic GFR-binding peptide
  MOD_RES (30)..(30): Xaa is C or S
VVMNRHKRLIVNSSDDYYLVSTASLQTPAX

SEQ ID NO: 42634 - protein, 29 aa, Artificial Sequence
  Cyclic GFR-binding peptide
  MOD_RES (2)..(2): Xaa is C or S
KXSRVIMRHKRLVKPKRGVYYLISTASLA

SEQ ID NO: 42635 - protein, 21 aa, Artificial Sequence
  Cyclic GFR-binding peptide
MRYKKLIKPTKGIFYLISIAN

SEQ ID NO: 42636 - protein, 33 aa, Artificial Sequence
  Cyclic GFR-binding peptide
  MOD_RES (30)..(31): Xaa is C or S
KVIMYHYKLIKPTKGIKYLISIPSLDQSVXXPS

SEQ ID NO: 42637 - protein, 30 aa, Artificial Sequence
  Cyclic GFR-binding peptide
AVSMGERYKKLTPVGMDDFYLVSIANLKTP

SEQ ID NO: 42638 - protein, 31 aa, Artificial Sequence; identical to SEQ ID NO: 4739
  Cyclic GFR-binding peptide
  MOD_RES (31)..(31): Xaa is C or S

SEQ ID NO: 42639 - protein, 38 aa, Artificial Sequence; identical to SEQ ID NO: 4740
  Cyclic GFR-binding peptide
  MOD_RES (32)..(33): Xaa is C or S

SEQ ID NO: 42640 - protein, 31 aa, Artificial Sequence
  Cyclic GFR-binding peptide
  MOD_RES (28)..(29): Xaa is C or S
MNQYNKLIVNSSDDLYLVSIASLKTPAXXPK

SEQ ID NO: 42641 - protein, 29 aa, Artificial Sequence
  Cyclic GFR-binding peptide
  MOD_RES (2)..(2): Xaa is C or S
GXARVVMNQYNKLIVNSSDDLYLVSIASL

SEQ ID NO: 42642 - protein, 36 aa, Artificial Sequence; identical to SEQ ID NO: 4741
  Cyclic GFR-binding peptide
  MOD_RES (2)..(34)..(35): Xaa is C or S

SEQ ID NO: 42643 - protein, 28 aa, Artificial Sequence
  Cyclic GFR-binding peptide
  MOD_RES (1)..(1): Xaa is C or S
XSKVVMQYNKLVKPTRGVLYLISIASLD

SEQ ID NO: 42644 - protein, 36 aa, Artificial Sequence; identical to SEQ ID NO: 4742
  Cyclic GFR-binding peptide
  MOD_RES (1)..(33)..(34): Xaa is C or S

SEQ ID NO: 42645 - protein, 28 aa, Artificial Sequence
  Cyclic GFR-binding peptide
  MOD_RES (2)..(2): Xaa is C or S
GXGEVVMDRHKRLVVKENEDYYLMSTAS

SEQ ID NO: 42646 - protein, 35 aa, Artificial Sequence; identical to SEQ ID NO: 4743
  Cyclic GFR-binding peptide
  MOD_RES (1)..(3)..(35): Xaa is C or S

SEQ ID NO: 42647 - protein, 22 aa, Artificial Sequence
  Cyclic GFR-binding peptide
QYNKLIKPTKGILYLISIASLD

SEQ ID NO: 42648 - protein, 35 aa, Artificial Sequence; identical to SEQ ID NO: 4745
  Cyclic GFR-binding peptide
  MOD_RES (2)..(4): Xaa is C or S

SEQ ID NO: 42649 - protein, 27 aa, Artificial Sequence
  Cyclic GFR-binding peptide
  MOD_RES (1)..(1): Xaa is C or S
XSRVIMRYKKLVKPKRGVFYLISIANL

SEQ ID NO: 42650 - protein, 24 aa, Artificial Sequence
  Cyclic GFR-binding peptide
VIMYHYKLVKPKRGVKYLISIPSL

SEQ ID NO: 42651 - protein, 41 aa, Artificial Sequence; identical to SEQ ID NO: 4746
  Cyclic GFR-binding peptide
  MOD_RES (2)..(4)..(36): Xaa is C or S

SEQ ID NO: 42652 - protein, 22 aa, Artificial Sequence
  Cyclic GFR-binding peptide
GERYKKLTPVGMDDFYLVSIAN

SEQ ID NO: 42653 - protein, 40 aa, Artificial Sequence; identical to SEQ ID NO: 4747
  Cyclic GFR-binding peptide
  MOD_RES (2)..(39): Xaa is C or S

SEQ ID NO: 42654 - protein, 30 aa, Artificial Sequence
  Cyclic GFR-binding peptide
  MOD_RES (28)..(28): Xaa is C or S
MNYHYKLIVNSSDDKYLVSIPSLKTPAXTP

SEQ ID NO: 42655 - protein, 31 aa, Artificial Sequence
  Cyclic GFR-binding peptide
  MOD_RES (2)..(4): Xaa is C or S
RXGXGEVVMERHKRLVVKDYEDYYLMSTASL

SEQ ID NO: 42656 - protein, 34 aa, Artificial Sequence
  Cyclic GFR-binding peptide
  MOD_RES (32)..(33): Xaa is C or S
AVSMGERYKKLTPVGMDDFYLVSIANLKTPVXXA

SEQ ID NO: 42657 - protein, 26 aa, Artificial Sequence
  Cyclic GFR-binding peptide
VIMYHYKLVKPKRGVKYLISIPSLAQ

SEQ ID NO: 42658 - protein, 36 aa, Artificial Sequence; identical to SEQ ID NO: 4750
  Cyclic GFR-binding peptide
  MOD_RES (1)..(33)..(34): Xaa is C or S

SEQ ID NO: 42659 - protein, 32 aa, Artificial Sequence
  Cyclic GFR-binding peptide
  MOD_RES (28)..(29): Xaa is C or S
MDRHKRLVVKENEDYYLMSTASLETPVXXAKP

SEQ ID NO: 42660 - protein, 20 aa, Artificial Sequence
  Cyclic GFR-binding peptide
YHYKLIVNNSSDKYLVSIPS

SEQ ID NO: 42661 - protein, 30 aa, Artificial Sequence
  Cyclic GFR-binding peptide
  MOD_RES (2)..(2): Xaa is C or S
GXEAVSMGERYKKLTPVGMDDFYLVSIANL

SEQ ID NO: 42662 - protein, 32 aa, Artificial Sequence
  Cyclic GFR-binding peptide
  MOD_RES (29)..(30): Xaa is C or S
VMNQYNKLIVNSSDDLYLVSIASLQTPAXXPK

SEQ ID NO: 42663 - protein, 29 aa, Artificial Sequence
  Cyclic GFR-binding peptide
LTQYNKLFIPKKRVIELYLVSIASLQVQT

SEQ ID NO: 42664 - protein, 37 aa, Artificial Sequence; identical to SEQ ID NO: 4753
  Cyclic GFR-binding peptide
  MOD_RES (1)..(32)..(33): Xaa is C or S

SEQ ID NO: 42665 - protein, 31 aa, Artificial Sequence
  Cyclic GFR-binding peptide
  MOD_RES (28)..(29): Xaa is C or S
IMRYKKLVKPKRGVFYLISIANLAQPVXXPA

SEQ ID NO: 42666 - protein, 32 aa, Artificial Sequence; identical to SEQ ID NO: 4754
  Cyclic GFR-binding peptide
  MOD_RES (31)..(32): Xaa is C or S

SEQ ID NO: 42667 - protein, 32 aa, Artificial Sequence
  Cyclic GFR-binding peptide
  MOD_RES (1)..(3): Xaa is C or S
XKXSRVIMRYKKLVKPKRGVFYLISIANLAQP

SEQ ID NO: 42668 - protein, 30 aa, Artificial Sequence; identical to SEQ ID NO: 4756
  Cyclic GFR-binding peptide

SEQ ID NO: 42669 - protein, 35 aa, Artificial Sequence; identical to SEQ ID NO: 4757
  Cyclic GFR-binding peptide
  MOD_RES (2)..(34)..(35): Xaa is C or S

SEQ ID NO: 42670 - protein, 31 aa, Artificial Sequence
  Cyclic GFR-binding peptide
  MOD_RES (26)..(27): Xaa is C or S
QYNKLVKPKRGVLYLISIASLAQPVXXPAAS

SEQ ID NO: 42671 - protein, 35 aa, Artificial Sequence
  Cyclic GFR-binding peptide
  MOD_RES (30)..(30): Xaa is C or S
VVMNRHKRLIVNSSDDYYLVSTASLKTPAXTPKTV

SEQ ID NO: 42672 - protein, 34 aa, Artificial Sequence
  Cyclic GFR-binding peptide
  MOD_RES (28)..(29): Xaa is C or S
VMRYKKLVKPTRGVFYLISIANLDQPVXXPSASA

SEQ ID NO: 42673 - protein, 34 aa, Artificial Sequence; identical to SEQ ID NO: 4758
  Cyclic GFR-binding peptide
  MOD_RES (1)..(3)..(34): Xaa is C or S

SEQ ID NO: 42674 - protein, 38 aa, Artificial Sequence; identical to SEQ ID NO: 4759
  Cyclic GFR-binding peptide
  MOD_RES (1)..(34)..(35): Xaa is C or S

SEQ ID NO: 42675 - protein, 32 aa, Artificial Sequence
  Cyclic GFR-binding peptide
  MOD_RES (29)..(30): Xaa is C or S
VMDRYKKLVVKENEDFYLMSIANLETPVXXAK

SEQ ID NO: 42676 - protein, 32 aa, Artificial Sequence; identical to SEQ ID NO: 4761
  Cyclic GFR-binding peptide
  MOD_RES (1)..(1): Xaa is C or S

SEQ ID NO: 42677 - protein, 30 aa, Artificial Sequence
  Cyclic GFR-binding peptide
HDELTRYKKLFIPKKRVIEFYLVSIANLQV

SEQ ID NO: 42678 - protein, 28 aa, Artificial Sequence
  Cyclic GFR-binding peptide
VIMQYNKLVKPKRGVLYLISIASLAQPV

SEQ ID NO: 42679 - protein, 22 aa, Artificial Sequence
  Cyclic GFR-binding peptide
MERYKKLVVKDYEDFYLMSIAN

SEQ ID NO: 42680 - protein, 33 aa, Artificial Sequence
  Cyclic GFR-binding peptide
  MOD_RES (30)..(31): Xaa is C or S
VVMNYHYKLIVNSSDDKYLVSIPSLQTPAXXPK

SEQ ID NO: 42681 - protein, 32 aa, Artificial Sequence
  Cyclic GFR-binding peptide
  MOD_RES (2)..(2): Xaa is C or S
GXAKVVMNQYNKLIVNNSSDLYLVSIASLKTP

SEQ ID NO: 42682 - protein, 31 aa, Artificial Sequence
  Cyclic GFR-binding peptide
  MOD_RES (1)..(1): Xaa is C or S
XAKVVMNYHYKLIVNNSSDKYLVSIPSLKTP

SEQ ID NO: 42683 - protein, 28 aa, Artificial Sequence
  Cyclic GFR-binding peptide
VVMNQYNKLIVNNSSDLYLVSIASLKTP

SEQ ID NO: 42684 - protein, 29 aa, Artificial Sequence
  Cyclic GFR-binding peptide
  MOD_RES (1)..(3): Xaa is C or S
XGXGEVVMEYHYKLVVKDYEDKYLMSIPS

SEQ ID NO: 42685 - protein, 40 aa, Artificial Sequence; identical to SEQ ID NO: 4764
  Cyclic GFR-binding peptide
  MOD_RES (2)..(4): Xaa is C or S

SEQ ID NO: 42686 - protein, 38 aa, Artificial Sequence; identical to SEQ ID NO: 4765
  Cyclic GFR-binding peptide
  MOD_RES (1)..(32)..(33): Xaa is C or S

SEQ ID NO: 42687 - protein, 32 aa, Artificial Sequence
  Cyclic GFR-binding peptide
  MOD_RES (27)..(28): Xaa is C or S
NYHYKLIVNSSDDKYLVSIPSLQTPAXXPKPV

SEQ ID NO: 42688 - protein, 24 aa, Artificial Sequence
  Cyclic GFR-binding peptide
VMQYNKLVKPTRGVLYLISIASLD

SEQ ID NO: 42689 - protein, 26 aa, Artificial Sequence
  Cyclic GFR-binding peptide
VIMRHKRLVKPKRGVYYLISTASLAQ

SEQ ID NO: 42690 - protein, 36 aa, Artificial Sequence; identical to SEQ ID NO: 4766
  Cyclic GFR-binding peptide
  MOD_RES (2)..(33)..(34): Xaa is C or S

SEQ ID NO: 42691 - protein, 37 aa, Artificial Sequence; identical to SEQ ID NO: 4768
  Cyclic GFR-binding peptide
  MOD_RES (1)..(32)..(33): Xaa is C or S

SEQ ID NO: 42692 - protein, 25 aa, Artificial Sequence
  Cyclic GFR-binding peptide
VMERYKKLVVKDYEDFYLMSIANLE

SEQ ID NO: 42693 - protein, 32 aa, Artificial Sequence; identical to SEQ ID NO: 4769
  Cyclic GFR-binding peptide

SEQ ID NO: 42694 - protein, 31 aa, Artificial Sequence
  Cyclic GFR-binding peptide
  MOD_RES (2)..(4): Xaa is C or S
SXKXSKVIMYHYKLIKPTKGIKYLISIPSLD

SEQ ID NO: 42695 - protein, 23 aa, Artificial Sequence
  Cyclic GFR-binding peptide
YHYKLFIPKKRVIEKYLVSIPSL

SEQ ID NO: 42696 - protein, 24 aa, Artificial Sequence
  Cyclic GFR-binding peptide
VIMRHKRLVKPKRGVYYLISTASL

SEQ ID NO: 42697 - protein, 38 aa, Artificial Sequence; identical to SEQ ID NO: 4771
  Cyclic GFR-binding peptide
  MOD_RES (1)..(38): Xaa is C or S

SEQ ID NO: 42698 - protein, 25 aa, Artificial Sequence
  Cyclic GFR-binding peptide
VMNYHYKLIVNSSDDKYLVSIPSLQ

SEQ ID NO: 42699 - protein, 35 aa, Artificial Sequence; identical to SEQ ID NO: 4772
  Cyclic GFR-binding peptide
  MOD_RES (1)..(3)..(35): Xaa is C or S

SEQ ID NO: 42700 - protein, 26 aa, Artificial Sequence
  Cyclic GFR-binding peptide
VVMNYHYKLIVNSSDDKYLVSIPSLQ

SEQ ID NO: 42701 - protein, 38 aa, Artificial Sequence; identical to SEQ ID NO: 4776
  Cyclic GFR-binding peptide
  MOD_RES (1)..(3)..(35)..(36): Xaa is C or S

SEQ ID NO: 42702 - protein, 35 aa, Artificial Sequence; identical to SEQ ID NO: 4775
  Cyclic GFR-binding peptide
  MOD_RES (1)..(32)..(33): Xaa is C or S

SEQ ID NO: 42703 - protein, 25 aa, Artificial Sequence
  Cyclic GFR-binding peptide
VMNRHKRLIVNSSDDYYLVSTASLQ

SEQ ID NO: 42704 - protein, 36 aa, Artificial Sequence; identical to SEQ ID NO: 4778
  Cyclic GFR-binding peptide
  MOD_RES (32)..(33): Xaa is C or S

SEQ ID NO: 42705 - protein, 41 aa, Artificial Sequence; identical to SEQ ID NO: 4779
  Cyclic GFR-binding peptide
  MOD_RES (1)..(3)..(35): Xaa is C or S

SEQ ID NO: 42706 - protein, 38 aa, Artificial Sequence; identical to SEQ ID NO: 4780
  Cyclic GFR-binding peptide
  MOD_RES (1)..(33)..(34): Xaa is C or S

SEQ ID NO: 42707 - protein, 20 aa, Artificial Sequence
  Cyclic GFR-binding peptide
RHKRLIVNNSSDYYLVSTAS

SEQ ID NO: 42708 - protein, 26 aa, Artificial Sequence
  Cyclic GFR-binding peptide
  MOD_RES (26)..(26): Xaa is C or S
RHKRLVKPTRGVYYLISTASLDQPVX

SEQ ID NO: 42709 - protein, 36 aa, Artificial Sequence; identical to SEQ ID NO: 4781
  Cyclic GFR-binding peptide
  MOD_RES (33)..(34): Xaa is C or S

SEQ ID NO: 42710 - protein, 24 aa, Artificial Sequence
  Cyclic GFR-binding peptide
MQYNKLIKPTKGILYLISIASLDQ

SEQ ID NO: 42711 - protein, 33 aa, Artificial Sequence
  Cyclic GFR-binding peptide
  MOD_RES (30)..(31): Xaa is C or S
VVMNQYNKLIVNSSDDLYLVSIASLKTPAXXPK

SEQ ID NO: 42712 - protein, 31 aa, Artificial Sequence
  Cyclic GFR-binding peptide
  MOD_RES (1)..(1): Xaa is C or S
XAKVVMNRYKKLIVNNSSDFYLVSIANLKTP

SEQ ID NO: 42713 - protein, 37 aa, Artificial Sequence; identical to SEQ ID NO: 4785
  Cyclic GFR-binding peptide
  MOD_RES (2)..(34)..(35): Xaa is C or S

SEQ ID NO: 42714 - protein, 31 aa, Artificial Sequence; identical to SEQ ID NO: 4787
  Cyclic GFR-binding peptide
  MOD_RES (1)..(1): Xaa is C or S

SEQ ID NO: 42715 - protein, 39 aa, Artificial Sequence; identical to SEQ ID NO: 4789
  Cyclic GFR-binding peptide
  MOD_RES (37)..(37): Xaa is C or S

SEQ ID NO: 42716 - protein, 21 aa, Artificial Sequence
  Cyclic GFR-binding peptide
YHYKLIVNSSDDKYLVSIPSL

SEQ ID NO: 42717 - protein, 26 aa, Artificial Sequence
  Cyclic GFR-binding peptide
RVVMNYHYKLIVNSSDDKYLVSIPSL

SEQ ID NO: 42718 - protein, 26 aa, Artificial Sequence
  Cyclic GFR-binding peptide
  MOD_RES (26)..(26): Xaa is C or S
RYKKLIKPTKGIFYLISIANLDQSVX

SEQ ID NO: 42719 - protein, 26 aa, Artificial Sequence
  Cyclic GFR-binding peptide
  MOD_RES (26)..(26): Xaa is C or S
QYNKLTPVGMDDLYLVSIASLKTPVX

SEQ ID NO: 42720 - protein, 32 aa, Artificial Sequence
  Cyclic GFR-binding peptide
  MOD_RES (28)..(29): Xaa is C or S
VMRYKKLVKPTRGVFYLISIANLDQPVXXPSA

SEQ ID NO: 42721 - protein, 39 aa, Artificial Sequence; identical to SEQ ID NO: 4790
  Cyclic GFR-binding peptide
  MOD_RES (37)..(37): Xaa is C or S

SEQ ID NO: 42722 - protein, 26 aa, Artificial Sequence
  Cyclic GFR-binding peptide
MYHYKLVKPKRGVKYLISIPSLAQPV

SEQ ID NO: 42723 - protein, 30 aa, Artificial Sequence
  Cyclic GFR-binding peptide
  MOD_RES (1)..(3): Xaa is C or S
XGXAKVVMNRYKKLIVNNSSDFYLVSIANL

SEQ ID NO: 42724 - protein, 39 aa, Artificial Sequence; identical to SEQ ID NO: 4791
  Cyclic GFR-binding peptide
  MOD_RES (36)..(36): Xaa is C or S

SEQ ID NO: 42725 - protein, 25 aa, Artificial Sequence
  Cyclic GFR-binding peptide
MERHKRLVVKDYEDYYLMSTASLET

SEQ ID NO: 42726 - protein, 26 aa, Artificial Sequence
  Cyclic GFR-binding peptide
GEVVMEYHYKLVVKDYEDKYLMSIPS

SEQ ID NO: 42727 - protein, 34 aa, Artificial Sequence
  Cyclic GFR-binding peptide
  MOD_RES (28)..(29): Xaa is C or S
MNRHKRLIVNSSDDYYLVSTASLQTPAXXPKPVT

SEQ ID NO: 42728 - protein, 32 aa, Artificial Sequence; identical to SEQ ID NO: 4793
  Cyclic GFR-binding peptide
  MOD_RES (31)..(32): Xaa is C or S

SEQ ID NO: 42729 - protein, 33 aa, Artificial Sequence
  Cyclic GFR-binding peptide
  MOD_RES (1)..(3): Xaa is C or S
XGXARVVMNYHYKLIVNSSDDKYLVSIPSLQTP

SEQ ID NO: 42730 - protein, 40 aa, Artificial Sequence; identical to SEQ ID NO: 4797
  Cyclic GFR-binding peptide
  MOD_RES (1)..(3)..(35)..(36): Xaa is C or S

SEQ ID NO: 42731 - protein, 28 aa, Artificial Sequence
  Cyclic GFR-binding peptide
VMNRHKRLIVNSSDDYYLVSTASLKTPA

SEQ ID NO: 42732 - protein, 29 aa, Artificial Sequence
  Cyclic GFR-binding peptide
  MOD_RES (1)..(3): Xaa is C or S
XKXSRVIMRHKRLVKPKRGVYYLISTASL

SEQ ID NO: 42733 - protein, 35 aa, Artificial Sequence; identical to SEQ ID NO: 4798
  Cyclic GFR-binding peptide
  MOD_RES (2)..(34)..(35): Xaa is C or S

SEQ ID NO: 42734 - protein, 40 aa, Artificial Sequence; identical to SEQ ID NO: 4799
  Cyclic GFR-binding peptide
  MOD_RES (2)..(4)..(35)..(36): Xaa is C or S

SEQ ID NO: 42735 - protein, 30 aa, Artificial Sequence
  Cyclic GFR-binding peptide
  MOD_RES (2)..(2): Xaa is C or S
KXSKVIMRHKRLIKPTKGIYYLISTASLDQ

SEQ ID NO: 42736 - protein, 27 aa, Artificial Sequence
  Cyclic GFR-binding peptide
  MOD_RES (26)..(27): Xaa is C or S
RYKKLVVKENEDFYLMSIANLETPVXX

SEQ ID NO: 42737 - protein, 37 aa, Artificial Sequence; identical to SEQ ID NO: 4802
  Cyclic GFR-binding peptide
  MOD_RES (31)..(32): Xaa is C or S

SEQ ID NO: 42738 - protein, 41 aa, Artificial Sequence; identical to SEQ ID NO: 4804
  Cyclic GFR-binding peptide
  MOD_RES (2)..(4)..(35)..(36): Xaa is C or S

SEQ ID NO: 42739 - protein, 26 aa, Artificial Sequence
  Cyclic GFR-binding peptide
SKVVMRYKKLVKPTRGVFYLISIANL

SEQ ID NO: 42740 - protein, 32 aa, Artificial Sequence
  Cyclic GFR-binding peptide
  MOD_RES (29)..(30): Xaa is C or S
VMNYHYKLIVNSSDDKYLVSIPSLQTPAXXPK

SEQ ID NO: 42741 - protein, 35 aa, Artificial Sequence; identical to SEQ ID NO: 4809
  Cyclic GFR-binding peptide
  MOD_RES (33)..(34): Xaa is C or S

SEQ ID NO: 42742 - protein, 32 aa, Artificial Sequence
  Cyclic GFR-binding peptide
  MOD_RES (30)..(31): Xaa is C or S
VVMNRHKRLIVNSSDDYYLVSTASLKTPAXXP

SEQ ID NO: 42743 - protein, 30 aa, Artificial Sequence
  Cyclic GFR-binding peptide
  MOD_RES (2)..(2): Xaa is C or S
GXARVVMNRHKRLIVNSSDDYYLVSTASLQ

SEQ ID NO: 42744 - protein, 25 aa, Artificial Sequence
  Cyclic GFR-binding peptide
MEYHYKLVVKDYEDKYLMSIPSLET

SEQ ID NO: 42745 - protein, 27 aa, Artificial Sequence
  Cyclic GFR-binding peptide
VSMGERYKKLTPVGMDDFYLVSIANLK

SEQ ID NO: 42746 - protein, 36 aa, Artificial Sequence; identical to SEQ ID NO: 4810
  Cyclic GFR-binding peptide
  MOD_RES (1)..(32)..(33): Xaa is C or S

SEQ ID NO: 42747 - protein, 32 aa, Artificial Sequence
  Cyclic GFR-binding peptide
  MOD_RES (2)..(4): Xaa is C or S
HXGXAKVVMNRYKKLIVNNSSDFYLVSIANLK

SEQ ID NO: 42748 - protein, 35 aa, Artificial Sequence; identical to SEQ ID NO: 4811
  Cyclic GFR-binding peptide
  MOD_RES (2)..(34)..(35): Xaa is C or S

SEQ ID NO: 42749 - protein, 35 aa, Artificial Sequence; identical to SEQ ID NO: 4812
  Cyclic GFR-binding peptide
  MOD_RES (2)..(4)..(35): Xaa is C or S

SEQ ID NO: 42750 - protein, 35 aa, Artificial Sequence
  Cyclic GFR-binding peptide
  MOD_RES (34)..(34): Xaa is C or S
DELTRYKKLFIPKKRVIEFYLVSIANLQVQTPRXQ

SEQ ID NO: 42751 - protein, 26 aa, Artificial Sequence
  Cyclic GFR-binding peptide
ELTRYKKLFIPKKRVIEFYLVSIANL

SEQ ID NO: 42752 - protein, 33 aa, Artificial Sequence
  Cyclic GFR-binding peptide
  MOD_RES (2)..(4): Xaa is C or S
HXGXSRVVMNQYNKLIVNSSDDLYLVSIASLKT

SEQ ID NO: 42753 - protein, 31 aa, Artificial Sequence; identical to SEQ ID NO: 4813
  Cyclic GFR-binding peptide
  MOD_RES (31)..(31): Xaa is C or S

SEQ ID NO: 42754 - protein, 30 aa, Artificial Sequence
  Cyclic GFR-binding peptide
  MOD_RES (29)..(30): Xaa is C or S
VMNQYNKLIVNSSDDLYLVSIASLKTPAXX

SEQ ID NO: 42755 - protein, 22 aa, Artificial Sequence
  Cyclic GFR-binding peptide
ERYKKLTPVGMDDFYLVSIANL

SEQ ID NO: 42756 - protein, 30 aa, Artificial Sequence
  Cyclic GFR-binding peptide
  MOD_RES (27)..(28): Xaa is C or S
MRHKRLIKPTKGIYYLISTASLDQSVXXPS

SEQ ID NO: 42757 - protein, 30 aa, Artificial Sequence
  Cyclic GFR-binding peptide
ELTRYKKLFIPKKRVIEFYLVSIANLQVQT

SEQ ID NO: 42758 - protein, 35 aa, Artificial Sequence
  Cyclic GFR-binding peptide
  MOD_RES (30)..(31): Xaa is C or S
SMGERHKRLTPVGMDDYYLVSTASLKTPVXXAKGV

SEQ ID NO: 42759 - protein, 29 aa, Artificial Sequence
  Cyclic GFR-binding peptide
  MOD_RES (1)..(3): Xaa is C or S
XGXAKVVMNYHYKLIVNNSSDKYLVSIPS

SEQ ID NO: 42760 - protein, 25 aa, Artificial Sequence
  Cyclic GFR-binding peptide
RVVMNQYNKLIVNSSDDLYLVSIAS

SEQ ID NO: 42761 - protein, 34 aa, Artificial Sequence; identical to SEQ ID NO: 4816
  Cyclic GFR-binding peptide
  MOD_RES (1)..(3)..(34): Xaa is C or S

SEQ ID NO: 42762 - protein, 35 aa, Artificial Sequence; identical to SEQ ID NO: 4821
  Cyclic GFR-binding peptide
  MOD_RES (2)..(4): Xaa is C or S

SEQ ID NO: 42763 - protein, 24 aa, Artificial Sequence
  Cyclic GFR-binding peptide
RHKRLVKPKRGVYYLISTASLAQP

SEQ ID NO: 42764 - protein, 36 aa, Artificial Sequence; identical to SEQ ID NO: 4822
  Cyclic GFR-binding peptide
  MOD_RES (2)..(33)..(34): Xaa is C or S

SEQ ID NO: 42765 - protein, 35 aa, Artificial Sequence; identical to SEQ ID NO: 4823
  Cyclic GFR-binding peptide
  MOD_RES (31)..(32): Xaa is C or S

SEQ ID NO: 42766 - protein, 32 aa, Artificial Sequence
  Cyclic GFR-binding peptide
  MOD_RES (31)..(31): Xaa is C or S
TYHYKLFIPKKRVIEKYLVSIPSLQVQTPRXQ

SEQ ID NO: 42767 - protein, 37 aa, Artificial Sequence
  Cyclic GFR-binding peptide
  MOD_RES (32)..(33): Xaa is C or S
AVSMGERHKRLTPVGMDDYYLVSTASLKTPVXXAKGV

SEQ ID NO: 42768 - protein, 25 aa, Artificial Sequence
  Cyclic GFR-binding peptide
MNQYNKLIVNNSSDLYLVSIASLKT

SEQ ID NO: 42769 - protein, 39 aa, Artificial Sequence; identical to SEQ ID NO: 4824
  Cyclic GFR-binding peptide
  MOD_RES (2)..(4)..(37)..(38): Xaa is C or S

SEQ ID NO: 42770 - protein, 30 aa, Artificial Sequence
  Cyclic GFR-binding peptide
LHDELTRHKRLFIPKKRVIEYYLVSTASLQ

SEQ ID NO: 42771 - protein, 38 aa, Artificial Sequence; identical to SEQ ID NO: 4825
  Cyclic GFR-binding peptide
  MOD_RES (1)..(3)..(35)..(36): Xaa is C or S

SEQ ID NO: 42772 - protein, 21 aa, Artificial Sequence
  Cyclic GFR-binding peptide
NQYNKLIVNSSDDLYLVSIAS

SEQ ID NO: 42773 - protein, 37 aa, Artificial Sequence; identical to SEQ ID NO: 4828
  Cyclic GFR-binding peptide
  MOD_RES (1)..(34)..(35): Xaa is C or S

SEQ ID NO: 42774 - protein, 34 aa, Artificial Sequence
  Cyclic GFR-binding peptide
  MOD_RES (29)..(30): Xaa is C or S
VIMRYKKLIKPTKGIFYLISIANLDQSVXXPSAS

SEQ ID NO: 42775 - protein, 36 aa, Artificial Sequence; identical to SEQ ID NO: 4829
  Cyclic GFR-binding peptide
  MOD_RES (2)..(4)..(36): Xaa is C or S

SEQ ID NO: 42776 - protein, 40 aa, Artificial Sequence; identical to SEQ ID NO: 4831
  Cyclic GFR-binding peptide
  MOD_RES (1)..(3)..(35)..(36): Xaa is C or S

SEQ ID NO: 42777 - protein, 39 aa, Artificial Sequence; identical to SEQ ID NO: 4832
  Cyclic GFR-binding peptide
  MOD_RES (2)..(33)..(34): Xaa is C or S

SEQ ID NO: 42778 - protein, 35 aa, Artificial Sequence
  Cyclic GFR-binding peptide
  MOD_RES (29)..(29): Xaa is C or S
VMNQYNKLIVNSSDDLYLVSIASLKTPAXTPKTVH

SEQ ID NO: 42779 - protein, 36 aa, Artificial Sequence; identical to SEQ ID NO: 4835
  Cyclic GFR-binding peptide
  MOD_RES (35)..(35): Xaa is C or S

SEQ ID NO: 42780 - protein, 32 aa, Artificial Sequence; identical to SEQ ID NO: 4837
  Cyclic GFR-binding peptide
  MOD_RES (2)..(2): Xaa is C or S

SEQ ID NO: 42781 - protein, 30 aa, Artificial Sequence
  Cyclic GFR-binding peptide
  MOD_RES (26)..(27): Xaa is C or S
QYNKLVKPTRGVLYLISIASLDQPVXXPSA

SEQ ID NO: 42782 - protein, 27 aa, Artificial Sequence
  Cyclic GFR-binding peptide
VVMDRYKKLVVKENEDFYLMSIANLET

SEQ ID NO: 42783 - protein, 35 aa, Artificial Sequence; identical to SEQ ID NO: 4840
  Cyclic GFR-binding peptide
  MOD_RES (2)..(4)..(35): Xaa is C or S

SEQ ID NO: 42784 - protein, 38 aa, Artificial Sequence; identical to SEQ ID NO: 4842
  Cyclic GFR-binding peptide
  MOD_RES (32)..(33): Xaa is C or S

SEQ ID NO: 42785 - protein, 36 aa, Artificial Sequence; identical to SEQ ID NO: 4843
  Cyclic GFR-binding peptide
  MOD_RES (1)..(32)..(33): Xaa is C or S

SEQ ID NO: 42786 - protein, 29 aa, Artificial Sequence
  Cyclic GFR-binding peptide
  MOD_RES (27)..(28): Xaa is C or S
MYHYKLVKPKRGVKYLISIPSLAQPVXXP

SEQ ID NO: 42787 - protein, 28 aa, Artificial Sequence
  Cyclic GFR-binding peptide
  MOD_RES (2)..(2): Xaa is C or S
KXSRVIMQYNKLVKPKRGVLYLISIASL

SEQ ID NO: 42788 - protein, 26 aa, Artificial Sequence
  Cyclic GFR-binding peptide
EVVMERHKRLVVKDYEDYYLMSTASL

SEQ ID NO: 42789 - protein, 31 aa, Artificial Sequence
  Cyclic GFR-binding peptide
  MOD_RES (2)..(4): Xaa is C or S
SXKXSKVIMQYNKLIKPTKGILYLISIASLD

SEQ ID NO: 42790 - protein, 29 aa, Artificial Sequence
  Cyclic GFR-binding peptide
  MOD_RES (28)..(29): Xaa is C or S
VMRHKRLVKPTRGVYYLISTASLDQPVXX

SEQ ID NO: 42791 - protein, 43 aa, Artificial Sequence; identical to SEQ ID NO: 4847
  Cyclic GFR-binding peptide
  MOD_RES (2)..(4)..(41): Xaa is C or S

SEQ ID NO: 42792 - protein, 40 aa, Artificial Sequence; identical to SEQ ID NO: 4848
  Cyclic GFR-binding peptide
  MOD_RES (2)..(34)..(35): Xaa is C or S

SEQ ID NO: 42793 - protein, 34 aa, Artificial Sequence
  Cyclic GFR-binding peptide
  MOD_RES (28)..(29): Xaa is C or S
IMYHYKLVKPKRGVKYLISIPSLAQPVXXPAASA

SEQ ID NO: 42794 - protein, 27 aa, Artificial Sequence
  Cyclic GFR-binding peptide
KVIMRHKRLIKPTKGIYYLISTASLDQ

SEQ ID NO: 42795 - protein, 41 aa, Artificial Sequence; identical to SEQ ID NO: 4850
  Cyclic GFR-binding peptide
  MOD_RES (2)..(4)..(36)..(37): Xaa is C or S

SEQ ID NO: 42796 - protein, 29 aa, Artificial Sequence
  Cyclic GFR-binding peptide
  MOD_RES (2)..(4): Xaa is C or S
SXKXSRVIMYHYKLVKPKRGVKYLISIPS

SEQ ID NO: 42797 - protein, 34 aa, Artificial Sequence
  Cyclic GFR-binding peptide
  MOD_RES (29)..(30): Xaa is C or S
VMNQYNKLIVNNSSDLYLVSIASLKTPAXXAKPV

SEQ ID NO: 42798 - protein, 35 aa, Artificial Sequence; identical to SEQ ID NO: 4852
  Cyclic GFR-binding peptide
  MOD_RES (1)..(33)..(34): Xaa is C or S

SEQ ID NO: 42799 - protein, 31 aa, Artificial Sequence
  Cyclic GFR-binding peptide
LTYHYKLFIPKKRVIEKYLVSIPSLQVQTPR

SEQ ID NO: 42800 - protein, 39 aa, Artificial Sequence; identical to SEQ ID NO: 4853
  Cyclic GFR-binding peptide
  MOD_RES (2)..(34)..(35): Xaa is C or S

SEQ ID NO: 42801 - protein, 23 aa, Artificial Sequence
  Cyclic GFR-binding peptide
YHYKLIKPTKGIKYLISIPSLDQ

SEQ ID NO: 42802 - protein, 42 aa, Artificial Sequence; identical to SEQ ID NO: 4854
  Cyclic GFR-binding peptide
  MOD_RES (1)..(3)..(40): Xaa is C or S

SEQ ID NO: 42803 - protein, 42 aa, Artificial Sequence; identical to SEQ ID NO: 4856
  Cyclic GFR-binding peptide
  MOD_RES (2)..(4)..(36)..(37): Xaa is C or S

SEQ ID NO: 42804 - protein, 26 aa, Artificial Sequence
  Cyclic GFR-binding peptide
MYHYKLIKPTKGIKYLISIPSLDQSV

SEQ ID NO: 42805 - protein, 35 aa, Artificial Sequence; identical to SEQ ID NO: 4858
  Cyclic GFR-binding peptide
  MOD_RES (1)..(3)..(35): Xaa is C or S

SEQ ID NO: 42806 - protein, 31 aa, Artificial Sequence; identical to SEQ ID NO: 4857
  Cyclic GFR-binding peptide
  MOD_RES (31)..(31): Xaa is C or S

SEQ ID NO: 42807 - protein, 33 aa, Artificial Sequence; identical to SEQ ID NO: 4859
  Cyclic GFR-binding peptide
  MOD_RES (31)..(32): Xaa is C or S

SEQ ID NO: 42808 - protein, 39 aa, Artificial Sequence; identical to SEQ ID NO: 4861
  Cyclic GFR-binding peptide
  MOD_RES (2)..(33)..(34): Xaa is C or S

SEQ ID NO: 42809 - protein, 36 aa, Artificial Sequence; identical to SEQ ID NO: 4862
  Cyclic GFR-binding peptide
  MOD_RES (1)..(3)..(35): Xaa is C or S

SEQ ID NO: 42810 - protein, 32 aa, Artificial Sequence; identical to SEQ ID NO: 4863
  Cyclic GFR-binding peptide
  MOD_RES (31)..(32): Xaa is C or S

SEQ ID NO: 42811 - protein, 32 aa, Artificial Sequence
  Cyclic GFR-binding peptide
  MOD_RES (30)..(30): Xaa is C or S
VVMNQYNKLIVNSSDDLYLVSIASLKTPAXTP

SEQ ID NO: 42812 - protein, 25 aa, Artificial Sequence
  Cyclic GFR-binding peptide
RVVMNYHYKLIVNSSDDKYLVSIPS

SEQ ID NO: 42813 - protein, 34 aa, Artificial Sequence; identical to SEQ ID NO: 4865
  Cyclic GFR-binding peptide
  MOD_RES (1)..(3): Xaa is C or S

SEQ ID NO: 42814 - protein, 25 aa, Artificial Sequence
  Cyclic GFR-binding peptide
DRYKKLVVKENEDFYLMSIANLETP

SEQ ID NO: 42815 - protein, 29 aa, Artificial Sequence
  Cyclic GFR-binding peptide
  MOD_RES (27)..(28): Xaa is C or S
NQYNKLIVNSSDDLYLVSIASLQTPAXXP

SEQ ID NO: 42816 - protein, 20 aa, Artificial Sequence
  Cyclic GFR-binding peptide
RYKKLIKPTKGIFYLISIAN

SEQ ID NO: 42817 - protein, 34 aa, Artificial Sequence
  Cyclic GFR-binding peptide
  MOD_RES (28)..(29): Xaa is C or S
IMRHKRLVKPKRGVYYLISTASLAQPVXXPAASA

SEQ ID NO: 42818 - protein, 37 aa, Artificial Sequence; identical to SEQ ID NO: 4866
  Cyclic GFR-binding peptide
  MOD_RES (32)..(33): Xaa is C or S

SEQ ID NO: 42819 - protein, 33 aa, Artificial Sequence
  Cyclic GFR-binding peptide
  MOD_RES (1)..(3): Xaa is C or S
XGXGEVVMERHKRLVVKDYEDYYLMSTASLETP

SEQ ID NO: 42820 - protein, 35 aa, Artificial Sequence; identical to SEQ ID NO: 4869
  Cyclic GFR-binding peptide
  MOD_RES (2)..(4): Xaa is C or S

SEQ ID NO: 42821 - protein, 20 aa, Artificial Sequence
  Cyclic GFR-binding peptide
RHKRLVVKENEDYYLMSTAS

SEQ ID NO: 42822 - protein, 38 aa, Artificial Sequence; identical to SEQ ID NO: 4871
  Cyclic GFR-binding peptide
  MOD_RES (2)..(4)..(35)..(36): Xaa is C or S

SEQ ID NO: 42823 - protein, 36 aa, Artificial Sequence; identical to SEQ ID NO: 4872
  Cyclic GFR-binding peptide
  MOD_RES (31)..(32): Xaa is C or S

SEQ ID NO: 42824 - protein, 32 aa, Artificial Sequence
  Cyclic GFR-binding peptide
  MOD_RES (27)..(28): Xaa is C or S
NRHKRLIVNSSDDYYLVSTASLQTPAXXPKPV

SEQ ID NO: 42825 - protein, 22 aa, Artificial Sequence
  Cyclic GFR-binding peptide
MRYKKLIKPTKGIFYLISIANL

SEQ ID NO: 42826 - protein, 29 aa, Artificial Sequence
  Cyclic GFR-binding peptide
VVMNYHYKLIVNSSDDKYLVSIPSLKTPA

SEQ ID NO: 42827 - protein, 32 aa, Artificial Sequence
  Cyclic GFR-binding peptide
  MOD_RES (2)..(4): Xaa is C or S
HXGXARVVMNRHKRLIVNSSDDYYLVSTASLQ

SEQ ID NO: 42828 - protein, 30 aa, Artificial Sequence
  Cyclic GFR-binding peptide
  MOD_RES (26)..(27): Xaa is C or S
YHYKLIKPTKGIKYLISIPSLDQSVXXPSA

SEQ ID NO: 42829 - protein, 33 aa, Artificial Sequence; identical to SEQ ID NO: 4875
  Cyclic GFR-binding peptide
  MOD_RES (32)..(33): Xaa is C or S

SEQ ID NO: 42830 - protein, 38 aa, Artificial Sequence; identical to SEQ ID NO: 4874
  Cyclic GFR-binding peptide
  MOD_RES (2)..(34)..(35): Xaa is C or S

SEQ ID NO: 42831 - protein, 31 aa, Artificial Sequence; identical to SEQ ID NO: 4876
  Cyclic GFR-binding peptide
  MOD_RES (31)..(31): Xaa is C or S

SEQ ID NO: 42832 - protein, 39 aa, Artificial Sequence; identical to SEQ ID NO: 4878
  Cyclic GFR-binding peptide
  MOD_RES (2)..(4)..(36)..(37): Xaa is C or S

SEQ ID NO: 42833 - protein, 38 aa, Artificial Sequence; identical to SEQ ID NO: 4881
  Cyclic GFR-binding peptide
  MOD_RES (1)..(33)..(34): Xaa is C or S

SEQ ID NO: 42834 - protein, 23 aa, Artificial Sequence
  Cyclic GFR-binding peptide
VMRYKKLVKPTRGVFYLISIANL

SEQ ID NO: 42835 - protein, 34 aa, Artificial Sequence
  Cyclic GFR-binding peptide
  MOD_RES (32)..(32): Xaa is C or S
LTRHKRLFIPKKRVIEYYLVSTASLQVQTPRXQV

SEQ ID NO: 42836 - protein, 32 aa, Artificial Sequence; identical to SEQ ID NO: 4882
  Cyclic GFR-binding peptide
  MOD_RES (2)..(2): Xaa is C or S

SEQ ID NO: 42837 - protein, 25 aa, Artificial Sequence
  Cyclic GFR-binding peptide
KVIMRHKRLIKPTKGIYYLISTASL

SEQ ID NO: 42838 - protein, 25 aa, Artificial Sequence
  Cyclic GFR-binding peptide
EVVMERHKRLVVKDYEDYYLMSTAS

SEQ ID NO: 42839 - protein, 38 aa, Artificial Sequence; identical to SEQ ID NO: 4884
  Cyclic GFR-binding peptide
  MOD_RES (2)..(33)..(34): Xaa is C or S

SEQ ID NO: 42840 - protein, 32 aa, Artificial Sequence
  Cyclic GFR-binding peptide
  MOD_RES (28)..(29): Xaa is C or S
IMRHKRLVKPKRGVYYLISTASLAQPVXXPAA

SEQ ID NO: 42841 - protein, 25 aa, Artificial Sequence
  Cyclic GFR-binding peptide
GEQYNKLTPVGMDDLYLVSIASLKT

SEQ ID NO: 42842 - protein, 27 aa, Artificial Sequence
  Cyclic GFR-binding peptide
  MOD_RES (27)..(27): Xaa is C or S
NQYNKLIVNNSSDLYLVSIASLKTPAX

SEQ ID NO: 42843 - protein, 33 aa, Artificial Sequence
  Cyclic GFR-binding peptide
  MOD_RES (30)..(30): Xaa is C or S
QYNKLFIPKKRVIELYLVSIASLQVQTPRXQVN

SEQ ID NO: 42844 - protein, 21 aa, Artificial Sequence
  Cyclic GFR-binding peptide
EQYNKLTPVGMDDLYLVSIAS

SEQ ID NO: 42845 - protein, 39 aa, Artificial Sequence; identical to SEQ ID NO: 4887
  Cyclic GFR-binding peptide
  MOD_RES (2)..(4): Xaa is C or S

SEQ ID NO: 42846 - protein, 37 aa, Artificial Sequence
  Cyclic GFR-binding peptide
  MOD_RES (34)..(34): Xaa is C or S
DELTQYNKLFIPKKRVIELYLVSIASLQVQTPRXQVN

SEQ ID NO: 42847 - protein, 35 aa, Artificial Sequence; identical to SEQ ID NO: 4889
  Cyclic GFR-binding peptide
  MOD_RES (1)..(1): Xaa is C or S

SEQ ID NO: 42848 - protein, 30 aa, Artificial Sequence
  Cyclic GFR-binding peptide
  MOD_RES (1)..(3): Xaa is C or S
XGXEAVSMGERYKKLTPVGMDDFYLVSIAN

SEQ ID NO: 42849 - protein, 28 aa, Artificial Sequence
  Cyclic GFR-binding peptide
VVMQYNKLVKPTRGVLYLISIASLDQPV

SEQ ID NO: 42850 - protein, 33 aa, Artificial Sequence; identical to SEQ ID NO: 4891
  Cyclic GFR-binding peptide
  MOD_RES (1)..(33): Xaa is C or S

SEQ ID NO: 42851 - protein, 30 aa, Artificial Sequence; identical to SEQ ID NO: 4892
  Cyclic GFR-binding peptide

SEQ ID NO: 42852 - protein, 31 aa, Artificial Sequence
  Cyclic GFR-binding peptide
  MOD_RES (1)..(3): Xaa is C or S
XGXARVVMNRHKRLIVNSSDDYYLVSTASLQ

SEQ ID NO: 42853 - protein, 27 aa, Artificial Sequence
  Cyclic GFR-binding peptide
VVMNRYKKLIVNNSSDFYLVSIANLKT

SEQ ID NO: 42854 - protein, 22 aa, Artificial Sequence
  Cyclic GFR-binding peptide
QYNKLIVNNSSDLYLVSIASLK

SEQ ID NO: 42855 - protein, 38 aa, Artificial Sequence; identical to SEQ ID NO: 4893
  Cyclic GFR-binding peptide
  MOD_RES (1)..(3): Xaa is C or S

SEQ ID NO: 42856 - protein, 26 aa, Artificial Sequence
  Cyclic GFR-binding peptide
  MOD_RES (26)..(26): Xaa is C or S
QYNKLIVNNSSDLYLVSIASLKTPAX

SEQ ID NO: 42857 - protein, 32 aa, Artificial Sequence
  Cyclic GFR-binding peptide
  MOD_RES (2)..(4): Xaa is C or S
SXKXSRVIMRYKKLVKPKRGVFYLISIANLAQ

SEQ ID NO: 42858 - protein, 28 aa, Artificial Sequence
  Cyclic GFR-binding peptide
KVVMYHYKLVKPTRGVKYLISIPSLDQP

SEQ ID NO: 42859 - protein, 33 aa, Artificial Sequence; identical to SEQ ID NO: 4896
  Cyclic GFR-binding peptide
  MOD_RES (1)..(33): Xaa is C or S

SEQ ID NO: 42860 - protein, 26 aa, Artificial Sequence
  Cyclic GFR-binding peptide
NRHKRLIVNSSDDYYLVSTASLKTPA

SEQ ID NO: 42861 - protein, 25 aa, Artificial Sequence
  Cyclic GFR-binding peptide
IMQYNKLIKPTKGILYLISIASLDQ

SEQ ID NO: 42862 - protein, 28 aa, Artificial Sequence
  Cyclic GFR-binding peptide
VVMNQYNKLIVNSSDDLYLVSIASLQTP

SEQ ID NO: 42863 - protein, 32 aa, Artificial Sequence
  Cyclic GFR-binding peptide
  MOD_RES (2)..(4): Xaa is C or S
RXGXGEVVMERHKRLVVKDYEDYYLMSTASLE

SEQ ID NO: 42864 - protein, 35 aa, Artificial Sequence
  Cyclic GFR-binding peptide
  MOD_RES (29)..(30): Xaa is C or S
VVMRHKRLVKPTRGVYYLISTASLDQPVXXPSASA

SEQ ID NO: 42865 - protein, 27 aa, Artificial Sequence
  Cyclic GFR-binding peptide
  MOD_RES (1)..(1): Xaa is C or S
XSKVVMRHKRLVKPTRGVYYLISTASL

SEQ ID NO: 42866 - protein, 25 aa, Artificial Sequence
  Cyclic GFR-binding peptide
KVVMNYHYKLIVNNSSDKYLVSIPS

SEQ ID NO: 42867 - protein, 22 aa, Artificial Sequence
  Cyclic GFR-binding peptide
VMQYNKLVKPTRGVLYLISIAS

SEQ ID NO: 42868 - protein, 40 aa, Artificial Sequence; identical to SEQ ID NO: 4898
  Cyclic GFR-binding peptide
  MOD_RES (1)..(3)..(34)..(35): Xaa is C or S

SEQ ID NO: 42869 - protein, 39 aa, Artificial Sequence; identical to SEQ ID NO: 4899
  Cyclic GFR-binding peptide
  MOD_RES (1)..(33): Xaa is C or S

SEQ ID NO: 42870 - protein, 24 aa, Artificial Sequence
  Cyclic GFR-binding peptide
TRYKKLFIPKKRVIEFYLVSIANL

SEQ ID NO: 42871 - protein, 31 aa, Artificial Sequence
  Cyclic GFR-binding peptide
  MOD_RES (26)..(27): Xaa is C or S
RYKKLIVNNSSDFYLVSIANLKTPAXXAKPV

SEQ ID NO: 42872 - protein, 23 aa, Artificial Sequence
  Cyclic GFR-binding peptide
VMERHKRLVVKDYEDYYLMSTAS

SEQ ID NO: 42873 - protein, 32 aa, Artificial Sequence
  Cyclic GFR-binding peptide
  MOD_RES (27)..(28): Xaa is C or S
ERYKKLTPVGMDDFYLVSIANLKTPVXXAKGV

SEQ ID NO: 42874 - protein, 30 aa, Artificial Sequence
  Cyclic GFR-binding peptide
  MOD_RES (1)..(1): Xaa is C or S
XARVVMNYHYKLIVNSSDDKYLVSIPSLQT

SEQ ID NO: 42875 - protein, 30 aa, Artificial Sequence
  Cyclic GFR-binding peptide
  MOD_RES (27)..(28): Xaa is C or S
MYHYKLVKPTRGVKYLISIPSLDQPVXXPS

SEQ ID NO: 42876 - protein, 39 aa, Artificial Sequence; identical to SEQ ID NO: 4900
  Cyclic GFR-binding peptide
  MOD_RES (2)..(4): Xaa is C or S

SEQ ID NO: 42877 - protein, 30 aa, Artificial Sequence
  Cyclic GFR-binding peptide
  MOD_RES (27)..(28): Xaa is C or S
NQYNKLIVNSSDDLYLVSIASLQTPAXXPK

SEQ ID NO: 42878 - protein, 31 aa, Artificial Sequence
  Cyclic GFR-binding peptide
  MOD_RES (31)..(31): Xaa is C or S
SKVVMRYKKLVKPTRGVFYLISIANLDQPVX

SEQ ID NO: 42879 - protein, 34 aa, Artificial Sequence
  Cyclic GFR-binding peptide
  MOD_RES (30)..(31): Xaa is C or S
VVMNQYNKLIVNNSSDLYLVSIASLKTPAXXAKP

SEQ ID NO: 42880 - protein, 40 aa, Artificial Sequence; identical to SEQ ID NO: 4901
  Cyclic GFR-binding peptide
  MOD_RES (2)..(4): Xaa is C or S

SEQ ID NO: 42881 - protein, 25 aa, Artificial Sequence
  Cyclic GFR-binding peptide
YHYKLIVNNSSDKYLVSIPSLKTPA

SEQ ID NO: 42882 - protein, 25 aa, Artificial Sequence
  Cyclic GFR-binding peptide
KVVMQYNKLVKPTRGVLYLISIASL

SEQ ID NO: 42883 - protein, 25 aa, Artificial Sequence
  Cyclic GFR-binding peptide
YHYKLIVNSSDDKYLVSIPSLQTPA

SEQ ID NO: 42884 - protein, 38 aa, Artificial Sequence; identical to SEQ ID NO: 4902
  Cyclic GFR-binding peptide
  MOD_RES (1)..(3)..(35)..(36): Xaa is C or S

SEQ ID NO: 42885 - protein, 33 aa, Artificial Sequence
  Cyclic GFR-binding peptide
  MOD_RES (27)..(28): Xaa is C or S
MYHYKLVKPTRGVKYLISIPSLDQPVXXPSASA

SEQ ID NO: 42886 - protein, 29 aa, Artificial Sequence
  Cyclic GFR-binding peptide
  MOD_RES (2)..(2): Xaa is C or S
GXARVVMNRHKRLIVNSSDDYYLVSTASL

SEQ ID NO: 42887 - protein, 26 aa, Artificial Sequence
  Cyclic GFR-binding peptide
IMRYKKLIKPTKGIFYLISIANLDQS

SEQ ID NO: 42888 - protein, 29 aa, Artificial Sequence
  Cyclic GFR-binding peptide
  MOD_RES (29)..(29): Xaa is C or S
VVMRYKKLVKPTRGVFYLISIANLDQPVX

SEQ ID NO: 42889 - protein, 30 aa, Artificial Sequence
  Cyclic GFR-binding peptide
  MOD_RES (2)..(4): Xaa is C or S
SXKXSKVIMRHKRLIKPTKGIYYLISTASL

SEQ ID NO: 42890 - protein, 39 aa, Artificial Sequence; identical to SEQ ID NO: 4905
  Cyclic GFR-binding peptide
  MOD_RES (2)..(4)..(36): Xaa is C or S

SEQ ID NO: 42891 - protein, 32 aa, Artificial Sequence; identical to SEQ ID NO: 4906
  Cyclic GFR-binding peptide
  MOD_RES (31)..(32): Xaa is C or S

SEQ ID NO: 42892 - protein, 28 aa, Artificial Sequence
  Cyclic GFR-binding peptide
  MOD_RES (2)..(2): Xaa is C or S
GXARVVMNRHKRLIVNSSDDYYLVSTAS

SEQ ID NO: 42893 - protein, 33 aa, Artificial Sequence; identical to SEQ ID NO: 4907
  Cyclic GFR-binding peptide
  MOD_RES (32)..(33): Xaa is C or S

SEQ ID NO: 42894 - protein, 32 aa, Artificial Sequence; identical to SEQ ID NO: 4908
  Cyclic GFR-binding peptide
  MOD_RES (31)..(32): Xaa is C or S

SEQ ID NO: 42895 - protein, 30 aa, Artificial Sequence
  Cyclic GFR-binding peptide
  MOD_RES (1)..(3): Xaa is C or S
XGXSRVVMNQYNKLIVNSSDDLYLVSIASL

SEQ ID NO: 42896 - protein, 39 aa, Artificial Sequence; identical to SEQ ID NO: 4909
  Cyclic GFR-binding peptide
  MOD_RES (1)..(3)..(35)..(36): Xaa is C or S

SEQ ID NO: 42897 - protein, 35 aa, Artificial Sequence
  Cyclic GFR-binding peptide
  MOD_RES (30)..(31): Xaa is C or S
VVMNRHKRLIVNSSDDYYLVSTASLQTPAXXPKPV

SEQ ID NO: 42898 - protein, 27 aa, Artificial Sequence
  Cyclic GFR-binding peptide
IMRHKRLVKPKRGVYYLISTASLAQPV

SEQ ID NO: 42899 - protein, 34 aa, Artificial Sequence
  Cyclic GFR-binding peptide
  MOD_RES (32)..(33): Xaa is C or S
AVSMGERHKRLTPVGMDDYYLVSTASLKTPVXXA

SEQ ID NO: 42900 - protein, 34 aa, Artificial Sequence; identical to SEQ ID NO: 4910
  Cyclic GFR-binding peptide
  MOD_RES (1)..(3)..(34): Xaa is C or S

SEQ ID NO: 42901 - protein, 33 aa, Artificial Sequence; identical to SEQ ID NO: 4911
  Cyclic GFR-binding peptide
  MOD_RES (31)..(32): Xaa is C or S

SEQ ID NO: 42902 - protein, 25 aa, Artificial Sequence
  Cyclic GFR-binding peptide
VVMQYNKLVKPTRGVLYLISIASLD

SEQ ID NO: 42903 - protein, 37 aa, Artificial Sequence; identical to SEQ ID NO: 4914
  Cyclic GFR-binding peptide
  MOD_RES (31)..(32): Xaa is C or S

SEQ ID NO: 42904 - protein, 31 aa, Artificial Sequence
  Cyclic GFR-binding peptide
  MOD_RES (2)..(4): Xaa is C or S
HXGXAKVVMNYHYKLIVNNSSDKYLVSIPSL

SEQ ID NO: 42905 - protein, 27 aa, Artificial Sequence
  Cyclic GFR-binding peptide
MNRYKKLIVNNSSDFYLVSIANLKTPA

SEQ ID NO: 42906 - protein, 32 aa, Artificial Sequence
  Cyclic GFR-binding peptide
  MOD_RES (2)..(4): Xaa is C or S
SXKXSKVVMRHKRLVKPTRGVYYLISTASLDQ

SEQ ID NO: 42907 - protein, 32 aa, Artificial Sequence
  Cyclic GFR-binding peptide
  MOD_RES (2)..(4): Xaa is C or S
RXGXGEVVMDRHKRLVVKENEDYYLMSTASLE

SEQ ID NO: 42908 - protein, 35 aa, Artificial Sequence; identical to SEQ ID NO: 4919
  Cyclic GFR-binding peptide
  MOD_RES (32)..(33): Xaa is C or S

SEQ ID NO: 42909 - protein, 26 aa, Artificial Sequence
  Cyclic GFR-binding peptide
MYHYKLVKPTRGVKYLISIPSLDQPV

SEQ ID NO: 42910 - protein, 35 aa, Artificial Sequence; identical to SEQ ID NO: 4920
  Cyclic GFR-binding peptide
  MOD_RES (31)..(32): Xaa is C or S

SEQ ID NO: 42911 - protein, 37 aa, Artificial Sequence; identical to SEQ ID NO: 4921
  Cyclic GFR-binding peptide
  MOD_RES (1)..(3)..(35)..(36): Xaa is C or S

SEQ ID NO: 42912 - protein, 27 aa, Artificial Sequence
  Cyclic GFR-binding peptide
TRYKKLFIPKKRVIEFYLVSIANLQVQ

SEQ ID NO: 42913 - protein, 24 aa, Artificial Sequence
  Cyclic GFR-binding peptide
VIMYHYKLIKPTKGIKYLISIPSL

SEQ ID NO: 42914 - protein, 26 aa, Artificial Sequence
  Cyclic GFR-binding peptide
  MOD_RES (26)..(26): Xaa is C or S
QYNKLIVNSSDDLYLVSIASLQTPAX

SEQ ID NO: 42915 - protein, 30 aa, Artificial Sequence
  Cyclic GFR-binding peptide
  MOD_RES (27)..(27): Xaa is C or S
NRHKRLIVNSSDDYYLVSTASLKTPAXTPK

SEQ ID NO: 42916 - protein, 33 aa, Artificial Sequence; identical to SEQ ID NO: 4925
  Cyclic GFR-binding peptide
  MOD_RES (31)..(32): Xaa is C or S

SEQ ID NO: 42917 - protein, 28 aa, Artificial Sequence
  Cyclic GFR-binding peptide
AKVVMNYHYKLIVNNSSDKYLVSIPSLK

SEQ ID NO: 42918 - protein, 35 aa, Artificial Sequence; identical to SEQ ID NO: 4926
  Cyclic GFR-binding peptide
  MOD_RES (33)..(34): Xaa is C or S

SEQ ID NO: 42919 - protein, 35 aa, Artificial Sequence
  Cyclic GFR-binding peptide
  MOD_RES (30)..(31): Xaa is C or S
KVIMQYNKLIKPTKGILYLISIASLDQSVXXPSAS

SEQ ID NO: 42920 - protein, 33 aa, Artificial Sequence; identical to SEQ ID NO: 4927
  Cyclic GFR-binding peptide
  MOD_RES (1)..(33): Xaa is C or S

SEQ ID NO: 42921 - protein, 20 aa, Artificial Sequence
  Cyclic GFR-binding peptide
YHYKLVKPTRGVKYLISIPS

SEQ ID NO: 42922 - protein, 27 aa, Artificial Sequence
  Cyclic GFR-binding peptide
SMGERHKRLTPVGMDDYYLVSTASLKT

SEQ ID NO: 42923 - protein, 36 aa, Artificial Sequence; identical to SEQ ID NO: 4929
  Cyclic GFR-binding peptide
  MOD_RES (1)..(3)..(35): Xaa is C or S

SEQ ID NO: 42924 - protein, 29 aa, Artificial Sequence
  Cyclic GFR-binding peptide
VVMNQYNKLIVNSSDDLYLVSIASLKTPA

SEQ ID NO: 42925 - protein, 26 aa, Artificial Sequence
  Cyclic GFR-binding peptide
VMERYKKLVVKDYEDFYLMSIANLET

SEQ ID NO: 42926 - protein, 25 aa, Artificial Sequence
  Cyclic GFR-binding peptide
ELTRHKRLFIPKKRVIEYYLVSTAS

SEQ ID NO: 42927 - protein, 33 aa, Artificial Sequence
  Cyclic GFR-binding peptide
  MOD_RES (27)..(28): Xaa is C or S
MRYKKLVKPTRGVFYLISIANLDQPVXXPSASA

SEQ ID NO: 42928 - protein, 35 aa, Artificial Sequence
  Cyclic GFR-binding peptide
  MOD_RES (33)..(33): Xaa is C or S
ELTQYNKLFIPKKRVIELYLVSIASLQVQTPRXQV

SEQ ID NO: 42929 - protein, 29 aa, Artificial Sequence
  Cyclic GFR-binding peptide
  MOD_RES (1)..(1): Xaa is C or S
XSRVIMYHYKLVKPKRGVKYLISIPSLAQ

SEQ ID NO: 42930 - protein, 25 aa, Artificial Sequence
  Cyclic GFR-binding peptide
LTRYKKLFIPKKRVIEFYLVSIANL

SEQ ID NO: 42931 - protein, 21 aa, Artificial Sequence
  Cyclic GFR-binding peptide
EYHYKLVVKDYEDKYLMSIPS

SEQ ID NO: 42932 - protein, 24 aa, Artificial Sequence
  Cyclic GFR-binding peptide
DRYKKLVVKENEDFYLMSIANLET

SEQ ID NO: 42933 - protein, 41 aa, Artificial Sequence; identical to SEQ ID NO: 4936
  Cyclic GFR-binding peptide
  MOD_RES (2)..(4)..(36): Xaa is C or S

SEQ ID NO: 42934 - protein, 39 aa, Artificial Sequence; identical to SEQ ID NO: 4937
  Cyclic GFR-binding peptide
  MOD_RES (2)..(34)..(35): Xaa is C or S

SEQ ID NO: 42935 - protein, 28 aa, Artificial Sequence
  Cyclic GFR-binding peptide
  MOD_RES (2)..(2): Xaa is C or S
KXSKVVMRHKRLVKPTRGVYYLISTASL

SEQ ID NO: 42936 - protein, 36 aa, Artificial Sequence
  Cyclic GFR-binding peptide
  MOD_RES (30)..(31): Xaa is C or S
RVIMRYKKLVKPKRGVFYLISIANLAQPVXXPAASA

SEQ ID NO: 42937 - protein, 33 aa, Artificial Sequence
  Cyclic GFR-binding peptide
  MOD_RES (30)..(31): Xaa is C or S
VVMNYHYKLIVNSSDDKYLVSIPSLKTPAXXPK

SEQ ID NO: 42938 - protein, 28 aa, Artificial Sequence
  Cyclic GFR-binding peptide
VMNQYNKLIVNSSDDLYLVSIASLKTPA

SEQ ID NO: 42939 - protein, 40 aa, Artificial Sequence; identical to SEQ ID NO: 4942
  Cyclic GFR-binding peptide
  MOD_RES (1)..(3)..(35)..(36): Xaa is C or S

SEQ ID NO: 42940 - protein, 21 aa, Artificial Sequence
  Cyclic GFR-binding peptide
RHKRLTPVGMDDYYLVSTASL

SEQ ID NO: 42941 - protein, 40 aa, Artificial Sequence; identical to SEQ ID NO: 4943
  Cyclic GFR-binding peptide
  MOD_RES (2)..(4)..(35)..(36): Xaa is C or S

SEQ ID NO: 42942 - protein, 35 aa, Artificial Sequence; identical to SEQ ID NO: 4947
  Cyclic GFR-binding peptide
  MOD_RES (31)..(32): Xaa is C or S

SEQ ID NO: 42943 - protein, 36 aa, Artificial Sequence; identical to SEQ ID NO: 4950
  Cyclic GFR-binding peptide
  MOD_RES (31)..(32): Xaa is C or S

SEQ ID NO: 42944 - protein, 32 aa, Artificial Sequence
  Cyclic GFR-binding peptide
  MOD_RES (29)..(30): Xaa is C or S
VMDRHKRLVVKENEDYYLMSTASLETPVXXAK

SEQ ID NO: 42945 - protein, 31 aa, Artificial Sequence
  Cyclic GFR-binding peptide
  MOD_RES (26)..(26): Xaa is C or S
QYNKLIVNSSDDLYLVSIASLKTPAXTPKTV

SEQ ID NO: 42946 - protein, 30 aa, Artificial Sequence
  Cyclic GFR-binding peptide
  MOD_RES (26)..(27): Xaa is C or S
RHKRLVVKDYEDYYLMSTASLETPVXXAKP

SEQ ID NO: 42947 - protein, 40 aa, Artificial Sequence; identical to SEQ ID NO: 4954
  Cyclic GFR-binding peptide
  MOD_RES (1)..(3)..(40): Xaa is C or S

SEQ ID NO: 42948 - protein, 37 aa, Artificial Sequence; identical to SEQ ID NO: 4955
  Cyclic GFR-binding peptide
  MOD_RES (2)..(4)..(35)..(36): Xaa is C or S

SEQ ID NO: 42949 - protein, 30 aa, Artificial Sequence
  Cyclic GFR-binding peptide
  MOD_RES (28)..(29): Xaa is C or S
MEYHYKLVVKDYEDKYLMSIPSLETPVXXA

SEQ ID NO: 42950 - protein, 28 aa, Artificial Sequence
  Cyclic GFR-binding peptide
  MOD_RES (1)..(3): Xaa is C or S
XKXSRVIMRHKRLVKPKRGVYYLISTAS

SEQ ID NO: 42951 - protein, 30 aa, Artificial Sequence
  Cyclic GFR-binding peptide
  MOD_RES (1)..(1): Xaa is C or S
XSRVIMRHKRLVKPKRGVYYLISTASLAQP

SEQ ID NO: 42952 - protein, 25 aa, Artificial Sequence
  Cyclic GFR-binding peptide
LTRHKRLFIPKKRVIEYYLVSTASL

SEQ ID NO: 42953 - protein, 28 aa, Artificial Sequence
  Cyclic GFR-binding peptide
KVIMRHKRLIKPTKGIYYLISTASLDQS

SEQ ID NO: 42954 - protein, 30 aa, Artificial Sequence
  Cyclic GFR-binding peptide
GEVVMEYHYKLVVKDYEDKYLMSIPSLETP

SEQ ID NO: 42955 - protein, 22 aa, Artificial Sequence
  Cyclic GFR-binding peptide
DRYKKLVVKENEDFYLMSIANL

SEQ ID NO: 42956 - protein, 35 aa, Artificial Sequence; identical to SEQ ID NO: 4960
  Cyclic GFR-binding peptide
  MOD_RES (32)..(33): Xaa is C or S

SEQ ID NO: 42957 - protein, 44 aa, Artificial Sequence; identical to SEQ ID NO: 4961
  Cyclic GFR-binding peptide
  MOD_RES (1)..(3)..(40): Xaa is C or S

SEQ ID NO: 42958 - protein, 30 aa, Artificial Sequence
  Cyclic GFR-binding peptide
HDELTQYNKLFIPKKRVIELYLVSIASLQV

SEQ ID NO: 42959 - protein, 32 aa, Artificial Sequence
  Cyclic GFR-binding peptide
  MOD_RES (29)..(30): Xaa is C or S
MGERHKRLTPVGMDDYYLVSTASLKTPVXXAK

SEQ ID NO: 42960 - protein, 30 aa, Artificial Sequence
  Cyclic GFR-binding peptide
  MOD_RES (29)..(30): Xaa is C or S
VVMYHYKLVKPTRGVKYLISIPSLDQPVXX

SEQ ID NO: 42961 - protein, 32 aa, Artificial Sequence
  Cyclic GFR-binding peptide
  MOD_RES (28)..(29): Xaa is C or S
MNRYKKLIVNNSSDFYLVSIANLKTPAXXAKP

SEQ ID NO: 42962 - protein, 39 aa, Artificial Sequence; identical to SEQ ID NO: 4965
  Cyclic GFR-binding peptide
  MOD_RES (2)..(4)..(35)..(36): Xaa is C or S

SEQ ID NO: 42963 - protein, 35 aa, Artificial Sequence
  Cyclic GFR-binding peptide
  MOD_RES (31)..(31): Xaa is C or S
TQYNKLFIPKKRVIELYLVSIASLQVQTPRXQVNR

SEQ ID NO: 42964 - protein, 37 aa, Artificial Sequence; identical to SEQ ID NO: 4967
  Cyclic GFR-binding peptide
  MOD_RES (2)..(4)..(36)..(37): Xaa is C or S

SEQ ID NO: 42965 - protein, 29 aa, Artificial Sequence
  Cyclic GFR-binding peptide
EVVMDRYKKLVVKENEDFYLMSIANLETP

SEQ ID NO: 42966 - protein, 33 aa, Artificial Sequence
  Cyclic GFR-binding peptide
  MOD_RES (28)..(29): Xaa is C or S
MNRYKKLIVNNSSDFYLVSIANLKTPAXXAKPV

SEQ ID NO: 42967 - protein, 23 aa, Artificial Sequence
  Cyclic GFR-binding peptide
RHKRLFIPKKRVIEYYLVSTASL

SEQ ID NO: 42968 - protein, 31 aa, Artificial Sequence; identical to SEQ ID NO: 4972
  Cyclic GFR-binding peptide
  MOD_RES (31)..(31): Xaa is C or S

SEQ ID NO: 42969 - protein, 28 aa, Artificial Sequence
  Cyclic GFR-binding peptide
  MOD_RES (1)..(1): Xaa is C or S
XSKVVMRYKKLVKPTRGVFYLISIANLD

SEQ ID NO: 42970 - protein, 38 aa, Artificial Sequence; identical to SEQ ID NO: 4974
  Cyclic GFR-binding peptide
  MOD_RES (2)..(4)..(37)..(38): Xaa is C or S

SEQ ID NO: 42971 - protein, 41 aa, Artificial Sequence; identical to SEQ ID NO: 4975
  Cyclic GFR-binding peptide
  MOD_RES (1)..(3)..(35)..(36): Xaa is C or S

SEQ ID NO: 42972 - protein, 34 aa, Artificial Sequence; identical to SEQ ID NO: 4976
  Cyclic GFR-binding peptide
  MOD_RES (2)..(4): Xaa is C or S

SEQ ID NO: 42973 - protein, 29 aa, Artificial Sequence
  Cyclic GFR-binding peptide
  MOD_RES (2)..(4): Xaa is C or S
SXKXSKVIMYHYKLIKPTKGIKYLISIPS

SEQ ID NO: 42974 - protein, 34 aa, Artificial Sequence; identical to SEQ ID NO: 4978
  Cyclic GFR-binding peptide
  MOD_RES (1)..(32)..(33): Xaa is C or S

SEQ ID NO: 42975 - protein, 31 aa, Artificial Sequence
  Cyclic GFR-binding peptide
  MOD_RES (1)..(3): Xaa is C or S
XKXSKVIMQYNKLIKPTKGILYLISIASLDQ

SEQ ID NO: 42976 - protein, 33 aa, Artificial Sequence
  Cyclic GFR-binding peptide
  MOD_RES (2)..(4): Xaa is C or S
RXGXEAVSMGERYKKLTPVGMDDFYLVSIANLK

SEQ ID NO: 42977 - protein, 31 aa, Artificial Sequence
  Cyclic GFR-binding peptide
  MOD_RES (26)..(27): Xaa is C or S
QYNKLTPVGMDDLYLVSIASLKTPVXXAKGV

SEQ ID NO: 42978 - protein, 39 aa, Artificial Sequence; identical to SEQ ID NO: 4979
  Cyclic GFR-binding peptide
  MOD_RES (1)..(3)..(35)..(36): Xaa is C or S

SEQ ID NO: 42979 - protein, 30 aa, Artificial Sequence
  Cyclic GFR-binding peptide
  MOD_RES (28)..(29): Xaa is C or S
MERHKRLVVKDYEDYYLMSTASLETPVXXA

SEQ ID NO: 42980 - protein, 23 aa, Artificial Sequence
  Cyclic GFR-binding peptide
YHYKLIVNNSSDKYLVSIPSLKT

SEQ ID NO: 42981 - protein, 32 aa, Artificial Sequence
  Cyclic GFR-binding peptide
  MOD_RES (26)..(27): Xaa is C or S
QYNKLIVNSSDDLYLVSIASLKTPAXXPKPVY

SEQ ID NO: 42982 - protein, 24 aa, Artificial Sequence
  Cyclic GFR-binding peptide
MNRYKKLIVNNSSDFYLVSIANLK

SEQ ID NO: 42983 - protein, 24 aa, Artificial Sequence
  Cyclic GFR-binding peptide
RHKRLIKPTKGIYYLISTASLDQS

SEQ ID NO: 42984 - protein, 28 aa, Artificial Sequence
  Cyclic GFR-binding peptide
VVMERYKKLVVKDYEDFYLMSIANLETP

SEQ ID NO: 42985 - protein, 33 aa, Artificial Sequence; identical to SEQ ID NO: 4983
  Cyclic GFR-binding peptide
  MOD_RES (1)..(33): Xaa is C or S

SEQ ID NO: 42986 - protein, 29 aa, Artificial Sequence
  Cyclic GFR-binding peptide
  MOD_RES (2)..(2): Xaa is C or S
GXGEVVMERYKKLVVKDYEDFYLMSIANL

SEQ ID NO: 42987 - protein, 30 aa, Artificial Sequence
  Cyclic GFR-binding peptide
  MOD_RES (1)..(1): Xaa is C or S
XSRVVMNRHKRLIVNSSDDYYLVSTASLKT

SEQ ID NO: 42988 - protein, 33 aa, Artificial Sequence
  Cyclic GFR-binding peptide
  MOD_RES (27)..(28): Xaa is C or S
NRHKRLIVNSSDDYYLVSTASLKTPAXXPKPVY

SEQ ID NO: 42989 - protein, 44 aa, Artificial Sequence; identical to SEQ ID NO: 4987
  Cyclic GFR-binding peptide
  MOD_RES (2)..(4)..(41): Xaa is C or S

SEQ ID NO: 42990 - protein, 32 aa, Artificial Sequence
  Cyclic GFR-binding peptide
ELTQYNKLFIPKKRVIELYLVSIASLQVQTPR

SEQ ID NO: 42991 - protein, 33 aa, Artificial Sequence
  Cyclic GFR-binding peptide
  MOD_RES (1)..(3): Xaa is C or S
XKXALHDELTYHYKLFIPKKRVIEKYLVSIPSL

SEQ ID NO: 42992 - protein, 32 aa, Artificial Sequence; identical to SEQ ID NO: 4988
  Cyclic GFR-binding peptide
  MOD_RES (31)..(32): Xaa is C or S

SEQ ID NO: 42993 - protein, 29 aa, Artificial Sequence
  Cyclic GFR-binding peptide
  MOD_RES (2)..(2): Xaa is C or S
KXSKVIMRHKRLIKPTKGIYYLISTASLD

SEQ ID NO: 42994 - protein, 23 aa, Artificial Sequence
  Cyclic GFR-binding peptide
TRHKRLFIPKKRVIEYYLVSTAS

SEQ ID NO: 42995 - protein, 30 aa, Artificial Sequence
  Cyclic GFR-binding peptide
  MOD_RES (30)..(30): Xaa is C or S
VVMNYHYKLIVNSSDDKYLVSIPSLKTPAX

SEQ ID NO: 42996 - protein, 24 aa, Artificial Sequence
  Cyclic GFR-binding peptide
QYNKLIKPTKGILYLISIASLDQS

SEQ ID NO: 42997 - protein, 20 aa, Artificial Sequence
  Cyclic GFR-binding peptide
RHKRLIVNSSDDYYLVSTAS

SEQ ID NO: 42998 - protein, 39 aa, Artificial Sequence; identical to SEQ ID NO: 4990
  Cyclic GFR-binding peptide
  MOD_RES (2)..(39): Xaa is C or S

SEQ ID NO: 42999 - protein, 34 aa, Artificial Sequence; identical to SEQ ID NO: 4992
  Cyclic GFR-binding peptide
  MOD_RES (2)..(34): Xaa is C or S

SEQ ID NO: 43000 - protein, 33 aa, Artificial Sequence; identical to SEQ ID NO: 4993
  Cyclic GFR-binding peptide
  MOD_RES (1)..(32)..(33): Xaa is C or S

SEQ ID NO: 43001 - protein, 23 aa, Artificial Sequence
  Cyclic GFR-binding peptide
QYNKLIVNNSSDLYLVSIASLKT

SEQ ID NO: 43002 - protein, 26 aa, Artificial Sequence
  Cyclic GFR-binding peptide
ELTQYNKLFIPKKRVIELYLVSIASL

SEQ ID NO: 43003 - protein, 34 aa, Artificial Sequence; identical to SEQ ID NO: 4995
  Cyclic GFR-binding peptide
  MOD_RES (2)..(34): Xaa is C or S

SEQ ID NO: 43004 - protein, 32 aa, Artificial Sequence
  Cyclic GFR-binding peptide
  MOD_RES (1)..(3): Xaa is C or S
XGXEAVSMGERYKKLTPVGMDDFYLVSIANLK

SEQ ID NO: 43005 - protein, 30 aa, Artificial Sequence
  Cyclic GFR-binding peptide
LTRHKRLFIPKKRVIEYYLVSTASLQVQTP

SEQ ID NO: 43006 - protein, 31 aa, Artificial Sequence; identical to SEQ ID NO: 4997
  Cyclic GFR-binding peptide
  MOD_RES (1)..(1): Xaa is C or S

SEQ ID NO: 43007 - protein, 25 aa, Artificial Sequence
  Cyclic GFR-binding peptide
RHKRLFIPKKRVIEYYLVSTASLQV

SEQ ID NO: 43008 - protein, 24 aa, Artificial Sequence
  Cyclic GFR-binding peptide
NQYNKLIVNSSDDLYLVSIASLKT

SEQ ID NO: 43009 - protein, 41 aa, Artificial Sequence; identical to SEQ ID NO: 5000
  Cyclic GFR-binding peptide
  MOD_RES (2)..(4)..(37)..(38): Xaa is C or S

SEQ ID NO: 43010 - protein, 29 aa, Artificial Sequence
  Cyclic GFR-binding peptide
  MOD_RES (27)..(28): Xaa is C or S
MRYKKLVKPKRGVFYLISIANLAQPVXXP

SEQ ID NO: 43011 - protein, 28 aa, Artificial Sequence
  Cyclic GFR-binding peptide
RVIMQYNKLVKPKRGVLYLISIASLAQP

SEQ ID NO: 43012 - protein, 28 aa, Artificial Sequence
  Cyclic GFR-binding peptide
  MOD_RES (27)..(28): Xaa is C or S
MQYNKLIKPTKGILYLISIASLDQSVXX

SEQ ID NO: 43013 - protein, 26 aa, Artificial Sequence
  Cyclic GFR-binding peptide
VVMNQYNKLIVNSSDDLYLVSIASLQ

SEQ ID NO: 43014 - protein, 27 aa, Artificial Sequence
  Cyclic GFR-binding peptide
VIMRYKKLIKPTKGIFYLISIANLDQS

SEQ ID NO: 43015 - protein, 25 aa, Artificial Sequence
  Cyclic GFR-binding peptide
SKVIMRYKKLIKPTKGIFYLISIAN

SEQ ID NO: 43016 - protein, 28 aa, Artificial Sequence
  Cyclic GFR-binding peptide
RHKRLFIPKKRVIEYYLVSTASLQVQTP

SEQ ID NO: 43017 - protein, 31 aa, Artificial Sequence; identical to SEQ ID NO: 5007
  Cyclic GFR-binding peptide
  MOD_RES (31)..(31): Xaa is C or S

SEQ ID NO: 43018 - protein, 27 aa, Artificial Sequence
  Cyclic GFR-binding peptide
RVIMRHKRLVKPKRGVYYLISTASLAQ

SEQ ID NO: 43019 - protein, 37 aa, Artificial Sequence; identical to SEQ ID NO: 5008
  Cyclic GFR-binding peptide
  MOD_RES (31)..(32): Xaa is C or S

SEQ ID NO: 43020 - protein, 32 aa, Artificial Sequence
  Cyclic GFR-binding peptide
  MOD_RES (30)..(30): Xaa is C or S
QYNKLFIPKKRVIELYLVSIASLQVQTPRXQV

SEQ ID NO: 43021 - protein, 36 aa, Artificial Sequence; identical to SEQ ID NO: 5014
  Cyclic GFR-binding peptide
  MOD_RES (1)..(33): Xaa is C or S

SEQ ID NO: 43022 - protein, 37 aa, Artificial Sequence; identical to SEQ ID NO: 5013
  Cyclic GFR-binding peptide
  MOD_RES (2)..(33)..(34): Xaa is C or S

SEQ ID NO: 43023 - protein, 24 aa, Artificial Sequence
  Cyclic GFR-binding peptide
IMYHYKLVKPKRGVKYLISIPSLA

SEQ ID NO: 43024 - protein, 33 aa, Artificial Sequence
  Cyclic GFR-binding peptide
DELTYHYKLFIPKKRVIEKYLVSIPSLQVQTPR

SEQ ID NO: 43025 - protein, 32 aa, Artificial Sequence; identical to SEQ ID NO: 5015
  Cyclic GFR-binding peptide
  MOD_RES (31)..(32): Xaa is C or S

SEQ ID NO: 43026 - protein, 31 aa, Artificial Sequence
  Cyclic GFR-binding peptide
  MOD_RES (26)..(27): Xaa is C or S
RHKRLTPVGMDDYYLVSTASLKTPVXXAKGV

SEQ ID NO: 43027 - protein, 20 aa, Artificial Sequence
  Cyclic GFR-binding peptide
RHKRLVVKDYEDYYLMSTAS

SEQ ID NO: 43028 - protein, 38 aa, Artificial Sequence; identical to SEQ ID NO: 5018
  Cyclic GFR-binding peptide
  MOD_RES (1)..(33)..(34): Xaa is C or S

SEQ ID NO: 43029 - protein, 34 aa, Artificial Sequence
  Cyclic GFR-binding peptide
  MOD_RES (28)..(29): Xaa is C or S
IMYHYKLIKPTKGIKYLISIPSLDQSVXXPSASA

SEQ ID NO: 43030 - protein, 28 aa, Artificial Sequence
  Cyclic GFR-binding peptide
SKVVMQYNKLVKPTRGVLYLISIASLDQ

SEQ ID NO: 43031 - protein, 38 aa, Artificial Sequence; identical to SEQ ID NO: 5020
  Cyclic GFR-binding peptide
  MOD_RES (2)..(4)..(37)..(38): Xaa is C or S

SEQ ID NO: 43032 - protein, 32 aa, Artificial Sequence
  Cyclic GFR-binding peptide
  MOD_RES (1)..(3): Xaa is C or S
XKXSRVIMRHKRLVKPKRGVYYLISTASLAQP

SEQ ID NO: 43033 - protein, 26 aa, Artificial Sequence
  Cyclic GFR-binding peptide
  MOD_RES (26)..(26): Xaa is C or S
RHKRLTPVGMDDYYLVSTASLKTPVX

SEQ ID NO: 43034 - protein, 28 aa, Artificial Sequence
  Cyclic GFR-binding peptide
  MOD_RES (2)..(2): Xaa is C or S
GXGEVVMDYHYKLVVKENEDKYLMSIPS

SEQ ID NO: 43035 - protein, 34 aa, Artificial Sequence; identical to SEQ ID NO: 5022
  Cyclic GFR-binding peptide
  MOD_RES (2)..(34): Xaa is C or S

SEQ ID NO: 43036 - protein, 29 aa, Artificial Sequence
  Cyclic GFR-binding peptide
  MOD_RES (29)..(29): Xaa is C or S
VMERHKRLVVKDYEDYYLMSTASLETPVX

SEQ ID NO: 43037 - protein, 28 aa, Artificial Sequence
  Cyclic GFR-binding peptide
HDELTRHKRLFIPKKRVIEYYLVSTASL

SEQ ID NO: 43038 - protein, 36 aa, Artificial Sequence; identical to SEQ ID NO: 5025
  Cyclic GFR-binding peptide
  MOD_RES (2)..(4)..(35)..(36): Xaa is C or S

SEQ ID NO: 43039 - protein, 36 aa, Artificial Sequence; identical to SEQ ID NO: 5027
  Cyclic GFR-binding peptide
  MOD_RES (31)..(32): Xaa is C or S

SEQ ID NO: 43040 - protein, 38 aa, Artificial Sequence; identical to SEQ ID NO: 5026
  Cyclic GFR-binding peptide
  MOD_RES (2)..(34)..(35): Xaa is C or S

SEQ ID NO: 43041 - protein, 34 aa, Artificial Sequence
  Cyclic GFR-binding peptide
  MOD_RES (30)..(31): Xaa is C or S
VVMEYHYKLVVKDYEDKYLMSIPSLETPVXXAKP

SEQ ID NO: 43042 - protein, 36 aa, Artificial Sequence; identical to SEQ ID NO: 5028
  Cyclic GFR-binding peptide
  MOD_RES (32)..(33): Xaa is C or S

SEQ ID NO: 43043 - protein, 32 aa, Artificial Sequence; identical to SEQ ID NO: 5030
  Cyclic GFR-binding peptide
  MOD_RES (31)..(32): Xaa is C or S

SEQ ID NO: 43044 - protein, 33 aa, Artificial Sequence
  Cyclic GFR-binding peptide
  MOD_RES (28)..(28): Xaa is C or S
MNYHYKLIVNSSDDKYLVSIPSLKTPAXTPKTV

SEQ ID NO: 43045 - protein, 33 aa, Artificial Sequence
  Cyclic GFR-binding peptide
  MOD_RES (30)..(30): Xaa is C or S
RYKKLFIPKKRVIEFYLVSIANLQVQTPRXQVN

SEQ ID NO: 43046 - protein, 32 aa, Artificial Sequence
  Cyclic GFR-binding peptide
  MOD_RES (2)..(2): Xaa is C or S
GXGEVVMDRHKRLVVKENEDYYLMSTASLETP

SEQ ID NO: 43047 - protein, 32 aa, Artificial Sequence
  Cyclic GFR-binding peptide
  MOD_RES (1)..(3): Xaa is C or S
XKXSKVVMRYKKLVKPTRGVFYLISIANLDQP

SEQ ID NO: 43048 - protein, 30 aa, Artificial Sequence
  Cyclic GFR-binding peptide
  MOD_RES (30)..(30): Xaa is C or S
KVIMRHKRLIKPTKGIYYLISTASLDQSVX

SEQ ID NO: 43049 - protein, 34 aa, Artificial Sequence; identical to SEQ ID NO: 5031
  Cyclic GFR-binding peptide
  MOD_RES (1)..(3): Xaa is C or S

SEQ ID NO: 43050 - protein, 32 aa, Artificial Sequence
  Cyclic GFR-binding peptide
  MOD_RES (26)..(27): Xaa is C or S
YHYKLVKPKRGVKYLISIPSLAQPVXXPAASA

SEQ ID NO: 43051 - protein, 31 aa, Artificial Sequence
  Cyclic GFR-binding peptide
  MOD_RES (2)..(2): Xaa is C or S
GXGEVVMDYHYKLVVKENEDKYLMSIPSLET

SEQ ID NO: 43052 - protein, 31 aa, Artificial Sequence
  Cyclic GFR-binding peptide
  MOD_RES (1)..(1): Xaa is C or S
XALHDELTYHYKLFIPKKRVIEKYLVSIPSL

SEQ ID NO: 43053 - protein, 36 aa, Artificial Sequence
  Cyclic GFR-binding peptide
  MOD_RES (34)..(34): Xaa is C or S
DELTQYNKLFIPKKRVIELYLVSIASLQVQTPRXQV

SEQ ID NO: 43054 - protein, 30 aa, Artificial Sequence
  Cyclic GFR-binding peptide
  MOD_RES (29)..(30): Xaa is C or S
VMNYHYKLIVNSSDDKYLVSIPSLKTPAXX

SEQ ID NO: 43055 - protein, 34 aa, Artificial Sequence; identical to SEQ ID NO: 5034
  Cyclic GFR-binding peptide
  MOD_RES (31)..(32): Xaa is C or S

SEQ ID NO: 43056 - protein, 38 aa, Artificial Sequence; identical to SEQ ID NO: 5035
  Cyclic GFR-binding peptide
  MOD_RES (2)..(4): Xaa is C or S

SEQ ID NO: 43057 - protein, 31 aa, Artificial Sequence
  Cyclic GFR-binding peptide
  MOD_RES (30)..(31): Xaa is C or S
KVIMRYKKLIKPTKGIFYLISIANLDQSVXX

SEQ ID NO: 43058 - protein, 33 aa, Artificial Sequence
  Cyclic GFR-binding peptide
  MOD_RES (29)..(30): Xaa is C or S
VVMRYKKLVKPTRGVFYLISIANLDQPVXXPSA

SEQ ID NO: 43059 - protein, 31 aa, Artificial Sequence
  Cyclic GFR-binding peptide
  MOD_RES (27)..(27): Xaa is C or S
NYHYKLIVNSSDDKYLVSIPSLKTPAXTPKT

SEQ ID NO: 43060 - protein, 29 aa, Artificial Sequence
  Cyclic GFR-binding peptide
EAVSMGERHKRLTPVGMDDYYLVSTASLK

SEQ ID NO: 43061 - protein, 33 aa, Artificial Sequence
  Cyclic GFR-binding peptide
  MOD_RES (2)..(4): Xaa is C or S
SXKXSKVVMYHYKLVKPTRGVKYLISIPSLDQP

SEQ ID NO: 43062 - protein, 35 aa, Artificial Sequence; identical to SEQ ID NO: 5038
  Cyclic GFR-binding peptide

SEQ ID NO: 43063 - protein, 26 aa, Artificial Sequence
  Cyclic GFR-binding peptide
  MOD_RES (26)..(26): Xaa is C or S
RHKRLIVNSSDDYYLVSTASLQTPAX

SEQ ID NO: 43064 - protein, 26 aa, Artificial Sequence
  Cyclic GFR-binding peptide
  MOD_RES (26)..(26): Xaa is C or S
YHYKLIVNNSSDKYLVSIPSLKTPAX

SEQ ID NO: 43065 - protein, 31 aa, Artificial Sequence
  Cyclic GFR-binding peptide
  MOD_RES (1)..(3): Xaa is C or S
XGXGEVVMDRYKKLVVKENEDFYLMSIANLE

SEQ ID NO: 43066 - protein, 33 aa, Artificial Sequence
  Cyclic GFR-binding peptide
  MOD_RES (28)..(29): Xaa is C or S
GERHKRLTPVGMDDYYLVSTASLKTPVXXAKGV

SEQ ID NO: 43067 - protein, 20 aa, Artificial Sequence
  Cyclic GFR-binding peptide
QYNKLIKPTKGILYLISIAS

SEQ ID NO: 43068 - protein, 25 aa, Artificial Sequence
  Cyclic GFR-binding peptide
DYHYKLVVKENEDKYLMSIPSLETP

SEQ ID NO: 43069 - protein, 37 aa, Artificial Sequence; identical to SEQ ID NO: 5042
  Cyclic GFR-binding peptide
  MOD_RES (1)..(33)..(34): Xaa is C or S

SEQ ID NO: 43070 - protein, 26 aa, Artificial Sequence
  Cyclic GFR-binding peptide
MNRHKRLIVNSSDDYYLVSTASLKTP

SEQ ID NO: 43071 - protein, 32 aa, Artificial Sequence
  Cyclic GFR-binding peptide
  MOD_RES (1)..(3): Xaa is C or S
XGXGEVVMEYHYKLVVKDYEDKYLMSIPSLET

SEQ ID NO: 43072 - protein, 37 aa, Artificial Sequence; identical to SEQ ID NO: 5043
  Cyclic GFR-binding peptide
  MOD_RES (1)..(1): Xaa is C or S

SEQ ID NO: 43073 - protein, 30 aa, Artificial Sequence
  Cyclic GFR-binding peptide
  MOD_RES (2)..(2): Xaa is C or S
KXSRVIMRHKRLVKPKRGVYYLISTASLAQ

SEQ ID NO: 43074 - protein, 30 aa, Artificial Sequence
  Cyclic GFR-binding peptide
  MOD_RES (26)..(27): Xaa is C or S
RHKRLIKPTKGIYYLISTASLDQSVXXPSA

SEQ ID NO: 43075 - protein, 34 aa, Artificial Sequence; identical to SEQ ID NO: 5047
  Cyclic GFR-binding peptide
  MOD_RES (32)..(33): Xaa is C or S

SEQ ID NO: 43076 - protein, 22 aa, Artificial Sequence
  Cyclic GFR-binding peptide
RHKRLIVNSSDDYYLVSTASLQ

SEQ ID NO: 43077 - protein, 22 aa, Artificial Sequence
  Cyclic GFR-binding peptide
YHYKLIVNNSSDKYLVSIPSLK

SEQ ID NO: 43078 - protein, 35 aa, Artificial Sequence; identical to SEQ ID NO: 5048
  Cyclic GFR-binding peptide
  MOD_RES (2)..(4): Xaa is C or S

SEQ ID NO: 43079 - protein, 34 aa, Artificial Sequence; identical to SEQ ID NO: 5051
  Cyclic GFR-binding peptide
  MOD_RES (32)..(32): Xaa is C or S

SEQ ID NO: 43080 - protein, 31 aa, Artificial Sequence
  Cyclic GFR-binding peptide
  MOD_RES (29)..(30): Xaa is C or S
VMNQYNKLIVNSSDDLYLVSIASLQTPAXXP

SEQ ID NO: 43081 - protein, 29 aa, Artificial Sequence
  Cyclic GFR-binding peptide
  MOD_RES (28)..(29): Xaa is C or S
MNQYNKLIVNNSSDLYLVSIASLKTPAXX

SEQ ID NO: 43082 - protein, 32 aa, Artificial Sequence; identical to SEQ ID NO: 5053
  Cyclic GFR-binding peptide
  MOD_RES (31)..(32): Xaa is C or S

SEQ ID NO: 43083 - protein, 31 aa, Artificial Sequence
  Cyclic GFR-binding peptide
  MOD_RES (1)..(1): Xaa is C or S
XEAVSMGEQYNKLTPVGMDDLYLVSIASLKT

SEQ ID NO: 43084 - protein, 25 aa, Artificial Sequence
  Cyclic GFR-binding peptide
KVVMRHKRLVKPTRGVYYLISTASL

SEQ ID NO: 43085 - protein, 31 aa, Artificial Sequence
  Cyclic GFR-binding peptide
  MOD_RES (26)..(27): Xaa is C or S
YHYKLIVNNSSDKYLVSIPSLKTPAXXAKPV

SEQ ID NO: 43086 - protein, 41 aa, Artificial Sequence; identical to SEQ ID NO: 5054
  Cyclic GFR-binding peptide
  MOD_RES (2)..(4)..(36)..(37): Xaa is C or S

SEQ ID NO: 43087 - protein, 31 aa, Artificial Sequence
  Cyclic GFR-binding peptide
  MOD_RES (28)..(29): Xaa is C or S
MNRYKKLIVNNSSDFYLVSIANLKTPAXXAK

SEQ ID NO: 43088 - protein, 35 aa, Artificial Sequence
  Cyclic GFR-binding peptide
  MOD_RES (32)..(32): Xaa is C or S
LTYHYKLFIPKKRVIEKYLVSIPSLQVQTPRXQVN

SEQ ID NO: 43089 - protein, 39 aa, Artificial Sequence; identical to SEQ ID NO: 5055
  Cyclic GFR-binding peptide
  MOD_RES (1)..(3)..(36)..(37): Xaa is C or S

SEQ ID NO: 43090 - protein, 33 aa, Artificial Sequence
  Cyclic GFR-binding peptide
  MOD_RES (2)..(2): Xaa is C or S
GXEAVSMGEQYNKLTPVGMDDLYLVSIASLKTP

SEQ ID NO: 43091 - protein, 34 aa, Artificial Sequence; identical to SEQ ID NO: 5057
  Cyclic GFR-binding peptide

SEQ ID NO: 43092 - protein, 21 aa, Artificial Sequence
  Cyclic GFR-binding peptide
QYNKLVKPKRGVLYLISIASL

SEQ ID NO: 43093 - protein, 32 aa, Artificial Sequence
  Cyclic GFR-binding peptide
  MOD_RES (31)..(32): Xaa is C or S
VSMGEQYNKLTPVGMDDLYLVSIASLKTPVXX

SEQ ID NO: 43094 - protein, 26 aa, Artificial Sequence
  Cyclic GFR-binding peptide
MRYKKLVKPKRGVFYLISIANLAQPV

SEQ ID NO: 43095 - protein, 21 aa, Artificial Sequence
  Cyclic GFR-binding peptide
MYHYKLVKPTRGVKYLISIPS

SEQ ID NO: 43096 - protein, 22 aa, Artificial Sequence
  Cyclic GFR-binding peptide
MYHYKLIKPTKGIKYLISIPSL

SEQ ID NO: 43097 - protein, 36 aa, Artificial Sequence; identical to SEQ ID NO: 5059
  Cyclic GFR-binding peptide
  MOD_RES (2)..(2): Xaa is C or S

SEQ ID NO: 43098 - protein, 31 aa, Artificial Sequence
  Cyclic GFR-binding peptide
ALHDELTYHYKLFIPKKRVIEKYLVSIPSLQ

SEQ ID NO: 43099 - protein, 32 aa, Artificial Sequence
  Cyclic GFR-binding peptide
  MOD_RES (26)..(27): Xaa is C or S
RHKRLIVNSSDDYYLVSTASLQTPAXXPKPVT

SEQ ID NO: 43100 - protein, 26 aa, Artificial Sequence
  Cyclic GFR-binding peptide
  MOD_RES (26)..(26): Xaa is C or S
YHYKLVKPTRGVKYLISIPSLDQPVX

SEQ ID NO: 43101 - protein, 23 aa, Artificial Sequence
  Cyclic GFR-binding peptide
RHKRLIVNSSDDYYLVSTASLQT

SEQ ID NO: 43102 - protein, 32 aa, Artificial Sequence; identical to SEQ ID NO: 5060
  Cyclic GFR-binding peptide
  MOD_RES (32)..(32): Xaa is C or S

SEQ ID NO: 43103 - protein, 23 aa, Artificial Sequence
  Cyclic GFR-binding peptide
RHKRLIKPTKGIYYLISTASLDQ

SEQ ID NO: 43104 - protein, 32 aa, Artificial Sequence; identical to SEQ ID NO: 5061
  Cyclic GFR-binding peptide
  MOD_RES (31)..(32): Xaa is C or S

SEQ ID NO: 43105 - protein, 30 aa, Artificial Sequence
  Cyclic GFR-binding peptide
  MOD_RES (1)..(3): Xaa is C or S
XKXSKVVMQYNKLVKPTRGVLYLISIASLD

SEQ ID NO: 43106 - protein, 32 aa, Artificial Sequence
  Cyclic GFR-binding peptide
  MOD_RES (27)..(28): Xaa is C or S
MRHKRLIKPTKGIYYLISTASLDQSVXXPSAS

SEQ ID NO: 43107 - protein, 24 aa, Artificial Sequence
  Cyclic GFR-binding peptide
VVMNYHYKLIVNSSDDKYLVSIPS

SEQ ID NO: 43108 - protein, 35 aa, Artificial Sequence
  Cyclic GFR-binding peptide
  MOD_RES (2)..(4): Xaa is C or S
RXGXEAVSMGERYKKLTPVGMDDFYLVSIANLKTP

SEQ ID NO: 43109 - protein, 32 aa, Artificial Sequence; identical to SEQ ID NO: 5065
  Cyclic GFR-binding peptide
  MOD_RES (1)..(32): Xaa is C or S

SEQ ID NO: 43110 - protein, 29 aa, Artificial Sequence
  Cyclic GFR-binding peptide
GEVVMERHKRLVVKDYEDYYLMSTASLET

SEQ ID NO: 43111 - protein, 20 aa, Artificial Sequence
  Cyclic GFR-binding peptide
RHKRLVVKDYEDYYLMSTAS

SEQ ID NO: 43112 - protein, 30 aa, Artificial Sequence
  Cyclic GFR-binding peptide
  MOD_RES (2)..(4): Xaa is C or S
SXKXSKVIMQYNKLIKPTKGILYLISIASL

SEQ ID NO: 43113 - protein, 29 aa, Artificial Sequence
  Cyclic GFR-binding peptide
  MOD_RES (28)..(28): Xaa is C or S
MNYHYKLIVNSSDDKYLVSIPSLKTPAXT

SEQ ID NO: 43114 - protein, 26 aa, Artificial Sequence
  Cyclic GFR-binding peptide
IMRHKRLVKPKRGVYYLISTASLAQP

SEQ ID NO: 43115 - protein, 25 aa, Artificial Sequence
  Cyclic GFR-binding peptide
VIMRYKKLIKPTKGIFYLISIANLD

SEQ ID NO: 43116 - protein, 29 aa, Artificial Sequence
  Cyclic GFR-binding peptide
  MOD_RES (29)..(29): Xaa is C or S
VIMRYKKLIKPTKGIFYLISIANLDQSVX

SEQ ID NO: 43117 - protein, 26 aa, Artificial Sequence
  Cyclic GFR-binding peptide
VMRYKKLVKPTRGVFYLISIANLDQP

SEQ ID NO: 43118 - protein, 35 aa, Artificial Sequence; identical to SEQ ID NO: 5071
  Cyclic GFR-binding peptide
  MOD_RES (31)..(32): Xaa is C or S

SEQ ID NO: 43119 - protein, 30 aa, Artificial Sequence
  Cyclic GFR-binding peptide
SRVVMNYHYKLIVNSSDDKYLVSIPSLKTP

SEQ ID NO: 43120 - protein, 28 aa, Artificial Sequence
  Cyclic GFR-binding peptide
  MOD_RES (26)..(27): Xaa is C or S
RYKKLIVNNSSDFYLVSIANLKTPAXXA

SEQ ID NO: 43121 - protein, 29 aa, Artificial Sequence
  Cyclic GFR-binding peptide
DELTYHYKLFIPKKRVIEKYLVSIPSLQV

SEQ ID NO: 43122 - protein, 29 aa, Artificial Sequence
  Cyclic GFR-binding peptide
  MOD_RES (26)..(26): Xaa is C or S
QYNKLIVNSSDDLYLVSIASLKTPAXTPK

SEQ ID NO: 43123 - protein, 31 aa, Artificial Sequence; identical to SEQ ID NO: 5075
  Cyclic GFR-binding peptide

SEQ ID NO: 43124 - protein, 23 aa, Artificial Sequence
  Cyclic GFR-binding peptide
NQYNKLIVNNSSDLYLVSIASLK

SEQ ID NO: 43125 - protein, 30 aa, Artificial Sequence
  Cyclic GFR-binding peptide
  MOD_RES (29)..(29): Xaa is C or S
VMNYHYKLIVNSSDDKYLVSIPSLKTPAXT

SEQ ID NO: 43126 - protein, 33 aa, Artificial Sequence; identical to SEQ ID NO: 5077
  Cyclic GFR-binding peptide
  MOD_RES (1)..(33): Xaa is C or S

SEQ ID NO: 43127 - protein, 27 aa, Artificial Sequence
  Cyclic GFR-binding peptide
IMYHYKLVKPKRGVKYLISIPSLAQPV

SEQ ID NO: 43128 - protein, 28 aa, Artificial Sequence
  Cyclic GFR-binding peptide
  MOD_RES (26)..(27): Xaa is C or S
RYKKLVKPTRGVFYLISIANLDQPVXXP

SEQ ID NO: 43129 - protein, 34 aa, Artificial Sequence; identical to SEQ ID NO: 5080
  Cyclic GFR-binding peptide
  MOD_RES (2)..(4): Xaa is C or S

SEQ ID NO: 43130 - protein, 27 aa, Artificial Sequence
  Cyclic GFR-binding peptide
ARVVMNYHYKLIVNSSDDKYLVSIPSL

SEQ ID NO: 43131 - protein, 32 aa, Artificial Sequence
  Cyclic GFR-binding peptide
  MOD_RES (29)..(30): Xaa is C or S
VVMYHYKLVKPTRGVKYLISIPSLDQPVXXPS

SEQ ID NO: 43132 - protein, 34 aa, Artificial Sequence
  Cyclic GFR-binding peptide
  MOD_RES (30)..(30): Xaa is C or S
RHKRLFIPKKRVIEYYLVSTASLQVQTPRXQVNR

SEQ ID NO: 43133 - protein, 37 aa, Artificial Sequence; identical to SEQ ID NO: 5082
  Cyclic GFR-binding peptide
  MOD_RES (1)..(3): Xaa is C or S

SEQ ID NO: 43134 - protein, 27 aa, Artificial Sequence
  Cyclic GFR-binding peptide
KVVMQYNKLVKPTRGVLYLISIASLDQ

SEQ ID NO: 43135 - protein, 37 aa, Artificial Sequence; identical to SEQ ID NO: 5083
  Cyclic GFR-binding peptide
  MOD_RES (1)..(3)..(35)..(36): Xaa is C or S

SEQ ID NO: 43136 - protein, 30 aa, Artificial Sequence
  Cyclic GFR-binding peptide
  MOD_RES (1)..(3): Xaa is C or S
XGXGEVVMERYKKLVVKDYEDFYLMSIANL

SEQ ID NO: 43137 - protein, 37 aa, Artificial Sequence; identical to SEQ ID NO: 5084
  Cyclic GFR-binding peptide
  MOD_RES (1)..(33)..(34): Xaa is C or S

SEQ ID NO: 43138 - protein, 25 aa, Artificial Sequence
  Cyclic GFR-binding peptide
VMYHYKLVKPTRGVKYLISIPSLDQ

SEQ ID NO: 43139 - protein, 24 aa, Artificial Sequence
  Cyclic GFR-binding peptide
IMRHKRLVKPKRGVYYLISTASLA

SEQ ID NO: 43140 - protein, 32 aa, Artificial Sequence; identical to SEQ ID NO: 5085
  Cyclic GFR-binding peptide
  MOD_RES (31)..(32): Xaa is C or S

SEQ ID NO: 43141 - protein, 27 aa, Artificial Sequence
  Cyclic GFR-binding peptide
SRVVMNYHYKLIVNSSDDKYLVSIPSL

SEQ ID NO: 43142 - protein, 40 aa, Artificial Sequence; identical to SEQ ID NO: 5089
  Cyclic GFR-binding peptide
  MOD_RES (1)..(3)..(35)..(36): Xaa is C or S

SEQ ID NO: 43143 - protein, 27 aa, Artificial Sequence
  Cyclic GFR-binding peptide
MGERYKKLTPVGMDDFYLVSIANLKTP

SEQ ID NO: 43144 - protein, 33 aa, Artificial Sequence
  Cyclic GFR-binding peptide
  MOD_RES (29)..(30): Xaa is C or S
VIMQYNKLVKPKRGVLYLISIASLAQPVXXPAA

SEQ ID NO: 43145 - protein, 23 aa, Artificial Sequence
  Cyclic GFR-binding peptide
MRHKRLIKPTKGIYYLISTASLD

SEQ ID NO: 43146 - protein, 40 aa, Artificial Sequence; identical to SEQ ID NO: 5090
  Cyclic GFR-binding peptide
  MOD_RES (1)..(38): Xaa is C or S

SEQ ID NO: 43147 - protein, 26 aa, Artificial Sequence
  Cyclic GFR-binding peptide
SKVIMRYKKLIKPTKGIFYLISIANL

SEQ ID NO: 43148 - protein, 26 aa, Artificial Sequence
  Cyclic GFR-binding peptide
IMYHYKLVKPKRGVKYLISIPSLAQP

SEQ ID NO: 43149 - protein, 32 aa, Artificial Sequence
  Cyclic GFR-binding peptide
  MOD_RES (2)..(4): Xaa is C or S
RXGXEAVSMGEQYNKLTPVGMDDLYLVSIASL

SEQ ID NO: 43150 - protein, 29 aa, Artificial Sequence
  Cyclic GFR-binding peptide
  MOD_RES (28)..(29): Xaa is C or S
IMRHKRLIKPTKGIYYLISTASLDQSVXX

SEQ ID NO: 43151 - protein, 31 aa, Artificial Sequence
  Cyclic GFR-binding peptide
  MOD_RES (28)..(29): Xaa is C or S
MDRHKRLVVKENEDYYLMSTASLETPVXXAK

SEQ ID NO: 43152 - protein, 36 aa, Artificial Sequence
  Cyclic GFR-binding peptide
  MOD_RES (30)..(30): Xaa is C or S
VVMNYHYKLIVNSSDDKYLVSIPSLKTPAXTPKTVH

SEQ ID NO: 43153 - protein, 28 aa, Artificial Sequence
  Cyclic GFR-binding peptide
  MOD_RES (28)..(28): Xaa is C or S
IMRHKRLIKPTKGIYYLISTASLDQSVX

SEQ ID NO: 43154 - protein, 31 aa, Artificial Sequence
  Cyclic GFR-binding peptide
  MOD_RES (29)..(30): Xaa is C or S
MGERHKRLTPVGMDDYYLVSTASLKTPVXXA

SEQ ID NO: 43155 - protein, 33 aa, Artificial Sequence
  Cyclic GFR-binding peptide
  MOD_RES (30)..(31): Xaa is C or S
RVIMYHYKLVKPKRGVKYLISIPSLAQPVXXPA

SEQ ID NO: 43156 - protein, 34 aa, Artificial Sequence
  Cyclic GFR-binding peptide
  MOD_RES (33)..(33): Xaa is C or S
ELTRYKKLFIPKKRVIEFYLVSIANLQVQTPRXQ

SEQ ID NO: 43157 - protein, 35 aa, Artificial Sequence; identical to SEQ ID NO: 5096
  Cyclic GFR-binding peptide
  MOD_RES (2)..(33)..(34): Xaa is C or S

SEQ ID NO: 43158 - protein, 31 aa, Artificial Sequence
  Cyclic GFR-binding peptide
  MOD_RES (2)..(2): Xaa is C or S
GXAKVVMNQYNKLIVNNSSDLYLVSIASLKT

SEQ ID NO: 43159 - protein, 32 aa, Artificial Sequence
  Cyclic GFR-binding peptide
  MOD_RES (1)..(3): Xaa is C or S
XGXGEVVMDYHYKLVVKENEDKYLMSIPSLET

SEQ ID NO: 43160 - protein, 23 aa, Artificial Sequence
  Cyclic GFR-binding peptide
DRHKRLVVKENEDYYLMSTASLE

SEQ ID NO: 43161 - protein, 34 aa, Artificial Sequence; identical to SEQ ID NO: 5102
  Cyclic GFR-binding peptide
  MOD_RES (1)..(32)..(33): Xaa is C or S

SEQ ID NO: 43162 - protein, 32 aa, Artificial Sequence
  Cyclic GFR-binding peptide
  MOD_RES (26)..(27): Xaa is C or S
YHYKLVVKENEDKYLMSIPSLETPVXXAKPIK

SEQ ID NO: 43163 - protein, 26 aa, Artificial Sequence
  Cyclic GFR-binding peptide
VMDRYKKLVVKENEDFYLMSIANLET

SEQ ID NO: 43164 - protein, 31 aa, Artificial Sequence
  Cyclic GFR-binding peptide
  MOD_RES (31)..(31): Xaa is C or S
VSMGEQYNKLTPVGMDDLYLVSIASLKTPVX

SEQ ID NO: 43165 - protein, 27 aa, Artificial Sequence
  Cyclic GFR-binding peptide
VMNRYKKLIVNNSSDFYLVSIANLKTP

SEQ ID NO: 43166 - protein, 32 aa, Artificial Sequence; identical to SEQ ID NO: 5105
  Cyclic GFR-binding peptide
  MOD_RES (31)..(32): Xaa is C or S

SEQ ID NO: 43167 - protein, 22 aa, Artificial Sequence
  Cyclic GFR-binding peptide
IMYHYKLVKPKRGVKYLISIPS

SEQ ID NO: 43168 - protein, 37 aa, Artificial Sequence; identical to SEQ ID NO: 5109
  Cyclic GFR-binding peptide
  MOD_RES (33)..(34): Xaa is C or S

SEQ ID NO: 43169 - protein, 33 aa, Artificial Sequence; identical to SEQ ID NO: 5112
  Cyclic GFR-binding peptide
  MOD_RES (1)..(33): Xaa is C or S

SEQ ID NO: 43170 - protein, 32 aa, Artificial Sequence
  Cyclic GFR-binding peptide
  MOD_RES (27)..(28): Xaa is C or S
MYHYKLVKPKRGVKYLISIPSLAQPVXXPAAS

SEQ ID NO: 43171 - protein, 27 aa, Artificial Sequence
  Cyclic GFR-binding peptide
  MOD_RES (27)..(27): Xaa is C or S
MYHYKLIKPTKGIKYLISIPSLDQSVX

SEQ ID NO: 43172 - protein, 27 aa, Artificial Sequence
  Cyclic GFR-binding peptide
  MOD_RES (26)..(27): Xaa is C or S
RHKRLIVNSSDDYYLVSTASLKTPAXX

SEQ ID NO: 43173 - protein, 34 aa, Artificial Sequence
  Cyclic GFR-binding peptide
  MOD_RES (30)..(31): Xaa is C or S
SMGEQYNKLTPVGMDDLYLVSIASLKTPVXXAKG

SEQ ID NO: 43174 - protein, 29 aa, Artificial Sequence
  Cyclic GFR-binding peptide
  MOD_RES (29)..(29): Xaa is C or S
VIMYHYKLVKPKRGVKYLISIPSLAQPVX

SEQ ID NO: 43175 - protein, 33 aa, Artificial Sequence
  Cyclic GFR-binding peptide
  MOD_RES (1)..(3): Xaa is C or S
XGXGEVVMDRHKRLVVKENEDYYLMSTASLETP

SEQ ID NO: 43176 - protein, 31 aa, Artificial Sequence
  Cyclic GFR-binding peptide
  MOD_RES (27)..(28): Xaa is C or S
EQYNKLTPVGMDDLYLVSIASLKTPVXXAKG

SEQ ID NO: 43177 - protein, 31 aa, Artificial Sequence
  Cyclic GFR-binding peptide
  MOD_RES (1)..(3): Xaa is C or S
XKXSKVVMYHYKLVKPTRGVKYLISIPSLDQ

SEQ ID NO: 43178 - protein, 32 aa, Artificial Sequence
  Cyclic GFR-binding peptide
  MOD_RES (29)..(30): Xaa is C or S
VIMYHYKLVKPKRGVKYLISIPSLAQPVXXPA

SEQ ID NO: 43179 - protein, 28 aa, Artificial Sequence
  Cyclic GFR-binding peptide
  MOD_RES (26)..(27): Xaa is C or S
YHYKLIVNNSSDKYLVSIPSLKTPAXXA

SEQ ID NO: 43180 - protein, 32 aa, Artificial Sequence
  Cyclic GFR-binding peptide
  MOD_RES (1)..(3): Xaa is C or S
XKXALHDELTQYNKLFIPKKRVIELYLVSIAS

SEQ ID NO: 43181 - protein, 34 aa, Artificial Sequence
  Cyclic GFR-binding peptide
  MOD_RES (2)..(4): Xaa is C or S
EXKXALHDELTYHYKLFIPKKRVIEKYLVSIPSL

SEQ ID NO: 43182 - protein, 40 aa, Artificial Sequence; identical to SEQ ID NO: 5118
  Cyclic GFR-binding peptide
  MOD_RES (2)..(4)..(36)..(37): Xaa is C or S

SEQ ID NO: 43183 - protein, 35 aa, Artificial Sequence
  Cyclic GFR-binding peptide
  MOD_RES (29)..(30): Xaa is C or S
VMNYHYKLIVNSSDDKYLVSIPSLQTPAXXPKPVT

SEQ ID NO: 43184 - protein, 39 aa, Artificial Sequence; identical to SEQ ID NO: 5120
  Cyclic GFR-binding peptide
  MOD_RES (2)..(4)..(36)..(37): Xaa is C or S

SEQ ID NO: 43185 - protein, 24 aa, Artificial Sequence
  Cyclic GFR-binding peptide
LTYHYKLFIPKKRVIEKYLVSIPS

SEQ ID NO: 43186 - protein, 34 aa, Artificial Sequence
  Cyclic GFR-binding peptide
  MOD_RES (33)..(33): Xaa is C or S
ELTQYNKLFIPKKRVIELYLVSIASLQVQTPRXQ

SEQ ID NO: 43187 - protein, 34 aa, Artificial Sequence; identical to SEQ ID NO: 5121
  Cyclic GFR-binding peptide
  MOD_RES (1)..(33)..(34): Xaa is C or S

SEQ ID NO: 43188 - protein, 24 aa, Artificial Sequence
  Cyclic GFR-binding peptide
TQYNKLFIPKKRVIELYLVSIASL

SEQ ID NO: 43189 - protein, 29 aa, Artificial Sequence
  Cyclic GFR-binding peptide
  MOD_RES (2)..(2): Xaa is C or S
KXSKVIMYHYKLIKPTKGIKYLISIPSLD

SEQ ID NO: 43190 - protein, 38 aa, Artificial Sequence; identical to SEQ ID NO: 5123
  Cyclic GFR-binding peptide
  MOD_RES (2)..(2): Xaa is C or S

SEQ ID NO: 43191 - protein, 23 aa, Artificial Sequence
  Cyclic GFR-binding peptide
QYNKLVKPKRGVLYLISIASLAQ

SEQ ID NO: 43192 - protein, 29 aa, Artificial Sequence
  Cyclic GFR-binding peptide
  MOD_RES (27)..(28): Xaa is C or S
MYHYKLVKPTRGVKYLISIPSLDQPVXXP

SEQ ID NO: 43193 - protein, 33 aa, Artificial Sequence
  Cyclic GFR-binding peptide
  MOD_RES (28)..(29): Xaa is C or S
VMRYKKLVKPTRGVFYLISIANLDQPVXXPSAS

SEQ ID NO: 43194 - protein, 31 aa, Artificial Sequence
  Cyclic GFR-binding peptide
  MOD_RES (30)..(31): Xaa is C or S
VVMERHKRLVVKDYEDYYLMSTASLETPVXX

SEQ ID NO: 43195 - protein, 29 aa, Artificial Sequence
  Cyclic GFR-binding peptide
  MOD_RES (28)..(29): Xaa is C or S
IMQYNKLVKPKRGVLYLISIASLAQPVXX

SEQ ID NO: 43196 - protein, 38 aa, Artificial Sequence; identical to SEQ ID NO: 5126
  Cyclic GFR-binding peptide
  MOD_RES (2)..(33)..(34): Xaa is C or S

SEQ ID NO: 43197 - protein, 29 aa, Artificial Sequence
  Cyclic GFR-binding peptide
  MOD_RES (27)..(28): Xaa is C or S
NQYNKLIVNNSSDLYLVSIASLKTPAXXA

SEQ ID NO: 43198 - protein, 32 aa, Artificial Sequence
  Cyclic GFR-binding peptide
  MOD_RES (32)..(32): Xaa is C or S
LTQYNKLFIPKKRVIELYLVSIASLQVQTPRX

SEQ ID NO: 43199 - protein, 25 aa, Artificial Sequence
  Cyclic GFR-binding peptide
SRVIMRYKKLVKPKRGVFYLISIAN

SEQ ID NO: 43200 - protein, 29 aa, Artificial Sequence
  Cyclic GFR-binding peptide
  MOD_RES (29)..(29): Xaa is C or S
MGEQYNKLTPVGMDDLYLVSIASLKTPVX

SEQ ID NO: 43201 - protein, 27 aa, Artificial Sequence
  Cyclic GFR-binding peptide
AVSMGERHKRLTPVGMDDYYLVSTASL

SEQ ID NO: 43202 - protein, 28 aa, Artificial Sequence
  Cyclic GFR-binding peptide
  MOD_RES (28)..(28): Xaa is C or S
MNQYNKLIVNNSSDLYLVSIASLKTPAX

SEQ ID NO: 43203 - protein, 28 aa, Artificial Sequence
  Cyclic GFR-binding peptide
  MOD_RES (27)..(27): Xaa is C or S
NQYNKLIVNSSDDLYLVSIASLKTPAXT

SEQ ID NO: 43204 - protein, 36 aa, Artificial Sequence; identical to SEQ ID NO: 5127
  Cyclic GFR-binding peptide
  MOD_RES (2)..(4)..(36): Xaa is C or S

SEQ ID NO: 43205 - protein, 31 aa, Artificial Sequence
  Cyclic GFR-binding peptide
  MOD_RES (1)..(3): Xaa is C or S
XGXGEVVMERYKKLVVKDYEDFYLMSIANLE

SEQ ID NO: 43206 - protein, 36 aa, Artificial Sequence; identical to SEQ ID NO: 5129
  Cyclic GFR-binding peptide
  MOD_RES (31)..(31): Xaa is C or S

SEQ ID NO: 43207 - protein, 37 aa, Artificial Sequence; identical to SEQ ID NO: 5128
  Cyclic GFR-binding peptide
  MOD_RES (2)..(33)..(34): Xaa is C or S

SEQ ID NO: 43208 - protein, 25 aa, Artificial Sequence
  Cyclic GFR-binding peptide
KVVMNQYNKLIVNNSSDLYLVSIAS

SEQ ID NO: 43209 - protein, 34 aa, Artificial Sequence; identical to SEQ ID NO: 5131
  Cyclic GFR-binding peptide
  MOD_RES (31)..(32): Xaa is C or S

SEQ ID NO: 43210 - protein, 30 aa, Artificial Sequence
  Cyclic GFR-binding peptide
  MOD_RES (2)..(2): Xaa is C or S
KXSRVIMRYKKLVKPKRGVFYLISIANLAQ

SEQ ID NO: 43211 - protein, 30 aa, Artificial Sequence
  Cyclic GFR-binding peptide
  MOD_RES (1)..(1): Xaa is C or S
XGEVVMDRHKRLVVKENEDYYLMSTASLET

SEQ ID NO: 43212 - protein, 27 aa, Artificial Sequence
  Cyclic GFR-binding peptide
  MOD_RES (26)..(27): Xaa is C or S
RHKRLIKPTKGIYYLISTASLDQSVXX

SEQ ID NO: 43213 - protein, 40 aa, Artificial Sequence; identical to SEQ ID NO: 5134
  Cyclic GFR-binding peptide
  MOD_RES (2)..(4)..(36)..(37): Xaa is C or S

SEQ ID NO: 43214 - protein, 24 aa, Artificial Sequence
  Cyclic GFR-binding peptide
VMNQYNKLIVNNSSDLYLVSIASL

SEQ ID NO: 43215 - protein, 29 aa, Artificial Sequence
  Cyclic GFR-binding peptide
  MOD_RES (26)..(27): Xaa is C or S
YHYKLVKPKRGVKYLISIPSLAQPVXXPA

SEQ ID NO: 43216 - protein, 32 aa, Artificial Sequence; identical to SEQ ID NO: 5136
  Cyclic GFR-binding peptide
  MOD_RES (1)..(32): Xaa is C or S

SEQ ID NO: 43217 - protein, 24 aa, Artificial Sequence
  Cyclic GFR-binding peptide
MYHYKLVKPKRGVKYLISIPSLAQ

SEQ ID NO: 43218 - protein, 33 aa, Artificial Sequence
  Cyclic GFR-binding peptide
  MOD_RES (30)..(31): Xaa is C or S
KVVMRYKKLVKPTRGVFYLISIANLDQPVXXPS

SEQ ID NO: 43219 - protein, 26 aa, Artificial Sequence
  Cyclic GFR-binding peptide
MNYHYKLIVNSSDDKYLVSIPSLQTP

SEQ ID NO: 43220 - protein, 30 aa, Artificial Sequence
  Cyclic GFR-binding peptide
  MOD_RES (27)..(28): Xaa is C or S
NYHYKLIVNSSDDKYLVSIPSLKTPAXXPK

SEQ ID NO: 43221 - protein, 33 aa, Artificial Sequence
  Cyclic GFR-binding peptide
  MOD_RES (29)..(30): Xaa is C or S
VIMRHKRLIKPTKGIYYLISTASLDQSVXXPSA

SEQ ID NO: 43222 - protein, 26 aa, Artificial Sequence
  Cyclic GFR-binding peptide
VMNQYNKLIVNSSDDLYLVSIASLKT

SEQ ID NO: 43223 - protein, 31 aa, Artificial Sequence
  Cyclic GFR-binding peptide
HDELTQYNKLFIPKKRVIELYLVSIASLQVQ

SEQ ID NO: 43224 - protein, 23 aa, Artificial Sequence
  Cyclic GFR-binding peptide
VVMRHKRLVKPTRGVYYLISTAS

SEQ ID NO: 43225 - protein, 23 aa, Artificial Sequence
  Cyclic GFR-binding peptide
VMDRHKRLVVKENEDYYLMSTAS

SEQ ID NO: 43226 - protein, 31 aa, Artificial Sequence; identical to SEQ ID NO: 5145
  Cyclic GFR-binding peptide
  MOD_RES (1)..(1): Xaa is C or S

SEQ ID NO: 43227 - protein, 41 aa, Artificial Sequence; identical to SEQ ID NO: 5146
  Cyclic GFR-binding peptide
  MOD_RES (2)..(4)..(35)..(36): Xaa is C or S

SEQ ID NO: 43228 - protein, 28 aa, Artificial Sequence
  Cyclic GFR-binding peptide
SKVVMYHYKLVKPTRGVKYLISIPSLDQ

SEQ ID NO: 43229 - protein, 31 aa, Artificial Sequence
  Cyclic GFR-binding peptide
  MOD_RES (29)..(30): Xaa is C or S
VIMRYKKLVKPKRGVFYLISIANLAQPVXXP

SEQ ID NO: 43230 - protein, 33 aa, Artificial Sequence
  Cyclic GFR-binding peptide
  MOD_RES (30)..(30): Xaa is C or S
VVMNQYNKLIVNSSDDLYLVSIASLKTPAXTPK

SEQ ID NO: 43231 - protein, 30 aa, Artificial Sequence
  Cyclic GFR-binding peptide
  MOD_RES (1)..(3): Xaa is C or S
XGXGEVVMDRYKKLVVKENEDFYLMSIANL

SEQ ID NO: 43232 - protein, 39 aa, Artificial Sequence; identical to SEQ ID NO: 5149
  Cyclic GFR-binding peptide
  MOD_RES (2)..(4)..(35)..(36): Xaa is C or S

SEQ ID NO: 43233 - protein, 28 aa, Artificial Sequence
  Cyclic GFR-binding peptide
  MOD_RES (28)..(28): Xaa is C or S
IMQYNKLVKPKRGVLYLISIASLAQPVX

SEQ ID NO: 43234 - protein, 21 aa, Artificial Sequence
  Cyclic GFR-binding peptide
MRHKRLVKPKRGVYYLISTAS

SEQ ID NO: 43235 - protein, 34 aa, Artificial Sequence
  Cyclic GFR-binding peptide
  MOD_RES (1)..(3): Xaa is C or S
XKXALHDELTYHYKLFIPKKRVIEKYLVSIPSLQ

SEQ ID NO: 43236 - protein, 36 aa, Artificial Sequence; identical to SEQ ID NO: 5150
  Cyclic GFR-binding peptide
  MOD_RES (1)..(3)..(35)..(36): Xaa is C or S

SEQ ID NO: 43237 - protein, 22 aa, Artificial Sequence
  Cyclic GFR-binding peptide
RHKRLIKPTKGIYYLISTASLD

SEQ ID NO: 43238 - protein, 33 aa, Artificial Sequence
  Cyclic GFR-binding peptide
  MOD_RES (27)..(28): Xaa is C or S
NYHYKLIVNNSSDKYLVSIPSLKTPAXXAKPVA

SEQ ID NO: 43239 - protein, 37 aa, Artificial Sequence
  Cyclic GFR-binding peptide
  MOD_RES (2)..(4): Xaa is C or S
EXKXALHDELTYHYKLFIPKKRVIEKYLVSIPSLQVQ

SEQ ID NO: 43240 - protein, 27 aa, Artificial Sequence
  Cyclic GFR-binding peptide
VSMGERHKRLTPVGMDDYYLVSTASLK

SEQ ID NO: 43241 - protein, 33 aa, Artificial Sequence; identical to SEQ ID NO: 5152
  Cyclic GFR-binding peptide
  MOD_RES (2)..(2): Xaa is C or S

SEQ ID NO: 43242 - protein, 33 aa, Artificial Sequence
  Cyclic GFR-binding peptide
  MOD_RES (30)..(31): Xaa is C or S
VVMERHKRLVVKDYEDYYLMSTASLETPVXXAK

SEQ ID NO: 43243 - protein, 40 aa, Artificial Sequence; identical to SEQ ID NO: 5155
  Cyclic GFR-binding peptide
  MOD_RES (1)..(3)..(35)..(36): Xaa is C or S

SEQ ID NO: 43244 - protein, 39 aa, Artificial Sequence; identical to SEQ ID NO: 5156
  Cyclic GFR-binding peptide
  MOD_RES (1)..(34)..(35): Xaa is C or S

SEQ ID NO: 43245 - protein, 32 aa, Artificial Sequence
  Cyclic GFR-binding peptide
  MOD_RES (28)..(29): Xaa is C or S
IMYHYKLIKPTKGIKYLISIPSLDQSVXXPSA

SEQ ID NO: 43246 - protein, 32 aa, Artificial Sequence
  Cyclic GFR-binding peptide
  MOD_RES (2)..(4): Xaa is C or S
RXGXEAVSMGERHKRLTPVGMDDYYLVSTASL

SEQ ID NO: 43247 - protein, 27 aa, Artificial Sequence
  Cyclic GFR-binding peptide
EVVMDRHKRLVVKENEDYYLMSTASLE

SEQ ID NO: 43248 - protein, 34 aa, Artificial Sequence; identical to SEQ ID NO: 5157
  Cyclic GFR-binding peptide
  MOD_RES (31)..(32): Xaa is C or S

SEQ ID NO: 43249 - protein, 39 aa, Artificial Sequence; identical to SEQ ID NO: 5158
  Cyclic GFR-binding peptide
  MOD_RES (2)..(34)..(35): Xaa is C or S

SEQ ID NO: 43250 - protein, 31 aa, Artificial Sequence
  Cyclic GFR-binding peptide
  MOD_RES (2)..(2): Xaa is C or S
GXSRVVMNRHKRLIVNSSDDYYLVSTASLKT

SEQ ID NO: 43251 - protein, 26 aa, Artificial Sequence
  Cyclic GFR-binding peptide
  MOD_RES (26)..(26): Xaa is C or S
YHYKLVKPKRGVKYLISIPSLAQPVX

SEQ ID NO: 43252 - protein, 30 aa, Artificial Sequence
  Cyclic GFR-binding peptide
SRVVMNQYNKLIVNSSDDLYLVSIASLKTP

SEQ ID NO: 43253 - protein, 21 aa, Artificial Sequence
  Cyclic GFR-binding peptide
RHKRLVKPTRGVYYLISTASL

SEQ ID NO: 43254 - protein, 31 aa, Artificial Sequence
  Cyclic GFR-binding peptide
  MOD_RES (1)..(3): Xaa is C or S
XKXSRVIMRYKKLVKPKRGVFYLISIANLAQ

SEQ ID NO: 43255 - protein, 25 aa, Artificial Sequence
  Cyclic GFR-binding peptide
RVVMNRHKRLIVNSSDDYYLVSTAS

SEQ ID NO: 43256 - protein, 24 aa, Artificial Sequence
  Cyclic GFR-binding peptide
EQYNKLTPVGMDDLYLVSIASLKT

SEQ ID NO: 43257 - protein, 22 aa, Artificial Sequence
  Cyclic GFR-binding peptide
MQYNKLVKPTRGVLYLISIASL

SEQ ID NO: 43258 - protein, 32 aa, Artificial Sequence
  Cyclic GFR-binding peptide
  MOD_RES (29)..(30): Xaa is C or S
VMERHKRLVVKDYEDYYLMSTASLETPVXXAK

SEQ ID NO: 43259 - protein, 36 aa, Artificial Sequence; identical to SEQ ID NO: 5165
  Cyclic GFR-binding peptide
  MOD_RES (31)..(32): Xaa is C or S

SEQ ID NO: 43260 - protein, 30 aa, Artificial Sequence
  Cyclic GFR-binding peptide
  MOD_RES (1)..(1): Xaa is C or S
XARVVMNRHKRLIVNSSDDYYLVSTASLQT

SEQ ID NO: 43261 - protein, 24 aa, Artificial Sequence
  Cyclic GFR-binding peptide
IMRHKRLIKPTKGIYYLISTASLD

SEQ ID NO: 43262 - protein, 28 aa, Artificial Sequence
  Cyclic GFR-binding peptide
  MOD_RES (26)..(27): Xaa is C or S
RHKRLTPVGMDDYYLVSTASLKTPVXXA

SEQ ID NO: 43263 - protein, 34 aa, Artificial Sequence
  Cyclic GFR-binding peptide
  MOD_RES (30)..(31): Xaa is C or S
KVVMRHKRLVKPTRGVYYLISTASLDQPVXXPSA

SEQ ID NO: 43264 - protein, 26 aa, Artificial Sequence
  Cyclic GFR-binding peptide
MNRHKRLIVNSSDDYYLVSTASLQTP

SEQ ID NO: 43265 - protein, 33 aa, Artificial Sequence; identical to SEQ ID NO: 5169
  Cyclic GFR-binding peptide
  MOD_RES (1)..(3): Xaa is C or S

SEQ ID NO: 43266 - protein, 29 aa, Artificial Sequence
  Cyclic GFR-binding peptide
  MOD_RES (29)..(29): Xaa is C or S
MGERYKKLTPVGMDDFYLVSIANLKTPVX

SEQ ID NO: 43267 - protein, 29 aa, Artificial Sequence
  Cyclic GFR-binding peptide
  MOD_RES (2)..(2): Xaa is C or S
GXGEVVMDYHYKLVVKENEDKYLMSIPSL

SEQ ID NO: 43268 - protein, 34 aa, Artificial Sequence
  Cyclic GFR-binding peptide
  MOD_RES (28)..(29): Xaa is C or S
MDRHKRLVVKENEDYYLMSTASLETPVXXAKPIK

SEQ ID NO: 43269 - protein, 32 aa, Artificial Sequence
  Cyclic GFR-binding peptide
  MOD_RES (29)..(29): Xaa is C or S
VMNRHKRLIVNSSDDYYLVSTASLKTPAXTPK

SEQ ID NO: 43270 - protein, 30 aa, Artificial Sequence
  Cyclic GFR-binding peptide
  MOD_RES (2)..(2): Xaa is C or S
KXSRVIMYHYKLVKPKRGVKYLISIPSLAQ

SEQ ID NO: 43271 - protein, 28 aa, Artificial Sequence
  Cyclic GFR-binding peptide
  MOD_RES (28)..(28): Xaa is C or S
VMRHKRLVKPTRGVYYLISTASLDQPVX

SEQ ID NO: 43272 - protein, 41 aa, Artificial Sequence; identical to SEQ ID NO: 5171
  Cyclic GFR-binding peptide
  MOD_RES (2)..(4)..(36)..(37): Xaa is C or S

SEQ ID NO: 43273 - protein, 36 aa, Artificial Sequence
  Cyclic GFR-binding peptide
  MOD_RES (30)..(31): Xaa is C or S
VVMNQYNKLIVNNSSDLYLVSIASLKTPAXXAKPVA

SEQ ID NO: 43274 - protein, 35 aa, Artificial Sequence
  Cyclic GFR-binding peptide
  MOD_RES (29)..(30): Xaa is C or S
VIMYHYKLIKPTKGIKYLISIPSLDQSVXXPSASA

SEQ ID NO: 43275 - protein, 27 aa, Artificial Sequence
  Cyclic GFR-binding peptide
MDRHKRLVVKENEDYYLMSTASLETPV

SEQ ID NO: 43276 - protein, 27 aa, Artificial Sequence
  Cyclic GFR-binding peptide
  MOD_RES (27)..(27): Xaa is C or S
MRYKKLVKPTRGVFYLISIANLDQPVX

SEQ ID NO: 43277 - protein, 39 aa, Artificial Sequence; identical to SEQ ID NO: 5174
  Cyclic GFR-binding peptide
  MOD_RES (1)..(3)..(35): Xaa is C or S

SEQ ID NO: 43278 - protein, 33 aa, Artificial Sequence
  Cyclic GFR-binding peptide
  MOD_RES (29)..(30): Xaa is C or S
VVMQYNKLVKPTRGVLYLISIASLDQPVXXPSA

SEQ ID NO: 43279 - protein, 34 aa, Artificial Sequence
  Cyclic GFR-binding peptide
  MOD_RES (28)..(29): Xaa is C or S
MDYHYKLVVKENEDKYLMSIPSLETPVXXAKPIK

SEQ ID NO: 43280 - protein, 25 aa, Artificial Sequence
  Cyclic GFR-binding peptide
MYHYKLVKPKRGVKYLISIPSLAQP

SEQ ID NO: 43281 - protein, 29 aa, Artificial Sequence
  Cyclic GFR-binding peptide
  MOD_RES (26)..(27): Xaa is C or S
YHYKLIVNSSDDKYLVSIPSLQTPAXXPK

SEQ ID NO: 43282 - protein, 33 aa, Artificial Sequence; identical to SEQ ID NO: 5177
  Cyclic GFR-binding peptide
  MOD_RES (2)..(2): Xaa is C or S

SEQ ID NO: 43283 - protein, 30 aa, Artificial Sequence
  Cyclic GFR-binding peptide
  MOD_RES (28)..(29): Xaa is C or S
IMRHKRLVKPKRGVYYLISTASLAQPVXXP

SEQ ID NO: 43284 - protein, 36 aa, Artificial Sequence; identical to SEQ ID NO: 5179
  Cyclic GFR-binding peptide
  MOD_RES (1)..(3)..(35)..(36): Xaa is C or S

SEQ ID NO: 43285 - protein, 22 aa, Artificial Sequence
  Cyclic GFR-binding peptide
MERHKRLVVKDYEDYYLMSTAS

SEQ ID NO: 43286 - protein, 26 aa, Artificial Sequence
  Cyclic GFR-binding peptide
SKVVMRHKRLVKPTRGVYYLISTASL

SEQ ID NO: 43287 - protein, 33 aa, Artificial Sequence
  Cyclic GFR-binding peptide
  MOD_RES (30)..(31): Xaa is C or S
SMGEQYNKLTPVGMDDLYLVSIASLKTPVXXAK

SEQ ID NO: 43288 - protein, 32 aa, Artificial Sequence
  Cyclic GFR-binding peptide
  MOD_RES (30)..(31): Xaa is C or S
KVIMYHYKLIKPTKGIKYLISIPSLDQSVXXP

SEQ ID NO: 43289 - protein, 38 aa, Artificial Sequence; identical to SEQ ID NO: 5182
  Cyclic GFR-binding peptide
  MOD_RES (1)..(33)..(34): Xaa is C or S

SEQ ID NO: 43290 - protein, 40 aa, Artificial Sequence; identical to SEQ ID NO: 5183
  Cyclic GFR-binding peptide
  MOD_RES (37)..(37): Xaa is C or S

SEQ ID NO: 43291 - protein, 30 aa, Artificial Sequence
  Cyclic GFR-binding peptide
EAVSMGERYKKLTPVGMDDFYLVSIANLKT

SEQ ID NO: 43292 - protein, 37 aa, Artificial Sequence; identical to SEQ ID NO: 5184
  Cyclic GFR-binding peptide
  MOD_RES (1)..(3)..(35): Xaa is C or S

SEQ ID NO: 43293 - protein, 33 aa, Artificial Sequence; identical to SEQ ID NO: 5186
  Cyclic GFR-binding peptide
  MOD_RES (2)..(33): Xaa is C or S

SEQ ID NO: 43294 - protein, 31 aa, Artificial Sequence
  Cyclic GFR-binding peptide
  MOD_RES (31)..(31): Xaa is C or S
TQYNKLFIPKKRVIELYLVSIASLQVQTPRX

SEQ ID NO: 43295 - protein, 32 aa, Artificial Sequence
  Cyclic GFR-binding peptide
  MOD_RES (28)..(29): Xaa is C or S
IMRHKRLIKPTKGIYYLISTASLDQSVXXPSA

SEQ ID NO: 43296 - protein, 31 aa, Artificial Sequence
  Cyclic GFR-binding peptide
  MOD_RES (30)..(31): Xaa is C or S
VVMNYHYKLIVNNSSDKYLVSIPSLKTPAXX

SEQ ID NO: 43297 - protein, 24 aa, Artificial Sequence
  Cyclic GFR-binding peptide
YHYKLVKPKRGVKYLISIPSLAQP

SEQ ID NO: 43298 - protein, 27 aa, Artificial Sequence
  Cyclic GFR-binding peptide
LTYHYKLFIPKKRVIEKYLVSIPSLQV

SEQ ID NO: 43299 - protein, 35 aa, Artificial Sequence; identical to SEQ ID NO: 5188
  Cyclic GFR-binding peptide
  MOD_RES (1)..(3)..(35): Xaa is C or S

SEQ ID NO: 43300 - protein, 33 aa, Artificial Sequence
  Cyclic GFR-binding peptide
  MOD_RES (28)..(29): Xaa is C or S
IMRYKKLIKPTKGIFYLISIANLDQSVXXPSAS

SEQ ID NO: 43301 - protein, 30 aa, Artificial Sequence
  Cyclic GFR-binding peptide
  MOD_RES (29)..(30): Xaa is C or S
VVMQYNKLVKPTRGVLYLISIASLDQPVXX

SEQ ID NO: 43302 - protein, 30 aa, Artificial Sequence
  Cyclic GFR-binding peptide
  MOD_RES (1)..(1): Xaa is C or S
XAKVVMNQYNKLIVNNSSDLYLVSIASLKT

SEQ ID NO: 43303 - protein, 31 aa, Artificial Sequence
  Cyclic GFR-binding peptide
HDELTYHYKLFIPKKRVIEKYLVSIPSLQVQ

SEQ ID NO: 43304 - protein, 26 aa, Artificial Sequence
  Cyclic GFR-binding peptide
  MOD_RES (26)..(26): Xaa is C or S
YHYKLIVNSSDDKYLVSIPSLQTPAX

SEQ ID NO: 43305 - protein, 26 aa, Artificial Sequence
  Cyclic GFR-binding peptide
VVMEYHYKLVVKDYEDKYLMSIPSLE

SEQ ID NO: 43306 - protein, 27 aa, Artificial Sequence
  Cyclic GFR-binding peptide
  MOD_RES (27)..(27): Xaa is C or S
NYHYKLIVNSSDDKYLVSIPSLQTPAX

SEQ ID NO: 43307 - protein, 37 aa, Artificial Sequence; identical to SEQ ID NO: 5192
  Cyclic GFR-binding peptide
  MOD_RES (2)..(34)..(35): Xaa is C or S

SEQ ID NO: 43308 - protein, 27 aa, Artificial Sequence
  Cyclic GFR-binding peptide
VMDRYKKLVVKENEDFYLMSIANLETP

SEQ ID NO: 43309 - protein, 34 aa, Artificial Sequence
  Cyclic GFR-binding peptide
  MOD_RES (2)..(2): Xaa is C or S
KXALHDELTRYKKLFIPKKRVIEFYLVSIANLQV

SEQ ID NO: 43310 - protein, 26 aa, Artificial Sequence
  Cyclic GFR-binding peptide
MNQYNKLIVNSSDDLYLVSIASLQTP

SEQ ID NO: 43311 - protein, 29 aa, Artificial Sequence
  Cyclic GFR-binding peptide
  MOD_RES (26)..(27): Xaa is C or S
YHYKLIVNSSDDKYLVSIPSLKTPAXXPK

SEQ ID NO: 43312 - protein, 32 aa, Artificial Sequence
  Cyclic GFR-binding peptide
  MOD_RES (30)..(30): Xaa is C or S
RYKKLFIPKKRVIEFYLVSIANLQVQTPRXQV

SEQ ID NO: 43313 - protein, 27 aa, Artificial Sequence
  Cyclic GFR-binding peptide
  MOD_RES (1)..(1): Xaa is C or S
XSKVIMRYKKLIKPTKGIFYLISIANL

SEQ ID NO: 43314 - protein, 35 aa, Artificial Sequence; identical to SEQ ID NO: 5195
  Cyclic GFR-binding peptide
  MOD_RES (1)..(32)..(33): Xaa is C or S

SEQ ID NO: 43315 - protein, 29 aa, Artificial Sequence
  Cyclic GFR-binding peptide
  MOD_RES (26)..(27): Xaa is C or S
YHYKLVVKENEDKYLMSIPSLETPVXXAK

SEQ ID NO: 43316 - protein, 35 aa, Artificial Sequence; identical to SEQ ID NO: 5198
  Cyclic GFR-binding peptide
  MOD_RES (2)..(33)..(34): Xaa is C or S

SEQ ID NO: 43317 - protein, 35 aa, Artificial Sequence
  Cyclic GFR-binding peptide
  MOD_RES (31)..(32): Xaa is C or S
VSMGEQYNKLTPVGMDDLYLVSIASLKTPVXXAKG

SEQ ID NO: 43318 - protein, 32 aa, Artificial Sequence
  Cyclic GFR-binding peptide
  MOD_RES (30)..(30): Xaa is C or S
VVMNRHKRLIVNSSDDYYLVSTASLKTPAXTP

SEQ ID NO: 43319 - protein, 36 aa, Artificial Sequence; identical to SEQ ID NO: 5199
  Cyclic GFR-binding peptide
  MOD_RES (1)..(33)..(34): Xaa is C or S

SEQ ID NO: 43320 - protein, 22 aa, Artificial Sequence
  Cyclic GFR-binding peptide
VMYHYKLVKPTRGVKYLISIPS

SEQ ID NO: 43321 - protein, 28 aa, Artificial Sequence
  Cyclic GFR-binding peptide
  MOD_RES (2)..(2): Xaa is C or S
GXGEVVMEYHYKLVVKDYEDKYLMSIPS

SEQ ID NO: 43322 - protein, 34 aa, Artificial Sequence; identical to SEQ ID NO: 5201
  Cyclic GFR-binding peptide

SEQ ID NO: 43323 - protein, 33 aa, Artificial Sequence
  Cyclic GFR-binding peptide
  MOD_RES (27)..(28): Xaa is C or S
ERHKRLTPVGMDDYYLVSTASLKTPVXXAKGVK

SEQ ID NO: 43324 - protein, 26 aa, Artificial Sequence
  Cyclic GFR-binding peptide
  MOD_RES (1)..(1): Xaa is C or S
XSKVIMYHYKLIKPTKGIKYLISIPS

SEQ ID NO: 43325 - protein, 41 aa, Artificial Sequence; identical to SEQ ID NO: 5203
  Cyclic GFR-binding peptide
  MOD_RES (2)..(4)..(35)..(36): Xaa is C or S

SEQ ID NO: 43326 - protein, 31 aa, Artificial Sequence; identical to SEQ ID NO: 5204
  Cyclic GFR-binding peptide

SEQ ID NO: 43327 - protein, 27 aa, Artificial Sequence
  Cyclic GFR-binding peptide
EAVSMGERYKKLTPVGMDDFYLVSIAN

SEQ ID NO: 43328 - protein, 32 aa, Artificial Sequence
  Cyclic GFR-binding peptide
  MOD_RES (30)..(31): Xaa is C or S
KVVMRYKKLVKPTRGVFYLISIANLDQPVXXP

SEQ ID NO: 43329 - protein, 28 aa, Artificial Sequence
  Cyclic GFR-binding peptide
LTQYNKLFIPKKRVIELYLVSIASLQVQ

SEQ ID NO: 43330 - protein, 25 aa, Artificial Sequence
  Cyclic GFR-binding peptide
IMYHYKLIKPTKGIKYLISIPSLDQ

SEQ ID NO: 43331 - protein, 28 aa, Artificial Sequence
  Cyclic GFR-binding peptide
  MOD_RES (26)..(27): Xaa is C or S
YHYKLVKPTRGVKYLISIPSLDQPVXXP

SEQ ID NO: 43332 - protein, 23 aa, Artificial Sequence
  Cyclic GFR-binding peptide
QYNKLIKPTKGILYLISIASLDQ

SEQ ID NO: 43333 - protein, 25 aa, Artificial Sequence
  Cyclic GFR-binding peptide
MERYKKLVVKDYEDFYLMSIANLET

SEQ ID NO: 43334 - protein, 23 aa, Artificial Sequence
  Cyclic GFR-binding peptide
VMDRYKKLVVKENEDFYLMSIAN

SEQ ID NO: 43335 - protein, 38 aa, Artificial Sequence; identical to SEQ ID NO: 5210
  Cyclic GFR-binding peptide
  MOD_RES (2)..(4)..(35)..(36): Xaa is C or S

SEQ ID NO: 43336 - protein, 37 aa, Artificial Sequence; identical to SEQ ID NO: 5211
  Cyclic GFR-binding peptide
  MOD_RES (32)..(33): Xaa is C or S

SEQ ID NO: 43337 - protein, 32 aa, Artificial Sequence
  Cyclic GFR-binding peptide
  MOD_RES (32)..(32): Xaa is C or S
AVSMGERYKKLTPVGMDDFYLVSIANLKTPVX

SEQ ID NO: 43338 - protein, 37 aa, Artificial Sequence
  Cyclic GFR-binding peptide
  MOD_RES (33)..(33): Xaa is C or S
ELTQYNKLFIPKKRVIELYLVSIASLQVQTPRXQVNR

SEQ ID NO: 43339 - protein, 39 aa, Artificial Sequence; identical to SEQ ID NO: 5212
  Cyclic GFR-binding peptide
  MOD_RES (2)..(34)..(35): Xaa is C or S

SEQ ID NO: 43340 - protein, 32 aa, Artificial Sequence
  Cyclic GFR-binding peptide
  MOD_RES (27)..(28): Xaa is C or S
NYHYKLIVNSSDDKYLVSIPSLKTPAXXPKPV

SEQ ID NO: 43341 - protein, 29 aa, Artificial Sequence
  Cyclic GFR-binding peptide
ALHDELTYHYKLFIPKKRVIEKYLVSIPS

SEQ ID NO: 43342 - protein, 37 aa, Artificial Sequence; identical to SEQ ID NO: 5215
  Cyclic GFR-binding peptide
  MOD_RES (1)..(33)..(34): Xaa is C or S

SEQ ID NO: 43343 - protein, 36 aa, Artificial Sequence; identical to SEQ ID NO: 5216
  Cyclic GFR-binding peptide
  MOD_RES (1)..(3)..(35)..(36): Xaa is C or S

SEQ ID NO: 43344 - protein, 33 aa, Artificial Sequence
  Cyclic GFR-binding peptide
  MOD_RES (28)..(29): Xaa is C or S
MNRHKRLIVNSSDDYYLVSTASLKTPAXXPKPV

SEQ ID NO: 43345 - protein, 29 aa, Artificial Sequence
  Cyclic GFR-binding peptide
  MOD_RES (29)..(29): Xaa is C or S
VMDRHKRLVVKENEDYYLMSTASLETPVX

SEQ ID NO: 43346 - protein, 32 aa, Artificial Sequence
  Cyclic GFR-binding peptide
  MOD_RES (28)..(29): Xaa is C or S
VMYHYKLVKPTRGVKYLISIPSLDQPVXXPSA

SEQ ID NO: 43347 - protein, 27 aa, Artificial Sequence
  Cyclic GFR-binding peptide
  MOD_RES (1)..(1): Xaa is C or S
XGEVVMDRYKKLVVKENEDFYLMSIAN

SEQ ID NO: 43348 - protein, 33 aa, Artificial Sequence; identical to SEQ ID NO: 5217
  Cyclic GFR-binding peptide
  MOD_RES (33)..(33): Xaa is C or S

SEQ ID NO: 43349 - protein, 35 aa, Artificial Sequence; identical to SEQ ID NO: 5218
  Cyclic GFR-binding peptide
  MOD_RES (31)..(32): Xaa is C or S

SEQ ID NO: 43350 - protein, 27 aa, Artificial Sequence
  Cyclic GFR-binding peptide
KVIMQYNKLIKPTKGILYLISIASLDQ

SEQ ID NO: 43351 - protein, 36 aa, Artificial Sequence; identical to SEQ ID NO: 5219
  Cyclic GFR-binding peptide
  MOD_RES (2)..(4)..(36): Xaa is C or S

SEQ ID NO: 43352 - protein, 38 aa, Artificial Sequence; identical to SEQ ID NO: 5221
  Cyclic GFR-binding peptide
  MOD_RES (35)..(35): Xaa is C or S

SEQ ID NO: 43353 - protein, 31 aa, Artificial Sequence
  Cyclic GFR-binding peptide
  MOD_RES (2)..(4): Xaa is C or S
RXGXGEVVMDRYKKLVVKENEDFYLMSIANL

SEQ ID NO: 43354 - protein, 25 aa, Artificial Sequence
  Cyclic GFR-binding peptide
EQYNKLTPVGMDDLYLVSIASLKTP

SEQ ID NO: 43355 - protein, 28 aa, Artificial Sequence
  Cyclic GFR-binding peptide
  MOD_RES (27)..(28): Xaa is C or S
NYHYKLIVNSSDDKYLVSIPSLQTPAXX

SEQ ID NO: 43356 - protein, 38 aa, Artificial Sequence; identical to SEQ ID NO: 5223
  Cyclic GFR-binding peptide
  MOD_RES (2)..(33)..(34): Xaa is C or S

SEQ ID NO: 43357 - protein, 35 aa, Artificial Sequence
  Cyclic GFR-binding peptide
  MOD_RES (29)..(30): Xaa is C or S
VMERYKKLVVKDYEDFYLMSIANLETPVXXAKPIS

SEQ ID NO: 43358 - protein, 25 aa, Artificial Sequence
  Cyclic GFR-binding peptide
SKVIMRHKRLIKPTKGIYYLISTAS

SEQ ID NO: 43359 - protein, 32 aa, Artificial Sequence
  Cyclic GFR-binding peptide
  MOD_RES (29)..(30): Xaa is C or S
VIMQYNKLIKPTKGILYLISIASLDQSVXXPS

SEQ ID NO: 43360 - protein, 33 aa, Artificial Sequence
  Cyclic GFR-binding peptide
  MOD_RES (28)..(29): Xaa is C or S
MNYHYKLIVNNSSDKYLVSIPSLKTPAXXAKPV

SEQ ID NO: 43361 - protein, 31 aa, Artificial Sequence; identical to SEQ ID NO: 5225
  Cyclic GFR-binding peptide
  MOD_RES (31)..(31): Xaa is C or S

SEQ ID NO: 43362 - protein, 30 aa, Artificial Sequence
  Cyclic GFR-binding peptide
  MOD_RES (30)..(30): Xaa is C or S
RYKKLFIPKKRVIEFYLVSIANLQVQTPRX

SEQ ID NO: 43363 - protein, 34 aa, Artificial Sequence; identical to SEQ ID NO: 5227
  Cyclic GFR-binding peptide
  MOD_RES (1)..(33)..(34): Xaa is C or S

SEQ ID NO: 43364 - protein, 26 aa, Artificial Sequence
  Cyclic GFR-binding peptide
  MOD_RES (26)..(26): Xaa is C or S
RYKKLIVNNSSDFYLVSIANLKTPAX

SEQ ID NO: 43365 - protein, 43 aa, Artificial Sequence; identical to SEQ ID NO: 5229
  Cyclic GFR-binding peptide
  MOD_RES (2)..(4)..(37)..(38): Xaa is C or S

SEQ ID NO: 43366 - protein, 33 aa, Artificial Sequence
  Cyclic GFR-binding peptide
DELTRYKKLFIPKKRVIEFYLVSIANLQVQTPR

SEQ ID NO: 43367 - protein, 35 aa, Artificial Sequence
  Cyclic GFR-binding peptide
  MOD_RES (30)..(31): Xaa is C or S
SMGEQYNKLTPVGMDDLYLVSIASLKTPVXXAKGV

SEQ ID NO: 43368 - protein, 41 aa, Artificial Sequence; identical to SEQ ID NO: 5230
  Cyclic GFR-binding peptide
  MOD_RES (1)..(3)..(35)..(36): Xaa is C or S

SEQ ID NO: 43369 - protein, 28 aa, Artificial Sequence
  Cyclic GFR-binding peptide
  MOD_RES (27)..(28): Xaa is C or S
EYHYKLVVKDYEDKYLMSIPSLETPVXX

SEQ ID NO: 43370 - protein, 30 aa, Artificial Sequence
  Cyclic GFR-binding peptide
  MOD_RES (29)..(30): Xaa is C or S
VMNRHKRLIVNSSDDYYLVSTASLQTPAXX

SEQ ID NO: 43371 - protein, 39 aa, Artificial Sequence; identical to SEQ ID NO: 5232
  Cyclic GFR-binding peptide
  MOD_RES (2)..(4)..(35)..(36): Xaa is C or S

SEQ ID NO: 43372 - protein, 22 aa, Artificial Sequence
  Cyclic GFR-binding peptide
RYKKLIVNNSSDFYLVSIANLK

SEQ ID NO: 43373 - protein, 28 aa, Artificial Sequence
  Cyclic GFR-binding peptide
  MOD_RES (1)..(1): Xaa is C or S
XGEVVMDRHKRLVVKENEDYYLMSTASL

SEQ ID NO: 43374 - protein, 33 aa, Artificial Sequence; identical to SEQ ID NO: 5234
  Cyclic GFR-binding peptide
  MOD_RES (2)..(2): Xaa is C or S

SEQ ID NO: 43375 - protein, 26 aa, Artificial Sequence
  Cyclic GFR-binding peptide
QYNKLFIPKKRVIELYLVSIASLQVQ

SEQ ID NO: 43376 - protein, 30 aa, Artificial Sequence
  Cyclic GFR-binding peptide
LTQYNKLFIPKKRVIELYLVSIASLQVQTP

SEQ ID NO: 43377 - protein, 31 aa, Artificial Sequence
  Cyclic GFR-binding peptide
  MOD_RES (1)..(3): Xaa is C or S
XGXARVVMNYHYKLIVNSSDDKYLVSIPSLQ

SEQ ID NO: 43378 - protein, 32 aa, Artificial Sequence
  Cyclic GFR-binding peptide
  MOD_RES (27)..(28): Xaa is C or S
ERHKRLVVKDYEDYYLMSTASLETPVXXAKPI

SEQ ID NO: 43379 - protein, 37 aa, Artificial Sequence; identical to SEQ ID NO: 5235
  Cyclic GFR-binding peptide
  MOD_RES (32)..(33): Xaa is C or S

SEQ ID NO: 43380 - protein, 21 aa, Artificial Sequence
  Cyclic GFR-binding peptide
RYKKLVVKDYEDFYLMSIANL

SEQ ID NO: 43381 - protein, 27 aa, Artificial Sequence
  Cyclic GFR-binding peptide
  MOD_RES (26)..(27): Xaa is C or S
YHYKLIKPTKGIKYLISIPSLDQSVXX

SEQ ID NO: 43382 - protein, 36 aa, Artificial Sequence; identical to SEQ ID NO: 5238
  Cyclic GFR-binding peptide
  MOD_RES (31)..(32): Xaa is C or S

SEQ ID NO: 43383 - protein, 42 aa, Artificial Sequence; identical to SEQ ID NO: 5242
  Cyclic GFR-binding peptide
  MOD_RES (2)..(4)..(36)..(37): Xaa is C or S

SEQ ID NO: 43384 - protein, 31 aa, Artificial Sequence
  Cyclic GFR-binding peptide
  MOD_RES (31)..(31): Xaa is C or S
VSMGERYKKLTPVGMDDFYLVSIANLKTPVX

SEQ ID NO: 43385 - protein, 35 aa, Artificial Sequence
  Cyclic GFR-binding peptide
  MOD_RES (30)..(31): Xaa is C or S
VVMNQYNKLIVNSSDDLYLVSIASLQTPAXXPKPV

SEQ ID NO: 43386 - protein, 35 aa, Artificial Sequence; identical to SEQ ID NO: 5245
  Cyclic GFR-binding peptide
  MOD_RES (31)..(32): Xaa is C or S

SEQ ID NO: 43387 - protein, 37 aa, Artificial Sequence; identical to SEQ ID NO: 5246
  Cyclic GFR-binding peptide
  MOD_RES (1)..(3)..(35)..(36): Xaa is C or S

SEQ ID NO: 43388 - protein, 27 aa, Artificial Sequence
  Cyclic GFR-binding peptide
VKPTRGVQYNKLVKPTRGVLYLISIAS

SEQ ID NO: 43389 - protein, 25 aa, Artificial Sequence
  Cyclic GFR-binding peptide
ERHKRLVVKDYEDYYLMSTASLETP

SEQ ID NO: 43390 - protein, 33 aa, Artificial Sequence
  Cyclic GFR-binding peptide
  MOD_RES (27)..(28): Xaa is C or S
DRHKRLVVKENEDYYLMSTASLETPVXXAKPIK

SEQ ID NO: 43391 - protein, 29 aa, Artificial Sequence
  Cyclic GFR-binding peptide
  MOD_RES (1)..(1): Xaa is C or S
XGEVVMERHKRLVVKDYEDYYLMSTASLE

SEQ ID NO: 43392 - protein, 34 aa, Artificial Sequence; identical to SEQ ID NO: 5250
  Cyclic GFR-binding peptide
  MOD_RES (31)..(32): Xaa is C or S

SEQ ID NO: 43393 - protein, 33 aa, Artificial Sequence
  Cyclic GFR-binding peptide
  MOD_RES (32)..(33): Xaa is C or S
AVSMGEQYNKLTPVGMDDLYLVSIASLKTPVXX

SEQ ID NO: 43394 - protein, 30 aa, Artificial Sequence
  Cyclic GFR-binding peptide
  MOD_RES (26)..(27): Xaa is C or S
QYNKLIKPTKGILYLISIASLDQSVXXPSA

SEQ ID NO: 43395 - protein, 37 aa, Artificial Sequence
  Cyclic GFR-binding peptide
  MOD_RES (31)..(32): Xaa is C or S
VSMGEQYNKLTPVGMDDLYLVSIASLKTPVXXAKGVK

SEQ ID NO: 43396 - protein, 34 aa, Artificial Sequence; identical to SEQ ID NO: 5252
  Cyclic GFR-binding peptide

SEQ ID NO: 43397 - protein, 30 aa, Artificial Sequence
  Cyclic GFR-binding peptide
ARVVMNRHKRLIVNSSDDYYLVSTASLQTP

SEQ ID NO: 43398 - protein, 31 aa, Artificial Sequence
  Cyclic GFR-binding peptide
  MOD_RES (27)..(28): Xaa is C or S
MYHYKLVKPKRGVKYLISIPSLAQPVXXPAA

SEQ ID NO: 43399 - protein, 24 aa, Artificial Sequence
  Cyclic GFR-binding peptide
VVMRYKKLVKPTRGVFYLISIANL

SEQ ID NO: 43400 - protein, 32 aa, Artificial Sequence
  Cyclic GFR-binding peptide
  MOD_RES (31)..(31): Xaa is C or S
TRYKKLFIPKKRVIEFYLVSIANLQVQTPRXQ

SEQ ID NO: 43401 - protein, 21 aa, Artificial Sequence
  Cyclic GFR-binding peptide
RHKRLVKPKRGVYYLISTASL

SEQ ID NO: 43402 - protein, 28 aa, Artificial Sequence
  Cyclic GFR-binding peptide
  MOD_RES (1)..(1): Xaa is C or S
XARVVMNQYNKLIVNSSDDLYLVSIASL

SEQ ID NO: 43403 - protein, 33 aa, Artificial Sequence
  Cyclic GFR-binding peptide
  MOD_RES (2)..(4): Xaa is C or S
EXKXALHDELTYHYKLFIPKKRVIEKYLVSIPS

SEQ ID NO: 43404 - protein, 32 aa, Artificial Sequence
  Cyclic GFR-binding peptide
  MOD_RES (32)..(32): Xaa is C or S
AVSMGEQYNKLTPVGMDDLYLVSIASLKTPVX

SEQ ID NO: 43405 - protein, 29 aa, Artificial Sequence
  Cyclic GFR-binding peptide
EVVMDRHKRLVVKENEDYYLMSTASLETP

SEQ ID NO: 43406 - protein, 32 aa, Artificial Sequence
  Cyclic GFR-binding peptide
  MOD_RES (1)..(3): Xaa is C or S
XGXSRVVMNRHKRLIVNSSDDYYLVSTASLKT

SEQ ID NO: 43407 - protein, 23 aa, Artificial Sequence
  Cyclic GFR-binding peptide
MNYHYKLIVNSSDDKYLVSIPSL

SEQ ID NO: 43408 - protein, 25 aa, Artificial Sequence
  Cyclic GFR-binding peptide
RYKKLVVKDYEDFYLMSIANLETPV

SEQ ID NO: 43409 - protein, 29 aa, Artificial Sequence
  Cyclic GFR-binding peptide
SRVIMYHYKLVKPKRGVKYLISIPSLAQP

SEQ ID NO: 43410 - protein, 34 aa, Artificial Sequence; identical to SEQ ID NO: 5263
  Cyclic GFR-binding peptide
  MOD_RES (1)..(33)..(34): Xaa is C or S

SEQ ID NO: 43411 - protein, 36 aa, Artificial Sequence; identical to SEQ ID NO: 5262
  Cyclic GFR-binding peptide
  MOD_RES (1)..(32)..(33): Xaa is C or S

SEQ ID NO: 43412 - protein, 28 aa, Artificial Sequence
  Cyclic GFR-binding peptide
  MOD_RES (27)..(28): Xaa is C or S
DRHKRLVVKENEDYYLMSTASLETPVXX

SEQ ID NO: 43413 - protein, 25 aa, Artificial Sequence
  Cyclic GFR-binding peptide
MQYNKLVKPTRGVLYLISIASLDQP

SEQ ID NO: 43414 - protein, 25 aa, Artificial Sequence
  Cyclic GFR-binding peptide
VVMEYHYKLVVKDYEDKYLMSIPSL

SEQ ID NO: 43415 - protein, 31 aa, Artificial Sequence
  Cyclic GFR-binding peptide
LTRHKRLFIPKKRVIEYYLVSTASLQVQTPR

SEQ ID NO: 43416 - protein, 37 aa, Artificial Sequence; identical to SEQ ID NO: 5265
  Cyclic GFR-binding peptide
  MOD_RES (2)..(33)..(34): Xaa is C or S

SEQ ID NO: 43417 - protein, 35 aa, Artificial Sequence
  Cyclic GFR-binding peptide
  MOD_RES (33)..(33): Xaa is C or S
ELTRYKKLFIPKKRVIEFYLVSIANLQVQTPRXQV

SEQ ID NO: 43418 - protein, 35 aa, Artificial Sequence
  Cyclic GFR-binding peptide
  MOD_RES (1)..(3): Xaa is C or S
XKXALHDELTRHKRLFIPKKRVIEYYLVSTASLQV

SEQ ID NO: 43419 - protein, 36 aa, Artificial Sequence; identical to SEQ ID NO: 5267
  Cyclic GFR-binding peptide
  MOD_RES (2)..(35)..(36): Xaa is C or S

SEQ ID NO: 43420 - protein, 30 aa, Artificial Sequence
  Cyclic GFR-binding peptide
ALHDELTYHYKLFIPKKRVIEKYLVSIPSL

SEQ ID NO: 43421 - protein, 27 aa, Artificial Sequence
  Cyclic GFR-binding peptide
EVVMDRYKKLVVKENEDFYLMSIANLE

SEQ ID NO: 43422 - protein, 41 aa, Artificial Sequence; identical to SEQ ID NO: 5269
  Cyclic GFR-binding peptide
  MOD_RES (2)..(4)..(37)..(38): Xaa is C or S

SEQ ID NO: 43423 - protein, 31 aa, Artificial Sequence
  Cyclic GFR-binding peptide
  MOD_RES (2)..(2): Xaa is C or S
KXSKVVMRHKRLVKPTRGVYYLISTASLDQP

SEQ ID NO: 43424 - protein, 25 aa, Artificial Sequence
  Cyclic GFR-binding peptide
NQYNKLIVNSSDDLYLVSIASLKTP

SEQ ID NO: 43425 - protein, 24 aa, Artificial Sequence
  Cyclic GFR-binding peptide
GEQYNKLTPVGMDDLYLVSIASLK

SEQ ID NO: 43426 - protein, 42 aa, Artificial Sequence; identical to SEQ ID NO: 5271
  Cyclic GFR-binding peptide
  MOD_RES (2)..(4)..(41): Xaa is C or S

SEQ ID NO: 43427 - protein, 27 aa, Artificial Sequence
  Cyclic GFR-binding peptide
  MOD_RES (2)..(2): Xaa is C or S
KXSRVIMQYNKLVKPKRGVLYLISIAS

SEQ ID NO: 43428 - protein, 35 aa, Artificial Sequence; identical to SEQ ID NO: 5272
  Cyclic GFR-binding peptide
  MOD_RES (2)..(33)..(34): Xaa is C or S

SEQ ID NO: 43429 - protein, 31 aa, Artificial Sequence
  Cyclic GFR-binding peptide
  MOD_RES (30)..(30): Xaa is C or S
VVMNYHYKLIVNSSDDKYLVSIPSLKTPAXT

SEQ ID NO: 43430 - protein, 32 aa, Artificial Sequence; identical to SEQ ID NO: 5274
  Cyclic GFR-binding peptide
  MOD_RES (1)..(32): Xaa is C or S

SEQ ID NO: 43431 - protein, 24 aa, Artificial Sequence
  Cyclic GFR-binding peptide
KVIMRYKKLIKPTKGIFYLISIAN

SEQ ID NO: 43432 - protein, 36 aa, Artificial Sequence; identical to SEQ ID NO: 5275
  Cyclic GFR-binding peptide
  MOD_RES (2)..(34)..(35): Xaa is C or S

SEQ ID NO: 43433 - protein, 21 aa, Artificial Sequence
  Cyclic GFR-binding peptide
MRYKKLVKPTRGVFYLISIAN

SEQ ID NO: 43434 - protein, 40 aa, Artificial Sequence; identical to SEQ ID NO: 5276
  Cyclic GFR-binding peptide
  MOD_RES (1)..(3)..(35): Xaa is C or S

SEQ ID NO: 43435 - protein, 31 aa, Artificial Sequence
  Cyclic GFR-binding peptide
  MOD_RES (30)..(31): Xaa is C or S
KVVMRYKKLVKPTRGVFYLISIANLDQPVXX

SEQ ID NO: 43436 - protein, 23 aa, Artificial Sequence
  Cyclic GFR-binding peptide
VMRHKRLVKPTRGVYYLISTASL

SEQ ID NO: 43437 - protein, 25 aa, Artificial Sequence
  Cyclic GFR-binding peptide
MRHKRLIKPTKGIYYLISTASLDQS

SEQ ID NO: 43438 - protein, 22 aa, Artificial Sequence
  Cyclic GFR-binding peptide
YHYKLIVNSSDDKYLVSIPSLQ

SEQ ID NO: 43439 - protein, 31 aa, Artificial Sequence
  Cyclic GFR-binding peptide
  MOD_RES (2)..(4): Xaa is C or S
HXGXSRVVMNRHKRLIVNSSDDYYLVSTASL

SEQ ID NO: 43440 - protein, 27 aa, Artificial Sequence
  Cyclic GFR-binding peptide
  MOD_RES (26)..(27): Xaa is C or S
QYNKLIVNNSSDLYLVSIASLKTPAXX

SEQ ID NO: 43441 - protein, 29 aa, Artificial Sequence
  Cyclic GFR-binding peptide
EAVSMGEQYNKLTPVGMDDLYLVSIASLK

SEQ ID NO: 43442 - protein, 37 aa, Artificial Sequence; identical to SEQ ID NO: 5279
  Cyclic GFR-binding peptide
  MOD_RES (33)..(34): Xaa is C or S

SEQ ID NO: 43443 - protein, 40 aa, Artificial Sequence; identical to SEQ ID NO: 5280
  Cyclic GFR-binding peptide
  MOD_RES (2)..(4): Xaa is C or S

SEQ ID NO: 43444 - protein, 39 aa, Artificial Sequence; identical to SEQ ID NO: 5281
  Cyclic GFR-binding peptide
  MOD_RES (2)..(4)..(36)..(37): Xaa is C or S

SEQ ID NO: 43445 - protein, 39 aa, Artificial Sequence; identical to SEQ ID NO: 5282
  Cyclic GFR-binding peptide
  MOD_RES (1)..(33)..(34): Xaa is C or S

SEQ ID NO: 43446 - protein, 25 aa, Artificial Sequence
  Cyclic GFR-binding peptide
KVIMQYNKLIKPTKGILYLISIASL

SEQ ID NO: 43447 - protein, 38 aa, Artificial Sequence; identical to SEQ ID NO: 5283
  Cyclic GFR-binding peptide
  MOD_RES (2)..(4): Xaa is C or S

SEQ ID NO: 43448 - protein, 23 aa, Artificial Sequence
  Cyclic GFR-binding peptide
VIMYHYKLVKPKRGVKYLISIPS

SEQ ID NO: 43449 - protein, 29 aa, Artificial Sequence
  Cyclic GFR-binding peptide
  MOD_RES (1)..(1): Xaa is C or S
XSRVVMNQYNKLIVNSSDDLYLVSIASLK

SEQ ID NO: 43450 - protein, 23 aa, Artificial Sequence
  Cyclic GFR-binding peptide
YHYKLIVNSSDDKYLVSIPSLQT

SEQ ID NO: 43451 - protein, 30 aa, Artificial Sequence
  Cyclic GFR-binding peptide
  MOD_RES (1)..(1): Xaa is C or S
XGEVVMDYHYKLVVKENEDKYLMSIPSLET

SEQ ID NO: 43452 - protein, 25 aa, Artificial Sequence
  Cyclic GFR-binding peptide
VMNRYKKLIVNNSSDFYLVSIANLK

SEQ ID NO: 43453 - protein, 32 aa, Artificial Sequence; identical to SEQ ID NO: 5286
  Cyclic GFR-binding peptide
  MOD_RES (1)..(32): Xaa is C or S

SEQ ID NO: 43454 - protein, 31 aa, Artificial Sequence
  Cyclic GFR-binding peptide
  MOD_RES (1)..(1): Xaa is C or S
XSRVVMNRHKRLIVNSSDDYYLVSTASLKTP

SEQ ID NO: 43455 - protein, 37 aa, Artificial Sequence; identical to SEQ ID NO: 5287
  Cyclic GFR-binding peptide
  MOD_RES (32)..(33): Xaa is C or S

SEQ ID NO: 43456 - protein, 33 aa, Artificial Sequence
  Cyclic GFR-binding peptide
  MOD_RES (30)..(31): Xaa is C or S
VVMNRYKKLIVNNSSDFYLVSIANLKTPAXXAK

SEQ ID NO: 43457 - protein, 26 aa, Artificial Sequence
  Cyclic GFR-binding peptide
VMNYHYKLIVNSSDDKYLVSIPSLKT

SEQ ID NO: 43458 - protein, 33 aa, Artificial Sequence
  Cyclic GFR-binding peptide
  MOD_RES (2)..(4): Xaa is C or S
SXKXSRVIMQYNKLVKPKRGVLYLISIASLAQP

SEQ ID NO: 43459 - protein, 24 aa, Artificial Sequence
  Cyclic GFR-binding peptide
VMNYHYKLIVNNSSDKYLVSIPSL

SEQ ID NO: 43460 - protein, 26 aa, Artificial Sequence
  Cyclic GFR-binding peptide
  MOD_RES (26)..(26): Xaa is C or S
RHKRLIKPTKGIYYLISTASLDQSVX

SEQ ID NO: 43461 - protein, 39 aa, Artificial Sequence; identical to SEQ ID NO: 5289
  Cyclic GFR-binding peptide
  MOD_RES (1)..(3)..(36)..(37): Xaa is C or S

SEQ ID NO: 43462 - protein, 34 aa, Artificial Sequence
  Cyclic GFR-binding peptide
  MOD_RES (29)..(30): Xaa is C or S
VMNQYNKLIVNSSDDLYLVSIASLKTPAXXPKPV

SEQ ID NO: 43463 - protein, 31 aa, Artificial Sequence
  Cyclic GFR-binding peptide
  MOD_RES (2)..(4): Xaa is C or S
RXGXEAVSMGEQYNKLTPVGMDDLYLVSIAS

SEQ ID NO: 43464 - protein, 34 aa, Artificial Sequence; identical to SEQ ID NO: 5292
  Cyclic GFR-binding peptide

SEQ ID NO: 43465 - protein, 35 aa, Artificial Sequence
  Cyclic GFR-binding peptide
  MOD_RES (30)..(31): Xaa is C or S
KVIMRHKRLIKPTKGIYYLISTASLDQSVXXPSAS

SEQ ID NO: 43466 - protein, 34 aa, Artificial Sequence; identical to SEQ ID NO: 5293
  Cyclic GFR-binding peptide
  MOD_RES (1)..(3): Xaa is C or S

SEQ ID NO: 43467 - protein, 34 aa, Artificial Sequence
  Cyclic GFR-binding peptide
  MOD_RES (28)..(29): Xaa is C or S
IMRYKKLVKPKRGVFYLISIANLAQPVXXPAASA

SEQ ID NO: 43468 - protein, 31 aa, Artificial Sequence; identical to SEQ ID NO: 5297
  Cyclic GFR-binding peptide
  MOD_RES (1)..(1): Xaa is C or S

SEQ ID NO: 43469 - protein, 30 aa, Artificial Sequence
  Cyclic GFR-binding peptide
  MOD_RES (26)..(27): Xaa is C or S
YHYKLVKPTRGVKYLISIPSLDQPVXXPSA

SEQ ID NO: 43470 - protein, 30 aa, Artificial Sequence
  Cyclic GFR-binding peptide
  MOD_RES (29)..(30): Xaa is C or S
MGEQYNKLTPVGMDDLYLVSIASLKTPVXX

SEQ ID NO: 43471 - protein, 36 aa, Artificial Sequence; identical to SEQ ID NO: 5298
  Cyclic GFR-binding peptide
  MOD_RES (2)..(34)..(35): Xaa is C or S

SEQ ID NO: 43472 - protein, 39 aa, Artificial Sequence; identical to SEQ ID NO: 5299
  Cyclic GFR-binding peptide
  MOD_RES (1)..(33)..(34): Xaa is C or S

SEQ ID NO: 43473 - protein, 30 aa, Artificial Sequence
  Cyclic GFR-binding peptide
  MOD_RES (27)..(28): Xaa is C or S
DRHKRLVVKENEDYYLMSTASLETPVXXAK

SEQ ID NO: 43474 - protein, 34 aa, Artificial Sequence; identical to SEQ ID NO: 5300
  Cyclic GFR-binding peptide
  MOD_RES (2)..(4): Xaa is C or S

SEQ ID NO: 43475 - protein, 34 aa, Artificial Sequence
  Cyclic GFR-binding peptide
  MOD_RES (29)..(30): Xaa is C or S
VVMYHYKLVKPTRGVKYLISIPSLDQPVXXPSAS

SEQ ID NO: 43476 - protein, 30 aa, Artificial Sequence; identical to SEQ ID NO: 5301
  Cyclic GFR-binding peptide

SEQ ID NO: 43477 - protein, 25 aa, Artificial Sequence
  Cyclic GFR-binding peptide
VVMNQYNKLIVNSSDDLYLVSIASL

SEQ ID NO: 43478 - protein, 23 aa, Artificial Sequence
  Cyclic GFR-binding peptide
RYKKLTPVGMDDFYLVSIANLKT

SEQ ID NO: 43479 - protein, 38 aa, Artificial Sequence; identical to SEQ ID NO: 5302
  Cyclic GFR-binding peptide
  MOD_RES (2)..(33)..(34): Xaa is C or S

SEQ ID NO: 43480 - protein, 38 aa, Artificial Sequence; identical to SEQ ID NO: 5303
  Cyclic GFR-binding peptide
  MOD_RES (32)..(33): Xaa is C or S

SEQ ID NO: 43481 - protein, 33 aa, Artificial Sequence
  Cyclic GFR-binding peptide
  MOD_RES (2)..(4): Xaa is C or S
RXGXGEVVMDRYKKLVVKENEDFYLMSIANLET

SEQ ID NO: 43482 - protein, 38 aa, Artificial Sequence; identical to SEQ ID NO: 5304
  Cyclic GFR-binding peptide
  MOD_RES (1)..(3)..(34)..(35): Xaa is C or S

SEQ ID NO: 43483 - protein, 31 aa, Artificial Sequence; identical to SEQ ID NO: 5305
  Cyclic GFR-binding peptide

SEQ ID NO: 43484 - protein, 35 aa, Artificial Sequence; identical to SEQ ID NO: 5307
  Cyclic GFR-binding peptide
  MOD_RES (1)..(32)..(33): Xaa is C or S

SEQ ID NO: 43485 - protein, 28 aa, Artificial Sequence
  Cyclic GFR-binding peptide
  MOD_RES (1)..(3): Xaa is C or S
XKXSKVVMYHYKLVKPTRGVKYLISIPS

SEQ ID NO: 43486 - protein, 21 aa, Artificial Sequence
  Cyclic GFR-binding peptide
RHKRLVVKENEDYYLMSTASL

SEQ ID NO: 43487 - protein, 31 aa, Artificial Sequence
  Cyclic GFR-binding peptide
  MOD_RES (26)..(27): Xaa is C or S
RYKKLTPVGMDDFYLVSIANLKTPVXXAKGV

SEQ ID NO: 43488 - protein, 40 aa, Artificial Sequence; identical to SEQ ID NO: 5310
  Cyclic GFR-binding peptide
  MOD_RES (2)..(4)..(36)..(37): Xaa is C or S

SEQ ID NO: 43489 - protein, 23 aa, Artificial Sequence
  Cyclic GFR-binding peptide
MDRHKRLVVKENEDYYLMSTASL

SEQ ID NO: 43490 - protein, 21 aa, Artificial Sequence
  Cyclic GFR-binding peptide
NQYNKLIVNNSSDLYLVSIAS

SEQ ID NO: 43491 - protein, 36 aa, Artificial Sequence; identical to SEQ ID NO: 5313
  Cyclic GFR-binding peptide
  MOD_RES (2)..(2): Xaa is C or S

SEQ ID NO: 43492 - protein, 38 aa, Artificial Sequence; identical to SEQ ID NO: 5314
  Cyclic GFR-binding peptide
  MOD_RES (2)..(4)..(36)..(37): Xaa is C or S

SEQ ID NO: 43493 - protein, 34 aa, Artificial Sequence
  Cyclic GFR-binding peptide
  MOD_RES (34)..(34): Xaa is C or S
DELTQYNKLFIPKKRVIELYLVSIASLQVQTPRX

SEQ ID NO: 43494 - protein, 34 aa, Artificial Sequence; identical to SEQ ID NO: 5316
  Cyclic GFR-binding peptide
  MOD_RES (2)..(34): Xaa is C or S

SEQ ID NO: 43495 - protein, 27 aa, Artificial Sequence
  Cyclic GFR-binding peptide
EAVSMGEQYNKLTPVGMDDLYLVSIAS

SEQ ID NO: 43496 - protein, 32 aa, Artificial Sequence
  Cyclic GFR-binding peptide
  MOD_RES (1)..(3): Xaa is C or S
XGXARVVMNRHKRLIVNSSDDYYLVSTASLQT

SEQ ID NO: 43497 - protein, 25 aa, Artificial Sequence
  Cyclic GFR-binding peptide
YHYKLVVKENEDKYLMSIPSLETPV

SEQ ID NO: 43498 - protein, 28 aa, Artificial Sequence
  Cyclic GFR-binding peptide
  MOD_RES (28)..(28): Xaa is C or S
IMRHKRLVKPKRGVYYLISTASLAQPVX

SEQ ID NO: 43499 - protein, 39 aa, Artificial Sequence; identical to SEQ ID NO: 5319
  Cyclic GFR-binding peptide
  MOD_RES (1)..(33): Xaa is C or S

SEQ ID NO: 43500 - protein, 39 aa, Artificial Sequence; identical to SEQ ID NO: 5320
  Cyclic GFR-binding peptide
  MOD_RES (2)..(4)..(36)..(37): Xaa is C or S

SEQ ID NO: 43501 - protein, 45 aa, Artificial Sequence; identical to SEQ ID NO: 5321
  Cyclic GFR-binding peptide
  MOD_RES (2)..(4)..(41): Xaa is C or S

SEQ ID NO: 43502 - protein, 34 aa, Artificial Sequence; identical to SEQ ID NO: 5322
  Cyclic GFR-binding peptide
  MOD_RES (31)..(32): Xaa is C or S

SEQ ID NO: 43503 - protein, 24 aa, Artificial Sequence
  Cyclic GFR-binding peptide
GERYKKLTPVGMDDFYLVSIANLK

SEQ ID NO: 43504 - protein, 25 aa, Artificial Sequence
  Cyclic GFR-binding peptide
ELTQYNKLFIPKKRVIELYLVSIAS

SEQ ID NO: 43505 - protein, 27 aa, Artificial Sequence
  Cyclic GFR-binding peptide
VVMQYNKLVKPTRGVLYLISIASLDQP

SEQ ID NO: 43506 - protein, 36 aa, Artificial Sequence; identical to SEQ ID NO: 5324
  Cyclic GFR-binding peptide
  MOD_RES (2)..(33)..(34): Xaa is C or S

SEQ ID NO: 43507 - protein, 37 aa, Artificial Sequence; identical to SEQ ID NO: 5325
  Cyclic GFR-binding peptide
  MOD_RES (2)..(4)..(36)..(37): Xaa is C or S

SEQ ID NO: 43508 - protein, 27 aa, Artificial Sequence
  Cyclic GFR-binding peptide
  MOD_RES (27)..(27): Xaa is C or S
EYHYKLVVKDYEDKYLMSIPSLETPVX

SEQ ID NO: 43509 - protein, 29 aa, Artificial Sequence
  Cyclic GFR-binding peptide
SRVIMQYNKLVKPKRGVLYLISIASLAQP

SEQ ID NO: 43510 - protein, 30 aa, Artificial Sequence
  Cyclic GFR-binding peptide
  MOD_RES (1)..(1): Xaa is C or S
XGEVVMDRYKKLVVKENEDFYLMSIANLET

SEQ ID NO: 43511 - protein, 29 aa, Artificial Sequence
  Cyclic GFR-binding peptide
ALHDELTRYKKLFIPKKRVIEFYLVSIAN

SEQ ID NO: 43512 - protein, 36 aa, Artificial Sequence; identical to SEQ ID NO: 5326
  Cyclic GFR-binding peptide
  MOD_RES (1)..(3)..(35)..(36): Xaa is C or S

SEQ ID NO: 43513 - protein, 22 aa, Artificial Sequence
  Cyclic GFR-binding peptide
YHYKLIKPTKGIKYLISIPSLD

SEQ ID NO: 43514 - protein, 35 aa, Artificial Sequence; identical to SEQ ID NO: 5328
  Cyclic GFR-binding peptide
  MOD_RES (2)..(33)..(34): Xaa is C or S

SEQ ID NO: 43515 - protein, 29 aa, Artificial Sequence
  Cyclic GFR-binding peptide
KVIMRHKRLIKPTKGIYYLISTASLDQSV

SEQ ID NO: 43516 - protein, 39 aa, Artificial Sequence; identical to SEQ ID NO: 5329
  Cyclic GFR-binding peptide
  MOD_RES (2)..(34)..(35): Xaa is C or S

SEQ ID NO: 43517 - protein, 33 aa, Artificial Sequence
  Cyclic GFR-binding peptide
  MOD_RES (1)..(1): Xaa is C or S
XALHDELTRHKRLFIPKKRVIEYYLVSTASLQV

SEQ ID NO: 43518 - protein, 28 aa, Artificial Sequence
  Cyclic GFR-binding peptide
HDELTYHYKLFIPKKRVIEKYLVSIPSL

SEQ ID NO: 43519 - protein, 35 aa, Artificial Sequence
  Cyclic GFR-binding peptide
  MOD_RES (29)..(30): Xaa is C or S
VMNQYNKLIVNSSDDLYLVSIASLQTPAXXPKPVT

SEQ ID NO: 43520 - protein, 37 aa, Artificial Sequence; identical to SEQ ID NO: 5333
  Cyclic GFR-binding peptide
  MOD_RES (32)..(33): Xaa is C or S

SEQ ID NO: 43521 - protein, 39 aa, Artificial Sequence; identical to SEQ ID NO: 5336
  Cyclic GFR-binding peptide
  MOD_RES (2)..(33)..(34): Xaa is C or S

SEQ ID NO: 43522 - protein, 27 aa, Artificial Sequence
  Cyclic GFR-binding peptide
IMRYKKLVKPKRGVFYLISIANLAQPV

SEQ ID NO: 43523 - protein, 32 aa, Artificial Sequence; identical to SEQ ID NO: 5337
  Cyclic GFR-binding peptide

SEQ ID NO: 43524 - protein, 28 aa, Artificial Sequence
  Cyclic GFR-binding peptide
  MOD_RES (1)..(3): Xaa is C or S
XKXSKVIMRYKKLIKPTKGIFYLISIAN

SEQ ID NO: 43525 - protein, 35 aa, Artificial Sequence; identical to SEQ ID NO: 5338
  Cyclic GFR-binding peptide
  MOD_RES (2)..(34)..(35): Xaa is C or S

SEQ ID NO: 43526 - protein, 31 aa, Artificial Sequence
  Cyclic GFR-binding peptide
  MOD_RES (1)..(1): Xaa is C or S
XARVVMNYHYKLIVNSSDDKYLVSIPSLQTP

SEQ ID NO: 43527 - protein, 37 aa, Artificial Sequence; identical to SEQ ID NO: 5340
  Cyclic GFR-binding peptide
  MOD_RES (31)..(32): Xaa is C or S

SEQ ID NO: 43528 - protein, 36 aa, Artificial Sequence; identical to SEQ ID NO: 5342
  Cyclic GFR-binding peptide
  MOD_RES (32)..(32): Xaa is C or S

SEQ ID NO: 43529 - protein, 37 aa, Artificial Sequence; identical to SEQ ID NO: 5343
  Cyclic GFR-binding peptide
  MOD_RES (2)..(4)..(35)..(36): Xaa is C or S

SEQ ID NO: 43530 - protein, 34 aa, Artificial Sequence; identical to SEQ ID NO: 5344
  Cyclic GFR-binding peptide
  MOD_RES (32)..(33): Xaa is C or S

SEQ ID NO: 43531 - protein, 32 aa, Artificial Sequence
  Cyclic GFR-binding peptide
  MOD_RES (2)..(4): Xaa is C or S
SXKXSKVVMQYNKLVKPTRGVLYLISIASLDQ

SEQ ID NO: 43532 - protein, 25 aa, Artificial Sequence
  Cyclic GFR-binding peptide
GERHKRLTPVGMDDYYLVSTASLKT

SEQ ID NO: 43533 - protein, 34 aa, Artificial Sequence
  Cyclic GFR-binding peptide
  MOD_RES (29)..(30): Xaa is C or S
MGEQYNKLTPVGMDDLYLVSIASLKTPVXXAKGV

SEQ ID NO: 43534 - protein, 34 aa, Artificial Sequence
  Cyclic GFR-binding peptide
  MOD_RES (28)..(29): Xaa is C or S
IMQYNKLVKPKRGVLYLISIASLAQPVXXPAASA

SEQ ID NO: 43535 - protein, 25 aa, Artificial Sequence
  Cyclic GFR-binding peptide
VMNQYNKLIVNSSDDLYLVSIASLQ

SEQ ID NO: 43536 - protein, 40 aa, Artificial Sequence; identical to SEQ ID NO: 5348
  Cyclic GFR-binding peptide
  MOD_RES (2)..(34)..(35): Xaa is C or S

SEQ ID NO: 43537 - protein, 32 aa, Artificial Sequence; identical to SEQ ID NO: 5349
  Cyclic GFR-binding peptide
  MOD_RES (31)..(32): Xaa is C or S

SEQ ID NO: 43538 - protein, 26 aa, Artificial Sequence
  Cyclic GFR-binding peptide
VIMRHKRLIKPTKGIYYLISTASLDQ

SEQ ID NO: 43539 - protein, 30 aa, Artificial Sequence
  Cyclic GFR-binding peptide
  MOD_RES (29)..(30): Xaa is C or S
VMNRYKKLIVNNSSDFYLVSIANLKTPAXX

SEQ ID NO: 43540 - protein, 28 aa, Artificial Sequence
  Cyclic GFR-binding peptide
VMERHKRLVVKDYEDYYLMSTASLETPV

SEQ ID NO: 43541 - protein, 27 aa, Artificial Sequence
  Cyclic GFR-binding peptide
  MOD_RES (27)..(27): Xaa is C or S
DRHKRLVVKENEDYYLMSTASLETPVX

SEQ ID NO: 43542 - protein, 28 aa, Artificial Sequence
  Cyclic GFR-binding peptide
VIMRHKRLIKPTKGIYYLISTASLDQSV

SEQ ID NO: 43543 - protein, 29 aa, Artificial Sequence
  Cyclic GFR-binding peptide
  MOD_RES (1)..(3): Xaa is C or S
XGXSRVVMNRHKRLIVNSSDDYYLVSTAS

SEQ ID NO: 43544 - protein, 37 aa, Artificial Sequence; identical to SEQ ID NO: 5352
  Cyclic GFR-binding peptide
  MOD_RES (36)..(36): Xaa is C or S

SEQ ID NO: 43545 - protein, 41 aa, Artificial Sequence; identical to SEQ ID NO: 5355
  Cyclic GFR-binding peptide
  MOD_RES (2)..(4)..(35)..(36): Xaa is C or S

SEQ ID NO: 43546 - protein, 33 aa, Artificial Sequence
  Cyclic GFR-binding peptide
  MOD_RES (28)..(29): Xaa is C or S
GERYKKLTPVGMDDFYLVSIANLKTPVXXAKGV

SEQ ID NO: 43547 - protein, 35 aa, Artificial Sequence; identical to SEQ ID NO: 5356
  Cyclic GFR-binding peptide
  MOD_RES (31)..(32): Xaa is C or S

SEQ ID NO: 43548 - protein, 35 aa, Artificial Sequence; identical to SEQ ID NO: 5357
  Cyclic GFR-binding peptide
  MOD_RES (2)..(34)..(35): Xaa is C or S

SEQ ID NO: 43549 - protein, 36 aa, Artificial Sequence; identical to SEQ ID NO: 5358
  Cyclic GFR-binding peptide
  MOD_RES (2)..(4)..(36): Xaa is C or S

SEQ ID NO: 43550 - protein, 30 aa, Artificial Sequence
  Cyclic GFR-binding peptide
  MOD_RES (28)..(29): Xaa is C or S
MERYKKLVVKDYEDFYLMSIANLETPVXXA

SEQ ID NO: 43551 - protein, 28 aa, Artificial Sequence
  Cyclic GFR-binding peptide
  MOD_RES (26)..(27): Xaa is C or S
QYNKLIVNNSSDLYLVSIASLKTPAXXA

SEQ ID NO: 43552 - protein, 30 aa, Artificial Sequence
  Cyclic GFR-binding peptide
DELTQYNKLFIPKKRVIELYLVSIASLQVQ

SEQ ID NO: 43553 - protein, 29 aa, Artificial Sequence
  Cyclic GFR-binding peptide
  MOD_RES (29)..(29): Xaa is C or S
VMNRHKRLIVNSSDDYYLVSTASLQTPAX

SEQ ID NO: 43554 - protein, 30 aa, Artificial Sequence
  Cyclic GFR-binding peptide
  MOD_RES (26)..(27): Xaa is C or S
YHYKLIVNSSDDKYLVSIPSLKTPAXXPKP

SEQ ID NO: 43555 - protein, 26 aa, Artificial Sequence
  Cyclic GFR-binding peptide
MNYHYKLIVNSSDDKYLVSIPSLKTP

SEQ ID NO: 43556 - protein, 32 aa, Artificial Sequence
  Cyclic GFR-binding peptide
  MOD_RES (1)..(3): Xaa is C or S
XKXALHDELTRHKRLFIPKKRVIEYYLVSTAS

SEQ ID NO: 43557 - protein, 23 aa, Artificial Sequence
  Cyclic GFR-binding peptide
MRYKKLVKPTRGVFYLISIANLD

SEQ ID NO: 43558 - protein, 26 aa, Artificial Sequence
  Cyclic GFR-binding peptide
GEVVMDRYKKLVVKENEDFYLMSIAN

SEQ ID NO: 43559 - protein, 29 aa, Artificial Sequence
  Cyclic GFR-binding peptide
  MOD_RES (29)..(29): Xaa is C or S
VMERYKKLVVKDYEDFYLMSIANLETPVX

SEQ ID NO: 43560 - protein, 29 aa, Artificial Sequence
  Cyclic GFR-binding peptide
  MOD_RES (1)..(1): Xaa is C or S
XSRVIMRYKKLVKPKRGVFYLISIANLAQ

SEQ ID NO: 43561 - protein, 23 aa, Artificial Sequence
  Cyclic GFR-binding peptide
IMRYKKLVKPKRGVFYLISIANL

SEQ ID NO: 43562 - protein, 38 aa, Artificial Sequence; identical to SEQ ID NO: 5362
  Cyclic GFR-binding peptide
  MOD_RES (1)..(3)..(35)..(36): Xaa is C or S

SEQ ID NO: 43563 - protein, 34 aa, Artificial Sequence
  Cyclic GFR-binding peptide
  MOD_RES (2)..(4): Xaa is C or S
RXGXGEVVMDRHKRLVVKENEDYYLMSTASLETP

SEQ ID NO: 43564 - protein, 30 aa, Artificial Sequence
  Cyclic GFR-binding peptide
TQYNKLFIPKKRVIELYLVSIASLQVQTPR

SEQ ID NO: 43565 - protein, 31 aa, Artificial Sequence
  Cyclic GFR-binding peptide
  MOD_RES (26)..(26): Xaa is C or S
RHKRLIVNSSDDYYLVSTASLKTPAXTPKTV

SEQ ID NO: 43566 - protein, 35 aa, Artificial Sequence
  Cyclic GFR-binding peptide
  MOD_RES (30)..(31): Xaa is C or S
RVIMYHYKLVKPKRGVKYLISIPSLAQPVXXPAAS

SEQ ID NO: 43567 - protein, 30 aa, Artificial Sequence
  Cyclic GFR-binding peptide
  MOD_RES (30)..(30): Xaa is C or S
RVIMYHYKLVKPKRGVKYLISIPSLAQPVX

SEQ ID NO: 43568 - protein, 37 aa, Artificial Sequence; identical to SEQ ID NO: 5364
  Cyclic GFR-binding peptide
  MOD_RES (2)..(33)..(34): Xaa is C or S

SEQ ID NO: 43569 - protein, 33 aa, Artificial Sequence; identical to SEQ ID NO: 5365
  Cyclic GFR-binding peptide
  MOD_RES (1)..(32)..(33): Xaa is C or S

SEQ ID NO: 43570 - protein, 35 aa, Artificial Sequence
  Cyclic GFR-binding peptide
  MOD_RES (30)..(31): Xaa is C or S
VVMDRHKRLVVKENEDYYLMSTASLETPVXXAKPI

SEQ ID NO: 43571 - protein, 31 aa, Artificial Sequence; identical to SEQ ID NO: 5370
  Cyclic GFR-binding peptide

SEQ ID NO: 43572 - protein, 31 aa, Artificial Sequence
  Cyclic GFR-binding peptide
ALHDELTRYKKLFIPKKRVIEFYLVSIANLQ

SEQ ID NO: 43573 - protein, 26 aa, Artificial Sequence
  Cyclic GFR-binding peptide
EVVMEYHYKLVVKDYEDKYLMSIPSL

SEQ ID NO: 43574 - protein, 32 aa, Artificial Sequence; identical to SEQ ID NO: 5371
  Cyclic GFR-binding peptide
  MOD_RES (2)..(2): Xaa is C or S

SEQ ID NO: 43575 - protein, 36 aa, Artificial Sequence; identical to SEQ ID NO: 5375
  Cyclic GFR-binding peptide
  MOD_RES (2)..(33)..(34): Xaa is C or S

SEQ ID NO: 43576 - protein, 42 aa, Artificial Sequence; identical to SEQ ID NO: 5377
  Cyclic GFR-binding peptide
  MOD_RES (2)..(4)..(41): Xaa is C or S

SEQ ID NO: 43577 - protein, 39 aa, Artificial Sequence; identical to SEQ ID NO: 5378
  Cyclic GFR-binding peptide
  MOD_RES (2)..(4)..(35)..(36): Xaa is C or S

SEQ ID NO: 43578 - protein, 30 aa, Artificial Sequence
  Cyclic GFR-binding peptide
  MOD_RES (1)..(1): Xaa is C or S
XEAVSMGEQYNKLTPVGMDDLYLVSIASLK

SEQ ID NO: 43579 - protein, 28 aa, Artificial Sequence
  Cyclic GFR-binding peptide
  MOD_RES (1)..(3): Xaa is C or S
XKXSKVIMRHKRLIKPTKGIYYLISTAS

SEQ ID NO: 43580 - protein, 28 aa, Artificial Sequence
  Cyclic GFR-binding peptide
  MOD_RES (1)..(3): Xaa is C or S
XKXSKVIMYHYKLIKPTKGIKYLISIPS

SEQ ID NO: 43581 - protein, 30 aa, Artificial Sequence; identical to SEQ ID NO: 5380
  Cyclic GFR-binding peptide

SEQ ID NO: 43582 - protein, 29 aa, Artificial Sequence
  Cyclic GFR-binding peptide
  MOD_RES (26)..(27): Xaa is C or S
RYKKLVVKDYEDFYLMSIANLETPVXXAK

SEQ ID NO: 43583 - protein, 38 aa, Artificial Sequence; identical to SEQ ID NO: 5382
  Cyclic GFR-binding peptide
  MOD_RES (32)..(33): Xaa is C or S

SEQ ID NO: 43584 - protein, 22 aa, Artificial Sequence
  Cyclic GFR-binding peptide
YHYKLFIPKKRVIEKYLVSIPS

SEQ ID NO: 43585 - protein, 40 aa, Artificial Sequence; identical to SEQ ID NO: 5383
  Cyclic GFR-binding peptide
  MOD_RES (2)..(4)..(35)..(36): Xaa is C or S

SEQ ID NO: 43586 - protein, 37 aa, Artificial Sequence; identical to SEQ ID NO: 5384
  Cyclic GFR-binding peptide
  MOD_RES (2)..(34): Xaa is C or S

SEQ ID NO: 43587 - protein, 41 aa, Artificial Sequence; identical to SEQ ID NO: 5385
  Cyclic GFR-binding peptide
  MOD_RES (2)..(39): Xaa is C or S

SEQ ID NO: 43588 - protein, 28 aa, Artificial Sequence
  Cyclic GFR-binding peptide
  MOD_RES (2)..(2): Xaa is C or S
KXSRVIMRYKKLVKPKRGVFYLISIANL

SEQ ID NO: 43589 - protein, 26 aa, Artificial Sequence
  Cyclic GFR-binding peptide
MDRHKRLVVKENEDYYLMSTASLETP

SEQ ID NO: 43590 - protein, 27 aa, Artificial Sequence
  Cyclic GFR-binding peptide
  MOD_RES (1)..(1): Xaa is C or S
XGEVVMDYHYKLVVKENEDKYLMSIPS

SEQ ID NO: 43591 - protein, 26 aa, Artificial Sequence
  Cyclic GFR-binding peptide
LTYHYKLFIPKKRVIEKYLVSIPSLQ

SEQ ID NO: 43592 - protein, 30 aa, Artificial Sequence
  Cyclic GFR-binding peptide
  MOD_RES (2)..(4): Xaa is C or S
HXGXARVVMNYHYKLIVNSSDDKYLVSIPS

SEQ ID NO: 43593 - protein, 39 aa, Artificial Sequence; identical to SEQ ID NO: 5387
  Cyclic GFR-binding peptide
  MOD_RES (1)..(38): Xaa is C or S

SEQ ID NO: 43594 - protein, 24 aa, Artificial Sequence
  Cyclic GFR-binding peptide
RYKKLVVKENEDFYLMSIANLETP

SEQ ID NO: 43595 - protein, 33 aa, Artificial Sequence; identical to SEQ ID NO: 5388
  Cyclic GFR-binding peptide
  MOD_RES (31)..(31): Xaa is C or S

SEQ ID NO: 43596 - protein, 29 aa, Artificial Sequence
  Cyclic GFR-binding peptide
RVIMRYKKLVKPKRGVFYLISIANLAQPV

SEQ ID NO: 43597 - protein, 28 aa, Artificial Sequence
  Cyclic GFR-binding peptide
  MOD_RES (1)..(3): Xaa is C or S
XKXSKVVMRHKRLVKPTRGVYYLISTAS

SEQ ID NO: 43598 - protein, 34 aa, Artificial Sequence; identical to SEQ ID NO: 5389
  Cyclic GFR-binding peptide
  MOD_RES (2)..(34): Xaa is C or S

SEQ ID NO: 43599 - protein, 32 aa, Artificial Sequence
  Cyclic GFR-binding peptide
  MOD_RES (26)..(27): Xaa is C or S
RHKRLIVNSSDDYYLVSTASLKTPAXXPKPVY

SEQ ID NO: 43600 - protein, 39 aa, Artificial Sequence; identical to SEQ ID NO: 5390
  Cyclic GFR-binding peptide
  MOD_RES (2)..(33)..(34): Xaa is C or S

SEQ ID NO: 43601 - protein, 37 aa, Artificial Sequence; identical to SEQ ID NO: 5392
  Cyclic GFR-binding peptide
  MOD_RES (1)..(3)..(36)..(37): Xaa is C or S

SEQ ID NO: 43602 - protein, 26 aa, Artificial Sequence
  Cyclic GFR-binding peptide
  MOD_RES (26)..(26): Xaa is C or S
RYKKLVVKENEDFYLMSIANLETPVX

SEQ ID NO: 43603 - protein, 32 aa, Artificial Sequence
  Cyclic GFR-binding peptide
  MOD_RES (2)..(4): Xaa is C or S
HXGXAKVVMNYHYKLIVNNSSDKYLVSIPSLK

SEQ ID NO: 43604 - protein, 27 aa, Artificial Sequence
  Cyclic GFR-binding peptide
VMERYKKLVVKDYEDFYLMSIANLETP

SEQ ID NO: 43605 - protein, 35 aa, Artificial Sequence
  Cyclic GFR-binding peptide
  MOD_RES (29)..(30): Xaa is C or S
VIMRHKRLVKPKRGVYYLISTASLAQPVXXPAASA

SEQ ID NO: 43606 - protein, 34 aa, Artificial Sequence
  Cyclic GFR-binding peptide
  MOD_RES (28)..(29): Xaa is C or S
MDRYKKLVVKENEDFYLMSIANLETPVXXAKPIK

SEQ ID NO: 43607 - protein, 32 aa, Artificial Sequence
  Cyclic GFR-binding peptide
  MOD_RES (27)..(28): Xaa is C or S
DYHYKLVVKENEDKYLMSIPSLETPVXXAKPI

SEQ ID NO: 43608 - protein, 40 aa, Artificial Sequence; identical to SEQ ID NO: 5396
  Cyclic GFR-binding peptide
  MOD_RES (1)..(34)..(35): Xaa is C or S

SEQ ID NO: 43609 - protein, 29 aa, Artificial Sequence
  Cyclic GFR-binding peptide
  MOD_RES (28)..(29): Xaa is C or S
IMRHKRLVKPKRGVYYLISTASLAQPVXX

SEQ ID NO: 43610 - protein, 40 aa, Artificial Sequence; identical to SEQ ID NO: 5397
  Cyclic GFR-binding peptide
  MOD_RES (1)..(38): Xaa is C or S

SEQ ID NO: 43611 - protein, 32 aa, Artificial Sequence; identical to SEQ ID NO: 5399
  Cyclic GFR-binding peptide
  MOD_RES (32)..(32): Xaa is C or S

SEQ ID NO: 43612 - protein, 25 aa, Artificial Sequence
  Cyclic GFR-binding peptide
MGEQYNKLTPVGMDDLYLVSIASLK

SEQ ID NO: 43613 - protein, 30 aa, Artificial Sequence
  Cyclic GFR-binding peptide
  MOD_RES (27)..(28): Xaa is C or S
EYHYKLVVKDYEDKYLMSIPSLETPVXXAK

SEQ ID NO: 43614 - protein, 38 aa, Artificial Sequence; identical to SEQ ID NO: 5401
  Cyclic GFR-binding peptide
  MOD_RES (37)..(37): Xaa is C or S

SEQ ID NO: 43615 - protein, 28 aa, Artificial Sequence
  Cyclic GFR-binding peptide
YHYKLFIPKKRVIEKYLVSIPSLQVQTP

SEQ ID NO: 43616 - protein, 35 aa, Artificial Sequence
  Cyclic GFR-binding peptide
  MOD_RES (29)..(29): Xaa is C or S
VMNYHYKLIVNSSDDKYLVSIPSLKTPAXTPKTVH

SEQ ID NO: 43617 - protein, 34 aa, Artificial Sequence; identical to SEQ ID NO: 5402
  Cyclic GFR-binding peptide
  MOD_RES (1)..(3)..(34): Xaa is C or S

SEQ ID NO: 43618 - protein, 40 aa, Artificial Sequence; identical to SEQ ID NO: 5403
  Cyclic GFR-binding peptide
  MOD_RES (36)..(36): Xaa is C or S

SEQ ID NO: 43619 - protein, 32 aa, Artificial Sequence; identical to SEQ ID NO: 5405
  Cyclic GFR-binding peptide
  MOD_RES (31)..(31): Xaa is C or S

SEQ ID NO: 43620 - protein, 21 aa, Artificial Sequence
  Cyclic GFR-binding peptide
ERHKRLTPVGMDDYYLVSTAS

SEQ ID NO: 43621 - protein, 27 aa, Artificial Sequence
  Cyclic GFR-binding peptide
  MOD_RES (27)..(27): Xaa is C or S
MYHYKLVKPTRGVKYLISIPSLDQPVX

SEQ ID NO: 43622 - protein, 36 aa, Artificial Sequence; identical to SEQ ID NO: 5406
  Cyclic GFR-binding peptide
  MOD_RES (2)..(4)..(36): Xaa is C or S

SEQ ID NO: 43623 - protein, 29 aa, Artificial Sequence
  Cyclic GFR-binding peptide
  MOD_RES (29)..(29): Xaa is C or S
VIMRHKRLIKPTKGIYYLISTASLDQSVX

SEQ ID NO: 43624 - protein, 34 aa, Artificial Sequence
  Cyclic GFR-binding peptide
  MOD_RES (33)..(33): Xaa is C or S
ELTRHKRLFIPKKRVIEYYLVSTASLQVQTPRXQ

SEQ ID NO: 43625 - protein, 37 aa, Artificial Sequence; identical to SEQ ID NO: 5408
  Cyclic GFR-binding peptide
  MOD_RES (2)..(34)..(35): Xaa is C or S

SEQ ID NO: 43626 - protein, 36 aa, Artificial Sequence; identical to SEQ ID NO: 5409
  Cyclic GFR-binding peptide
  MOD_RES (1)..(32)..(33): Xaa is C or S

SEQ ID NO: 43627 - protein, 29 aa, Artificial Sequence
  Cyclic GFR-binding peptide
  MOD_RES (2)..(2): Xaa is C or S
KXSRVIMRYKKLVKPKRGVFYLISIANLA

SEQ ID NO: 43628 - protein, 25 aa, Artificial Sequence
  Cyclic GFR-binding peptide
VMNYHYKLIVNSSDDKYLVSIPSLK

SEQ ID NO: 43629 - protein, 26 aa, Artificial Sequence
  Cyclic GFR-binding peptide
MRYKKLVKPTRGVFYLISIANLDQPV

SEQ ID NO: 43630 - protein, 32 aa, Artificial Sequence
  Cyclic GFR-binding peptide
  MOD_RES (30)..(31): Xaa is C or S
RVIMRHKRLVKPKRGVYYLISTASLAQPVXXP

SEQ ID NO: 43631 - protein, 33 aa, Artificial Sequence
  Cyclic GFR-binding peptide
  MOD_RES (28)..(29): Xaa is C or S
IMRHKRLIKPTKGIYYLISTASLDQSVXXPSAS

SEQ ID NO: 43632 - protein, 22 aa, Artificial Sequence
  Cyclic GFR-binding peptide
RYKKLTPVGMDDFYLVSIANLK

SEQ ID NO: 43633 - protein, 35 aa, Artificial Sequence
  Cyclic GFR-binding peptide
  MOD_RES (2)..(2): Xaa is C or S
KXALHDELTRYKKLFIPKKRVIEFYLVSIANLQVQ

SEQ ID NO: 43634 - protein, 31 aa, Artificial Sequence
  Cyclic GFR-binding peptide
  MOD_RES (26)..(27): Xaa is C or S
RYKKLIKPTKGIFYLISIANLDQSVXXPSAS

SEQ ID NO: 43635 - protein, 31 aa, Artificial Sequence
  Cyclic GFR-binding peptide
  MOD_RES (2)..(4): Xaa is C or S
SXKXSKVIMRHKRLIKPTKGIYYLISTASLD

SEQ ID NO: 43636 - protein, 20 aa, Artificial Sequence
  Cyclic GFR-binding peptide
QYNKLVVKDYEDLYLMSIAS

SEQ ID NO: 43637 - protein, 23 aa, Artificial Sequence
  Cyclic GFR-binding peptide
RHKRLIVNSSDDYYLVSTASLKT

SEQ ID NO: 43638 - protein, 21 aa, Artificial Sequence
  Cyclic GFR-binding peptide
RYKKLVKPTRGVFYLISIANL

SEQ ID NO: 43639 - protein, 42 aa, Artificial Sequence; identical to SEQ ID NO: 5415
  Cyclic GFR-binding peptide
  MOD_RES (2)..(4)..(37)..(38): Xaa is C or S

SEQ ID NO: 43640 - protein, 28 aa, Artificial Sequence
  Cyclic GFR-binding peptide
  MOD_RES (2)..(2): Xaa is C or S
GXAKVVMNRYKKLIVNNSSDFYLVSIAN

SEQ ID NO: 43641 - protein, 40 aa, Artificial Sequence; identical to SEQ ID NO: 5416
  Cyclic GFR-binding peptide
  MOD_RES (2)..(39): Xaa is C or S

SEQ ID NO: 43642 - protein, 32 aa, Artificial Sequence
  Cyclic GFR-binding peptide
  MOD_RES (1)..(3): Xaa is C or S
XKXSKVIMRHKRLIKPTKGIYYLISTASLDQS

SEQ ID NO: 43643 - protein, 38 aa, Artificial Sequence; identical to SEQ ID NO: 5417
  Cyclic GFR-binding peptide
  MOD_RES (36)..(36): Xaa is C or S

SEQ ID NO: 43644 - protein, 38 aa, Artificial Sequence; identical to SEQ ID NO: 5419
  Cyclic GFR-binding peptide
  MOD_RES (2)..(34)..(35): Xaa is C or S

SEQ ID NO: 43645 - protein, 28 aa, Artificial Sequence
  Cyclic GFR-binding peptide
  MOD_RES (26)..(27): Xaa is C or S
RYKKLIKPTKGIFYLISIANLDQSVXXP

SEQ ID NO: 43646 - protein, 34 aa, Artificial Sequence; identical to SEQ ID NO: 5421
  Cyclic GFR-binding peptide
  MOD_RES (31)..(32): Xaa is C or S

SEQ ID NO: 43647 - protein, 30 aa, Artificial Sequence
  Cyclic GFR-binding peptide
  MOD_RES (27)..(27): Xaa is C or S
NQYNKLIVNSSDDLYLVSIASLKTPAXTPK

SEQ ID NO: 43648 - protein, 29 aa, Artificial Sequence
  Cyclic GFR-binding peptide
  MOD_RES (2)..(2): Xaa is C or S
KXSRVIMYHYKLVKPKRGVKYLISIPSLA

SEQ ID NO: 43649 - protein, 26 aa, Artificial Sequence
  Cyclic GFR-binding peptide
EVVMERYKKLVVKDYEDFYLMSIANL

SEQ ID NO: 43650 - protein, 34 aa, Artificial Sequence
  Cyclic GFR-binding peptide
  MOD_RES (34)..(34): Xaa is C or S
DELTRYKKLFIPKKRVIEFYLVSIANLQVQTPRX

SEQ ID NO: 43651 - protein, 23 aa, Artificial Sequence
  Cyclic GFR-binding peptide
YHYKLVKPTRGVKYLISIPSLDQ

SEQ ID NO: 43652 - protein, 38 aa, Artificial Sequence; identical to SEQ ID NO: 5424
  Cyclic GFR-binding peptide
  MOD_RES (32)..(33): Xaa is C or S

SEQ ID NO: 43653 - protein, 39 aa, Artificial Sequence; identical to SEQ ID NO: 5426
  Cyclic GFR-binding peptide
  MOD_RES (1)..(34)..(35): Xaa is C or S

SEQ ID NO: 43654 - protein, 32 aa, Artificial Sequence; identical to SEQ ID NO: 5425
  Cyclic GFR-binding peptide
  MOD_RES (2)..(2): Xaa is C or S

SEQ ID NO: 43655 - protein, 31 aa, Artificial Sequence
  Cyclic GFR-binding peptide
  MOD_RES (1)..(3): Xaa is C or S
XKXSRVIMRHKRLVKPKRGVYYLISTASLAQ

SEQ ID NO: 43656 - protein, 35 aa, Artificial Sequence; identical to SEQ ID NO: 5427
  Cyclic GFR-binding peptide
  MOD_RES (2)..(34)..(35): Xaa is C or S

SEQ ID NO: 43657 - protein, 20 aa, Artificial Sequence
  Cyclic GFR-binding peptide
QYNKLVKPTRGVLYLISIAS

SEQ ID NO: 43658 - protein, 31 aa, Artificial Sequence
  Cyclic GFR-binding peptide
  MOD_RES (31)..(31): Xaa is C or S
VSMGERHKRLTPVGMDDYYLVSTASLKTPVX

SEQ ID NO: 43659 - protein, 31 aa, Artificial Sequence
  Cyclic GFR-binding peptide
  MOD_RES (1)..(3): Xaa is C or S
XGXAKVVMNQYNKLIVNNSSDLYLVSIASLK

SEQ ID NO: 43660 - protein, 34 aa, Artificial Sequence; identical to SEQ ID NO: 5428
  Cyclic GFR-binding peptide
  MOD_RES (1)..(3): Xaa is C or S

SEQ ID NO: 43661 - protein, 29 aa, Artificial Sequence
  Cyclic GFR-binding peptide
  MOD_RES (26)..(27): Xaa is C or S
RHKRLIVNSSDDYYLVSTASLKTPAXXPK

SEQ ID NO: 43662 - protein, 30 aa, Artificial Sequence; identical to SEQ ID NO: 5429
  Cyclic GFR-binding peptide

SEQ ID NO: 43663 - protein, 29 aa, Artificial Sequence
  Cyclic GFR-binding peptide
  MOD_RES (1)..(3): Xaa is C or S
XGXGEVVMERYKKLVVKDYEDFYLMSIAN

SEQ ID NO: 43664 - protein, 28 aa, Artificial Sequence
  Cyclic GFR-binding peptide
  MOD_RES (27)..(28): Xaa is C or S
MYHYKLVKPTRGVKYLISIPSLDQPVXX

SEQ ID NO: 43665 - protein, 37 aa, Artificial Sequence; identical to SEQ ID NO: 5430
  Cyclic GFR-binding peptide
  MOD_RES (1)..(3)..(35)..(36): Xaa is C or S

SEQ ID NO: 43666 - protein, 28 aa, Artificial Sequence
  Cyclic GFR-binding peptide
  MOD_RES (26)..(27): Xaa is C or S
RHKRLVKPTRGVYYLISTASLDQPVXXP

SEQ ID NO: 43667 - protein, 36 aa, Artificial Sequence; identical to SEQ ID NO: 5435
  Cyclic GFR-binding peptide
  MOD_RES (31)..(31): Xaa is C or S

SEQ ID NO: 43668 - protein, 32 aa, Artificial Sequence
  Cyclic GFR-binding peptide
  MOD_RES (1)..(3): Xaa is C or S
XKXSKVIMYHYKLIKPTKGIKYLISIPSLDQS

SEQ ID NO: 43669 - protein, 28 aa, Artificial Sequence
  Cyclic GFR-binding peptide
  MOD_RES (1)..(1): Xaa is C or S
XEAVSMGERYKKLTPVGMDDFYLVSIAN

SEQ ID NO: 43670 - protein, 32 aa, Artificial Sequence
  Cyclic GFR-binding peptide
LHDELTRHKRLFIPKKRVIEYYLVSTASLQVQ

SEQ ID NO: 43671 - protein, 35 aa, Artificial Sequence
  Cyclic GFR-binding peptide
  MOD_RES (30)..(31): Xaa is C or S
VVMNQYNKLIVNNSSDLYLVSIASLKTPAXXAKPV

SEQ ID NO: 43672 - protein, 31 aa, Artificial Sequence
  Cyclic GFR-binding peptide
  MOD_RES (29)..(30): Xaa is C or S
VMNYHYKLIVNNSSDKYLVSIPSLKTPAXXA

SEQ ID NO: 43673 - protein, 25 aa, Artificial Sequence
  Cyclic GFR-binding peptide
SRVIMYHYKLVKPKRGVKYLISIPS

SEQ ID NO: 43674 - protein, 27 aa, Artificial Sequence
  Cyclic GFR-binding peptide
  MOD_RES (27)..(27): Xaa is C or S
ERYKKLTPVGMDDFYLVSIANLKTPVX

SEQ ID NO: 43675 - protein, 33 aa, Artificial Sequence
  Cyclic GFR-binding peptide
  MOD_RES (30)..(31): Xaa is C or S
KVVMYHYKLVKPTRGVKYLISIPSLDQPVXXPS

SEQ ID NO: 43676 - protein, 25 aa, Artificial Sequence
  Cyclic GFR-binding peptide
YHYKLFIPKKRVIEKYLVSIPSLQV

SEQ ID NO: 43677 - protein, 40 aa, Artificial Sequence; identical to SEQ ID NO: 5439
  Cyclic GFR-binding peptide
  MOD_RES (36)..(36): Xaa is C or S

SEQ ID NO: 43678 - protein, 28 aa, Artificial Sequence
  Cyclic GFR-binding peptide
  MOD_RES (27)..(28): Xaa is C or S
ERYKKLTPVGMDDFYLVSIANLKTPVXX

SEQ ID NO: 43679 - protein, 31 aa, Artificial Sequence
  Cyclic GFR-binding peptide
LHDELTYHYKLFIPKKRVIEKYLVSIPSLQV

SEQ ID NO: 43680 - protein, 29 aa, Artificial Sequence
  Cyclic GFR-binding peptide
  MOD_RES (27)..(28): Xaa is C or S
MQYNKLIKPTKGILYLISIASLDQSVXXP

SEQ ID NO: 43681 - protein, 37 aa, Artificial Sequence; identical to SEQ ID NO: 5440
  Cyclic GFR-binding peptide
  MOD_RES (1)..(33)..(34): Xaa is C or S

SEQ ID NO: 43682 - protein, 33 aa, Artificial Sequence; identical to SEQ ID NO: 5441
  Cyclic GFR-binding peptide
  MOD_RES (32)..(33): Xaa is C or S

SEQ ID NO: 43683 - protein, 39 aa, Artificial Sequence; identical to SEQ ID NO: 5442
  Cyclic GFR-binding peptide
  MOD_RES (1)..(3)..(35)..(36): Xaa is C or S

SEQ ID NO: 43684 - protein, 32 aa, Artificial Sequence
  Cyclic GFR-binding peptide
  MOD_RES (1)..(3): Xaa is C or S
XGXAKVVMNRYKKLIVNNSSDFYLVSIANLKT

SEQ ID NO: 43685 - protein, 34 aa, Artificial Sequence
  Cyclic GFR-binding peptide
  MOD_RES (2)..(4): Xaa is C or S
HXGXAKVVMNRYKKLIVNNSSDFYLVSIANLKTP

SEQ ID NO: 43686 - protein, 22 aa, Artificial Sequence
  Cyclic GFR-binding peptide
IMRYKKLIKPTKGIFYLISIAN

SEQ ID NO: 43687 - protein, 36 aa, Artificial Sequence
  Cyclic GFR-binding peptide
  MOD_RES (2)..(4): Xaa is C or S
EXKXALHDELTRYKKLFIPKKRVIEFYLVSIANLQV

SEQ ID NO: 43688 - protein, 30 aa, Artificial Sequence
  Cyclic GFR-binding peptide
  MOD_RES (28)..(29): Xaa is C or S
GEQYNKLTPVGMDDLYLVSIASLKTPVXXA

SEQ ID NO: 43689 - protein, 36 aa, Artificial Sequence; identical to SEQ ID NO: 5445
  Cyclic GFR-binding peptide
  MOD_RES (1)..(33)..(34): Xaa is C or S

SEQ ID NO: 43690 - protein, 35 aa, Artificial Sequence; identical to SEQ ID NO: 5446
  Cyclic GFR-binding peptide
  MOD_RES (2)..(4): Xaa is C or S

SEQ ID NO: 43691 - protein, 31 aa, Artificial Sequence
  Cyclic GFR-binding peptide
  MOD_RES (2)..(4): Xaa is C or S
RXGXGEVVMDYHYKLVVKENEDKYLMSIPSL

SEQ ID NO: 43692 - protein, 23 aa, Artificial Sequence
  Cyclic GFR-binding peptide
MNQYNKLIVNSSDDLYLVSIASL

SEQ ID NO: 43693 - protein, 33 aa, Artificial Sequence
  Cyclic GFR-binding peptide
  MOD_RES (2)..(4): Xaa is C or S
SXKXSKVIMQYNKLIKPTKGILYLISIASLDQS

SEQ ID NO: 43694 - protein, 23 aa, Artificial Sequence
  Cyclic GFR-binding peptide
NYHYKLIVNSSDDKYLVSIPSLQ

SEQ ID NO: 43695 - protein, 32 aa, Artificial Sequence
  Cyclic GFR-binding peptide
ALHDELTQYNKLFIPKKRVIELYLVSIASLQV

SEQ ID NO: 43696 - protein, 35 aa, Artificial Sequence; identical to SEQ ID NO: 5449
  Cyclic GFR-binding peptide
  MOD_RES (31)..(32): Xaa is C or S

SEQ ID NO: 43697 - protein, 30 aa, Artificial Sequence
  Cyclic GFR-binding peptide
  MOD_RES (30)..(30): Xaa is C or S
KVIMQYNKLIKPTKGILYLISIASLDQSVX

SEQ ID NO: 43698 - protein, 23 aa, Artificial Sequence
  Cyclic GFR-binding peptide
ERYKKLVVKDYEDFYLMSIANLE

SEQ ID NO: 43699 - protein, 43 aa, Artificial Sequence; identical to SEQ ID NO: 5450
  Cyclic GFR-binding peptide
  MOD_RES (2)..(4)..(37)..(38): Xaa is C or S

SEQ ID NO: 43700 - protein, 30 aa, Artificial Sequence
  Cyclic GFR-binding peptide
  MOD_RES (1)..(3): Xaa is C or S
XGXEAVSMGEQYNKLTPVGMDDLYLVSIAS

SEQ ID NO: 43701 - protein, 36 aa, Artificial Sequence; identical to SEQ ID NO: 5452
  Cyclic GFR-binding peptide
  MOD_RES (32)..(33): Xaa is C or S

SEQ ID NO: 43702 - protein, 31 aa, Artificial Sequence
  Cyclic GFR-binding peptide
  MOD_RES (1)..(3): Xaa is C or S
XKXSKVVMRYKKLVKPTRGVFYLISIANLDQ

SEQ ID NO: 43703 - protein, 24 aa, Artificial Sequence
  Cyclic GFR-binding peptide
NRHKRLIVNSSDDYYLVSTASLQT

SEQ ID NO: 43704 - protein, 36 aa, Artificial Sequence; identical to SEQ ID NO: 5455
  Cyclic GFR-binding peptide
  MOD_RES (2)..(34)..(35): Xaa is C or S

SEQ ID NO: 43705 - protein, 25 aa, Artificial Sequence
  Cyclic GFR-binding peptide
YHYKLIVNSSDDKYLVSIPSLKTPA

SEQ ID NO: 43706 - protein, 24 aa, Artificial Sequence
  Cyclic GFR-binding peptide
MYHYKLIKPTKGIKYLISIPSLDQ

SEQ ID NO: 43707 - protein, 33 aa, Artificial Sequence
  Cyclic GFR-binding peptide
  MOD_RES (30)..(31): Xaa is C or S
RVIMRYKKLVKPKRGVFYLISIANLAQPVXXPA

SEQ ID NO: 43708 - protein, 24 aa, Artificial Sequence
  Cyclic GFR-binding peptide
LTRHKRLFIPKKRVIEYYLVSTAS

SEQ ID NO: 43709 - protein, 39 aa, Artificial Sequence; identical to SEQ ID NO: 5460
  Cyclic GFR-binding peptide
  MOD_RES (2)..(4): Xaa is C or S

SEQ ID NO: 43710 - protein, 30 aa, Artificial Sequence
  Cyclic GFR-binding peptide
DELTYHYKLFIPKKRVIEKYLVSIPSLQVQ

SEQ ID NO: 43711 - protein, 36 aa, Artificial Sequence; identical to SEQ ID NO: 5462
  Cyclic GFR-binding peptide
  MOD_RES (2)..(4)..(35)..(36): Xaa is C or S

SEQ ID NO: 43712 - protein, 33 aa, Artificial Sequence
  Cyclic GFR-binding peptide
  MOD_RES (29)..(30): Xaa is C or S
VMNQYNKLIVNSSDDLYLVSIASLKTPAXXPKP

SEQ ID NO: 43713 - protein, 33 aa, Artificial Sequence; identical to SEQ ID NO: 5464
  Cyclic GFR-binding peptide
  MOD_RES (31)..(32): Xaa is C or S

SEQ ID NO: 43714 - protein, 37 aa, Artificial Sequence
  Cyclic GFR-binding peptide
  MOD_RES (31)..(32): Xaa is C or S
VSMGERHKRLTPVGMDDYYLVSTASLKTPVXXAKGVK

SEQ ID NO: 43715 - protein, 32 aa, Artificial Sequence
  Cyclic GFR-binding peptide
  MOD_RES (28)..(29): Xaa is C or S
VMQYNKLVKPTRGVLYLISIASLDQPVXXPSA

SEQ ID NO: 43716 - protein, 25 aa, Artificial Sequence
  Cyclic GFR-binding peptide
NRHKRLIVNSSDDYYLVSTASLQTP

SEQ ID NO: 43717 - protein, 32 aa, Artificial Sequence
  Cyclic GFR-binding peptide
ALHDELTRHKRLFIPKKRVIEYYLVSTASLQV

SEQ ID NO: 43718 - protein, 42 aa, Artificial Sequence; identical to SEQ ID NO: 5467
  Cyclic GFR-binding peptide
  MOD_RES (1)..(38): Xaa is C or S

SEQ ID NO: 43719 - protein, 34 aa, Artificial Sequence
  Cyclic GFR-binding peptide
  MOD_RES (32)..(32): Xaa is C or S
LTQYNKLFIPKKRVIELYLVSIASLQVQTPRXQV

SEQ ID NO: 43720 - protein, 29 aa, Artificial Sequence
  Cyclic GFR-binding peptide
  MOD_RES (2)..(4): Xaa is C or S
SXKXSKVVMRHKRLVKPTRGVYYLISTAS

SEQ ID NO: 43721 - protein, 30 aa, Artificial Sequence
  Cyclic GFR-binding peptide
  MOD_RES (2)..(2): Xaa is C or S
GXAKVVMNQYNKLIVNNSSDLYLVSIASLK

SEQ ID NO: 43722 - protein, 24 aa, Artificial Sequence
  Cyclic GFR-binding peptide
IMRYKKLVKPKRGVFYLISIANLA

SEQ ID NO: 43723 - protein, 26 aa, Artificial Sequence
  Cyclic GFR-binding peptide
AVSMGERHKRLTPVGMDDYYLVSTAS

SEQ ID NO: 43724 - protein, 29 aa, Artificial Sequence
  Cyclic GFR-binding peptide
EVVMDYHYKLVVKENEDKYLMSIPSLETP

SEQ ID NO: 43725 - protein, 33 aa, Artificial Sequence
  Cyclic GFR-binding peptide
  MOD_RES (28)..(29): Xaa is C or S
MNRHKRLIVNSSDDYYLVSTASLQTPAXXPKPV

SEQ ID NO: 43726 - protein, 28 aa, Artificial Sequence
  Cyclic GFR-binding peptide
VMERYKKLVVKDYEDFYLMSIANLETPV

SEQ ID NO: 43727 - protein, 28 aa, Artificial Sequence
  Cyclic GFR-binding peptide
  MOD_RES (1)..(1): Xaa is C or S
XSRVIMRHKRLVKPKRGVYYLISTASLA

SEQ ID NO: 43728 - protein, 22 aa, Artificial Sequence
  Cyclic GFR-binding peptide
QYNKLFIPKKRVIELYLVSIAS

SEQ ID NO: 43729 - protein, 36 aa, Artificial Sequence; identical to SEQ ID NO: 5469
  Cyclic GFR-binding peptide
  MOD_RES (32)..(33): Xaa is C or S

SEQ ID NO: 43730 - protein, 25 aa, Artificial Sequence
  Cyclic GFR-binding peptide
VVMDYHYKLVVKENEDKYLMSIPSL

SEQ ID NO: 43731 - protein, 36 aa, Artificial Sequence
  Cyclic GFR-binding peptide
  MOD_RES (32)..(33): Xaa is C or S
AVSMGERYKKLTPVGMDDFYLVSIANLKTPVXXAKG

SEQ ID NO: 43732 - protein, 33 aa, Artificial Sequence; identical to SEQ ID NO: 5471
  Cyclic GFR-binding peptide
  MOD_RES (2)..(2): Xaa is C or S

SEQ ID NO: 43733 - protein, 32 aa, Artificial Sequence; identical to SEQ ID NO: 5472
  Cyclic GFR-binding peptide
  MOD_RES (1)..(32): Xaa is C or S

SEQ ID NO: 43734 - protein, 30 aa, Artificial Sequence
  Cyclic GFR-binding peptide
  MOD_RES (26)..(27): Xaa is C or S
RHKRLVKPTRGVYYLISTASLDQPVXXPSA

SEQ ID NO: 43735 - protein, 40 aa, Artificial Sequence; identical to SEQ ID NO: 5473
  Cyclic GFR-binding peptide
  MOD_RES (2)..(34)..(35): Xaa is C or S

SEQ ID NO: 43736 - protein, 40 aa, Artificial Sequence; identical to SEQ ID NO: 5474
  Cyclic GFR-binding peptide
  MOD_RES (2)..(34): Xaa is C or S

SEQ ID NO: 43737 - protein, 20 aa, Artificial Sequence
  Cyclic GFR-binding peptide
RYKKLVKPTRGVFYLISIAN

SEQ ID NO: 43738 - protein, 26 aa, Artificial Sequence
  Cyclic GFR-binding peptide
ELTRHKRLFIPKKRVIEYYLVSTASL

SEQ ID NO: 43739 - protein, 23 aa, Artificial Sequence
  Cyclic GFR-binding peptide
TRYKKLFIPKKRVIEFYLVSIAN

SEQ ID NO: 43740 - protein, 36 aa, Artificial Sequence; identical to SEQ ID NO: 5478
  Cyclic GFR-binding peptide
  MOD_RES (32)..(33): Xaa is C or S

SEQ ID NO: 43741 - protein, 30 aa, Artificial Sequence
  Cyclic GFR-binding peptide
  MOD_RES (2)..(2): Xaa is C or S
GXSRVVMNRHKRLIVNSSDDYYLVSTASLK

SEQ ID NO: 43742 - protein, 33 aa, Artificial Sequence
  Cyclic GFR-binding peptide
  MOD_RES (27)..(28): Xaa is C or S
MRHKRLVKPKRGVYYLISTASLAQPVXXPAASA

SEQ ID NO: 43743 - protein, 27 aa, Artificial Sequence
  Cyclic GFR-binding peptide
  MOD_RES (27)..(27): Xaa is C or S
MRYKKLVKPKRGVFYLISIANLAQPVX

SEQ ID NO: 43744 - protein, 31 aa, Artificial Sequence
  Cyclic GFR-binding peptide
  MOD_RES (29)..(30): Xaa is C or S
VIMYHYKLIKPTKGIKYLISIPSLDQSVXXP

SEQ ID NO: 43745 - protein, 26 aa, Artificial Sequence
  Cyclic GFR-binding peptide
RVIMRYKKLVKPKRGVFYLISIANLA

SEQ ID NO: 43746 - protein, 41 aa, Artificial Sequence; identical to SEQ ID NO: 5482
  Cyclic GFR-binding peptide
  MOD_RES (2)..(4)..(36)..(37): Xaa is C or S

SEQ ID NO: 43747 - protein, 41 aa, Artificial Sequence; identical to SEQ ID NO: 5484
  Cyclic GFR-binding peptide
  MOD_RES (2)..(4)..(36)..(37): Xaa is C or S

SEQ ID NO: 43748 - protein, 33 aa, Artificial Sequence
  Cyclic GFR-binding peptide
  MOD_RES (2)..(4): Xaa is C or S
RXGXGEVVMDYHYKLVVKENEDKYLMSIPSLET

SEQ ID NO: 43749 - protein, 24 aa, Artificial Sequence
  Cyclic GFR-binding peptide
VVMRHKRLVKPTRGVYYLISTASL

SEQ ID NO: 43750 - protein, 32 aa, Artificial Sequence; identical to SEQ ID NO: 5485
  Cyclic GFR-binding peptide
  MOD_RES (2)..(2): Xaa is C or S

SEQ ID NO: 43751 - protein, 28 aa, Artificial Sequence
  Cyclic GFR-binding peptide
  MOD_RES (26)..(27): Xaa is C or S
QYNKLIVNSSDDLYLVSIASLQTPAXXP

SEQ ID NO: 43752 - protein, 27 aa, Artificial Sequence
  Cyclic GFR-binding peptide
VMNRHKRLIVNSSDDYYLVSTASLQTP

SEQ ID NO: 43753 - protein, 38 aa, Artificial Sequence; identical to SEQ ID NO: 5488
  Cyclic GFR-binding peptide
  MOD_RES (36)..(36): Xaa is C or S

SEQ ID NO: 43754 - protein, 28 aa, Artificial Sequence
  Cyclic GFR-binding peptide
  MOD_RES (26)..(27): Xaa is C or S
QYNKLIKPTKGILYLISIASLDQSVXXP

SEQ ID NO: 43755 - protein, 26 aa, Artificial Sequence
  Cyclic GFR-binding peptide
IMRHKRLIKPTKGIYYLISTASLDQS

SEQ ID NO: 43756 - protein, 31 aa, Artificial Sequence
  Cyclic GFR-binding peptide
AVSMGERHKRLTPVGMDDYYLVSTASLKTPV

SEQ ID NO: 43757 - protein, 37 aa, Artificial Sequence; identical to SEQ ID NO: 5490
  Cyclic GFR-binding peptide
  MOD_RES (2)..(4)..(36)..(37): Xaa is C or S

SEQ ID NO: 43758 - protein, 27 aa, Artificial Sequence
  Cyclic GFR-binding peptide
GEVVMEYHYKLVVKDYEDKYLMSIPSL

SEQ ID NO: 43759 - protein, 35 aa, Artificial Sequence
  Cyclic GFR-binding peptide
  MOD_RES (29)..(30): Xaa is C or S
VMNYHYKLIVNSSDDKYLVSIPSLKTPAXXPKPVY

SEQ ID NO: 43760 - protein, 39 aa, Artificial Sequence; identical to SEQ ID NO: 5491
  Cyclic GFR-binding peptide
  MOD_RES (35)..(35): Xaa is C or S

SEQ ID NO: 43761 - protein, 26 aa, Artificial Sequence
  Cyclic GFR-binding peptide
NQYNKLIVNNSSDLYLVSIASLKTPA

SEQ ID NO: 43762 - protein, 35 aa, Artificial Sequence; identical to SEQ ID NO: 5494
  Cyclic GFR-binding peptide
  MOD_RES (31)..(32): Xaa is C or S

SEQ ID NO: 43763 - protein, 36 aa, Artificial Sequence; identical to SEQ ID NO: 5495
  Cyclic GFR-binding peptide
  MOD_RES (1)..(33)..(34): Xaa is C or S

SEQ ID NO: 43764 - protein, 31 aa, Artificial Sequence
  Cyclic GFR-binding peptide
  MOD_RES (26)..(27): Xaa is C or S
QYNKLIVNNSSDLYLVSIASLKTPAXXAKPV

SEQ ID NO: 43765 - protein, 42 aa, Artificial Sequence; identical to SEQ ID NO: 5497
  Cyclic GFR-binding peptide
  MOD_RES (2)..(39): Xaa is C or S

SEQ ID NO: 43766 - protein, 34 aa, Artificial Sequence
  Cyclic GFR-binding peptide
  MOD_RES (30)..(31): Xaa is C or S
KVIMRYKKLIKPTKGIFYLISIANLDQSVXXPSA

SEQ ID NO: 43767 - protein, 26 aa, Artificial Sequence
  Cyclic GFR-binding peptide
VMNRYKKLIVNNSSDFYLVSIANLKT

SEQ ID NO: 43768 - protein, 27 aa, Artificial Sequence
  Cyclic GFR-binding peptide
  MOD_RES (26)..(27): Xaa is C or S
YHYKLIVNSSDDKYLVSIPSLQTPAXX

SEQ ID NO: 43769 - protein, 39 aa, Artificial Sequence; identical to SEQ ID NO: 5499
  Cyclic GFR-binding peptide
  MOD_RES (1)..(3)..(35)..(36): Xaa is C or S

SEQ ID NO: 43770 - protein, 35 aa, Artificial Sequence
  Cyclic GFR-binding peptide
  MOD_RES (1)..(3): Xaa is C or S
XKXALHDELTQYNKLFIPKKRVIELYLVSIASLQV

SEQ ID NO: 43771 - protein, 32 aa, Artificial Sequence
  Cyclic GFR-binding peptide
  MOD_RES (1)..(3): Xaa is C or S
XKXSKVVMRHKRLVKPTRGVYYLISTASLDQP

SEQ ID NO: 43772 - protein, 35 aa, Artificial Sequence; identical to SEQ ID NO: 5500
  Cyclic GFR-binding peptide
  MOD_RES (2)..(33)..(34): Xaa is C or S

SEQ ID NO: 43773 - protein, 31 aa, Artificial Sequence
  Cyclic GFR-binding peptide
  MOD_RES (1)..(3): Xaa is C or S
XGXSRVVMNYHYKLIVNSSDDKYLVSIPSLK

SEQ ID NO: 43774 - protein, 35 aa, Artificial Sequence; identical to SEQ ID NO: 5503
  Cyclic GFR-binding peptide
  MOD_RES (31)..(32): Xaa is C or S

SEQ ID NO: 43775 - protein, 38 aa, Artificial Sequence; identical to SEQ ID NO: 5505
  Cyclic GFR-binding peptide
  MOD_RES (1)..(3)..(35)..(36): Xaa is C or S

SEQ ID NO: 43776 - protein, 40 aa, Artificial Sequence; identical to SEQ ID NO: 5506
  Cyclic GFR-binding peptide
  MOD_RES (2)..(34)..(35): Xaa is C or S

SEQ ID NO: 43777 - protein, 30 aa, Artificial Sequence
  Cyclic GFR-binding peptide
  MOD_RES (2)..(4): Xaa is C or S
SXKXSRVIMRHKRLVKPKRGVYYLISTASL

SEQ ID NO: 43778 - protein, 33 aa, Artificial Sequence; identical to SEQ ID NO: 5507
  Cyclic GFR-binding peptide
  MOD_RES (1)..(32)..(33): Xaa is C or S

SEQ ID NO: 43779 - protein, 23 aa, Artificial Sequence
  Cyclic GFR-binding peptide
IMRHKRLIKPTKGIYYLISTASL

SEQ ID NO: 43780 - protein, 37 aa, Artificial Sequence
  Cyclic GFR-binding peptide
  MOD_RES (31)..(32): Xaa is C or S
VSMGERYKKLTPVGMDDFYLVSIANLKTPVXXAKGVK

SEQ ID NO: 43781 - protein, 31 aa, Artificial Sequence; identical to SEQ ID NO: 5508
  Cyclic GFR-binding peptide
  MOD_RES (31)..(31): Xaa is C or S

SEQ ID NO: 43782 - protein, 30 aa, Artificial Sequence
  Cyclic GFR-binding peptide
  MOD_RES (26)..(27): Xaa is C or S
YHYKLVVKDYEDKYLMSIPSLETPVXXAKP

SEQ ID NO: 43783 - protein, 31 aa, Artificial Sequence
  Cyclic GFR-binding peptide
  MOD_RES (26)..(27): Xaa is C or S
QYNKLIKPTKGILYLISIASLDQSVXXPSAS

SEQ ID NO: 43784 - protein, 21 aa, Artificial Sequence
  Cyclic GFR-binding peptide
QYNKLVKPTRGVLYLISIASL

SEQ ID NO: 43785 - protein, 23 aa, Artificial Sequence
  Cyclic GFR-binding peptide
RHKRLVKPKRGVYYLISTASLAQ

SEQ ID NO: 43786 - protein, 29 aa, Artificial Sequence
  Cyclic GFR-binding peptide
HDELTQYNKLFIPKKRVIELYLVSIASLQ

SEQ ID NO: 43787 - protein, 36 aa, Artificial Sequence; identical to SEQ ID NO: 5514
  Cyclic GFR-binding peptide
  MOD_RES (1)..(3)..(35)..(36): Xaa is C or S

SEQ ID NO: 43788 - protein, 28 aa, Artificial Sequence
  Cyclic GFR-binding peptide
VVMEYHYKLVVKDYEDKYLMSIPSLETP

SEQ ID NO: 43789 - protein, 36 aa, Artificial Sequence; identical to SEQ ID NO: 5515
  Cyclic GFR-binding peptide
  MOD_RES (31)..(32): Xaa is C or S

SEQ ID NO: 43790 - protein, 29 aa, Artificial Sequence
  Cyclic GFR-binding peptide
RYKKLFIPKKRVIEFYLVSIANLQVQTPR

SEQ ID NO: 43791 - protein, 32 aa, Artificial Sequence
  Cyclic GFR-binding peptide
  MOD_RES (2)..(2): Xaa is C or S
GXGEVVMEYHYKLVVKDYEDKYLMSIPSLETP

SEQ ID NO: 43792 - protein, 34 aa, Artificial Sequence; identical to SEQ ID NO: 5516
  Cyclic GFR-binding peptide
  MOD_RES (2)..(33)..(34): Xaa is C or S

SEQ ID NO: 43793 - protein, 24 aa, Artificial Sequence
  Cyclic GFR-binding peptide
NRYKKLIVNNSSDFYLVSIANLKT

SEQ ID NO: 43794 - protein, 40 aa, Artificial Sequence; identical to SEQ ID NO: 5518
  Cyclic GFR-binding peptide
  MOD_RES (2)..(4)..(36): Xaa is C or S

SEQ ID NO: 43795 - protein, 42 aa, Artificial Sequence; identical to SEQ ID NO: 5519
  Cyclic GFR-binding peptide
  MOD_RES (1)..(3)..(40): Xaa is C or S

SEQ ID NO: 43796 - protein, 30 aa, Artificial Sequence
  Cyclic GFR-binding peptide
  MOD_RES (2)..(4): Xaa is C or S
HXGXSRVVMNYHYKLIVNSSDDKYLVSIPS

SEQ ID NO: 43797 - protein, 25 aa, Artificial Sequence
  Cyclic GFR-binding peptide
VVMYHYKLVKPTRGVKYLISIPSLD

SEQ ID NO: 43798 - protein, 26 aa, Artificial Sequence
  Cyclic GFR-binding peptide
VMRHKRLVKPTRGVYYLISTASLDQP

SEQ ID NO: 43799 - protein, 26 aa, Artificial Sequence
  Cyclic GFR-binding peptide
RHKRLFIPKKRVIEYYLVSTASLQVQ

SEQ ID NO: 43800 - protein, 26 aa, Artificial Sequence
  Cyclic GFR-binding peptide
IMQYNKLVKPKRGVLYLISIASLAQP

SEQ ID NO: 43801 - protein, 31 aa, Artificial Sequence
  Cyclic GFR-binding peptide
  MOD_RES (1)..(1): Xaa is C or S
XAKVVMNQYNKLIVNNSSDLYLVSIASLKTP

SEQ ID NO: 43802 - protein, 37 aa, Artificial Sequence; identical to SEQ ID NO: 5520
  Cyclic GFR-binding peptide
  MOD_RES (31)..(32): Xaa is C or S

SEQ ID NO: 43803 - protein, 27 aa, Artificial Sequence
  Cyclic GFR-binding peptide
  MOD_RES (1)..(1): Xaa is C or S
XSRVIMRHKRLVKPKRGVYYLISTASL

SEQ ID NO: 43804 - protein, 24 aa, Artificial Sequence
  Cyclic GFR-binding peptide
KVVMRYKKLVKPTRGVFYLISIAN

SEQ ID NO: 43805 - protein, 22 aa, Artificial Sequence
  Cyclic GFR-binding peptide
QYNKLIVNSSDDLYLVSIASLK

SEQ ID NO: 43806 - protein, 28 aa, Artificial Sequence
  Cyclic GFR-binding peptide
  MOD_RES (26)..(26): Xaa is C or S
QYNKLIVNSSDDLYLVSIASLKTPAXTP

SEQ ID NO: 43807 - protein, 28 aa, Artificial Sequence
  Cyclic GFR-binding peptide
ARVVMNRHKRLIVNSSDDYYLVSTASLQ

SEQ ID NO: 43808 - protein, 42 aa, Artificial Sequence; identical to SEQ ID NO: 5524
  Cyclic GFR-binding peptide
  MOD_RES (1)..(3)..(36)..(37): Xaa is C or S

SEQ ID NO: 43809 - protein, 32 aa, Artificial Sequence
  Cyclic GFR-binding peptide
  MOD_RES (26)..(27): Xaa is C or S
YHYKLIVNSSDDKYLVSIPSLKTPAXXPKPVY

SEQ ID NO: 43810 - protein, 22 aa, Artificial Sequence
  Cyclic GFR-binding peptide
QYNKLTPVGMDDLYLVSIASLK

SEQ ID NO: 43811 - protein, 35 aa, Artificial Sequence
  Cyclic GFR-binding peptide
  MOD_RES (32)..(32): Xaa is C or S
LTRHKRLFIPKKRVIEYYLVSTASLQVQTPRXQVN

SEQ ID NO: 43812 - protein, 40 aa, Artificial Sequence; identical to SEQ ID NO: 5526
  Cyclic GFR-binding peptide
  MOD_RES (2)..(39): Xaa is C or S

SEQ ID NO: 43813 - protein, 33 aa, Artificial Sequence
  Cyclic GFR-binding peptide
  MOD_RES (1)..(3): Xaa is C or S
XKXALHDELTRYKKLFIPKKRVIEFYLVSIANL

SEQ ID NO: 43814 - protein, 26 aa, Artificial Sequence
  Cyclic GFR-binding peptide
  MOD_RES (26)..(26): Xaa is C or S
QYNKLIVNSSDDLYLVSIASLKTPAX

SEQ ID NO: 43815 - protein, 31 aa, Artificial Sequence
  Cyclic GFR-binding peptide
  MOD_RES (2)..(2): Xaa is C or S
KXSRVIMYHYKLVKPKRGVKYLISIPSLAQP

SEQ ID NO: 43816 - protein, 30 aa, Artificial Sequence
  Cyclic GFR-binding peptide
  MOD_RES (2)..(4): Xaa is C or S
HXGXAKVVMNQYNKLIVNNSSDLYLVSIAS

SEQ ID NO: 43817 - protein, 35 aa, Artificial Sequence
  Cyclic GFR-binding peptide
  MOD_RES (30)..(31): Xaa is C or S
VVMNQYNKLIVNSSDDLYLVSIASLKTPAXXPKPV

SEQ ID NO: 43818 - protein, 30 aa, Artificial Sequence; identical to SEQ ID NO: 5527
  Cyclic GFR-binding peptide

SEQ ID NO: 43819 - protein, 27 aa, Artificial Sequence
  Cyclic GFR-binding peptide
  MOD_RES (26)..(27): Xaa is C or S
QYNKLIVNSSDDLYLVSIASLKTPAXX

SEQ ID NO: 43820 - protein, 42 aa, Artificial Sequence; identical to SEQ ID NO: 5529
  Cyclic GFR-binding peptide
  MOD_RES (2)..(4)..(37)..(38): Xaa is C or S

SEQ ID NO: 43821 - protein, 36 aa, Artificial Sequence
  Cyclic GFR-binding peptide
  MOD_RES (1)..(3): Xaa is C or S
XKXALHDELTRYKKLFIPKKRVIEFYLVSIANLQVQ

SEQ ID NO: 43822 - protein, 25 aa, Artificial Sequence
  Cyclic GFR-binding peptide
LTYHYKLFIPKKRVIEKYLVSIPSL

SEQ ID NO: 43823 - protein, 26 aa, Artificial Sequence
  Cyclic GFR-binding peptide
IMRYKKLVKPKRGVFYLISIANLAQP

SEQ ID NO: 43824 - protein, 34 aa, Artificial Sequence
  Cyclic GFR-binding peptide
  MOD_RES (31)..(32): Xaa is C or S
VSMGERYKKLTPVGMDDFYLVSIANLKTPVXXAK

SEQ ID NO: 43825 - protein, 34 aa, Artificial Sequence
  Cyclic GFR-binding peptide
  MOD_RES (30)..(31): Xaa is C or S
RVIMRHKRLVKPKRGVYYLISTASLAQPVXXPAA

SEQ ID NO: 43826 - protein, 27 aa, Artificial Sequence
  Cyclic GFR-binding peptide
VMDRHKRLVVKENEDYYLMSTASLETP

SEQ ID NO: 43827 - protein, 25 aa, Artificial Sequence
  Cyclic GFR-binding peptide
SMGERYKKLTPVGMDDFYLVSIANL

SEQ ID NO: 43828 - protein, 21 aa, Artificial Sequence
  Cyclic GFR-binding peptide
NRHKRLIVNSSDDYYLVSTAS

SEQ ID NO: 43829 - protein, 29 aa, Artificial Sequence
  Cyclic GFR-binding peptide
  MOD_RES (29)..(29): Xaa is C or S
VMDRYKKLVVKENEDFYLMSIANLETPVX

SEQ ID NO: 43830 - protein, 37 aa, Artificial Sequence; identical to SEQ ID NO: 5536
  Cyclic GFR-binding peptide
  MOD_RES (2)..(34): Xaa is C or S

SEQ ID NO: 43831 - protein, 33 aa, Artificial Sequence; identical to SEQ ID NO: 5537
  Cyclic GFR-binding peptide
  MOD_RES (1)..(3): Xaa is C or S

SEQ ID NO: 43832 - protein, 34 aa, Artificial Sequence
  Cyclic GFR-binding peptide
  MOD_RES (28)..(29): Xaa is C or S
MNRHKRLIVNSSDDYYLVSTASLKTPAXXPKPVY

SEQ ID NO: 43833 - protein, 34 aa, Artificial Sequence
  Cyclic GFR-binding peptide
  MOD_RES (29)..(30): Xaa is C or S
VMDYHYKLVVKENEDKYLMSIPSLETPVXXAKPI

SEQ ID NO: 43834 - protein, 33 aa, Artificial Sequence
  Cyclic GFR-binding peptide
  MOD_RES (27)..(28): Xaa is C or S
NRYKKLIVNNSSDFYLVSIANLKTPAXXAKPVA

SEQ ID NO: 43835 - protein, 23 aa, Artificial Sequence
  Cyclic GFR-binding peptide
IMQYNKLVKPKRGVLYLISIASL

SEQ ID NO: 43836 - protein, 30 aa, Artificial Sequence
  Cyclic GFR-binding peptide
DELTRYKKLFIPKKRVIEFYLVSIANLQVQ

SEQ ID NO: 43837 - protein, 37 aa, Artificial Sequence; identical to SEQ ID NO: 5541
  Cyclic GFR-binding peptide
  MOD_RES (2)..(35)..(36): Xaa is C or S

SEQ ID NO: 43838 - protein, 33 aa, Artificial Sequence
  Cyclic GFR-binding peptide
  MOD_RES (30)..(30): Xaa is C or S
VVMNRHKRLIVNSSDDYYLVSTASLKTPAXTPK

SEQ ID NO: 43839 - protein, 35 aa, Artificial Sequence; identical to SEQ ID NO: 5544
  Cyclic GFR-binding peptide
  MOD_RES (31)..(32): Xaa is C or S

SEQ ID NO: 43840 - protein, 28 aa, Artificial Sequence
  Cyclic GFR-binding peptide
  MOD_RES (26)..(27): Xaa is C or S
RHKRLVKPKRGVYYLISTASLAQPVXXP

SEQ ID NO: 43841 - protein, 20 aa, Artificial Sequence
  Cyclic GFR-binding peptide
YHYKLVVKENEDKYLMSIPS

SEQ ID NO: 43842 - protein, 31 aa, Artificial Sequence
  Cyclic GFR-binding peptide
  MOD_RES (26)..(27): Xaa is C or S
YHYKLVKPTRGVKYLISIPSLDQPVXXPSAS

SEQ ID NO: 43843 - protein, 35 aa, Artificial Sequence
  Cyclic GFR-binding peptide
  MOD_RES (29)..(30): Xaa is C or S
VMERHKRLVVKDYEDYYLMSTASLETPVXXAKPIS

SEQ ID NO: 43844 - protein, 33 aa, Artificial Sequence
  Cyclic GFR-binding peptide
  MOD_RES (28)..(29): Xaa is C or S
VMRHKRLVKPTRGVYYLISTASLDQPVXXPSAS

SEQ ID NO: 43845 - protein, 24 aa, Artificial Sequence
  Cyclic GFR-binding peptide
YHYKLIKPTKGIKYLISIPSLDQS

SEQ ID NO: 43846 - protein, 34 aa, Artificial Sequence; identical to SEQ ID NO: 5548
  Cyclic GFR-binding peptide
  MOD_RES (32)..(33): Xaa is C or S

SEQ ID NO: 43847 - protein, 31 aa, Artificial Sequence
  Cyclic GFR-binding peptide
  MOD_RES (29)..(30): Xaa is C or S
VMNYHYKLIVNSSDDKYLVSIPSLQTPAXXP

SEQ ID NO: 43848 - protein, 21 aa, Artificial Sequence
  Cyclic GFR-binding peptide
YHYKLVVKENEDKYLMSIPSL

SEQ ID NO: 43849 - protein, 29 aa, Artificial Sequence
  Cyclic GFR-binding peptide
  MOD_RES (1)..(1): Xaa is C or S
XEAVSMGERHKRLTPVGMDDYYLVSTASL

SEQ ID NO: 43850 - protein, 22 aa, Artificial Sequence
  Cyclic GFR-binding peptide
IMQYNKLIKPTKGILYLISIAS

SEQ ID NO: 43851 - protein, 37 aa, Artificial Sequence; identical to SEQ ID NO: 5551
  Cyclic GFR-binding peptide
  MOD_RES (1)..(33)..(34): Xaa is C or S

SEQ ID NO: 43852 - protein, 32 aa, Artificial Sequence
  Cyclic GFR-binding peptide
  MOD_RES (31)..(32): Xaa is C or S
VSMGERHKRLTPVGMDDYYLVSTASLKTPVXX

SEQ ID NO: 43853 - protein, 38 aa, Artificial Sequence; identical to SEQ ID NO: 5553
  Cyclic GFR-binding peptide
  MOD_RES (1)..(3)..(35)..(36): Xaa is C or S

SEQ ID NO: 43854 - protein, 32 aa, Artificial Sequence
  Cyclic GFR-binding peptide
  MOD_RES (27)..(28): Xaa is C or S
NQYNKLIVNSSDDLYLVSIASLQTPAXXPKPV

SEQ ID NO: 43855 - protein, 35 aa, Artificial Sequence
  Cyclic GFR-binding peptide
  MOD_RES (2)..(4): Xaa is C or S
EXKXALHDELTYHYKLFIPKKRVIEKYLVSIPSLQ

SEQ ID NO: 43856 - protein, 26 aa, Artificial Sequence
  Cyclic GFR-binding peptide
  MOD_RES (26)..(26): Xaa is C or S
YHYKLIKPTKGIKYLISIPSLDQSVX

SEQ ID NO: 43857 - protein, 38 aa, Artificial Sequence; identical to SEQ ID NO: 5555
  Cyclic GFR-binding peptide
  MOD_RES (2)..(34): Xaa is C or S

SEQ ID NO: 43858 - protein, 32 aa, Artificial Sequence
  Cyclic GFR-binding peptide
  MOD_RES (26)..(26): Xaa is C or S
YHYKLIVNSSDDKYLVSIPSLKTPAXTPKTVH

SEQ ID NO: 43859 - protein, 32 aa, Artificial Sequence
  Cyclic GFR-binding peptide
  MOD_RES (27)..(28): Xaa is C or S
MRYKKLVKPKRGVFYLISIANLAQPVXXPAAS

SEQ ID NO: 43860 - protein, 32 aa, Artificial Sequence
  Cyclic GFR-binding peptide
  MOD_RES (1)..(3): Xaa is C or S
XKXSKVVMYHYKLVKPTRGVKYLISIPSLDQP

SEQ ID NO: 43861 - protein, 26 aa, Artificial Sequence
  Cyclic GFR-binding peptide
VIMRYKKLIKPTKGIFYLISIANLDQ

SEQ ID NO: 43862 - protein, 30 aa, Artificial Sequence
  Cyclic GFR-binding peptide
  MOD_RES (2)..(2): Xaa is C or S
GXGEVVMDYHYKLVVKENEDKYLMSIPSLE

SEQ ID NO: 43863 - protein, 39 aa, Artificial Sequence; identical to SEQ ID NO: 5556
  Cyclic GFR-binding peptide
  MOD_RES (1)..(3): Xaa is C or S

SEQ ID NO: 43864 - protein, 31 aa, Artificial Sequence
  Cyclic GFR-binding peptide
  MOD_RES (2)..(2): Xaa is C or S
KXSRVIMRYKKLVKPKRGVFYLISIANLAQP

SEQ ID NO: 43865 - protein, 26 aa, Artificial Sequence
  Cyclic GFR-binding peptide
EYHYKLVVKDYEDKYLMSIPSLETPV

SEQ ID NO: 43866 - protein, 31 aa, Artificial Sequence
  Cyclic GFR-binding peptide
  MOD_RES (27)..(28): Xaa is C or S
NQYNKLIVNSSDDLYLVSIASLKTPAXXPKP

SEQ ID NO: 43867 - protein, 30 aa, Artificial Sequence; identical to SEQ ID NO: 5559
  Cyclic GFR-binding peptide

SEQ ID NO: 43868 - protein, 29 aa, Artificial Sequence
  Cyclic GFR-binding peptide
  MOD_RES (1)..(1): Xaa is C or S
XSRVIMQYNKLVKPKRGVLYLISIASLAQ

SEQ ID NO: 43869 - protein, 40 aa, Artificial Sequence; identical to SEQ ID NO: 5561
  Cyclic GFR-binding peptide
  MOD_RES (2)..(34)..(35): Xaa is C or S

SEQ ID NO: 43870 - protein, 27 aa, Artificial Sequence
  Cyclic GFR-binding peptide
EVVMDYHYKLVVKENEDKYLMSIPSLE

SEQ ID NO: 43871 - protein, 26 aa, Artificial Sequence
  Cyclic GFR-binding peptide
SKVIMYHYKLIKPTKGIKYLISIPSL

SEQ ID NO: 43872 - protein, 29 aa, Artificial Sequence
  Cyclic GFR-binding peptide
  MOD_RES (1)..(3): Xaa is C or S
XGXGEVVMDRYKKLVVKENEDFYLMSIAN

SEQ ID NO: 43873 - protein, 33 aa, Artificial Sequence
  Cyclic GFR-binding peptide
ALHDELTYHYKLFIPKKRVIEKYLVSIPSLQVQ

SEQ ID NO: 43874 - protein, 37 aa, Artificial Sequence; identical to SEQ ID NO: 5563
  Cyclic GFR-binding peptide
  MOD_RES (1)..(3)..(34)..(35): Xaa is C or S

SEQ ID NO: 43875 - protein, 38 aa, Artificial Sequence; identical to SEQ ID NO: 5565
  Cyclic GFR-binding peptide
  MOD_RES (35)..(35): Xaa is C or S

SEQ ID NO: 43876 - protein, 43 aa, Artificial Sequence; identical to SEQ ID NO: 5566
  Cyclic GFR-binding peptide
  MOD_RES (2)..(4)..(41): Xaa is C or S

SEQ ID NO: 43877 - protein, 37 aa, Artificial Sequence; identical to SEQ ID NO: 5567
  Cyclic GFR-binding peptide
  MOD_RES (1)..(33)..(34): Xaa is C or S

SEQ ID NO: 43878 - protein, 42 aa, Artificial Sequence; identical to SEQ ID NO: 5568
  Cyclic GFR-binding peptide
  MOD_RES (2)..(4)..(36)..(37): Xaa is C or S

SEQ ID NO: 43879 - protein, 23 aa, Artificial Sequence
  Cyclic GFR-binding peptide
VIMYHYKLIKPTKGIKYLISIPS

SEQ ID NO: 43880 - protein, 31 aa, Artificial Sequence
  Cyclic GFR-binding peptide
  MOD_RES (30)..(31): Xaa is C or S
KVIMYHYKLIKPTKGIKYLISIPSLDQSVXX

SEQ ID NO: 43881 - protein, 28 aa, Artificial Sequence
  Cyclic GFR-binding peptide
VMDRHKRLVVKENEDYYLMSTASLETPV

SEQ ID NO: 43882 - protein, 32 aa, Artificial Sequence; identical to SEQ ID NO: 5569
  Cyclic GFR-binding peptide
  MOD_RES (31)..(32): Xaa is C or S

SEQ ID NO: 43883 - protein, 20 aa, Artificial Sequence
  Cyclic GFR-binding peptide
RYKKLVVKDYEDFYLMSIAN

SEQ ID NO: 43884 - protein, 38 aa, Artificial Sequence; identical to SEQ ID NO: 5572
  Cyclic GFR-binding peptide
  MOD_RES (2)..(4)..(36)..(37): Xaa is C or S

SEQ ID NO: 43885 - protein, 30 aa, Artificial Sequence
  Cyclic GFR-binding peptide
GEVVMDRYKKLVVKENEDFYLMSIANLETP

SEQ ID NO: 43886 - protein, 29 aa, Artificial Sequence
  Cyclic GFR-binding peptide
  MOD_RES (1)..(3): Xaa is C or S
XGXARVVMNQYNKLIVNSSDDLYLVSIAS

SEQ ID NO: 43887 - protein, 30 aa, Artificial Sequence
  Cyclic GFR-binding peptide
  MOD_RES (1)..(3): Xaa is C or S
XKXSRVIMQYNKLVKPKRGVLYLISIASLA

SEQ ID NO: 43888 - protein, 37 aa, Artificial Sequence; identical to SEQ ID NO: 5573
  Cyclic GFR-binding peptide
  MOD_RES (2)..(33)..(34): Xaa is C or S

SEQ ID NO: 43889 - protein, 28 aa, Artificial Sequence
  Cyclic GFR-binding peptide
TQYNKLFIPKKRVIELYLVSIASLQVQT

SEQ ID NO: 43890 - protein, 35 aa, Artificial Sequence
  Cyclic GFR-binding peptide
  MOD_RES (30)..(31): Xaa is C or S
VVMERHKRLVVKDYEDYYLMSTASLETPVXXAKPI

SEQ ID NO: 43891 - protein, 24 aa, Artificial Sequence
  Cyclic GFR-binding peptide
MQYNKLVKPTRGVLYLISIASLDQ

SEQ ID NO: 43892 - protein, 38 aa, Artificial Sequence; identical to SEQ ID NO: 5577
  Cyclic GFR-binding peptide
  MOD_RES (1)..(33): Xaa is C or S

SEQ ID NO: 43893 - protein, 31 aa, Artificial Sequence
  Cyclic GFR-binding peptide
  MOD_RES (1)..(1): Xaa is C or S
XALHDELTRYKKLFIPKKRVIEFYLVSIANL

SEQ ID NO: 43894 - protein, 40 aa, Artificial Sequence; identical to SEQ ID NO: 5579
  Cyclic GFR-binding peptide
  MOD_RES (2)..(34)..(35): Xaa is C or S

SEQ ID NO: 43895 - protein, 36 aa, Artificial Sequence; identical to SEQ ID NO: 5580
  Cyclic GFR-binding peptide
  MOD_RES (1)..(3)..(36): Xaa is C or S

SEQ ID NO: 43896 - protein, 36 aa, Artificial Sequence
  Cyclic GFR-binding peptide
  MOD_RES (30)..(31): Xaa is C or S
KVVMYHYKLVKPTRGVKYLISIPSLDQPVXXPSASA

SEQ ID NO: 43897 - protein, 32 aa, Artificial Sequence
  Cyclic GFR-binding peptide
  MOD_RES (28)..(29): Xaa is C or S
IMRYKKLIKPTKGIFYLISIANLDQSVXXPSA

SEQ ID NO: 43898 - protein, 35 aa, Artificial Sequence; identical to SEQ ID NO: 5581
  Cyclic GFR-binding peptide
  MOD_RES (2)..(34)..(35): Xaa is C or S

SEQ ID NO: 43899 - protein, 34 aa, Artificial Sequence
  Cyclic GFR-binding peptide
  MOD_RES (31)..(32): Xaa is C or S
VSMGERHKRLTPVGMDDYYLVSTASLKTPVXXAK

SEQ ID NO: 43900 - protein, 39 aa, Artificial Sequence; identical to SEQ ID NO: 5582
  Cyclic GFR-binding peptide
  MOD_RES (2)..(4)..(36)..(37): Xaa is C or S

SEQ ID NO: 43901 - protein, 23 aa, Artificial Sequence
  Cyclic GFR-binding peptide
RYKKLIKPTKGIFYLISIANLDQ

SEQ ID NO: 43902 - protein, 31 aa, Artificial Sequence
  Cyclic GFR-binding peptide
  MOD_RES (2)..(4): Xaa is C or S
SXKXSRVIMRYKKLVKPKRGVFYLISIANLA

SEQ ID NO: 43903 - protein, 22 aa, Artificial Sequence
  Cyclic GFR-binding peptide
RHKRLFIPKKRVIEYYLVSTAS

SEQ ID NO: 43904 - protein, 24 aa, Artificial Sequence
  Cyclic GFR-binding peptide
MEYHYKLVVKDYEDKYLMSIPSLE

SEQ ID NO: 43905 - protein, 26 aa, Artificial Sequence
  Cyclic GFR-binding peptide
MNQYNKLIVNSSDDLYLVSIASLKTP

SEQ ID NO: 43906 - protein, 26 aa, Artificial Sequence
  Cyclic GFR-binding peptide
MGEQYNKLTPVGMDDLYLVSIASLKT

SEQ ID NO: 43907 - protein, 34 aa, Artificial Sequence
  Cyclic GFR-binding peptide
  MOD_RES (30)..(31): Xaa is C or S
SMGERHKRLTPVGMDDYYLVSTASLKTPVXXAKG

SEQ ID NO: 43908 - protein, 20 aa, Artificial Sequence
  Cyclic GFR-binding peptide
QYNKLIVNSSDDLYLVSIAS

SEQ ID NO: 43909 - protein, 32 aa, Artificial Sequence; identical to SEQ ID NO: 5585
  Cyclic GFR-binding peptide
  MOD_RES (32)..(32): Xaa is C or S

SEQ ID NO: 43910 - protein, 26 aa, Artificial Sequence
  Cyclic GFR-binding peptide
DRHKRLVVKENEDYYLMSTASLETPV

SEQ ID NO: 43911 - protein, 36 aa, Artificial Sequence; identical to SEQ ID NO: 5586
  Cyclic GFR-binding peptide
  MOD_RES (31)..(31): Xaa is C or S

SEQ ID NO: 43912 - protein, 28 aa, Artificial Sequence
  Cyclic GFR-binding peptide
  MOD_RES (27)..(28): Xaa is C or S
MRYKKLVKPKRGVFYLISIANLAQPVXX

SEQ ID NO: 43913 - protein, 30 aa, Artificial Sequence
  Cyclic GFR-binding peptide
  MOD_RES (27)..(28): Xaa is C or S
NQYNKLIVNNSSDLYLVSIASLKTPAXXAK

SEQ ID NO: 43914 - protein, 40 aa, Artificial Sequence; identical to SEQ ID NO: 5587
  Cyclic GFR-binding peptide
  MOD_RES (2)..(4)..(36)..(37): Xaa is C or S

SEQ ID NO: 43915 - protein, 31 aa, Artificial Sequence
  Cyclic GFR-binding peptide
  MOD_RES (1)..(3): Xaa is C or S
XKXSRVIMYHYKLVKPKRGVKYLISIPSLAQ

SEQ ID NO: 43916 - protein, 33 aa, Artificial Sequence
  Cyclic GFR-binding peptide
  MOD_RES (30)..(31): Xaa is C or S
SMGERHKRLTPVGMDDYYLVSTASLKTPVXXAK

SEQ ID NO: 43917 - protein, 22 aa, Artificial Sequence
  Cyclic GFR-binding peptide
MDRYKKLVVKENEDFYLMSIAN

SEQ ID NO: 43918 - protein, 37 aa, Artificial Sequence; identical to SEQ ID NO: 5589
  Cyclic GFR-binding peptide
  MOD_RES (1)..(3)..(34)..(35): Xaa is C or S

SEQ ID NO: 43919 - protein, 32 aa, Artificial Sequence
  Cyclic GFR-binding peptide
  MOD_RES (26)..(27): Xaa is C or S
YHYKLIVNSSDDKYLVSIPSLQTPAXXPKPVT

SEQ ID NO: 43920 - protein, 41 aa, Artificial Sequence; identical to SEQ ID NO: 5590
  Cyclic GFR-binding peptide
  MOD_RES (1)..(3)..(40): Xaa is C or S

SEQ ID NO: 43921 - protein, 36 aa, Artificial Sequence; identical to SEQ ID NO: 5592
  Cyclic GFR-binding peptide
  MOD_RES (2)..(34)..(35): Xaa is C or S

SEQ ID NO: 43922 - protein, 27 aa, Artificial Sequence
  Cyclic GFR-binding peptide
  MOD_RES (1)..(1): Xaa is C or S
XSRVIMYHYKLVKPKRGVKYLISIPSL

SEQ ID NO: 43923 - protein, 29 aa, Artificial Sequence
  Cyclic GFR-binding peptide
  MOD_RES (27)..(28): Xaa is C or S
ERYKKLVVKDYEDFYLMSIANLETPVXXA

SEQ ID NO: 43924 - protein, 27 aa, Artificial Sequence
  Cyclic GFR-binding peptide
  MOD_RES (2)..(2): Xaa is C or S
KXSKVVMRHKRLVKPTRGVYYLISTAS

SEQ ID NO: 43925 - protein, 34 aa, Artificial Sequence
  Cyclic GFR-binding peptide
  MOD_RES (29)..(30): Xaa is C or S
VIMYHYKLVKPKRGVKYLISIPSLAQPVXXPAAS

SEQ ID NO: 43926 - protein, 32 aa, Artificial Sequence
  Cyclic GFR-binding peptide
  MOD_RES (27)..(28): Xaa is C or S
MRHKRLVKPTRGVYYLISTASLDQPVXXPSAS

SEQ ID NO: 43927 - protein, 30 aa, Artificial Sequence
  Cyclic GFR-binding peptide
  MOD_RES (26)..(27): Xaa is C or S
RYKKLIKPTKGIFYLISIANLDQSVXXPSA

SEQ ID NO: 43928 - protein, 35 aa, Artificial Sequence; identical to SEQ ID NO: 5594
  Cyclic GFR-binding peptide
  MOD_RES (2)..(4)..(35): Xaa is C or S

SEQ ID NO: 43929 - protein, 39 aa, Artificial Sequence; identical to SEQ ID NO: 5597
  Cyclic GFR-binding peptide
  MOD_RES (2)..(4)..(36)..(37): Xaa is C or S

SEQ ID NO: 43930 - protein, 28 aa, Artificial Sequence
  Cyclic GFR-binding peptide
GEVVMDRYKKLVVKENEDFYLMSIANLE

SEQ ID NO: 43931 - protein, 31 aa, Artificial Sequence
  Cyclic GFR-binding peptide
HDELTRHKRLFIPKKRVIEYYLVSTASLQVQ

SEQ ID NO: 43932 - protein, 33 aa, Artificial Sequence; identical to SEQ ID NO: 5599
  Cyclic GFR-binding peptide
  MOD_RES (31)..(32): Xaa is C or S

SEQ ID NO: 43933 - protein, 25 aa, Artificial Sequence
  Cyclic GFR-binding peptide
RHKRLVVKENEDYYLMSTASLETPV

SEQ ID NO: 43934 - protein, 34 aa, Artificial Sequence
  Cyclic GFR-binding peptide
  MOD_RES (30)..(31): Xaa is C or S
KVVMQYNKLVKPTRGVLYLISIASLDQPVXXPSA

SEQ ID NO: 43935 - protein, 31 aa, Artificial Sequence
  Cyclic GFR-binding peptide
  MOD_RES (30)..(31): Xaa is C or S
SMGERHKRLTPVGMDDYYLVSTASLKTPVXX

SEQ ID NO: 43936 - protein, 33 aa, Artificial Sequence; identical to SEQ ID NO: 5600
  Cyclic GFR-binding peptide
  MOD_RES (2)..(33): Xaa is C or S

SEQ ID NO: 43937 - protein, 31 aa, Artificial Sequence
  Cyclic GFR-binding peptide
  MOD_RES (27)..(28): Xaa is C or S
MRYKKLIKPTKGIFYLISIANLDQSVXXPSA

SEQ ID NO: 43938 - protein, 28 aa, Artificial Sequence
  Cyclic GFR-binding peptide
  MOD_RES (28)..(28): Xaa is C or S
LSAISVLYLDDSSNVILKNYQNMVVRSX

SEQ ID NO: 43939 - protein, 38 aa, Artificial Sequence; identical to SEQ ID NO: 5601
  Cyclic GFR-binding peptide
  MOD_RES (6)..(7): Xaa is C or S

SEQ ID NO: 43940 - protein, 35 aa, Artificial Sequence
  Cyclic GFR-binding peptide
  MOD_RES (32)..(34): Xaa is C or S
PTKLSATSVLYYDDMGVPTLRKHREGMSVAEXGXR

SEQ ID NO: 43941 - protein, 27 aa, Artificial Sequence
  Cyclic GFR-binding peptide
PTKLSPISVLYKDDSSNVILKYHYNMV

SEQ ID NO: 43942 - protein, 35 aa, Artificial Sequence; identical to SEQ ID NO: 5602
  Cyclic GFR-binding peptide
  MOD_RES (32)..(34): Xaa is C or S

SEQ ID NO: 43943 - protein, 29 aa, Artificial Sequence
  Cyclic GFR-binding peptide
  MOD_RES (3)..(4): Xaa is C or S
KAXXVPTELSATSMLYYDEYDKVVLRKHR

SEQ ID NO: 43944 - protein, 24 aa, Artificial Sequence
  Cyclic GFR-binding peptide
QDLNAISILYFIGKTPKILKKYRM

SEQ ID NO: 43945 - protein, 29 aa, Artificial Sequence
  Cyclic GFR-binding peptide
  MOD_RES (29)..(29): Xaa is C or S
QDLNAISILYFVGRTPKVLKKYRMVVKSX

SEQ ID NO: 43946 - protein, 31 aa, Artificial Sequence
  Cyclic GFR-binding peptide
  MOD_RES (30)..(30): Xaa is C or S
TELSPISMLYKDEYDKVVLKYHYEMVVEGXG

SEQ ID NO: 43947 - protein, 30 aa, Artificial Sequence
  Cyclic GFR-binding peptide
  MOD_RES (30)..(30): Xaa is C or S
PQALNAISILYFVGRKPKVLKKYRMIVRSX

SEQ ID NO: 43948 - protein, 25 aa, Artificial Sequence
  Cyclic GFR-binding peptide
VSQDLSAISILYLIGKTPKILKNYQ

SEQ ID NO: 43949 - protein, 38 aa, Artificial Sequence; identical to SEQ ID NO: 5607
  Cyclic GFR-binding peptide
  MOD_RES (7)..(7): Xaa is C or S

SEQ ID NO: 43950 - protein, 33 aa, Artificial Sequence; identical to SEQ ID NO: 5608
  Cyclic GFR-binding peptide
  MOD_RES (32)..(32): Xaa is C or S

SEQ ID NO: 43951 - protein, 28 aa, Artificial Sequence
  Cyclic GFR-binding peptide
PQALNAISILYFVGRKPKVLKKYRMIVR

SEQ ID NO: 43952 - protein, 26 aa, Artificial Sequence
  Cyclic GFR-binding peptide
LSAISILYLIGKTPKILKNYQMIVKS

SEQ ID NO: 43953 - protein, 25 aa, Artificial Sequence
  Cyclic GFR-binding peptide
LNAISMLYFDENEKVVLKKYRDMVV

SEQ ID NO: 43954 - protein, 33 aa, Artificial Sequence
  Cyclic GFR-binding peptide
  MOD_RES (30)..(32): Xaa is C or S
TQLSAISVLYLDDSSNVILKNYQNMVVRAXGXH

SEQ ID NO: 43955 - protein, 36 aa, Artificial Sequence; identical to SEQ ID NO: 5611
  Cyclic GFR-binding peptide
  MOD_RES (3)..(4)..(36): Xaa is C or S

SEQ ID NO: 43956 - protein, 25 aa, Artificial Sequence
  Cyclic GFR-binding peptide
KLSATSVLYYDDSSNVILRKHRNMV

SEQ ID NO: 43957 - protein, 32 aa, Artificial Sequence; identical to SEQ ID NO: 5612
  Cyclic GFR-binding peptide
  MOD_RES (1)..(32): Xaa is C or S

SEQ ID NO: 43958 - protein, 27 aa, Artificial Sequence
  Cyclic GFR-binding peptide
  MOD_RES (1)..(1): Xaa is C or S
XAPTKLNAISVLYFDSSNNVILKKYRN

SEQ ID NO: 43959 - protein, 38 aa, Artificial Sequence; identical to SEQ ID NO: 5614
  Cyclic GFR-binding peptide
  MOD_RES (4)..(5)..(36)..(38): Xaa is C or S

SEQ ID NO: 43960 - protein, 24 aa, Artificial Sequence
  Cyclic GFR-binding peptide
QLSATSVLYYEIVRKKPIFLRKHR

SEQ ID NO: 43961 - protein, 27 aa, Artificial Sequence
  Cyclic GFR-binding peptide
SAISVLYLDSSNNVILKNYQDSSNNVI

SEQ ID NO: 43962 - protein, 38 aa, Artificial Sequence; identical to SEQ ID NO: 5617
  Cyclic GFR-binding peptide
  MOD_RES (6)..(7): Xaa is C or S

SEQ ID NO: 43963 - protein, 22 aa, Artificial Sequence
  Cyclic GFR-binding peptide
LNAISILYFVGRKPKVLKKYRM

SEQ ID NO: 43964 - protein, 35 aa, Artificial Sequence; identical to SEQ ID NO: 5618
  Cyclic GFR-binding peptide
  MOD_RES (4)..(5): Xaa is C or S

SEQ ID NO: 43965 - protein, 34 aa, Artificial Sequence
  Cyclic GFR-binding peptide
  MOD_RES (32)..(34): Xaa is C or S
PTKLNAISVLYFDDMGVPTLKKYREGMSVAEXGX

SEQ ID NO: 43966 - protein, 29 aa, Artificial Sequence
  Cyclic GFR-binding peptide
  MOD_RES (1)..(2): Xaa is C or S
XXAPTKLNAISVLYFDSSNNVILKKYRNM

SEQ ID NO: 43967 - protein, 32 aa, Artificial Sequence
  Cyclic GFR-binding peptide
  MOD_RES (2)..(3): Xaa is C or S
PXXAPTQLSATSVLYYDDSSNVILRKHRNMVV

SEQ ID NO: 43968 - protein, 27 aa, Artificial Sequence
  Cyclic GFR-binding peptide
  MOD_RES (1)..(2): Xaa is C or S
XXVPTKLSATSVLYYDDMGVPTLRKHR

SEQ ID NO: 43969 - protein, 35 aa, Artificial Sequence
  Cyclic GFR-binding peptide
  MOD_RES (5)..(6): Xaa is C or S
VPKAXXAPTKLNAISVLYFDSSNNVILKKYRNMVV

SEQ ID NO: 43970 - protein, 39 aa, Artificial Sequence; identical to SEQ ID NO: 5625
  Cyclic GFR-binding peptide
  MOD_RES (4)..(5)..(37)..(39): Xaa is C or S

SEQ ID NO: 43971 - protein, 35 aa, Artificial Sequence; identical to SEQ ID NO: 5626
  Cyclic GFR-binding peptide
  MOD_RES (3)..(4)..(35): Xaa is C or S

SEQ ID NO: 43972 - protein, 23 aa, Artificial Sequence
  Cyclic GFR-binding peptide
QDLSATSILYYVGRTPKVLRKHR

SEQ ID NO: 43973 - protein, 32 aa, Artificial Sequence; identical to SEQ ID NO: 5627
  Cyclic GFR-binding peptide
  MOD_RES (1)..(2): Xaa is C or S

SEQ ID NO: 43974 - protein, 31 aa, Artificial Sequence
  Cyclic GFR-binding peptide
  MOD_RES (3)..(4): Xaa is C or S
KPXXAPTQLSPISVLYKDDSSNVILKYHYNM

SEQ ID NO: 43975 - protein, 34 aa, Artificial Sequence; identical to SEQ ID NO: 5631
  Cyclic GFR-binding peptide
  MOD_RES (2)..(3): Xaa is C or S

SEQ ID NO: 43976 - protein, 28 aa, Artificial Sequence
  Cyclic GFR-binding peptide
  MOD_RES (1)..(2): Xaa is C or S
XXVPQDLSATSILYYVGRTPKVLRKHRM

SEQ ID NO: 43977 - protein, 33 aa, Artificial Sequence
  Cyclic GFR-binding peptide
  MOD_RES (30)..(32): Xaa is C or S
PQDLSATSILYYVGRTPKVLRKHRMVVKSXKXS

SEQ ID NO: 43978 - protein, 30 aa, Artificial Sequence; identical to SEQ ID NO: 5633
  Cyclic GFR-binding peptide

SEQ ID NO: 43979 - protein, 37 aa, Artificial Sequence; identical to SEQ ID NO: 5635
  Cyclic GFR-binding peptide
  MOD_RES (6)..(7): Xaa is C or S

SEQ ID NO: 43980 - protein, 32 aa, Artificial Sequence; identical to SEQ ID NO: 5636
  Cyclic GFR-binding peptide
  MOD_RES (1)..(1): Xaa is C or S

SEQ ID NO: 43981 - protein, 35 aa, Artificial Sequence; identical to SEQ ID NO: 5637
  Cyclic GFR-binding peptide
  MOD_RES (2)..(3)..(35): Xaa is C or S

SEQ ID NO: 43982 - protein, 32 aa, Artificial Sequence
  Cyclic GFR-binding peptide
  MOD_RES (2)..(3): Xaa is C or S
PXXVSQDLSATSILYYIGKTPKILRKHRMIVK

SEQ ID NO: 43983 - protein, 29 aa, Artificial Sequence
  Cyclic GFR-binding peptide
PQALNAISILYFVGRKPKVLKKYRMIVRS

SEQ ID NO: 43984 - protein, 35 aa, Artificial Sequence; identical to SEQ ID NO: 5638
  Cyclic GFR-binding peptide
  MOD_RES (1)..(34): Xaa is C or S

SEQ ID NO: 43985 - protein, 36 aa, Artificial Sequence; identical to SEQ ID NO: 5639
  Cyclic GFR-binding peptide
  MOD_RES (2)..(2): Xaa is C or S

SEQ ID NO: 43986 - protein, 29 aa, Artificial Sequence
  Cyclic GFR-binding peptide
QLSPISVLYKEIVRKKPIFLKYHYTLEDH

SEQ ID NO: 43987 - protein, 38 aa, Artificial Sequence; identical to SEQ ID NO: 5640
  Cyclic GFR-binding peptide
  MOD_RES (7)..(7): Xaa is C or S

SEQ ID NO: 43988 - protein, 35 aa, Artificial Sequence
  Cyclic GFR-binding peptide
  MOD_RES (5)..(6): Xaa is C or S
SAAPXXVPQALSATSILYYVGRKPKVLRKHRMIVR

SEQ ID NO: 43989 - protein, 36 aa, Artificial Sequence
  Cyclic GFR-binding peptide
  MOD_RES (34)..(36): Xaa is C or S
QVQLSAISVLYLEIVRKKPIFLKNYQTLEDHLAXKX

SEQ ID NO: 43990 - protein, 30 aa, Artificial Sequence
  Cyclic GFR-binding peptide
  MOD_RES (3)..(4): Xaa is C or S
KAXXVPTKLNAISVLYFDDMGVPTLKKYRE

SEQ ID NO: 43991 - protein, 30 aa, Artificial Sequence
  Cyclic GFR-binding peptide
  MOD_RES (29)..(29): Xaa is C or S
QDLNAISILYFVGRTPKVLKKYRMVVKSXK

SEQ ID NO: 43992 - protein, 35 aa, Artificial Sequence
  Cyclic GFR-binding peptide
  MOD_RES (6)..(7): Xaa is C or S
AVPKAXXAPTKLSPISVLYKDSSNNVILKYHYNMV

SEQ ID NO: 43993 - protein, 32 aa, Artificial Sequence; identical to SEQ ID NO: 5641
  Cyclic GFR-binding peptide
  MOD_RES (32)..(32): Xaa is C or S

SEQ ID NO: 43994 - protein, 40 aa, Artificial Sequence; identical to SEQ ID NO: 5642
  Cyclic GFR-binding peptide
  MOD_RES (5)..(6)..(39): Xaa is C or S

SEQ ID NO: 43995 - protein, 34 aa, Artificial Sequence
  Cyclic GFR-binding peptide
  MOD_RES (4)..(5): Xaa is C or S
PKAXXVPTELSATSMLYYDENEKVVLRKHRDMVV

SEQ ID NO: 43996 - protein, 33 aa, Artificial Sequence
  Cyclic GFR-binding peptide
  MOD_RES (3)..(4): Xaa is C or S
KAXXVPTELNAISMLYFDENEKVVLKKYRDMVV

SEQ ID NO: 43997 - protein, 38 aa, Artificial Sequence; identical to SEQ ID NO: 5648
  Cyclic GFR-binding peptide
  MOD_RES (4)..(5)..(37): Xaa is C or S

SEQ ID NO: 43998 - protein, 25 aa, Artificial Sequence
  Cyclic GFR-binding peptide
PTKLNAISVLYFDSSNNVILKKYRN

SEQ ID NO: 43999 - protein, 22 aa, Artificial Sequence
  Cyclic GFR-binding peptide
LSAISILYLIGKTPKILKNYQM

SEQ ID NO: 44000 - protein, 33 aa, Artificial Sequence
  Cyclic GFR-binding peptide
  MOD_RES (4)..(5): Xaa is C or S
PKAXXAPTKLNAISVLYFDSSNNVILKKYRNMV

SEQ ID NO: 44001 - protein, 35 aa, Artificial Sequence; identical to SEQ ID NO: 5654
  Cyclic GFR-binding peptide
  MOD_RES (1)..(32)..(34): Xaa is C or S

SEQ ID NO: 44002 - protein, 26 aa, Artificial Sequence
  Cyclic GFR-binding peptide
  MOD_RES (1)..(1): Xaa is C or S
XVPTELNAISMLYFDEYDKVVLKKYR

SEQ ID NO: 44003 - protein, 26 aa, Artificial Sequence
  Cyclic GFR-binding peptide
TQLSATSVLYYDDSSNVILRKHRNMV

SEQ ID NO: 44004 - protein, 31 aa, Artificial Sequence
  Cyclic GFR-binding peptide
  MOD_RES (3)..(4): Xaa is C or S
KPXXAPTQLSATSVLYYDDSSNVILRKHRNM

SEQ ID NO: 44005 - protein, 40 aa, Artificial Sequence; identical to SEQ ID NO: 5655
  Cyclic GFR-binding peptide
  MOD_RES (4)..(5)..(38)..(40): Xaa is C or S

SEQ ID NO: 44006 - protein, 32 aa, Artificial Sequence
  Cyclic GFR-binding peptide
  MOD_RES (4)..(5): Xaa is C or S
ASPXXVSQDLSAISILYLIGKTPKILKNYQMI

SEQ ID NO: 44007 - protein, 20 aa, Artificial Sequence
  Cyclic GFR-binding peptide
SATSILYYVGRTPKVLRKHR

SEQ ID NO: 44008 - protein, 34 aa, Artificial Sequence
  Cyclic GFR-binding peptide
  MOD_RES (34)..(34): Xaa is C or S
QVQLNAISVLYFEIVRKKPIFLKKYRTLEDHLAX

SEQ ID NO: 44009 - protein, 28 aa, Artificial Sequence
  Cyclic GFR-binding peptide
  MOD_RES (27)..(27): Xaa is C or S
SAISVLYLDDSSNVILKNYQNMVVRSXG

SEQ ID NO: 44010 - protein, 37 aa, Artificial Sequence; identical to SEQ ID NO: 5658
  Cyclic GFR-binding peptide
  MOD_RES (2)..(3)..(35)..(37): Xaa is C or S

SEQ ID NO: 44011 - protein, 25 aa, Artificial Sequence
  Cyclic GFR-binding peptide
QDLNAISILYFIGKTPKILKKYRMI

SEQ ID NO: 44012 - protein, 30 aa, Artificial Sequence
  Cyclic GFR-binding peptide
  MOD_RES (30)..(30): Xaa is C or S
SAISVLYLEIVRKKPIFLKNYQTLEDHLAX

SEQ ID NO: 44013 - protein, 27 aa, Artificial Sequence
  Cyclic GFR-binding peptide
SAISVLYLDDSSNVILKNYQDDSSNVI

SEQ ID NO: 44014 - protein, 31 aa, Artificial Sequence
  Cyclic GFR-binding peptide
  MOD_RES (29)..(31): Xaa is C or S
KLSATSVLYYDDSSNVILRKHRNMVVRSXGX

SEQ ID NO: 44015 - protein, 38 aa, Artificial Sequence; identical to SEQ ID NO: 5659
  Cyclic GFR-binding peptide
  MOD_RES (1)..(38): Xaa is C or S

SEQ ID NO: 44016 - protein, 37 aa, Artificial Sequence; identical to SEQ ID NO: 5660
  Cyclic GFR-binding peptide
  MOD_RES (4)..(5)..(37): Xaa is C or S

SEQ ID NO: 44017 - protein, 26 aa, Artificial Sequence
  Cyclic GFR-binding peptide
  MOD_RES (1)..(1): Xaa is C or S
XVPTELSPISMLYKDENEKVVLKYHY

SEQ ID NO: 44018 - protein, 30 aa, Artificial Sequence; identical to SEQ ID NO: 5662
  Cyclic GFR-binding peptide

SEQ ID NO: 44019 - protein, 33 aa, Artificial Sequence
  Cyclic GFR-binding peptide
  MOD_RES (30)..(32): Xaa is C or S
PQALNAISILYFVGRKPKVLKKYRMIVRSXKXS

SEQ ID NO: 44020 - protein, 26 aa, Artificial Sequence
  Cyclic GFR-binding peptide
LSAISILYLVGRKPKVLKNYQMIVRS

SEQ ID NO: 44021 - protein, 35 aa, Artificial Sequence
  Cyclic GFR-binding peptide
  MOD_RES (6)..(7): Xaa is C or S
YVPKPXXAPTKLSAISVLYLDDSSNVILKNYQNMV

SEQ ID NO: 44022 - protein, 30 aa, Artificial Sequence
  Cyclic GFR-binding peptide
  MOD_RES (29)..(29): Xaa is C or S
LSATSVLYYDDMGVPTLRKHREGMSVAEXG

SEQ ID NO: 44023 - protein, 34 aa, Artificial Sequence; identical to SEQ ID NO: 5664
  Cyclic GFR-binding peptide
  MOD_RES (3)..(4): Xaa is C or S

SEQ ID NO: 44024 - protein, 28 aa, Artificial Sequence
  Cyclic GFR-binding peptide
PTELSPISMLYKDENEKVVLKYHYDMVV

SEQ ID NO: 44025 - protein, 32 aa, Artificial Sequence
  Cyclic GFR-binding peptide
  MOD_RES (29)..(31): Xaa is C or S
ELNAISMLYFDEYDKVVLKKYREMVVEGXGXR

SEQ ID NO: 44026 - protein, 33 aa, Artificial Sequence; identical to SEQ ID NO: 5669
  Cyclic GFR-binding peptide
  MOD_RES (1)..(32): Xaa is C or S

SEQ ID NO: 44027 - protein, 27 aa, Artificial Sequence
  Cyclic GFR-binding peptide
QLSATSVLYYDDSSNVILRKHRNMVVR

SEQ ID NO: 44028 - protein, 36 aa, Artificial Sequence; identical to SEQ ID NO: 5671
  Cyclic GFR-binding peptide
  MOD_RES (1)..(1): Xaa is C or S

SEQ ID NO: 44029 - protein, 30 aa, Artificial Sequence
  Cyclic GFR-binding peptide
  MOD_RES (1)..(2): Xaa is C or S
XXVPTELNAISMLYFDENEKVVLKKYRDMV

SEQ ID NO: 44030 - protein, 27 aa, Artificial Sequence
  Cyclic GFR-binding peptide
LNAISMLYFDEYDKVVLKKYREMVVEG

SEQ ID NO: 44031 - protein, 20 aa, Artificial Sequence
  Cyclic GFR-binding peptide
NAISILYFIGKTPKILKKYR

SEQ ID NO: 44032 - protein, 21 aa, Artificial Sequence
  Cyclic GFR-binding peptide
SATSMLYYDENEKVVLRKHRD

SEQ ID NO: 44033 - protein, 31 aa, Artificial Sequence
  Cyclic GFR-binding peptide
  MOD_RES (2)..(3): Xaa is C or S
PXXVSQDLSAISILYLIGKTPKILKNYQMIV

SEQ ID NO: 44034 - protein, 27 aa, Artificial Sequence
  Cyclic GFR-binding peptide
  MOD_RES (26)..(26): Xaa is C or S
NAISILYFIGKTPKILKKYRMIVKSXK

SEQ ID NO: 44035 - protein, 21 aa, Artificial Sequence
  Cyclic GFR-binding peptide
SAISILYLVGRKPKVLKNYQM

SEQ ID NO: 44036 - protein, 28 aa, Artificial Sequence
  Cyclic GFR-binding peptide
PTQVQLNAISVLYFEIVRKKPIFLKKYR

SEQ ID NO: 44037 - protein, 31 aa, Artificial Sequence
  Cyclic GFR-binding peptide
  MOD_RES (28)..(30): Xaa is C or S
DLSATSILYYVGRTPKVLRKHRMVVKSXKXS

SEQ ID NO: 44038 - protein, 34 aa, Artificial Sequence; identical to SEQ ID NO: 5677
  Cyclic GFR-binding peptide
  MOD_RES (1)..(2)..(34): Xaa is C or S

SEQ ID NO: 44039 - protein, 29 aa, Artificial Sequence
  Cyclic GFR-binding peptide
PTKLSATSVLYYDDMGVPTLRKHREGMSV

SEQ ID NO: 44040 - protein, 42 aa, Artificial Sequence; identical to SEQ ID NO: 5680
  Cyclic GFR-binding peptide
  MOD_RES (3)..(40)..(42): Xaa is C or S

SEQ ID NO: 44041 - protein, 30 aa, Artificial Sequence
  Cyclic GFR-binding peptide
  MOD_RES (1)..(2): Xaa is C or S
XXVPQALSAISILYLVGRKPKVLKNYQMIV

SEQ ID NO: 44042 - protein, 33 aa, Artificial Sequence; identical to SEQ ID NO: 5681
  Cyclic GFR-binding peptide

SEQ ID NO: 44043 - protein, 30 aa, Artificial Sequence
  Cyclic GFR-binding peptide
  MOD_RES (1)..(1): Xaa is C or S
XVPTKLNAISVLYFDDMGVPTLKKYREGMS

SEQ ID NO: 44044 - protein, 31 aa, Artificial Sequence
  Cyclic GFR-binding peptide
PTKLNAISVLYFDDMGVPTLKKYREGMSVAE

SEQ ID NO: 44045 - protein, 33 aa, Artificial Sequence; identical to SEQ ID NO: 5683
  Cyclic GFR-binding peptide
  MOD_RES (32)..(32): Xaa is C or S

SEQ ID NO: 44046 - protein, 26 aa, Artificial Sequence
  Cyclic GFR-binding peptide
KLSPISVLYKDSSNNVILKYHYNMVV

SEQ ID NO: 44047 - protein, 37 aa, Artificial Sequence; identical to SEQ ID NO: 5684
  Cyclic GFR-binding peptide
  MOD_RES (5)..(6): Xaa is C or S

SEQ ID NO: 44048 - protein, 34 aa, Artificial Sequence
  Cyclic GFR-binding peptide
  MOD_RES (6)..(7): Xaa is C or S
ASASPXXVPQDLSAISILYLVGRTPKVLKNYQMV

SEQ ID NO: 44049 - protein, 34 aa, Artificial Sequence
  Cyclic GFR-binding peptide
  MOD_RES (5)..(5): Xaa is C or S
TKPTXAPTKLSAISVLYLDDSSNVILKNYQNMVV

SEQ ID NO: 44050 - protein, 34 aa, Artificial Sequence; identical to SEQ ID NO: 5687
  Cyclic GFR-binding peptide

SEQ ID NO: 44051 - protein, 29 aa, Artificial Sequence
  Cyclic GFR-binding peptide
  MOD_RES (28)..(28): Xaa is C or S
LSAISVLYLDDSSNVILKNYQNMVVRSXG

SEQ ID NO: 44052 - protein, 38 aa, Artificial Sequence; identical to SEQ ID NO: 5688
  Cyclic GFR-binding peptide
  MOD_RES (5)..(6)..(38): Xaa is C or S

SEQ ID NO: 44053 - protein, 31 aa, Artificial Sequence
  Cyclic GFR-binding peptide
  MOD_RES (4)..(5): Xaa is C or S
ASPXXVPQDLNAISILYFVGRTPKVLKKYRM

SEQ ID NO: 44054 - protein, 31 aa, Artificial Sequence
  Cyclic GFR-binding peptide
  MOD_RES (3)..(4): Xaa is C or S
KAXXVPTKLSAISVLYLDDMGVPTLKNYQEG

SEQ ID NO: 44055 - protein, 39 aa, Artificial Sequence; identical to SEQ ID NO: 5690
  Cyclic GFR-binding peptide
  MOD_RES (5)..(6)..(38): Xaa is C or S

SEQ ID NO: 44056 - protein, 37 aa, Artificial Sequence; identical to SEQ ID NO: 5691
  Cyclic GFR-binding peptide
  MOD_RES (1)..(34)..(36): Xaa is C or S

SEQ ID NO: 44057 - protein, 28 aa, Artificial Sequence
  Cyclic GFR-binding peptide
  MOD_RES (2)..(3): Xaa is C or S
PXXVPQALSPISILYKVGRKPKVLKYHY

SEQ ID NO: 44058 - protein, 36 aa, Artificial Sequence
  Cyclic GFR-binding peptide
  MOD_RES (6)..(7): Xaa is C or S
SIPKAXXVPTELSATSMLYYDEYDKVVLRKHREMVV

SEQ ID NO: 44059 - protein, 26 aa, Artificial Sequence
  Cyclic GFR-binding peptide
DLSPISILYKVGRTPKVLKYHYMVVK

SEQ ID NO: 44060 - protein, 30 aa, Artificial Sequence
  Cyclic GFR-binding peptide
  MOD_RES (2)..(3): Xaa is C or S
AXXVPTKLNAISVLYFDDMGVPTLKKYREG

SEQ ID NO: 44061 - protein, 37 aa, Artificial Sequence; identical to SEQ ID NO: 5696
  Cyclic GFR-binding peptide
  MOD_RES (6)..(7): Xaa is C or S

SEQ ID NO: 44062 - protein, 36 aa, Artificial Sequence; identical to SEQ ID NO: 5697
  Cyclic GFR-binding peptide
  MOD_RES (2)..(3)..(34)..(36): Xaa is C or S

SEQ ID NO: 44063 - protein, 23 aa, Artificial Sequence
  Cyclic GFR-binding peptide
TKLSAISVLYLDDMGVPTLKNYQ

SEQ ID NO: 44064 - protein, 28 aa, Artificial Sequence
  Cyclic GFR-binding peptide
QALNAISILYFVGRKPKVLKKYRMIVRS

SEQ ID NO: 44065 - protein, 27 aa, Artificial Sequence
  Cyclic GFR-binding peptide
  MOD_RES (27)..(27): Xaa is C or S
NAISVLYFDSSNNVILKKYRNMVVKAX

SEQ ID NO: 44066 - protein, 30 aa, Artificial Sequence
  Cyclic GFR-binding peptide
  MOD_RES (29)..(29): Xaa is C or S
QLSPISVLYKDDSSNVILKYHYNMVVRAXG

SEQ ID NO: 44067 - protein, 28 aa, Artificial Sequence
  Cyclic GFR-binding peptide
PTKLSPISVLYKDDSSNVILKYHYNMVV

SEQ ID NO: 44068 - protein, 26 aa, Artificial Sequence
  Cyclic GFR-binding peptide
LSAISVLYLDDMGVPTLKNYQEGMSV

SEQ ID NO: 44069 - protein, 35 aa, Artificial Sequence; identical to SEQ ID NO: 5700
  Cyclic GFR-binding peptide
  MOD_RES (3)..(4)..(35): Xaa is C or S

SEQ ID NO: 44070 - protein, 40 aa, Artificial Sequence; identical to SEQ ID NO: 5701
  Cyclic GFR-binding peptide
  MOD_RES (5)..(5): Xaa is C or S

SEQ ID NO: 44071 - protein, 35 aa, Artificial Sequence; identical to SEQ ID NO: 5702
  Cyclic GFR-binding peptide
  MOD_RES (1)..(33)..(35): Xaa is C or S

SEQ ID NO: 44072 - protein, 31 aa, Artificial Sequence
  Cyclic GFR-binding peptide
  MOD_RES (5)..(6): Xaa is C or S
IPKAXXVPTELSATSMLYYDEYDKVVLRKHR

SEQ ID NO: 44073 - protein, 31 aa, Artificial Sequence
  Cyclic GFR-binding peptide
PTKLSAISVLYLDDMGVPTLKNYQEGMSVAE

SEQ ID NO: 44074 - protein, 23 aa, Artificial Sequence
  Cyclic GFR-binding peptide
ELSPISMLYKDEYDKVVLKYHYE

SEQ ID NO: 44075 - protein, 32 aa, Artificial Sequence
  Cyclic GFR-binding peptide
  MOD_RES (31)..(31): Xaa is C or S
PTELNAISMLYFDEYDKVVLKKYREMVVEGXG

SEQ ID NO: 44076 - protein, 38 aa, Artificial Sequence; identical to SEQ ID NO: 5705
  Cyclic GFR-binding peptide
  MOD_RES (2)..(2): Xaa is C or S

SEQ ID NO: 44077 - protein, 27 aa, Artificial Sequence
  Cyclic GFR-binding peptide
PTKLSPISVLYKDSSNNVILKYHYNMV

SEQ ID NO: 44078 - protein, 34 aa, Artificial Sequence; identical to SEQ ID NO: 5708
  Cyclic GFR-binding peptide
  MOD_RES (2)..(3)..(34): Xaa is C or S

SEQ ID NO: 44079 - protein, 25 aa, Artificial Sequence
  Cyclic GFR-binding peptide
KLSAISVLYLDDSSNVILKNYQNMV

SEQ ID NO: 44080 - protein, 30 aa, Artificial Sequence; identical to SEQ ID NO: 816
  Cyclic GFR-binding peptide

SEQ ID NO: 44081 - protein, 41 aa, Artificial Sequence; identical to SEQ ID NO: 5710
  Cyclic GFR-binding peptide
  MOD_RES (6)..(7)..(39)..(41): Xaa is C or S

SEQ ID NO: 44082 - protein, 38 aa, Artificial Sequence; identical to SEQ ID NO: 5711
  Cyclic GFR-binding peptide
  MOD_RES (2)..(3)..(35)..(37): Xaa is C or S

SEQ ID NO: 44083 - protein, 22 aa, Artificial Sequence
  Cyclic GFR-binding peptide
LSATSILYYVGRKPKVLRKHRM

SEQ ID NO: 44084 - protein, 25 aa, Artificial Sequence
  Cyclic GFR-binding peptide
TQLSATSVLYYDDSSNVILRKHRNM

SEQ ID NO: 44085 - protein, 25 aa, Artificial Sequence
  Cyclic GFR-binding peptide
LSPISILYKVGRKPKVLKYHYMIVR

SEQ ID NO: 44086 - protein, 27 aa, Artificial Sequence
  Cyclic GFR-binding peptide
TKLSAISVLYLDSSNNVILKNYQNMVV

SEQ ID NO: 44087 - protein, 36 aa, Artificial Sequence; identical to SEQ ID NO: 5713
  Cyclic GFR-binding peptide
  MOD_RES (2)..(3)..(35): Xaa is C or S

SEQ ID NO: 44088 - protein, 23 aa, Artificial Sequence
  Cyclic GFR-binding peptide
LNAISMLYFDENEKVVLKKYRDM

SEQ ID NO: 44089 - protein, 40 aa, Artificial Sequence; identical to SEQ ID NO: 5714
  Cyclic GFR-binding peptide
  MOD_RES (4)..(5)..(37)..(39): Xaa is C or S

SEQ ID NO: 44090 - protein, 32 aa, Artificial Sequence
  Cyclic GFR-binding peptide
  MOD_RES (2)..(3): Xaa is C or S
AXXAPTKLSAISVLYLDSSNNVILKNYQNMVV

SEQ ID NO: 44091 - protein, 28 aa, Artificial Sequence
  Cyclic GFR-binding peptide
LSATSVLYYDDMGVPTLRKHREGMSVAE

SEQ ID NO: 44092 - protein, 29 aa, Artificial Sequence
  Cyclic GFR-binding peptide
VPQDLNAISILYFVGRTPKVLKKYRMVVK

SEQ ID NO: 44093 - protein, 25 aa, Artificial Sequence
  Cyclic GFR-binding peptide
SPISILYKIGKTPKILKYHYMIVKS

SEQ ID NO: 44094 - protein, 29 aa, Artificial Sequence
  Cyclic GFR-binding peptide
  MOD_RES (28)..(28): Xaa is C or S
ALSAISILYLVGRKPKVLKNYQMIVRSXK

SEQ ID NO: 44095 - protein, 22 aa, Artificial Sequence
  Cyclic GFR-binding peptide
SATSVLYYEIVRKKPIFLRKHR

SEQ ID NO: 44096 - protein, 32 aa, Artificial Sequence; identical to SEQ ID NO: 5717
  Cyclic GFR-binding peptide
  MOD_RES (2)..(2): Xaa is C or S

SEQ ID NO: 44097 - protein, 34 aa, Artificial Sequence; identical to SEQ ID NO: 5718
  Cyclic GFR-binding peptide
  MOD_RES (3)..(4): Xaa is C or S

SEQ ID NO: 44098 - protein, 38 aa, Artificial Sequence; identical to SEQ ID NO: 5719
  Cyclic GFR-binding peptide
  MOD_RES (2)..(3)..(35)..(37): Xaa is C or S

SEQ ID NO: 44099 - protein, 32 aa, Artificial Sequence
  Cyclic GFR-binding peptide
PTQVQLSPISVLYKEIVRKKPIFLKYHYTLED

SEQ ID NO: 44100 - protein, 41 aa, Artificial Sequence; identical to SEQ ID NO: 5721
  Cyclic GFR-binding peptide
  MOD_RES (5)..(5): Xaa is C or S

SEQ ID NO: 44101 - protein, 36 aa, Artificial Sequence; identical to SEQ ID NO: 5723
  Cyclic GFR-binding peptide
  MOD_RES (2)..(2): Xaa is C or S

SEQ ID NO: 44102 - protein, 39 aa, Artificial Sequence; identical to SEQ ID NO: 5722
  Cyclic GFR-binding peptide
  MOD_RES (4)..(5)..(37)..(39): Xaa is C or S

SEQ ID NO: 44103 - protein, 29 aa, Artificial Sequence
  Cyclic GFR-binding peptide
  MOD_RES (27)..(29): Xaa is C or S
SAISVLYLDDSSNVILKNYQNMVVRSXGX

SEQ ID NO: 44104 - protein, 32 aa, Artificial Sequence
  Cyclic GFR-binding peptide
  MOD_RES (1)..(2): Xaa is C or S
XXVPTKLNAISVLYFDDMGVPTLKKYREGMSV

SEQ ID NO: 44105 - protein, 38 aa, Artificial Sequence; identical to SEQ ID NO: 5724
  Cyclic GFR-binding peptide
  MOD_RES (5)..(6)..(38): Xaa is C or S

SEQ ID NO: 44106 - protein, 32 aa, Artificial Sequence
  Cyclic GFR-binding peptide
  MOD_RES (3)..(4): Xaa is C or S
KAXXAPTKLSPISVLYKDSSNNVILKYHYNMV

SEQ ID NO: 44107 - protein, 36 aa, Artificial Sequence; identical to SEQ ID NO: 5725
  Cyclic GFR-binding peptide
  MOD_RES (4)..(5)..(36): Xaa is C or S

SEQ ID NO: 44108 - protein, 26 aa, Artificial Sequence
  Cyclic GFR-binding peptide
PTELNAISMLYFDENEKVVLKKYRDM

SEQ ID NO: 44109 - protein, 37 aa, Artificial Sequence; identical to SEQ ID NO: 5726
  Cyclic GFR-binding peptide
  MOD_RES (3)..(4)..(35)..(37): Xaa is C or S

SEQ ID NO: 44110 - protein, 40 aa, Artificial Sequence; identical to SEQ ID NO: 5727
  Cyclic GFR-binding peptide
  MOD_RES (4)..(5)..(37)..(39): Xaa is C or S

SEQ ID NO: 44111 - protein, 29 aa, Artificial Sequence
  Cyclic GFR-binding peptide
TQLSATSVLYYDDSSNVILRKHRNMVVRA

SEQ ID NO: 44112 - protein, 41 aa, Artificial Sequence; identical to SEQ ID NO: 5729
  Cyclic GFR-binding peptide
  MOD_RES (4)..(41): Xaa is C or S

SEQ ID NO: 44113 - protein, 35 aa, Artificial Sequence
  Cyclic GFR-binding peptide
  MOD_RES (6)..(7): Xaa is C or S
KIPKAXXVPTELNAISMLYFDENEKVVLKKYRDMV

SEQ ID NO: 44114 - protein, 29 aa, Artificial Sequence
  Cyclic GFR-binding peptide
TQLSAISVLYLDDSSNVILKNYQNMVVRA

SEQ ID NO: 44115 - protein, 34 aa, Artificial Sequence
  Cyclic GFR-binding peptide
  MOD_RES (5)..(6): Xaa is C or S
SASPXXVPQDLSATSILYYVGRTPKVLRKHRMVV

SEQ ID NO: 44116 - protein, 24 aa, Artificial Sequence
  Cyclic GFR-binding peptide
SAISVLYLDDMGVPTLKNYQEGMS

SEQ ID NO: 44117 - protein, 28 aa, Artificial Sequence
  Cyclic GFR-binding peptide
  MOD_RES (2)..(3): Xaa is C or S
PXXAPTKLSPISVLYKDDSSNVILKYHY

SEQ ID NO: 44118 - protein, 33 aa, Artificial Sequence
  Cyclic GFR-binding peptide
  MOD_RES (4)..(5): Xaa is C or S
PKPXXAPTQLSPISVLYKDDSSNVILKYHYNMV

SEQ ID NO: 44119 - protein, 36 aa, Artificial Sequence; identical to SEQ ID NO: 5733
  Cyclic GFR-binding peptide
  MOD_RES (3)..(4)..(36): Xaa is C or S

SEQ ID NO: 44120 - protein, 32 aa, Artificial Sequence; identical to SEQ ID NO: 5734
  Cyclic GFR-binding peptide
  MOD_RES (1)..(1): Xaa is C or S

SEQ ID NO: 44121 - protein, 37 aa, Artificial Sequence; identical to SEQ ID NO: 5735
  Cyclic GFR-binding peptide
  MOD_RES (1)..(2)..(34)..(36): Xaa is C or S

SEQ ID NO: 44122 - protein, 41 aa, Artificial Sequence; identical to SEQ ID NO: 5736
  Cyclic GFR-binding peptide
  MOD_RES (5)..(5): Xaa is C or S

SEQ ID NO: 44123 - protein, 25 aa, Artificial Sequence
  Cyclic GFR-binding peptide
DLSAISILYLIGKTPKILKNYQMIV

SEQ ID NO: 44124 - protein, 26 aa, Artificial Sequence
  Cyclic GFR-binding peptide
  MOD_RES (1)..(1): Xaa is C or S
XVPTELSATSMLYYDENEKVVLRKHR

SEQ ID NO: 44125 - protein, 27 aa, Artificial Sequence
  Cyclic GFR-binding peptide
  MOD_RES (1)..(2): Xaa is C or S
XXVPQDLNAISILYFVGRTPKVLKKYR

SEQ ID NO: 44126 - protein, 35 aa, Artificial Sequence; identical to SEQ ID NO: 5738
  Cyclic GFR-binding peptide
  MOD_RES (2)..(3)..(35): Xaa is C or S

SEQ ID NO: 44127 - protein, 32 aa, Artificial Sequence
  Cyclic GFR-binding peptide
  MOD_RES (2)..(2): Xaa is C or S
QXRPTQVQLSATSVLYYEIVRKKPIFLRKHRT

SEQ ID NO: 44128 - protein, 31 aa, Artificial Sequence
  Cyclic GFR-binding peptide
  MOD_RES (5)..(6): Xaa is C or S
IPKAXXVPTELSPISMLYKDEYDKVVLKYHY

SEQ ID NO: 44129 - protein, 25 aa, Artificial Sequence
  Cyclic GFR-binding peptide
SAISILYLVGRKPKVLKNYQMIVRS

SEQ ID NO: 44130 - protein, 34 aa, Artificial Sequence
  Cyclic GFR-binding peptide
  MOD_RES (32)..(34): Xaa is C or S
QLNAISVLYFEIVRKKPIFLKKYRTLEDHLAXKX

SEQ ID NO: 44131 - protein, 27 aa, Artificial Sequence
  Cyclic GFR-binding peptide
VPQDLSPISILYKVGRTPKVLKYHYMV

SEQ ID NO: 44132 - protein, 32 aa, Artificial Sequence
  Cyclic GFR-binding peptide
  MOD_RES (3)..(3): Xaa is C or S
VQXRPTQVQLSATSVLYYEIVRKKPIFLRKHR

SEQ ID NO: 44133 - protein, 31 aa, Artificial Sequence
  Cyclic GFR-binding peptide
  MOD_RES (28)..(30): Xaa is C or S
DLSAISILYLVGRTPKVLKNYQMVVKSXKXS

SEQ ID NO: 44134 - protein, 33 aa, Artificial Sequence; identical to SEQ ID NO: 5744
  Cyclic GFR-binding peptide
  MOD_RES (2)..(3): Xaa is C or S

SEQ ID NO: 44135 - protein, 29 aa, Artificial Sequence
  Cyclic GFR-binding peptide
TQVQLNAISVLYFEIVRKKPIFLKKYRTL

SEQ ID NO: 44136 - protein, 34 aa, Artificial Sequence; identical to SEQ ID NO: 5743
  Cyclic GFR-binding peptide
  MOD_RES (1)..(32)..(34): Xaa is C or S

SEQ ID NO: 44137 - protein, 35 aa, Artificial Sequence
  Cyclic GFR-binding peptide
  MOD_RES (6)..(7): Xaa is C or S
AVPKAXXAPTKLSAISVLYLDSSNNVILKNYQNMV

SEQ ID NO: 44138 - protein, 31 aa, Artificial Sequence
  Cyclic GFR-binding peptide
  MOD_RES (2)..(2): Xaa is C or S
QXRPTQVQLSPISVLYKEIVRKKPIFLKYHY

SEQ ID NO: 44139 - protein, 36 aa, Artificial Sequence; identical to SEQ ID NO: 5745
  Cyclic GFR-binding peptide
  MOD_RES (3)..(4): Xaa is C or S

SEQ ID NO: 44140 - protein, 34 aa, Artificial Sequence
  Cyclic GFR-binding peptide
  MOD_RES (5)..(6): Xaa is C or S
IPKAXXVPTELSPISMLYKDEYDKVVLKYHYEMV

SEQ ID NO: 44141 - protein, 29 aa, Artificial Sequence
  Cyclic GFR-binding peptide
VSQDLSAISILYLIGKTPKILKNYQMIVK

SEQ ID NO: 44142 - protein, 30 aa, Artificial Sequence
  Cyclic GFR-binding peptide
  MOD_RES (29)..(29): Xaa is C or S
QDLSAISILYLIGKTPKILKNYQMIVKSXK

SEQ ID NO: 44143 - protein, 25 aa, Artificial Sequence
  Cyclic GFR-binding peptide
SAISILYLIGKTPKILKNYQMIVKS

SEQ ID NO: 44144 - protein, 35 aa, Artificial Sequence; identical to SEQ ID NO: 5747
  Cyclic GFR-binding peptide
  MOD_RES (4)..(5): Xaa is C or S

SEQ ID NO: 44145 - protein, 37 aa, Artificial Sequence; identical to SEQ ID NO: 5749
  Cyclic GFR-binding peptide
  MOD_RES (36)..(36): Xaa is C or S

SEQ ID NO: 44146 - protein, 26 aa, Artificial Sequence
  Cyclic GFR-binding peptide
APTQLSPISVLYKDDSSNVILKYHYN

SEQ ID NO: 44147 - protein, 25 aa, Artificial Sequence
  Cyclic GFR-binding peptide
LSAISVLYLDSSNNVILKNYQNMVV

SEQ ID NO: 44148 - protein, 28 aa, Artificial Sequence
  Cyclic GFR-binding peptide
  MOD_RES (1)..(1): Xaa is C or S
XVPTKLNAISVLYFDDMGVPTLKKYREG

SEQ ID NO: 44149 - protein, 35 aa, Artificial Sequence
  Cyclic GFR-binding peptide
  MOD_RES (34)..(34): Xaa is C or S
QVQLSPISVLYKEIVRKKPIFLKYHYTLEDHLAXK

SEQ ID NO: 44150 - protein, 29 aa, Artificial Sequence
  Cyclic GFR-binding peptide
PTQVQLSAISVLYLEIVRKKPIFLKNYQT

SEQ ID NO: 44151 - protein, 25 aa, Artificial Sequence
  Cyclic GFR-binding peptide
SAISVLYLDDMGVPTLKNYQEGMSV

SEQ ID NO: 44152 - protein, 41 aa, Artificial Sequence; identical to SEQ ID NO: 5752
  Cyclic GFR-binding peptide
  MOD_RES (2)..(39)..(41): Xaa is C or S

SEQ ID NO: 44153 - protein, 31 aa, Artificial Sequence; identical to SEQ ID NO: 5753
  Cyclic GFR-binding peptide
  MOD_RES (1)..(1): Xaa is C or S

SEQ ID NO: 44154 - protein, 26 aa, Artificial Sequence
  Cyclic GFR-binding peptide
VSQDLSAISILYLIGKTPKILKNYQM

SEQ ID NO: 44155 - protein, 31 aa, Artificial Sequence
  Cyclic GFR-binding peptide
  MOD_RES (4)..(5): Xaa is C or S
PKAXXVPTELNAISMLYFDENEKVVLKKYRD

SEQ ID NO: 44156 - protein, 28 aa, Artificial Sequence
  Cyclic GFR-binding peptide
  MOD_RES (1)..(2): Xaa is C or S
XXVSQDLSATSILYYIGKTPKILRKHRM

SEQ ID NO: 44157 - protein, 34 aa, Artificial Sequence
  Cyclic GFR-binding peptide
  MOD_RES (3)..(4): Xaa is C or S
KAXXVPTKLSAISVLYLDDMGVPTLKNYQEGMSV

SEQ ID NO: 44158 - protein, 33 aa, Artificial Sequence; identical to SEQ ID NO: 5754
  Cyclic GFR-binding peptide
  MOD_RES (2)..(2): Xaa is C or S

SEQ ID NO: 44159 - protein, 40 aa, Artificial Sequence; identical to SEQ ID NO: 5757
  Cyclic GFR-binding peptide
  MOD_RES (4)..(5)..(37)..(39): Xaa is C or S

SEQ ID NO: 44160 - protein, 34 aa, Artificial Sequence; identical to SEQ ID NO: 5758
  Cyclic GFR-binding peptide
  MOD_RES (32)..(34): Xaa is C or S

SEQ ID NO: 44161 - protein, 24 aa, Artificial Sequence
  Cyclic GFR-binding peptide
DLSAISILYLIGKTPKILKNYQMI

SEQ ID NO: 44162 - protein, 28 aa, Artificial Sequence
  Cyclic GFR-binding peptide
  MOD_RES (1)..(1): Xaa is C or S
XVPQALNAISILYFVGRKPKVLKKYRMI

SEQ ID NO: 44163 - protein, 32 aa, Artificial Sequence
  Cyclic GFR-binding peptide
  MOD_RES (3)..(4): Xaa is C or S
KPXXAPTKLSATSVLYYDDSSNVILRKHRNMV

SEQ ID NO: 44164 - protein, 33 aa, Artificial Sequence
  Cyclic GFR-binding peptide
  MOD_RES (4)..(5): Xaa is C or S
AAPXXVPQALNAISILYFVGRKPKVLKKYRMIV

SEQ ID NO: 44165 - protein, 34 aa, Artificial Sequence
  Cyclic GFR-binding peptide
  MOD_RES (6)..(7): Xaa is C or S
ASASPXXVSQDLSAISILYLIGKTPKILKNYQMI

SEQ ID NO: 44166 - protein, 32 aa, Artificial Sequence; identical to SEQ ID NO: 5759
  Cyclic GFR-binding peptide
  MOD_RES (1)..(2): Xaa is C or S

SEQ ID NO: 44167 - protein, 30 aa, Artificial Sequence
  Cyclic GFR-binding peptide
  MOD_RES (4)..(5): Xaa is C or S
PKAXXVPTELNAISMLYFDENEKVVLKKYR

SEQ ID NO: 44168 - protein, 42 aa, Artificial Sequence; identical to SEQ ID NO: 5762
  Cyclic GFR-binding peptide
  MOD_RES (5)..(42): Xaa is C or S

SEQ ID NO: 44169 - protein, 25 aa, Artificial Sequence
  Cyclic GFR-binding peptide
KLSAISVLYLDSSNNVILKNYQNMV

SEQ ID NO: 44170 - protein, 27 aa, Artificial Sequence
  Cyclic GFR-binding peptide
TELSATSMLYYDEYDKVVLRKHREMVV

SEQ ID NO: 44171 - protein, 38 aa, Artificial Sequence; identical to SEQ ID NO: 5764
  Cyclic GFR-binding peptide
  MOD_RES (6)..(7)..(38): Xaa is C or S

SEQ ID NO: 44172 - protein, 26 aa, Artificial Sequence
  Cyclic GFR-binding peptide
ALSATSILYYVGRKPKVLRKHRMIVR

SEQ ID NO: 44173 - protein, 26 aa, Artificial Sequence
  Cyclic GFR-binding peptide
QLSAISVLYLEIVRKKPIFLKNYQTL

SEQ ID NO: 44174 - protein, 35 aa, Artificial Sequence
  Cyclic GFR-binding peptide
  MOD_RES (5)..(5): Xaa is C or S
RNVQXRPTQVQLSATSVLYYEIVRKKPIFLRKHRT

SEQ ID NO: 44175 - protein, 27 aa, Artificial Sequence
  Cyclic GFR-binding peptide
  MOD_RES (1)..(2): Xaa is C or S
XXVPQDLSPISILYKVGRTPKVLKYHY

SEQ ID NO: 44176 - protein, 32 aa, Artificial Sequence; identical to SEQ ID NO: 5768
  Cyclic GFR-binding peptide
  MOD_RES (1)..(32): Xaa is C or S

SEQ ID NO: 44177 - protein, 31 aa, Artificial Sequence
  Cyclic GFR-binding peptide
  MOD_RES (5)..(6): Xaa is C or S
SASPXXVSQDLSPISILYKIGKTPKILKYHY

SEQ ID NO: 44178 - protein, 26 aa, Artificial Sequence
  Cyclic GFR-binding peptide
VQLNAISVLYFEIVRKKPIFLKKYRT

SEQ ID NO: 44179 - protein, 27 aa, Artificial Sequence
  Cyclic GFR-binding peptide
PTKLSAISVLYLDDSSNVILKNYQNMV

SEQ ID NO: 44180 - protein, 37 aa, Artificial Sequence; identical to SEQ ID NO: 5773
  Cyclic GFR-binding peptide
  MOD_RES (5)..(6): Xaa is C or S

SEQ ID NO: 44181 - protein, 30 aa, Artificial Sequence
  Cyclic GFR-binding peptide
  MOD_RES (30)..(30): Xaa is C or S
SQDLSAISILYLIGKTPKILKNYQMIVKSX

SEQ ID NO: 44182 - protein, 31 aa, Artificial Sequence; identical to SEQ ID NO: 5775
  Cyclic GFR-binding peptide
  MOD_RES (31)..(31): Xaa is C or S

SEQ ID NO: 44183 - protein, 33 aa, Artificial Sequence
  Cyclic GFR-binding peptide
  MOD_RES (6)..(7): Xaa is C or S
SIPKAXXVPTELSATSMLYYDEYDKVVLRKHRE

SEQ ID NO: 44184 - protein, 40 aa, Artificial Sequence; identical to SEQ ID NO: 5776
  Cyclic GFR-binding peptide
  MOD_RES (6)..(7)..(38)..(40): Xaa is C or S

SEQ ID NO: 44185 - protein, 20 aa, Artificial Sequence
  Cyclic GFR-binding peptide
SPISMLYKDEYDKVVLKYHY

SEQ ID NO: 44186 - protein, 35 aa, Artificial Sequence; identical to SEQ ID NO: 5778
  Cyclic GFR-binding peptide
  MOD_RES (4)..(5): Xaa is C or S

SEQ ID NO: 44187 - protein, 33 aa, Artificial Sequence
  Cyclic GFR-binding peptide
  MOD_RES (4)..(5): Xaa is C or S
PKPXXAPTQLSATSVLYYDDSSNVILRKHRNMV

SEQ ID NO: 44188 - protein, 37 aa, Artificial Sequence; identical to SEQ ID NO: 5780
  Cyclic GFR-binding peptide
  MOD_RES (2)..(3)..(35)..(37): Xaa is C or S

SEQ ID NO: 44189 - protein, 25 aa, Artificial Sequence
  Cyclic GFR-binding peptide
LNAISILYFIGKTPKILKKYRMIVK

SEQ ID NO: 44190 - protein, 38 aa, Artificial Sequence; identical to SEQ ID NO: 5783
  Cyclic GFR-binding peptide
  MOD_RES (6)..(7): Xaa is C or S

SEQ ID NO: 44191 - protein, 39 aa, Artificial Sequence; identical to SEQ ID NO: 5784
  Cyclic GFR-binding peptide
  MOD_RES (4)..(5)..(36)..(38): Xaa is C or S

SEQ ID NO: 44192 - protein, 22 aa, Artificial Sequence
  Cyclic GFR-binding peptide
SATSILYYIGKTPKILRKHRMI

SEQ ID NO: 44193 - protein, 31 aa, Artificial Sequence
  Cyclic GFR-binding peptide
  MOD_RES (4)..(5): Xaa is C or S
GKAXXVPTKLSATSVLYYDDMGVPTLRKHRE

SEQ ID NO: 44194 - protein, 32 aa, Artificial Sequence
  Cyclic GFR-binding peptide
VQLSPISVLYKEIVRKKPIFLKYHYTLEDHLA

SEQ ID NO: 44195 - protein, 23 aa, Artificial Sequence
  Cyclic GFR-binding peptide
LSPISILYKVGRKPKVLKYHYMI

SEQ ID NO: 44196 - protein, 40 aa, Artificial Sequence; identical to SEQ ID NO: 5787
  Cyclic GFR-binding peptide
  MOD_RES (5)..(6)..(37)..(39): Xaa is C or S

SEQ ID NO: 44197 - protein, 31 aa, Artificial Sequence
  Cyclic GFR-binding peptide
  MOD_RES (29)..(31): Xaa is C or S
QDLSAISILYLVGRTPKVLKNYQMVVKSXKX

SEQ ID NO: 44198 - protein, 28 aa, Artificial Sequence
  Cyclic GFR-binding peptide
PTKLNAISVLYFDDMGVPTLKKYREGMS

SEQ ID NO: 44199 - protein, 40 aa, Artificial Sequence; identical to SEQ ID NO: 5789
  Cyclic GFR-binding peptide
  MOD_RES (7)..(39): Xaa is C or S

SEQ ID NO: 44200 - protein, 33 aa, Artificial Sequence; identical to SEQ ID NO: 5790
  Cyclic GFR-binding peptide

SEQ ID NO: 44201 - protein, 34 aa, Artificial Sequence; identical to SEQ ID NO: 5791
  Cyclic GFR-binding peptide
  MOD_RES (2)..(3)..(34): Xaa is C or S

SEQ ID NO: 44202 - protein, 29 aa, Artificial Sequence
  Cyclic GFR-binding peptide
TQVQLSATSVLYYEIVRKKPIFLRKHRTL

SEQ ID NO: 44203 - protein, 38 aa, Artificial Sequence; identical to SEQ ID NO: 5793
  Cyclic GFR-binding peptide
  MOD_RES (4)..(5)..(37): Xaa is C or S

SEQ ID NO: 44204 - protein, 34 aa, Artificial Sequence; identical to SEQ ID NO: 5794
  Cyclic GFR-binding peptide
  MOD_RES (32)..(34): Xaa is C or S

SEQ ID NO: 44205 - protein, 33 aa, Artificial Sequence; identical to SEQ ID NO: 5795
  Cyclic GFR-binding peptide

SEQ ID NO: 44206 - protein, 38 aa, Artificial Sequence; identical to SEQ ID NO: 5796
  Cyclic GFR-binding peptide
  MOD_RES (3)..(4)..(35)..(37): Xaa is C or S

SEQ ID NO: 44207 - protein, 20 aa, Artificial Sequence
  Cyclic GFR-binding peptide
SPISILYKVGRTPKVLKYHY

SEQ ID NO: 44208 - protein, 34 aa, Artificial Sequence; identical to SEQ ID NO: 5798
  Cyclic GFR-binding peptide
  MOD_RES (31)..(33): Xaa is C or S

SEQ ID NO: 44209 - protein, 29 aa, Artificial Sequence
  Cyclic GFR-binding peptide
  MOD_RES (28)..(28): Xaa is C or S
DLSATSILYYVGRTPKVLRKHRMVVKSXK

SEQ ID NO: 44210 - protein, 36 aa, Artificial Sequence
  Cyclic GFR-binding peptide
  MOD_RES (5)..(6): Xaa is C or S
VGKAXXVPTKLSAISVLYLDDMGVPTLKNYQEGMSV

SEQ ID NO: 44211 - protein, 30 aa, Artificial Sequence
  Cyclic GFR-binding peptide
  MOD_RES (5)..(5): Xaa is C or S
TKPTXAPTKLSPISVLYKDDSSNVILKYHY

SEQ ID NO: 44212 - protein, 32 aa, Artificial Sequence; identical to SEQ ID NO: 5802
  Cyclic GFR-binding peptide
  MOD_RES (2)..(2): Xaa is C or S

SEQ ID NO: 44213 - protein, 29 aa, Artificial Sequence
  Cyclic GFR-binding peptide
  MOD_RES (29)..(29): Xaa is C or S
KLSPISVLYKDDSSNVILKYHYNMVVRSX

SEQ ID NO: 44214 - protein, 31 aa, Artificial Sequence
  Cyclic GFR-binding peptide
  MOD_RES (30)..(30): Xaa is C or S
KLSAISVLYLDDMGVPTLKNYQEGMSVAEXG

SEQ ID NO: 44215 - protein, 25 aa, Artificial Sequence
  Cyclic GFR-binding peptide
ELNAISMLYFDENEKVVLKKYRDMV

SEQ ID NO: 44216 - protein, 29 aa, Artificial Sequence
  Cyclic GFR-binding peptide
VQLSAISVLYLEIVRKKPIFLKNYQTLED

SEQ ID NO: 44217 - protein, 35 aa, Artificial Sequence
  Cyclic GFR-binding peptide
  MOD_RES (6)..(7): Xaa is C or S
ASASPXXVSQDLNAISILYFIGKTPKILKKYRMIV

SEQ ID NO: 44218 - protein, 38 aa, Artificial Sequence; identical to SEQ ID NO: 5807
  Cyclic GFR-binding peptide
  MOD_RES (3)..(4)..(37): Xaa is C or S

SEQ ID NO: 44219 - protein, 39 aa, Artificial Sequence; identical to SEQ ID NO: 5808
  Cyclic GFR-binding peptide
  MOD_RES (6)..(7)..(39): Xaa is C or S

SEQ ID NO: 44220 - protein, 29 aa, Artificial Sequence
  Cyclic GFR-binding peptide
RPTQVQLSATSVLYYEIVRKKPIFLRKHR

SEQ ID NO: 44221 - protein, 32 aa, Artificial Sequence
  Cyclic GFR-binding peptide
  MOD_RES (30)..(32): Xaa is C or S
TQLSPISVLYKDDSSNVILKYHYNMVVRAXGX

SEQ ID NO: 44222 - protein, 35 aa, Artificial Sequence
  Cyclic GFR-binding peptide
  MOD_RES (5)..(6): Xaa is C or S
SASPXXVPQDLSPISILYKVGRTPKVLKYHYMVVK

SEQ ID NO: 44223 - protein, 32 aa, Artificial Sequence
  Cyclic GFR-binding peptide
  MOD_RES (4)..(5): Xaa is C or S
PKPXXAPTKLSATSVLYYDDSSNVILRKHRNM

SEQ ID NO: 44224 - protein, 31 aa, Artificial Sequence
  Cyclic GFR-binding peptide
  MOD_RES (30)..(30): Xaa is C or S
TKLSPISVLYKDDSSNVILKYHYNMVVRSXG

SEQ ID NO: 44225 - protein, 23 aa, Artificial Sequence
  Cyclic GFR-binding peptide
LSATSILYYVGRKPKVLRKHRMI

SEQ ID NO: 44226 - protein, 38 aa, Artificial Sequence; identical to SEQ ID NO: 5809
  Cyclic GFR-binding peptide
  MOD_RES (3)..(4)..(36)..(38): Xaa is C or S

SEQ ID NO: 44227 - protein, 28 aa, Artificial Sequence
  Cyclic GFR-binding peptide
ELSPISMLYKDEYDKVVLKYHYEMVVEG

SEQ ID NO: 44228 - protein, 33 aa, Artificial Sequence; identical to SEQ ID NO: 5811
  Cyclic GFR-binding peptide
  MOD_RES (2)..(2): Xaa is C or S

SEQ ID NO: 44229 - protein, 23 aa, Artificial Sequence
  Cyclic GFR-binding peptide
SAISVLYLEIVRKKPIFLKNYQT

SEQ ID NO: 44230 - protein, 31 aa, Artificial Sequence
  Cyclic GFR-binding peptide
  MOD_RES (5)..(6): Xaa is C or S
SASPXXVPQDLSAISILYLVGRTPKVLKNYQ

SEQ ID NO: 44231 - protein, 24 aa, Artificial Sequence
  Cyclic GFR-binding peptide
QDLSATSILYYIGKTPKILRKHRM

SEQ ID NO: 44232 - protein, 22 aa, Artificial Sequence
  Cyclic GFR-binding peptide
SPISILYKIGKTPKILKYHYMI

SEQ ID NO: 44233 - protein, 31 aa, Artificial Sequence
  Cyclic GFR-binding peptide
  MOD_RES (5)..(6): Xaa is C or S
SASPXXVPQDLSATSILYYVGRTPKVLRKHR

SEQ ID NO: 44234 - protein, 32 aa, Artificial Sequence; identical to SEQ ID NO: 5814
  Cyclic GFR-binding peptide
  MOD_RES (31)..(31): Xaa is C or S

SEQ ID NO: 44235 - protein, 29 aa, Artificial Sequence
  Cyclic GFR-binding peptide
  MOD_RES (3)..(4): Xaa is C or S
KAXXAPTKLNAISVLYFDSSNNVILKKYR

SEQ ID NO: 44236 - protein, 23 aa, Artificial Sequence
  Cyclic GFR-binding peptide
DLSAISILYLIGKTPKILKNYQM

SEQ ID NO: 44237 - protein, 25 aa, Artificial Sequence
  Cyclic GFR-binding peptide
TQLSPISVLYKDDSSNVILKYHYNM

SEQ ID NO: 44238 - protein, 39 aa, Artificial Sequence; identical to SEQ ID NO: 5819
  Cyclic GFR-binding peptide
  MOD_RES (5)..(6)..(37)..(39): Xaa is C or S

SEQ ID NO: 44239 - protein, 30 aa, Artificial Sequence
  Cyclic GFR-binding peptide
  MOD_RES (28)..(30): Xaa is C or S
LSPISVLYKDSSNNVILKYHYNMVVKAXGX

SEQ ID NO: 44240 - protein, 32 aa, Artificial Sequence
  Cyclic GFR-binding peptide
  MOD_RES (6)..(7): Xaa is C or S
SIPKAXXVPTELNAISMLYFDEYDKVVLKKYR

SEQ ID NO: 44241 - protein, 27 aa, Artificial Sequence
  Cyclic GFR-binding peptide
  MOD_RES (27)..(27): Xaa is C or S
LSPISILYKIGKTPKILKYHYMIVKSX

SEQ ID NO: 44242 - protein, 28 aa, Artificial Sequence
  Cyclic GFR-binding peptide
VPTKLNAISVLYFDDMGVPTLKKYREGM

SEQ ID NO: 44243 - protein, 28 aa, Artificial Sequence
  Cyclic GFR-binding peptide
  MOD_RES (28)..(28): Xaa is C or S
DLSATSILYYVGRTPKVLRKHRMVVKSX

SEQ ID NO: 44244 - protein, 28 aa, Artificial Sequence
  Cyclic GFR-binding peptide
  MOD_RES (1)..(2): Xaa is C or S
XXVSQDLNAISILYFIGKTPKILKKYRM

SEQ ID NO: 44245 - protein, 33 aa, Artificial Sequence; identical to SEQ ID NO: 5821
  Cyclic GFR-binding peptide

SEQ ID NO: 44246 - protein, 24 aa, Artificial Sequence
  Cyclic GFR-binding peptide
KLSPISVLYKDSSNNVILKYHYNM

SEQ ID NO: 44247 - protein, 35 aa, Artificial Sequence; identical to SEQ ID NO: 5822
  Cyclic GFR-binding peptide
  MOD_RES (2)..(34): Xaa is C or S

SEQ ID NO: 44248 - protein, 30 aa, Artificial Sequence
  Cyclic GFR-binding peptide
PTKLNAISVLYFDSSNNVILKKYRNMVVKA

SEQ ID NO: 44249 - protein, 36 aa, Artificial Sequence; identical to SEQ ID NO: 5823
  Cyclic GFR-binding peptide
  MOD_RES (3)..(4)..(36): Xaa is C or S

SEQ ID NO: 44250 - protein, 28 aa, Artificial Sequence
  Cyclic GFR-binding peptide
TELNAISMLYFDEYDKVVLKKYREMVVE

SEQ ID NO: 44251 - protein, 28 aa, Artificial Sequence
  Cyclic GFR-binding peptide
NAISVLYFEIVRKKPIFLKKYRTLEDHL

SEQ ID NO: 44252 - protein, 34 aa, Artificial Sequence; identical to SEQ ID NO: 5827
  Cyclic GFR-binding peptide
  MOD_RES (2)..(3): Xaa is C or S

SEQ ID NO: 44253 - protein, 34 aa, Artificial Sequence
  Cyclic GFR-binding peptide
  MOD_RES (5)..(6): Xaa is C or S
VPKPXXAPTQLSAISVLYLDDSSNVILKNYQNMV

SEQ ID NO: 44254 - protein, 29 aa, Artificial Sequence
  Cyclic GFR-binding peptide
  MOD_RES (29)..(29): Xaa is C or S
ELSPISMLYKDENEKVVLKYHYDMVVEGX

SEQ ID NO: 44255 - protein, 36 aa, Artificial Sequence
  Cyclic GFR-binding peptide
  MOD_RES (6)..(7): Xaa is C or S
TVPKPXXAPTQLSPISVLYKDDSSNVILKYHYNMVV

SEQ ID NO: 44256 - protein, 39 aa, Artificial Sequence; identical to SEQ ID NO: 5830
  Cyclic GFR-binding peptide
  MOD_RES (5)..(5): Xaa is C or S

SEQ ID NO: 44257 - protein, 33 aa, Artificial Sequence; identical to SEQ ID NO: 5831
  Cyclic GFR-binding peptide
  MOD_RES (32)..(32): Xaa is C or S

SEQ ID NO: 44258 - protein, 27 aa, Artificial Sequence
  Cyclic GFR-binding peptide
  MOD_RES (26)..(26): Xaa is C or S
SATSILYYIGKTPKILRKHRMIVKSXK

SEQ ID NO: 44259 - protein, 36 aa, Artificial Sequence; identical to SEQ ID NO: 5832
  Cyclic GFR-binding peptide
  MOD_RES (1)..(2)..(34)..(36): Xaa is C or S

SEQ ID NO: 44260 - protein, 30 aa, Artificial Sequence
  Cyclic GFR-binding peptide
  MOD_RES (27)..(29): Xaa is C or S
SATSMLYYDEYDKVVLRKHREMVVEGXGXR

SEQ ID NO: 44261 - protein, 28 aa, Artificial Sequence
  Cyclic GFR-binding peptide
TKLSPISVLYKDSSNNVILKYHYNMVVK

SEQ ID NO: 44262 - protein, 37 aa, Artificial Sequence; identical to SEQ ID NO: 5833
  Cyclic GFR-binding peptide
  MOD_RES (4)..(5)..(36): Xaa is C or S

SEQ ID NO: 44263 - protein, 33 aa, Artificial Sequence
  Cyclic GFR-binding peptide
RPTQVQLSAISVLYLEIVRKKPIFLKNYQTLED

SEQ ID NO: 44264 - protein, 26 aa, Artificial Sequence
  Cyclic GFR-binding peptide
  MOD_RES (26)..(26): Xaa is C or S
NAISILYFVGRTPKVLKKYRMVVKSX

SEQ ID NO: 44265 - protein, 41 aa, Artificial Sequence; identical to SEQ ID NO: 5836
  Cyclic GFR-binding peptide
  MOD_RES (5)..(6)..(38)..(40): Xaa is C or S

SEQ ID NO: 44266 - protein, 28 aa, Artificial Sequence
  Cyclic GFR-binding peptide
PTKLSPISVLYKDSSNNVILKYHYNMVV

SEQ ID NO: 44267 - protein, 35 aa, Artificial Sequence; identical to SEQ ID NO: 5838
  Cyclic GFR-binding peptide
  MOD_RES (1)..(2)..(34): Xaa is C or S

SEQ ID NO: 44268 - protein, 35 aa, Artificial Sequence; identical to SEQ ID NO: 5839
  Cyclic GFR-binding peptide
  MOD_RES (3)..(4): Xaa is C or S

SEQ ID NO: 44269 - protein, 24 aa, Artificial Sequence
  Cyclic GFR-binding peptide
LNAISILYFIGKTPKILKKYRMIV

SEQ ID NO: 44270 - protein, 25 aa, Artificial Sequence
  Cyclic GFR-binding peptide
KLSPISVLYKDSSNNVILKYHYNMV

SEQ ID NO: 44271 - protein, 34 aa, Artificial Sequence; identical to SEQ ID NO: 5841
  Cyclic GFR-binding peptide
  MOD_RES (2)..(34): Xaa is C or S

SEQ ID NO: 44272 - protein, 28 aa, Artificial Sequence
  Cyclic GFR-binding peptide
  MOD_RES (27)..(27): Xaa is C or S
LSAISILYLVGRTPKVLKNYQMVVKSXK

SEQ ID NO: 44273 - protein, 35 aa, Artificial Sequence; identical to SEQ ID NO: 5843
  Cyclic GFR-binding peptide
  MOD_RES (1)..(2)..(34): Xaa is C or S

SEQ ID NO: 44274 - protein, 33 aa, Artificial Sequence; identical to SEQ ID NO: 5845
  Cyclic GFR-binding peptide
  MOD_RES (2)..(3): Xaa is C or S

SEQ ID NO: 44275 - protein, 36 aa, Artificial Sequence; identical to SEQ ID NO: 5844
  Cyclic GFR-binding peptide
  MOD_RES (4)..(5): Xaa is C or S

SEQ ID NO: 44276 - protein, 23 aa, Artificial Sequence
  Cyclic GFR-binding peptide
TKLSATSVLYYDDMGVPTLRKHR

SEQ ID NO: 44277 - protein, 36 aa, Artificial Sequence
  Cyclic GFR-binding peptide
  MOD_RES (6)..(7): Xaa is C or S
TVPKPXXAPTQLSATSVLYYDDSSNVILRKHRNMVV

SEQ ID NO: 44278 - protein, 27 aa, Artificial Sequence
  Cyclic GFR-binding peptide
VPTKLSAISVLYLDDMGVPTLKNYQEG

SEQ ID NO: 44279 - protein, 27 aa, Artificial Sequence
  Cyclic GFR-binding peptide
PQALSPISILYKVGRKPKVLKYHYMIV

SEQ ID NO: 44280 - protein, 34 aa, Artificial Sequence; identical to SEQ ID NO: 5848
  Cyclic GFR-binding peptide
  MOD_RES (31)..(33): Xaa is C or S

SEQ ID NO: 44281 - protein, 38 aa, Artificial Sequence; identical to SEQ ID NO: 5849
  Cyclic GFR-binding peptide
  MOD_RES (5)..(6): Xaa is C or S

SEQ ID NO: 44282 - protein, 29 aa, Artificial Sequence
  Cyclic GFR-binding peptide
PTKLSAISVLYLDSSNNVILKNYQNMVVK

SEQ ID NO: 44283 - protein, 28 aa, Artificial Sequence
  Cyclic GFR-binding peptide
  MOD_RES (27)..(27): Xaa is C or S
LSPISILYKVGRKPKVLKYHYMIVRSXK

SEQ ID NO: 44284 - protein, 38 aa, Artificial Sequence; identical to SEQ ID NO: 5851
  Cyclic GFR-binding peptide
  MOD_RES (3)..(4)..(36)..(38): Xaa is C or S

SEQ ID NO: 44285 - protein, 36 aa, Artificial Sequence; identical to SEQ ID NO: 5852
  Cyclic GFR-binding peptide
  MOD_RES (1)..(33)..(35): Xaa is C or S

SEQ ID NO: 44286 - protein, 31 aa, Artificial Sequence
  Cyclic GFR-binding peptide
  MOD_RES (29)..(31): Xaa is C or S
LSAISVLYLDDMGVPTLKNYQEGMSVAEXGX

SEQ ID NO: 44287 - protein, 33 aa, Artificial Sequence
  Cyclic GFR-binding peptide
  MOD_RES (6)..(7): Xaa is C or S
TVPKPXXAPTQLSPISVLYKDDSSNVILKYHYN

SEQ ID NO: 44288 - protein, 30 aa, Artificial Sequence
  Cyclic GFR-binding peptide
  MOD_RES (1)..(1): Xaa is C or S
XAPTKLSATSVLYYDDSSNVILRKHRNMVV

SEQ ID NO: 44289 - protein, 32 aa, Artificial Sequence
  Cyclic GFR-binding peptide
  MOD_RES (4)..(5): Xaa is C or S
PKPXXAPTKLSPISVLYKDDSSNVILKYHYNM

SEQ ID NO: 44290 - protein, 40 aa, Artificial Sequence; identical to SEQ ID NO: 5853
  Cyclic GFR-binding peptide
  MOD_RES (5)..(6)..(38)..(40): Xaa is C or S

SEQ ID NO: 44291 - protein, 26 aa, Artificial Sequence
  Cyclic GFR-binding peptide
VPQDLSAISILYLVGRTPKVLKNYQM

SEQ ID NO: 44292 - protein, 34 aa, Artificial Sequence; identical to SEQ ID NO: 5855
  Cyclic GFR-binding peptide
  MOD_RES (2)..(3): Xaa is C or S

SEQ ID NO: 44293 - protein, 27 aa, Artificial Sequence
  Cyclic GFR-binding peptide
  MOD_RES (1)..(1): Xaa is C or S
XVSQDLSAISILYLIGKTPKILKNYQM

SEQ ID NO: 44294 - protein, 27 aa, Artificial Sequence
  Cyclic GFR-binding peptide
QLSPISVLYKEIVRKKPIFLKYHYTLE

SEQ ID NO: 44295 - protein, 27 aa, Artificial Sequence
  Cyclic GFR-binding peptide
  MOD_RES (27)..(27): Xaa is C or S
SATSVLYYDDSSNVILRKHRNMVVRAX

SEQ ID NO: 44296 - protein, 39 aa, Artificial Sequence; identical to SEQ ID NO: 5856
  Cyclic GFR-binding peptide
  MOD_RES (4)..(5)..(38): Xaa is C or S

SEQ ID NO: 44297 - protein, 29 aa, Artificial Sequence
  Cyclic GFR-binding peptide
  MOD_RES (1)..(2): Xaa is C or S
XXVPQALNAISILYFVGRKPKVLKKYRMI

SEQ ID NO: 44298 - protein, 35 aa, Artificial Sequence; identical to SEQ ID NO: 5857
  Cyclic GFR-binding peptide
  MOD_RES (2)..(3)..(35): Xaa is C or S

SEQ ID NO: 44299 - protein, 27 aa, Artificial Sequence
  Cyclic GFR-binding peptide
QDLNAISILYFIGKTPKILKKYRMIVK

SEQ ID NO: 44300 - protein, 39 aa, Artificial Sequence; identical to SEQ ID NO: 5860
  Cyclic GFR-binding peptide
  MOD_RES (5)..(6)..(37)..(39): Xaa is C or S

SEQ ID NO: 44301 - protein, 25 aa, Artificial Sequence
  Cyclic GFR-binding peptide
DLSATSILYYIGKTPKILRKHRMIV

SEQ ID NO: 44302 - protein, 32 aa, Artificial Sequence
  Cyclic GFR-binding peptide
  MOD_RES (6)..(6): Xaa is C or S
VTKPTXAPTKLSATSVLYYDDSSNVILRKHRN

SEQ ID NO: 44303 - protein, 36 aa, Artificial Sequence
  Cyclic GFR-binding peptide
  MOD_RES (6)..(7): Xaa is C or S
KIPKAXXVPTELNAISMLYFDENEKVVLKKYRDMVV

SEQ ID NO: 44304 - protein, 31 aa, Artificial Sequence
  Cyclic GFR-binding peptide
  MOD_RES (31)..(31): Xaa is C or S
PTELSPISMLYKDEYDKVVLKYHYEMVVEGX

SEQ ID NO: 44305 - protein, 31 aa, Artificial Sequence
  Cyclic GFR-binding peptide
  MOD_RES (1)..(2): Xaa is C or S
XXVPQALSATSILYYVGRKPKVLRKHRMIVR

SEQ ID NO: 44306 - protein, 30 aa, Artificial Sequence
  Cyclic GFR-binding peptide
  MOD_RES (29)..(29): Xaa is C or S
QALSAISILYLVGRKPKVLKNYQMIVRSXK

SEQ ID NO: 44307 - protein, 34 aa, Artificial Sequence; identical to SEQ ID NO: 5866
  Cyclic GFR-binding peptide

SEQ ID NO: 44308 - protein, 31 aa, Artificial Sequence
  Cyclic GFR-binding peptide
  MOD_RES (4)..(5): Xaa is C or S
AAPXXVPQALSAISILYLVGRKPKVLKNYQM

SEQ ID NO: 44309 - protein, 36 aa, Artificial Sequence; identical to SEQ ID NO: 5871
  Cyclic GFR-binding peptide
  MOD_RES (4)..(5)..(36): Xaa is C or S

SEQ ID NO: 44310 - protein, 38 aa, Artificial Sequence; identical to SEQ ID NO: 5873
  Cyclic GFR-binding peptide
  MOD_RES (3)..(4)..(35)..(37): Xaa is C or S

SEQ ID NO: 44311 - protein, 43 aa, Artificial Sequence; identical to SEQ ID NO: 5874
  Cyclic GFR-binding peptide
  MOD_RES (5)..(42): Xaa is C or S

SEQ ID NO: 44312 - protein, 30 aa, Artificial Sequence
  Cyclic GFR-binding peptide
  MOD_RES (3)..(4): Xaa is C or S
APXXVPQALSATSILYYVGRKPKVLRKHRM

SEQ ID NO: 44313 - protein, 33 aa, Artificial Sequence; identical to SEQ ID NO: 5876
  Cyclic GFR-binding peptide
  MOD_RES (2)..(3): Xaa is C or S

SEQ ID NO: 44314 - protein, 33 aa, Artificial Sequence
  Cyclic GFR-binding peptide
  MOD_RES (6)..(7): Xaa is C or S
ASAAPXXVPQALNAISILYFVGRKPKVLKKYRM

SEQ ID NO: 44315 - protein, 29 aa, Artificial Sequence
  Cyclic GFR-binding peptide
TKLSATSVLYYDDMGVPTLRKHREGMSVA

SEQ ID NO: 44316 - protein, 30 aa, Artificial Sequence
  Cyclic GFR-binding peptide
  MOD_RES (27)..(29): Xaa is C or S
LSATSILYYVGRTPKVLRKHRMVVKSXKXS

SEQ ID NO: 44317 - protein, 42 aa, Artificial Sequence; identical to SEQ ID NO: 5877
  Cyclic GFR-binding peptide
  MOD_RES (7)..(39)..(41): Xaa is C or S

SEQ ID NO: 44318 - protein, 36 aa, Artificial Sequence; identical to SEQ ID NO: 5879
  Cyclic GFR-binding peptide
  MOD_RES (1)..(1): Xaa is C or S

SEQ ID NO: 44319 - protein, 32 aa, Artificial Sequence
  Cyclic GFR-binding peptide
  MOD_RES (30)..(32): Xaa is C or S
TELNAISMLYFDEYDKVVLKKYREMVVEGXGX

SEQ ID NO: 44320 - protein, 32 aa, Artificial Sequence
  Cyclic GFR-binding peptide
  MOD_RES (2)..(3): Xaa is C or S
PXXVPQALSAISILYLVGRKPKVLKNYQMIVR

SEQ ID NO: 44321 - protein, 27 aa, Artificial Sequence
  Cyclic GFR-binding peptide
VPQALSAISILYLVGRKPKVLKNYQMI

SEQ ID NO: 44322 - protein, 30 aa, Artificial Sequence
  Cyclic GFR-binding peptide
  MOD_RES (3)..(4): Xaa is C or S
KPXXAPTKLSAISVLYLDDSSNVILKNYQN

SEQ ID NO: 44323 - protein, 39 aa, Artificial Sequence; identical to SEQ ID NO: 5880
  Cyclic GFR-binding peptide
  MOD_RES (2)..(39): Xaa is C or S

SEQ ID NO: 44324 - protein, 34 aa, Artificial Sequence
  Cyclic GFR-binding peptide
  MOD_RES (5)..(6): Xaa is C or S
SASPXXVPQDLSAISILYLVGRTPKVLKNYQMVV

SEQ ID NO: 44325 - protein, 25 aa, Artificial Sequence
  Cyclic GFR-binding peptide
VQLSAISVLYLEIVRKKPIFLKNYQ

SEQ ID NO: 44326 - protein, 29 aa, Artificial Sequence
  Cyclic GFR-binding peptide
  MOD_RES (29)..(29): Xaa is C or S
LNAISVLYFDDMGVPTLKKYREGMSVAEX

SEQ ID NO: 44327 - protein, 34 aa, Artificial Sequence; identical to SEQ ID NO: 5881
  Cyclic GFR-binding peptide
  MOD_RES (31)..(33): Xaa is C or S

SEQ ID NO: 44328 - protein, 29 aa, Artificial Sequence
  Cyclic GFR-binding peptide
APTQLSAISVLYLDDSSNVILKNYQNMVV

SEQ ID NO: 44329 - protein, 32 aa, Artificial Sequence
  Cyclic GFR-binding peptide
  MOD_RES (5)..(6): Xaa is C or S
SAAPXXVPQALSAISILYLVGRKPKVLKNYQM

SEQ ID NO: 44330 - protein, 27 aa, Artificial Sequence
  Cyclic GFR-binding peptide
LNAISMLYFDENEKVVLKKYRDMVVEG

SEQ ID NO: 44331 - protein, 26 aa, Artificial Sequence
  Cyclic GFR-binding peptide
KLSATSVLYYDDSSNVILRKHRNMVV

SEQ ID NO: 44332 - protein, 34 aa, Artificial Sequence; identical to SEQ ID NO: 5882
  Cyclic GFR-binding peptide
  MOD_RES (1)..(2)..(34): Xaa is C or S

SEQ ID NO: 44333 - protein, 27 aa, Artificial Sequence
  Cyclic GFR-binding peptide
  MOD_RES (1)..(1): Xaa is C or S
XVPTELNAISMLYFDENEKVVLKKYRD

SEQ ID NO: 44334 - protein, 30 aa, Artificial Sequence
  Cyclic GFR-binding peptide
  MOD_RES (1)..(1): Xaa is C or S
XRPTQVQLSPISVLYKEIVRKKPIFLKYHY

SEQ ID NO: 44335 - protein, 36 aa, Artificial Sequence; identical to SEQ ID NO: 5883
  Cyclic GFR-binding peptide
  MOD_RES (4)..(5): Xaa is C or S

SEQ ID NO: 44336 - protein, 35 aa, Artificial Sequence
  Cyclic GFR-binding peptide
  MOD_RES (4)..(5): Xaa is C or S
GKAXXVPTKLNAISVLYFDDMGVPTLKKYREGMSV

SEQ ID NO: 44337 - protein, 36 aa, Artificial Sequence
  Cyclic GFR-binding peptide
  MOD_RES (34)..(36): Xaa is C or S
QVQLSPISVLYKEIVRKKPIFLKYHYTLEDHLAXKX

SEQ ID NO: 44338 - protein, 31 aa, Artificial Sequence
  Cyclic GFR-binding peptide
  MOD_RES (31)..(31): Xaa is C or S
PTELSPISMLYKDENEKVVLKYHYDMVVEGX

SEQ ID NO: 44339 - protein, 29 aa, Artificial Sequence
  Cyclic GFR-binding peptide
  MOD_RES (3)..(4): Xaa is C or S
KAXXVPTELSPISMLYKDEYDKVVLKYHY

SEQ ID NO: 44340 - protein, 27 aa, Artificial Sequence
  Cyclic GFR-binding peptide
QLNAISVLYFEIVRKKPIFLKKYRTLE

SEQ ID NO: 44341 - protein, 29 aa, Artificial Sequence
  Cyclic GFR-binding peptide
QVQLSAISVLYLEIVRKKPIFLKNYQTLE

SEQ ID NO: 44342 - protein, 27 aa, Artificial Sequence
  Cyclic GFR-binding peptide
VPQDLSATSILYYVGRTPKVLRKHRMV

SEQ ID NO: 44343 - protein, 28 aa, Artificial Sequence
  Cyclic GFR-binding peptide
  MOD_RES (1)..(1): Xaa is C or S
XAPTKLNAISVLYFDSSNNVILKKYRNM

SEQ ID NO: 44344 - protein, 27 aa, Artificial Sequence
  Cyclic GFR-binding peptide
PTKLSAISVLYLDSSNNVILKNYQNMV

SEQ ID NO: 44345 - protein, 30 aa, Artificial Sequence
  Cyclic GFR-binding peptide
  MOD_RES (30)..(30): Xaa is C or S
TKLNAISVLYFDSSNNVILKKYRNMVVKAX

SEQ ID NO: 44346 - protein, 29 aa, Artificial Sequence
  Cyclic GFR-binding peptide
  MOD_RES (1)..(2): Xaa is C or S
XXVPTKLNAISVLYFDDMGVPTLKKYREG

SEQ ID NO: 44347 - protein, 29 aa, Artificial Sequence
  Cyclic GFR-binding peptide
KLNAISVLYFDDMGVPTLKKYREGMSVAE

SEQ ID NO: 44348 - protein, 29 aa, Artificial Sequence
  Cyclic GFR-binding peptide
  MOD_RES (3)..(4): Xaa is C or S
KAXXVPTELSATSMLYYDENEKVVLRKHR

SEQ ID NO: 44349 - protein, 27 aa, Artificial Sequence
  Cyclic GFR-binding peptide
  MOD_RES (27)..(27): Xaa is C or S
LSPISILYKVGRTPKVLKYHYMVVKSX

SEQ ID NO: 44350 - protein, 26 aa, Artificial Sequence
  Cyclic GFR-binding peptide
KLNAISVLYFDDMGVPTLKKYREGMS

SEQ ID NO: 44351 - protein, 32 aa, Artificial Sequence
  Cyclic GFR-binding peptide
  MOD_RES (29)..(31): Xaa is C or S
QALSPISILYKVGRKPKVLKYHYMIVRSXKXS

SEQ ID NO: 44352 - protein, 28 aa, Artificial Sequence
  Cyclic GFR-binding peptide
QVQLSPISVLYKEIVRKKPIFLKYHYTL

SEQ ID NO: 44353 - protein, 28 aa, Artificial Sequence
  Cyclic GFR-binding peptide
  MOD_RES (27)..(27): Xaa is C or S
NAISMLYFDENEKVVLKKYRDMVVEGXG

SEQ ID NO: 44354 - protein, 20 aa, Artificial Sequence
  Cyclic GFR-binding peptide
NAISVLYFDDMGVPTLKKYR

SEQ ID NO: 44355 - protein, 35 aa, Artificial Sequence; identical to SEQ ID NO: 5886
  Cyclic GFR-binding peptide
  MOD_RES (1)..(32)..(34): Xaa is C or S

SEQ ID NO: 44356 - protein, 36 aa, Artificial Sequence; identical to SEQ ID NO: 5887
  Cyclic GFR-binding peptide
  MOD_RES (3)..(35): Xaa is C or S

SEQ ID NO: 44357 - protein, 29 aa, Artificial Sequence
  Cyclic GFR-binding peptide
  MOD_RES (28)..(28): Xaa is C or S
SATSVLYYDDMGVPTLRKHREGMSVAEXG

SEQ ID NO: 44358 - protein, 30 aa, Artificial Sequence
  Cyclic GFR-binding peptide
  MOD_RES (2)..(3): Xaa is C or S
PXXAPTKLSAISVLYLDDSSNVILKNYQNM

SEQ ID NO: 44359 - protein, 38 aa, Artificial Sequence; identical to SEQ ID NO: 5893
  Cyclic GFR-binding peptide
  MOD_RES (37)..(37): Xaa is C or S

SEQ ID NO: 44360 - protein, 38 aa, Artificial Sequence; identical to SEQ ID NO: 5894
  Cyclic GFR-binding peptide
  MOD_RES (4)..(4): Xaa is C or S

SEQ ID NO: 44361 - protein, 37 aa, Artificial Sequence; identical to SEQ ID NO: 5895
  Cyclic GFR-binding peptide
  MOD_RES (37)..(37): Xaa is C or S

SEQ ID NO: 44362 - protein, 31 aa, Artificial Sequence
  Cyclic GFR-binding peptide
  MOD_RES (4)..(5): Xaa is C or S
PKAXXVPTELSATSMLYYDENEKVVLRKHRD

SEQ ID NO: 44363 - protein, 32 aa, Artificial Sequence
  Cyclic GFR-binding peptide
  MOD_RES (31)..(31): Xaa is C or S
PTQLSAISVLYLDDSSNVILKNYQNMVVRAXG

SEQ ID NO: 44364 - protein, 40 aa, Artificial Sequence; identical to SEQ ID NO: 5896
  Cyclic GFR-binding peptide
  MOD_RES (5)..(6)..(37)..(39): Xaa is C or S

SEQ ID NO: 44365 - protein, 39 aa, Artificial Sequence; identical to SEQ ID NO: 5897
  Cyclic GFR-binding peptide
  MOD_RES (4)..(5)..(37)..(39): Xaa is C or S

SEQ ID NO: 44366 - protein, 25 aa, Artificial Sequence
  Cyclic GFR-binding peptide
PTKLSPISVLYKDDSSNVILKYHYN

SEQ ID NO: 44367 - protein, 31 aa, Artificial Sequence
  Cyclic GFR-binding peptide
  MOD_RES (1)..(2): Xaa is C or S
XXVPQALSPISILYKVGRKPKVLKYHYMIVR

SEQ ID NO: 44368 - protein, 41 aa, Artificial Sequence; identical to SEQ ID NO: 5899
  Cyclic GFR-binding peptide
  MOD_RES (6)..(7)..(39)..(41): Xaa is C or S

SEQ ID NO: 44369 - protein, 30 aa, Artificial Sequence
  Cyclic GFR-binding peptide
  MOD_RES (1)..(1): Xaa is C or S
XVPQALNAISILYFVGRKPKVLKKYRMIVR

SEQ ID NO: 44370 - protein, 28 aa, Artificial Sequence
  Cyclic GFR-binding peptide
  MOD_RES (1)..(2): Xaa is C or S
XXAPTKLSAISVLYLDDSSNVILKNYQN

SEQ ID NO: 44371 - protein, 29 aa, Artificial Sequence
  Cyclic GFR-binding peptide
  MOD_RES (28)..(28): Xaa is C or S
LSPISVLYKDDSSNVILKYHYNMVVRAXG

SEQ ID NO: 44372 - protein, 33 aa, Artificial Sequence; identical to SEQ ID NO: 5900
  Cyclic GFR-binding peptide
  MOD_RES (1)..(33): Xaa is C or S

SEQ ID NO: 44373 - protein, 33 aa, Artificial Sequence; identical to SEQ ID NO: 5902
  Cyclic GFR-binding peptide
  MOD_RES (2)..(3): Xaa is C or S

SEQ ID NO: 44374 - protein, 33 aa, Artificial Sequence
  Cyclic GFR-binding peptide
  MOD_RES (3)..(4): Xaa is C or S
SPXXVSQDLNAISILYFIGKTPKILKKYRMIVK

SEQ ID NO: 44375 - protein, 23 aa, Artificial Sequence
  Cyclic GFR-binding peptide
QDLSAISILYLVGRTPKVLKNYQ

SEQ ID NO: 44376 - protein, 41 aa, Artificial Sequence; identical to SEQ ID NO: 5904
  Cyclic GFR-binding peptide
  MOD_RES (6)..(7)..(38)..(40): Xaa is C or S

SEQ ID NO: 44377 - protein, 37 aa, Artificial Sequence; identical to SEQ ID NO: 5906
  Cyclic GFR-binding peptide
  MOD_RES (6)..(6): Xaa is C or S

SEQ ID NO: 44378 - protein, 30 aa, Artificial Sequence
  Cyclic GFR-binding peptide
  MOD_RES (28)..(30): Xaa is C or S
LSATSMLYYDEYDKVVLRKHREMVVEGXGX

SEQ ID NO: 44379 - protein, 31 aa, Artificial Sequence; identical to SEQ ID NO: 5905
  Cyclic GFR-binding peptide
  MOD_RES (1)..(1): Xaa is C or S

SEQ ID NO: 44380 - protein, 34 aa, Artificial Sequence
  Cyclic GFR-binding peptide
  MOD_RES (5)..(6): Xaa is C or S
VPKPXXAPTQLSATSVLYYDDSSNVILRKHRNMV

SEQ ID NO: 44381 - protein, 35 aa, Artificial Sequence; identical to SEQ ID NO: 5909
  Cyclic GFR-binding peptide

SEQ ID NO: 44382 - protein, 37 aa, Artificial Sequence; identical to SEQ ID NO: 5911
  Cyclic GFR-binding peptide
  MOD_RES (36)..(36): Xaa is C or S

SEQ ID NO: 44383 - protein, 26 aa, Artificial Sequence
  Cyclic GFR-binding peptide
DLSAISILYLIGKTPKILKNYQMIVK

SEQ ID NO: 44384 - protein, 37 aa, Artificial Sequence; identical to SEQ ID NO: 5913
  Cyclic GFR-binding peptide
  MOD_RES (4)..(5)..(37): Xaa is C or S

SEQ ID NO: 44385 - protein, 37 aa, Artificial Sequence; identical to SEQ ID NO: 5916
  Cyclic GFR-binding peptide
  MOD_RES (5)..(6): Xaa is C or S

SEQ ID NO: 44386 - protein, 32 aa, Artificial Sequence
  Cyclic GFR-binding peptide
  MOD_RES (30)..(32): Xaa is C or S
KLSATSVLYYDDMGVPTLRKHREGMSVAEXGX

SEQ ID NO: 44387 - protein, 30 aa, Artificial Sequence
  Cyclic GFR-binding peptide
  MOD_RES (1)..(1): Xaa is C or S
XRPTQVQLSATSVLYYEIVRKKPIFLRKHR

SEQ ID NO: 44388 - protein, 32 aa, Artificial Sequence
  Cyclic GFR-binding peptide
  MOD_RES (31)..(31): Xaa is C or S
PTKLSAISVLYLDDSSNVILKNYQNMVVRSXG

SEQ ID NO: 44389 - protein, 33 aa, Artificial Sequence
  Cyclic GFR-binding peptide
  MOD_RES (5)..(6): Xaa is C or S
VPKPXXAPTKLSAISVLYLDDSSNVILKNYQNM

SEQ ID NO: 44390 - protein, 37 aa, Artificial Sequence; identical to SEQ ID NO: 5917
  Cyclic GFR-binding peptide
  MOD_RES (6)..(7): Xaa is C or S

SEQ ID NO: 44391 - protein, 34 aa, Artificial Sequence
  Cyclic GFR-binding peptide
  MOD_RES (31)..(33): Xaa is C or S
PTQLSATSVLYYDDSSNVILRKHRNMVVRAXGXH

SEQ ID NO: 44392 - protein, 35 aa, Artificial Sequence; identical to SEQ ID NO: 5919
  Cyclic GFR-binding peptide

SEQ ID NO: 44393 - protein, 32 aa, Artificial Sequence; identical to SEQ ID NO: 5921
  Cyclic GFR-binding peptide
  MOD_RES (32)..(32): Xaa is C or S

SEQ ID NO: 44394 - protein, 37 aa, Artificial Sequence; identical to SEQ ID NO: 5920
  Cyclic GFR-binding peptide
  MOD_RES (5)..(37): Xaa is C or S

SEQ ID NO: 44395 - protein, 39 aa, Artificial Sequence; identical to SEQ ID NO: 5923
  Cyclic GFR-binding peptide
  MOD_RES (5)..(6)..(38): Xaa is C or S

SEQ ID NO: 44396 - protein, 28 aa, Artificial Sequence
  Cyclic GFR-binding peptide
KLSPISVLYKDDSSNVILKYHYNMVVRS

SEQ ID NO: 44397 - protein, 31 aa, Artificial Sequence
  Cyclic GFR-binding peptide
  MOD_RES (3)..(4): Xaa is C or S
KAXXAPTKLSAISVLYLDSSNNVILKNYQNM

SEQ ID NO: 44398 - protein, 39 aa, Artificial Sequence; identical to SEQ ID NO: 5925
  Cyclic GFR-binding peptide
  MOD_RES (4)..(5)..(36)..(38): Xaa is C or S

SEQ ID NO: 44399 - protein, 33 aa, Artificial Sequence
  Cyclic GFR-binding peptide
  MOD_RES (6)..(7): Xaa is C or S
AVPKAXXAPTKLSAISVLYLDSSNNVILKNYQN

SEQ ID NO: 44400 - protein, 27 aa, Artificial Sequence
  Cyclic GFR-binding peptide
VSQDLSATSILYYIGKTPKILRKHRMI

SEQ ID NO: 44401 - protein, 29 aa, Artificial Sequence
  Cyclic GFR-binding peptide
VPQALSPISILYKVGRKPKVLKYHYMIVR

SEQ ID NO: 44402 - protein, 31 aa, Artificial Sequence
  Cyclic GFR-binding peptide
  MOD_RES (28)..(30): Xaa is C or S
LSAISVLYLDDSSNVILKNYQNMVVRAXGXH

SEQ ID NO: 44403 - protein, 24 aa, Artificial Sequence
  Cyclic GFR-binding peptide
SPISILYKVGRKPKVLKYHYMIVR

SEQ ID NO: 44404 - protein, 22 aa, Artificial Sequence
  Cyclic GFR-binding peptide
KLSATSVLYYDDSSNVILRKHR

SEQ ID NO: 44405 - protein, 35 aa, Artificial Sequence; identical to SEQ ID NO: 5931
  Cyclic GFR-binding peptide
  MOD_RES (1)..(32)..(34): Xaa is C or S

SEQ ID NO: 44406 - protein, 35 aa, Artificial Sequence; identical to SEQ ID NO: 5933
  Cyclic GFR-binding peptide
  MOD_RES (1)..(2)..(33)..(35): Xaa is C or S

SEQ ID NO: 44407 - protein, 28 aa, Artificial Sequence
  Cyclic GFR-binding peptide
  MOD_RES (1)..(2): Xaa is C or S
XXVPQDLNAISILYFVGRTPKVLKKYRM

SEQ ID NO: 44408 - protein, 37 aa, Artificial Sequence; identical to SEQ ID NO: 5932
  Cyclic GFR-binding peptide
  MOD_RES (4)..(5)..(36): Xaa is C or S

SEQ ID NO: 44409 - protein, 32 aa, Artificial Sequence
  Cyclic GFR-binding peptide
  MOD_RES (29)..(31): Xaa is C or S
ELSPISMLYKDENEKVVLKYHYDMVVEGXGXR

SEQ ID NO: 44410 - protein, 28 aa, Artificial Sequence
  Cyclic GFR-binding peptide
VSQDLSAISILYLIGKTPKILKNYQMIV

SEQ ID NO: 44411 - protein, 37 aa, Artificial Sequence
  Cyclic GFR-binding peptide
  MOD_RES (5)..(6): Xaa is C or S
VGKAXXVPTKLNAISVLYFDDMGVPTLKKYREGMSVA

SEQ ID NO: 44412 - protein, 28 aa, Artificial Sequence
  Cyclic GFR-binding peptide
  MOD_RES (1)..(2): Xaa is C or S
XXVPQALSPISILYKVGRKPKVLKYHYM

SEQ ID NO: 44413 - protein, 38 aa, Artificial Sequence; identical to SEQ ID NO: 5937
  Cyclic GFR-binding peptide
  MOD_RES (1)..(38): Xaa is C or S

SEQ ID NO: 44414 - protein, 29 aa, Artificial Sequence
  Cyclic GFR-binding peptide
  MOD_RES (26)..(28): Xaa is C or S
SATSILYYVGRKPKVLRKHRMIVRSXKXS

SEQ ID NO: 44415 - protein, 24 aa, Artificial Sequence
  Cyclic GFR-binding peptide
SAISVLYLDSSNNVILKNYQNMVV

SEQ ID NO: 44416 - protein, 23 aa, Artificial Sequence
  Cyclic GFR-binding peptide
LNAISVLYFEIVRKKPIFLKKYR

SEQ ID NO: 44417 - protein, 34 aa, Artificial Sequence; identical to SEQ ID NO: 5940
  Cyclic GFR-binding peptide
  MOD_RES (4)..(4): Xaa is C or S

SEQ ID NO: 44418 - protein, 31 aa, Artificial Sequence; identical to SEQ ID NO: 5942
  Cyclic GFR-binding peptide
  MOD_RES (1)..(1): Xaa is C or S

SEQ ID NO: 44419 - protein, 24 aa, Artificial Sequence
  Cyclic GFR-binding peptide
QALSAISILYLVGRKPKVLKNYQM

SEQ ID NO: 44420 - protein, 35 aa, Artificial Sequence
  Cyclic GFR-binding peptide
  MOD_RES (6)..(7): Xaa is C or S
ASASPXXVSQDLSATSILYYIGKTPKILRKHRMIV

SEQ ID NO: 44421 - protein, 26 aa, Artificial Sequence
  Cyclic GFR-binding peptide
LSATSILYYIGKTPKILRKHRMIVKS

SEQ ID NO: 44422 - protein, 35 aa, Artificial Sequence
  Cyclic GFR-binding peptide
  MOD_RES (5)..(6): Xaa is C or S
VPKPXXAPTKLSATSVLYYDDSSNVILRKHRNMVV

SEQ ID NO: 44423 - protein, 24 aa, Artificial Sequence
  Cyclic GFR-binding peptide
KLSAISVLYLDSSNNVILKNYQNM

SEQ ID NO: 44424 - protein, 30 aa, Artificial Sequence
  Cyclic GFR-binding peptide
  MOD_RES (1)..(1): Xaa is C or S
XAPTQLSAISVLYLDDSSNVILKNYQNMVV

SEQ ID NO: 44425 - protein, 34 aa, Artificial Sequence
  Cyclic GFR-binding peptide
  MOD_RES (6)..(7): Xaa is C or S
AVPKAXXAPTKLSAISVLYLDSSNNVILKNYQNM

SEQ ID NO: 44426 - protein, 34 aa, Artificial Sequence
  Cyclic GFR-binding peptide
  MOD_RES (5)..(6): Xaa is C or S
VPKAXXAPTKLNAISVLYFDSSNNVILKKYRNMV

SEQ ID NO: 44427 - protein, 37 aa, Artificial Sequence; identical to SEQ ID NO: 5945
  Cyclic GFR-binding peptide
  MOD_RES (6)..(7): Xaa is C or S

SEQ ID NO: 44428 - protein, 30 aa, Artificial Sequence
  Cyclic GFR-binding peptide
  MOD_RES (30)..(30): Xaa is C or S
PQALSAISILYLVGRKPKVLKNYQMIVRSX

SEQ ID NO: 44429 - protein, 28 aa, Artificial Sequence
  Cyclic GFR-binding peptide
  MOD_RES (28)..(28): Xaa is C or S
ALSAISILYLVGRKPKVLKNYQMIVRSX

SEQ ID NO: 44430 - protein, 29 aa, Artificial Sequence
  Cyclic GFR-binding peptide
  MOD_RES (29)..(29): Xaa is C or S
QDLSAISILYLVGRTPKVLKNYQMVVKSX

SEQ ID NO: 44431 - protein, 29 aa, Artificial Sequence
  Cyclic GFR-binding peptide
  MOD_RES (3)..(3): Xaa is C or S
PTXAPTKLSAISVLYLDDSSNVILKNYQN

SEQ ID NO: 44432 - protein, 24 aa, Artificial Sequence
  Cyclic GFR-binding peptide
SATSILYYVGRKPKVLRKHRMIVR

SEQ ID NO: 44433 - protein, 33 aa, Artificial Sequence
  Cyclic GFR-binding peptide
  MOD_RES (3)..(4): Xaa is C or S
APXXVPQALSATSILYYVGRKPKVLRKHRMIVR

SEQ ID NO: 44434 - protein, 35 aa, Artificial Sequence
  Cyclic GFR-binding peptide
  MOD_RES (2)..(2): Xaa is C or S
QXRPTQVQLSPISVLYKEIVRKKPIFLKYHYTLED

SEQ ID NO: 44435 - protein, 26 aa, Artificial Sequence
  Cyclic GFR-binding peptide
VQLSPISVLYKEIVRKKPIFLKYHYT

SEQ ID NO: 44436 - protein, 31 aa, Artificial Sequence
  Cyclic GFR-binding peptide
  MOD_RES (5)..(6): Xaa is C or S
SASPXXVSQDLSATSILYYIGKTPKILRKHR

SEQ ID NO: 44437 - protein, 35 aa, Artificial Sequence
  Cyclic GFR-binding peptide
  MOD_RES (3)..(3): Xaa is C or S
VQXRPTQVQLSATSVLYYEIVRKKPIFLRKHRTLE

SEQ ID NO: 44438 - protein, 29 aa, Artificial Sequence
  Cyclic GFR-binding peptide
  MOD_RES (1)..(2): Xaa is C or S
XXAPTQLSATSVLYYDDSSNVILRKHRNM

SEQ ID NO: 44439 - protein, 35 aa, Artificial Sequence; identical to SEQ ID NO: 5949
  Cyclic GFR-binding peptide
  MOD_RES (2)..(3)..(35): Xaa is C or S

SEQ ID NO: 44440 - protein, 29 aa, Artificial Sequence
  Cyclic GFR-binding peptide
  MOD_RES (28)..(28): Xaa is C or S
LNAISMLYFDENEKVVLKKYRDMVVEGXG

SEQ ID NO: 44441 - protein, 30 aa, Artificial Sequence
  Cyclic GFR-binding peptide
PTQLSPISVLYKDDSSNVILKYHYNMVVRA

SEQ ID NO: 44442 - protein, 32 aa, Artificial Sequence
  Cyclic GFR-binding peptide
  MOD_RES (3)..(4): Xaa is C or S
KAXXVPTKLNAISVLYFDDMGVPTLKKYREGM

SEQ ID NO: 44443 - protein, 36 aa, Artificial Sequence
  Cyclic GFR-binding peptide
  MOD_RES (6)..(7): Xaa is C or S
YVPKPXXAPTKLSPISVLYKDDSSNVILKYHYNMVV

SEQ ID NO: 44444 - protein, 24 aa, Artificial Sequence
  Cyclic GFR-binding peptide
PTKLSATSVLYYDDMGVPTLRKHR

SEQ ID NO: 44445 - protein, 26 aa, Artificial Sequence
  Cyclic GFR-binding peptide
  MOD_RES (26)..(26): Xaa is C or S
SAISILYLVGRKPKVLKNYQMIVRSX

SEQ ID NO: 44446 - protein, 35 aa, Artificial Sequence; identical to SEQ ID NO: 5950
  Cyclic GFR-binding peptide
  MOD_RES (4)..(4): Xaa is C or S

SEQ ID NO: 44447 - protein, 29 aa, Artificial Sequence
  Cyclic GFR-binding peptide
  MOD_RES (2)..(3): Xaa is C or S
PXXAPTQLSPISVLYKDDSSNVILKYHYN

SEQ ID NO: 44448 - protein, 33 aa, Artificial Sequence
  Cyclic GFR-binding peptide
  MOD_RES (3)..(3): Xaa is C or S
VQXRPTQVQLSAISVLYLEIVRKKPIFLKNYQT

SEQ ID NO: 44449 - protein, 36 aa, Artificial Sequence
  Cyclic GFR-binding peptide
  MOD_RES (6)..(7): Xaa is C or S
ASASPXXVPQDLSAISILYLVGRTPKVLKNYQMVVK

SEQ ID NO: 44450 - protein, 36 aa, Artificial Sequence; identical to SEQ ID NO: 5952
  Cyclic GFR-binding peptide
  MOD_RES (2)..(34)..(36): Xaa is C or S

SEQ ID NO: 44451 - protein, 36 aa, Artificial Sequence; identical to SEQ ID NO: 5953
  Cyclic GFR-binding peptide
  MOD_RES (36)..(36): Xaa is C or S

SEQ ID NO: 44452 - protein, 38 aa, Artificial Sequence; identical to SEQ ID NO: 5955
  Cyclic GFR-binding peptide
  MOD_RES (5)..(6)..(38): Xaa is C or S

SEQ ID NO: 44453 - protein, 21 aa, Artificial Sequence
  Cyclic GFR-binding peptide
NAISMLYFDENEKVVLKKYRD

SEQ ID NO: 44454 - protein, 30 aa, Artificial Sequence
  Cyclic GFR-binding peptide
  MOD_RES (28)..(30): Xaa is C or S
LSPISMLYKDEYDKVVLKYHYEMVVEGXGX

SEQ ID NO: 44455 - protein, 36 aa, Artificial Sequence
  Cyclic GFR-binding peptide
  MOD_RES (33)..(35): Xaa is C or S
VQLSAISVLYLEIVRKKPIFLKNYQTLEDHLAXKXE

SEQ ID NO: 44456 - protein, 32 aa, Artificial Sequence; identical to SEQ ID NO: 5958
  Cyclic GFR-binding peptide
  MOD_RES (1)..(2): Xaa is C or S

SEQ ID NO: 44457 - protein, 28 aa, Artificial Sequence
  Cyclic GFR-binding peptide
  MOD_RES (2)..(3): Xaa is C or S
PXXAPTKLSATSVLYYDDSSNVILRKHR

SEQ ID NO: 44458 - protein, 36 aa, Artificial Sequence; identical to SEQ ID NO: 5959
  Cyclic GFR-binding peptide
  MOD_RES (4)..(5): Xaa is C or S

SEQ ID NO: 44459 - protein, 30 aa, Artificial Sequence
  Cyclic GFR-binding peptide
  MOD_RES (3)..(4): Xaa is C or S
KAXXVPTELNAISMLYFDEYDKVVLKKYRE

SEQ ID NO: 44460 - protein, 29 aa, Artificial Sequence
  Cyclic GFR-binding peptide
  MOD_RES (2)..(3): Xaa is C or S
PXXVPQDLSAISILYLVGRTPKVLKNYQM

SEQ ID NO: 44461 - protein, 28 aa, Artificial Sequence
  Cyclic GFR-binding peptide
VPTKLSATSVLYYDDMGVPTLRKHREGM

SEQ ID NO: 44462 - protein, 36 aa, Artificial Sequence
  Cyclic GFR-binding peptide
  MOD_RES (6)..(7): Xaa is C or S
YVPKPXXAPTKLSATSVLYYDDSSNVILRKHRNMVV

SEQ ID NO: 44463 - protein, 27 aa, Artificial Sequence
  Cyclic GFR-binding peptide
APTKLSAISVLYLDSSNNVILKNYQNM

SEQ ID NO: 44464 - protein, 29 aa, Artificial Sequence
  Cyclic GFR-binding peptide
QLSATSVLYYEIVRKKPIFLRKHRTLEDH

SEQ ID NO: 44465 - protein, 24 aa, Artificial Sequence
  Cyclic GFR-binding peptide
ELNAISMLYFDEYDKVVLKKYREM

SEQ ID NO: 44466 - protein, 34 aa, Artificial Sequence; identical to SEQ ID NO: 5961
  Cyclic GFR-binding peptide
  MOD_RES (31)..(33): Xaa is C or S

SEQ ID NO: 44467 - protein, 33 aa, Artificial Sequence
  Cyclic GFR-binding peptide
  MOD_RES (1)..(2): Xaa is C or S
XXVPTKLNAISVLYFDDMGVPTLKKYREGMSVA

SEQ ID NO: 44468 - protein, 34 aa, Artificial Sequence; identical to SEQ ID NO: 5965
  Cyclic GFR-binding peptide
  MOD_RES (1)..(2)..(33): Xaa is C or S

SEQ ID NO: 44469 - protein, 28 aa, Artificial Sequence
  Cyclic GFR-binding peptide
  MOD_RES (2)..(3): Xaa is C or S
PXXVPQALSAISILYLVGRKPKVLKNYQ

SEQ ID NO: 44470 - protein, 29 aa, Artificial Sequence
  Cyclic GFR-binding peptide
PTKLSPISVLYKDSSNNVILKYHYNMVVK

SEQ ID NO: 44471 - protein, 28 aa, Artificial Sequence
  Cyclic GFR-binding peptide
  MOD_RES (28)..(28): Xaa is C or S
LNAISMLYFDENEKVVLKKYRDMVVEGX

SEQ ID NO: 44472 - protein, 30 aa, Artificial Sequence; identical to SEQ ID NO: 5966
  Cyclic GFR-binding peptide

SEQ ID NO: 44473 - protein, 25 aa, Artificial Sequence
  Cyclic GFR-binding peptide
TELSATSMLYYDENEKVVLRKHRDM

SEQ ID NO: 44474 - protein, 21 aa, Artificial Sequence
  Cyclic GFR-binding peptide
SPISILYKIGKTPKILKYHYM

SEQ ID NO: 44475 - protein, 30 aa, Artificial Sequence
  Cyclic GFR-binding peptide
  MOD_RES (1)..(2): Xaa is C or S
XXAPTQLSPISVLYKDDSSNVILKYHYNMV

SEQ ID NO: 44476 - protein, 28 aa, Artificial Sequence
  Cyclic GFR-binding peptide
  MOD_RES (27)..(27): Xaa is C or S
SPISVLYKDDSSNVILKYHYNMVVRAXG

SEQ ID NO: 44477 - protein, 28 aa, Artificial Sequence
  Cyclic GFR-binding peptide
TKLSATSVLYYDDMGVPTLRKHREGMSV

SEQ ID NO: 44478 - protein, 25 aa, Artificial Sequence
  Cyclic GFR-binding peptide
DLSPISILYKIGKTPKILKYHYMIV

SEQ ID NO: 44479 - protein, 30 aa, Artificial Sequence
  Cyclic GFR-binding peptide
  MOD_RES (5)..(5): Xaa is C or S
TKPTXAPTKLSAISVLYLDDSSNVILKNYQ

SEQ ID NO: 44480 - protein, 34 aa, Artificial Sequence
  Cyclic GFR-binding peptide
  MOD_RES (4)..(5): Xaa is C or S
GKAXXVPTKLNAISVLYFDDMGVPTLKKYREGMS

SEQ ID NO: 44481 - protein, 30 aa, Artificial Sequence; identical to SEQ ID NO: 848
  Cyclic GFR-binding peptide

SEQ ID NO: 44482 - protein, 25 aa, Artificial Sequence
  Cyclic GFR-binding peptide
VPTELNAISMLYFDENEKVVLKKYR

SEQ ID NO: 44483 - protein, 23 aa, Artificial Sequence
  Cyclic GFR-binding peptide
ALSPISILYKVGRKPKVLKYHYM

SEQ ID NO: 44484 - protein, 31 aa, Artificial Sequence
  Cyclic GFR-binding peptide
  MOD_RES (4)..(5): Xaa is C or S
ASPXXVSQDLSATSILYYIGKTPKILRKHRM

SEQ ID NO: 44485 - protein, 30 aa, Artificial Sequence
  Cyclic GFR-binding peptide
  MOD_RES (1)..(2): Xaa is C or S
XXVPQDLNAISILYFVGRTPKVLKKYRMVV

SEQ ID NO: 44486 - protein, 27 aa, Artificial Sequence
  Cyclic GFR-binding peptide
TKLSAISVLYLDDSSNVILKNYQNMVV

SEQ ID NO: 44487 - protein, 34 aa, Artificial Sequence; identical to SEQ ID NO: 5975
  Cyclic GFR-binding peptide
  MOD_RES (1)..(34): Xaa is C or S

SEQ ID NO: 44488 - protein, 24 aa, Artificial Sequence
  Cyclic GFR-binding peptide
TKLSPISVLYKDDSSNVILKYHYN

SEQ ID NO: 44489 - protein, 33 aa, Artificial Sequence
  Cyclic GFR-binding peptide
  MOD_RES (3)..(4): Xaa is C or S
KAXXAPTKLSPISVLYKDSSNNVILKYHYNMVV

SEQ ID NO: 44490 - protein, 34 aa, Artificial Sequence; identical to SEQ ID NO: 5977
  Cyclic GFR-binding peptide
  MOD_RES (4)..(4): Xaa is C or S

SEQ ID NO: 44491 - protein, 32 aa, Artificial Sequence
  Cyclic GFR-binding peptide
  MOD_RES (5)..(6): Xaa is C or S
SASPXXVSQDLSAISILYLIGKTPKILKNYQM

SEQ ID NO: 44492 - protein, 29 aa, Artificial Sequence
  Cyclic GFR-binding peptide
LSATSVLYYEIVRKKPIFLRKHRTLEDHL

SEQ ID NO: 44493 - protein, 25 aa, Artificial Sequence
  Cyclic GFR-binding peptide
NAISMLYFDENEKVVLKKYRDMVVE

SEQ ID NO: 44494 - protein, 22 aa, Artificial Sequence
  Cyclic GFR-binding peptide
LSATSMLYYDEYDKVVLRKHRE

SEQ ID NO: 44495 - protein, 25 aa, Artificial Sequence
  Cyclic GFR-binding peptide
TELSPISMLYKDENEKVVLKYHYDM

SEQ ID NO: 44496 - protein, 28 aa, Artificial Sequence
  Cyclic GFR-binding peptide
VSQDLNAISILYFIGKTPKILKKYRMIV

SEQ ID NO: 44497 - protein, 34 aa, Artificial Sequence
  Cyclic GFR-binding peptide
  MOD_RES (4)..(5): Xaa is C or S
ASPXXVSQDLSATSILYYIGKTPKILRKHRMIVK

SEQ ID NO: 44498 - protein, 32 aa, Artificial Sequence
  Cyclic GFR-binding peptide
  MOD_RES (30)..(32): Xaa is C or S
TELSATSMLYYDENEKVVLRKHRDMVVEGXGX

SEQ ID NO: 44499 - protein, 35 aa, Artificial Sequence
  Cyclic GFR-binding peptide
  MOD_RES (6)..(6): Xaa is C or S
VTKPTXAPTKLSAISVLYLDDSSNVILKNYQNMVV

SEQ ID NO: 44500 - protein, 44 aa, Artificial Sequence; identical to SEQ ID NO: 5982
  Cyclic GFR-binding peptide
  MOD_RES (5)..(42)..(44): Xaa is C or S

SEQ ID NO: 44501 - protein, 29 aa, Artificial Sequence
  Cyclic GFR-binding peptide
  MOD_RES (28)..(28): Xaa is C or S
DLSAISILYLIGKTPKILKNYQMIVKSXK

SEQ ID NO: 44502 - protein, 41 aa, Artificial Sequence; identical to SEQ ID NO: 5987
  Cyclic GFR-binding peptide
  MOD_RES (4)..(41): Xaa is C or S

SEQ ID NO: 44503 - protein, 39 aa, Artificial Sequence; identical to SEQ ID NO: 5985
  Cyclic GFR-binding peptide
  MOD_RES (5)..(37)..(39): Xaa is C or S

SEQ ID NO: 44504 - protein, 34 aa, Artificial Sequence
  Cyclic GFR-binding peptide
  MOD_RES (4)..(5): Xaa is C or S
AAPXXVPQALSAISILYLVGRKPKVLKNYQMIVR

SEQ ID NO: 44505 - protein, 36 aa, Artificial Sequence; identical to SEQ ID NO: 5989
  Cyclic GFR-binding peptide
  MOD_RES (1)..(2)..(34)..(36): Xaa is C or S

SEQ ID NO: 44506 - protein, 31 aa, Artificial Sequence
  Cyclic GFR-binding peptide
  MOD_RES (31)..(31): Xaa is C or S
PTKLSPISVLYKDDSSNVILKYHYNMVVRSX

SEQ ID NO: 44507 - protein, 28 aa, Artificial Sequence
  Cyclic GFR-binding peptide
  MOD_RES (2)..(2): Xaa is C or S
TXAPTKLSATSVLYYDDSSNVILRKHRN

SEQ ID NO: 44508 - protein, 26 aa, Artificial Sequence
  Cyclic GFR-binding peptide
TQLSAISVLYLDDSSNVILKNYQNMV

SEQ ID NO: 44509 - protein, 34 aa, Artificial Sequence
  Cyclic GFR-binding peptide
  MOD_RES (5)..(5): Xaa is C or S
RNVQXRPTQVQLSAISVLYLEIVRKKPIFLKNYQ

SEQ ID NO: 44510 - protein, 36 aa, Artificial Sequence; identical to SEQ ID NO: 5991
  Cyclic GFR-binding peptide
  MOD_RES (2)..(3)..(35): Xaa is C or S

SEQ ID NO: 44511 - protein, 32 aa, Artificial Sequence
  Cyclic GFR-binding peptide
  MOD_RES (5)..(6): Xaa is C or S
IPKAXXVPTELNAISMLYFDENEKVVLKKYRD

SEQ ID NO: 44512 - protein, 39 aa, Artificial Sequence; identical to SEQ ID NO: 5992
  Cyclic GFR-binding peptide
  MOD_RES (4)..(5)..(36)..(38): Xaa is C or S

SEQ ID NO: 44513 - protein, 30 aa, Artificial Sequence; identical to SEQ ID NO: 5993
  Cyclic GFR-binding peptide

SEQ ID NO: 44514 - protein, 33 aa, Artificial Sequence; identical to SEQ ID NO: 5994
  Cyclic GFR-binding peptide
  MOD_RES (1)..(2): Xaa is C or S

SEQ ID NO: 44515 - protein, 33 aa, Artificial Sequence
  Cyclic GFR-binding peptide
  MOD_RES (3)..(4): Xaa is C or S
KPXXAPTQLSAISVLYLDDSSNVILKNYQNMVV

SEQ ID NO: 44516 - protein, 38 aa, Artificial Sequence; identical to SEQ ID NO: 5995
  Cyclic GFR-binding peptide
  MOD_RES (5)..(6)..(38): Xaa is C or S

SEQ ID NO: 44517 - protein, 32 aa, Artificial Sequence
  Cyclic GFR-binding peptide
  MOD_RES (2)..(3): Xaa is C or S
AXXVPTELSPISMLYKDEYDKVVLKYHYEMVV

SEQ ID NO: 44518 - protein, 41 aa, Artificial Sequence; identical to SEQ ID NO: 5997
  Cyclic GFR-binding peptide
  MOD_RES (5)..(6)..(39)..(41): Xaa is C or S

SEQ ID NO: 44519 - protein, 31 aa, Artificial Sequence; identical to SEQ ID NO: 5996
  Cyclic GFR-binding peptide
  MOD_RES (1)..(1): Xaa is C or S

SEQ ID NO: 44520 - protein, 36 aa, Artificial Sequence
  Cyclic GFR-binding peptide
  MOD_RES (3)..(3): Xaa is C or S
VQXRPTQVQLSATSVLYYEIVRKKPIFLRKHRTLED

SEQ ID NO: 44521 - protein, 29 aa, Artificial Sequence
  Cyclic GFR-binding peptide
RPTQVQLSPISVLYKEIVRKKPIFLKYHY

SEQ ID NO: 44522 - protein, 35 aa, Artificial Sequence; identical to SEQ ID NO: 5998
  Cyclic GFR-binding peptide
  MOD_RES (2)..(3)..(35): Xaa is C or S

SEQ ID NO: 44523 - protein, 31 aa, Artificial Sequence; identical to SEQ ID NO: 5999
  Cyclic GFR-binding peptide
  MOD_RES (31)..(31): Xaa is C or S

SEQ ID NO: 44524 - protein, 28 aa, Artificial Sequence
  Cyclic GFR-binding peptide
  MOD_RES (2)..(3): Xaa is C or S
PXXVPQALNAISILYFVGRKPKVLKKYR

SEQ ID NO: 44525 - protein, 29 aa, Artificial Sequence
  Cyclic GFR-binding peptide
  MOD_RES (2)..(3): Xaa is C or S
AXXVPTELSPISMLYKDEYDKVVLKYHYE

SEQ ID NO: 44526 - protein, 29 aa, Artificial Sequence
  Cyclic GFR-binding peptide
  MOD_RES (29)..(29): Xaa is C or S
ELSPISMLYKDEYDKVVLKYHYEMVVEGX

SEQ ID NO: 44527 - protein, 34 aa, Artificial Sequence
  Cyclic GFR-binding peptide
  MOD_RES (4)..(5): Xaa is C or S
ASPXXVSQDLSPISILYKIGKTPKILKYHYMIVK

SEQ ID NO: 44528 - protein, 28 aa, Artificial Sequence
  Cyclic GFR-binding peptide
QDLSPISILYKIGKTPKILKYHYMIVKS

SEQ ID NO: 44529 - protein, 36 aa, Artificial Sequence; identical to SEQ ID NO: 6001
  Cyclic GFR-binding peptide
  MOD_RES (2)..(3)..(34)..(36): Xaa is C or S

SEQ ID NO: 44530 - protein, 26 aa, Artificial Sequence
  Cyclic GFR-binding peptide
SATSVLYYDDSSNVILRKHRNMVVRS

SEQ ID NO: 44531 - protein, 39 aa, Artificial Sequence; identical to SEQ ID NO: 6003
  Cyclic GFR-binding peptide
  MOD_RES (6)..(7): Xaa is C or S

SEQ ID NO: 44532 - protein, 39 aa, Artificial Sequence; identical to SEQ ID NO: 6005
  Cyclic GFR-binding peptide
  MOD_RES (4)..(5)..(36)..(38): Xaa is C or S

SEQ ID NO: 44533 - protein, 36 aa, Artificial Sequence; identical to SEQ ID NO: 6007
  Cyclic GFR-binding peptide
  MOD_RES (33)..(35): Xaa is C or S

SEQ ID NO: 44534 - protein, 36 aa, Artificial Sequence
  Cyclic GFR-binding peptide
  MOD_RES (5)..(5): Xaa is C or S
RNVQXRPTQVQLSAISVLYLEIVRKKPIFLKNYQTL

SEQ ID NO: 44535 - protein, 33 aa, Artificial Sequence
  Cyclic GFR-binding peptide
  MOD_RES (31)..(33): Xaa is C or S
PTELSPISMLYKDENEKVVLKYHYDMVVEGXGX

SEQ ID NO: 44536 - protein, 37 aa, Artificial Sequence; identical to SEQ ID NO: 6008
  Cyclic GFR-binding peptide
  MOD_RES (2)..(3)..(36): Xaa is C or S

SEQ ID NO: 44537 - protein, 26 aa, Artificial Sequence
  Cyclic GFR-binding peptide
SATSVLYYDDSSNVILRKHRNMVVRA

SEQ ID NO: 44538 - protein, 33 aa, Artificial Sequence
  Cyclic GFR-binding peptide
  MOD_RES (30)..(32): Xaa is C or S
KLSAISVLYLDDMGVPTLKNYQEGMSVAEXGXR

SEQ ID NO: 44539 - protein, 27 aa, Artificial Sequence
  Cyclic GFR-binding peptide
  MOD_RES (1)..(1): Xaa is C or S
XAPTKLSPISVLYKDDSSNVILKYHYN

SEQ ID NO: 44540 - protein, 27 aa, Artificial Sequence
  Cyclic GFR-binding peptide
ALNAISILYFVGRKPKVLKKYRMIVRS

SEQ ID NO: 44541 - protein, 28 aa, Artificial Sequence
  Cyclic GFR-binding peptide
TKLSPISVLYKDDSSNVILKYHYNMVVR

SEQ ID NO: 44542 - protein, 24 aa, Artificial Sequence
  Cyclic GFR-binding peptide
PQDLNAISILYFVGRTPKVLKKYR

SEQ ID NO: 44543 - protein, 37 aa, Artificial Sequence
  Cyclic GFR-binding peptide
  MOD_RES (4)..(4): Xaa is C or S
NVQXRPTQVQLSPISVLYKEIVRKKPIFLKYHYTLED

SEQ ID NO: 44544 - protein, 29 aa, Artificial Sequence
  Cyclic GFR-binding peptide
  MOD_RES (29)..(29): Xaa is C or S
QLSPISVLYKDDSSNVILKYHYNMVVRAX

SEQ ID NO: 44545 - protein, 31 aa, Artificial Sequence
  Cyclic GFR-binding peptide
  MOD_RES (29)..(31): Xaa is C or S
ELSPISMLYKDEYDKVVLKYHYEMVVEGXGX

SEQ ID NO: 44546 - protein, 28 aa, Artificial Sequence
  Cyclic GFR-binding peptide
  MOD_RES (1)..(2): Xaa is C or S
XXVPTKLSAISVLYLDDMGVPTLKNYQE

SEQ ID NO: 44547 - protein, 24 aa, Artificial Sequence
  Cyclic GFR-binding peptide
TELSATSMLYYDEYDKVVLRKHRE

SEQ ID NO: 44548 - protein, 29 aa, Artificial Sequence
  Cyclic GFR-binding peptide
  MOD_RES (1)..(2): Xaa is C or S
XXAPTQLSPISVLYKDDSSNVILKYHYNM

SEQ ID NO: 44549 - protein, 33 aa, Artificial Sequence
  Cyclic GFR-binding peptide
  MOD_RES (31)..(33): Xaa is C or S
LSAISVLYLEIVRKKPIFLKNYQTLEDHLAXKX

SEQ ID NO: 44550 - protein, 22 aa, Artificial Sequence
  Cyclic GFR-binding peptide
DLSATSILYYVGRTPKVLRKHR

SEQ ID NO: 44551 - protein, 41 aa, Artificial Sequence; identical to SEQ ID NO: 6016
  Cyclic GFR-binding peptide
  MOD_RES (6)..(7)..(39)..(41): Xaa is C or S

SEQ ID NO: 44552 - protein, 25 aa, Artificial Sequence
  Cyclic GFR-binding peptide
SATSVLYYDDMGVPTLRKHREGMSV

SEQ ID NO: 44553 - protein, 36 aa, Artificial Sequence; identical to SEQ ID NO: 6018
  Cyclic GFR-binding peptide
  MOD_RES (36)..(36): Xaa is C or S

SEQ ID NO: 44554 - protein, 37 aa, Artificial Sequence; identical to SEQ ID NO: 6020
  Cyclic GFR-binding peptide
  MOD_RES (4)..(5)..(37): Xaa is C or S

SEQ ID NO: 44555 - protein, 30 aa, Artificial Sequence
  Cyclic GFR-binding peptide
  MOD_RES (4)..(5): Xaa is C or S
GKAXXVPTKLSATSVLYYDDMGVPTLRKHR

SEQ ID NO: 44556 - protein, 33 aa, Artificial Sequence; identical to SEQ ID NO: 6022
  Cyclic GFR-binding peptide
  MOD_RES (31)..(33): Xaa is C or S

SEQ ID NO: 44557 - protein, 40 aa, Artificial Sequence; identical to SEQ ID NO: 6023
  Cyclic GFR-binding peptide
  MOD_RES (5)..(6)..(37)..(39): Xaa is C or S

SEQ ID NO: 44558 - protein, 30 aa, Artificial Sequence
  Cyclic GFR-binding peptide
TQVQLSPISVLYKEIVRKKPIFLKYHYTLE

SEQ ID NO: 44559 - protein, 34 aa, Artificial Sequence
  Cyclic GFR-binding peptide
  MOD_RES (31)..(33): Xaa is C or S
PTKLSPISVLYKDDSSNVILKYHYNMVVRSXGXH

SEQ ID NO: 44560 - protein, 25 aa, Artificial Sequence
  Cyclic GFR-binding peptide
PQALSAISILYLVGRKPKVLKNYQM

SEQ ID NO: 44561 - protein, 32 aa, Artificial Sequence
  Cyclic GFR-binding peptide
  MOD_RES (2)..(3): Xaa is C or S
PXXAPTQLSPISVLYKDDSSNVILKYHYNMVV

SEQ ID NO: 44562 - protein, 34 aa, Artificial Sequence; identical to SEQ ID NO: 6027
  Cyclic GFR-binding peptide
  MOD_RES (1)..(2)..(33): Xaa is C or S

SEQ ID NO: 44563 - protein, 26 aa, Artificial Sequence
  Cyclic GFR-binding peptide
TELSATSMLYYDEYDKVVLRKHREMV

SEQ ID NO: 44564 - protein, 39 aa, Artificial Sequence; identical to SEQ ID NO: 6028
  Cyclic GFR-binding peptide
  MOD_RES (2)..(39): Xaa is C or S

SEQ ID NO: 44565 - protein, 24 aa, Artificial Sequence
  Cyclic GFR-binding peptide
LSATSVLYYDDMGVPTLRKHREGM

SEQ ID NO: 44566 - protein, 28 aa, Artificial Sequence
  Cyclic GFR-binding peptide
QLSAISVLYLEIVRKKPIFLKNYQTLED

SEQ ID NO: 44567 - protein, 33 aa, Artificial Sequence; identical to SEQ ID NO: 6030
  Cyclic GFR-binding peptide
  MOD_RES (1)..(2): Xaa is C or S

SEQ ID NO: 44568 - protein, 41 aa, Artificial Sequence; identical to SEQ ID NO: 6031
  Cyclic GFR-binding peptide
  MOD_RES (5)..(5): Xaa is C or S

SEQ ID NO: 44569 - protein, 23 aa, Artificial Sequence
  Cyclic GFR-binding peptide
LSAISILYLIGKTPKILKNYQMI

SEQ ID NO: 44570 - protein, 35 aa, Artificial Sequence
  Cyclic GFR-binding peptide
  MOD_RES (3)..(4): Xaa is C or S
KAXXVPTKLSATSVLYYDDMGVPTLRKHREGMSVA

SEQ ID NO: 44571 - protein, 35 aa, Artificial Sequence; identical to SEQ ID NO: 6033
  Cyclic GFR-binding peptide
  MOD_RES (1)..(32)..(34): Xaa is C or S

SEQ ID NO: 44572 - protein, 32 aa, Artificial Sequence
  Cyclic GFR-binding peptide
  MOD_RES (6)..(7): Xaa is C or S
ASAAPXXVPQALSATSILYYVGRKPKVLRKHR

SEQ ID NO: 44573 - protein, 32 aa, Artificial Sequence
  Cyclic GFR-binding peptide
  MOD_RES (29)..(31): Xaa is C or S
KLSAISVLYLDDSSNVILKNYQNMVVRSXGXH

SEQ ID NO: 44574 - protein, 29 aa, Artificial Sequence
  Cyclic GFR-binding peptide
  MOD_RES (28)..(28): Xaa is C or S
LSPISMLYKDEYDKVVLKYHYEMVVEGXG

SEQ ID NO: 44575 - protein, 37 aa, Artificial Sequence; identical to SEQ ID NO: 6034
  Cyclic GFR-binding peptide
  MOD_RES (3)..(4)..(35)..(37): Xaa is C or S

SEQ ID NO: 44576 - protein, 36 aa, Artificial Sequence; identical to SEQ ID NO: 6035
  Cyclic GFR-binding peptide
  MOD_RES (4)..(5): Xaa is C or S

SEQ ID NO: 44577 - protein, 32 aa, Artificial Sequence
  Cyclic GFR-binding peptide
  MOD_RES (1)..(2): Xaa is C or S
XXVPQDLSAISILYLVGRTPKVLKNYQMVVKS

SEQ ID NO: 44578 - protein, 21 aa, Artificial Sequence
  Cyclic GFR-binding peptide
SPISVLYKDSSNNVILKYHYN

SEQ ID NO: 44579 - protein, 30 aa, Artificial Sequence
  Cyclic GFR-binding peptide
  MOD_RES (27)..(29): Xaa is C or S
LSAISILYLVGRTPKVLKNYQMVVKSXKXS

SEQ ID NO: 44580 - protein, 34 aa, Artificial Sequence; identical to SEQ ID NO: 6038
  Cyclic GFR-binding peptide
  MOD_RES (3)..(4): Xaa is C or S

SEQ ID NO: 44581 - protein, 29 aa, Artificial Sequence
  Cyclic GFR-binding peptide
  MOD_RES (27)..(29): Xaa is C or S
LSATSILYYIGKTPKILRKHRMIVKSXKX

SEQ ID NO: 44582 - protein, 33 aa, Artificial Sequence; identical to SEQ ID NO: 6039
  Cyclic GFR-binding peptide
  MOD_RES (1)..(33): Xaa is C or S

SEQ ID NO: 44583 - protein, 39 aa, Artificial Sequence; identical to SEQ ID NO: 6040
  Cyclic GFR-binding peptide
  MOD_RES (6)..(7)..(39): Xaa is C or S

SEQ ID NO: 44584 - protein, 26 aa, Artificial Sequence
  Cyclic GFR-binding peptide
PQDLSAISILYLVGRTPKVLKNYQMV

SEQ ID NO: 44585 - protein, 26 aa, Artificial Sequence
  Cyclic GFR-binding peptide
DLSATSILYYVGRTPKVLRKHRMVVK

SEQ ID NO: 44586 - protein, 37 aa, Artificial Sequence; identical to SEQ ID NO: 6043
  Cyclic GFR-binding peptide
  MOD_RES (4)..(5): Xaa is C or S

SEQ ID NO: 44587 - protein, 33 aa, Artificial Sequence
  Cyclic GFR-binding peptide
  MOD_RES (4)..(5): Xaa is C or S
PKAXXVPTELSPISMLYKDENEKVVLKYHYDMV

SEQ ID NO: 44588 - protein, 34 aa, Artificial Sequence; identical to SEQ ID NO: 6044
  Cyclic GFR-binding peptide
  MOD_RES (1)..(2)..(34): Xaa is C or S

SEQ ID NO: 44589 - protein, 30 aa, Artificial Sequence
  Cyclic GFR-binding peptide
RPTQVQLSATSVLYYEIVRKKPIFLRKHRT

SEQ ID NO: 44590 - protein, 36 aa, Artificial Sequence; identical to SEQ ID NO: 6045
  Cyclic GFR-binding peptide
  MOD_RES (3)..(4)..(35): Xaa is C or S

SEQ ID NO: 44591 - protein, 28 aa, Artificial Sequence
  Cyclic GFR-binding peptide
  MOD_RES (1)..(1): Xaa is C or S
XAPTQLSATSVLYYDDSSNVILRKHRNM

SEQ ID NO: 44592 - protein, 32 aa, Artificial Sequence
  Cyclic GFR-binding peptide
  MOD_RES (6)..(7): Xaa is C or S
TVPKPXXAPTQLSAISVLYLDDSSNVILKNYQ

SEQ ID NO: 44593 - protein, 35 aa, Artificial Sequence
  Cyclic GFR-binding peptide
  MOD_RES (6)..(7): Xaa is C or S
ASASPXXVSQDLSAISILYLIGKTPKILKNYQMIV

SEQ ID NO: 44594 - protein, 36 aa, Artificial Sequence; identical to SEQ ID NO: 6047
  Cyclic GFR-binding peptide
  MOD_RES (4)..(36): Xaa is C or S

SEQ ID NO: 44595 - protein, 31 aa, Artificial Sequence
  Cyclic GFR-binding peptide
  MOD_RES (5)..(5): Xaa is C or S
TKPTXAPTKLSATSVLYYDDSSNVILRKHRN

SEQ ID NO: 44596 - protein, 29 aa, Artificial Sequence
  Cyclic GFR-binding peptide
  MOD_RES (27)..(29): Xaa is C or S
LSATSILYYVGRTPKVLRKHRMVVKSXKX

SEQ ID NO: 44597 - protein, 32 aa, Artificial Sequence
  Cyclic GFR-binding peptide
  MOD_RES (3)..(4): Xaa is C or S
SPXXVSQDLSATSILYYIGKTPKILRKHRMIV

SEQ ID NO: 44598 - protein, 25 aa, Artificial Sequence
  Cyclic GFR-binding peptide
QDLSATSILYYIGKTPKILRKHRMI

SEQ ID NO: 44599 - protein, 20 aa, Artificial Sequence
  Cyclic GFR-binding peptide
SAISVLYLDSSNNVILKNYQ

SEQ ID NO: 44600 - protein, 29 aa, Artificial Sequence
  Cyclic GFR-binding peptide
  MOD_RES (27)..(29): Xaa is C or S
SAISVLYLDSSNNVILKNYQNMVVKAXGX

SEQ ID NO: 44601 - protein, 35 aa, Artificial Sequence; identical to SEQ ID NO: 6049
  Cyclic GFR-binding peptide
  MOD_RES (3)..(4): Xaa is C or S

SEQ ID NO: 44602 - protein, 32 aa, Artificial Sequence
  Cyclic GFR-binding peptide
  MOD_RES (29)..(31): Xaa is C or S
KLSAISVLYLDSSNNVILKNYQNMVVKAXGXH

SEQ ID NO: 44603 - protein, 26 aa, Artificial Sequence
  Cyclic GFR-binding peptide
SATSMLYYDEYDKVVLRKHREMVVEG

SEQ ID NO: 44604 - protein, 27 aa, Artificial Sequence
  Cyclic GFR-binding peptide
VPQDLSAISILYLVGRTPKVLKNYQMV

SEQ ID NO: 44605 - protein, 30 aa, Artificial Sequence
  Cyclic GFR-binding peptide
  MOD_RES (4)..(4): Xaa is C or S
KPTXAPTKLSPISVLYKDDSSNVILKYHYN

SEQ ID NO: 44606 - protein, 32 aa, Artificial Sequence
  Cyclic GFR-binding peptide
  MOD_RES (4)..(5): Xaa is C or S
ASPXXVPQDLSATSILYYVGRTPKVLRKHRMV

SEQ ID NO: 44607 - protein, 32 aa, Artificial Sequence
  Cyclic GFR-binding peptide
  MOD_RES (3)..(4): Xaa is C or S
KAXXVPTELSPISMLYKDENEKVVLKYHYDMV

SEQ ID NO: 44608 - protein, 25 aa, Artificial Sequence
  Cyclic GFR-binding peptide
LSPISILYKIGKTPKILKYHYMIVK

SEQ ID NO: 44609 - protein, 34 aa, Artificial Sequence; identical to SEQ ID NO: 6055
  Cyclic GFR-binding peptide
  MOD_RES (1)..(32)..(34): Xaa is C or S

SEQ ID NO: 44610 - protein, 24 aa, Artificial Sequence
  Cyclic GFR-binding peptide
TQLSAISVLYLDDSSNVILKNYQN

SEQ ID NO: 44611 - protein, 26 aa, Artificial Sequence
  Cyclic GFR-binding peptide
TKLSATSVLYYDDMGVPTLRKHREGM

SEQ ID NO: 44612 - protein, 36 aa, Artificial Sequence; identical to SEQ ID NO: 6057
  Cyclic GFR-binding peptide
  MOD_RES (1)..(33)..(35): Xaa is C or S

SEQ ID NO: 44613 - protein, 33 aa, Artificial Sequence; identical to SEQ ID NO: 6058
  Cyclic GFR-binding peptide
  MOD_RES (1)..(2): Xaa is C or S

SEQ ID NO: 44614 - protein, 24 aa, Artificial Sequence
  Cyclic GFR-binding peptide
ELSATSMLYYDEYDKVVLRKHREM

SEQ ID NO: 44615 - protein, 26 aa, Artificial Sequence
  Cyclic GFR-binding peptide
  MOD_RES (26)..(26): Xaa is C or S
NAISILYFVGRKPKVLKKYRMIVRSX

SEQ ID NO: 44616 - protein, 28 aa, Artificial Sequence
  Cyclic GFR-binding peptide
PTKLSATSVLYYDDSSNVILRKHRNMVV

SEQ ID NO: 44617 - protein, 34 aa, Artificial Sequence
  Cyclic GFR-binding peptide
  MOD_RES (31)..(33): Xaa is C or S
PTKLSPISVLYKDSSNNVILKYHYNMVVKAXGXH

SEQ ID NO: 44618 - protein, 36 aa, Artificial Sequence; identical to SEQ ID NO: 6060
  Cyclic GFR-binding peptide
  MOD_RES (2)..(3)..(34)..(36): Xaa is C or S

SEQ ID NO: 44619 - protein, 24 aa, Artificial Sequence
  Cyclic GFR-binding peptide
NAISVLYFEIVRKKPIFLKKYRTL

SEQ ID NO: 44620 - protein, 30 aa, Artificial Sequence
  Cyclic GFR-binding peptide
  MOD_RES (1)..(1): Xaa is C or S
XVPTELSATSMLYYDENEKVVLRKHRDMVV

SEQ ID NO: 44621 - protein, 25 aa, Artificial Sequence
  Cyclic GFR-binding peptide
NAISVLYFDSSNNVILKKYRNMVVK

SEQ ID NO: 44622 - protein, 33 aa, Artificial Sequence; identical to SEQ ID NO: 6062
  Cyclic GFR-binding peptide
  MOD_RES (2)..(3): Xaa is C or S

SEQ ID NO: 44623 - protein, 34 aa, Artificial Sequence
  Cyclic GFR-binding peptide
  MOD_RES (6)..(7): Xaa is C or S
ASASPXXVPQDLSPISILYKVGRTPKVLKYHYMV

SEQ ID NO: 44624 - protein, 20 aa, Artificial Sequence
  Cyclic GFR-binding peptide
NAISMLYFDEYDKVVLKKYR

SEQ ID NO: 44625 - protein, 32 aa, Artificial Sequence; identical to SEQ ID NO: 6064
  Cyclic GFR-binding peptide
  MOD_RES (1)..(32): Xaa is C or S

SEQ ID NO: 44626 - protein, 32 aa, Artificial Sequence; identical to SEQ ID NO: 6065
  Cyclic GFR-binding peptide
  MOD_RES (1)..(2): Xaa is C or S

SEQ ID NO: 44627 - protein, 29 aa, Artificial Sequence
  Cyclic GFR-binding peptide
PTKLSAISVLYLDDMGVPTLKNYQEGMSV

SEQ ID NO: 44628 - protein, 39 aa, Artificial Sequence; identical to SEQ ID NO: 6068
  Cyclic GFR-binding peptide
  MOD_RES (5)..(6)..(37)..(39): Xaa is C or S

SEQ ID NO: 44629 - protein, 39 aa, Artificial Sequence; identical to SEQ ID NO: 6071
  Cyclic GFR-binding peptide
  MOD_RES (3)..(4)..(36)..(38): Xaa is C or S

SEQ ID NO: 44630 - protein, 27 aa, Artificial Sequence
  Cyclic GFR-binding peptide
LSPISVLYKDSSNNVILKYHYNMVVKA

SEQ ID NO: 44631 - protein, 33 aa, Artificial Sequence; identical to SEQ ID NO: 6072
  Cyclic GFR-binding peptide

SEQ ID NO: 44632 - protein, 35 aa, Artificial Sequence
  Cyclic GFR-binding peptide
  MOD_RES (6)..(7): Xaa is C or S
KIPKAXXVPTELSATSMLYYDENEKVVLRKHRDMV

SEQ ID NO: 44633 - protein, 33 aa, Artificial Sequence
  Cyclic GFR-binding peptide
  MOD_RES (3)..(4): Xaa is C or S
KPXXAPTKLSATSVLYYDDSSNVILRKHRNMVV

SEQ ID NO: 44634 - protein, 28 aa, Artificial Sequence
  Cyclic GFR-binding peptide
PQDLNAISILYFVGRTPKVLKKYRMVVK

SEQ ID NO: 44635 - protein, 33 aa, Artificial Sequence
  Cyclic GFR-binding peptide
QVQLNAISVLYFEIVRKKPIFLKKYRTLEDHLA

SEQ ID NO: 44636 - protein, 34 aa, Artificial Sequence
  Cyclic GFR-binding peptide
  MOD_RES (5)..(6): Xaa is C or S
VPKPXXAPTQLSPISVLYKDDSSNVILKYHYNMV

SEQ ID NO: 44637 - protein, 30 aa, Artificial Sequence
  Cyclic GFR-binding peptide
  MOD_RES (4)..(5): Xaa is C or S
PKAXXVPTELNAISMLYFDEYDKVVLKKYR

SEQ ID NO: 44638 - protein, 39 aa, Artificial Sequence; identical to SEQ ID NO: 6076
  Cyclic GFR-binding peptide
  MOD_RES (5)..(6)..(37)..(39): Xaa is C or S

SEQ ID NO: 44639 - protein, 30 aa, Artificial Sequence
  Cyclic GFR-binding peptide
VPTKLNAISVLYFDDMGVPTLKKYREGMSV

SEQ ID NO: 44640 - protein, 38 aa, Artificial Sequence; identical to SEQ ID NO: 6080
  Cyclic GFR-binding peptide
  MOD_RES (3)..(35)..(37): Xaa is C or S

SEQ ID NO: 44641 - protein, 37 aa, Artificial Sequence; identical to SEQ ID NO: 6081
  Cyclic GFR-binding peptide
  MOD_RES (5)..(6)..(37): Xaa is C or S

SEQ ID NO: 44642 - protein, 22 aa, Artificial Sequence
  Cyclic GFR-binding peptide
LSATSILYYVGRTPKVLRKHRM

SEQ ID NO: 44643 - protein, 32 aa, Artificial Sequence
  Cyclic GFR-binding peptide
  MOD_RES (31)..(31): Xaa is C or S
PTKLSPISVLYKDSSNNVILKYHYNMVVKAXG

SEQ ID NO: 44644 - protein, 33 aa, Artificial Sequence; identical to SEQ ID NO: 6082
  Cyclic GFR-binding peptide
  MOD_RES (31)..(33): Xaa is C or S

SEQ ID NO: 44645 - protein, 32 aa, Artificial Sequence
  Cyclic GFR-binding peptide
  MOD_RES (5)..(6): Xaa is C or S
SASPXXVSQDLNAISILYFIGKTPKILKKYRM

SEQ ID NO: 44646 - protein, 31 aa, Artificial Sequence
  Cyclic GFR-binding peptide
  MOD_RES (30)..(30): Xaa is C or S
PQALSAISILYLVGRKPKVLKNYQMIVRSXK

SEQ ID NO: 44647 - protein, 28 aa, Artificial Sequence
  Cyclic GFR-binding peptide
  MOD_RES (28)..(28): Xaa is C or S
LNAISMLYFDEYDKVVLKKYREMVVEGX

SEQ ID NO: 44648 - protein, 38 aa, Artificial Sequence; identical to SEQ ID NO: 6085
  Cyclic GFR-binding peptide
  MOD_RES (6)..(7): Xaa is C or S

SEQ ID NO: 44649 - protein, 32 aa, Artificial Sequence
  Cyclic GFR-binding peptide
  MOD_RES (2)..(3): Xaa is C or S
AXXVPTELSATSMLYYDEYDKVVLRKHREMVV

SEQ ID NO: 44650 - protein, 24 aa, Artificial Sequence
  Cyclic GFR-binding peptide
SPISMLYKDENEKVVLKYHYDMVV

SEQ ID NO: 44651 - protein, 24 aa, Artificial Sequence
  Cyclic GFR-binding peptide
PQDLSPISILYKVGRTPKVLKYHY

SEQ ID NO: 44652 - protein, 32 aa, Artificial Sequence
  Cyclic GFR-binding peptide
  MOD_RES (4)..(5): Xaa is C or S
PKPXXAPTKLSAISVLYLDDSSNVILKNYQNM

SEQ ID NO: 44653 - protein, 34 aa, Artificial Sequence
  Cyclic GFR-binding peptide
  MOD_RES (6)..(7): Xaa is C or S
KVGKAXXVPTKLSAISVLYLDDMGVPTLKNYQEG

SEQ ID NO: 44654 - protein, 33 aa, Artificial Sequence
  Cyclic GFR-binding peptide
  MOD_RES (30)..(32): Xaa is C or S
TKLSATSVLYYDDSSNVILRKHRNMVVRSXGXH

SEQ ID NO: 44655 - protein, 32 aa, Artificial Sequence
  Cyclic GFR-binding peptide
  MOD_RES (29)..(31): Xaa is C or S
QDLNAISILYFIGKTPKILKKYRMIVKSXKXS

SEQ ID NO: 44656 - protein, 36 aa, Artificial Sequence
  Cyclic GFR-binding peptide
  MOD_RES (5)..(6): Xaa is C or S
VGKAXXVPTKLSATSVLYYDDMGVPTLRKHREGMSV

SEQ ID NO: 44657 - protein, 37 aa, Artificial Sequence; identical to SEQ ID NO: 6087
  Cyclic GFR-binding peptide
  MOD_RES (35)..(37): Xaa is C or S

SEQ ID NO: 44658 - protein, 30 aa, Artificial Sequence
  Cyclic GFR-binding peptide
  MOD_RES (30)..(30): Xaa is C or S
KLSATSVLYYDDMGVPTLRKHREGMSVAEX

SEQ ID NO: 44659 - protein, 38 aa, Artificial Sequence; identical to SEQ ID NO: 6088
  Cyclic GFR-binding peptide
  MOD_RES (2)..(3)..(35)..(37): Xaa is C or S

SEQ ID NO: 44660 - protein, 35 aa, Artificial Sequence; identical to SEQ ID NO: 6089
  Cyclic GFR-binding peptide
  MOD_RES (1)..(33)..(35): Xaa is C or S

SEQ ID NO: 44661 - protein, 28 aa, Artificial Sequence
  Cyclic GFR-binding peptide
  MOD_RES (2)..(3): Xaa is C or S
PXXAPTQLSATSVLYYDDSSNVILRKHR

SEQ ID NO: 44662 - protein, 26 aa, Artificial Sequence
  Cyclic GFR-binding peptide
LSATSILYYVGRKPKVLRKHRMIVRS

SEQ ID NO: 44663 - protein, 36 aa, Artificial Sequence
  Cyclic GFR-binding peptide
  MOD_RES (6)..(7): Xaa is C or S
SIPKAXXVPTELSPISMLYKDEYDKVVLKYHYEMVV

SEQ ID NO: 44664 - protein, 29 aa, Artificial Sequence
  Cyclic GFR-binding peptide
  MOD_RES (2)..(3): Xaa is C or S
AXXVPTELSATSMLYYDENEKVVLRKHRD

SEQ ID NO: 44665 - protein, 24 aa, Artificial Sequence
  Cyclic GFR-binding peptide
QDLSATSILYYVGRTPKVLRKHRM

SEQ ID NO: 44666 - protein, 21 aa, Artificial Sequence
  Cyclic GFR-binding peptide
LSAISVLYLDDSSNVILKNYQ

SEQ ID NO: 44667 - protein, 29 aa, Artificial Sequence
  Cyclic GFR-binding peptide
  MOD_RES (27)..(29): Xaa is C or S
SPISMLYKDENEKVVLKYHYDMVVEGXGX

SEQ ID NO: 44668 - protein, 28 aa, Artificial Sequence
  Cyclic GFR-binding peptide
TKLSAISVLYLDDSSNVILKNYQNMVVR

SEQ ID NO: 44669 - protein, 33 aa, Artificial Sequence
  Cyclic GFR-binding peptide
  MOD_RES (5)..(6): Xaa is C or S
VPKPXXAPTKLSPISVLYKDDSSNVILKYHYNM

SEQ ID NO: 44670 - protein, 27 aa, Artificial Sequence
  Cyclic GFR-binding peptide
  MOD_RES (27)..(27): Xaa is C or S
LSATSILYYIGKTPKILRKHRMIVKSX

SEQ ID NO: 44671 - protein, 24 aa, Artificial Sequence
  Cyclic GFR-binding peptide
TKLSATSVLYYDDMGVPTLRKHRE

SEQ ID NO: 44672 - protein, 35 aa, Artificial Sequence; identical to SEQ ID NO: 6093
  Cyclic GFR-binding peptide
  MOD_RES (1)..(32)..(34): Xaa is C or S

SEQ ID NO: 44673 - protein, 30 aa, Artificial Sequence
  Cyclic GFR-binding peptide
  MOD_RES (1)..(2): Xaa is C or S
XXVPTELSATSMLYYDENEKVVLRKHRDMV

SEQ ID NO: 44674 - protein, 24 aa, Artificial Sequence
  Cyclic GFR-binding peptide
QLSPISVLYKEIVRKKPIFLKYHY

SEQ ID NO: 44675 - protein, 25 aa, Artificial Sequence
  Cyclic GFR-binding peptide
PTKLNAISVLYFDDMGVPTLKKYRE

SEQ ID NO: 44676 - protein, 34 aa, Artificial Sequence; identical to SEQ ID NO: 6104
  Cyclic GFR-binding peptide
  MOD_RES (2)..(3)..(34): Xaa is C or S

SEQ ID NO: 44677 - protein, 33 aa, Artificial Sequence
  Cyclic GFR-binding peptide
  MOD_RES (7)..(7): Xaa is C or S
HVTKPTXAPTKLSPISVLYKDDSSNVILKYHYN

SEQ ID NO: 44678 - protein, 34 aa, Artificial Sequence; identical to SEQ ID NO: 6105
  Cyclic GFR-binding peptide
  MOD_RES (2)..(3): Xaa is C or S

SEQ ID NO: 44679 - protein, 33 aa, Artificial Sequence; identical to SEQ ID NO: 6106
  Cyclic GFR-binding peptide
  MOD_RES (1)..(2): Xaa is C or S

SEQ ID NO: 44680 - protein, 33 aa, Artificial Sequence; identical to SEQ ID NO: 6107
  Cyclic GFR-binding peptide
  MOD_RES (32)..(32): Xaa is C or S

SEQ ID NO: 44681 - protein, 36 aa, Artificial Sequence
  Cyclic GFR-binding peptide
  MOD_RES (3)..(3): Xaa is C or S
VQXRPTQVQLNAISVLYFEIVRKKPIFLKKYRTLED

SEQ ID NO: 44682 - protein, 33 aa, Artificial Sequence; identical to SEQ ID NO: 6108
  Cyclic GFR-binding peptide
  MOD_RES (1)..(33): Xaa is C or S

SEQ ID NO: 44683 - protein, 24 aa, Artificial Sequence
  Cyclic GFR-binding peptide
LSAISVLYLDDMGVPTLKNYQEGM

SEQ ID NO: 44684 - protein, 31 aa, Artificial Sequence; identical to SEQ ID NO: 6109
  Cyclic GFR-binding peptide

SEQ ID NO: 44685 - protein, 37 aa, Artificial Sequence; identical to SEQ ID NO: 6110
  Cyclic GFR-binding peptide
  MOD_RES (4)..(5)..(36): Xaa is C or S

SEQ ID NO: 44686 - protein, 29 aa, Artificial Sequence
  Cyclic GFR-binding peptide
  MOD_RES (1)..(2): Xaa is C or S
XXVPQDLNAISILYFVGRTPKVLKKYRMV

SEQ ID NO: 44687 - protein, 29 aa, Artificial Sequence
  Cyclic GFR-binding peptide
  MOD_RES (28)..(28): Xaa is C or S
DLNAISILYFIGKTPKILKKYRMIVKSXK

SEQ ID NO: 44688 - protein, 25 aa, Artificial Sequence
  Cyclic GFR-binding peptide
SATSILYYVGRKPKVLRKHRMIVRS

SEQ ID NO: 44689 - protein, 38 aa, Artificial Sequence
  Cyclic GFR-binding peptide
  MOD_RES (6)..(7): Xaa is C or S
KVGKAXXVPTKLSAISVLYLDDMGVPTLKNYQEGMSVA

SEQ ID NO: 44690 - protein, 32 aa, Artificial Sequence
  Cyclic GFR-binding peptide
  MOD_RES (2)..(3): Xaa is C or S
PXXAPTKLSPISVLYKDDSSNVILKYHYNMVV

SEQ ID NO: 44691 - protein, 32 aa, Artificial Sequence
  Cyclic GFR-binding peptide
  MOD_RES (30)..(32): Xaa is C or S
TQLSAISVLYLDDSSNVILKNYQNMVVRAXGX

SEQ ID NO: 44692 - protein, 34 aa, Artificial Sequence; identical to SEQ ID NO: 6114
  Cyclic GFR-binding peptide
  MOD_RES (32)..(34): Xaa is C or S

SEQ ID NO: 44693 - protein, 32 aa, Artificial Sequence
  Cyclic GFR-binding peptide
  MOD_RES (29)..(31): Xaa is C or S
QALSATSILYYVGRKPKVLRKHRMIVRSXKXS

SEQ ID NO: 44694 - protein, 23 aa, Artificial Sequence
  Cyclic GFR-binding peptide
LSATSVLYYDDSSNVILRKHRNM

SEQ ID NO: 44695 - protein, 31 aa, Artificial Sequence
  Cyclic GFR-binding peptide
  MOD_RES (3)..(4): Xaa is C or S
KPXXAPTQLSAISVLYLDDSSNVILKNYQNM

SEQ ID NO: 44696 - protein, 34 aa, Artificial Sequence
  Cyclic GFR-binding peptide
  MOD_RES (4)..(5): Xaa is C or S
PKAXXVPTELSPISMLYKDENEKVVLKYHYDMVV

SEQ ID NO: 44697 - protein, 31 aa, Artificial Sequence
  Cyclic GFR-binding peptide
  MOD_RES (2)..(2): Xaa is C or S
QXRPTQVQLSAISVLYLEIVRKKPIFLKNYQ

SEQ ID NO: 44698 - protein, 33 aa, Artificial Sequence
  Cyclic GFR-binding peptide
  MOD_RES (30)..(32): Xaa is C or S
SQDLSATSILYYIGKTPKILRKHRMIVKSXKXS

SEQ ID NO: 44699 - protein, 33 aa, Artificial Sequence
  Cyclic GFR-binding peptide
  MOD_RES (30)..(32): Xaa is C or S
TELSPISMLYKDEYDKVVLKYHYEMVVEGXGXR

SEQ ID NO: 44700 - protein, 30 aa, Artificial Sequence
  Cyclic GFR-binding peptide
  MOD_RES (2)..(3): Xaa is C or S
AXXVPTKLSATSVLYYDDMGVPTLRKHREG

SEQ ID NO: 44701 - protein, 31 aa, Artificial Sequence
  Cyclic GFR-binding peptide
  MOD_RES (5)..(6): Xaa is C or S
SASPXXVPQDLNAISILYFVGRTPKVLKKYR

SEQ ID NO: 44702 - protein, 24 aa, Artificial Sequence
  Cyclic GFR-binding peptide
LSPISMLYKDENEKVVLKYHYDMV

SEQ ID NO: 44703 - protein, 30 aa, Artificial Sequence
  Cyclic GFR-binding peptide
  MOD_RES (27)..(29): Xaa is C or S
SPISVLYKDSSNNVILKYHYNMVVKAXGXH

SEQ ID NO: 44704 - protein, 33 aa, Artificial Sequence
  Cyclic GFR-binding peptide
  MOD_RES (6)..(7): Xaa is C or S
KVGKAXXVPTKLSAISVLYLDDMGVPTLKNYQE

SEQ ID NO: 44705 - protein, 37 aa, Artificial Sequence; identical to SEQ ID NO: 6120
  Cyclic GFR-binding peptide
  MOD_RES (2)..(3)..(34)..(36): Xaa is C or S

SEQ ID NO: 44706 - protein, 29 aa, Artificial Sequence
  Cyclic GFR-binding peptide
  MOD_RES (27)..(29): Xaa is C or S
SPISVLYKDDSSNVILKYHYNMVVRSXGX

SEQ ID NO: 44707 - protein, 31 aa, Artificial Sequence
  Cyclic GFR-binding peptide
  MOD_RES (30)..(30): Xaa is C or S
NAISVLYFEIVRKKPIFLKKYRTLEDHLAXK

SEQ ID NO: 44708 - protein, 25 aa, Artificial Sequence
  Cyclic GFR-binding peptide
PTKLSATSVLYYDDMGVPTLRKHRE

SEQ ID NO: 44709 - protein, 27 aa, Artificial Sequence
  Cyclic GFR-binding peptide
VSQDLSPISILYKIGKTPKILKYHYMI

SEQ ID NO: 44710 - protein, 30 aa, Artificial Sequence
  Cyclic GFR-binding peptide
PTELSATSMLYYDEYDKVVLRKHREMVVEG

SEQ ID NO: 44711 - protein, 27 aa, Artificial Sequence
  Cyclic GFR-binding peptide
LSATSMLYYDENEKVVLRKHRDMVVEG

SEQ ID NO: 44712 - protein, 30 aa, Artificial Sequence; identical to SEQ ID NO: 850
  Cyclic GFR-binding peptide

SEQ ID NO: 44713 - protein, 31 aa, Artificial Sequence
  Cyclic GFR-binding peptide
VQLSAISVLYLEIVRKKPIFLKNYQTLEDHL

SEQ ID NO: 44714 - protein, 24 aa, Artificial Sequence
  Cyclic GFR-binding peptide
SQDLNAISILYFIGKTPKILKKYR

SEQ ID NO: 44715 - protein, 28 aa, Artificial Sequence
  Cyclic GFR-binding peptide
KLSAISVLYLDSSNNVILKNYQNMVVKA

SEQ ID NO: 44716 - protein, 32 aa, Artificial Sequence; identical to SEQ ID NO: 6126
  Cyclic GFR-binding peptide
  MOD_RES (1)..(1): Xaa is C or S

SEQ ID NO: 44717 - protein, 25 aa, Artificial Sequence
  Cyclic GFR-binding peptide
QLSAISVLYLEIVRKKPIFLKNYQT

SEQ ID NO: 44718 - protein, 31 aa, Artificial Sequence
  Cyclic GFR-binding peptide
  MOD_RES (2)..(3): Xaa is C or S
AXXVPTELSPISMLYKDEYDKVVLKYHYEMV

SEQ ID NO: 44719 - protein, 35 aa, Artificial Sequence
  Cyclic GFR-binding peptide
  MOD_RES (5)..(6): Xaa is C or S
SASPXXVPQDLSATSILYYVGRTPKVLRKHRMVVK

SEQ ID NO: 44720 - protein, 23 aa, Artificial Sequence
  Cyclic GFR-binding peptide
TKLNAISVLYFDSSNNVILKKYR

SEQ ID NO: 44721 - protein, 25 aa, Artificial Sequence
  Cyclic GFR-binding peptide
VPTELSPISMLYKDEYDKVVLKYHY

SEQ ID NO: 44722 - protein, 38 aa, Artificial Sequence
  Cyclic GFR-binding peptide
  MOD_RES (5)..(5): Xaa is C or S
RNVQXRPTQVQLNAISVLYFEIVRKKPIFLKKYRTLED

SEQ ID NO: 44723 - protein, 31 aa, Artificial Sequence; identical to SEQ ID NO: 6128
  Cyclic GFR-binding peptide
  MOD_RES (1)..(1): Xaa is C or S

SEQ ID NO: 44724 - protein, 26 aa, Artificial Sequence
  Cyclic GFR-binding peptide
  MOD_RES (1)..(1): Xaa is C or S
XVSQDLSAISILYLIGKTPKILKNYQ

SEQ ID NO: 44725 - protein, 38 aa, Artificial Sequence; identical to SEQ ID NO: 6129
  Cyclic GFR-binding peptide
  MOD_RES (2)..(3)..(35)..(37): Xaa is C or S

SEQ ID NO: 44726 - protein, 35 aa, Artificial Sequence; identical to SEQ ID NO: 6132
  Cyclic GFR-binding peptide
  MOD_RES (4)..(5): Xaa is C or S

SEQ ID NO: 44727 - protein, 23 aa, Artificial Sequence
  Cyclic GFR-binding peptide
SAISVLYLDDMGVPTLKNYQEGM

SEQ ID NO: 44728 - protein, 27 aa, Artificial Sequence
  Cyclic GFR-binding peptide
  MOD_RES (1)..(2): Xaa is C or S
XXVPTKLNAISVLYFDDMGVPTLKKYR

SEQ ID NO: 44729 - protein, 30 aa, Artificial Sequence
  Cyclic GFR-binding peptide
  MOD_RES (1)..(2): Xaa is C or S
XXAPTQLSAISVLYLDDSSNVILKNYQNMV

SEQ ID NO: 44730 - protein, 40 aa, Artificial Sequence; identical to SEQ ID NO: 6135
  Cyclic GFR-binding peptide
  MOD_RES (4)..(5)..(38)..(40): Xaa is C or S

SEQ ID NO: 44731 - protein, 33 aa, Artificial Sequence; identical to SEQ ID NO: 6136
  Cyclic GFR-binding peptide
  MOD_RES (1)..(1): Xaa is C or S

SEQ ID NO: 44732 - protein, 31 aa, Artificial Sequence
  Cyclic GFR-binding peptide
  MOD_RES (5)..(6): Xaa is C or S
IPKAXXVPTELNAISMLYFDEYDKVVLKKYR

SEQ ID NO: 44733 - protein, 31 aa, Artificial Sequence
  Cyclic GFR-binding peptide
  MOD_RES (29)..(31): Xaa is C or S
LNAISVLYFDDMGVPTLKKYREGMSVAEXGX

SEQ ID NO: 44734 - protein, 34 aa, Artificial Sequence
  Cyclic GFR-binding peptide
  MOD_RES (1)..(1): Xaa is C or S
XRPTQVQLSATSVLYYEIVRKKPIFLRKHRTLED

SEQ ID NO: 44735 - protein, 24 aa, Artificial Sequence
  Cyclic GFR-binding peptide
SAISILYLVGRTPKVLKNYQMVVK

SEQ ID NO: 44736 - protein, 41 aa, Artificial Sequence; identical to SEQ ID NO: 6138
  Cyclic GFR-binding peptide
  MOD_RES (6)..(7)..(40): Xaa is C or S

SEQ ID NO: 44737 - protein, 28 aa, Artificial Sequence
  Cyclic GFR-binding peptide
PTQLSATSVLYYDDSSNVILRKHRNMVV

SEQ ID NO: 44738 - protein, 27 aa, Artificial Sequence
  Cyclic GFR-binding peptide
  MOD_RES (1)..(1): Xaa is C or S
XVPQALSPISILYKVGRKPKVLKYHYM

SEQ ID NO: 44739 - protein, 32 aa, Artificial Sequence
  Cyclic GFR-binding peptide
  MOD_RES (2)..(3): Xaa is C or S
AXXVPTELNAISMLYFDEYDKVVLKKYREMVV

SEQ ID NO: 44740 - protein, 30 aa, Artificial Sequence
  Cyclic GFR-binding peptide
  MOD_RES (29)..(29): Xaa is C or S
QDLSAISILYLVGRTPKVLKNYQMVVKSXK

SEQ ID NO: 44741 - protein, 31 aa, Artificial Sequence
  Cyclic GFR-binding peptide
RPTQVQLNAISVLYFEIVRKKPIFLKKYRTL

SEQ ID NO: 44742 - protein, 36 aa, Artificial Sequence
  Cyclic GFR-binding peptide
  MOD_RES (6)..(7): Xaa is C or S
KVGKAXXVPTKLSAISVLYLDDMGVPTLKNYQEGMS

SEQ ID NO: 44743 - protein, 27 aa, Artificial Sequence
  Cyclic GFR-binding peptide
QDLSPISILYKIGKTPKILKYHYMIVK

SEQ ID NO: 44744 - protein, 40 aa, Artificial Sequence; identical to SEQ ID NO: 6145
  Cyclic GFR-binding peptide
  MOD_RES (5)..(6)..(37)..(39): Xaa is C or S

SEQ ID NO: 44745 - protein, 40 aa, Artificial Sequence; identical to SEQ ID NO: 6146
  Cyclic GFR-binding peptide
  MOD_RES (6)..(7)..(38)..(40): Xaa is C or S

SEQ ID NO: 44746 - protein, 34 aa, Artificial Sequence
  Cyclic GFR-binding peptide
  MOD_RES (32)..(34): Xaa is C or S
PTKLSAISVLYLDDMGVPTLKNYQEGMSVAEXGX

SEQ ID NO: 44747 - protein, 35 aa, Artificial Sequence; identical to SEQ ID NO: 6148
  Cyclic GFR-binding peptide
  MOD_RES (1)..(2)..(35): Xaa is C or S

SEQ ID NO: 44748 - protein, 32 aa, Artificial Sequence
  Cyclic GFR-binding peptide
  MOD_RES (1)..(1): Xaa is C or S
XRPTQVQLSATSVLYYEIVRKKPIFLRKHRTL

SEQ ID NO: 44749 - protein, 36 aa, Artificial Sequence; identical to SEQ ID NO: 6149
  Cyclic GFR-binding peptide
  MOD_RES (35)..(35): Xaa is C or S

SEQ ID NO: 44750 - protein, 38 aa, Artificial Sequence; identical to SEQ ID NO: 6150
  Cyclic GFR-binding peptide
  MOD_RES (4)..(5)..(37): Xaa is C or S

SEQ ID NO: 44751 - protein, 20 aa, Artificial Sequence
  Cyclic GFR-binding peptide
NAISILYFVGRTPKVLKKYR

SEQ ID NO: 44752 - protein, 30 aa, Artificial Sequence
  Cyclic GFR-binding peptide
  MOD_RES (29)..(29): Xaa is C or S
ELSPISMLYKDEYDKVVLKYHYEMVVEGXG

SEQ ID NO: 44753 - protein, 41 aa, Artificial Sequence; identical to SEQ ID NO: 6153
  Cyclic GFR-binding peptide
  MOD_RES (6)..(7)..(39)..(41): Xaa is C or S

SEQ ID NO: 44754 - protein, 30 aa, Artificial Sequence
  Cyclic GFR-binding peptide
  MOD_RES (27)..(29): Xaa is C or S
SAISVLYLDDSSNVILKNYQNMVVRSXGXH

SEQ ID NO: 44755 - protein, 37 aa, Artificial Sequence; identical to SEQ ID NO: 6154
  Cyclic GFR-binding peptide
  MOD_RES (4)..(5)..(37): Xaa is C or S

SEQ ID NO: 44756 - protein, 35 aa, Artificial Sequence; identical to SEQ ID NO: 6155
  Cyclic GFR-binding peptide
  MOD_RES (1)..(2)..(33)..(35): Xaa is C or S

SEQ ID NO: 44757 - protein, 32 aa, Artificial Sequence
  Cyclic GFR-binding peptide
  MOD_RES (4)..(5): Xaa is C or S
AAPXXVPQALSAISILYLVGRKPKVLKNYQMI

SEQ ID NO: 44758 - protein, 38 aa, Artificial Sequence; identical to SEQ ID NO: 6156
  Cyclic GFR-binding peptide
  MOD_RES (4)..(5)..(37): Xaa is C or S

SEQ ID NO: 44759 - protein, 29 aa, Artificial Sequence
  Cyclic GFR-binding peptide
APTKLSATSVLYYDDSSNVILRKHRNMVV

SEQ ID NO: 44760 - protein, 35 aa, Artificial Sequence; identical to SEQ ID NO: 6159
  Cyclic GFR-binding peptide
  MOD_RES (3)..(4): Xaa is C or S

SEQ ID NO: 44761 - protein, 20 aa, Artificial Sequence
  Cyclic GFR-binding peptide
SATSMLYYDENEKVVLRKHR

SEQ ID NO: 44762 - protein, 38 aa, Artificial Sequence
  Cyclic GFR-binding peptide
  MOD_RES (6)..(7): Xaa is C or S
KVGKAXXVPTKLSATSVLYYDDMGVPTLRKHREGMSVA

SEQ ID NO: 44763 - protein, 23 aa, Artificial Sequence
  Cyclic GFR-binding peptide
LSPISMLYKDENEKVVLKYHYDM

SEQ ID NO: 44764 - protein, 29 aa, Artificial Sequence
  Cyclic GFR-binding peptide
QLNAISVLYFEIVRKKPIFLKKYRTLEDH

SEQ ID NO: 44765 - protein, 30 aa, Artificial Sequence
  Cyclic GFR-binding peptide
  MOD_RES (3)..(3): Xaa is C or S
PTXAPTKLSAISVLYLDDSSNVILKNYQNM

SEQ ID NO: 44766 - protein, 34 aa, Artificial Sequence; identical to SEQ ID NO: 6161
  Cyclic GFR-binding peptide
  MOD_RES (31)..(33): Xaa is C or S

SEQ ID NO: 44767 - protein, 27 aa, Artificial Sequence
  Cyclic GFR-binding peptide
TKLSAISVLYLDDMGVPTLKNYQEGMS

SEQ ID NO: 44768 - protein, 38 aa, Artificial Sequence; identical to SEQ ID NO: 6162
  Cyclic GFR-binding peptide
  MOD_RES (3)..(4)..(35)..(37): Xaa is C or S

SEQ ID NO: 44769 - protein, 29 aa, Artificial Sequence
  Cyclic GFR-binding peptide
  MOD_RES (27)..(29): Xaa is C or S
LSPISILYKIGKTPKILKYHYMIVKSXKX

SEQ ID NO: 44770 - protein, 32 aa, Artificial Sequence
  Cyclic GFR-binding peptide
  MOD_RES (3)..(4): Xaa is C or S
KPXXAPTKLSPISVLYKDDSSNVILKYHYNMV

SEQ ID NO: 44771 - protein, 22 aa, Artificial Sequence
  Cyclic GFR-binding peptide
LSPISMLYKDENEKVVLKYHYD

SEQ ID NO: 44772 - protein, 41 aa, Artificial Sequence; identical to SEQ ID NO: 6165
  Cyclic GFR-binding peptide
  MOD_RES (7)..(39)..(41): Xaa is C or S

SEQ ID NO: 44773 - protein, 31 aa, Artificial Sequence; identical to SEQ ID NO: 6167
  Cyclic GFR-binding peptide
  MOD_RES (1)..(1): Xaa is C or S

SEQ ID NO: 44774 - protein, 32 aa, Artificial Sequence
  Cyclic GFR-binding peptide
  MOD_RES (6)..(7): Xaa is C or S
SIPKAXXVPTELSPISMLYKDEYDKVVLKYHY

SEQ ID NO: 44775 - protein, 41 aa, Artificial Sequence; identical to SEQ ID NO: 6168
  Cyclic GFR-binding peptide
  MOD_RES (6)..(7)..(39)..(41): Xaa is C or S

SEQ ID NO: 44776 - protein, 34 aa, Artificial Sequence
  Cyclic GFR-binding peptide
  MOD_RES (5)..(6): Xaa is C or S
SAAPXXVPQALSAISILYLVGRKPKVLKNYQMIV

SEQ ID NO: 44777 - protein, 25 aa, Artificial Sequence
  Cyclic GFR-binding peptide
NAISMLYFDEYDKVVLKKYREMVVE

SEQ ID NO: 44778 - protein, 39 aa, Artificial Sequence; identical to SEQ ID NO: 6169
  Cyclic GFR-binding peptide
  MOD_RES (6)..(38): Xaa is C or S

SEQ ID NO: 44779 - protein, 28 aa, Artificial Sequence
  Cyclic GFR-binding peptide
VPTKLSAISVLYLDDMGVPTLKNYQEGM

SEQ ID NO: 44780 - protein, 31 aa, Artificial Sequence; identical to SEQ ID NO: 6170
  Cyclic GFR-binding peptide
  MOD_RES (1)..(1): Xaa is C or S

SEQ ID NO: 44781 - protein, 41 aa, Artificial Sequence; identical to SEQ ID NO: 6171
  Cyclic GFR-binding peptide
  MOD_RES (6)..(38)..(40): Xaa is C or S

SEQ ID NO: 44782 - protein, 24 aa, Artificial Sequence
  Cyclic GFR-binding peptide
QLSATSVLYYDDSSNVILRKHRNM

SEQ ID NO: 44783 - protein, 25 aa, Artificial Sequence
  Cyclic GFR-binding peptide
TKLSPISVLYKDSSNNVILKYHYNM

SEQ ID NO: 44784 - protein, 35 aa, Artificial Sequence; identical to SEQ ID NO: 6172
  Cyclic GFR-binding peptide
  MOD_RES (4)..(5): Xaa is C or S

SEQ ID NO: 44785 - protein, 32 aa, Artificial Sequence
  Cyclic GFR-binding peptide
  MOD_RES (2)..(2): Xaa is C or S
QXRPTQVQLSAISVLYLEIVRKKPIFLKNYQT

SEQ ID NO: 44786 - protein, 35 aa, Artificial Sequence; identical to SEQ ID NO: 6175
  Cyclic GFR-binding peptide
  MOD_RES (32)..(34): Xaa is C or S

SEQ ID NO: 44787 - protein, 34 aa, Artificial Sequence; identical to SEQ ID NO: 6177
  Cyclic GFR-binding peptide
  MOD_RES (2)..(3): Xaa is C or S

SEQ ID NO: 44788 - protein, 32 aa, Artificial Sequence
  Cyclic GFR-binding peptide
  MOD_RES (30)..(32): Xaa is C or S
TKLSAISVLYLDSSNNVILKNYQNMVVKAXGX

SEQ ID NO: 44789 - protein, 31 aa, Artificial Sequence
  Cyclic GFR-binding peptide
  MOD_RES (30)..(30): Xaa is C or S
TQLSPISVLYKDDSSNVILKYHYNMVVRAXG

SEQ ID NO: 44790 - protein, 22 aa, Artificial Sequence
  Cyclic GFR-binding peptide
NAISVLYFEIVRKKPIFLKKYR

SEQ ID NO: 44791 - protein, 41 aa, Artificial Sequence; identical to SEQ ID NO: 6179
  Cyclic GFR-binding peptide
  MOD_RES (5)..(6)..(38)..(40): Xaa is C or S

SEQ ID NO: 44792 - protein, 29 aa, Artificial Sequence
  Cyclic GFR-binding peptide
  MOD_RES (1)..(1): Xaa is C or S
XVPTKLSATSVLYYDDMGVPTLRKHREGM

SEQ ID NO: 44793 - protein, 33 aa, Artificial Sequence
  Cyclic GFR-binding peptide
  MOD_RES (4)..(4): Xaa is C or S
NVQXRPTQVQLSPISVLYKEIVRKKPIFLKYHY

SEQ ID NO: 44794 - protein, 22 aa, Artificial Sequence
  Cyclic GFR-binding peptide
ELSATSMLYYDEYDKVVLRKHR

SEQ ID NO: 44795 - protein, 37 aa, Artificial Sequence; identical to SEQ ID NO: 6182
  Cyclic GFR-binding peptide
  MOD_RES (3)..(4)..(37): Xaa is C or S

SEQ ID NO: 44796 - protein, 30 aa, Artificial Sequence
  Cyclic GFR-binding peptide
PTELSPISMLYKDENEKVVLKYHYDMVVEG

SEQ ID NO: 44797 - protein, 23 aa, Artificial Sequence
  Cyclic GFR-binding peptide
NAISILYFVGRTPKVLKKYRMVV

SEQ ID NO: 44798 - protein, 32 aa, Artificial Sequence; identical to SEQ ID NO: 6184
  Cyclic GFR-binding peptide
  MOD_RES (1)..(2): Xaa is C or S

SEQ ID NO: 44799 - protein, 29 aa, Artificial Sequence
  Cyclic GFR-binding peptide
LSAISVLYLEIVRKKPIFLKNYQTLEDHL

SEQ ID NO: 44800 - protein, 21 aa, Artificial Sequence
  Cyclic GFR-binding peptide
LSPISILYKVGRTPKVLKYHY

SEQ ID NO: 44801 - protein, 26 aa, Artificial Sequence
  Cyclic GFR-binding peptide
ELSPISMLYKDENEKVVLKYHYDMVV

SEQ ID NO: 44802 - protein, 40 aa, Artificial Sequence; identical to SEQ ID NO: 6185
  Cyclic GFR-binding peptide
  MOD_RES (6)..(7)..(39): Xaa is C or S

SEQ ID NO: 44803 - protein, 29 aa, Artificial Sequence
  Cyclic GFR-binding peptide
PTQLSATSVLYYDDSSNVILRKHRNMVVR

SEQ ID NO: 44804 - protein, 29 aa, Artificial Sequence
  Cyclic GFR-binding peptide
  MOD_RES (3)..(4): Xaa is C or S
KAXXVPTELNAISMLYFDENEKVVLKKYR

SEQ ID NO: 44805 - protein, 31 aa, Artificial Sequence
  Cyclic GFR-binding peptide
  MOD_RES (5)..(6): Xaa is C or S
IPKAXXVPTELSPISMLYKDENEKVVLKYHY

SEQ ID NO: 44806 - protein, 26 aa, Artificial Sequence
  Cyclic GFR-binding peptide
QALNAISILYFVGRKPKVLKKYRMIV

SEQ ID NO: 44807 - protein, 40 aa, Artificial Sequence; identical to SEQ ID NO: 6193
  Cyclic GFR-binding peptide
  MOD_RES (6)..(7)..(38)..(40): Xaa is C or S

SEQ ID NO: 44808 - protein, 28 aa, Artificial Sequence
  Cyclic GFR-binding peptide
SQDLSAISILYLIGKTPKILKNYQMIVK

SEQ ID NO: 44809 - protein, 23 aa, Artificial Sequence
  Cyclic GFR-binding peptide
DLSATSILYYVGRTPKVLRKHRM

SEQ ID NO: 44810 - protein, 26 aa, Artificial Sequence
  Cyclic GFR-binding peptide
PTELSPISMLYKDENEKVVLKYHYDM

SEQ ID NO: 44811 - protein, 23 aa, Artificial Sequence
  Cyclic GFR-binding peptide
QDLNAISILYFVGRTPKVLKKYR

SEQ ID NO: 44812 - protein, 34 aa, Artificial Sequence
  Cyclic GFR-binding peptide
  MOD_RES (4)..(5): Xaa is C or S
PKAXXVPTELNAISMLYFDEYDKVVLKKYREMVV

SEQ ID NO: 44813 - protein, 28 aa, Artificial Sequence
  Cyclic GFR-binding peptide
  MOD_RES (28)..(28): Xaa is C or S
ALNAISILYFVGRKPKVLKKYRMIVRSX

SEQ ID NO: 44814 - protein, 36 aa, Artificial Sequence; identical to SEQ ID NO: 6195
  Cyclic GFR-binding peptide
  MOD_RES (4)..(5)..(36): Xaa is C or S

SEQ ID NO: 44815 - protein, 29 aa, Artificial Sequence
  Cyclic GFR-binding peptide
TKLSPISVLYKDSSNNVILKYHYNMVVKA

SEQ ID NO: 44816 - protein, 28 aa, Artificial Sequence
  Cyclic GFR-binding peptide
TKLSAISVLYLDDMGVPTLKNYQEGMSV

SEQ ID NO: 44817 - protein, 24 aa, Artificial Sequence
  Cyclic GFR-binding peptide
LSATSMLYYDENEKVVLRKHRDMV

SEQ ID NO: 44818 - protein, 27 aa, Artificial Sequence
  Cyclic GFR-binding peptide
DLNAISILYFIGKTPKILKKYRMIVKS

SEQ ID NO: 44819 - protein, 20 aa, Artificial Sequence
  Cyclic GFR-binding peptide
SATSVLYYDDMGVPTLRKHR

SEQ ID NO: 44820 - protein, 26 aa, Artificial Sequence
  Cyclic GFR-binding peptide
KLSPISVLYKDDSSNVILKYHYNMVV

SEQ ID NO: 44821 - protein, 33 aa, Artificial Sequence
  Cyclic GFR-binding peptide
  MOD_RES (1)..(1): Xaa is C or S
XRPTQVQLSAISVLYLEIVRKKPIFLKNYQTLE

SEQ ID NO: 44822 - protein, 27 aa, Artificial Sequence
  Cyclic GFR-binding peptide
PQDLNAISILYFVGRTPKVLKKYRMVV

SEQ ID NO: 44823 - protein, 27 aa, Artificial Sequence
  Cyclic GFR-binding peptide
APTKLSPISVLYKDSSNNVILKYHYNM

SEQ ID NO: 44824 - protein, 41 aa, Artificial Sequence; identical to SEQ ID NO: 6197
  Cyclic GFR-binding peptide
  MOD_RES (2)..(39)..(41): Xaa is C or S

SEQ ID NO: 44825 - protein, 26 aa, Artificial Sequence
  Cyclic GFR-binding peptide
QVQLNAISVLYFEIVRKKPIFLKKYR

SEQ ID NO: 44826 - protein, 32 aa, Artificial Sequence; identical to SEQ ID NO: 6198
  Cyclic GFR-binding peptide
  MOD_RES (1)..(1): Xaa is C or S

SEQ ID NO: 44827 - protein, 22 aa, Artificial Sequence
  Cyclic GFR-binding peptide
KLSPISVLYKDDSSNVILKYHY

SEQ ID NO: 44828 - protein, 33 aa, Artificial Sequence; identical to SEQ ID NO: 6199
  Cyclic GFR-binding peptide
  MOD_RES (1)..(2)..(33): Xaa is C or S

SEQ ID NO: 44829 - protein, 20 aa, Artificial Sequence
  Cyclic GFR-binding peptide
SPISILYKIGKTPKILKYHY

SEQ ID NO: 44830 - protein, 37 aa, Artificial Sequence; identical to SEQ ID NO: 6201
  Cyclic GFR-binding peptide
  MOD_RES (2)..(2): Xaa is C or S

SEQ ID NO: 44831 - protein, 30 aa, Artificial Sequence
  Cyclic GFR-binding peptide
QLSAISVLYLEIVRKKPIFLKNYQTLEDHL

SEQ ID NO: 44832 - protein, 30 aa, Artificial Sequence; identical to SEQ ID NO: 6202
  Cyclic GFR-binding peptide

SEQ ID NO: 44833 - protein, 37 aa, Artificial Sequence; identical to SEQ ID NO: 6205
  Cyclic GFR-binding peptide
  MOD_RES (2)..(3)..(34)..(36): Xaa is C or S

SEQ ID NO: 44834 - protein, 25 aa, Artificial Sequence
  Cyclic GFR-binding peptide
VSQDLSPISILYKIGKTPKILKYHY

SEQ ID NO: 44835 - protein, 39 aa, Artificial Sequence; identical to SEQ ID NO: 6207
  Cyclic GFR-binding peptide
  MOD_RES (5)..(6)..(38): Xaa is C or S

SEQ ID NO: 44836 - protein, 37 aa, Artificial Sequence; identical to SEQ ID NO: 6206
  Cyclic GFR-binding peptide
  MOD_RES (3)..(4)..(36): Xaa is C or S

SEQ ID NO: 44837 - protein, 28 aa, Artificial Sequence
  Cyclic GFR-binding peptide
  MOD_RES (1)..(1): Xaa is C or S
XVPQALSPISILYKVGRKPKVLKYHYMI

SEQ ID NO: 44838 - protein, 26 aa, Artificial Sequence
  Cyclic GFR-binding peptide
LNAISMLYFDENEKVVLKKYRDMVVE

SEQ ID NO: 44839 - protein, 27 aa, Artificial Sequence
  Cyclic GFR-binding peptide
  MOD_RES (27)..(27): Xaa is C or S
SAISVLYLDSSNNVILKNYQNMVVKAX

SEQ ID NO: 44840 - protein, 27 aa, Artificial Sequence
  Cyclic GFR-binding peptide
QALSAISILYLVGRKPKVLKNYQMIVR

SEQ ID NO: 44841 - protein, 36 aa, Artificial Sequence; identical to SEQ ID NO: 6210
  Cyclic GFR-binding peptide
  MOD_RES (1)..(33)..(35): Xaa is C or S

SEQ ID NO: 44842 - protein, 39 aa, Artificial Sequence; identical to SEQ ID NO: 6211
  Cyclic GFR-binding peptide
  MOD_RES (4)..(5)..(37)..(39): Xaa is C or S

SEQ ID NO: 44843 - protein, 27 aa, Artificial Sequence
  Cyclic GFR-binding peptide
TQLSPISVLYKDDSSNVILKYHYNMVV

SEQ ID NO: 44844 - protein, 32 aa, Artificial Sequence
  Cyclic GFR-binding peptide
  MOD_RES (3)..(4): Xaa is C or S
KAXXVPTELNAISMLYFDEYDKVVLKKYREMV

SEQ ID NO: 44845 - protein, 24 aa, Artificial Sequence
  Cyclic GFR-binding peptide
TELSPISMLYKDENEKVVLKYHYD

SEQ ID NO: 44846 - protein, 34 aa, Artificial Sequence; identical to SEQ ID NO: 6213
  Cyclic GFR-binding peptide
  MOD_RES (33)..(33): Xaa is C or S

SEQ ID NO: 44847 - protein, 30 aa, Artificial Sequence
  Cyclic GFR-binding peptide
  MOD_RES (4)..(5): Xaa is C or S
PKAXXVPTELSATSMLYYDENEKVVLRKHR

SEQ ID NO: 44848 - protein, 26 aa, Artificial Sequence
  Cyclic GFR-binding peptide
ALSPISILYKVGRKPKVLKYHYMIVR

SEQ ID NO: 44849 - protein, 31 aa, Artificial Sequence
  Cyclic GFR-binding peptide
  MOD_RES (1)..(2): Xaa is C or S
XXVPTELSATSMLYYDENEKVVLRKHRDMVV

SEQ ID NO: 44850 - protein, 26 aa, Artificial Sequence
  Cyclic GFR-binding peptide
SATSVLYYEIVRKKPIFLRKHRTLED

SEQ ID NO: 44851 - protein, 27 aa, Artificial Sequence
  Cyclic GFR-binding peptide
  MOD_RES (26)..(26): Xaa is C or S
SAISILYLIGKTPKILKNYQMIVKSXK

SEQ ID NO: 44852 - protein, 28 aa, Artificial Sequence
  Cyclic GFR-binding peptide
ELSPISMLYKDENEKVVLKYHYDMVVEG

SEQ ID NO: 44853 - protein, 35 aa, Artificial Sequence
  Cyclic GFR-binding peptide
  MOD_RES (32)..(34): Xaa is C or S
QLSATSVLYYEIVRKKPIFLRKHRTLEDHLAXKXE

SEQ ID NO: 44854 - protein, 33 aa, Artificial Sequence; identical to SEQ ID NO: 6215
  Cyclic GFR-binding peptide
  MOD_RES (32)..(32): Xaa is C or S

SEQ ID NO: 44855 - protein, 24 aa, Artificial Sequence
  Cyclic GFR-binding peptide
SPISILYKIGKTPKILKYHYMIVK

SEQ ID NO: 44856 - protein, 36 aa, Artificial Sequence; identical to SEQ ID NO: 6216
  Cyclic GFR-binding peptide

SEQ ID NO: 44857 - protein, 22 aa, Artificial Sequence
  Cyclic GFR-binding peptide
NAISVLYFEIVRKKPIFLKKYR

SEQ ID NO: 44858 - protein, 27 aa, Artificial Sequence
  Cyclic GFR-binding peptide
  MOD_RES (1)..(2): Xaa is C or S
XXVSQDLNAISILYFIGKTPKILKKYR

SEQ ID NO: 44859 - protein, 27 aa, Artificial Sequence
  Cyclic GFR-binding peptide
  MOD_RES (1)..(2): Xaa is C or S
XXVPTKLSAISVLYLDDMGVPTLKNYQ

SEQ ID NO: 44860 - protein, 31 aa, Artificial Sequence
  Cyclic GFR-binding peptide
  MOD_RES (4)..(5): Xaa is C or S
PKPXXAPTKLSPISVLYKDDSSNVILKYHYN

SEQ ID NO: 44861 - protein, 35 aa, Artificial Sequence; identical to SEQ ID NO: 6217
  Cyclic GFR-binding peptide
  MOD_RES (3)..(4)..(35): Xaa is C or S

SEQ ID NO: 44862 - protein, 34 aa, Artificial Sequence; identical to SEQ ID NO: 6218
  Cyclic GFR-binding peptide
  MOD_RES (2)..(3): Xaa is C or S

SEQ ID NO: 44863 - protein, 29 aa, Artificial Sequence
  Cyclic GFR-binding peptide
  MOD_RES (28)..(28): Xaa is C or S
LNAISVLYFDSSNNVILKKYRNMVVKAXG

SEQ ID NO: 44864 - protein, 26 aa, Artificial Sequence
  Cyclic GFR-binding peptide
LSAISVLYLDSSNNVILKNYQNMVVK

SEQ ID NO: 44865 - protein, 32 aa, Artificial Sequence
  Cyclic GFR-binding peptide
  MOD_RES (31)..(31): Xaa is C or S
PTQLSATSVLYYDDSSNVILRKHRNMVVRAXG

SEQ ID NO: 44866 - protein, 33 aa, Artificial Sequence
  Cyclic GFR-binding peptide
  MOD_RES (33)..(33): Xaa is C or S
VQLNAISVLYFEIVRKKPIFLKKYRTLEDHLAX

SEQ ID NO: 44867 - protein, 33 aa, Artificial Sequence; identical to SEQ ID NO: 6224
  Cyclic GFR-binding peptide
  MOD_RES (2)..(3): Xaa is C or S

SEQ ID NO: 44868 - protein, 38 aa, Artificial Sequence; identical to SEQ ID NO: 6223
  Cyclic GFR-binding peptide
  MOD_RES (5)..(37): Xaa is C or S

SEQ ID NO: 44869 - protein, 33 aa, Artificial Sequence
  Cyclic GFR-binding peptide
  MOD_RES (4)..(5): Xaa is C or S
PKAXXVPTELSATSMLYYDENEKVVLRKHRDMV

SEQ ID NO: 44870 - protein, 37 aa, Artificial Sequence; identical to SEQ ID NO: 6225
  Cyclic GFR-binding peptide
  MOD_RES (6)..(6): Xaa is C or S

SEQ ID NO: 44871 - protein, 29 aa, Artificial Sequence
  Cyclic GFR-binding peptide
VPTKLNAISVLYFDDMGVPTLKKYREGMS

SEQ ID NO: 44872 - protein, 35 aa, Artificial Sequence; identical to SEQ ID NO: 6227
  Cyclic GFR-binding peptide
  MOD_RES (1)..(33)..(35): Xaa is C or S

SEQ ID NO: 44873 - protein, 28 aa, Artificial Sequence
  Cyclic GFR-binding peptide
APTKLSPISVLYKDSSNNVILKYHYNMV

SEQ ID NO: 44874 - protein, 28 aa, Artificial Sequence
  Cyclic GFR-binding peptide
  MOD_RES (1)..(2): Xaa is C or S
XXVPTELNAISMLYFDENEKVVLKKYRD

SEQ ID NO: 44875 - protein, 34 aa, Artificial Sequence
  Cyclic GFR-binding peptide
  MOD_RES (4)..(5): Xaa is C or S
PKPXXAPTQLSPISVLYKDDSSNVILKYHYNMVV

SEQ ID NO: 44876 - protein, 30 aa, Artificial Sequence
  Cyclic GFR-binding peptide
  MOD_RES (3)..(4): Xaa is C or S
KPXXAPTQLSATSVLYYDDSSNVILRKHRN

SEQ ID NO: 44877 - protein, 35 aa, Artificial Sequence; identical to SEQ ID NO: 6229
  Cyclic GFR-binding peptide
  MOD_RES (3)..(4): Xaa is C or S

SEQ ID NO: 44878 - protein, 31 aa, Artificial Sequence
  Cyclic GFR-binding peptide
  MOD_RES (3)..(4): Xaa is C or S
KAXXAPTKLSPISVLYKDSSNNVILKYHYNM

SEQ ID NO: 44879 - protein, 33 aa, Artificial Sequence
  Cyclic GFR-binding peptide
  MOD_RES (6)..(7): Xaa is C or S
ASASPXXVSQDLSPISILYKIGKTPKILKYHYM

SEQ ID NO: 44880 - protein, 24 aa, Artificial Sequence
  Cyclic GFR-binding peptide
LNAISMLYFDENEKVVLKKYRDMV

SEQ ID NO: 44881 - protein, 31 aa, Artificial Sequence
  Cyclic GFR-binding peptide
  MOD_RES (4)..(5): Xaa is C or S
ASPXXVPQDLSATSILYYVGRTPKVLRKHRM

SEQ ID NO: 44882 - protein, 39 aa, Artificial Sequence; identical to SEQ ID NO: 6231
  Cyclic GFR-binding peptide
  MOD_RES (4)..(4): Xaa is C or S

SEQ ID NO: 44883 - protein, 23 aa, Artificial Sequence
  Cyclic GFR-binding peptide
TELNAISMLYFDENEKVVLKKYR

SEQ ID NO: 44884 - protein, 25 aa, Artificial Sequence
  Cyclic GFR-binding peptide
PQDLSATSILYYVGRTPKVLRKHRM

SEQ ID NO: 44885 - protein, 26 aa, Artificial Sequence
  Cyclic GFR-binding peptide
SATSMLYYDENEKVVLRKHRDMVVEG

SEQ ID NO: 44886 - protein, 25 aa, Artificial Sequence
  Cyclic GFR-binding peptide
TKLNAISVLYFDSSNNVILKKYRNM

SEQ ID NO: 44887 - protein, 40 aa, Artificial Sequence; identical to SEQ ID NO: 6233
  Cyclic GFR-binding peptide
  MOD_RES (5)..(6)..(37)..(39): Xaa is C or S

SEQ ID NO: 44888 - protein, 35 aa, Artificial Sequence; identical to SEQ ID NO: 6234
  Cyclic GFR-binding peptide
  MOD_RES (2)..(3)..(34): Xaa is C or S

SEQ ID NO: 44889 - protein, 24 aa, Artificial Sequence
  Cyclic GFR-binding peptide
LSAISILYLVGRTPKVLKNYQMVV

SEQ ID NO: 44890 - protein, 27 aa, Artificial Sequence
  Cyclic GFR-binding peptide
  MOD_RES (27)..(27): Xaa is C or S
SATSVLYYDDSSNVILRKHRNMVVRSX

SEQ ID NO: 44891 - protein, 29 aa, Artificial Sequence
  Cyclic GFR-binding peptide
PQDLSATSILYYVGRTPKVLRKHRMVVKS

SEQ ID NO: 44892 - protein, 24 aa, Artificial Sequence
  Cyclic GFR-binding peptide
NAISMLYFDENEKVVLKKYRDMVV

SEQ ID NO: 44893 - protein, 27 aa, Artificial Sequence
  Cyclic GFR-binding peptide
  MOD_RES (1)..(2): Xaa is C or S
XXVPQDLSATSILYYVGRTPKVLRKHR

SEQ ID NO: 44894 - protein, 31 aa, Artificial Sequence
  Cyclic GFR-binding peptide
  MOD_RES (5)..(6): Xaa is C or S
IPKAXXVPTELSATSMLYYDENEKVVLRKHR

SEQ ID NO: 44895 - protein, 45 aa, Artificial Sequence; identical to SEQ ID NO: 6236
  Cyclic GFR-binding peptide
  MOD_RES (5)..(42)..(44): Xaa is C or S

SEQ ID NO: 44896 - protein, 26 aa, Artificial Sequence
  Cyclic GFR-binding peptide
TELSPISMLYKDEYDKVVLKYHYEMV

SEQ ID NO: 44897 - protein, 30 aa, Artificial Sequence
  Cyclic GFR-binding peptide
  MOD_RES (1)..(2): Xaa is C or S
XXVPQALNAISILYFVGRKPKVLKKYRMIV

SEQ ID NO: 44898 - protein, 29 aa, Artificial Sequence
  Cyclic GFR-binding peptide
VPTELSPISMLYKDENEKVVLKYHYDMVV

SEQ ID NO: 44899 - protein, 41 aa, Artificial Sequence; identical to SEQ ID NO: 6237
  Cyclic GFR-binding peptide
  MOD_RES (5)..(6)..(38)..(40): Xaa is C or S

SEQ ID NO: 44900 - protein, 42 aa, Artificial Sequence; identical to SEQ ID NO: 6238
  Cyclic GFR-binding peptide
  MOD_RES (6)..(7)..(39)..(41): Xaa is C or S

SEQ ID NO: 44901 - protein, 35 aa, Artificial Sequence
  Cyclic GFR-binding peptide
  MOD_RES (34)..(34): Xaa is C or S
QVQLSATSVLYYEIVRKKPIFLRKHRTLEDHLAXK

SEQ ID NO: 44902 - protein, 29 aa, Artificial Sequence
  Cyclic GFR-binding peptide
  MOD_RES (27)..(29): Xaa is C or S
SATSVLYYDDSSNVILRKHRNMVVRAXGX

SEQ ID NO: 44903 - protein, 40 aa, Artificial Sequence; identical to SEQ ID NO: 6241
  Cyclic GFR-binding peptide
  MOD_RES (2)..(39): Xaa is C or S

SEQ ID NO: 44904 - protein, 38 aa, Artificial Sequence; identical to SEQ ID NO: 6242
  Cyclic GFR-binding peptide
  MOD_RES (4)..(36)..(38): Xaa is C or S

SEQ ID NO: 44905 - protein, 35 aa, Artificial Sequence; identical to SEQ ID NO: 6243
  Cyclic GFR-binding peptide
  MOD_RES (3)..(4): Xaa is C or S

SEQ ID NO: 44906 - protein, 29 aa, Artificial Sequence
  Cyclic GFR-binding peptide
  MOD_RES (3)..(4): Xaa is C or S
KPXXAPTQLSATSVLYYDDSSNVILRKHR

SEQ ID NO: 44907 - protein, 37 aa, Artificial Sequence; identical to SEQ ID NO: 6244
  Cyclic GFR-binding peptide
  MOD_RES (36)..(36): Xaa is C or S

SEQ ID NO: 44908 - protein, 32 aa, Artificial Sequence
  Cyclic GFR-binding peptide
  MOD_RES (31)..(31): Xaa is C or S
PTELNAISMLYFDENEKVVLKKYRDMVVEGXG

SEQ ID NO: 44909 - protein, 37 aa, Artificial Sequence; identical to SEQ ID NO: 6245
  Cyclic GFR-binding peptide
  MOD_RES (4)..(5)..(36): Xaa is C or S

SEQ ID NO: 44910 - protein, 33 aa, Artificial Sequence
  Cyclic GFR-binding peptide
  MOD_RES (31)..(33): Xaa is C or S
LSATSVLYYEIVRKKPIFLRKHRTLEDHLAXKX

SEQ ID NO: 44911 - protein, 28 aa, Artificial Sequence
  Cyclic GFR-binding peptide
  MOD_RES (2)..(3): Xaa is C or S
PXXAPTQLSPISVLYKDDSSNVILKYHY

SEQ ID NO: 44912 - protein, 33 aa, Artificial Sequence
  Cyclic GFR-binding peptide
  MOD_RES (5)..(6): Xaa is C or S
IPKAXXVPTELSPISMLYKDEYDKVVLKYHYEM

SEQ ID NO: 44913 - protein, 25 aa, Artificial Sequence
  Cyclic GFR-binding peptide
VSQDLSATSILYYIGKTPKILRKHR

SEQ ID NO: 44914 - protein, 31 aa, Artificial Sequence
  Cyclic GFR-binding peptide
  MOD_RES (4)..(5): Xaa is C or S
PKAXXAPTKLNAISVLYFDSSNNVILKKYRN

SEQ ID NO: 44915 - protein, 28 aa, Artificial Sequence
  Cyclic GFR-binding peptide
  MOD_RES (1)..(2): Xaa is C or S
XXVPTELNAISMLYFDEYDKVVLKKYRE

SEQ ID NO: 44916 - protein, 29 aa, Artificial Sequence
  Cyclic GFR-binding peptide
VPTELSATSMLYYDENEKVVLRKHRDMVV

SEQ ID NO: 44917 - protein, 37 aa, Artificial Sequence; identical to SEQ ID NO: 6247
  Cyclic GFR-binding peptide
  MOD_RES (4)..(5)..(36): Xaa is C or S

SEQ ID NO: 44918 - protein, 41 aa, Artificial Sequence; identical to SEQ ID NO: 6249
  Cyclic GFR-binding peptide
  MOD_RES (6)..(7)..(38)..(40): Xaa is C or S

SEQ ID NO: 44919 - protein, 26 aa, Artificial Sequence
  Cyclic GFR-binding peptide
QLSATSVLYYDDSSNVILRKHRNMVV

SEQ ID NO: 44920 - protein, 27 aa, Artificial Sequence
  Cyclic GFR-binding peptide
VSQDLSAISILYLIGKTPKILKNYQMI

SEQ ID NO: 44921 - protein, 31 aa, Artificial Sequence
  Cyclic GFR-binding peptide
  MOD_RES (1)..(2): Xaa is C or S
XXAPTKLSAISVLYLDSSNNVILKNYQNMVV

SEQ ID NO: 44922 - protein, 30 aa, Artificial Sequence
  Cyclic GFR-binding peptide
  MOD_RES (29)..(29): Xaa is C or S
QDLSATSILYYVGRTPKVLRKHRMVVKSXK

SEQ ID NO: 44923 - protein, 27 aa, Artificial Sequence
  Cyclic GFR-binding peptide
SAISILYLIGKTPKILKNYQIGKTPKI

SEQ ID NO: 44924 - protein, 27 aa, Artificial Sequence
  Cyclic GFR-binding peptide
QLSPISVLYKDDSSNVILKYHYNMVVR

SEQ ID NO: 44925 - protein, 33 aa, Artificial Sequence; identical to SEQ ID NO: 6254
  Cyclic GFR-binding peptide
  MOD_RES (1)..(2): Xaa is C or S

SEQ ID NO: 44926 - protein, 27 aa, Artificial Sequence
  Cyclic GFR-binding peptide
KLSAISVLYLDDMGVPTLKNYQEGMSV

SEQ ID NO: 44927 - protein, 22 aa, Artificial Sequence
  Cyclic GFR-binding peptide
DLSPISILYKVGRTPKVLKYHY

SEQ ID NO: 44928 - protein, 26 aa, Artificial Sequence
  Cyclic GFR-binding peptide
ELSATSMLYYDENEKVVLRKHRDMVV

SEQ ID NO: 44929 - protein, 26 aa, Artificial Sequence
  Cyclic GFR-binding peptide
TQLSPISVLYKDDSSNVILKYHYNMV

SEQ ID NO: 44930 - protein, 29 aa, Artificial Sequence
  Cyclic GFR-binding peptide
PTQVQLSATSVLYYEIVRKKPIFLRKHRT

SEQ ID NO: 44931 - protein, 27 aa, Artificial Sequence
  Cyclic GFR-binding peptide
KLNAISVLYFDSSNNVILKKYRNMVVK

SEQ ID NO: 44932 - protein, 36 aa, Artificial Sequence; identical to SEQ ID NO: 6258
  Cyclic GFR-binding peptide
  MOD_RES (3)..(35): Xaa is C or S

SEQ ID NO: 44933 - protein, 40 aa, Artificial Sequence; identical to SEQ ID NO: 6262
  Cyclic GFR-binding peptide
  MOD_RES (6)..(7)..(39): Xaa is C or S

SEQ ID NO: 44934 - protein, 39 aa, Artificial Sequence; identical to SEQ ID NO: 6263
  Cyclic GFR-binding peptide
  MOD_RES (6)..(7)..(38): Xaa is C or S

SEQ ID NO: 44935 - protein, 32 aa, Artificial Sequence
  Cyclic GFR-binding peptide
  MOD_RES (3)..(4): Xaa is C or S
SPXXVSQDLSPISILYKIGKTPKILKYHYMIV

SEQ ID NO: 44936 - protein, 32 aa, Artificial Sequence
  Cyclic GFR-binding peptide
  MOD_RES (6)..(7): Xaa is C or S
ASASPXXVPQDLNAISILYFVGRTPKVLKKYR

SEQ ID NO: 44937 - protein, 35 aa, Artificial Sequence
  Cyclic GFR-binding peptide
  MOD_RES (6)..(7): Xaa is C or S
KIPKAXXVPTELSPISMLYKDENEKVVLKYHYDMV

SEQ ID NO: 44938 - protein, 36 aa, Artificial Sequence
  Cyclic GFR-binding peptide
  MOD_RES (6)..(7): Xaa is C or S
ASASPXXVSQDLSPISILYKIGKTPKILKYHYMIVK

SEQ ID NO: 44939 - protein, 28 aa, Artificial Sequence
  Cyclic GFR-binding peptide
TKLSATSVLYYDDSSNVILRKHRNMVVR

SEQ ID NO: 44940 - protein, 39 aa, Artificial Sequence; identical to SEQ ID NO: 6268
  Cyclic GFR-binding peptide
  MOD_RES (6)..(7)..(39): Xaa is C or S

SEQ ID NO: 44941 - protein, 31 aa, Artificial Sequence; identical to SEQ ID NO: 6270
  Cyclic GFR-binding peptide
  MOD_RES (1)..(1): Xaa is C or S

SEQ ID NO: 44942 - protein, 32 aa, Artificial Sequence
  Cyclic GFR-binding peptide
RPTQVQLSPISVLYKEIVRKKPIFLKYHYTLE

SEQ ID NO: 44943 - protein, 29 aa, Artificial Sequence
  Cyclic GFR-binding peptide
  MOD_RES (28)..(28): Xaa is C or S
LSPISVLYKDSSNNVILKYHYNMVVKAXG

SEQ ID NO: 44944 - protein, 32 aa, Artificial Sequence; identical to SEQ ID NO: 6273
  Cyclic GFR-binding peptide
  MOD_RES (1)..(2): Xaa is C or S

SEQ ID NO: 44945 - protein, 26 aa, Artificial Sequence
  Cyclic GFR-binding peptide
ELNAISMLYFDEYDKVVLKKYREMVV

SEQ ID NO: 44946 - protein, 37 aa, Artificial Sequence
  Cyclic GFR-binding peptide
  MOD_RES (34)..(36): Xaa is C or S
QVQLSAISVLYLEIVRKKPIFLKNYQTLEDHLAXKXE

SEQ ID NO: 44947 - protein, 27 aa, Artificial Sequence
  Cyclic GFR-binding peptide
  MOD_RES (1)..(1): Xaa is C or S
XAPTQLSAISVLYLDDSSNVILKNYQN

SEQ ID NO: 44948 - protein, 41 aa, Artificial Sequence; identical to SEQ ID NO: 6277
  Cyclic GFR-binding peptide
  MOD_RES (2)..(39)..(41): Xaa is C or S

SEQ ID NO: 44949 - protein, 35 aa, Artificial Sequence
  Cyclic GFR-binding peptide
  MOD_RES (5)..(6): Xaa is C or S
IPKAXXVPTELNAISMLYFDENEKVVLKKYRDMVV

SEQ ID NO: 44950 - protein, 29 aa, Artificial Sequence
  Cyclic GFR-binding peptide
  MOD_RES (1)..(2): Xaa is C or S
XXVSQDLNAISILYFIGKTPKILKKYRMI

SEQ ID NO: 44951 - protein, 35 aa, Artificial Sequence; identical to SEQ ID NO: 6278
  Cyclic GFR-binding peptide
  MOD_RES (2)..(3)..(35): Xaa is C or S

SEQ ID NO: 44952 - protein, 32 aa, Artificial Sequence
  Cyclic GFR-binding peptide
  MOD_RES (5)..(6): Xaa is C or S
SASPXXVPQDLSAISILYLVGRTPKVLKNYQM

SEQ ID NO: 44953 - protein, 36 aa, Artificial Sequence
  Cyclic GFR-binding peptide
  MOD_RES (34)..(36): Xaa is C or S
QVQLSATSVLYYEIVRKKPIFLRKHRTLEDHLAXKX

SEQ ID NO: 44954 - protein, 26 aa, Artificial Sequence
  Cyclic GFR-binding peptide
SQDLSAISILYLIGKTPKILKNYQMI

SEQ ID NO: 44955 - protein, 26 aa, Artificial Sequence
  Cyclic GFR-binding peptide
SQDLSPISILYKIGKTPKILKYHYMI

SEQ ID NO: 44956 - protein, 35 aa, Artificial Sequence; identical to SEQ ID NO: 6281
  Cyclic GFR-binding peptide
  MOD_RES (4)..(5): Xaa is C or S

SEQ ID NO: 44957 - protein, 30 aa, Artificial Sequence
  Cyclic GFR-binding peptide
  MOD_RES (4)..(5): Xaa is C or S
PKAXXVPTELSPISMLYKDENEKVVLKYHY

SEQ ID NO: 44958 - protein, 25 aa, Artificial Sequence
  Cyclic GFR-binding peptide
QDLSAISILYLVGRTPKVLKNYQMV

SEQ ID NO: 44959 - protein, 21 aa, Artificial Sequence
  Cyclic GFR-binding peptide
LSATSVLYYDDSSNVILRKHR

SEQ ID NO: 44960 - protein, 34 aa, Artificial Sequence; identical to SEQ ID NO: 6282
  Cyclic GFR-binding peptide
  MOD_RES (32)..(34): Xaa is C or S

SEQ ID NO: 44961 - protein, 34 aa, Artificial Sequence; identical to SEQ ID NO: 6283
  Cyclic GFR-binding peptide
  MOD_RES (2)..(3)..(34): Xaa is C or S

SEQ ID NO: 44962 - protein, 30 aa, Artificial Sequence
  Cyclic GFR-binding peptide
  MOD_RES (3)..(4): Xaa is C or S
SPXXVPQDLSATSILYYVGRTPKVLRKHRM

SEQ ID NO: 44963 - protein, 28 aa, Artificial Sequence
  Cyclic GFR-binding peptide
TKLSAISVLYLDSSNNVILKNYQNMVVK

SEQ ID NO: 44964 - protein, 31 aa, Artificial Sequence
  Cyclic GFR-binding peptide
  MOD_RES (30)..(30): Xaa is C or S
SQDLSATSILYYIGKTPKILRKHRMIVKSXK

SEQ ID NO: 44965 - protein, 38 aa, Artificial Sequence; identical to SEQ ID NO: 6284
  Cyclic GFR-binding peptide
  MOD_RES (6)..(7)..(38): Xaa is C or S

SEQ ID NO: 44966 - protein, 26 aa, Artificial Sequence
  Cyclic GFR-binding peptide
VPQALSATSILYYVGRKPKVLRKHRM

SEQ ID NO: 44967 - protein, 30 aa, Artificial Sequence
  Cyclic GFR-binding peptide
  MOD_RES (28)..(30): Xaa is C or S
SATSVLYYDDMGVPTLRKHREGMSVAEXGX

SEQ ID NO: 44968 - protein, 32 aa, Artificial Sequence
  Cyclic GFR-binding peptide
  MOD_RES (5)..(6): Xaa is C or S
VPKAXXAPTKLSPISVLYKDSSNNVILKYHYN

SEQ ID NO: 44969 - protein, 28 aa, Artificial Sequence
  Cyclic GFR-binding peptide
  MOD_RES (28)..(28): Xaa is C or S
DLSATSILYYIGKTPKILRKHRMIVKSX

SEQ ID NO: 44970 - protein, 41 aa, Artificial Sequence; identical to SEQ ID NO: 6294
  Cyclic GFR-binding peptide
  MOD_RES (3)..(40): Xaa is C or S

SEQ ID NO: 44971 - protein, 29 aa, Artificial Sequence
  Cyclic GFR-binding peptide
PTELNAISMLYFDEYDKVVLKKYREMVVE

SEQ ID NO: 44972 - protein, 33 aa, Artificial Sequence
  Cyclic GFR-binding peptide
  MOD_RES (4)..(5): Xaa is C or S
AAPXXVPQALSATSILYYVGRKPKVLRKHRMIV

SEQ ID NO: 44973 - protein, 28 aa, Artificial Sequence
  Cyclic GFR-binding peptide
PQALSPISILYKVGRKPKVLKYHYMIVR

SEQ ID NO: 44974 - protein, 37 aa, Artificial Sequence; identical to SEQ ID NO: 6295
  Cyclic GFR-binding peptide
  MOD_RES (2)..(3)..(35)..(37): Xaa is C or S

SEQ ID NO: 44975 - protein, 22 aa, Artificial Sequence
  Cyclic GFR-binding peptide
LSPISVLYKDDSSNVILKYHYN

SEQ ID NO: 44976 - protein, 29 aa, Artificial Sequence
  Cyclic GFR-binding peptide
  MOD_RES (28)..(28): Xaa is C or S
DLNAISILYFVGRTPKVLKKYRMVVKSXK

SEQ ID NO: 44977 - protein, 36 aa, Artificial Sequence; identical to SEQ ID NO: 6299
  Cyclic GFR-binding peptide
  MOD_RES (1)..(2)..(34)..(36): Xaa is C or S

SEQ ID NO: 44978 - protein, 32 aa, Artificial Sequence
  Cyclic GFR-binding peptide
  MOD_RES (31)..(31): Xaa is C or S
TKLSAISVLYLDDMGVPTLKNYQEGMSVAEXG

SEQ ID NO: 44979 - protein, 40 aa, Artificial Sequence; identical to SEQ ID NO: 6300
  Cyclic GFR-binding peptide
  MOD_RES (6)..(7)..(38)..(40): Xaa is C or S

SEQ ID NO: 44980 - protein, 27 aa, Artificial Sequence
  Cyclic GFR-binding peptide
  MOD_RES (1)..(1): Xaa is C or S
XVSQDLNAISILYFIGKTPKILKKYRM

SEQ ID NO: 44981 - protein, 32 aa, Artificial Sequence
  Cyclic GFR-binding peptide
  MOD_RES (30)..(32): Xaa is C or S
TKLSPISVLYKDDSSNVILKYHYNMVVRSXGX

SEQ ID NO: 44982 - protein, 36 aa, Artificial Sequence; identical to SEQ ID NO: 6302
  Cyclic GFR-binding peptide
  MOD_RES (4)..(5): Xaa is C or S

SEQ ID NO: 44983 - protein, 31 aa, Artificial Sequence
  Cyclic GFR-binding peptide
  MOD_RES (4)..(5): Xaa is C or S
AAPXXVPQALNAISILYFVGRKPKVLKKYRM

SEQ ID NO: 44984 - protein, 35 aa, Artificial Sequence; identical to SEQ ID NO: 6305
  Cyclic GFR-binding peptide
  MOD_RES (2)..(3): Xaa is C or S

SEQ ID NO: 44985 - protein, 31 aa, Artificial Sequence
  Cyclic GFR-binding peptide
  MOD_RES (2)..(3): Xaa is C or S
AXXVPTELSATSMLYYDEYDKVVLRKHREMV

SEQ ID NO: 44986 - protein, 30 aa, Artificial Sequence
  Cyclic GFR-binding peptide
  MOD_RES (30)..(30): Xaa is C or S
SPISVLYKEIVRKKPIFLKYHYTLEDHLAX

SEQ ID NO: 44987 - protein, 34 aa, Artificial Sequence; identical to SEQ ID NO: 6308
  Cyclic GFR-binding peptide
  MOD_RES (3)..(4): Xaa is C or S

SEQ ID NO: 44988 - protein, 32 aa, Artificial Sequence
  Cyclic GFR-binding peptide
  MOD_RES (6)..(7): Xaa is C or S
ASASPXXVPQDLSAISILYLVGRTPKVLKNYQ

SEQ ID NO: 44989 - protein, 34 aa, Artificial Sequence; identical to SEQ ID NO: 6311
  Cyclic GFR-binding peptide
  MOD_RES (3)..(3): Xaa is C or S

SEQ ID NO: 44990 - protein, 33 aa, Artificial Sequence; identical to SEQ ID NO: 6312
  Cyclic GFR-binding peptide
  MOD_RES (32)..(32): Xaa is C or S

SEQ ID NO: 44991 - protein, 34 aa, Artificial Sequence
  Cyclic GFR-binding peptide
  MOD_RES (5)..(5): Xaa is C or S
RNVQXRPTQVQLSPISVLYKEIVRKKPIFLKYHY

SEQ ID NO: 44992 - protein, 28 aa, Artificial Sequence
  Cyclic GFR-binding peptide
  MOD_RES (1)..(1): Xaa is C or S
XAPTKLSPISVLYKDSSNNVILKYHYNM

SEQ ID NO: 44993 - protein, 32 aa, Artificial Sequence
  Cyclic GFR-binding peptide
  MOD_RES (32)..(32): Xaa is C or S
PTKLNAISVLYFDDMGVPTLKKYREGMSVAEX

SEQ ID NO: 44994 - protein, 34 aa, Artificial Sequence
  Cyclic GFR-binding peptide
  MOD_RES (34)..(34): Xaa is C or S
QVQLSATSVLYYEIVRKKPIFLRKHRTLEDHLAX

SEQ ID NO: 44995 - protein, 20 aa, Artificial Sequence
  Cyclic GFR-binding peptide
SPISMLYKDENEKVVLKYHY

SEQ ID NO: 44996 - protein, 27 aa, Artificial Sequence
  Cyclic GFR-binding peptide
VPQDLNAISILYFVGRTPKVLKKYRMV

SEQ ID NO: 44997 - protein, 32 aa, Artificial Sequence
  Cyclic GFR-binding peptide
  MOD_RES (30)..(32): Xaa is C or S
TKLSPISVLYKDSSNNVILKYHYNMVVKAXGX

SEQ ID NO: 44998 - protein, 26 aa, Artificial Sequence
  Cyclic GFR-binding peptide
LSPISVLYKDSSNNVILKYHYNMVVK

SEQ ID NO: 44999 - protein, 32 aa, Artificial Sequence
  Cyclic GFR-binding peptide
  MOD_RES (6)..(7): Xaa is C or S
ASAAPXXVPQALSAISILYLVGRKPKVLKNYQ

SEQ ID NO: 45000 - protein, 29 aa, Artificial Sequence
  Cyclic GFR-binding peptide
  MOD_RES (1)..(2): Xaa is C or S
XXVPQALSPISILYKVGRKPKVLKYHYMI

SEQ ID NO: 45001 - protein, 27 aa, Artificial Sequence
  Cyclic GFR-binding peptide
QDLSATSILYYVGRTPKVLRKHRMVVK

SEQ ID NO: 45002 - protein, 30 aa, Artificial Sequence
  Cyclic GFR-binding peptide
  MOD_RES (1)..(2): Xaa is C or S
XXVPQALSATSILYYVGRKPKVLRKHRMIV

SEQ ID NO: 45003 - protein, 36 aa, Artificial Sequence
  Cyclic GFR-binding peptide
  MOD_RES (6)..(7): Xaa is C or S
ASAAPXXVPQALSAISILYLVGRKPKVLKNYQMIVR

SEQ ID NO: 45004 - protein, 37 aa, Artificial Sequence; identical to SEQ ID NO: 6320
  Cyclic GFR-binding peptide
  MOD_RES (3)..(4)..(36): Xaa is C or S

SEQ ID NO: 45005 - protein, 23 aa, Artificial Sequence
  Cyclic GFR-binding peptide
KLSATSVLYYDDSSNVILRKHRN

SEQ ID NO: 45006 - protein, 36 aa, Artificial Sequence
  Cyclic GFR-binding peptide
  MOD_RES (6)..(7): Xaa is C or S
ASASPXXVSQDLSATSILYYIGKTPKILRKHRMIVK

SEQ ID NO: 45007 - protein, 30 aa, Artificial Sequence
  Cyclic GFR-binding peptide
  MOD_RES (1)..(2): Xaa is C or S
XXVPTELSPISMLYKDENEKVVLKYHYDMV

SEQ ID NO: 45008 - protein, 30 aa, Artificial Sequence
  Cyclic GFR-binding peptide
  MOD_RES (1)..(2): Xaa is C or S
XXVPQALSPISILYKVGRKPKVLKYHYMIV

SEQ ID NO: 45009 - protein, 29 aa, Artificial Sequence
  Cyclic GFR-binding peptide
  MOD_RES (3)..(4): Xaa is C or S
KAXXAPTKLSPISVLYKDSSNNVILKYHY

SEQ ID NO: 45010 - protein, 32 aa, Artificial Sequence; identical to SEQ ID NO: 6322
  Cyclic GFR-binding peptide
  MOD_RES (1)..(2): Xaa is C or S

SEQ ID NO: 45011 - protein, 31 aa, Artificial Sequence
  Cyclic GFR-binding peptide
  MOD_RES (28)..(30): Xaa is C or S
LNAISMLYFDEYDKVVLKKYREMVVEGXGXR

SEQ ID NO: 45012 - protein, 37 aa, Artificial Sequence; identical to SEQ ID NO: 6324
  Cyclic GFR-binding peptide
  MOD_RES (2)..(3)..(35)..(37): Xaa is C or S

SEQ ID NO: 45013 - protein, 30 aa, Artificial Sequence
  Cyclic GFR-binding peptide
  MOD_RES (3)..(4): Xaa is C or S
APXXVPQALNAISILYFVGRKPKVLKKYRM

SEQ ID NO: 45014 - protein, 38 aa, Artificial Sequence; identical to SEQ ID NO: 6327
  Cyclic GFR-binding peptide
  MOD_RES (5)..(6)..(37): Xaa is C or S

SEQ ID NO: 45015 - protein, 27 aa, Artificial Sequence
  Cyclic GFR-binding peptide
  MOD_RES (26)..(26): Xaa is C or S
NAISILYFVGRTPKVLKKYRMVVKSXK

SEQ ID NO: 45016 - protein, 24 aa, Artificial Sequence
  Cyclic GFR-binding peptide
ELSPISMLYKDENEKVVLKYHYDM

SEQ ID NO: 45017 - protein, 41 aa, Artificial Sequence; identical to SEQ ID NO: 6329
  Cyclic GFR-binding peptide
  MOD_RES (3)..(40): Xaa is C or S

SEQ ID NO: 45018 - protein, 24 aa, Artificial Sequence
  Cyclic GFR-binding peptide
PTKLSAISVLYLDDMGVPTLKNYQ

SEQ ID NO: 45019 - protein, 32 aa, Artificial Sequence; identical to SEQ ID NO: 6332
  Cyclic GFR-binding peptide
  MOD_RES (1)..(32): Xaa is C or S

SEQ ID NO: 45020 - protein, 32 aa, Artificial Sequence; identical to SEQ ID NO: 6333
  Cyclic GFR-binding peptide
  MOD_RES (1)..(2): Xaa is C or S

SEQ ID NO: 45021 - protein, 25 aa, Artificial Sequence
  Cyclic GFR-binding peptide
ELSATSMLYYDENEKVVLRKHRDMV

SEQ ID NO: 45022 - protein, 20 aa, Artificial Sequence
  Cyclic GFR-binding peptide
SATSILYYVGRKPKVLRKHR

SEQ ID NO: 45023 - protein, 34 aa, Artificial Sequence; identical to SEQ ID NO: 6334
  Cyclic GFR-binding peptide
  MOD_RES (3)..(4): Xaa is C or S

SEQ ID NO: 45024 - protein, 33 aa, Artificial Sequence; identical to SEQ ID NO: 6335
  Cyclic GFR-binding peptide
  MOD_RES (31)..(33): Xaa is C or S

SEQ ID NO: 45025 - protein, 31 aa, Artificial Sequence
  Cyclic GFR-binding peptide
  MOD_RES (30)..(30): Xaa is C or S
PQALSATSILYYVGRKPKVLRKHRMIVRSXK

SEQ ID NO: 45026 - protein, 28 aa, Artificial Sequence
  Cyclic GFR-binding peptide
PTELNAISMLYFDENEKVVLKKYRDMVV

SEQ ID NO: 45027 - protein, 26 aa, Artificial Sequence
  Cyclic GFR-binding peptide
LSPISILYKVGRKPKVLKYHYMIVRS

SEQ ID NO: 45028 - protein, 26 aa, Artificial Sequence
  Cyclic GFR-binding peptide
  MOD_RES (26)..(26): Xaa is C or S
SAISILYLIGKTPKILKNYQMIVKSX

SEQ ID NO: 45029 - protein, 34 aa, Artificial Sequence
  Cyclic GFR-binding peptide
  MOD_RES (31)..(33): Xaa is C or S
PTELSPISMLYKDEYDKVVLKYHYEMVVEGXGXR

SEQ ID NO: 45030 - protein, 31 aa, Artificial Sequence; identical to SEQ ID NO: 6336
  Cyclic GFR-binding peptide
  MOD_RES (1)..(1): Xaa is C or S

SEQ ID NO: 45031 - protein, 29 aa, Artificial Sequence
  Cyclic GFR-binding peptide
TELNAISMLYFDENEKVVLKKYRDMVVEG

SEQ ID NO: 45032 - protein, 33 aa, Artificial Sequence
  Cyclic GFR-binding peptide
  MOD_RES (6)..(7): Xaa is C or S
KVGKAXXVPTKLNAISVLYFDDMGVPTLKKYRE

SEQ ID NO: 45033 - protein, 30 aa, Artificial Sequence
  Cyclic GFR-binding peptide
  MOD_RES (5)..(5): Xaa is C or S
TKPTXAPTKLSATSVLYYDDSSNVILRKHR

SEQ ID NO: 45034 - protein, 25 aa, Artificial Sequence
  Cyclic GFR-binding peptide
TELNAISMLYFDENEKVVLKKYRDM

SEQ ID NO: 45035 - protein, 32 aa, Artificial Sequence
  Cyclic GFR-binding peptide
  MOD_RES (3)..(4): Xaa is C or S
SPXXVSQDLNAISILYFIGKTPKILKKYRMIV

SEQ ID NO: 45036 - protein, 36 aa, Artificial Sequence; identical to SEQ ID NO: 6337
  Cyclic GFR-binding peptide
  MOD_RES (1)..(2)..(33)..(35): Xaa is C or S

SEQ ID NO: 45037 - protein, 24 aa, Artificial Sequence
  Cyclic GFR-binding peptide
SAISVLYLDDSSNVILKNYQNMVV

SEQ ID NO: 45038 - protein, 30 aa, Artificial Sequence
  Cyclic GFR-binding peptide
  MOD_RES (3)..(4): Xaa is C or S
KAXXVPTKLSATSVLYYDDMGVPTLRKHRE

SEQ ID NO: 45039 - protein, 32 aa, Artificial Sequence
  Cyclic GFR-binding peptide
  MOD_RES (6)..(7): Xaa is C or S
SIPKAXXVPTELSATSMLYYDEYDKVVLRKHR

SEQ ID NO: 45040 - protein, 25 aa, Artificial Sequence
  Cyclic GFR-binding peptide
LSAISVLYLDDMGVPTLKNYQEGMS

SEQ ID NO: 45041 - protein, 34 aa, Artificial Sequence; identical to SEQ ID NO: 6341
  Cyclic GFR-binding peptide
  MOD_RES (3)..(4): Xaa is C or S

SEQ ID NO: 45042 - protein, 38 aa, Artificial Sequence; identical to SEQ ID NO: 6339
  Cyclic GFR-binding peptide
  MOD_RES (4)..(5)..(37): Xaa is C or S

SEQ ID NO: 45043 - protein, 38 aa, Artificial Sequence; identical to SEQ ID NO: 6342
  Cyclic GFR-binding peptide
  MOD_RES (6)..(7)..(38): Xaa is C or S

SEQ ID NO: 45044 - protein, 28 aa, Artificial Sequence
  Cyclic GFR-binding peptide
  MOD_RES (27)..(27): Xaa is C or S
LSPISILYKIGKTPKILKYHYMIVKSXK

SEQ ID NO: 45045 - protein, 32 aa, Artificial Sequence
  Cyclic GFR-binding peptide
  MOD_RES (32)..(32): Xaa is C or S
QLSATSVLYYEIVRKKPIFLRKHRTLEDHLAX

SEQ ID NO: 45046 - protein, 29 aa, Artificial Sequence
  Cyclic GFR-binding peptide
  MOD_RES (2)..(3): Xaa is C or S
AXXAPTKLNAISVLYFDSSNNVILKKYRN

SEQ ID NO: 45047 - protein, 31 aa, Artificial Sequence
  Cyclic GFR-binding peptide
  MOD_RES (2)..(2): Xaa is C or S
QXRPTQVQLSATSVLYYEIVRKKPIFLRKHR

SEQ ID NO: 45048 - protein, 38 aa, Artificial Sequence; identical to SEQ ID NO: 6343
  Cyclic GFR-binding peptide
  MOD_RES (6)..(7): Xaa is C or S

SEQ ID NO: 45049 - protein, 28 aa, Artificial Sequence
  Cyclic GFR-binding peptide
  MOD_RES (1)..(2): Xaa is C or S
XXAPTQLSAISVLYLDDSSNVILKNYQN

SEQ ID NO: 45050 - protein, 27 aa, Artificial Sequence
  Cyclic GFR-binding peptide
  MOD_RES (1)..(2): Xaa is C or S
XXVSQDLSAISILYLIGKTPKILKNYQ

SEQ ID NO: 45051 - protein, 38 aa, Artificial Sequence; identical to SEQ ID NO: 6345
  Cyclic GFR-binding peptide
  MOD_RES (35)..(37): Xaa is C or S

SEQ ID NO: 45052 - protein, 44 aa, Artificial Sequence; identical to SEQ ID NO: 6347
  Cyclic GFR-binding peptide
  MOD_RES (4)..(41)..(43): Xaa is C or S

SEQ ID NO: 45053 - protein, 38 aa, Artificial Sequence; identical to SEQ ID NO: 6349
  Cyclic GFR-binding peptide
  MOD_RES (2)..(3)..(35)..(37): Xaa is C or S

SEQ ID NO: 45054 - protein, 34 aa, Artificial Sequence; identical to SEQ ID NO: 6350
  Cyclic GFR-binding peptide
  MOD_RES (1)..(32)..(34): Xaa is C or S

SEQ ID NO: 45055 - protein, 37 aa, Artificial Sequence; identical to SEQ ID NO: 6352
  Cyclic GFR-binding peptide
  MOD_RES (3)..(4)..(36): Xaa is C or S

SEQ ID NO: 45056 - protein, 30 aa, Artificial Sequence
  Cyclic GFR-binding peptide
  MOD_RES (27)..(29): Xaa is C or S
LSAISILYLVGRKPKVLKNYQMIVRSXKXS

SEQ ID NO: 45057 - protein, 33 aa, Artificial Sequence
  Cyclic GFR-binding peptide
  MOD_RES (30)..(32): Xaa is C or S
TELSATSMLYYDEYDKVVLRKHREMVVEGXGXR

SEQ ID NO: 45058 - protein, 29 aa, Artificial Sequence
  Cyclic GFR-binding peptide
TELNAISMLYFDEYDKVVLKKYREMVVEG

SEQ ID NO: 45059 - protein, 20 aa, Artificial Sequence
  Cyclic GFR-binding peptide
SPISILYKVGRKPKVLKYHY

SEQ ID NO: 45060 - protein, 30 aa, Artificial Sequence
  Cyclic GFR-binding peptide
  MOD_RES (30)..(30): Xaa is C or S
TKLSPISVLYKDDSSNVILKYHYNMVVRSX

SEQ ID NO: 45061 - protein, 28 aa, Artificial Sequence
  Cyclic GFR-binding peptide
  MOD_RES (1)..(1): Xaa is C or S
XVSQDLNAISILYFIGKTPKILKKYRMI

SEQ ID NO: 45062 - protein, 37 aa, Artificial Sequence; identical to SEQ ID NO: 6354
  Cyclic GFR-binding peptide
  MOD_RES (2)..(34)..(36): Xaa is C or S

SEQ ID NO: 45063 - protein, 31 aa, Artificial Sequence
  Cyclic GFR-binding peptide
TQVQLSATSVLYYEIVRKKPIFLRKHRTLED

SEQ ID NO: 45064 - protein, 25 aa, Artificial Sequence
  Cyclic GFR-binding peptide
ELSPISMLYKDENEKVVLKYHYDMV

SEQ ID NO: 45065 - protein, 36 aa, Artificial Sequence; identical to SEQ ID NO: 6356
  Cyclic GFR-binding peptide
  MOD_RES (1)..(2)..(33)..(35): Xaa is C or S

SEQ ID NO: 45066 - protein, 40 aa, Artificial Sequence; identical to SEQ ID NO: 6357
  Cyclic GFR-binding peptide
  MOD_RES (3)..(4)..(37)..(39): Xaa is C or S

SEQ ID NO: 45067 - protein, 28 aa, Artificial Sequence
  Cyclic GFR-binding peptide
  MOD_RES (28)..(28): Xaa is C or S
LSPISVLYKDSSNNVILKYHYNMVVKAX

SEQ ID NO: 45068 - protein, 22 aa, Artificial Sequence
  Cyclic GFR-binding peptide
ELSPISMLYKDEYDKVVLKYHY

SEQ ID NO: 45069 - protein, 33 aa, Artificial Sequence; identical to SEQ ID NO: 6358
  Cyclic GFR-binding peptide
  MOD_RES (1)..(32): Xaa is C or S

SEQ ID NO: 45070 - protein, 34 aa, Artificial Sequence; identical to SEQ ID NO: 6359
  Cyclic GFR-binding peptide
  MOD_RES (2)..(3)..(34): Xaa is C or S

SEQ ID NO: 45071 - protein, 27 aa, Artificial Sequence
  Cyclic GFR-binding peptide
VSQDLNAISILYFIGKTPKILKKYRMI

SEQ ID NO: 45072 - protein, 38 aa, Artificial Sequence; identical to SEQ ID NO: 6360
  Cyclic GFR-binding peptide
  MOD_RES (3)..(4)..(35)..(37): Xaa is C or S

SEQ ID NO: 45073 - protein, 34 aa, Artificial Sequence; identical to SEQ ID NO: 6361
  Cyclic GFR-binding peptide
  MOD_RES (1)..(33): Xaa is C or S

SEQ ID NO: 45074 - protein, 25 aa, Artificial Sequence
  Cyclic GFR-binding peptide
LSATSILYYVGRKPKVLRKHRMIVR

SEQ ID NO: 45075 - protein, 22 aa, Artificial Sequence
  Cyclic GFR-binding peptide
LSAISVLYLDSSNNVILKNYQN

SEQ ID NO: 45076 - protein, 34 aa, Artificial Sequence; identical to SEQ ID NO: 6364
  Cyclic GFR-binding peptide
  MOD_RES (1)..(33): Xaa is C or S

SEQ ID NO: 45077 - protein, 37 aa, Artificial Sequence; identical to SEQ ID NO: 6365
  Cyclic GFR-binding peptide
  MOD_RES (1)..(2)..(34)..(36): Xaa is C or S

SEQ ID NO: 45078 - protein, 36 aa, Artificial Sequence; identical to SEQ ID NO: 6366
  Cyclic GFR-binding peptide
  MOD_RES (2)..(3)..(36): Xaa is C or S

SEQ ID NO: 45079 - protein, 32 aa, Artificial Sequence
  Cyclic GFR-binding peptide
  MOD_RES (3)..(3): Xaa is C or S
VQXRPTQVQLSPISVLYKEIVRKKPIFLKYHY

SEQ ID NO: 45080 - protein, 20 aa, Artificial Sequence
  Cyclic GFR-binding peptide
NAISMLYFDENEKVVLKKYR

SEQ ID NO: 45081 - protein, 26 aa, Artificial Sequence
  Cyclic GFR-binding peptide
PQDLSPISILYKVGRTPKVLKYHYMV

SEQ ID NO: 45082 - protein, 28 aa, Artificial Sequence
  Cyclic GFR-binding peptide
  MOD_RES (2)..(3): Xaa is C or S
AXXVPTKLNAISVLYFDDMGVPTLKKYR

SEQ ID NO: 45083 - protein, 31 aa, Artificial Sequence
  Cyclic GFR-binding peptide
  MOD_RES (1)..(2): Xaa is C or S
XXVPQDLSATSILYYVGRTPKVLRKHRMVVK

SEQ ID NO: 45084 - protein, 27 aa, Artificial Sequence
  Cyclic GFR-binding peptide
  MOD_RES (1)..(1): Xaa is C or S
XVPQDLSAISILYLVGRTPKVLKNYQM

SEQ ID NO: 45085 - protein, 22 aa, Artificial Sequence
  Cyclic GFR-binding peptide
DLNAISILYFIGKTPKILKKYR

SEQ ID NO: 45086 - protein, 24 aa, Artificial Sequence
  Cyclic GFR-binding peptide
PQDLSATSILYYVGRTPKVLRKHR

SEQ ID NO: 45087 - protein, 36 aa, Artificial Sequence; identical to SEQ ID NO: 6372
  Cyclic GFR-binding peptide
  MOD_RES (1)..(2)..(34)..(36): Xaa is C or S

SEQ ID NO: 45088 - protein, 27 aa, Artificial Sequence
  Cyclic GFR-binding peptide
PQDLSPISILYKVGRTPKVLKYHYMVV

SEQ ID NO: 45089 - protein, 27 aa, Artificial Sequence
  Cyclic GFR-binding peptide
PQDLSATSILYYVGRTPKVLRKHRMVV

SEQ ID NO: 45090 - protein, 35 aa, Artificial Sequence; identical to SEQ ID NO: 6376
  Cyclic GFR-binding peptide

SEQ ID NO: 45091 - protein, 31 aa, Artificial Sequence
  Cyclic GFR-binding peptide
PTKLSATSVLYYDDMGVPTLRKHREGMSVAE

SEQ ID NO: 45092 - protein, 31 aa, Artificial Sequence
  Cyclic GFR-binding peptide
  MOD_RES (28)..(30): Xaa is C or S
DLSPISILYKVGRTPKVLKYHYMVVKSXKXS

SEQ ID NO: 45093 - protein, 37 aa, Artificial Sequence; identical to SEQ ID NO: 6380
  Cyclic GFR-binding peptide
  MOD_RES (2)..(3)..(35)..(37): Xaa is C or S

SEQ ID NO: 45094 - protein, 30 aa, Artificial Sequence
  Cyclic GFR-binding peptide
  MOD_RES (28)..(30): Xaa is C or S
DLSAISILYLIGKTPKILKNYQMIVKSXKX

SEQ ID NO: 45095 - protein, 31 aa, Artificial Sequence
  Cyclic GFR-binding peptide
  MOD_RES (3)..(4): Xaa is C or S
KAXXVPTELNAISMLYFDENEKVVLKKYRDM

SEQ ID NO: 45096 - protein, 38 aa, Artificial Sequence; identical to SEQ ID NO: 6384
  Cyclic GFR-binding peptide
  MOD_RES (5)..(6): Xaa is C or S

SEQ ID NO: 45097 - protein, 36 aa, Artificial Sequence; identical to SEQ ID NO: 6383
  Cyclic GFR-binding peptide
  MOD_RES (3)..(4)..(35): Xaa is C or S

SEQ ID NO: 45098 - protein, 33 aa, Artificial Sequence; identical to SEQ ID NO: 6385
  Cyclic GFR-binding peptide

SEQ ID NO: 45099 - protein, 23 aa, Artificial Sequence
  Cyclic GFR-binding peptide
SAISILYLVGRKPKVLKNYQMIV

SEQ ID NO: 45100 - protein, 36 aa, Artificial Sequence
  Cyclic GFR-binding peptide
  MOD_RES (7)..(7): Xaa is C or S
HVTKPTXAPTKLSAISVLYLDDSSNVILKNYQNMVV

SEQ ID NO: 45101 - protein, 40 aa, Artificial Sequence; identical to SEQ ID NO: 6386
  Cyclic GFR-binding peptide
  MOD_RES (4)..(5)..(37)..(39): Xaa is C or S

SEQ ID NO: 45102 - protein, 27 aa, Artificial Sequence
  Cyclic GFR-binding peptide
VPTELNAISMLYFDENEKVVLKKYRDM

SEQ ID NO: 45103 - protein, 33 aa, Artificial Sequence; identical to SEQ ID NO: 6387
  Cyclic GFR-binding peptide
  MOD_RES (1)..(32): Xaa is C or S

SEQ ID NO: 45104 - protein, 33 aa, Artificial Sequence
  Cyclic GFR-binding peptide
  MOD_RES (4)..(4): Xaa is C or S
NVQXRPTQVQLSATSVLYYEIVRKKPIFLRKHR

SEQ ID NO: 45105 - protein, 40 aa, Artificial Sequence; identical to SEQ ID NO: 6388
  Cyclic GFR-binding peptide
  MOD_RES (4)..(5)..(37)..(39): Xaa is C or S

SEQ ID NO: 45106 - protein, 35 aa, Artificial Sequence
  Cyclic GFR-binding peptide
  MOD_RES (34)..(34): Xaa is C or S
QVQLSAISVLYLEIVRKKPIFLKNYQTLEDHLAXK

SEQ ID NO: 45107 - protein, 27 aa, Artificial Sequence
  Cyclic GFR-binding peptide
  MOD_RES (27)..(27): Xaa is C or S
SATSMLYYDEYDKVVLRKHREMVVEGX

SEQ ID NO: 45108 - protein, 30 aa, Artificial Sequence
  Cyclic GFR-binding peptide
  MOD_RES (27)..(29): Xaa is C or S
LSPISILYKVGRKPKVLKYHYMIVRSXKXS

SEQ ID NO: 45109 - protein, 33 aa, Artificial Sequence
  Cyclic GFR-binding peptide
  MOD_RES (6)..(7): Xaa is C or S
ASASPXXVSQDLSATSILYYIGKTPKILRKHRM

SEQ ID NO: 45110 - protein, 31 aa, Artificial Sequence
  Cyclic GFR-binding peptide
  MOD_RES (1)..(2): Xaa is C or S
XXVPTELNAISMLYFDEYDKVVLKKYREMVV

SEQ ID NO: 45111 - protein, 38 aa, Artificial Sequence
  Cyclic GFR-binding peptide
  MOD_RES (5)..(5): Xaa is C or S
RNVQXRPTQVQLSAISVLYLEIVRKKPIFLKNYQTLED

SEQ ID NO: 45112 - protein, 35 aa, Artificial Sequence; identical to SEQ ID NO: 6394
  Cyclic GFR-binding peptide
  MOD_RES (1)..(2)..(35): Xaa is C or S

SEQ ID NO: 45113 - protein, 40 aa, Artificial Sequence; identical to SEQ ID NO: 6395
  Cyclic GFR-binding peptide
  MOD_RES (5)..(6)..(38)..(40): Xaa is C or S

SEQ ID NO: 45114 - protein, 25 aa, Artificial Sequence
  Cyclic GFR-binding peptide
SPISMLYKDEYDKVVLKYHYEMVVE

SEQ ID NO: 45115 - protein, 32 aa, Artificial Sequence
  Cyclic GFR-binding peptide
  MOD_RES (4)..(5): Xaa is C or S
PKAXXVPTELSPISMLYKDEYDKVVLKYHYEM

SEQ ID NO: 45116 - protein, 33 aa, Artificial Sequence
  Cyclic GFR-binding peptide
  MOD_RES (2)..(2): Xaa is C or S
QXRPTQVQLNAISVLYFEIVRKKPIFLKKYRTL

SEQ ID NO: 45117 - protein, 30 aa, Artificial Sequence
  Cyclic GFR-binding peptide
  MOD_RES (1)..(1): Xaa is C or S
XVPTELSPISMLYKDENEKVVLKYHYDMVV

SEQ ID NO: 45118 - protein, 35 aa, Artificial Sequence; identical to SEQ ID NO: 6397
  Cyclic GFR-binding peptide

SEQ ID NO: 45119 - protein, 36 aa, Artificial Sequence
  Cyclic GFR-binding peptide
  MOD_RES (4)..(4): Xaa is C or S
NVQXRPTQVQLSAISVLYLEIVRKKPIFLKNYQTLE

SEQ ID NO: 45120 - protein, 26 aa, Artificial Sequence
  Cyclic GFR-binding peptide
NAISVLYFDSSNNVILKKYRNMVVKA

SEQ ID NO: 45121 - protein, 29 aa, Artificial Sequence
  Cyclic GFR-binding peptide
TKLSATSVLYYDDSSNVILRKHRNMVVRS

SEQ ID NO: 45122 - protein, 41 aa, Artificial Sequence; identical to SEQ ID NO: 6400
  Cyclic GFR-binding peptide
  MOD_RES (6)..(7)..(38)..(40): Xaa is C or S

SEQ ID NO: 45123 - protein, 22 aa, Artificial Sequence
  Cyclic GFR-binding peptide
LNAISILYFVGRTPKVLKKYRM

SEQ ID NO: 45124 - protein, 34 aa, Artificial Sequence
  Cyclic GFR-binding peptide
  MOD_RES (31)..(33): Xaa is C or S
PTKLSATSVLYYDDSSNVILRKHRNMVVRSXGXH

SEQ ID NO: 45125 - protein, 26 aa, Artificial Sequence
  Cyclic GFR-binding peptide
LSAISVLYLDDSSNVILKNYQNMVVR

SEQ ID NO: 45126 - protein, 36 aa, Artificial Sequence; identical to SEQ ID NO: 6401
  Cyclic GFR-binding peptide
  MOD_RES (1)..(2)..(35): Xaa is C or S

SEQ ID NO: 45127 - protein, 35 aa, Artificial Sequence
  Cyclic GFR-binding peptide
  MOD_RES (4)..(4): Xaa is C or S
NVQXRPTQVQLNAISVLYFEIVRKKPIFLKKYRTL

SEQ ID NO: 45128 - protein, 36 aa, Artificial Sequence; identical to SEQ ID NO: 6403
  Cyclic GFR-binding peptide
  MOD_RES (5)..(6): Xaa is C or S

SEQ ID NO: 45129 - protein, 42 aa, Artificial Sequence; identical to SEQ ID NO: 6404
  Cyclic GFR-binding peptide
  MOD_RES (6)..(7)..(39)..(41): Xaa is C or S

SEQ ID NO: 45130 - protein, 39 aa, Artificial Sequence; identical to SEQ ID NO: 6405
  Cyclic GFR-binding peptide
  MOD_RES (6)..(7)..(39): Xaa is C or S

SEQ ID NO: 45131 - protein, 24 aa, Artificial Sequence
  Cyclic GFR-binding peptide
TKLNAISVLYFDDMGVPTLKKYRE

SEQ ID NO: 45132 - protein, 25 aa, Artificial Sequence
  Cyclic GFR-binding peptide
PTQLSAISVLYLDDSSNVILKNYQN

SEQ ID NO: 45133 - protein, 33 aa, Artificial Sequence; identical to SEQ ID NO: 6409
  Cyclic GFR-binding peptide
  MOD_RES (1)..(2): Xaa is C or S

SEQ ID NO: 45134 - protein, 33 aa, Artificial Sequence; identical to SEQ ID NO: 6413
  Cyclic GFR-binding peptide
  MOD_RES (1)..(2)..(33): Xaa is C or S

SEQ ID NO: 45135 - protein, 29 aa, Artificial Sequence
  Cyclic GFR-binding peptide
  MOD_RES (1)..(2): Xaa is C or S
XXAPTKLSPISVLYKDSSNNVILKYHYNM

SEQ ID NO: 45136 - protein, 28 aa, Artificial Sequence
  Cyclic GFR-binding peptide
  MOD_RES (2)..(3): Xaa is C or S
PXXAPTKLSAISVLYLDDSSNVILKNYQ

SEQ ID NO: 45137 - protein, 28 aa, Artificial Sequence
  Cyclic GFR-binding peptide
QDLSATSILYYVGRTPKVLRKHRMVVKS

SEQ ID NO: 45138 - protein, 31 aa, Artificial Sequence; identical to SEQ ID NO: 6414
  Cyclic GFR-binding peptide
  MOD_RES (31)..(31): Xaa is C or S

SEQ ID NO: 45139 - protein, 38 aa, Artificial Sequence; identical to SEQ ID NO: 6415
  Cyclic GFR-binding peptide
  MOD_RES (6)..(7)..(38): Xaa is C or S

SEQ ID NO: 45140 - protein, 25 aa, Artificial Sequence
  Cyclic GFR-binding peptide
VPTELSATSMLYYDEYDKVVLRKHR

SEQ ID NO: 45141 - protein, 27 aa, Artificial Sequence
  Cyclic GFR-binding peptide
QLSAISVLYLDDSSNVILKNYQNMVVR

SEQ ID NO: 45142 - protein, 33 aa, Artificial Sequence
  Cyclic GFR-binding peptide
  MOD_RES (4)..(5): Xaa is C or S
PKPXXAPTQLSAISVLYLDDSSNVILKNYQNMV

SEQ ID NO: 45143 - protein, 28 aa, Artificial Sequence
  Cyclic GFR-binding peptide
  MOD_RES (28)..(28): Xaa is C or S
LSPISVLYKDDSSNVILKYHYNMVVRAX

SEQ ID NO: 45144 - protein, 22 aa, Artificial Sequence
  Cyclic GFR-binding peptide
NAISILYFVGRKPKVLKKYRMI

SEQ ID NO: 45145 - protein, 33 aa, Artificial Sequence; identical to SEQ ID NO: 6416
  Cyclic GFR-binding peptide
  MOD_RES (1)..(1): Xaa is C or S

SEQ ID NO: 45146 - protein, 36 aa, Artificial Sequence; identical to SEQ ID NO: 6417
  Cyclic GFR-binding peptide
  MOD_RES (2)..(3)..(34)..(36): Xaa is C or S

SEQ ID NO: 45147 - protein, 30 aa, Artificial Sequence
  Cyclic GFR-binding peptide
  MOD_RES (30)..(30): Xaa is C or S
SQDLNAISILYFIGKTPKILKKYRMIVKSX

SEQ ID NO: 45148 - protein, 27 aa, Artificial Sequence
  Cyclic GFR-binding peptide
  MOD_RES (26)..(26): Xaa is C or S
NAISILYFVGRKPKVLKKYRMIVRSXK

SEQ ID NO: 45149 - protein, 34 aa, Artificial Sequence; identical to SEQ ID NO: 6421
  Cyclic GFR-binding peptide
  MOD_RES (1)..(2)..(33): Xaa is C or S

SEQ ID NO: 45150 - protein, 33 aa, Artificial Sequence; identical to SEQ ID NO: 6420
  Cyclic GFR-binding peptide
  MOD_RES (2)..(3): Xaa is C or S

SEQ ID NO: 45151 - protein, 28 aa, Artificial Sequence
  Cyclic GFR-binding peptide
TQVQLSATSVLYYEIVRKKPIFLRKHRT

SEQ ID NO: 45152 - protein, 33 aa, Artificial Sequence; identical to SEQ ID NO: 6422
  Cyclic GFR-binding peptide
  MOD_RES (2)..(3): Xaa is C or S

SEQ ID NO: 45153 - protein, 27 aa, Artificial Sequence
  Cyclic GFR-binding peptide
PQALSAISILYLVGRKPKVLKNYQMIV

SEQ ID NO: 45154 - protein, 31 aa, Artificial Sequence
  Cyclic GFR-binding peptide
  MOD_RES (29)..(31): Xaa is C or S
QDLSATSILYYIGKTPKILRKHRMIVKSXKX

SEQ ID NO: 45155 - protein, 32 aa, Artificial Sequence; identical to SEQ ID NO: 6425
  Cyclic GFR-binding peptide
  MOD_RES (32)..(32): Xaa is C or S

SEQ ID NO: 45156 - protein, 32 aa, Artificial Sequence; identical to SEQ ID NO: 6427
  Cyclic GFR-binding peptide
  MOD_RES (31)..(31): Xaa is C or S

SEQ ID NO: 45157 - protein, 30 aa, Artificial Sequence
  Cyclic GFR-binding peptide
  MOD_RES (2)..(3): Xaa is C or S
PXXVPQALNAISILYFVGRKPKVLKKYRMI

SEQ ID NO: 45158 - protein, 27 aa, Artificial Sequence
  Cyclic GFR-binding peptide
VQLSAISVLYLEIVRKKPIFLKNYQTL

SEQ ID NO: 45159 - protein, 33 aa, Artificial Sequence
  Cyclic GFR-binding peptide
  MOD_RES (4)..(5): Xaa is C or S
PKAXXVPTELNAISMLYFDENEKVVLKKYRDMV

SEQ ID NO: 45160 - protein, 34 aa, Artificial Sequence
  Cyclic GFR-binding peptide
  MOD_RES (4)..(5): Xaa is C or S
PKPXXAPTKLSAISVLYLDDSSNVILKNYQNMVV

SEQ ID NO: 45161 - protein, 36 aa, Artificial Sequence; identical to SEQ ID NO: 6431
  Cyclic GFR-binding peptide
  MOD_RES (1)..(33)..(35): Xaa is C or S

SEQ ID NO: 45162 - protein, 28 aa, Artificial Sequence
  Cyclic GFR-binding peptide
KLNAISVLYFDDMGVPTLKKYREGMSVA

SEQ ID NO: 45163 - protein, 24 aa, Artificial Sequence
  Cyclic GFR-binding peptide
PTKLNAISVLYFDDMGVPTLKKYR

SEQ ID NO: 45164 - protein, 32 aa, Artificial Sequence; identical to SEQ ID NO: 6432
  Cyclic GFR-binding peptide
  MOD_RES (31)..(31): Xaa is C or S

SEQ ID NO: 45165 - protein, 36 aa, Artificial Sequence; identical to SEQ ID NO: 6433
  Cyclic GFR-binding peptide
  MOD_RES (3)..(4)..(36): Xaa is C or S

SEQ ID NO: 45166 - protein, 33 aa, Artificial Sequence
  Cyclic GFR-binding peptide
  MOD_RES (4)..(5): Xaa is C or S
PKAXXAPTKLSAISVLYLDSSNNVILKNYQNMV

SEQ ID NO: 45167 - protein, 30 aa, Artificial Sequence
  Cyclic GFR-binding peptide
  MOD_RES (3)..(4): Xaa is C or S
KAXXAPTKLSPISVLYKDSSNNVILKYHYN

SEQ ID NO: 45168 - protein, 32 aa, Artificial Sequence
  Cyclic GFR-binding peptide
  MOD_RES (3)..(4): Xaa is C or S
KAXXAPTKLSAISVLYLDSSNNVILKNYQNMV

SEQ ID NO: 45169 - protein, 30 aa, Artificial Sequence
  Cyclic GFR-binding peptide
LNAISVLYFEIVRKKPIFLKKYRTLEDHLA

SEQ ID NO: 45170 - protein, 30 aa, Artificial Sequence; identical to SEQ ID NO: 6436
  Cyclic GFR-binding peptide

SEQ ID NO: 45171 - protein, 42 aa, Artificial Sequence; identical to SEQ ID NO: 6437
  Cyclic GFR-binding peptide
  MOD_RES (6)..(7)..(39)..(41): Xaa is C or S

SEQ ID NO: 45172 - protein, 28 aa, Artificial Sequence
  Cyclic GFR-binding peptide
  MOD_RES (1)..(1): Xaa is C or S
XVPQDLNAISILYFVGRTPKVLKKYRMV

SEQ ID NO: 45173 - protein, 35 aa, Artificial Sequence; identical to SEQ ID NO: 6438
  Cyclic GFR-binding peptide
  MOD_RES (32)..(34): Xaa is C or S

SEQ ID NO: 45174 - protein, 29 aa, Artificial Sequence
  Cyclic GFR-binding peptide
  MOD_RES (2)..(3): Xaa is C or S
PXXAPTKLSPISVLYKDDSSNVILKYHYN

SEQ ID NO: 45175 - protein, 27 aa, Artificial Sequence
  Cyclic GFR-binding peptide
PTKLSATSVLYYDDSSNVILRKHRNMV

SEQ ID NO: 45176 - protein, 32 aa, Artificial Sequence
  Cyclic GFR-binding peptide
  MOD_RES (2)..(3): Xaa is C or S
PXXVPQDLSAISILYLVGRTPKVLKNYQMVVK

SEQ ID NO: 45177 - protein, 42 aa, Artificial Sequence; identical to SEQ ID NO: 6439
  Cyclic GFR-binding peptide
  MOD_RES (6)..(7)..(39)..(41): Xaa is C or S

SEQ ID NO: 45178 - protein, 31 aa, Artificial Sequence
  Cyclic GFR-binding peptide
  MOD_RES (1)..(2): Xaa is C or S
XXVPQDLSPISILYKVGRTPKVLKYHYMVVK

SEQ ID NO: 45179 - protein, 32 aa, Artificial Sequence
  Cyclic GFR-binding peptide
  MOD_RES (31)..(31): Xaa is C or S
LSPISVLYKEIVRKKPIFLKYHYTLEDHLAXK

SEQ ID NO: 45180 - protein, 32 aa, Artificial Sequence
  Cyclic GFR-binding peptide
  MOD_RES (4)..(5): Xaa is C or S
AAPXXVPQALSPISILYKVGRKPKVLKYHYMI

SEQ ID NO: 45181 - protein, 32 aa, Artificial Sequence
  Cyclic GFR-binding peptide
  MOD_RES (6)..(7): Xaa is C or S
ASASPXXVSQDLSATSILYYIGKTPKILRKHR

SEQ ID NO: 45182 - protein, 30 aa, Artificial Sequence
  Cyclic GFR-binding peptide
  MOD_RES (27)..(29): Xaa is C or S
LSPISILYKVGRTPKVLKYHYMVVKSXKXS

SEQ ID NO: 45183 - protein, 39 aa, Artificial Sequence; identical to SEQ ID NO: 6442
  Cyclic GFR-binding peptide
  MOD_RES (6)..(7)..(39): Xaa is C or S

SEQ ID NO: 45184 - protein, 41 aa, Artificial Sequence; identical to SEQ ID NO: 6443
  Cyclic GFR-binding peptide
  MOD_RES (6)..(7)..(40): Xaa is C or S

SEQ ID NO: 45185 - protein, 30 aa, Artificial Sequence
  Cyclic GFR-binding peptide
  MOD_RES (29)..(29): Xaa is C or S
ELSATSMLYYDENEKVVLRKHRDMVVEGXG

SEQ ID NO: 45186 - protein, 31 aa, Artificial Sequence
  Cyclic GFR-binding peptide
  MOD_RES (30)..(30): Xaa is C or S
SPISVLYKEIVRKKPIFLKYHYTLEDHLAXK

SEQ ID NO: 45187 - protein, 34 aa, Artificial Sequence
  Cyclic GFR-binding peptide
  MOD_RES (6)..(7): Xaa is C or S
TVPKPXXAPTQLSPISVLYKDDSSNVILKYHYNM

SEQ ID NO: 45188 - protein, 33 aa, Artificial Sequence; identical to SEQ ID NO: 6445
  Cyclic GFR-binding peptide
  MOD_RES (1)..(32): Xaa is C or S

SEQ ID NO: 45189 - protein, 31 aa, Artificial Sequence
  Cyclic GFR-binding peptide
  MOD_RES (30)..(30): Xaa is C or S
SQDLNAISILYFIGKTPKILKKYRMIVKSXK

SEQ ID NO: 45190 - protein, 30 aa, Artificial Sequence
  Cyclic GFR-binding peptide
  MOD_RES (1)..(2): Xaa is C or S
XXAPTKLSAISVLYLDSSNNVILKNYQNMV

SEQ ID NO: 45191 - protein, 32 aa, Artificial Sequence
  Cyclic GFR-binding peptide
  MOD_RES (5)..(6): Xaa is C or S
VGKAXXVPTKLSATSVLYYDDMGVPTLRKHRE

SEQ ID NO: 45192 - protein, 29 aa, Artificial Sequence
  Cyclic GFR-binding peptide
  MOD_RES (4)..(4): Xaa is C or S
KPTXAPTKLSATSVLYYDDSSNVILRKHR

SEQ ID NO: 45193 - protein, 32 aa, Artificial Sequence
  Cyclic GFR-binding peptide
  MOD_RES (2)..(3): Xaa is C or S
AXXVPTKLSAISVLYLDDMGVPTLKNYQEGMS

SEQ ID NO: 45194 - protein, 22 aa, Artificial Sequence
  Cyclic GFR-binding peptide
ELSATSMLYYDENEKVVLRKHR

SEQ ID NO: 45195 - protein, 34 aa, Artificial Sequence; identical to SEQ ID NO: 6447
  Cyclic GFR-binding peptide
  MOD_RES (3)..(4): Xaa is C or S

SEQ ID NO: 45196 - protein, 31 aa, Artificial Sequence
  Cyclic GFR-binding peptide
  MOD_RES (28)..(30): Xaa is C or S
ALSPISILYKVGRKPKVLKYHYMIVRSXKXS

SEQ ID NO: 45197 - protein, 29 aa, Artificial Sequence
  Cyclic GFR-binding peptide
  MOD_RES (3)..(4): Xaa is C or S
KPXXAPTQLSAISVLYLDDSSNVILKNYQ

SEQ ID NO: 45198 - protein, 35 aa, Artificial Sequence; identical to SEQ ID NO: 6449
  Cyclic GFR-binding peptide
  MOD_RES (1)..(2)..(33)..(35): Xaa is C or S

SEQ ID NO: 45199 - protein, 36 aa, Artificial Sequence; identical to SEQ ID NO: 6450
  Cyclic GFR-binding peptide
  MOD_RES (1)..(33)..(35): Xaa is C or S

SEQ ID NO: 45200 - protein, 35 aa, Artificial Sequence
  Cyclic GFR-binding peptide
  MOD_RES (7)..(7): Xaa is C or S
HVTKPTXAPTKLSATSVLYYDDSSNVILRKHRNMV

SEQ ID NO: 45201 - protein, 25 aa, Artificial Sequence
  Cyclic GFR-binding peptide
LSATSMLYYDEYDKVVLRKHREMVV

SEQ ID NO: 45202 - protein, 26 aa, Artificial Sequence
  Cyclic GFR-binding peptide
  MOD_RES (1)..(1): Xaa is C or S
XVPQALNAISILYFVGRKPKVLKKYR

SEQ ID NO: 45203 - protein, 37 aa, Artificial Sequence; identical to SEQ ID NO: 6451
  Cyclic GFR-binding peptide
  MOD_RES (4)..(5)..(37): Xaa is C or S

SEQ ID NO: 45204 - protein, 23 aa, Artificial Sequence
  Cyclic GFR-binding peptide
LSATSVLYYDDMGVPTLRKHREG

SEQ ID NO: 45205 - protein, 26 aa, Artificial Sequence
  Cyclic GFR-binding peptide
DLNAISILYFIGKTPKILKKYRMIVK

SEQ ID NO: 45206 - protein, 29 aa, Artificial Sequence
  Cyclic GFR-binding peptide
  MOD_RES (2)..(3): Xaa is C or S
PXXVSQDLSPISILYKIGKTPKILKYHYM

SEQ ID NO: 45207 - protein, 32 aa, Artificial Sequence; identical to SEQ ID NO: 6453
  Cyclic GFR-binding peptide
  MOD_RES (32)..(32): Xaa is C or S

SEQ ID NO: 45208 - protein, 23 aa, Artificial Sequence
  Cyclic GFR-binding peptide
SAISILYLVGRTPKVLKNYQMVV

SEQ ID NO: 45209 - protein, 34 aa, Artificial Sequence
  Cyclic GFR-binding peptide
  MOD_RES (33)..(33): Xaa is C or S
VQLSATSVLYYEIVRKKPIFLRKHRTLEDHLAXK

SEQ ID NO: 45210 - protein, 33 aa, Artificial Sequence; identical to SEQ ID NO: 6456
  Cyclic GFR-binding peptide
  MOD_RES (1)..(32): Xaa is C or S

SEQ ID NO: 45211 - protein, 35 aa, Artificial Sequence; identical to SEQ ID NO: 6457
  Cyclic GFR-binding peptide
  MOD_RES (35)..(35): Xaa is C or S

SEQ ID NO: 45212 - protein, 31 aa, Artificial Sequence
  Cyclic GFR-binding peptide
  MOD_RES (2)..(3): Xaa is C or S
AXXVPTELNAISMLYFDENEKVVLKKYRDMV

SEQ ID NO: 45213 - protein, 29 aa, Artificial Sequence
  Cyclic GFR-binding peptide
VPTKLSATSVLYYDDMGVPTLRKHREGMS

SEQ ID NO: 45214 - protein, 28 aa, Artificial Sequence
  Cyclic GFR-binding peptide
  MOD_RES (1)..(1): Xaa is C or S
XVPTKLSAISVLYLDDMGVPTLKNYQEG

SEQ ID NO: 45215 - protein, 26 aa, Artificial Sequence
  Cyclic GFR-binding peptide
ELNAISMLYFDENEKVVLKKYRDMVV

SEQ ID NO: 45216 - protein, 29 aa, Artificial Sequence
  Cyclic GFR-binding peptide
  MOD_RES (1)..(2): Xaa is C or S
XXAPTQLSAISVLYLDDSSNVILKNYQNM

SEQ ID NO: 45217 - protein, 22 aa, Artificial Sequence
  Cyclic GFR-binding peptide
LSATSMLYYDENEKVVLRKHRD

SEQ ID NO: 45218 - protein, 31 aa, Artificial Sequence
  Cyclic GFR-binding peptide
  MOD_RES (31)..(31): Xaa is C or S
LSATSVLYYEIVRKKPIFLRKHRTLEDHLAX

SEQ ID NO: 45219 - protein, 30 aa, Artificial Sequence
  Cyclic GFR-binding peptide
  MOD_RES (30)..(30): Xaa is C or S
TELNAISMLYFDEYDKVVLKKYREMVVEGX

SEQ ID NO: 45220 - protein, 33 aa, Artificial Sequence
  Cyclic GFR-binding peptide
  MOD_RES (4)..(5): Xaa is C or S
AAPXXVPQALSPISILYKVGRKPKVLKYHYMIV

SEQ ID NO: 45221 - protein, 31 aa, Artificial Sequence
  Cyclic GFR-binding peptide
  MOD_RES (1)..(2): Xaa is C or S
XXVPQALNAISILYFVGRKPKVLKKYRMIVR

SEQ ID NO: 45222 - protein, 29 aa, Artificial Sequence
  Cyclic GFR-binding peptide
SQDLNAISILYFIGKTPKILKKYRMIVKS

SEQ ID NO: 45223 - protein, 28 aa, Artificial Sequence
  Cyclic GFR-binding peptide
QLSPISVLYKEIVRKKPIFLKYHYTLED

SEQ ID NO: 45224 - protein, 27 aa, Artificial Sequence
  Cyclic GFR-binding peptide
  MOD_RES (27)..(27): Xaa is C or S
SPISVLYKDDSSNVILKYHYNMVVRSX

SEQ ID NO: 45225 - protein, 36 aa, Artificial Sequence; identical to SEQ ID NO: 6461
  Cyclic GFR-binding peptide
  MOD_RES (2)..(3)..(35): Xaa is C or S

SEQ ID NO: 45226 - protein, 28 aa, Artificial Sequence
  Cyclic GFR-binding peptide
  MOD_RES (1)..(1): Xaa is C or S
XAPTKLSAISVLYLDDSSNVILKNYQNM

SEQ ID NO: 45227 - protein, 34 aa, Artificial Sequence
  Cyclic GFR-binding peptide
  MOD_RES (6)..(7): Xaa is C or S
AVPKAXXAPTKLSPISVLYKDSSNNVILKYHYNM

SEQ ID NO: 45228 - protein, 37 aa, Artificial Sequence; identical to SEQ ID NO: 6462
  Cyclic GFR-binding peptide
  MOD_RES (7)..(7): Xaa is C or S

SEQ ID NO: 45229 - protein, 43 aa, Artificial Sequence; identical to SEQ ID NO: 6463
  Cyclic GFR-binding peptide
  MOD_RES (5)..(42): Xaa is C or S

SEQ ID NO: 45230 - protein, 30 aa, Artificial Sequence
  Cyclic GFR-binding peptide
  MOD_RES (27)..(29): Xaa is C or S
SPISMLYKDEYDKVVLKYHYEMVVEGXGXR

SEQ ID NO: 45231 - protein, 28 aa, Artificial Sequence
  Cyclic GFR-binding peptide
  MOD_RES (1)..(2): Xaa is C or S
XXAPTKLNAISVLYFDSSNNVILKKYRN

SEQ ID NO: 45232 - protein, 31 aa, Artificial Sequence; identical to SEQ ID NO: 6465
  Cyclic GFR-binding peptide
  MOD_RES (1)..(1): Xaa is C or S

SEQ ID NO: 45233 - protein, 36 aa, Artificial Sequence; identical to SEQ ID NO: 6466
  Cyclic GFR-binding peptide
  MOD_RES (2)..(3)..(34)..(36): Xaa is C or S

SEQ ID NO: 45234 - protein, 29 aa, Artificial Sequence
  Cyclic GFR-binding peptide
PTQLSPISVLYKDDSSNVILKYHYNMVVR

SEQ ID NO: 45235 - protein, 34 aa, Artificial Sequence; identical to SEQ ID NO: 6469
  Cyclic GFR-binding peptide
  MOD_RES (1)..(34): Xaa is C or S

SEQ ID NO: 45236 - protein, 31 aa, Artificial Sequence
  Cyclic GFR-binding peptide
  MOD_RES (4)..(5): Xaa is C or S
ASPXXVSQDLSAISILYLIGKTPKILKNYQM

SEQ ID NO: 45237 - protein, 38 aa, Artificial Sequence; identical to SEQ ID NO: 6470
  Cyclic GFR-binding peptide
  MOD_RES (36)..(38): Xaa is C or S

SEQ ID NO: 45238 - protein, 24 aa, Artificial Sequence
  Cyclic GFR-binding peptide
TELSATSMLYYDENEKVVLRKHRD

SEQ ID NO: 45239 - protein, 37 aa, Artificial Sequence; identical to SEQ ID NO: 6471
  Cyclic GFR-binding peptide
  MOD_RES (6)..(7): Xaa is C or S

SEQ ID NO: 45240 - protein, 26 aa, Artificial Sequence
  Cyclic GFR-binding peptide
PTKLSPISVLYKDSSNNVILKYHYNM

SEQ ID NO: 45241 - protein, 38 aa, Artificial Sequence; identical to SEQ ID NO: 6473
  Cyclic GFR-binding peptide
  MOD_RES (35)..(37): Xaa is C or S

SEQ ID NO: 45242 - protein, 29 aa, Artificial Sequence
  Cyclic GFR-binding peptide
PTKLNAISVLYFDSSNNVILKKYRNMVVK

SEQ ID NO: 45243 - protein, 30 aa, Artificial Sequence
  Cyclic GFR-binding peptide
  MOD_RES (1)..(1): Xaa is C or S
XVPQDLSPISILYKVGRTPKVLKYHYMVVK

SEQ ID NO: 45244 - protein, 30 aa, Artificial Sequence
  Cyclic GFR-binding peptide
  MOD_RES (3)..(4): Xaa is C or S
KPXXAPTKLSATSVLYYDDSSNVILRKHRN

SEQ ID NO: 45245 - protein, 31 aa, Artificial Sequence
  Cyclic GFR-binding peptide
  MOD_RES (30)..(30): Xaa is C or S
SQDLSPISILYKIGKTPKILKYHYMIVKSXK

SEQ ID NO: 45246 - protein, 37 aa, Artificial Sequence; identical to SEQ ID NO: 6475
  Cyclic GFR-binding peptide
  MOD_RES (5)..(6): Xaa is C or S

SEQ ID NO: 45247 - protein, 29 aa, Artificial Sequence
  Cyclic GFR-binding peptide
  MOD_RES (29)..(29): Xaa is C or S
KLSPISVLYKDSSNNVILKYHYNMVVKAX

SEQ ID NO: 45248 - protein, 34 aa, Artificial Sequence; identical to SEQ ID NO: 6476
  Cyclic GFR-binding peptide
  MOD_RES (33)..(33): Xaa is C or S

SEQ ID NO: 45249 - protein, 42 aa, Artificial Sequence; identical to SEQ ID NO: 6477
  Cyclic GFR-binding peptide
  MOD_RES (7)..(39)..(41): Xaa is C or S

SEQ ID NO: 45250 - protein, 33 aa, Artificial Sequence; identical to SEQ ID NO: 6479
  Cyclic GFR-binding peptide
  MOD_RES (33)..(33): Xaa is C or S

SEQ ID NO: 45251 - protein, 30 aa, Artificial Sequence
  Cyclic GFR-binding peptide
  MOD_RES (2)..(3): Xaa is C or S
AXXAPTKLSPISVLYKDSSNNVILKYHYNM

SEQ ID NO: 45252 - protein, 21 aa, Artificial Sequence
  Cyclic GFR-binding peptide
SAISILYLIGKTPKILKNYQM

SEQ ID NO: 45253 - protein, 27 aa, Artificial Sequence
  Cyclic GFR-binding peptide
KLSAISVLYLDSSNNVILKNYQNMVVK

SEQ ID NO: 45254 - protein, 30 aa, Artificial Sequence; identical to SEQ ID NO: 6480
  Cyclic GFR-binding peptide

SEQ ID NO: 45255 - protein, 22 aa, Artificial Sequence
  Cyclic GFR-binding peptide
LSAISILYLVGRKPKVLKNYQM

SEQ ID NO: 45256 - protein, 29 aa, Artificial Sequence
  Cyclic GFR-binding peptide
  MOD_RES (27)..(29): Xaa is C or S
LSAISILYLVGRKPKVLKNYQMIVRSXKX

SEQ ID NO: 45257 - protein, 36 aa, Artificial Sequence
  Cyclic GFR-binding peptide
  MOD_RES (6)..(7): Xaa is C or S
KIPKAXXVPTELSPISMLYKDENEKVVLKYHYDMVV

SEQ ID NO: 45258 - protein, 36 aa, Artificial Sequence; identical to SEQ ID NO: 6483
  Cyclic GFR-binding peptide
  MOD_RES (1)..(33)..(35): Xaa is C or S

SEQ ID NO: 45259 - protein, 27 aa, Artificial Sequence
  Cyclic GFR-binding peptide
  MOD_RES (1)..(1): Xaa is C or S
XVPQALSATSILYYVGRKPKVLRKHRM

SEQ ID NO: 45260 - protein, 40 aa, Artificial Sequence; identical to SEQ ID NO: 6485
  Cyclic GFR-binding peptide
  MOD_RES (3)..(40): Xaa is C or S

SEQ ID NO: 45261 - protein, 39 aa, Artificial Sequence; identical to SEQ ID NO: 6486
  Cyclic GFR-binding peptide
  MOD_RES (6)..(7): Xaa is C or S

SEQ ID NO: 45262 - protein, 23 aa, Artificial Sequence
  Cyclic GFR-binding peptide
DLNAISILYFIGKTPKILKKYRM

SEQ ID NO: 45263 - protein, 35 aa, Artificial Sequence; identical to SEQ ID NO: 6489
  Cyclic GFR-binding peptide
  MOD_RES (32)..(34): Xaa is C or S

SEQ ID NO: 45264 - protein, 39 aa, Artificial Sequence; identical to SEQ ID NO: 6490
  Cyclic GFR-binding peptide
  MOD_RES (6)..(7)..(39): Xaa is C or S

SEQ ID NO: 45265 - protein, 31 aa, Artificial Sequence
  Cyclic GFR-binding peptide
VQLSATSVLYYEIVRKKPIFLRKHRTLEDHL

SEQ ID NO: 45266 - protein, 25 aa, Artificial Sequence
  Cyclic GFR-binding peptide
VPQDLNAISILYFVGRTPKVLKKYR

SEQ ID NO: 45267 - protein, 34 aa, Artificial Sequence
  Cyclic GFR-binding peptide
  MOD_RES (32)..(34): Xaa is C or S
QLSATSVLYYEIVRKKPIFLRKHRTLEDHLAXKX

SEQ ID NO: 45268 - protein, 41 aa, Artificial Sequence; identical to SEQ ID NO: 6492
  Cyclic GFR-binding peptide
  MOD_RES (6)..(7)..(38)..(40): Xaa is C or S

SEQ ID NO: 45269 - protein, 39 aa, Artificial Sequence; identical to SEQ ID NO: 6493
  Cyclic GFR-binding peptide
  MOD_RES (6)..(7)..(38): Xaa is C or S

SEQ ID NO: 45270 - protein, 34 aa, Artificial Sequence
  Cyclic GFR-binding peptide
  MOD_RES (4)..(4): Xaa is C or S
NVQXRPTQVQLSPISVLYKEIVRKKPIFLKYHYT

SEQ ID NO: 45271 - protein, 32 aa, Artificial Sequence
  Cyclic GFR-binding peptide
  MOD_RES (5)..(6): Xaa is C or S
VPKAXXAPTKLNAISVLYFDSSNNVILKKYRN

SEQ ID NO: 45272 - protein, 30 aa, Artificial Sequence
  Cyclic GFR-binding peptide
  MOD_RES (2)..(3): Xaa is C or S
PXXAPTKLSPISVLYKDDSSNVILKYHYNM

SEQ ID NO: 45273 - protein, 29 aa, Artificial Sequence
  Cyclic GFR-binding peptide
  MOD_RES (3)..(4): Xaa is C or S
SPXXVSQDLSAISILYLIGKTPKILKNYQ

SEQ ID NO: 45274 - protein, 23 aa, Artificial Sequence
  Cyclic GFR-binding peptide
NAISILYFIGKTPKILKKYRMIV

SEQ ID NO: 45275 - protein, 32 aa, Artificial Sequence
  Cyclic GFR-binding peptide
  MOD_RES (3)..(4): Xaa is C or S
KAXXAPTKLNAISVLYFDSSNNVILKKYRNMV

SEQ ID NO: 45276 - protein, 37 aa, Artificial Sequence; identical to SEQ ID NO: 6498
  Cyclic GFR-binding peptide
  MOD_RES (5)..(6)..(37): Xaa is C or S

SEQ ID NO: 45277 - protein, 22 aa, Artificial Sequence
  Cyclic GFR-binding peptide
SAISVLYLEIVRKKPIFLKNYQ

SEQ ID NO: 45278 - protein, 28 aa, Artificial Sequence
  Cyclic GFR-binding peptide
  MOD_RES (27)..(27): Xaa is C or S
SATSVLYYDDSSNVILRKHRNMVVRSXG

SEQ ID NO: 45279 - protein, 33 aa, Artificial Sequence
  Cyclic GFR-binding peptide
  MOD_RES (3)..(3): Xaa is C or S
VQXRPTQVQLSATSVLYYEIVRKKPIFLRKHRT

SEQ ID NO: 45280 - protein, 37 aa, Artificial Sequence; identical to SEQ ID NO: 6501
  Cyclic GFR-binding peptide
  MOD_RES (5)..(6)..(37): Xaa is C or S

SEQ ID NO: 45281 - protein, 29 aa, Artificial Sequence
  Cyclic GFR-binding peptide
  MOD_RES (2)..(3): Xaa is C or S
PXXAPTKLSATSVLYYDDSSNVILRKHRN

SEQ ID NO: 45282 - protein, 24 aa, Artificial Sequence
  Cyclic GFR-binding peptide
SATSILYYVGRTPKVLRKHRMVVK

SEQ ID NO: 45283 - protein, 40 aa, Artificial Sequence; identical to SEQ ID NO: 6502
  Cyclic GFR-binding peptide
  MOD_RES (4)..(5)..(37)..(39): Xaa is C or S

SEQ ID NO: 45284 - protein, 30 aa, Artificial Sequence
  Cyclic GFR-binding peptide
  MOD_RES (1)..(2): Xaa is C or S
XXAPTKLSATSVLYYDDSSNVILRKHRNMV

SEQ ID NO: 45285 - protein, 34 aa, Artificial Sequence
  Cyclic GFR-binding peptide
  MOD_RES (2)..(3): Xaa is C or S
AXXVPTKLSAISVLYLDDMGVPTLKNYQEGMSVA

SEQ ID NO: 45286 - protein, 28 aa, Artificial Sequence
  Cyclic GFR-binding peptide
PTQLSPISVLYKDDSSNVILKYHYNMVV

SEQ ID NO: 45287 - protein, 28 aa, Artificial Sequence
  Cyclic GFR-binding peptide
  MOD_RES (1)..(1): Xaa is C or S
XVPTELSATSMLYYDEYDKVVLRKHREM

SEQ ID NO: 45288 - protein, 35 aa, Artificial Sequence
  Cyclic GFR-binding peptide
  MOD_RES (6)..(7): Xaa is C or S
KVGKAXXVPTKLSATSVLYYDDMGVPTLRKHREGM

SEQ ID NO: 45289 - protein, 28 aa, Artificial Sequence
  Cyclic GFR-binding peptide
VPQDLSPISILYKVGRTPKVLKYHYMVV

SEQ ID NO: 45290 - protein, 30 aa, Artificial Sequence
  Cyclic GFR-binding peptide
  MOD_RES (27)..(29): Xaa is C or S
NAISMLYFDENEKVVLKKYRDMVVEGXGXR

SEQ ID NO: 45291 - protein, 40 aa, Artificial Sequence; identical to SEQ ID NO: 6505
  Cyclic GFR-binding peptide
  MOD_RES (3)..(40): Xaa is C or S

SEQ ID NO: 45292 - protein, 35 aa, Artificial Sequence; identical to SEQ ID NO: 6507
  Cyclic GFR-binding peptide
  MOD_RES (1)..(2)..(33)..(35): Xaa is C or S

SEQ ID NO: 45293 - protein, 33 aa, Artificial Sequence
  Cyclic GFR-binding peptide
  MOD_RES (1)..(1): Xaa is C or S
XRPTQVQLNAISVLYFEIVRKKPIFLKKYRTLE

SEQ ID NO: 45294 - protein, 24 aa, Artificial Sequence
  Cyclic GFR-binding peptide
NAISILYFVGRKPKVLKKYRMIVR

SEQ ID NO: 45295 - protein, 27 aa, Artificial Sequence
  Cyclic GFR-binding peptide
SAISMLYLDENEKVVLKNYQDENEKVV

SEQ ID NO: 45296 - protein, 36 aa, Artificial Sequence; identical to SEQ ID NO: 6511
  Cyclic GFR-binding peptide
  MOD_RES (2)..(3)..(35): Xaa is C or S

SEQ ID NO: 45297 - protein, 28 aa, Artificial Sequence
  Cyclic GFR-binding peptide
APTKLSAISVLYLDSSNNVILKNYQNMV

SEQ ID NO: 45298 - protein, 35 aa, Artificial Sequence; identical to SEQ ID NO: 6512
  Cyclic GFR-binding peptide
  MOD_RES (32)..(34): Xaa is C or S

SEQ ID NO: 45299 - protein, 31 aa, Artificial Sequence; identical to SEQ ID NO: 6515
  Cyclic GFR-binding peptide
  MOD_RES (1)..(1): Xaa is C or S

SEQ ID NO: 45300 - protein, 36 aa, Artificial Sequence
  Cyclic GFR-binding peptide
  MOD_RES (6)..(7): Xaa is C or S
KVGKAXXVPTKLSATSVLYYDDMGVPTLRKHREGMS

SEQ ID NO: 45301 - protein, 30 aa, Artificial Sequence
  Cyclic GFR-binding peptide
  MOD_RES (2)..(2): Xaa is C or S
TXAPTKLSATSVLYYDDSSNVILRKHRNMV

SEQ ID NO: 45302 - protein, 26 aa, Artificial Sequence
  Cyclic GFR-binding peptide
KLSATSVLYYDDMGVPTLRKHREGMS

SEQ ID NO: 45303 - protein, 34 aa, Artificial Sequence; identical to SEQ ID NO: 6517
  Cyclic GFR-binding peptide
  MOD_RES (2)..(3)..(34): Xaa is C or S

SEQ ID NO: 45304 - protein, 23 aa, Artificial Sequence
  Cyclic GFR-binding peptide
TELSPISMLYKDENEKVVLKYHY

SEQ ID NO: 45305 - protein, 31 aa, Artificial Sequence; identical to SEQ ID NO: 6520
  Cyclic GFR-binding peptide

SEQ ID NO: 45306 - protein, 33 aa, Artificial Sequence; identical to SEQ ID NO: 6521
  Cyclic GFR-binding peptide
  MOD_RES (2)..(3): Xaa is C or S

SEQ ID NO: 45307 - protein, 24 aa, Artificial Sequence
  Cyclic GFR-binding peptide
LSAISILYLIGKTPKILKNYQMIV

SEQ ID NO: 45308 - protein, 32 aa, Artificial Sequence
  Cyclic GFR-binding peptide
  MOD_RES (6)..(7): Xaa is C or S
KIPKAXXVPTELNAISMLYFDENEKVVLKKYR

SEQ ID NO: 45309 - protein, 33 aa, Artificial Sequence; identical to SEQ ID NO: 6522
  Cyclic GFR-binding peptide

SEQ ID NO: 45310 - protein, 29 aa, Artificial Sequence
  Cyclic GFR-binding peptide
  MOD_RES (29)..(29): Xaa is C or S
QDLSATSILYYVGRTPKVLRKHRMVVKSX

SEQ ID NO: 45311 - protein, 29 aa, Artificial Sequence
  Cyclic GFR-binding peptide
  MOD_RES (26)..(28): Xaa is C or S
NAISILYFVGRTPKVLKKYRMVVKSXKXS

SEQ ID NO: 45312 - protein, 37 aa, Artificial Sequence; identical to SEQ ID NO: 6523
  Cyclic GFR-binding peptide
  MOD_RES (1)..(2)..(34)..(36): Xaa is C or S

SEQ ID NO: 45313 - protein, 37 aa, Artificial Sequence; identical to SEQ ID NO: 6524
  Cyclic GFR-binding peptide
  MOD_RES (1)..(2)..(34)..(36): Xaa is C or S

SEQ ID NO: 45314 - protein, 35 aa, Artificial Sequence
  Cyclic GFR-binding peptide
  MOD_RES (6)..(7): Xaa is C or S
ASASPXXVPQDLSAISILYLVGRTPKVLKNYQMVV

SEQ ID NO: 45315 - protein, 35 aa, Artificial Sequence
  Cyclic GFR-binding peptide
  MOD_RES (32)..(34): Xaa is C or S
QLSAISVLYLEIVRKKPIFLKNYQTLEDHLAXKXE

SEQ ID NO: 45316 - protein, 32 aa, Artificial Sequence
  Cyclic GFR-binding peptide
  MOD_RES (3)..(3): Xaa is C or S
PTXAPTKLSPISVLYKDDSSNVILKYHYNMVV

SEQ ID NO: 45317 - protein, 37 aa, Artificial Sequence; identical to SEQ ID NO: 6525
  Cyclic GFR-binding peptide
  MOD_RES (3)..(4)..(35)..(37): Xaa is C or S

SEQ ID NO: 45318 - protein, 33 aa, Artificial Sequence
  Cyclic GFR-binding peptide
  MOD_RES (30)..(32): Xaa is C or S
PQALSPISILYKVGRKPKVLKYHYMIVRSXKXS

SEQ ID NO: 45319 - protein, 36 aa, Artificial Sequence; identical to SEQ ID NO: 6528
  Cyclic GFR-binding peptide
  MOD_RES (3)..(4)..(35): Xaa is C or S

SEQ ID NO: 45320 - protein, 34 aa, Artificial Sequence
  Cyclic GFR-binding peptide
  MOD_RES (5)..(6): Xaa is C or S
IPKAXXVPTELNAISMLYFDEYDKVVLKKYREMV

SEQ ID NO: 45321 - protein, 34 aa, Artificial Sequence
  Cyclic GFR-binding peptide
  MOD_RES (32)..(34): Xaa is C or S
PTKLSATSVLYYDDMGVPTLRKHREGMSVAEXGX

SEQ ID NO: 45322 - protein, 40 aa, Artificial Sequence; identical to SEQ ID NO: 6529
  Cyclic GFR-binding peptide
  MOD_RES (6)..(7)..(39): Xaa is C or S

SEQ ID NO: 45323 - protein, 37 aa, Artificial Sequence; identical to SEQ ID NO: 6530
  Cyclic GFR-binding peptide
  MOD_RES (4)..(5)..(37): Xaa is C or S

SEQ ID NO: 45324 - protein, 26 aa, Artificial Sequence
  Cyclic GFR-binding peptide
APTQLSAISVLYLDDSSNVILKNYQN

SEQ ID NO: 45325 - protein, 26 aa, Artificial Sequence
  Cyclic GFR-binding peptide
LSPISMLYKDENEKVVLKYHYDMVVE

SEQ ID NO: 45326 - protein, 36 aa, Artificial Sequence; identical to SEQ ID NO: 6531
  Cyclic GFR-binding peptide
  MOD_RES (2)..(3)..(34)..(36): Xaa is C or S

SEQ ID NO: 45327 - protein, 28 aa, Artificial Sequence
  Cyclic GFR-binding peptide
  MOD_RES (1)..(2): Xaa is C or S
XXVPTKLSATSVLYYDDMGVPTLRKHRE

SEQ ID NO: 45328 - protein, 25 aa, Artificial Sequence
  Cyclic GFR-binding peptide
APTKLNAISVLYFDSSNNVILKKYR

SEQ ID NO: 45329 - protein, 30 aa, Artificial Sequence
  Cyclic GFR-binding peptide
  MOD_RES (1)..(1): Xaa is C or S
XVPTELNAISMLYFDEYDKVVLKKYREMVV

SEQ ID NO: 45330 - protein, 25 aa, Artificial Sequence
  Cyclic GFR-binding peptide
APTQLSATSVLYYDDSSNVILRKHR

SEQ ID NO: 45331 - protein, 32 aa, Artificial Sequence
  Cyclic GFR-binding peptide
  MOD_RES (3)..(4): Xaa is C or S
SPXXVPQDLSAISILYLVGRTPKVLKNYQMVV

SEQ ID NO: 45332 - protein, 40 aa, Artificial Sequence; identical to SEQ ID NO: 6535
  Cyclic GFR-binding peptide
  MOD_RES (1)..(38)..(40): Xaa is C or S

SEQ ID NO: 45333 - protein, 37 aa, Artificial Sequence; identical to SEQ ID NO: 6536
  Cyclic GFR-binding peptide
  MOD_RES (6)..(7): Xaa is C or S

SEQ ID NO: 45334 - protein, 30 aa, Artificial Sequence
  Cyclic GFR-binding peptide
  MOD_RES (3)..(4): Xaa is C or S
SPXXVPQDLNAISILYFVGRTPKVLKKYRM

SEQ ID NO: 45335 - protein, 36 aa, Artificial Sequence; identical to SEQ ID NO: 6537
  Cyclic GFR-binding peptide
  MOD_RES (1)..(33)..(35): Xaa is C or S

SEQ ID NO: 45336 - protein, 32 aa, Artificial Sequence
  Cyclic GFR-binding peptide
  MOD_RES (3)..(4): Xaa is C or S
SPXXVPQDLSATSILYYVGRTPKVLRKHRMVV

SEQ ID NO: 45337 - protein, 31 aa, Artificial Sequence
  Cyclic GFR-binding peptide
  MOD_RES (1)..(1): Xaa is C or S
XRPTQVQLNAISVLYFEIVRKKPIFLKKYRT

SEQ ID NO: 45338 - protein, 24 aa, Artificial Sequence
  Cyclic GFR-binding peptide
SATSMLYYDENEKVVLRKHRDMVV

SEQ ID NO: 45339 - protein, 28 aa, Artificial Sequence
  Cyclic GFR-binding peptide
  MOD_RES (27)..(27): Xaa is C or S
LNAISILYFVGRTPKVLKKYRMVVKSXK

SEQ ID NO: 45340 - protein, 31 aa, Artificial Sequence
  Cyclic GFR-binding peptide
  MOD_RES (31)..(31): Xaa is C or S
LSAISVLYLEIVRKKPIFLKNYQTLEDHLAX

SEQ ID NO: 45341 - protein, 28 aa, Artificial Sequence
  Cyclic GFR-binding peptide
  MOD_RES (1)..(1): Xaa is C or S
XVPTELSPISMLYKDEYDKVVLKYHYEM

SEQ ID NO: 45342 - protein, 28 aa, Artificial Sequence
  Cyclic GFR-binding peptide
VQLSATSVLYYEIVRKKPIFLRKHRTLE

SEQ ID NO: 45343 - protein, 23 aa, Artificial Sequence
  Cyclic GFR-binding peptide
TQLSAISVLYLDDSSNVILKNYQ

SEQ ID NO: 45344 - protein, 33 aa, Artificial Sequence
  Cyclic GFR-binding peptide
  MOD_RES (1)..(1): Xaa is C or S
XRPTQVQLSATSVLYYEIVRKKPIFLRKHRTLE

SEQ ID NO: 45345 - protein, 36 aa, Artificial Sequence; identical to SEQ ID NO: 6539
  Cyclic GFR-binding peptide
  MOD_RES (5)..(6): Xaa is C or S

SEQ ID NO: 45346 - protein, 29 aa, Artificial Sequence
  Cyclic GFR-binding peptide
  MOD_RES (29)..(29): Xaa is C or S
KLNAISVLYFDSSNNVILKKYRNMVVKAX

SEQ ID NO: 45347 - protein, 31 aa, Artificial Sequence
  Cyclic GFR-binding peptide
  MOD_RES (5)..(6): Xaa is C or S
VPKPXXAPTKLSAISVLYLDDSSNVILKNYQ

SEQ ID NO: 45348 - protein, 35 aa, Artificial Sequence; identical to SEQ ID NO: 6540
  Cyclic GFR-binding peptide

SEQ ID NO: 45349 - protein, 29 aa, Artificial Sequence
  Cyclic GFR-binding peptide
PTQLSAISVLYLDDSSNVILKNYQNMVVR

SEQ ID NO: 45350 - protein, 36 aa, Artificial Sequence; identical to SEQ ID NO: 6541
  Cyclic GFR-binding peptide
  MOD_RES (3)..(4): Xaa is C or S

SEQ ID NO: 45351 - protein, 30 aa, Artificial Sequence
  Cyclic GFR-binding peptide
  MOD_RES (1)..(1): Xaa is C or S
XVPQDLSAISILYLVGRTPKVLKNYQMVVK

SEQ ID NO: 45352 - protein, 25 aa, Artificial Sequence
  Cyclic GFR-binding peptide
NAISILYFVGRTPKVLKKYRMVVKS

SEQ ID NO: 45353 - protein, 34 aa, Artificial Sequence; identical to SEQ ID NO: 6544
  Cyclic GFR-binding peptide
  MOD_RES (1)..(2)..(34): Xaa is C or S

SEQ ID NO: 45354 - protein, 29 aa, Artificial Sequence
  Cyclic GFR-binding peptide
  MOD_RES (1)..(1): Xaa is C or S
XVPQALSAISILYLVGRKPKVLKNYQMIV

SEQ ID NO: 45355 - protein, 34 aa, Artificial Sequence; identical to SEQ ID NO: 6546
  Cyclic GFR-binding peptide
  MOD_RES (1)..(2)..(34): Xaa is C or S

SEQ ID NO: 45356 - protein, 28 aa, Artificial Sequence
  Cyclic GFR-binding peptide
QDLNAISILYFIGKTPKILKKYRMIVKS

SEQ ID NO: 45357 - protein, 40 aa, Artificial Sequence; identical to SEQ ID NO: 6550
  Cyclic GFR-binding peptide
  MOD_RES (4)..(4): Xaa is C or S

SEQ ID NO: 45358 - protein, 35 aa, Artificial Sequence
  Cyclic GFR-binding peptide
  MOD_RES (6)..(7): Xaa is C or S
KVGKAXXVPTKLSAISVLYLDDMGVPTLKNYQEGM

SEQ ID NO: 45359 - protein, 22 aa, Artificial Sequence
  Cyclic GFR-binding peptide
LSATSILYYIGKTPKILRKHRM

SEQ ID NO: 45360 - protein, 27 aa, Artificial Sequence
  Cyclic GFR-binding peptide
  MOD_RES (27)..(27): Xaa is C or S
NAISMLYFDEYDKVVLKKYREMVVEGX

SEQ ID NO: 45361 - protein, 29 aa, Artificial Sequence
  Cyclic GFR-binding peptide
VPQDLSAISILYLVGRTPKVLKNYQMVVK

SEQ ID NO: 45362 - protein, 34 aa, Artificial Sequence
  Cyclic GFR-binding peptide
  MOD_RES (5)..(6): Xaa is C or S
SAAPXXVPQALNAISILYFVGRKPKVLKKYRMIV

SEQ ID NO: 45363 - protein, 32 aa, Artificial Sequence
  Cyclic GFR-binding peptide
  MOD_RES (2)..(3): Xaa is C or S
AXXAPTKLNAISVLYFDSSNNVILKKYRNMVV

SEQ ID NO: 45364 - protein, 27 aa, Artificial Sequence
  Cyclic GFR-binding peptide
APTKLSATSVLYYDDSSNVILRKHRNM

SEQ ID NO: 45365 - protein, 34 aa, Artificial Sequence
  Cyclic GFR-binding peptide
  MOD_RES (7)..(7): Xaa is C or S
HVTKPTXAPTKLSPISVLYKDDSSNVILKYHYNM

SEQ ID NO: 45366 - protein, 34 aa, Artificial Sequence
  Cyclic GFR-binding peptide
  MOD_RES (7)..(7): Xaa is C or S
HVTKPTXAPTKLSATSVLYYDDSSNVILRKHRNM

SEQ ID NO: 45367 - protein, 39 aa, Artificial Sequence; identical to SEQ ID NO: 6552
  Cyclic GFR-binding peptide
  MOD_RES (5)..(6)..(38): Xaa is C or S

SEQ ID NO: 45368 - protein, 41 aa, Artificial Sequence; identical to SEQ ID NO: 6553
  Cyclic GFR-binding peptide
  MOD_RES (5)..(6)..(38)..(40): Xaa is C or S

SEQ ID NO: 45369 - protein, 37 aa, Artificial Sequence; identical to SEQ ID NO: 6554
  Cyclic GFR-binding peptide
  MOD_RES (6)..(7): Xaa is C or S

SEQ ID NO: 45370 - protein, 35 aa, Artificial Sequence
  Cyclic GFR-binding peptide
  MOD_RES (5)..(6): Xaa is C or S
IPKAXXVPTELSPISMLYKDENEKVVLKYHYDMVV

SEQ ID NO: 45371 - protein, 34 aa, Artificial Sequence; identical to SEQ ID NO: 6555
  Cyclic GFR-binding peptide
  MOD_RES (2)..(34): Xaa is C or S

SEQ ID NO: 45372 - protein, 28 aa, Artificial Sequence
  Cyclic GFR-binding peptide
  MOD_RES (28)..(28): Xaa is C or S
LSATSMLYYDEYDKVVLRKHREMVVEGX

SEQ ID NO: 45373 - protein, 27 aa, Artificial Sequence
  Cyclic GFR-binding peptide
  MOD_RES (27)..(27): Xaa is C or S
SPISMLYKDEYDKVVLKYHYEMVVEGX

SEQ ID NO: 45374 - protein, 27 aa, Artificial Sequence
  Cyclic GFR-binding peptide
TQLSATSVLYYDDSSNVILRKHRNMVV

SEQ ID NO: 45375 - protein, 32 aa, Artificial Sequence
  Cyclic GFR-binding peptide
  MOD_RES (31)..(31): Xaa is C or S
PTKLNAISVLYFDSSNNVILKKYRNMVVKAXG

SEQ ID NO: 45376 - protein, 31 aa, Artificial Sequence; identical to SEQ ID NO: 6560
  Cyclic GFR-binding peptide

SEQ ID NO: 45377 - protein, 36 aa, Artificial Sequence; identical to SEQ ID NO: 6559
  Cyclic GFR-binding peptide
  MOD_RES (3)..(4)..(35): Xaa is C or S

SEQ ID NO: 45378 - protein, 35 aa, Artificial Sequence; identical to SEQ ID NO: 6563
  Cyclic GFR-binding peptide
  MOD_RES (3)..(4): Xaa is C or S

SEQ ID NO: 45379 - protein, 30 aa, Artificial Sequence
  Cyclic GFR-binding peptide
  MOD_RES (4)..(5): Xaa is C or S
PKAXXAPTKLNAISVLYFDSSNNVILKKYR

SEQ ID NO: 45380 - protein, 29 aa, Artificial Sequence
  Cyclic GFR-binding peptide
PTKLSATSVLYYDDSSNVILRKHRNMVVR

SEQ ID NO: 45381 - protein, 35 aa, Artificial Sequence
  Cyclic GFR-binding peptide
  MOD_RES (5)..(6): Xaa is C or S
SASPXXVSQDLSPISILYKIGKTPKILKYHYMIVK

SEQ ID NO: 45382 - protein, 30 aa, Artificial Sequence
  Cyclic GFR-binding peptide
PTELSATSMLYYDENEKVVLRKHRDMVVEG

SEQ ID NO: 45383 - protein, 27 aa, Artificial Sequence
  Cyclic GFR-binding peptide
LSATSMLYYDEYDKVVLRKHREMVVEG

SEQ ID NO: 45384 - protein, 31 aa, Artificial Sequence; identical to SEQ ID NO: 6564
  Cyclic GFR-binding peptide

SEQ ID NO: 45385 - protein, 27 aa, Artificial Sequence
  Cyclic GFR-binding peptide
VPTKLSATSVLYYDDMGVPTLRKHREG

SEQ ID NO: 45386 - protein, 26 aa, Artificial Sequence
  Cyclic GFR-binding peptide
QALSAISILYLVGRKPKVLKNYQMIV

SEQ ID NO: 45387 - protein, 23 aa, Artificial Sequence
  Cyclic GFR-binding peptide
LSPISVLYKDSSNNVILKYHYNM

SEQ ID NO: 45388 - protein, 29 aa, Artificial Sequence
  Cyclic GFR-binding peptide
VPQALSATSILYYVGRKPKVLRKHRMIVR

SEQ ID NO: 45389 - protein, 34 aa, Artificial Sequence; identical to SEQ ID NO: 6568
  Cyclic GFR-binding peptide

SEQ ID NO: 45390 - protein, 22 aa, Artificial Sequence
  Cyclic GFR-binding peptide
ELNAISMLYFDEYDKVVLKKYR

SEQ ID NO: 45391 - protein, 35 aa, Artificial Sequence
  Cyclic GFR-binding peptide
  MOD_RES (3)..(3): Xaa is C or S
VQXRPTQVQLSPISVLYKEIVRKKPIFLKYHYTLE

SEQ ID NO: 45392 - protein, 35 aa, Artificial Sequence
  Cyclic GFR-binding peptide
  MOD_RES (6)..(7): Xaa is C or S
ASASPXXVPQDLSPISILYKVGRTPKVLKYHYMVV

SEQ ID NO: 45393 - protein, 40 aa, Artificial Sequence; identical to SEQ ID NO: 6569
  Cyclic GFR-binding peptide
  MOD_RES (5)..(37)..(39): Xaa is C or S

SEQ ID NO: 45394 - protein, 37 aa, Artificial Sequence; identical to SEQ ID NO: 6572
  Cyclic GFR-binding peptide
  MOD_RES (5)..(37): Xaa is C or S

SEQ ID NO: 45395 - protein, 31 aa, Artificial Sequence
  Cyclic GFR-binding peptide
  MOD_RES (1)..(2): Xaa is C or S
XXVPTELSPISMLYKDENEKVVLKYHYDMVV

SEQ ID NO: 45396 - protein, 35 aa, Artificial Sequence; identical to SEQ ID NO: 6574
  Cyclic GFR-binding peptide
  MOD_RES (2)..(3)..(35): Xaa is C or S

SEQ ID NO: 45397 - protein, 24 aa, Artificial Sequence
  Cyclic GFR-binding peptide
QLSAISVLYLEIVRKKPIFLKNYQ

SEQ ID NO: 45398 - protein, 31 aa, Artificial Sequence
  Cyclic GFR-binding peptide
  MOD_RES (28)..(30): Xaa is C or S
LSPISVLYKDDSSNVILKYHYNMVVRAXGXH

SEQ ID NO: 45399 - protein, 31 aa, Artificial Sequence
  Cyclic GFR-binding peptide
  MOD_RES (4)..(5): Xaa is C or S
ASPXXVPQDLSAISILYLVGRTPKVLKNYQM

SEQ ID NO: 45400 - protein, 29 aa, Artificial Sequence
  Cyclic GFR-binding peptide
RPTQVQLSAISVLYLEIVRKKPIFLKNYQ

SEQ ID NO: 45401 - protein, 31 aa, Artificial Sequence
  Cyclic GFR-binding peptide
  MOD_RES (3)..(4): Xaa is C or S
KAXXVPTKLNAISVLYFDDMGVPTLKKYREG

SEQ ID NO: 45402 - protein, 31 aa, Artificial Sequence
  Cyclic GFR-binding peptide
  MOD_RES (29)..(31): Xaa is C or S
QLSAISVLYLDDSSNVILKNYQNMVVRAXGX

SEQ ID NO: 45403 - protein, 31 aa, Artificial Sequence
  Cyclic GFR-binding peptide
  MOD_RES (30)..(30): Xaa is C or S
PQDLSPISILYKVGRTPKVLKYHYMVVKSXK

SEQ ID NO: 45404 - protein, 23 aa, Artificial Sequence
  Cyclic GFR-binding peptide
SPISMLYKDEYDKVVLKYHYEMV

SEQ ID NO: 45405 - protein, 40 aa, Artificial Sequence; identical to SEQ ID NO: 6576
  Cyclic GFR-binding peptide
  MOD_RES (5)..(6)..(37)..(39): Xaa is C or S

SEQ ID NO: 45406 - protein, 22 aa, Artificial Sequence
  Cyclic GFR-binding peptide
DLNAISILYFVGRTPKVLKKYR

SEQ ID NO: 45407 - protein, 28 aa, Artificial Sequence
  Cyclic GFR-binding peptide
PTKLSAISVLYLDDMGVPTLKNYQEGMS

SEQ ID NO: 45408 - protein, 30 aa, Artificial Sequence
  Cyclic GFR-binding peptide
  MOD_RES (1)..(1): Xaa is C or S
XVPTKLSATSVLYYDDMGVPTLRKHREGMS

SEQ ID NO: 45409 - protein, 30 aa, Artificial Sequence; identical to SEQ ID NO: 6577
  Cyclic GFR-binding peptide

SEQ ID NO: 45410 - protein, 32 aa, Artificial Sequence
  Cyclic GFR-binding peptide
  MOD_RES (32)..(32): Xaa is C or S
PTKLSAISVLYLDDMGVPTLKNYQEGMSVAEX

SEQ ID NO: 45411 - protein, 33 aa, Artificial Sequence
  Cyclic GFR-binding peptide
  MOD_RES (30)..(32): Xaa is C or S
NAISVLYFEIVRKKPIFLKKYRTLEDHLAXKXE

SEQ ID NO: 45412 - protein, 34 aa, Artificial Sequence
  Cyclic GFR-binding peptide
  MOD_RES (4)..(5): Xaa is C or S
PKAXXAPTKLSPISVLYKDSSNNVILKYHYNMVV

SEQ ID NO: 45413 - protein, 40 aa, Artificial Sequence; identical to SEQ ID NO: 6581
  Cyclic GFR-binding peptide
  MOD_RES (3)..(4)..(37)..(39): Xaa is C or S

SEQ ID NO: 45414 - protein, 27 aa, Artificial Sequence
  Cyclic GFR-binding peptide
  MOD_RES (1)..(1): Xaa is C or S
XVSQDLSATSILYYIGKTPKILRKHRM

SEQ ID NO: 45415 - protein, 40 aa, Artificial Sequence; identical to SEQ ID NO: 6582
  Cyclic GFR-binding peptide
  MOD_RES (4)..(5)..(38)..(40): Xaa is C or S

SEQ ID NO: 45416 - protein, 32 aa, Artificial Sequence
  Cyclic GFR-binding peptide
  MOD_RES (30)..(32): Xaa is C or S
PQALSAISILYLVGRKPKVLKNYQMIVRSXKX

SEQ ID NO: 45417 - protein, 24 aa, Artificial Sequence
  Cyclic GFR-binding peptide
LSATSILYYIGKTPKILRKHRMIV

SEQ ID NO: 45418 - protein, 33 aa, Artificial Sequence; identical to SEQ ID NO: 6583
  Cyclic GFR-binding peptide
  MOD_RES (1)..(2): Xaa is C or S

SEQ ID NO: 45419 - protein, 22 aa, Artificial Sequence
  Cyclic GFR-binding peptide
LSATSVLYYDDSSNVILRKHRN

SEQ ID NO: 45420 - protein, 28 aa, Artificial Sequence
  Cyclic GFR-binding peptide
  MOD_RES (27)..(27): Xaa is C or S
SAISVLYLDSSNNVILKNYQNMVVKAXG

SEQ ID NO: 45421 - protein, 37 aa, Artificial Sequence; identical to SEQ ID NO: 6586
  Cyclic GFR-binding peptide
  MOD_RES (2)..(2): Xaa is C or S

SEQ ID NO: 45422 - protein, 27 aa, Artificial Sequence
  Cyclic GFR-binding peptide
LSAISVLYLEIVRKKPIFLKNYQTLED

SEQ ID NO: 45423 - protein, 23 aa, Artificial Sequence
  Cyclic GFR-binding peptide
DLSPISILYKIGKTPKILKYHYM

SEQ ID NO: 45424 - protein, 38 aa, Artificial Sequence; identical to SEQ ID NO: 6590
  Cyclic GFR-binding peptide
  MOD_RES (6)..(7)..(38): Xaa is C or S

SEQ ID NO: 45425 - protein, 38 aa, Artificial Sequence; identical to SEQ ID NO: 6592
  Cyclic GFR-binding peptide
  MOD_RES (36)..(38): Xaa is C or S

SEQ ID NO: 45426 - protein, 34 aa, Artificial Sequence
  Cyclic GFR-binding peptide
  MOD_RES (4)..(5): Xaa is C or S
PKPXXAPTQLSAISVLYLDDSSNVILKNYQNMVV

SEQ ID NO: 45427 - protein, 20 aa, Artificial Sequence
  Cyclic GFR-binding peptide
SAISVLYLDDMGVPTLKNYQ

SEQ ID NO: 45428 - protein, 28 aa, Artificial Sequence
  Cyclic GFR-binding peptide
PQDLSAISILYLVGRTPKVLKNYQMVVK

SEQ ID NO: 45429 - protein, 21 aa, Artificial Sequence
  Cyclic GFR-binding peptide
LNAISVLYFDDMGVPTLKKYR

SEQ ID NO: 45430 - protein, 28 aa, Artificial Sequence
  Cyclic GFR-binding peptide
  MOD_RES (28)..(28): Xaa is C or S
LSATSVLYYDDSSNVILRKHRNMVVRSX

SEQ ID NO: 45431 - protein, 34 aa, Artificial Sequence; identical to SEQ ID NO: 6594
  Cyclic GFR-binding peptide
  MOD_RES (3)..(4): Xaa is C or S

SEQ ID NO: 45432 - protein, 30 aa, Artificial Sequence
  Cyclic GFR-binding peptide
  MOD_RES (1)..(1): Xaa is C or S
XVPQALSATSILYYVGRKPKVLRKHRMIVR

SEQ ID NO: 45433 - protein, 33 aa, Artificial Sequence
  Cyclic GFR-binding peptide
  MOD_RES (4)..(5): Xaa is C or S
PKAXXAPTKLSPISVLYKDSSNNVILKYHYNMV

SEQ ID NO: 45434 - protein, 36 aa, Artificial Sequence; identical to SEQ ID NO: 6595
  Cyclic GFR-binding peptide
  MOD_RES (1)..(33)..(35): Xaa is C or S

SEQ ID NO: 45435 - protein, 39 aa, Artificial Sequence; identical to SEQ ID NO: 6596
  Cyclic GFR-binding peptide
  MOD_RES (5)..(6)..(38): Xaa is C or S

SEQ ID NO: 45436 - protein, 36 aa, Artificial Sequence; identical to SEQ ID NO: 6597
  Cyclic GFR-binding peptide
  MOD_RES (2)..(3)..(36): Xaa is C or S

SEQ ID NO: 45437 - protein, 25 aa, Artificial Sequence
  Cyclic GFR-binding peptide
NAISVLYFEIVRKKPIFLKKYRTLE

SEQ ID NO: 45438 - protein, 33 aa, Artificial Sequence; identical to SEQ ID NO: 6598
  Cyclic GFR-binding peptide
  MOD_RES (32)..(32): Xaa is C or S

SEQ ID NO: 45439 - protein, 31 aa, Artificial Sequence
  Cyclic GFR-binding peptide
  MOD_RES (30)..(30): Xaa is C or S
TELSATSMLYYDEYDKVVLRKHREMVVEGXG

SEQ ID NO: 45440 - protein, 27 aa, Artificial Sequence
  Cyclic GFR-binding peptide
KLSPISVLYKDSSNNVILKYHYNMVVK

SEQ ID NO: 45441 - protein, 29 aa, Artificial Sequence
  Cyclic GFR-binding peptide
  MOD_RES (1)..(1): Xaa is C or S
XAPTQLSPISVLYKDDSSNVILKYHYNMV

SEQ ID NO: 45442 - protein, 26 aa, Artificial Sequence
  Cyclic GFR-binding peptide
QDLSPISILYKIGKTPKILKYHYMIV

SEQ ID NO: 45443 - protein, 38 aa, Artificial Sequence; identical to SEQ ID NO: 6599
  Cyclic GFR-binding peptide
  MOD_RES (3)..(4)..(36)..(38): Xaa is C or S

SEQ ID NO: 45444 - protein, 34 aa, Artificial Sequence; identical to SEQ ID NO: 6600
  Cyclic GFR-binding peptide
  MOD_RES (1)..(2)..(33): Xaa is C or S

SEQ ID NO: 45445 - protein, 25 aa, Artificial Sequence
  Cyclic GFR-binding peptide
SATSILYYVGRTPKVLRKHRMVVKS

SEQ ID NO: 45446 - protein, 34 aa, Artificial Sequence; identical to SEQ ID NO: 6603
  Cyclic GFR-binding peptide
  MOD_RES (31)..(33): Xaa is C or S

SEQ ID NO: 45447 - protein, 39 aa, Artificial Sequence; identical to SEQ ID NO: 6604
  Cyclic GFR-binding peptide
  MOD_RES (4)..(5)..(37)..(39): Xaa is C or S

SEQ ID NO: 45448 - protein, 37 aa, Artificial Sequence; identical to SEQ ID NO: 6605
  Cyclic GFR-binding peptide
  MOD_RES (6)..(7): Xaa is C or S

SEQ ID NO: 45449 - protein, 35 aa, Artificial Sequence; identical to SEQ ID NO: 6607
  Cyclic GFR-binding peptide
  MOD_RES (4)..(5): Xaa is C or S

SEQ ID NO: 45450 - protein, 33 aa, Artificial Sequence
  Cyclic GFR-binding peptide
  MOD_RES (4)..(5): Xaa is C or S
ASPXXVSQDLSAISILYLIGKTPKILKNYQMIV

SEQ ID NO: 45451 - protein, 35 aa, Artificial Sequence; identical to SEQ ID NO: 6608
  Cyclic GFR-binding peptide
  MOD_RES (33)..(35): Xaa is C or S

SEQ ID NO: 45452 - protein, 27 aa, Artificial Sequence
  Cyclic GFR-binding peptide
ELNAISMLYFDEYDKVVLKKYREMVVE

SEQ ID NO: 45453 - protein, 32 aa, Artificial Sequence
  Cyclic GFR-binding peptide
  MOD_RES (6)..(7): Xaa is C or S
ASAAPXXVPQALNAISILYFVGRKPKVLKKYR

SEQ ID NO: 45454 - protein, 41 aa, Artificial Sequence; identical to SEQ ID NO: 6609
  Cyclic GFR-binding peptide
  MOD_RES (1)..(38)..(40): Xaa is C or S

SEQ ID NO: 45455 - protein, 35 aa, Artificial Sequence; identical to SEQ ID NO: 6610
  Cyclic GFR-binding peptide
  MOD_RES (2)..(34): Xaa is C or S

SEQ ID NO: 45456 - protein, 29 aa, Artificial Sequence
  Cyclic GFR-binding peptide
VPQDLSPISILYKVGRTPKVLKYHYMVVK

SEQ ID NO: 45457 - protein, 29 aa, Artificial Sequence
  Cyclic GFR-binding peptide
  MOD_RES (1)..(2): Xaa is C or S
XXVPTELSATSMLYYDEYDKVVLRKHREM

SEQ ID NO: 45458 - protein, 29 aa, Artificial Sequence
  Cyclic GFR-binding peptide
  MOD_RES (1)..(2): Xaa is C or S
XXVPTELNAISMLYFDENEKVVLKKYRDM

SEQ ID NO: 45459 - protein, 30 aa, Artificial Sequence
  Cyclic GFR-binding peptide
  MOD_RES (30)..(30): Xaa is C or S
TELSPISMLYKDEYDKVVLKYHYEMVVEGX

SEQ ID NO: 45460 - protein, 30 aa, Artificial Sequence; identical to SEQ ID NO: 6618
  Cyclic GFR-binding peptide

SEQ ID NO: 45461 - protein, 35 aa, Artificial Sequence
  Cyclic GFR-binding peptide
  MOD_RES (6)..(7): Xaa is C or S
AVPKAXXAPTKLNAISVLYFDSSNNVILKKYRNMV

SEQ ID NO: 45462 - protein, 20 aa, Artificial Sequence
  Cyclic GFR-binding peptide
SAISILYLVGRTPKVLKNYQ

SEQ ID NO: 45463 - protein, 28 aa, Artificial Sequence
  Cyclic GFR-binding peptide
  MOD_RES (1)..(2): Xaa is C or S
XXVPTELSPISMLYKDENEKVVLKYHYD

SEQ ID NO: 45464 - protein, 37 aa, Artificial Sequence; identical to SEQ ID NO: 6624
  Cyclic GFR-binding peptide
  MOD_RES (3)..(4)..(35)..(37): Xaa is C or S

SEQ ID NO: 45465 - protein, 31 aa, Artificial Sequence
  Cyclic GFR-binding peptide
  MOD_RES (29)..(31): Xaa is C or S
QALSAISILYLVGRKPKVLKNYQMIVRSXKX

SEQ ID NO: 45466 - protein, 31 aa, Artificial Sequence
  Cyclic GFR-binding peptide
  MOD_RES (30)..(30): Xaa is C or S
PQDLNAISILYFVGRTPKVLKKYRMVVKSXK

SEQ ID NO: 45467 - protein, 23 aa, Artificial Sequence
  Cyclic GFR-binding peptide
LNAISMLYFDEYDKVVLKKYREM

SEQ ID NO: 45468 - protein, 26 aa, Artificial Sequence
  Cyclic GFR-binding peptide
SPISVLYKDSSNNVILKYHYNMVVKA

SEQ ID NO: 45469 - protein, 29 aa, Artificial Sequence
  Cyclic GFR-binding peptide
  MOD_RES (1)..(2): Xaa is C or S
XXVPTELSPISMLYKDEYDKVVLKYHYEM

SEQ ID NO: 45470 - protein, 40 aa, Artificial Sequence; identical to SEQ ID NO: 6625
  Cyclic GFR-binding peptide
  MOD_RES (5)..(6)..(37)..(39): Xaa is C or S

SEQ ID NO: 45471 - protein, 20 aa, Artificial Sequence
  Cyclic GFR-binding peptide
NAISMLYFDENEKVVLKKYR

SEQ ID NO: 45472 - protein, 38 aa, Artificial Sequence; identical to SEQ ID NO: 6626
  Cyclic GFR-binding peptide
  MOD_RES (4)..(5)..(36)..(38): Xaa is C or S

SEQ ID NO: 45473 - protein, 29 aa, Artificial Sequence
  Cyclic GFR-binding peptide
VPTELNAISMLYFDEYDKVVLKKYREMVV

SEQ ID NO: 45474 - protein, 40 aa, Artificial Sequence; identical to SEQ ID NO: 6627
  Cyclic GFR-binding peptide
  MOD_RES (4)..(5)..(37)..(39): Xaa is C or S

SEQ ID NO: 45475 - protein, 32 aa, Artificial Sequence
  Cyclic GFR-binding peptide
  MOD_RES (4)..(5): Xaa is C or S
GKAXXVPTKLNAISVLYFDDMGVPTLKKYREG

SEQ ID NO: 45476 - protein, 40 aa, Artificial Sequence; identical to SEQ ID NO: 6632
  Cyclic GFR-binding peptide
  MOD_RES (1)..(38)..(40): Xaa is C or S

SEQ ID NO: 45477 - protein, 34 aa, Artificial Sequence; identical to SEQ ID NO: 6631
  Cyclic GFR-binding peptide
  MOD_RES (3)..(3): Xaa is C or S

SEQ ID NO: 45478 - protein, 37 aa, Artificial Sequence; identical to SEQ ID NO: 6634
  Cyclic GFR-binding peptide
  MOD_RES (2)..(3)..(34)..(36): Xaa is C or S

SEQ ID NO: 45479 - protein, 30 aa, Artificial Sequence
  Cyclic GFR-binding peptide
  MOD_RES (2)..(3): Xaa is C or S
PXXVSQDLNAISILYFIGKTPKILKKYRMI

SEQ ID NO: 45480 - protein, 34 aa, Artificial Sequence
  Cyclic GFR-binding peptide
  MOD_RES (33)..(33): Xaa is C or S
VQLSAISVLYLEIVRKKPIFLKNYQTLEDHLAXK

SEQ ID NO: 45481 - protein, 33 aa, Artificial Sequence
  Cyclic GFR-binding peptide
  MOD_RES (5)..(6): Xaa is C or S
IPKAXXVPTELSATSMLYYDEYDKVVLRKHREM

SEQ ID NO: 45482 - protein, 34 aa, Artificial Sequence; identical to SEQ ID NO: 6636
  Cyclic GFR-binding peptide
  MOD_RES (1)..(33): Xaa is C or S

SEQ ID NO: 45483 - protein, 38 aa, Artificial Sequence; identical to SEQ ID NO: 6637
  Cyclic GFR-binding peptide
  MOD_RES (4)..(4): Xaa is C or S

SEQ ID NO: 45484 - protein, 25 aa, Artificial Sequence
  Cyclic GFR-binding peptide
VPTKLSATSVLYYDDMGVPTLRKHR

SEQ ID NO: 45485 - protein, 23 aa, Artificial Sequence
  Cyclic GFR-binding peptide
KLSAISVLYLDDSSNVILKNYQN

SEQ ID NO: 45486 - protein, 40 aa, Artificial Sequence; identical to SEQ ID NO: 6639
  Cyclic GFR-binding peptide
  MOD_RES (6)..(7)..(39): Xaa is C or S

SEQ ID NO: 45487 - protein, 26 aa, Artificial Sequence
  Cyclic GFR-binding peptide
LNAISILYFVGRKPKVLKKYRMIVRS

SEQ ID NO: 45488 - protein, 30 aa, Artificial Sequence
  Cyclic GFR-binding peptide
QLSPISVLYKEIVRKKPIFLKYHYTLEDHL

SEQ ID NO: 45489 - protein, 34 aa, Artificial Sequence; identical to SEQ ID NO: 6640
  Cyclic GFR-binding peptide
  MOD_RES (2)..(3)..(34): Xaa is C or S

SEQ ID NO: 45490 - protein, 35 aa, Artificial Sequence; identical to SEQ ID NO: 6641
  Cyclic GFR-binding peptide
  MOD_RES (35)..(35): Xaa is C or S

SEQ ID NO: 45491 - protein, 32 aa, Artificial Sequence; identical to SEQ ID NO: 6642
  Cyclic GFR-binding peptide
  MOD_RES (32)..(32): Xaa is C or S

SEQ ID NO: 45492 - protein, 36 aa, Artificial Sequence; identical to SEQ ID NO: 6643
  Cyclic GFR-binding peptide
  MOD_RES (2)..(3)..(34)..(36): Xaa is C or S

SEQ ID NO: 45493 - protein, 38 aa, Artificial Sequence; identical to SEQ ID NO: 6644
  Cyclic GFR-binding peptide
  MOD_RES (3)..(4)..(35)..(37): Xaa is C or S

SEQ ID NO: 45494 - protein, 32 aa, Artificial Sequence
  Cyclic GFR-binding peptide
  MOD_RES (3)..(4): Xaa is C or S
KPXXAPTQLSATSVLYYDDSSNVILRKHRNMV

SEQ ID NO: 45495 - protein, 30 aa, Artificial Sequence
  Cyclic GFR-binding peptide
  MOD_RES (1)..(1): Xaa is C or S
XRPTQVQLSAISVLYLEIVRKKPIFLKNYQ

SEQ ID NO: 45496 - protein, 32 aa, Artificial Sequence
  Cyclic GFR-binding peptide
  MOD_RES (29)..(31): Xaa is C or S
QDLNAISILYFVGRTPKVLKKYRMVVKSXKXS

SEQ ID NO: 45497 - protein, 36 aa, Artificial Sequence; identical to SEQ ID NO: 6646
  Cyclic GFR-binding peptide
  MOD_RES (4)..(5): Xaa is C or S

SEQ ID NO: 45498 - protein, 43 aa, Artificial Sequence; identical to SEQ ID NO: 6647
  Cyclic GFR-binding peptide
  MOD_RES (6)..(7)..(40)..(42): Xaa is C or S

SEQ ID NO: 45499 - protein, 39 aa, Artificial Sequence; identical to SEQ ID NO: 6649
  Cyclic GFR-binding peptide
  MOD_RES (3)..(3): Xaa is C or S

SEQ ID NO: 45500 - protein, 28 aa, Artificial Sequence
  Cyclic GFR-binding peptide
APTKLSPISVLYKDDSSNVILKYHYNMV

SEQ ID NO: 45501 - protein, 36 aa, Artificial Sequence; identical to SEQ ID NO: 6653
  Cyclic GFR-binding peptide
  MOD_RES (4)..(5): Xaa is C or S

SEQ ID NO: 45502 - protein, 31 aa, Artificial Sequence
  Cyclic GFR-binding peptide
  MOD_RES (5)..(6): Xaa is C or S
VPKPXXAPTKLSATSVLYYDDSSNVILRKHR

SEQ ID NO: 45503 - protein, 34 aa, Artificial Sequence
  Cyclic GFR-binding peptide
  MOD_RES (31)..(33): Xaa is C or S
PTQLSAISVLYLDDSSNVILKNYQNMVVRAXGXH

SEQ ID NO: 45504 - protein, 30 aa, Artificial Sequence
  Cyclic GFR-binding peptide
  MOD_RES (27)..(29): Xaa is C or S
SPISMLYKDENEKVVLKYHYDMVVEGXGXR

SEQ ID NO: 45505 - protein, 30 aa, Artificial Sequence
  Cyclic GFR-binding peptide
  MOD_RES (1)..(1): Xaa is C or S
XVPTELNAISMLYFDENEKVVLKKYRDMVV

SEQ ID NO: 45506 - protein, 33 aa, Artificial Sequence
  Cyclic GFR-binding peptide
  MOD_RES (3)..(4): Xaa is C or S
KAXXVPTKLNAISVLYFDDMGVPTLKKYREGMS

SEQ ID NO: 45507 - protein, 28 aa, Artificial Sequence
  Cyclic GFR-binding peptide
TELNAISMLYFDENEKVVLKKYRDMVVE

SEQ ID NO: 45508 - protein, 32 aa, Artificial Sequence
  Cyclic GFR-binding peptide
RPTQVQLNAISVLYFEIVRKKPIFLKKYRTLE

SEQ ID NO: 45509 - protein, 35 aa, Artificial Sequence; identical to SEQ ID NO: 6654
  Cyclic GFR-binding peptide
  MOD_RES (2)..(3)..(34): Xaa is C or S

SEQ ID NO: 45510 - protein, 37 aa, Artificial Sequence; identical to SEQ ID NO: 6655
  Cyclic GFR-binding peptide
  MOD_RES (2)..(3)..(36): Xaa is C or S

SEQ ID NO: 45511 - protein, 24 aa, Artificial Sequence
  Cyclic GFR-binding peptide
SATSMLYYDEYDKVVLRKHREMVV

SEQ ID NO: 45512 - protein, 33 aa, Artificial Sequence
  Cyclic GFR-binding peptide
  MOD_RES (31)..(33): Xaa is C or S
PTELNAISMLYFDENEKVVLKKYRDMVVEGXGX

SEQ ID NO: 45513 - protein, 30 aa, Artificial Sequence
  Cyclic GFR-binding peptide
  MOD_RES (3)..(4): Xaa is C or S
SPXXVSQDLSPISILYKIGKTPKILKYHYM

SEQ ID NO: 45514 - protein, 25 aa, Artificial Sequence
  Cyclic GFR-binding peptide
TQLSAISVLYLDDSSNVILKNYQNM

SEQ ID NO: 45515 - protein, 39 aa, Artificial Sequence; identical to SEQ ID NO: 6657
  Cyclic GFR-binding peptide
  MOD_RES (36)..(38): Xaa is C or S

SEQ ID NO: 45516 - protein, 24 aa, Artificial Sequence
  Cyclic GFR-binding peptide
DLSPISILYKIGKTPKILKYHYMI

SEQ ID NO: 45517 - protein, 30 aa, Artificial Sequence
  Cyclic GFR-binding peptide
  MOD_RES (27)..(29): Xaa is C or S
LNAISILYFIGKTPKILKKYRMIVKSXKXS

SEQ ID NO: 45518 - protein, 38 aa, Artificial Sequence; identical to SEQ ID NO: 6658
  Cyclic GFR-binding peptide
  MOD_RES (3)..(4)..(36)..(38): Xaa is C or S

SEQ ID NO: 45519 - protein, 29 aa, Artificial Sequence
  Cyclic GFR-binding peptide
  MOD_RES (1)..(2): Xaa is C or S
XXVSQDLSPISILYKIGKTPKILKYHYMI

SEQ ID NO: 45520 - protein, 34 aa, Artificial Sequence; identical to SEQ ID NO: 6661
  Cyclic GFR-binding peptide
  MOD_RES (1)..(2)..(33): Xaa is C or S

SEQ ID NO: 45521 - protein, 30 aa, Artificial Sequence
  Cyclic GFR-binding peptide
  MOD_RES (2)..(3): Xaa is C or S
PXXVPQDLNAISILYFVGRTPKVLKKYRMV

SEQ ID NO: 45522 - protein, 26 aa, Artificial Sequence
  Cyclic GFR-binding peptide
SPISMLYKDENEKVVLKYHYDMVVEG

SEQ ID NO: 45523 - protein, 27 aa, Artificial Sequence
  Cyclic GFR-binding peptide
APTQLSATSVLYYDDSSNVILRKHRNM

SEQ ID NO: 45524 - protein, 26 aa, Artificial Sequence
  Cyclic GFR-binding peptide
SAISVLYLDDMGVPTLKNYQEGMSVA

SEQ ID NO: 45525 - protein, 26 aa, Artificial Sequence
  Cyclic GFR-binding peptide
  MOD_RES (26)..(26): Xaa is C or S
NAISILYFIGKTPKILKKYRMIVKSX

SEQ ID NO: 45526 - protein, 28 aa, Artificial Sequence
  Cyclic GFR-binding peptide
KLNAISVLYFDSSNNVILKKYRNMVVKA

SEQ ID NO: 45527 - protein, 29 aa, Artificial Sequence
  Cyclic GFR-binding peptide
  MOD_RES (29)..(29): Xaa is C or S
LSAISVLYLDDMGVPTLKNYQEGMSVAEX

SEQ ID NO: 45528 - protein, 30 aa, Artificial Sequence
  Cyclic GFR-binding peptide
  MOD_RES (28)..(30): Xaa is C or S
DLSPISILYKIGKTPKILKYHYMIVKSXKX

SEQ ID NO: 45529 - protein, 24 aa, Artificial Sequence
  Cyclic GFR-binding peptide
PTKLNAISVLYFDSSNNVILKKYR

SEQ ID NO: 45530 - protein, 29 aa, Artificial Sequence
  Cyclic GFR-binding peptide
  MOD_RES (4)..(4): Xaa is C or S
KPTXAPTKLSPISVLYKDDSSNVILKYHY

SEQ ID NO: 45531 - protein, 30 aa, Artificial Sequence
  Cyclic GFR-binding peptide
PTQVQLSPISVLYKEIVRKKPIFLKYHYTL

SEQ ID NO: 45532 - protein, 24 aa, Artificial Sequence
  Cyclic GFR-binding peptide
SATSILYYIGKTPKILRKHRMIVK

SEQ ID NO: 45533 - protein, 30 aa, Artificial Sequence
  Cyclic GFR-binding peptide
  MOD_RES (29)..(29): Xaa is C or S
QDLSPISILYKIGKTPKILKYHYMIVKSXK

SEQ ID NO: 45534 - protein, 26 aa, Artificial Sequence
  Cyclic GFR-binding peptide
  MOD_RES (1)..(1): Xaa is C or S
XVPQDLSAISILYLVGRTPKVLKNYQ

SEQ ID NO: 45535 - protein, 29 aa, Artificial Sequence
  Cyclic GFR-binding peptide
TKLSAISVLYLDDSSNVILKNYQNMVVRS

SEQ ID NO: 45536 - protein, 34 aa, Artificial Sequence; identical to SEQ ID NO: 6664
  Cyclic GFR-binding peptide
  MOD_RES (2)..(3): Xaa is C or S

SEQ ID NO: 45537 - protein, 37 aa, Artificial Sequence; identical to SEQ ID NO: 6665
  Cyclic GFR-binding peptide
  MOD_RES (1)..(34)..(36): Xaa is C or S

SEQ ID NO: 45538 - protein, 33 aa, Artificial Sequence; identical to SEQ ID NO: 6666
  Cyclic GFR-binding peptide
  MOD_RES (32)..(32): Xaa is C or S

SEQ ID NO: 45539 - protein, 39 aa, Artificial Sequence; identical to SEQ ID NO: 6667
  Cyclic GFR-binding peptide
  MOD_RES (6)..(7)..(39): Xaa is C or S

SEQ ID NO: 45540 - protein, 33 aa, Artificial Sequence
  Cyclic GFR-binding peptide
  MOD_RES (3)..(4): Xaa is C or S
KAXXVPTELSPISMLYKDENEKVVLKYHYDMVV

SEQ ID NO: 45541 - protein, 27 aa, Artificial Sequence
  Cyclic GFR-binding peptide
KLSAISVLYLDDSSNVILKNYQNMVVR

SEQ ID NO: 45542 - protein, 41 aa, Artificial Sequence; identical to SEQ ID NO: 6668
  Cyclic GFR-binding peptide
  MOD_RES (5)..(6)..(39)..(41): Xaa is C or S

SEQ ID NO: 45543 - protein, 31 aa, Artificial Sequence
  Cyclic GFR-binding peptide
  MOD_RES (29)..(31): Xaa is C or S
LSATSVLYYDDMGVPTLRKHREGMSVAEXGX

SEQ ID NO: 45544 - protein, 39 aa, Artificial Sequence; identical to SEQ ID NO: 6669
  Cyclic GFR-binding peptide
  MOD_RES (6)..(7)..(38): Xaa is C or S

SEQ ID NO: 45545 - protein, 23 aa, Artificial Sequence
  Cyclic GFR-binding peptide
SPISILYKVGRTPKVLKYHYMVV

SEQ ID NO: 45546 - protein, 35 aa, Artificial Sequence; identical to SEQ ID NO: 6670
  Cyclic GFR-binding peptide
  MOD_RES (3)..(4): Xaa is C or S

SEQ ID NO: 45547 - protein, 28 aa, Artificial Sequence
  Cyclic GFR-binding peptide
PTKLSATSVLYYDDMGVPTLRKHREGMS

SEQ ID NO: 45548 - protein, 23 aa, Artificial Sequence
  Cyclic GFR-binding peptide
KLSAISVLYLDDMGVPTLKNYQE

SEQ ID NO: 45549 - protein, 39 aa, Artificial Sequence; identical to SEQ ID NO: 6672
  Cyclic GFR-binding peptide
  MOD_RES (3)..(4)..(36)..(38): Xaa is C or S

SEQ ID NO: 45550 - protein, 24 aa, Artificial Sequence
  Cyclic GFR-binding peptide
PQALSAISILYLVGRKPKVLKNYQ

SEQ ID NO: 45551 - protein, 33 aa, Artificial Sequence; identical to SEQ ID NO: 6673
  Cyclic GFR-binding peptide
  MOD_RES (1)..(33): Xaa is C or S

SEQ ID NO: 45552 - protein, 35 aa, Artificial Sequence; identical to SEQ ID NO: 6674
  Cyclic GFR-binding peptide
  MOD_RES (32)..(34): Xaa is C or S

SEQ ID NO: 45553 - protein, 36 aa, Artificial Sequence; identical to SEQ ID NO: 6675
  Cyclic GFR-binding peptide
  MOD_RES (5)..(6): Xaa is C or S

SEQ ID NO: 45554 - protein, 28 aa, Artificial Sequence
  Cyclic GFR-binding peptide
VQLNAISVLYFEIVRKKPIFLKKYRTLE

SEQ ID NO: 45555 - protein, 28 aa, Artificial Sequence
  Cyclic GFR-binding peptide
  MOD_RES (1)..(2): Xaa is C or S
XXVPQALSAISILYLVGRKPKVLKNYQM

SEQ ID NO: 45556 - protein, 26 aa, Artificial Sequence
  Cyclic GFR-binding peptide
VSQDLSATSILYYIGKTPKILRKHRM

SEQ ID NO: 45557 - protein, 31 aa, Artificial Sequence
  Cyclic GFR-binding peptide
  MOD_RES (4)..(4): Xaa is C or S
KPTXAPTKLSATSVLYYDDSSNVILRKHRNM

SEQ ID NO: 45558 - protein, 33 aa, Artificial Sequence
  Cyclic GFR-binding peptide
  MOD_RES (2)..(3): Xaa is C or S
AXXVPTKLSATSVLYYDDMGVPTLRKHREGMSV

SEQ ID NO: 45559 - protein, 32 aa, Artificial Sequence
  Cyclic GFR-binding peptide
  MOD_RES (5)..(6): Xaa is C or S
SASPXXVPQDLNAISILYFVGRTPKVLKKYRM

SEQ ID NO: 45560 - protein, 33 aa, Artificial Sequence
  Cyclic GFR-binding peptide
  MOD_RES (32)..(32): Xaa is C or S
QLNAISVLYFEIVRKKPIFLKKYRTLEDHLAXK

SEQ ID NO: 45561 - protein, 32 aa, Artificial Sequence
  Cyclic GFR-binding peptide
  MOD_RES (29)..(31): Xaa is C or S
KLSPISVLYKDDSSNVILKYHYNMVVRSXGXH

SEQ ID NO: 45562 - protein, 27 aa, Artificial Sequence
  Cyclic GFR-binding peptide
ELSATSMLYYDEYDKVVLRKHREMVVE

SEQ ID NO: 45563 - protein, 26 aa, Artificial Sequence
  Cyclic GFR-binding peptide
NAISVLYFEIVRKKPIFLKKYRTLED

SEQ ID NO: 45564 - protein, 35 aa, Artificial Sequence; identical to SEQ ID NO: 6677
  Cyclic GFR-binding peptide
  MOD_RES (3)..(35): Xaa is C or S

SEQ ID NO: 45565 - protein, 25 aa, Artificial Sequence
  Cyclic GFR-binding peptide
LSAISVLYLEIVRKKPIFLKNYQTL

SEQ ID NO: 45566 - protein, 35 aa, Artificial Sequence; identical to SEQ ID NO: 6680
  Cyclic GFR-binding peptide
  MOD_RES (1)..(2)..(34): Xaa is C or S

SEQ ID NO: 45567 - protein, 30 aa, Artificial Sequence; identical to SEQ ID NO: 6681
  Cyclic GFR-binding peptide

SEQ ID NO: 45568 - protein, 29 aa, Artificial Sequence
  Cyclic GFR-binding peptide
SQDLSATSILYYIGKTPKILRKHRMIVKS

SEQ ID NO: 45569 - protein, 25 aa, Artificial Sequence
  Cyclic GFR-binding peptide
VPQDLSPISILYKVGRTPKVLKYHY

SEQ ID NO: 45570 - protein, 21 aa, Artificial Sequence
  Cyclic GFR-binding peptide
LSAISVLYLDSSNNVILKNYQ

SEQ ID NO: 45571 - protein, 38 aa, Artificial Sequence; identical to SEQ ID NO: 6683
  Cyclic GFR-binding peptide
  MOD_RES (3)..(4)..(35)..(37): Xaa is C or S

SEQ ID NO: 45572 - protein, 20 aa, Artificial Sequence
  Cyclic GFR-binding peptide
SAISVLYLDDSSNVILKNYQ

SEQ ID NO: 45573 - protein, 29 aa, Artificial Sequence
  Cyclic GFR-binding peptide
  MOD_RES (3)..(4): Xaa is C or S
KAXXAPTKLSAISVLYLDSSNNVILKNYQ

SEQ ID NO: 45574 - protein, 32 aa, Artificial Sequence; identical to SEQ ID NO: 6687
  Cyclic GFR-binding peptide
  MOD_RES (32)..(32): Xaa is C or S

SEQ ID NO: 45575 - protein, 44 aa, Artificial Sequence; identical to SEQ ID NO: 6688
  Cyclic GFR-binding peptide
  MOD_RES (5)..(42)..(44): Xaa is C or S

SEQ ID NO: 45576 - protein, 30 aa, Artificial Sequence
  Cyclic GFR-binding peptide
  MOD_RES (27)..(29): Xaa is C or S
NAISMLYFDEYDKVVLKKYREMVVEGXGXR

SEQ ID NO: 45577 - protein, 38 aa, Artificial Sequence; identical to SEQ ID NO: 6691
  Cyclic GFR-binding peptide
  MOD_RES (6)..(7): Xaa is C or S

SEQ ID NO: 45578 - protein, 35 aa, Artificial Sequence
  Cyclic GFR-binding peptide
  MOD_RES (5)..(5): Xaa is C or S
RNVQXRPTQVQLSPISVLYKEIVRKKPIFLKYHYT

SEQ ID NO: 45579 - protein, 35 aa, Artificial Sequence
  Cyclic GFR-binding peptide
  MOD_RES (5)..(6): Xaa is C or S
VPKAXXAPTKLSPISVLYKDSSNNVILKYHYNMVV

SEQ ID NO: 45580 - protein, 28 aa, Artificial Sequence
  Cyclic GFR-binding peptide
KLSATSVLYYDDMGVPTLRKHREGMSVA

SEQ ID NO: 45581 - protein, 33 aa, Artificial Sequence
  Cyclic GFR-binding peptide
  MOD_RES (6)..(6): Xaa is C or S
VTKPTXAPTKLSATSVLYYDDSSNVILRKHRNM

SEQ ID NO: 45582 - protein, 34 aa, Artificial Sequence; identical to SEQ ID NO: 6693
  Cyclic GFR-binding peptide
  MOD_RES (1)..(2)..(34): Xaa is C or S

SEQ ID NO: 45583 - protein, 39 aa, Artificial Sequence; identical to SEQ ID NO: 6694
  Cyclic GFR-binding peptide
  MOD_RES (3)..(4)..(36)..(38): Xaa is C or S

SEQ ID NO: 45584 - protein, 39 aa, Artificial Sequence; identical to SEQ ID NO: 6698
  Cyclic GFR-binding peptide
  MOD_RES (5)..(6)..(38): Xaa is C or S

SEQ ID NO: 45585 - protein, 40 aa, Artificial Sequence; identical to SEQ ID NO: 6700
  Cyclic GFR-binding peptide
  MOD_RES (6)..(7)..(38)..(40): Xaa is C or S

SEQ ID NO: 45586 - protein, 41 aa, Artificial Sequence; identical to SEQ ID NO: 6701
  Cyclic GFR-binding peptide
  MOD_RES (5)..(6)..(39)..(41): Xaa is C or S

SEQ ID NO: 45587 - protein, 25 aa, Artificial Sequence
  Cyclic GFR-binding peptide
APTQLSAISVLYLDDSSNVILKNYQ

SEQ ID NO: 45588 - protein, 32 aa, Artificial Sequence
  Cyclic GFR-binding peptide
  MOD_RES (31)..(31): Xaa is C or S
TKLSATSVLYYDDMGVPTLRKHREGMSVAEXG

SEQ ID NO: 45589 - protein, 34 aa, Artificial Sequence
  Cyclic GFR-binding peptide
  MOD_RES (31)..(33): Xaa is C or S
PTELNAISMLYFDEYDKVVLKKYREMVVEGXGXR

SEQ ID NO: 45590 - protein, 31 aa, Artificial Sequence
  Cyclic GFR-binding peptide
  MOD_RES (3)..(4): Xaa is C or S
SPXXVPQDLSATSILYYVGRTPKVLRKHRMV

SEQ ID NO: 45591 - protein, 38 aa, Artificial Sequence; identical to SEQ ID NO: 6704
  Cyclic GFR-binding peptide
  MOD_RES (3)..(35)..(37): Xaa is C or S

SEQ ID NO: 45592 - protein, 36 aa, Artificial Sequence; identical to SEQ ID NO: 6705
  Cyclic GFR-binding peptide
  MOD_RES (1)..(2)..(34)..(36): Xaa is C or S

SEQ ID NO: 45593 - protein, 35 aa, Artificial Sequence
  Cyclic GFR-binding peptide
  MOD_RES (5)..(6): Xaa is C or S
VPKPXXAPTKLSPISVLYKDDSSNVILKYHYNMVV

SEQ ID NO: 45594 - protein, 26 aa, Artificial Sequence
  Cyclic GFR-binding peptide
PTKLSATSVLYYDDMGVPTLRKHREG

SEQ ID NO: 45595 - protein, 34 aa, Artificial Sequence; identical to SEQ ID NO: 6706
  Cyclic GFR-binding peptide

SEQ ID NO: 45596 - protein, 38 aa, Artificial Sequence; identical to SEQ ID NO: 6707
  Cyclic GFR-binding peptide
  MOD_RES (2)..(3)..(36)..(38): Xaa is C or S

SEQ ID NO: 45597 - protein, 33 aa, Artificial Sequence
  Cyclic GFR-binding peptide
  MOD_RES (31)..(33): Xaa is C or S
TKLSAISVLYLDDMGVPTLKNYQEGMSVAEXGX

SEQ ID NO: 45598 - protein, 28 aa, Artificial Sequence
  Cyclic GFR-binding peptide
QALSAISILYLVGRKPKVLKNYQMIVRS

SEQ ID NO: 45599 - protein, 25 aa, Artificial Sequence
  Cyclic GFR-binding peptide
QDLSATSILYYVGRTPKVLRKHRMV

SEQ ID NO: 45600 - protein, 30 aa, Artificial Sequence
  Cyclic GFR-binding peptide
PTKLSAISVLYLDSSNNVILKNYQNMVVKA

SEQ ID NO: 45601 - protein, 38 aa, Artificial Sequence; identical to SEQ ID NO: 6714
  Cyclic GFR-binding peptide
  MOD_RES (4)..(5)..(38): Xaa is C or S

SEQ ID NO: 45602 - protein, 28 aa, Artificial Sequence
  Cyclic GFR-binding peptide
TQLSATSVLYYDDSSNVILRKHRNMVVR

SEQ ID NO: 45603 - protein, 31 aa, Artificial Sequence
  Cyclic GFR-binding peptide
  MOD_RES (28)..(30): Xaa is C or S
LSPISVLYKDDSSNVILKYHYNMVVRSXGXH

SEQ ID NO: 45604 - protein, 29 aa, Artificial Sequence
  Cyclic GFR-binding peptide
  MOD_RES (29)..(29): Xaa is C or S
QDLSAISILYLIGKTPKILKNYQMIVKSX

SEQ ID NO: 45605 - protein, 39 aa, Artificial Sequence; identical to SEQ ID NO: 6715
  Cyclic GFR-binding peptide
  MOD_RES (5)..(6)..(37)..(39): Xaa is C or S

SEQ ID NO: 45606 - protein, 36 aa, Artificial Sequence; identical to SEQ ID NO: 6716
  Cyclic GFR-binding peptide
  MOD_RES (5)..(6): Xaa is C or S

SEQ ID NO: 45607 - protein, 30 aa, Artificial Sequence
  Cyclic GFR-binding peptide
  MOD_RES (29)..(29): Xaa is C or S
QDLNAISILYFIGKTPKILKKYRMIVKSXK

SEQ ID NO: 45608 - protein, 35 aa, Artificial Sequence; identical to SEQ ID NO: 6717
  Cyclic GFR-binding peptide
  MOD_RES (4)..(5): Xaa is C or S

SEQ ID NO: 45609 - protein, 20 aa, Artificial Sequence
  Cyclic GFR-binding peptide
SAISVLYLDDMGVPTLKNYQ

SEQ ID NO: 45610 - protein, 25 aa, Artificial Sequence
  Cyclic GFR-binding peptide
LSPISILYKVGRTPKVLKYHYMVVK

SEQ ID NO: 45611 - protein, 34 aa, Artificial Sequence; identical to SEQ ID NO: 6719
  Cyclic GFR-binding peptide

SEQ ID NO: 45612 - protein, 30 aa, Artificial Sequence
  Cyclic GFR-binding peptide
  MOD_RES (29)..(29): Xaa is C or S
KLSPISVLYKDDSSNVILKYHYNMVVRSXG

SEQ ID NO: 45613 - protein, 34 aa, Artificial Sequence; identical to SEQ ID NO: 6720
  Cyclic GFR-binding peptide
  MOD_RES (3)..(4): Xaa is C or S

SEQ ID NO: 45614 - protein, 32 aa, Artificial Sequence
  Cyclic GFR-binding peptide
  MOD_RES (6)..(7): Xaa is C or S
ASASPXXVSQDLSPISILYKIGKTPKILKYHY

SEQ ID NO: 45615 - protein, 35 aa, Artificial Sequence
  Cyclic GFR-binding peptide
  MOD_RES (5)..(6): Xaa is C or S
SASPXXVPQDLNAISILYFVGRTPKVLKKYRMVVK

SEQ ID NO: 45616 - protein, 34 aa, Artificial Sequence
  Cyclic GFR-binding peptide
  MOD_RES (4)..(5): Xaa is C or S
AAPXXVPQALNAISILYFVGRKPKVLKKYRMIVR

SEQ ID NO: 45617 - protein, 34 aa, Artificial Sequence; identical to SEQ ID NO: 6721
  Cyclic GFR-binding peptide

SEQ ID NO: 45618 - protein, 42 aa, Artificial Sequence; identical to SEQ ID NO: 6722
  Cyclic GFR-binding peptide
  MOD_RES (6)..(7)..(39)..(41): Xaa is C or S

SEQ ID NO: 45619 - protein, 28 aa, Artificial Sequence
  Cyclic GFR-binding peptide
  MOD_RES (1)..(2): Xaa is C or S
XXAPTKLSPISVLYKDDSSNVILKYHYN

SEQ ID NO: 45620 - protein, 29 aa, Artificial Sequence
  Cyclic GFR-binding peptide
  MOD_RES (27)..(29): Xaa is C or S
LNAISILYFIGKTPKILKKYRMIVKSXKX

SEQ ID NO: 45621 - protein, 33 aa, Artificial Sequence
  Cyclic GFR-binding peptide
  MOD_RES (2)..(2): Xaa is C or S
QXRPTQVQLSPISVLYKEIVRKKPIFLKYHYTL

SEQ ID NO: 45622 - protein, 31 aa, Artificial Sequence
  Cyclic GFR-binding peptide
  MOD_RES (4)..(5): Xaa is C or S
PKPXXAPTQLSAISVLYLDDSSNVILKNYQN

SEQ ID NO: 45623 - protein, 39 aa, Artificial Sequence; identical to SEQ ID NO: 6724
  Cyclic GFR-binding peptide
  MOD_RES (3)..(4)..(36)..(38): Xaa is C or S

SEQ ID NO: 45624 - protein, 33 aa, Artificial Sequence
  Cyclic GFR-binding peptide
  MOD_RES (5)..(6): Xaa is C or S
SAAPXXVPQALNAISILYFVGRKPKVLKKYRMI

SEQ ID NO: 45625 - protein, 27 aa, Artificial Sequence
  Cyclic GFR-binding peptide
  MOD_RES (1)..(1): Xaa is C or S
XVPTKLSAISVLYLDDMGVPTLKNYQE

SEQ ID NO: 45626 - protein, 29 aa, Artificial Sequence
  Cyclic GFR-binding peptide
  MOD_RES (2)..(3): Xaa is C or S
PXXVSQDLNAISILYFIGKTPKILKKYRM

SEQ ID NO: 45627 - protein, 35 aa, Artificial Sequence; identical to SEQ ID NO: 6726
  Cyclic GFR-binding peptide
  MOD_RES (1)..(34): Xaa is C or S

SEQ ID NO: 45628 - protein, 32 aa, Artificial Sequence
  Cyclic GFR-binding peptide
QVQLSAISVLYLEIVRKKPIFLKNYQTLEDHL

SEQ ID NO: 45629 - protein, 33 aa, Artificial Sequence
  Cyclic GFR-binding peptide
  MOD_RES (6)..(7): Xaa is C or S
ASASPXXVPQDLSATSILYYVGRTPKVLRKHRM

SEQ ID NO: 45630 - protein, 43 aa, Artificial Sequence; identical to SEQ ID NO: 6727
  Cyclic GFR-binding peptide
  MOD_RES (5)..(42): Xaa is C or S

SEQ ID NO: 45631 - protein, 31 aa, Artificial Sequence
  Cyclic GFR-binding peptide
  MOD_RES (30)..(30): Xaa is C or S
TELNAISMLYFDENEKVVLKKYRDMVVEGXG

SEQ ID NO: 45632 - protein, 29 aa, Artificial Sequence
  Cyclic GFR-binding peptide
  MOD_RES (2)..(2): Xaa is C or S
TXAPTKLSATSVLYYDDSSNVILRKHRNM

SEQ ID NO: 45633 - protein, 33 aa, Artificial Sequence
  Cyclic GFR-binding peptide
  MOD_RES (32)..(32): Xaa is C or S
PTKLNAISVLYFDDMGVPTLKKYREGMSVAEXG

SEQ ID NO: 45634 - protein, 33 aa, Artificial Sequence; identical to SEQ ID NO: 6729
  Cyclic GFR-binding peptide
  MOD_RES (1)..(33): Xaa is C or S

SEQ ID NO: 45635 - protein, 34 aa, Artificial Sequence
  Cyclic GFR-binding peptide
  MOD_RES (5)..(6): Xaa is C or S
VPKAXXAPTKLSPISVLYKDSSNNVILKYHYNMV

SEQ ID NO: 45636 - protein, 31 aa, Artificial Sequence
  Cyclic GFR-binding peptide
  MOD_RES (30)..(30): Xaa is C or S
KLNAISVLYFDDMGVPTLKKYREGMSVAEXG

SEQ ID NO: 45637 - protein, 32 aa, Artificial Sequence
  Cyclic GFR-binding peptide
  MOD_RES (6)..(6): Xaa is C or S
VTKPTXAPTKLSAISVLYLDDSSNVILKNYQN

SEQ ID NO: 45638 - protein, 32 aa, Artificial Sequence
  Cyclic GFR-binding peptide
  MOD_RES (5)..(6): Xaa is C or S
IPKAXXVPTELNAISMLYFDEYDKVVLKKYRE

SEQ ID NO: 45639 - protein, 31 aa, Artificial Sequence
  Cyclic GFR-binding peptide
PTQVQLSATSVLYYEIVRKKPIFLRKHRTLE

SEQ ID NO: 45640 - protein, 34 aa, Artificial Sequence; identical to SEQ ID NO: 6733
  Cyclic GFR-binding peptide
  MOD_RES (1)..(2)..(34): Xaa is C or S

SEQ ID NO: 45641 - protein, 39 aa, Artificial Sequence; identical to SEQ ID NO: 6734
  Cyclic GFR-binding peptide
  MOD_RES (6)..(7): Xaa is C or S

SEQ ID NO: 45642 - protein, 31 aa, Artificial Sequence
  Cyclic GFR-binding peptide
  MOD_RES (2)..(3): Xaa is C or S
PXXAPTKLSAISVLYLDDSSNVILKNYQNMV

SEQ ID NO: 45643 - protein, 24 aa, Artificial Sequence
  Cyclic GFR-binding peptide
PQALNAISILYFVGRKPKVLKKYR

SEQ ID NO: 45644 - protein, 35 aa, Artificial Sequence; identical to SEQ ID NO: 6735
  Cyclic GFR-binding peptide
  MOD_RES (1)..(2)..(34): Xaa is C or S

SEQ ID NO: 45645 - protein, 25 aa, Artificial Sequence
  Cyclic GFR-binding peptide
QALSAISILYLVGRKPKVLKNYQMI

SEQ ID NO: 45646 - protein, 29 aa, Artificial Sequence
  Cyclic GFR-binding peptide
  MOD_RES (1)..(1): Xaa is C or S
XVPQALSATSILYYVGRKPKVLRKHRMIV

SEQ ID NO: 45647 - protein, 27 aa, Artificial Sequence
  Cyclic GFR-binding peptide
DLSAISILYLVGRTPKVLKNYQMVVKS

SEQ ID NO: 45648 - protein, 37 aa, Artificial Sequence; identical to SEQ ID NO: 6736
  Cyclic GFR-binding peptide
  MOD_RES (3)..(4)..(35)..(37): Xaa is C or S

SEQ ID NO: 45649 - protein, 36 aa, Artificial Sequence
  Cyclic GFR-binding peptide
  MOD_RES (6)..(7): Xaa is C or S
ASASPXXVSQDLSAISILYLIGKTPKILKNYQMIVK

SEQ ID NO: 45650 - protein, 28 aa, Artificial Sequence
  Cyclic GFR-binding peptide
  MOD_RES (1)..(1): Xaa is C or S
XVSQDLSPISILYKIGKTPKILKYHYMI

SEQ ID NO: 45651 - protein, 34 aa, Artificial Sequence; identical to SEQ ID NO: 6740
  Cyclic GFR-binding peptide
  MOD_RES (1)..(2)..(34): Xaa is C or S

SEQ ID NO: 45652 - protein, 27 aa, Artificial Sequence
  Cyclic GFR-binding peptide
  MOD_RES (1)..(1): Xaa is C or S
XAPTKLSAISVLYLDDSSNVILKNYQN

SEQ ID NO: 45653 - protein, 36 aa, Artificial Sequence; identical to SEQ ID NO: 6741
  Cyclic GFR-binding peptide
  MOD_RES (1)..(2)..(33)..(35): Xaa is C or S

SEQ ID NO: 45654 - protein, 24 aa, Artificial Sequence
  Cyclic GFR-binding peptide
TKLSAISVLYLDSSNNVILKNYQN

SEQ ID NO: 45655 - protein, 26 aa, Artificial Sequence
  Cyclic GFR-binding peptide
  MOD_RES (1)..(1): Xaa is C or S
XVPQDLNAISILYFVGRTPKVLKKYR

SEQ ID NO: 45656 - protein, 29 aa, Artificial Sequence
  Cyclic GFR-binding peptide
  MOD_RES (3)..(4): Xaa is C or S
APXXVPQALNAISILYFVGRKPKVLKKYR

SEQ ID NO: 45657 - protein, 32 aa, Artificial Sequence; identical to SEQ ID NO: 6744
  Cyclic GFR-binding peptide
  MOD_RES (32)..(32): Xaa is C or S

SEQ ID NO: 45658 - protein, 27 aa, Artificial Sequence
  Cyclic GFR-binding peptide
VPTELSPISMLYKDENEKVVLKYHYDM

SEQ ID NO: 45659 - protein, 32 aa, Artificial Sequence
  Cyclic GFR-binding peptide
PTQVQLSAISVLYLEIVRKKPIFLKNYQTLED

SEQ ID NO: 45660 - protein, 38 aa, Artificial Sequence; identical to SEQ ID NO: 6745
  Cyclic GFR-binding peptide
  MOD_RES (5)..(6)..(38): Xaa is C or S

SEQ ID NO: 45661 - protein, 37 aa, Artificial Sequence; identical to SEQ ID NO: 6746
  Cyclic GFR-binding peptide
  MOD_RES (6)..(7): Xaa is C or S

SEQ ID NO: 45662 - protein, 28 aa, Artificial Sequence
  Cyclic GFR-binding peptide
  MOD_RES (1)..(2): Xaa is C or S
XXVPTELSATSMLYYDEYDKVVLRKHRE

SEQ ID NO: 45663 - protein, 39 aa, Artificial Sequence; identical to SEQ ID NO: 6751
  Cyclic GFR-binding peptide
  MOD_RES (5)..(37)..(39): Xaa is C or S

SEQ ID NO: 45664 - protein, 24 aa, Artificial Sequence
  Cyclic GFR-binding peptide
PQDLSAISILYLVGRTPKVLKNYQ

SEQ ID NO: 45665 - protein, 29 aa, Artificial Sequence
  Cyclic GFR-binding peptide
PQDLSPISILYKVGRTPKVLKYHYMVVKS

SEQ ID NO: 45666 - protein, 24 aa, Artificial Sequence
  Cyclic GFR-binding peptide
QLNAISVLYFEIVRKKPIFLKKYR

SEQ ID NO: 45667 - protein, 31 aa, Artificial Sequence
  Cyclic GFR-binding peptide
  MOD_RES (1)..(2): Xaa is C or S
XXVPTELSPISMLYKDEYDKVVLKYHYEMVV

SEQ ID NO: 45668 - protein, 25 aa, Artificial Sequence
  Cyclic GFR-binding peptide
PTELSATSMLYYDENEKVVLRKHRD

SEQ ID NO: 45669 - protein, 30 aa, Artificial Sequence
  Cyclic GFR-binding peptide
RPTQVQLSPISVLYKEIVRKKPIFLKYHYT

SEQ ID NO: 45670 - protein, 31 aa, Artificial Sequence
  Cyclic GFR-binding peptide
  MOD_RES (5)..(6): Xaa is C or S
SAAPXXVPQALSATSILYYVGRKPKVLRKHR

SEQ ID NO: 45671 - protein, 32 aa, Artificial Sequence
  Cyclic GFR-binding peptide
QVQLNAISVLYFEIVRKKPIFLKKYRTLEDHL

SEQ ID NO: 45672 - protein, 23 aa, Artificial Sequence
  Cyclic GFR-binding peptide
TELSATSMLYYDENEKVVLRKHR

SEQ ID NO: 45673 - protein, 35 aa, Artificial Sequence; identical to SEQ ID NO: 6753
  Cyclic GFR-binding peptide
  MOD_RES (3)..(4): Xaa is C or S

SEQ ID NO: 45674 - protein, 27 aa, Artificial Sequence
  Cyclic GFR-binding peptide
  MOD_RES (1)..(2): Xaa is C or S
XXVPQALSAISILYLVGRKPKVLKNYQ

SEQ ID NO: 45675 - protein, 29 aa, Artificial Sequence
  Cyclic GFR-binding peptide
  MOD_RES (1)..(1): Xaa is C or S
XVSQDLSAISILYLIGKTPKILKNYQMIV

SEQ ID NO: 45676 - protein, 31 aa, Artificial Sequence
  Cyclic GFR-binding peptide
  MOD_RES (1)..(2): Xaa is C or S
XXVPTKLNAISVLYFDDMGVPTLKKYREGMS

SEQ ID NO: 45677 - protein, 40 aa, Artificial Sequence; identical to SEQ ID NO: 6754
  Cyclic GFR-binding peptide
  MOD_RES (6)..(7)..(38)..(40): Xaa is C or S

SEQ ID NO: 45678 - protein, 28 aa, Artificial Sequence
  Cyclic GFR-binding peptide
  MOD_RES (1)..(1): Xaa is C or S
XVPQDLSPISILYKVGRTPKVLKYHYMV

SEQ ID NO: 45679 - protein, 39 aa, Artificial Sequence; identical to SEQ ID NO: 6755
  Cyclic GFR-binding peptide
  MOD_RES (5)..(6)..(37)..(39): Xaa is C or S

SEQ ID NO: 45680 - protein, 28 aa, Artificial Sequence
  Cyclic GFR-binding peptide
  MOD_RES (27)..(27): Xaa is C or S
LSPISILYKVGRTPKVLKYHYMVVKSXK

SEQ ID NO: 45681 - protein, 30 aa, Artificial Sequence
  Cyclic GFR-binding peptide
  MOD_RES (2)..(3): Xaa is C or S
PXXVPQALSPISILYKVGRKPKVLKYHYMI

SEQ ID NO: 45682 - protein, 32 aa, Artificial Sequence
  Cyclic GFR-binding peptide
  MOD_RES (5)..(6): Xaa is C or S
VPKPXXAPTKLSAISVLYLDDSSNVILKNYQN

SEQ ID NO: 45683 - protein, 32 aa, Artificial Sequence; identical to SEQ ID NO: 6756
  Cyclic GFR-binding peptide
  MOD_RES (1)..(1): Xaa is C or S

SEQ ID NO: 45684 - protein, 23 aa, Artificial Sequence
  Cyclic GFR-binding peptide
ALSAISILYLVGRKPKVLKNYQM

SEQ ID NO: 45685 - protein, 32 aa, Artificial Sequence
  Cyclic GFR-binding peptide
  MOD_RES (4)..(5): Xaa is C or S
PKAXXVPTELNAISMLYFDEYDKVVLKKYREM

SEQ ID NO: 45686 - protein, 24 aa, Artificial Sequence
  Cyclic GFR-binding peptide
LNAISVLYFDDMGVPTLKKYREGM

SEQ ID NO: 45687 - protein, 36 aa, Artificial Sequence; identical to SEQ ID NO: 6757
  Cyclic GFR-binding peptide
  MOD_RES (1)..(2)..(34)..(36): Xaa is C or S

SEQ ID NO: 45688 - protein, 28 aa, Artificial Sequence
  Cyclic GFR-binding peptide
  MOD_RES (28)..(28): Xaa is C or S
LSPISVLYKDDSSNVILKYHYNMVVRSX

SEQ ID NO: 45689 - protein, 26 aa, Artificial Sequence
  Cyclic GFR-binding peptide
  MOD_RES (26)..(26): Xaa is C or S
SATSILYYVGRTPKVLRKHRMVVKSX

SEQ ID NO: 45690 - protein, 26 aa, Artificial Sequence
  Cyclic GFR-binding peptide
VPTELNAISMLYFDENEKVVLKKYRD

SEQ ID NO: 45691 - protein, 29 aa, Artificial Sequence
  Cyclic GFR-binding peptide
TQLSPISVLYKDDSSNVILKYHYNMVVRA

SEQ ID NO: 45692 - protein, 29 aa, Artificial Sequence
  Cyclic GFR-binding peptide
  MOD_RES (1)..(2): Xaa is C or S
XXVPTKLSAISVLYLDDMGVPTLKNYQEG

SEQ ID NO: 45693 - protein, 36 aa, Artificial Sequence; identical to SEQ ID NO: 6762
  Cyclic GFR-binding peptide
  MOD_RES (5)..(5): Xaa is C or S

SEQ ID NO: 45694 - protein, 41 aa, Artificial Sequence; identical to SEQ ID NO: 6764
  Cyclic GFR-binding peptide
  MOD_RES (6)..(7)..(39)..(41): Xaa is C or S

SEQ ID NO: 45695 - protein, 31 aa, Artificial Sequence
  Cyclic GFR-binding peptide
  MOD_RES (2)..(2): Xaa is C or S
TXAPTKLSAISVLYLDDSSNVILKNYQNMVV

SEQ ID NO: 45696 - protein, 36 aa, Artificial Sequence
  Cyclic GFR-binding peptide
  MOD_RES (7)..(7): Xaa is C or S
HVTKPTXAPTKLSATSVLYYDDSSNVILRKHRNMVV

SEQ ID NO: 45697 - protein, 29 aa, Artificial Sequence
  Cyclic GFR-binding peptide
  MOD_RES (28)..(28): Xaa is C or S
LSATSMLYYDEYDKVVLRKHREMVVEGXG

SEQ ID NO: 45698 - protein, 31 aa, Artificial Sequence
  Cyclic GFR-binding peptide
  MOD_RES (4)..(5): Xaa is C or S
PKAXXVPTELSPISMLYKDEYDKVVLKYHYE

SEQ ID NO: 45699 - protein, 35 aa, Artificial Sequence; identical to SEQ ID NO: 6766
  Cyclic GFR-binding peptide
  MOD_RES (1)..(2)..(34): Xaa is C or S

SEQ ID NO: 45700 - protein, 24 aa, Artificial Sequence
  Cyclic GFR-binding peptide
NAISVLYFDSSNNVILKKYRNMVV

SEQ ID NO: 45701 - protein, 27 aa, Artificial Sequence
  Cyclic GFR-binding peptide
DLSPISILYKIGKTPKILKYHYMIVKS

SEQ ID NO: 45702 - protein, 33 aa, Artificial Sequence
  Cyclic GFR-binding peptide
  MOD_RES (4)..(5): Xaa is C or S
ASPXXVSQDLSPISILYKIGKTPKILKYHYMIV

SEQ ID NO: 45703 - protein, 40 aa, Artificial Sequence; identical to SEQ ID NO: 6769
  Cyclic GFR-binding peptide
  MOD_RES (5)..(6)..(38)..(40): Xaa is C or S

SEQ ID NO: 45704 - protein, 27 aa, Artificial Sequence
  Cyclic GFR-binding peptide
LSAISVLYLDSSNNVILKNYQNMVVKA

SEQ ID NO: 45705 - protein, 41 aa, Artificial Sequence; identical to SEQ ID NO: 6772
  Cyclic GFR-binding peptide
  MOD_RES (1)..(38)..(40): Xaa is C or S

SEQ ID NO: 45706 - protein, 24 aa, Artificial Sequence
  Cyclic GFR-binding peptide
ELNAISMLYFDENEKVVLKKYRDM

SEQ ID NO: 45707 - protein, 34 aa, Artificial Sequence; identical to SEQ ID NO: 6775
  Cyclic GFR-binding peptide
  MOD_RES (2)..(3)..(34): Xaa is C or S

SEQ ID NO: 45708 - protein, 29 aa, Artificial Sequence
  Cyclic GFR-binding peptide
  MOD_RES (1)..(1): Xaa is C or S
XAPTQLSAISVLYLDDSSNVILKNYQNMV

SEQ ID NO: 45709 - protein, 38 aa, Artificial Sequence; identical to SEQ ID NO: 6777
  Cyclic GFR-binding peptide
  MOD_RES (5)..(6)..(37): Xaa is C or S

SEQ ID NO: 45710 - protein, 31 aa, Artificial Sequence
  Cyclic GFR-binding peptide
  MOD_RES (4)..(5): Xaa is C or S
AAPXXVPQALSATSILYYVGRKPKVLRKHRM

SEQ ID NO: 45711 - protein, 23 aa, Artificial Sequence
  Cyclic GFR-binding peptide
TELSATSMLYYDEYDKVVLRKHR

SEQ ID NO: 45712 - protein, 28 aa, Artificial Sequence
  Cyclic GFR-binding peptide
  MOD_RES (27)..(27): Xaa is C or S
NAISMLYFDEYDKVVLKKYREMVVEGXG

SEQ ID NO: 45713 - protein, 35 aa, Artificial Sequence
  Cyclic GFR-binding peptide
  MOD_RES (2)..(2): Xaa is C or S
QXRPTQVQLSATSVLYYEIVRKKPIFLRKHRTLED

SEQ ID NO: 45714 - protein, 28 aa, Artificial Sequence
  Cyclic GFR-binding peptide
PTELSATSMLYYDENEKVVLRKHRDMVV

SEQ ID NO: 45715 - protein, 23 aa, Artificial Sequence
  Cyclic GFR-binding peptide
SPISMLYKDENEKVVLKYHYDMV

SEQ ID NO: 45716 - protein, 26 aa, Artificial Sequence
  Cyclic GFR-binding peptide
QDLNAISILYFVGRTPKVLKKYRMVV

SEQ ID NO: 45717 - protein, 21 aa, Artificial Sequence
  Cyclic GFR-binding peptide
SPISILYKVGRKPKVLKYHYM

SEQ ID NO: 45718 - protein, 32 aa, Artificial Sequence
  Cyclic GFR-binding peptide
  MOD_RES (1)..(1): Xaa is C or S
XVPTKLSATSVLYYDDMGVPTLRKHREGMSVA

SEQ ID NO: 45719 - protein, 31 aa, Artificial Sequence
  Cyclic GFR-binding peptide
  MOD_RES (28)..(30): Xaa is C or S
NAISVLYFDDMGVPTLKKYREGMSVAEXGXR

SEQ ID NO: 45720 - protein, 41 aa, Artificial Sequence; identical to SEQ ID NO: 6781
  Cyclic GFR-binding peptide
  MOD_RES (6)..(7)..(38)..(40): Xaa is C or S

SEQ ID NO: 45721 - protein, 25 aa, Artificial Sequence
  Cyclic GFR-binding peptide
LNAISILYFVGRKPKVLKKYRMIVR

SEQ ID NO: 45722 - protein, 30 aa, Artificial Sequence
  Cyclic GFR-binding peptide
  MOD_RES (28)..(30): Xaa is C or S
LSPISVLYKDDSSNVILKYHYNMVVRAXGX

SEQ ID NO: 45723 - protein, 28 aa, Artificial Sequence
  Cyclic GFR-binding peptide
  MOD_RES (28)..(28): Xaa is C or S
LSPISMLYKDEYDKVVLKYHYEMVVEGX

SEQ ID NO: 45724 - protein, 40 aa, Artificial Sequence; identical to SEQ ID NO: 6783
  Cyclic GFR-binding peptide
  MOD_RES (6)..(7)..(38)..(40): Xaa is C or S

SEQ ID NO: 45725 - protein, 34 aa, Artificial Sequence; identical to SEQ ID NO: 6784
  Cyclic GFR-binding peptide
  MOD_RES (1)..(33): Xaa is C or S

SEQ ID NO: 45726 - protein, 30 aa, Artificial Sequence
  Cyclic GFR-binding peptide
  MOD_RES (1)..(1): Xaa is C or S
XAPTKLNAISVLYFDSSNNVILKKYRNMVV

SEQ ID NO: 45727 - protein, 27 aa, Artificial Sequence
  Cyclic GFR-binding peptide
DLSPISILYKVGRTPKVLKYHYMVVKS

SEQ ID NO: 45728 - protein, 35 aa, Artificial Sequence
  Cyclic GFR-binding peptide
  MOD_RES (33)..(35): Xaa is C or S
VQLSPISVLYKEIVRKKPIFLKYHYTLEDHLAXKX

SEQ ID NO: 45729 - protein, 29 aa, Artificial Sequence
  Cyclic GFR-binding peptide
  MOD_RES (28)..(28): Xaa is C or S
LSATSVLYYDDSSNVILRKHRNMVVRSXG

SEQ ID NO: 45730 - protein, 37 aa, Artificial Sequence; identical to SEQ ID NO: 6788
  Cyclic GFR-binding peptide
  MOD_RES (6)..(7): Xaa is C or S

SEQ ID NO: 45731 - protein, 29 aa, Artificial Sequence
  Cyclic GFR-binding peptide
  MOD_RES (1)..(2): Xaa is C or S
XXVPQDLSPISILYKVGRTPKVLKYHYMV

SEQ ID NO: 45732 - protein, 41 aa, Artificial Sequence; identical to SEQ ID NO: 6790
  Cyclic GFR-binding peptide
  MOD_RES (4)..(5)..(38)..(40): Xaa is C or S

SEQ ID NO: 45733 - protein, 29 aa, Artificial Sequence
  Cyclic GFR-binding peptide
VPTELNAISMLYFDENEKVVLKKYRDMVV

SEQ ID NO: 45734 - protein, 36 aa, Artificial Sequence; identical to SEQ ID NO: 6793
  Cyclic GFR-binding peptide
  MOD_RES (1)..(2)..(33)..(35): Xaa is C or S

SEQ ID NO: 45735 - protein, 36 aa, Artificial Sequence; identical to SEQ ID NO: 6795
  Cyclic GFR-binding peptide
  MOD_RES (5)..(6): Xaa is C or S

SEQ ID NO: 45736 - protein, 31 aa, Artificial Sequence; identical to SEQ ID NO: 6794
  Cyclic GFR-binding peptide

SEQ ID NO: 45737 - protein, 22 aa, Artificial Sequence
  Cyclic GFR-binding peptide
SPISMLYKDEYDKVVLKYHYEM

SEQ ID NO: 45738 - protein, 33 aa, Artificial Sequence
  Cyclic GFR-binding peptide
  MOD_RES (6)..(7): Xaa is C or S
ASASPXXVSQDLNAISILYFIGKTPKILKKYRM

SEQ ID NO: 45739 - protein, 37 aa, Artificial Sequence
  Cyclic GFR-binding peptide
  MOD_RES (34)..(36): Xaa is C or S
QVQLNAISVLYFEIVRKKPIFLKKYRTLEDHLAXKXE

SEQ ID NO: 45740 - protein, 33 aa, Artificial Sequence; identical to SEQ ID NO: 6796
  Cyclic GFR-binding peptide
  MOD_RES (1)..(2): Xaa is C or S

SEQ ID NO: 45741 - protein, 29 aa, Artificial Sequence
  Cyclic GFR-binding peptide
  MOD_RES (3)..(3): Xaa is C or S
PTXAPTKLSPISVLYKDDSSNVILKYHYN

SEQ ID NO: 45742 - protein, 29 aa, Artificial Sequence
  Cyclic GFR-binding peptide
  MOD_RES (2)..(3): Xaa is C or S
AXXVPTKLSAISVLYLDDMGVPTLKNYQE

SEQ ID NO: 45743 - protein, 32 aa, Artificial Sequence
  Cyclic GFR-binding peptide
  MOD_RES (2)..(3): Xaa is C or S
PXXVPQALNAISILYFVGRKPKVLKKYRMIVR

SEQ ID NO: 45744 - protein, 23 aa, Artificial Sequence
  Cyclic GFR-binding peptide
ELSPISMLYKDENEKVVLKYHYD

SEQ ID NO: 45745 - protein, 32 aa, Artificial Sequence
  Cyclic GFR-binding peptide
  MOD_RES (4)..(4): Xaa is C or S
KPTXAPTKLSPISVLYKDDSSNVILKYHYNMV

SEQ ID NO: 45746 - protein, 28 aa, Artificial Sequence
  Cyclic GFR-binding peptide
  MOD_RES (28)..(28): Xaa is C or S
SAISVLYLDDMGVPTLKNYQEGMSVAEX

SEQ ID NO: 45747 - protein, 33 aa, Artificial Sequence
  Cyclic GFR-binding peptide
  MOD_RES (30)..(32): Xaa is C or S
TKLSAISVLYLDSSNNVILKNYQNMVVKAXGXH

SEQ ID NO: 45748 - protein, 26 aa, Artificial Sequence
  Cyclic GFR-binding peptide
LNAISVLYFDSSNNVILKKYRNMVVK

SEQ ID NO: 45749 - protein, 37 aa, Artificial Sequence; identical to SEQ ID NO: 6799
  Cyclic GFR-binding peptide
  MOD_RES (1)..(2)..(34)..(36): Xaa is C or S

SEQ ID NO: 45750 - protein, 31 aa, Artificial Sequence
  Cyclic GFR-binding peptide
VPTKLNAISVLYFDDMGVPTLKKYREGMSVA

SEQ ID NO: 45751 - protein, 34 aa, Artificial Sequence
  Cyclic GFR-binding peptide
  MOD_RES (6)..(7): Xaa is C or S
ASASPXXVPQDLSATSILYYVGRTPKVLRKHRMV

SEQ ID NO: 45752 - protein, 30 aa, Artificial Sequence
  Cyclic GFR-binding peptide
  MOD_RES (30)..(30): Xaa is C or S
TELSATSMLYYDEYDKVVLRKHREMVVEGX

SEQ ID NO: 45753 - protein, 38 aa, Artificial Sequence; identical to SEQ ID NO: 6801
  Cyclic GFR-binding peptide
  MOD_RES (2)..(3)..(35)..(37): Xaa is C or S

SEQ ID NO: 45754 - protein, 35 aa, Artificial Sequence
  Cyclic GFR-binding peptide
  MOD_RES (6)..(7): Xaa is C or S
TVPKPXXAPTQLSATSVLYYDDSSNVILRKHRNMV

SEQ ID NO: 45755 - protein, 29 aa, Artificial Sequence
  Cyclic GFR-binding peptide
TQVQLSPISVLYKEIVRKKPIFLKYHYTL

SEQ ID NO: 45756 - protein, 37 aa, Artificial Sequence; identical to SEQ ID NO: 6802
  Cyclic GFR-binding peptide
  MOD_RES (35)..(37): Xaa is C or S

SEQ ID NO: 45757 - protein, 36 aa, Artificial Sequence; identical to SEQ ID NO: 6803
  Cyclic GFR-binding peptide
  MOD_RES (5)..(6): Xaa is C or S

SEQ ID NO: 45758 - protein, 30 aa, Artificial Sequence
  Cyclic GFR-binding peptide
  MOD_RES (4)..(5): Xaa is C or S
PKAXXAPTKLSPISVLYKDSSNNVILKYHY

SEQ ID NO: 45759 - protein, 32 aa, Artificial Sequence
  Cyclic GFR-binding peptide
  MOD_RES (3)..(4): Xaa is C or S
KAXXVPTELSPISMLYKDEYDKVVLKYHYEMV

SEQ ID NO: 45760 - protein, 31 aa, Artificial Sequence
  Cyclic GFR-binding peptide
  MOD_RES (4)..(4): Xaa is C or S
KPTXAPTKLSPISVLYKDDSSNVILKYHYNM

SEQ ID NO: 45761 - protein, 32 aa, Artificial Sequence
  Cyclic GFR-binding peptide
  MOD_RES (3)..(4): Xaa is C or S
KAXXVPTKLSAISVLYLDDMGVPTLKNYQEGM

SEQ ID NO: 45762 - protein, 35 aa, Artificial Sequence; identical to SEQ ID NO: 6804
  Cyclic GFR-binding peptide
  MOD_RES (1)..(32)..(34): Xaa is C or S

SEQ ID NO: 45763 - protein, 20 aa, Artificial Sequence
  Cyclic GFR-binding peptide
SPISILYKIGKTPKILKYHY

SEQ ID NO: 45764 - protein, 26 aa, Artificial Sequence
  Cyclic GFR-binding peptide
KLNAISVLYFDSSNNVILKKYRNMVV

SEQ ID NO: 45765 - protein, 35 aa, Artificial Sequence; identical to SEQ ID NO: 6805
  Cyclic GFR-binding peptide
  MOD_RES (1)..(33)..(35): Xaa is C or S

SEQ ID NO: 45766 - protein, 31 aa, Artificial Sequence
  Cyclic GFR-binding peptide
  MOD_RES (4)..(5): Xaa is C or S
PKAXXAPTKLSAISVLYLDSSNNVILKNYQN

SEQ ID NO: 45767 - protein, 35 aa, Artificial Sequence; identical to SEQ ID NO: 6806
  Cyclic GFR-binding peptide
  MOD_RES (1)..(32)..(34): Xaa is C or S

SEQ ID NO: 45768 - protein, 27 aa, Artificial Sequence
  Cyclic GFR-binding peptide
KLSPISVLYKDDSSNVILKYHYNMVVR

SEQ ID NO: 45769 - protein, 26 aa, Artificial Sequence
  Cyclic GFR-binding peptide
DLNAISILYFVGRTPKVLKKYRMVVK

SEQ ID NO: 45770 - protein, 39 aa, Artificial Sequence; identical to SEQ ID NO: 6808
  Cyclic GFR-binding peptide
  MOD_RES (5)..(6)..(37)..(39): Xaa is C or S

SEQ ID NO: 45771 - protein, 39 aa, Artificial Sequence; identical to SEQ ID NO: 6809
  Cyclic GFR-binding peptide
  MOD_RES (5)..(6)..(38): Xaa is C or S

SEQ ID NO: 45772 - protein, 29 aa, Artificial Sequence
  Cyclic GFR-binding peptide
  MOD_RES (28)..(28): Xaa is C or S
LSAISVLYLDSSNNVILKNYQNMVVKAXG

SEQ ID NO: 45773 - protein, 39 aa, Artificial Sequence; identical to SEQ ID NO: 6811
  Cyclic GFR-binding peptide
  MOD_RES (6)..(7)..(38): Xaa is C or S

SEQ ID NO: 45774 - protein, 22 aa, Artificial Sequence
  Cyclic GFR-binding peptide
LNAISVLYFDSSNNVILKKYRN

SEQ ID NO: 45775 - protein, 28 aa, Artificial Sequence
  Cyclic GFR-binding peptide
QLSPISVLYKDDSSNVILKYHYNMVVRA

SEQ ID NO: 45776 - protein, 37 aa, Artificial Sequence
  Cyclic GFR-binding peptide
  MOD_RES (5)..(6): Xaa is C or S
VGKAXXVPTKLSAISVLYLDDMGVPTLKNYQEGMSVA

SEQ ID NO: 45777 - protein, 22 aa, Artificial Sequence
  Cyclic GFR-binding peptide
NAISVLYFDSSNNVILKKYRNM

SEQ ID NO: 45778 - protein, 29 aa, Artificial Sequence
  Cyclic GFR-binding peptide
TKLNAISVLYFDSSNNVILKKYRNMVVKA

SEQ ID NO: 45779 - protein, 28 aa, Artificial Sequence
  Cyclic GFR-binding peptide
  MOD_RES (1)..(2): Xaa is C or S
XXAPTKLSPISVLYKDSSNNVILKYHYN

SEQ ID NO: 45780 - protein, 33 aa, Artificial Sequence
  Cyclic GFR-binding peptide
  MOD_RES (3)..(4): Xaa is C or S
SPXXVSQDLSAISILYLIGKTPKILKNYQMIVK

SEQ ID NO: 45781 - protein, 40 aa, Artificial Sequence; identical to SEQ ID NO: 6814
  Cyclic GFR-binding peptide
  MOD_RES (6)..(38)..(40): Xaa is C or S

SEQ ID NO: 45782 - protein, 32 aa, Artificial Sequence
  Cyclic GFR-binding peptide
  MOD_RES (5)..(6): Xaa is C or S
SAAPXXVPQALSATSILYYVGRKPKVLRKHRM

SEQ ID NO: 45783 - protein, 27 aa, Artificial Sequence
  Cyclic GFR-binding peptide
DLSAISILYLIGKTPKILKNYQMIVKS

SEQ ID NO: 45784 - protein, 29 aa, Artificial Sequence
  Cyclic GFR-binding peptide
  MOD_RES (26)..(28): Xaa is C or S
SAISILYLVGRKPKVLKNYQMIVRSXKXS

SEQ ID NO: 45785 - protein, 25 aa, Artificial Sequence
  Cyclic GFR-binding peptide
LSATSVLYYDDMGVPTLRKHREGMS

SEQ ID NO: 45786 - protein, 30 aa, Artificial Sequence
  Cyclic GFR-binding peptide
TQVQLSAISVLYLEIVRKKPIFLKNYQTLE

SEQ ID NO: 45787 - protein, 40 aa, Artificial Sequence; identical to SEQ ID NO: 6815
  Cyclic GFR-binding peptide
  MOD_RES (4)..(5)..(37)..(39): Xaa is C or S

SEQ ID NO: 45788 - protein, 24 aa, Artificial Sequence
  Cyclic GFR-binding peptide
LNAISVLYFDSSNNVILKKYRNMV

SEQ ID NO: 45789 - protein, 32 aa, Artificial Sequence
  Cyclic GFR-binding peptide
  MOD_RES (2)..(3): Xaa is C or S
PXXVPQDLSATSILYYVGRTPKVLRKHRMVVK

SEQ ID NO: 45790 - protein, 34 aa, Artificial Sequence
  Cyclic GFR-binding peptide
  MOD_RES (6)..(7): Xaa is C or S
KVGKAXXVPTKLNAISVLYFDDMGVPTLKKYREG

SEQ ID NO: 45791 - protein, 28 aa, Artificial Sequence
  Cyclic GFR-binding peptide
  MOD_RES (26)..(28): Xaa is C or S
SAISILYLIGKTPKILKNYQMIVKSXKX

SEQ ID NO: 45792 - protein, 37 aa, Artificial Sequence; identical to SEQ ID NO: 6819
  Cyclic GFR-binding peptide
  MOD_RES (7)..(7): Xaa is C or S

SEQ ID NO: 45793 - protein, 33 aa, Artificial Sequence; identical to SEQ ID NO: 6820
  Cyclic GFR-binding peptide
  MOD_RES (33)..(33): Xaa is C or S

SEQ ID NO: 45794 - protein, 31 aa, Artificial Sequence
  Cyclic GFR-binding peptide
  MOD_RES (3)..(4): Xaa is C or S
KAXXVPTELSPISMLYKDENEKVVLKYHYDM

SEQ ID NO: 45795 - protein, 33 aa, Artificial Sequence
  Cyclic GFR-binding peptide
  MOD_RES (7)..(7): Xaa is C or S
HVTKPTXAPTKLSATSVLYYDDSSNVILRKHRN

SEQ ID NO: 45796 - protein, 40 aa, Artificial Sequence; identical to SEQ ID NO: 6822
  Cyclic GFR-binding peptide
  MOD_RES (6)..(7)..(40): Xaa is C or S

SEQ ID NO: 45797 - protein, 29 aa, Artificial Sequence
  Cyclic GFR-binding peptide
PQDLSAISILYLVGRTPKVLKNYQMVVKS

SEQ ID NO: 45798 - protein, 34 aa, Artificial Sequence
  Cyclic GFR-binding peptide
  MOD_RES (4)..(5): Xaa is C or S
PKAXXVPTELNAISMLYFDENEKVVLKKYRDMVV

SEQ ID NO: 45799 - protein, 45 aa, Artificial Sequence; identical to SEQ ID NO: 6824
  Cyclic GFR-binding peptide
  MOD_RES (5)..(42)..(44): Xaa is C or S

SEQ ID NO: 45800 - protein, 37 aa, Artificial Sequence; identical to SEQ ID NO: 6825
  Cyclic GFR-binding peptide
  MOD_RES (6)..(7): Xaa is C or S

SEQ ID NO: 45801 - protein, 25 aa, Artificial Sequence
  Cyclic GFR-binding peptide
PTKLSAISVLYLDSSNNVILKNYQN

SEQ ID NO: 45802 - protein, 33 aa, Artificial Sequence
  Cyclic GFR-binding peptide
  MOD_RES (32)..(32): Xaa is C or S
QLSATSVLYYEIVRKKPIFLRKHRTLEDHLAXK

SEQ ID NO: 45803 - protein, 22 aa, Artificial Sequence
  Cyclic GFR-binding peptide
SATSILYYVGRKPKVLRKHRMI

SEQ ID NO: 45804 - protein, 32 aa, Artificial Sequence; identical to SEQ ID NO: 6826
  Cyclic GFR-binding peptide
  MOD_RES (31)..(31): Xaa is C or S

SEQ ID NO: 45805 - protein, 36 aa, Artificial Sequence
  Cyclic GFR-binding peptide
  MOD_RES (5)..(6): Xaa is C or S
VGKAXXVPTKLNAISVLYFDDMGVPTLKKYREGMSV

SEQ ID NO: 45806 - protein, 38 aa, Artificial Sequence
  Cyclic GFR-binding peptide
  MOD_RES (6)..(7): Xaa is C or S
KVGKAXXVPTKLNAISVLYFDDMGVPTLKKYREGMSVA

SEQ ID NO: 45807 - protein, 38 aa, Artificial Sequence; identical to SEQ ID NO: 6827
  Cyclic GFR-binding peptide
  MOD_RES (6)..(7): Xaa is C or S

SEQ ID NO: 45808 - protein, 34 aa, Artificial Sequence
  Cyclic GFR-binding peptide
  MOD_RES (6)..(7): Xaa is C or S
ASASPXXVSQDLSATSILYYIGKTPKILRKHRMI

SEQ ID NO: 45809 - protein, 28 aa, Artificial Sequence
  Cyclic GFR-binding peptide
  MOD_RES (26)..(28): Xaa is C or S
SAISILYLVGRKPKVLKNYQMIVRSXKX

SEQ ID NO: 45810 - protein, 27 aa, Artificial Sequence
  Cyclic GFR-binding peptide
  MOD_RES (1)..(2): Xaa is C or S
XXVPTELSPISMLYKDEYDKVVLKYHY

SEQ ID NO: 45811 - protein, 26 aa, Artificial Sequence
  Cyclic GFR-binding peptide
SAISVLYLEIVRKKPIFLKNYQTLED

SEQ ID NO: 45812 - protein, 35 aa, Artificial Sequence
  Cyclic GFR-binding peptide
  MOD_RES (5)..(6): Xaa is C or S
SAAPXXVPQALSAISILYLVGRKPKVLKNYQMIVR

SEQ ID NO: 45813 - protein, 30 aa, Artificial Sequence
  Cyclic GFR-binding peptide
  MOD_RES (4)..(5): Xaa is C or S
AAPXXVPQALSPISILYKVGRKPKVLKYHY

SEQ ID NO: 45814 - protein, 30 aa, Artificial Sequence
  Cyclic GFR-binding peptide
  MOD_RES (1)..(1): Xaa is C or S
XAPTKLSPISVLYKDSSNNVILKYHYNMVV

SEQ ID NO: 45815 - protein, 21 aa, Artificial Sequence
  Cyclic GFR-binding peptide
SATSMLYYDEYDKVVLRKHRE

SEQ ID NO: 45816 - protein, 39 aa, Artificial Sequence; identical to SEQ ID NO: 6831
  Cyclic GFR-binding peptide
  MOD_RES (5)..(6)..(37)..(39): Xaa is C or S

SEQ ID NO: 45817 - protein, 36 aa, Artificial Sequence; identical to SEQ ID NO: 6832
  Cyclic GFR-binding peptide

SEQ ID NO: 45818 - protein, 34 aa, Artificial Sequence
  Cyclic GFR-binding peptide
  MOD_RES (4)..(4): Xaa is C or S
NVQXRPTQVQLNAISVLYFEIVRKKPIFLKKYRT

SEQ ID NO: 45819 - protein, 30 aa, Artificial Sequence
  Cyclic GFR-binding peptide
  MOD_RES (4)..(5): Xaa is C or S
PKAXXAPTKLSAISVLYLDSSNNVILKNYQ

SEQ ID NO: 45820 - protein, 34 aa, Artificial Sequence; identical to SEQ ID NO: 6834
  Cyclic GFR-binding peptide
  MOD_RES (32)..(34): Xaa is C or S

SEQ ID NO: 45821 - protein, 22 aa, Artificial Sequence
  Cyclic GFR-binding peptide
ALNAISILYFVGRKPKVLKKYR

SEQ ID NO: 45822 - protein, 25 aa, Artificial Sequence
  Cyclic GFR-binding peptide
PTQLSPISVLYKDDSSNVILKYHYN

SEQ ID NO: 45823 - protein, 32 aa, Artificial Sequence
  Cyclic GFR-binding peptide
  MOD_RES (5)..(5): Xaa is C or S
TKPTXAPTKLSPISVLYKDDSSNVILKYHYNM

SEQ ID NO: 45824 - protein, 21 aa, Artificial Sequence
  Cyclic GFR-binding peptide
SAISILYLVGRTPKVLKNYQM

SEQ ID NO: 45825 - protein, 37 aa, Artificial Sequence; identical to SEQ ID NO: 6841
  Cyclic GFR-binding peptide
  MOD_RES (6)..(7): Xaa is C or S

SEQ ID NO: 45826 - protein, 35 aa, Artificial Sequence; identical to SEQ ID NO: 6842
  Cyclic GFR-binding peptide
  MOD_RES (32)..(34): Xaa is C or S

SEQ ID NO: 45827 - protein, 32 aa, Artificial Sequence
  Cyclic GFR-binding peptide
QVQLSPISVLYKEIVRKKPIFLKYHYTLEDHL

SEQ ID NO: 45828 - protein, 34 aa, Artificial Sequence
  Cyclic GFR-binding peptide
  MOD_RES (31)..(33): Xaa is C or S
TKLSATSVLYYDDMGVPTLRKHREGMSVAEXGXR

SEQ ID NO: 45829 - protein, 25 aa, Artificial Sequence
  Cyclic GFR-binding peptide
SPISILYKVGRTPKVLKYHYMVVKS

SEQ ID NO: 45830 - protein, 25 aa, Artificial Sequence
  Cyclic GFR-binding peptide
QALSATSILYYVGRKPKVLRKHRMI

SEQ ID NO: 45831 - protein, 28 aa, Artificial Sequence
  Cyclic GFR-binding peptide
  MOD_RES (28)..(28): Xaa is C or S
DLSAISILYLIGKTPKILKNYQMIVKSX

SEQ ID NO: 45832 - protein, 31 aa, Artificial Sequence
  Cyclic GFR-binding peptide
  MOD_RES (1)..(2): Xaa is C or S
XXAPTKLSAISVLYLDDSSNVILKNYQNMVV

SEQ ID NO: 45833 - protein, 38 aa, Artificial Sequence; identical to SEQ ID NO: 6847
  Cyclic GFR-binding peptide
  MOD_RES (4)..(5)..(37): Xaa is C or S

SEQ ID NO: 45834 - protein, 32 aa, Artificial Sequence
  Cyclic GFR-binding peptide
  MOD_RES (2)..(3): Xaa is C or S
PXXVSQDLSAISILYLIGKTPKILKNYQMIVK

SEQ ID NO: 45835 - protein, 31 aa, Artificial Sequence
  Cyclic GFR-binding peptide
  MOD_RES (1)..(2): Xaa is C or S
XXVSQDLSAISILYLIGKTPKILKNYQMIVK

SEQ ID NO: 45836 - protein, 31 aa, Artificial Sequence
  Cyclic GFR-binding peptide
  MOD_RES (30)..(30): Xaa is C or S
PQDLSAISILYLVGRTPKVLKNYQMVVKSXK

SEQ ID NO: 45837 - protein, 28 aa, Artificial Sequence
  Cyclic GFR-binding peptide
VQLSAISVLYLEIVRKKPIFLKNYQTLE

SEQ ID NO: 45838 - protein, 33 aa, Artificial Sequence
  Cyclic GFR-binding peptide
  MOD_RES (2)..(3): Xaa is C or S
AXXVPTKLNAISVLYFDDMGVPTLKKYREGMSV

SEQ ID NO: 45839 - protein, 29 aa, Artificial Sequence
  Cyclic GFR-binding peptide
VPTKLSAISVLYLDDMGVPTLKNYQEGMS

SEQ ID NO: 45840 - protein, 33 aa, Artificial Sequence
  Cyclic GFR-binding peptide
  MOD_RES (6)..(7): Xaa is C or S
ASAAPXXVPQALSPISILYKVGRKPKVLKYHYM

SEQ ID NO: 45841 - protein, 36 aa, Artificial Sequence; identical to SEQ ID NO: 6851
  Cyclic GFR-binding peptide

SEQ ID NO: 45842 - protein, 31 aa, Artificial Sequence
  Cyclic GFR-binding peptide
  MOD_RES (29)..(31): Xaa is C or S
ELSATSMLYYDEYDKVVLRKHREMVVEGXGX

SEQ ID NO: 45843 - protein, 38 aa, Artificial Sequence; identical to SEQ ID NO: 6850
  Cyclic GFR-binding peptide
  MOD_RES (4)..(5)..(37): Xaa is C or S

SEQ ID NO: 45844 - protein, 23 aa, Artificial Sequence
  Cyclic GFR-binding peptide
LNAISVLYFDDMGVPTLKKYREG

SEQ ID NO: 45845 - protein, 40 aa, Artificial Sequence; identical to SEQ ID NO: 6852
  Cyclic GFR-binding peptide
  MOD_RES (5)..(6)..(38)..(40): Xaa is C or S

SEQ ID NO: 45846 - protein, 28 aa, Artificial Sequence
  Cyclic GFR-binding peptide
TQVQLSPISVLYKEIVRKKPIFLKYHYT

SEQ ID NO: 45847 - protein, 31 aa, Artificial Sequence; identical to SEQ ID NO: 6853
  Cyclic GFR-binding peptide
  MOD_RES (31)..(31): Xaa is C or S

SEQ ID NO: 45848 - protein, 44 aa, Artificial Sequence; identical to SEQ ID NO: 6854
  Cyclic GFR-binding peptide
  MOD_RES (4)..(41)..(43): Xaa is C or S

SEQ ID NO: 45849 - protein, 31 aa, Artificial Sequence
  Cyclic GFR-binding peptide
  MOD_RES (3)..(4): Xaa is C or S
SPXXVSQDLSPISILYKIGKTPKILKYHYMI

SEQ ID NO: 45850 - protein, 34 aa, Artificial Sequence
  Cyclic GFR-binding peptide
  MOD_RES (3)..(3): Xaa is C or S
VQXRPTQVQLSPISVLYKEIVRKKPIFLKYHYTL

SEQ ID NO: 45851 - protein, 35 aa, Artificial Sequence
  Cyclic GFR-binding peptide
  MOD_RES (3)..(4): Xaa is C or S
KAXXVPTKLSAISVLYLDDMGVPTLKNYQEGMSVA

SEQ ID NO: 45852 - protein, 30 aa, Artificial Sequence
  Cyclic GFR-binding peptide
  MOD_RES (3)..(4): Xaa is C or S
APXXVPQALSPISILYKVGRKPKVLKYHYM

SEQ ID NO: 45853 - protein, 34 aa, Artificial Sequence; identical to SEQ ID NO: 6857
  Cyclic GFR-binding peptide
  MOD_RES (1)..(34): Xaa is C or S

SEQ ID NO: 45854 - protein, 33 aa, Artificial Sequence
  Cyclic GFR-binding peptide
  MOD_RES (33)..(33): Xaa is C or S
VQLSAISVLYLEIVRKKPIFLKNYQTLEDHLAX

SEQ ID NO: 45855 - protein, 26 aa, Artificial Sequence
  Cyclic GFR-binding peptide
PTKLNAISVLYFDSSNNVILKKYRNM

SEQ ID NO: 45856 - protein, 41 aa, Artificial Sequence; identical to SEQ ID NO: 6858
  Cyclic GFR-binding peptide
  MOD_RES (5)..(6)..(38)..(40): Xaa is C or S

SEQ ID NO: 45857 - protein, 32 aa, Artificial Sequence
  Cyclic GFR-binding peptide
  MOD_RES (5)..(6): Xaa is C or S
SASPXXVPQDLSPISILYKVGRTPKVLKYHYM

SEQ ID NO: 45858 - protein, 31 aa, Artificial Sequence
  Cyclic GFR-binding peptide
TQVQLNAISVLYFEIVRKKPIFLKKYRTLED

SEQ ID NO: 45859 - protein, 33 aa, Artificial Sequence
  Cyclic GFR-binding peptide
  MOD_RES (3)..(4): Xaa is C or S
KAXXVPTELSPISMLYKDEYDKVVLKYHYEMVV

SEQ ID NO: 45860 - protein, 35 aa, Artificial Sequence; identical to SEQ ID NO: 6859
  Cyclic GFR-binding peptide
  MOD_RES (1)..(33)..(35): Xaa is C or S

SEQ ID NO: 45861 - protein, 30 aa, Artificial Sequence
  Cyclic GFR-binding peptide
  MOD_RES (30)..(30): Xaa is C or S
PQDLSATSILYYVGRTPKVLRKHRMVVKSX

SEQ ID NO: 45862 - protein, 35 aa, Artificial Sequence; identical to SEQ ID NO: 6861
  Cyclic GFR-binding peptide
  MOD_RES (1)..(33)..(35): Xaa is C or S

SEQ ID NO: 45863 - protein, 35 aa, Artificial Sequence
  Cyclic GFR-binding peptide
  MOD_RES (6)..(7): Xaa is C or S
ASAAPXXVPQALSPISILYKVGRKPKVLKYHYMIV

SEQ ID NO: 45864 - protein, 34 aa, Artificial Sequence
  Cyclic GFR-binding peptide
  MOD_RES (6)..(7): Xaa is C or S
SIPKAXXVPTELNAISMLYFDEYDKVVLKKYREM

SEQ ID NO: 45865 - protein, 37 aa, Artificial Sequence; identical to SEQ ID NO: 6862
  Cyclic GFR-binding peptide
  MOD_RES (2)..(3)..(35)..(37): Xaa is C or S

SEQ ID NO: 45866 - protein, 30 aa, Artificial Sequence
  Cyclic GFR-binding peptide
  MOD_RES (3)..(4): Xaa is C or S
KAXXVPTELNAISMLYFDENEKVVLKKYRD

SEQ ID NO: 45867 - protein, 33 aa, Artificial Sequence; identical to SEQ ID NO: 6863
  Cyclic GFR-binding peptide
  MOD_RES (1)..(33): Xaa is C or S

SEQ ID NO: 45868 - protein, 31 aa, Artificial Sequence; identical to SEQ ID NO: 6865
  Cyclic GFR-binding peptide

SEQ ID NO: 45869 - protein, 26 aa, Artificial Sequence
  Cyclic GFR-binding peptide
KLSAISVLYLDDMGVPTLKNYQEGMS

SEQ ID NO: 45870 - protein, 34 aa, Artificial Sequence
  Cyclic GFR-binding peptide
  MOD_RES (31)..(33): Xaa is C or S
LSAISVLYLEIVRKKPIFLKNYQTLEDHLAXKXE

SEQ ID NO: 45871 - protein, 40 aa, Artificial Sequence; identical to SEQ ID NO: 6868
  Cyclic GFR-binding peptide
  MOD_RES (5)..(6)..(37)..(39): Xaa is C or S

SEQ ID NO: 45872 - protein, 31 aa, Artificial Sequence
  Cyclic GFR-binding peptide
  MOD_RES (1)..(2): Xaa is C or S
XXAPTQLSAISVLYLDDSSNVILKNYQNMVV

SEQ ID NO: 45873 - protein, 27 aa, Artificial Sequence
  Cyclic GFR-binding peptide
  MOD_RES (1)..(2): Xaa is C or S
XXVPQDLSAISILYLVGRTPKVLKNYQ

SEQ ID NO: 45874 - protein, 25 aa, Artificial Sequence
  Cyclic GFR-binding peptide
SQDLNAISILYFIGKTPKILKKYRM

SEQ ID NO: 45875 - protein, 35 aa, Artificial Sequence; identical to SEQ ID NO: 6871
  Cyclic GFR-binding peptide
  MOD_RES (32)..(34): Xaa is C or S

SEQ ID NO: 45876 - protein, 31 aa, Artificial Sequence
  Cyclic GFR-binding peptide
  MOD_RES (28)..(30): Xaa is C or S
LSATSMLYYDENEKVVLRKHRDMVVEGXGXR

SEQ ID NO: 45877 - protein, 29 aa, Artificial Sequence
  Cyclic GFR-binding peptide
  MOD_RES (29)..(29): Xaa is C or S
QLSATSVLYYDDSSNVILRKHRNMVVRAX

SEQ ID NO: 45878 - protein, 42 aa, Artificial Sequence; identical to SEQ ID NO: 6872
  Cyclic GFR-binding peptide
  MOD_RES (2)..(39)..(41): Xaa is C or S

SEQ ID NO: 45879 - protein, 34 aa, Artificial Sequence
  Cyclic GFR-binding peptide
  MOD_RES (7)..(7): Xaa is C or S
HVTKPTXAPTKLSAISVLYLDDSSNVILKNYQNM

SEQ ID NO: 45880 - protein, 35 aa, Artificial Sequence; identical to SEQ ID NO: 6875
  Cyclic GFR-binding peptide
  MOD_RES (3)..(4)..(35): Xaa is C or S

SEQ ID NO: 45881 - protein, 36 aa, Artificial Sequence; identical to SEQ ID NO: 6876
  Cyclic GFR-binding peptide
  MOD_RES (2)..(3)..(34)..(36): Xaa is C or S

SEQ ID NO: 45882 - protein, 27 aa, Artificial Sequence
  Cyclic GFR-binding peptide
SAISVLYLEIVRKKPIFLKNYQTLEDH

SEQ ID NO: 45883 - protein, 33 aa, Artificial Sequence; identical to SEQ ID NO: 6878
  Cyclic GFR-binding peptide
  MOD_RES (32)..(32): Xaa is C or S

SEQ ID NO: 45884 - protein, 38 aa, Artificial Sequence; identical to SEQ ID NO: 6881
  Cyclic GFR-binding peptide
  MOD_RES (5)..(6)..(37): Xaa is C or S

SEQ ID NO: 45885 - protein, 22 aa, Artificial Sequence
  Cyclic GFR-binding peptide
SAISVLYLDSSNNVILKNYQNM

SEQ ID NO: 45886 - protein, 30 aa, Artificial Sequence
  Cyclic GFR-binding peptide
  MOD_RES (2)..(3): Xaa is C or S
PXXVSQDLSPISILYKIGKTPKILKYHYMI

SEQ ID NO: 45887 - protein, 29 aa, Artificial Sequence
  Cyclic GFR-binding peptide
PTKLSAISVLYLDDSSNVILKNYQNMVVR

SEQ ID NO: 45888 - protein, 23 aa, Artificial Sequence
  Cyclic GFR-binding peptide
LSAISVLYLDSSNNVILKNYQNM

SEQ ID NO: 45889 - protein, 40 aa, Artificial Sequence; identical to SEQ ID NO: 6882
  Cyclic GFR-binding peptide
  MOD_RES (5)..(6)..(38)..(40): Xaa is C or S

SEQ ID NO: 45890 - protein, 31 aa, Artificial Sequence
  Cyclic GFR-binding peptide
  MOD_RES (5)..(6): Xaa is C or S
VPKPXXAPTKLSPISVLYKDDSSNVILKYHY

SEQ ID NO: 45891 - protein, 38 aa, Artificial Sequence; identical to SEQ ID NO: 6884
  Cyclic GFR-binding peptide
  MOD_RES (2)..(3)..(35)..(37): Xaa is C or S

SEQ ID NO: 45892 - protein, 24 aa, Artificial Sequence
  Cyclic GFR-binding peptide
QDLNAISILYFVGRTPKVLKKYRM

SEQ ID NO: 45893 - protein, 23 aa, Artificial Sequence
  Cyclic GFR-binding peptide
DLSAISILYLVGRTPKVLKNYQM

SEQ ID NO: 45894 - protein, 33 aa, Artificial Sequence
  Cyclic GFR-binding peptide
  MOD_RES (6)..(7): Xaa is C or S
YVPKPXXAPTKLSPISVLYKDDSSNVILKYHYN

SEQ ID NO: 45895 - protein, 29 aa, Artificial Sequence
  Cyclic GFR-binding peptide
  MOD_RES (2)..(3): Xaa is C or S
AXXVPTELNAISMLYFDENEKVVLKKYRD

SEQ ID NO: 45896 - protein, 30 aa, Artificial Sequence
  Cyclic GFR-binding peptide
  MOD_RES (28)..(30): Xaa is C or S
DLNAISILYFIGKTPKILKKYRMIVKSXKX

SEQ ID NO: 45897 - protein, 29 aa, Artificial Sequence
  Cyclic GFR-binding peptide
  MOD_RES (1)..(1): Xaa is C or S
XVPTELSPISMLYKDEYDKVVLKYHYEMV

SEQ ID NO: 45898 - protein, 39 aa, Artificial Sequence; identical to SEQ ID NO: 6886
  Cyclic GFR-binding peptide
  MOD_RES (6)..(7)..(39): Xaa is C or S

SEQ ID NO: 45899 - protein, 25 aa, Artificial Sequence
  Cyclic GFR-binding peptide
SAISILYLVGRTPKVLKNYQMVVKS

SEQ ID NO: 45900 - protein, 35 aa, Artificial Sequence; identical to SEQ ID NO: 6888
  Cyclic GFR-binding peptide
  MOD_RES (2)..(3)..(34): Xaa is C or S

SEQ ID NO: 45901 - protein, 31 aa, Artificial Sequence; identical to SEQ ID NO: 6889
  Cyclic GFR-binding peptide

SEQ ID NO: 45902 - protein, 38 aa, Artificial Sequence; identical to SEQ ID NO: 6890
  Cyclic GFR-binding peptide
  MOD_RES (6)..(7)..(38): Xaa is C or S

SEQ ID NO: 45903 - protein, 34 aa, Artificial Sequence; identical to SEQ ID NO: 6891
  Cyclic GFR-binding peptide
  MOD_RES (32)..(34): Xaa is C or S

SEQ ID NO: 45904 - protein, 35 aa, Artificial Sequence; identical to SEQ ID NO: 6892
  Cyclic GFR-binding peptide
  MOD_RES (4)..(5): Xaa is C or S

SEQ ID NO: 45905 - protein, 35 aa, Artificial Sequence; identical to SEQ ID NO: 6893
  Cyclic GFR-binding peptide
  MOD_RES (2)..(3)..(34): Xaa is C or S

SEQ ID NO: 45906 - protein, 24 aa, Artificial Sequence
  Cyclic GFR-binding peptide
LSPISILYKVGRTPKVLKYHYMVV

SEQ ID NO: 45907 - protein, 31 aa, Artificial Sequence
  Cyclic GFR-binding peptide
  MOD_RES (2)..(3): Xaa is C or S
AXXVPTKLSAISVLYLDDMGVPTLKNYQEGM

SEQ ID NO: 45908 - protein, 29 aa, Artificial Sequence
  Cyclic GFR-binding peptide
TELSATSMLYYDENEKVVLRKHRDMVVEG

SEQ ID NO: 45909 - protein, 30 aa, Artificial Sequence
  Cyclic GFR-binding peptide
  MOD_RES (28)..(30): Xaa is C or S
DLNAISILYFVGRTPKVLKKYRMVVKSXKX

SEQ ID NO: 45910 - protein, 36 aa, Artificial Sequence
  Cyclic GFR-binding peptide
  MOD_RES (6)..(7): Xaa is C or S
ASASPXXVPQDLSATSILYYVGRTPKVLRKHRMVVK

SEQ ID NO: 45911 - protein, 32 aa, Artificial Sequence
  Cyclic GFR-binding peptide
  MOD_RES (4)..(5): Xaa is C or S
PKPXXAPTQLSAISVLYLDDSSNVILKNYQNM

SEQ ID NO: 45912 - protein, 25 aa, Artificial Sequence
  Cyclic GFR-binding peptide
QLSATSVLYYEIVRKKPIFLRKHRT

SEQ ID NO: 45913 - protein, 27 aa, Artificial Sequence
  Cyclic GFR-binding peptide
QALNAISILYFVGRKPKVLKKYRMIVR

SEQ ID NO: 45914 - protein, 31 aa, Artificial Sequence
  Cyclic GFR-binding peptide
  MOD_RES (4)..(5): Xaa is C or S
PKPXXAPTQLSPISVLYKDDSSNVILKYHYN

SEQ ID NO: 45915 - protein, 28 aa, Artificial Sequence
  Cyclic GFR-binding peptide
PTKLNAISVLYFDSSNNVILKKYRNMVV

SEQ ID NO: 45916 - protein, 32 aa, Artificial Sequence; identical to SEQ ID NO: 6896
  Cyclic GFR-binding peptide
  MOD_RES (32)..(32): Xaa is C or S

SEQ ID NO: 45917 - protein, 33 aa, Artificial Sequence
  Cyclic GFR-binding peptide
  MOD_RES (30)..(32): Xaa is C or S
TELSATSMLYYDENEKVVLRKHRDMVVEGXGXR

SEQ ID NO: 45918 - protein, 30 aa, Artificial Sequence
  Cyclic GFR-binding peptide
  MOD_RES (28)..(30): Xaa is C or S
LSAISVLYLDSSNNVILKNYQNMVVKAXGX

SEQ ID NO: 45919 - protein, 35 aa, Artificial Sequence; identical to SEQ ID NO: 6898
  Cyclic GFR-binding peptide
  MOD_RES (1)..(2)..(34): Xaa is C or S

SEQ ID NO: 45920 - protein, 32 aa, Artificial Sequence
  Cyclic GFR-binding peptide
PTQVQLSATSVLYYEIVRKKPIFLRKHRTLED

SEQ ID NO: 45921 - protein, 34 aa, Artificial Sequence
  Cyclic GFR-binding peptide
  MOD_RES (2)..(2): Xaa is C or S
QXRPTQVQLSPISVLYKEIVRKKPIFLKYHYTLE

SEQ ID NO: 45922 - protein, 31 aa, Artificial Sequence
  Cyclic GFR-binding peptide
  MOD_RES (3)..(4): Xaa is C or S
KAXXVPTELNAISMLYFDEYDKVVLKKYREM

SEQ ID NO: 45923 - protein, 35 aa, Artificial Sequence
  Cyclic GFR-binding peptide
  MOD_RES (5)..(6): Xaa is C or S
SASPXXVSQDLNAISILYFIGKTPKILKKYRMIVK

SEQ ID NO: 45924 - protein, 25 aa, Artificial Sequence
  Cyclic GFR-binding peptide
VQLNAISVLYFEIVRKKPIFLKKYR

SEQ ID NO: 45925 - protein, 35 aa, Artificial Sequence
  Cyclic GFR-binding peptide
  MOD_RES (3)..(4): Xaa is C or S
KAXXVPTKLNAISVLYFDDMGVPTLKKYREGMSVA

SEQ ID NO: 45926 - protein, 25 aa, Artificial Sequence
  Cyclic GFR-binding peptide
PQDLNAISILYFVGRTPKVLKKYRM

SEQ ID NO: 45927 - protein, 29 aa, Artificial Sequence
  Cyclic GFR-binding peptide
PTKLSPISVLYKDDSSNVILKYHYNMVVR

SEQ ID NO: 45928 - protein, 29 aa, Artificial Sequence
  Cyclic GFR-binding peptide
  MOD_RES (29)..(29): Xaa is C or S
QDLNAISILYFIGKTPKILKKYRMIVKSX

SEQ ID NO: 45929 - protein, 36 aa, Artificial Sequence; identical to SEQ ID NO: 6902
  Cyclic GFR-binding peptide
  MOD_RES (4)..(5): Xaa is C or S

SEQ ID NO: 45930 - protein, 34 aa, Artificial Sequence
  Cyclic GFR-binding peptide
  MOD_RES (31)..(33): Xaa is C or S
PTELNAISMLYFDENEKVVLKKYRDMVVEGXGXR

SEQ ID NO: 45931 - protein, 31 aa, Artificial Sequence
  Cyclic GFR-binding peptide
  MOD_RES (28)..(30): Xaa is C or S
DLNAISILYFVGRTPKVLKKYRMVVKSXKXS

SEQ ID NO: 45932 - protein, 26 aa, Artificial Sequence
  Cyclic GFR-binding peptide
VPTELSPISMLYKDENEKVVLKYHYD

SEQ ID NO: 45933 - protein, 38 aa, Artificial Sequence; identical to SEQ ID NO: 6903
  Cyclic GFR-binding peptide
  MOD_RES (5)..(6)..(38): Xaa is C or S

SEQ ID NO: 45934 - protein, 36 aa, Artificial Sequence
  Cyclic GFR-binding peptide
  MOD_RES (33)..(35): Xaa is C or S
VQLSPISVLYKEIVRKKPIFLKYHYTLEDHLAXKXE

SEQ ID NO: 45935 - protein, 30 aa, Artificial Sequence
  Cyclic GFR-binding peptide
  MOD_RES (2)..(3): Xaa is C or S
PXXVPQDLSAISILYLVGRTPKVLKNYQMV

SEQ ID NO: 45936 - protein, 39 aa, Artificial Sequence; identical to SEQ ID NO: 6904
  Cyclic GFR-binding peptide
  MOD_RES (6)..(38): Xaa is C or S

SEQ ID NO: 45937 - protein, 39 aa, Artificial Sequence; identical to SEQ ID NO: 6905
  Cyclic GFR-binding peptide
  MOD_RES (5)..(5): Xaa is C or S

SEQ ID NO: 45938 - protein, 32 aa, Artificial Sequence
  Cyclic GFR-binding peptide
  MOD_RES (29)..(31): Xaa is C or S
QDLSPISILYKIGKTPKILKYHYMIVKSXKXS

SEQ ID NO: 45939 - protein, 39 aa, Artificial Sequence; identical to SEQ ID NO: 6906
  Cyclic GFR-binding peptide
  MOD_RES (3)..(3): Xaa is C or S

SEQ ID NO: 45940 - protein, 32 aa, Artificial Sequence
  Cyclic GFR-binding peptide
  MOD_RES (31)..(31): Xaa is C or S
LSATSVLYYEIVRKKPIFLRKHRTLEDHLAXK

SEQ ID NO: 45941 - protein, 29 aa, Artificial Sequence
  Cyclic GFR-binding peptide
  MOD_RES (1)..(1): Xaa is C or S
XVSQDLSPISILYKIGKTPKILKYHYMIV

SEQ ID NO: 45942 - protein, 27 aa, Artificial Sequence
  Cyclic GFR-binding peptide
QLSATSVLYYEIVRKKPIFLRKHRTLE

SEQ ID NO: 45943 - protein, 27 aa, Artificial Sequence
  Cyclic GFR-binding peptide
DLSATSILYYVGRTPKVLRKHRMVVKS

SEQ ID NO: 45944 - protein, 28 aa, Artificial Sequence
  Cyclic GFR-binding peptide
  MOD_RES (1)..(1): Xaa is C or S
XAPTQLSPISVLYKDDSSNVILKYHYNM

SEQ ID NO: 45945 - protein, 35 aa, Artificial Sequence; identical to SEQ ID NO: 6908
  Cyclic GFR-binding peptide
  MOD_RES (3)..(35): Xaa is C or S

SEQ ID NO: 45946 - protein, 26 aa, Artificial Sequence
  Cyclic GFR-binding peptide
LSPISVLYKEIVRKKPIFLKYHYTLE

SEQ ID NO: 45947 - protein, 40 aa, Artificial Sequence; identical to SEQ ID NO: 6909
  Cyclic GFR-binding peptide
  MOD_RES (6)..(7)..(39): Xaa is C or S

SEQ ID NO: 45948 - protein, 34 aa, Artificial Sequence; identical to SEQ ID NO: 6910
  Cyclic GFR-binding peptide
  MOD_RES (1)..(2)..(33): Xaa is C or S

SEQ ID NO: 45949 - protein, 27 aa, Artificial Sequence
  Cyclic GFR-binding peptide
PTQLSPISVLYKDDSSNVILKYHYNMV

SEQ ID NO: 45950 - protein, 31 aa, Artificial Sequence
  Cyclic GFR-binding peptide
  MOD_RES (1)..(1): Xaa is C or S
XRPTQVQLSPISVLYKEIVRKKPIFLKYHYT

SEQ ID NO: 45951 - protein, 29 aa, Artificial Sequence
  Cyclic GFR-binding peptide
  MOD_RES (3)..(4): Xaa is C or S
KAXXVPTKLSAISVLYLDDMGVPTLKNYQ

SEQ ID NO: 45952 - protein, 28 aa, Artificial Sequence
  Cyclic GFR-binding peptide
QDLSAISILYLIGKTPKILKNYQMIVKS

SEQ ID NO: 45953 - protein, 34 aa, Artificial Sequence
  Cyclic GFR-binding peptide
  MOD_RES (5)..(6): Xaa is C or S
SASPXXVPQDLNAISILYFVGRTPKVLKKYRMVV

SEQ ID NO: 45954 - protein, 32 aa, Artificial Sequence
  Cyclic GFR-binding peptide
  MOD_RES (2)..(3): Xaa is C or S
AXXVPTKLSATSVLYYDDMGVPTLRKHREGMS

SEQ ID NO: 45955 - protein, 33 aa, Artificial Sequence
  Cyclic GFR-binding peptide
  MOD_RES (30)..(32): Xaa is C or S
TKLNAISVLYFDSSNNVILKKYRNMVVKAXGXH

SEQ ID NO: 45956 - protein, 40 aa, Artificial Sequence; identical to SEQ ID NO: 6915
  Cyclic GFR-binding peptide
  MOD_RES (5)..(5): Xaa is C or S

SEQ ID NO: 45957 - protein, 26 aa, Artificial Sequence
  Cyclic GFR-binding peptide
  MOD_RES (26)..(26): Xaa is C or S
SATSILYYVGRKPKVLRKHRMIVRSX

SEQ ID NO: 45958 - protein, 37 aa, Artificial Sequence; identical to SEQ ID NO: 6916
  Cyclic GFR-binding peptide
  MOD_RES (1)..(1): Xaa is C or S

SEQ ID NO: 45959 - protein, 29 aa, Artificial Sequence
  Cyclic GFR-binding peptide
  MOD_RES (3)..(4): Xaa is C or S
SPXXVSQDLSPISILYKIGKTPKILKYHY

SEQ ID NO: 45960 - protein, 22 aa, Artificial Sequence
  Cyclic GFR-binding peptide
SATSVLYYDDSSNVILRKHRNM

SEQ ID NO: 45961 - protein, 32 aa, Artificial Sequence
  Cyclic GFR-binding peptide
  MOD_RES (6)..(7): Xaa is C or S
ASASPXXVPQDLSATSILYYVGRTPKVLRKHR

SEQ ID NO: 45962 - protein, 33 aa, Artificial Sequence
  Cyclic GFR-binding peptide
  MOD_RES (7)..(7): Xaa is C or S
HVTKPTXAPTKLSAISVLYLDDSSNVILKNYQN

SEQ ID NO: 45963 - protein, 32 aa, Artificial Sequence
  Cyclic GFR-binding peptide
  MOD_RES (1)..(1): Xaa is C or S
XRPTQVQLNAISVLYFEIVRKKPIFLKKYRTL

SEQ ID NO: 45964 - protein, 31 aa, Artificial Sequence; identical to SEQ ID NO: 6917
  Cyclic GFR-binding peptide
  MOD_RES (1)..(1): Xaa is C or S

SEQ ID NO: 45965 - protein, 25 aa, Artificial Sequence
  Cyclic GFR-binding peptide
TKLSAISVLYLDDSSNVILKNYQNM

SEQ ID NO: 45966 - protein, 36 aa, Artificial Sequence; identical to SEQ ID NO: 6919
  Cyclic GFR-binding peptide
  MOD_RES (2)..(3)..(34)..(36): Xaa is C or S

SEQ ID NO: 45967 - protein, 27 aa, Artificial Sequence
  Cyclic GFR-binding peptide
LSAISVLYLDDMGVPTLKNYQEGMSVA

SEQ ID NO: 45968 - protein, 37 aa, Artificial Sequence; identical to SEQ ID NO: 6920
  Cyclic GFR-binding peptide
  MOD_RES (3)..(4)..(36): Xaa is C or S

SEQ ID NO: 45969 - protein, 30 aa, Artificial Sequence
  Cyclic GFR-binding peptide
PTQVQLNAISVLYFEIVRKKPIFLKKYRTL

SEQ ID NO: 45970 - protein, 35 aa, Artificial Sequence
  Cyclic GFR-binding peptide
  MOD_RES (5)..(6): Xaa is C or S
VPKPXXAPTQLSPISVLYKDDSSNVILKYHYNMVV

SEQ ID NO: 45971 - protein, 39 aa, Artificial Sequence; identical to SEQ ID NO: 6922
  Cyclic GFR-binding peptide
  MOD_RES (1)..(38): Xaa is C or S

SEQ ID NO: 45972 - protein, 30 aa, Artificial Sequence
  Cyclic GFR-binding peptide
  MOD_RES (28)..(30): Xaa is C or S
LSPISVLYKDDSSNVILKYHYNMVVRSXGX

SEQ ID NO: 45973 - protein, 34 aa, Artificial Sequence; identical to SEQ ID NO: 6926
  Cyclic GFR-binding peptide
  MOD_RES (3)..(4): Xaa is C or S

SEQ ID NO: 45974 - protein, 36 aa, Artificial Sequence
  Cyclic GFR-binding peptide
  MOD_RES (6)..(7): Xaa is C or S
ASASPXXVSQDLNAISILYFIGKTPKILKKYRMIVK

SEQ ID NO: 45975 - protein, 30 aa, Artificial Sequence
  Cyclic GFR-binding peptide
  MOD_RES (2)..(3): Xaa is C or S
AXXAPTKLSAISVLYLDSSNNVILKNYQNM

SEQ ID NO: 45976 - protein, 32 aa, Artificial Sequence
  Cyclic GFR-binding peptide
  MOD_RES (31)..(31): Xaa is C or S
PTKLSPISVLYKDDSSNVILKYHYNMVVRSXG

SEQ ID NO: 45977 - protein, 25 aa, Artificial Sequence
  Cyclic GFR-binding peptide
VPQDLSAISILYLVGRTPKVLKNYQ

SEQ ID NO: 45978 - protein, 33 aa, Artificial Sequence
  Cyclic GFR-binding peptide
  MOD_RES (32)..(32): Xaa is C or S
PTKLSATSVLYYDDMGVPTLRKHREGMSVAEXG

SEQ ID NO: 45979 - protein, 33 aa, Artificial Sequence
  Cyclic GFR-binding peptide
  MOD_RES (6)..(7): Xaa is C or S
TVPKPXXAPTQLSATSVLYYDDSSNVILRKHRN

SEQ ID NO: 45980 - protein, 28 aa, Artificial Sequence
  Cyclic GFR-binding peptide
  MOD_RES (28)..(28): Xaa is C or S
LSATSVLYYDDSSNVILRKHRNMVVRAX

SEQ ID NO: 45981 - protein, 31 aa, Artificial Sequence
  Cyclic GFR-binding peptide
  MOD_RES (2)..(3): Xaa is C or S
AXXAPTKLNAISVLYFDSSNNVILKKYRNMV

SEQ ID NO: 45982 - protein, 32 aa, Artificial Sequence
  Cyclic GFR-binding peptide
  MOD_RES (6)..(7): Xaa is C or S
ASASPXXVSQDLNAISILYFIGKTPKILKKYR

SEQ ID NO: 45983 - protein, 38 aa, Artificial Sequence; identical to SEQ ID NO: 6931
  Cyclic GFR-binding peptide
  MOD_RES (3)..(4)..(36)..(38): Xaa is C or S

SEQ ID NO: 45984 - protein, 33 aa, Artificial Sequence; identical to SEQ ID NO: 6932
  Cyclic GFR-binding peptide
  MOD_RES (1)..(32): Xaa is C or S

SEQ ID NO: 45985 - protein, 28 aa, Artificial Sequence
  Cyclic GFR-binding peptide
PTELSATSMLYYDEYDKVVLRKHREMVV

SEQ ID NO: 45986 - protein, 25 aa, Artificial Sequence
  Cyclic GFR-binding peptide
VPQALNAISILYFVGRKPKVLKKYR

SEQ ID NO: 45987 - protein, 39 aa, Artificial Sequence; identical to SEQ ID NO: 6933
  Cyclic GFR-binding peptide
  MOD_RES (4)..(5)..(37)..(39): Xaa is C or S

SEQ ID NO: 45988 - protein, 37 aa, Artificial Sequence; identical to SEQ ID NO: 6934
  Cyclic GFR-binding peptide
  MOD_RES (37)..(37): Xaa is C or S

SEQ ID NO: 45989 - protein, 31 aa, Artificial Sequence
  Cyclic GFR-binding peptide
  MOD_RES (4)..(5): Xaa is C or S
GKAXXVPTKLNAISVLYFDDMGVPTLKKYRE

SEQ ID NO: 45990 - protein, 33 aa, Artificial Sequence
  Cyclic GFR-binding peptide
  MOD_RES (31)..(33): Xaa is C or S
PTKLSATSVLYYDDSSNVILRKHRNMVVRSXGX

SEQ ID NO: 45991 - protein, 26 aa, Artificial Sequence
  Cyclic GFR-binding peptide
NAISMLYFDEYDKVVLKKYREMVVEG

SEQ ID NO: 45992 - protein, 35 aa, Artificial Sequence; identical to SEQ ID NO: 6936
  Cyclic GFR-binding peptide
  MOD_RES (35)..(35): Xaa is C or S

SEQ ID NO: 45993 - protein, 28 aa, Artificial Sequence
  Cyclic GFR-binding peptide
  MOD_RES (2)..(3): Xaa is C or S
AXXVPTELSATSMLYYDEYDKVVLRKHR

SEQ ID NO: 45994 - protein, 31 aa, Artificial Sequence
  Cyclic GFR-binding peptide
SAISVLYLEIVRKKPIFLKNYQEIVRKKPIF

SEQ ID NO: 45995 - protein, 29 aa, Artificial Sequence
  Cyclic GFR-binding peptide
APTKLNAISVLYFDSSNNVILKKYRNMVV

SEQ ID NO: 45996 - protein, 30 aa, Artificial Sequence
  Cyclic GFR-binding peptide
  MOD_RES (28)..(30): Xaa is C or S
ALSPISILYKVGRKPKVLKYHYMIVRSXKX

SEQ ID NO: 45997 - protein, 25 aa, Artificial Sequence
  Cyclic GFR-binding peptide
VSQDLNAISILYFIGKTPKILKKYR

SEQ ID NO: 45998 - protein, 31 aa, Artificial Sequence
  Cyclic GFR-binding peptide
  MOD_RES (5)..(6): Xaa is C or S
IPKAXXVPTELNAISMLYFDENEKVVLKKYR

SEQ ID NO: 45999 - protein, 26 aa, Artificial Sequence
  Cyclic GFR-binding peptide
TKLSPISVLYKDSSNNVILKYHYNMV

SEQ ID NO: 46000 - protein, 39 aa, Artificial Sequence; identical to SEQ ID NO: 6939
  Cyclic GFR-binding peptide
  MOD_RES (4)..(4): Xaa is C or S

SEQ ID NO: 46001 - protein, 30 aa, Artificial Sequence
  Cyclic GFR-binding peptide
  MOD_RES (29)..(29): Xaa is C or S
KLSAISVLYLDDSSNVILKNYQNMVVRSXG

SEQ ID NO: 46002 - protein, 37 aa, Artificial Sequence; identical to SEQ ID NO: 6940
  Cyclic GFR-binding peptide
  MOD_RES (3)..(4)..(37): Xaa is C or S

SEQ ID NO: 46003 - protein, 24 aa, Artificial Sequence
  Cyclic GFR-binding peptide
SATSVLYYDDMGVPTLRKHREGMS

SEQ ID NO: 46004 - protein, 29 aa, Artificial Sequence
  Cyclic GFR-binding peptide
VQLSATSVLYYEIVRKKPIFLRKHRTLED

SEQ ID NO: 46005 - protein, 28 aa, Artificial Sequence
  Cyclic GFR-binding peptide
  MOD_RES (1)..(1): Xaa is C or S
XVPTKLSATSVLYYDDMGVPTLRKHREG

SEQ ID NO: 46006 - protein, 23 aa, Artificial Sequence
  Cyclic GFR-binding peptide
QLSATSVLYYDDSSNVILRKHRN

SEQ ID NO: 46007 - protein, 36 aa, Artificial Sequence; identical to SEQ ID NO: 6941
  Cyclic GFR-binding peptide
  MOD_RES (2)..(2): Xaa is C or S

SEQ ID NO: 46008 - protein, 23 aa, Artificial Sequence
  Cyclic GFR-binding peptide
KLSPISVLYKDSSNNVILKYHYN

SEQ ID NO: 46009 - protein, 36 aa, Artificial Sequence; identical to SEQ ID NO: 6942
  Cyclic GFR-binding peptide
  MOD_RES (5)..(6): Xaa is C or S

SEQ ID NO: 46010 - protein, 28 aa, Artificial Sequence
  Cyclic GFR-binding peptide
VPTELSPISMLYKDEYDKVVLKYHYEMV

SEQ ID NO: 46011 - protein, 28 aa, Artificial Sequence
  Cyclic GFR-binding peptide
  MOD_RES (1)..(1): Xaa is C or S
XVPTELNAISMLYFDEYDKVVLKKYREM

SEQ ID NO: 46012 - protein, 39 aa, Artificial Sequence; identical to SEQ ID NO: 6943
  Cyclic GFR-binding peptide
  MOD_RES (4)..(5)..(37)..(39): Xaa is C or S

SEQ ID NO: 46013 - protein, 23 aa, Artificial Sequence
  Cyclic GFR-binding peptide
SATSILYYVGRKPKVLRKHRMIV

SEQ ID NO: 46014 - protein, 20 aa, Artificial Sequence
  Cyclic GFR-binding peptide
NAISVLYFDDMGVPTLKKYR

SEQ ID NO: 46015 - protein, 38 aa, Artificial Sequence; identical to SEQ ID NO: 6945
  Cyclic GFR-binding peptide
  MOD_RES (3)..(4)..(36)..(38): Xaa is C or S

SEQ ID NO: 46016 - protein, 32 aa, Artificial Sequence
  Cyclic GFR-binding peptide
  MOD_RES (3)..(4): Xaa is C or S
SPXXVPQDLNAISILYFVGRTPKVLKKYRMVV

SEQ ID NO: 46017 - protein, 38 aa, Artificial Sequence; identical to SEQ ID NO: 6947
  Cyclic GFR-binding peptide
  MOD_RES (4)..(5)..(36)..(38): Xaa is C or S

SEQ ID NO: 46018 - protein, 26 aa, Artificial Sequence
  Cyclic GFR-binding peptide
APTKLNAISVLYFDSSNNVILKKYRN

SEQ ID NO: 46019 - protein, 26 aa, Artificial Sequence
  Cyclic GFR-binding peptide
TKLSATSVLYYDDSSNVILRKHRNMV

SEQ ID NO: 46020 - protein, 23 aa, Artificial Sequence
  Cyclic GFR-binding peptide
ELSATSMLYYDEYDKVVLRKHRE

SEQ ID NO: 46021 - protein, 37 aa, Artificial Sequence; identical to SEQ ID NO: 6950
  Cyclic GFR-binding peptide
  MOD_RES (2)..(3)..(34)..(36): Xaa is C or S

SEQ ID NO: 46022 - protein, 27 aa, Artificial Sequence
  Cyclic GFR-binding peptide
TQVQLSAISVLYLEIVRKKPIFLKNYQ

SEQ ID NO: 46023 - protein, 40 aa, Artificial Sequence; identical to SEQ ID NO: 6954
  Cyclic GFR-binding peptide
  MOD_RES (5)..(6)..(38)..(40): Xaa is C or S

SEQ ID NO: 46024 - protein, 42 aa, Artificial Sequence; identical to SEQ ID NO: 6955
  Cyclic GFR-binding peptide
  MOD_RES (6)..(7)..(39)..(41): Xaa is C or S

SEQ ID NO: 46025 - protein, 26 aa, Artificial Sequence
  Cyclic GFR-binding peptide
VPQDLSATSILYYVGRTPKVLRKHRM

SEQ ID NO: 46026 - protein, 37 aa, Artificial Sequence; identical to SEQ ID NO: 6957
  Cyclic GFR-binding peptide
  MOD_RES (5)..(6): Xaa is C or S

SEQ ID NO: 46027 - protein, 34 aa, Artificial Sequence; identical to SEQ ID NO: 6956
  Cyclic GFR-binding peptide
  MOD_RES (32)..(34): Xaa is C or S

SEQ ID NO: 46028 - protein, 28 aa, Artificial Sequence
  Cyclic GFR-binding peptide
APTQLSAISVLYLDDSSNVILKNYQNMV

SEQ ID NO: 46029 - protein, 34 aa, Artificial Sequence
  Cyclic GFR-binding peptide
  MOD_RES (5)..(6): Xaa is C or S
IPKAXXVPTELSATSMLYYDEYDKVVLRKHREMV

SEQ ID NO: 46030 - protein, 30 aa, Artificial Sequence
  Cyclic GFR-binding peptide
  MOD_RES (29)..(29): Xaa is C or S
KLNAISVLYFDSSNNVILKKYRNMVVKAXG

SEQ ID NO: 46031 - protein, 28 aa, Artificial Sequence
  Cyclic GFR-binding peptide
QLSATSVLYYEIVRKKPIFLRKHRTLED

SEQ ID NO: 46032 - protein, 30 aa, Artificial Sequence
  Cyclic GFR-binding peptide
  MOD_RES (1)..(1): Xaa is C or S
XVPTKLSAISVLYLDDMGVPTLKNYQEGMS

SEQ ID NO: 46033 - protein, 36 aa, Artificial Sequence; identical to SEQ ID NO: 6958
  Cyclic GFR-binding peptide
  MOD_RES (2)..(3)..(35): Xaa is C or S

SEQ ID NO: 46034 - protein, 27 aa, Artificial Sequence
  Cyclic GFR-binding peptide
VPTKLNAISVLYFDDMGVPTLKKYREG

SEQ ID NO: 46035 - protein, 37 aa, Artificial Sequence; identical to SEQ ID NO: 6960
  Cyclic GFR-binding peptide
  MOD_RES (2)..(3)..(34)..(36): Xaa is C or S

SEQ ID NO: 46036 - protein, 34 aa, Artificial Sequence
  Cyclic GFR-binding peptide
  MOD_RES (4)..(5): Xaa is C or S
PKAXXAPTKLNAISVLYFDSSNNVILKKYRNMVV

SEQ ID NO: 46037 - protein, 36 aa, Artificial Sequence; identical to SEQ ID NO: 6961
  Cyclic GFR-binding peptide
  MOD_RES (5)..(6): Xaa is C or S

SEQ ID NO: 46038 - protein, 31 aa, Artificial Sequence
  Cyclic GFR-binding peptide
  MOD_RES (3)..(4): Xaa is C or S
KAXXVPTKLSATSVLYYDDMGVPTLRKHREG

SEQ ID NO: 46039 - protein, 29 aa, Artificial Sequence
  Cyclic GFR-binding peptide
SQDLSPISILYKIGKTPKILKYHYMIVKS

SEQ ID NO: 46040 - protein, 31 aa, Artificial Sequence
  Cyclic GFR-binding peptide
  MOD_RES (3)..(4): Xaa is C or S
SPXXVPQDLSPISILYKVGRTPKVLKYHYMV

SEQ ID NO: 46041 - protein, 33 aa, Artificial Sequence
  Cyclic GFR-binding peptide
  MOD_RES (31)..(33): Xaa is C or S
PTQLSATSVLYYDDSSNVILRKHRNMVVRAXGX

SEQ ID NO: 46042 - protein, 20 aa, Artificial Sequence
  Cyclic GFR-binding peptide
NAISILYFVGRKPKVLKKYR

SEQ ID NO: 46043 - protein, 34 aa, Artificial Sequence; identical to SEQ ID NO: 6962
  Cyclic GFR-binding peptide
  MOD_RES (1)..(2)..(34): Xaa is C or S

SEQ ID NO: 46044 - protein, 35 aa, Artificial Sequence
  Cyclic GFR-binding peptide
  MOD_RES (6)..(7): Xaa is C or S
KVGKAXXVPTKLNAISVLYFDDMGVPTLKKYREGM

SEQ ID NO: 46045 - protein, 32 aa, Artificial Sequence
  Cyclic GFR-binding peptide
  MOD_RES (31)..(31): Xaa is C or S
LSAISVLYLEIVRKKPIFLKNYQTLEDHLAXK

SEQ ID NO: 46046 - protein, 32 aa, Artificial Sequence; identical to SEQ ID NO: 6963
  Cyclic GFR-binding peptide
  MOD_RES (32)..(32): Xaa is C or S

SEQ ID NO: 46047 - protein, 32 aa, Artificial Sequence
  Cyclic GFR-binding peptide
  MOD_RES (29)..(31): Xaa is C or S
QALSAISILYLVGRKPKVLKNYQMIVRSXKXS

SEQ ID NO: 46048 - protein, 35 aa, Artificial Sequence; identical to SEQ ID NO: 6967
  Cyclic GFR-binding peptide
  MOD_RES (4)..(5): Xaa is C or S

SEQ ID NO: 46049 - protein, 33 aa, Artificial Sequence; identical to SEQ ID NO: 6970
  Cyclic GFR-binding peptide
  MOD_RES (2)..(3): Xaa is C or S

SEQ ID NO: 46050 - protein, 40 aa, Artificial Sequence; identical to SEQ ID NO: 6971
  Cyclic GFR-binding peptide
  MOD_RES (5)..(6)..(39): Xaa is C or S

SEQ ID NO: 46051 - protein, 24 aa, Artificial Sequence
  Cyclic GFR-binding peptide
LSAISVLYLDDSSNVILKNYQNMV

SEQ ID NO: 46052 - protein, 35 aa, Artificial Sequence; identical to SEQ ID NO: 6973
  Cyclic GFR-binding peptide
  MOD_RES (1)..(2)..(35): Xaa is C or S

SEQ ID NO: 46053 - protein, 34 aa, Artificial Sequence; identical to SEQ ID NO: 6976
  Cyclic GFR-binding peptide
  MOD_RES (1)..(2)..(33): Xaa is C or S

SEQ ID NO: 46054 - protein, 33 aa, Artificial Sequence
  Cyclic GFR-binding peptide
  MOD_RES (32)..(32): Xaa is C or S
QLSAISVLYLEIVRKKPIFLKNYQTLEDHLAXK

SEQ ID NO: 46055 - protein, 33 aa, Artificial Sequence
  Cyclic GFR-binding peptide
  MOD_RES (30)..(32): Xaa is C or S
SAISVLYLEIVRKKPIFLKNYQTLEDHLAXKXE

SEQ ID NO: 46056 - protein, 37 aa, Artificial Sequence; identical to SEQ ID NO: 6978
  Cyclic GFR-binding peptide
  MOD_RES (2)..(34)..(36): Xaa is C or S

SEQ ID NO: 46057 - protein, 36 aa, Artificial Sequence; identical to SEQ ID NO: 6979
  Cyclic GFR-binding peptide
  MOD_RES (5)..(6): Xaa is C or S

SEQ ID NO: 46058 - protein, 32 aa, Artificial Sequence
  Cyclic GFR-binding peptide
  MOD_RES (31)..(31): Xaa is C or S
PTQLSPISVLYKDDSSNVILKYHYNMVVRAXG

SEQ ID NO: 46059 - protein, 28 aa, Artificial Sequence
  Cyclic GFR-binding peptide
VSQDLSPISILYKIGKTPKILKYHYMIV

SEQ ID NO: 46060 - protein, 29 aa, Artificial Sequence
  Cyclic GFR-binding peptide
  MOD_RES (1)..(2): Xaa is C or S
XXVPTELSPISMLYKDENEKVVLKYHYDM

SEQ ID NO: 46061 - protein, 28 aa, Artificial Sequence
  Cyclic GFR-binding peptide
  MOD_RES (28)..(28): Xaa is C or S
DLSPISILYKVGRTPKVLKYHYMVVKSX

SEQ ID NO: 46062 - protein, 27 aa, Artificial Sequence
  Cyclic GFR-binding peptide
  MOD_RES (26)..(26): Xaa is C or S
SAISILYLVGRTPKVLKNYQMVVKSXK

SEQ ID NO: 46063 - protein, 28 aa, Artificial Sequence
  Cyclic GFR-binding peptide
  MOD_RES (27)..(27): Xaa is C or S
SATSMLYYDEYDKVVLRKHREMVVEGXG

SEQ ID NO: 46064 - protein, 24 aa, Artificial Sequence
  Cyclic GFR-binding peptide
QLSPISVLYKDDSSNVILKYHYNM

SEQ ID NO: 46065 - protein, 35 aa, Artificial Sequence; identical to SEQ ID NO: 6982
  Cyclic GFR-binding peptide
  MOD_RES (2)..(3)..(35): Xaa is C or S

SEQ ID NO: 46066 - protein, 27 aa, Artificial Sequence
  Cyclic GFR-binding peptide
TQLSAISVLYLDDSSNVILKNYQNMVV

SEQ ID NO: 46067 - protein, 31 aa, Artificial Sequence
  Cyclic GFR-binding peptide
  MOD_RES (5)..(6): Xaa is C or S
SAAPXXVPQALSPISILYKVGRKPKVLKYHY

SEQ ID NO: 46068 - protein, 35 aa, Artificial Sequence; identical to SEQ ID NO: 6984
  Cyclic GFR-binding peptide
  MOD_RES (2)..(3)..(35): Xaa is C or S

SEQ ID NO: 46069 - protein, 29 aa, Artificial Sequence
  Cyclic GFR-binding peptide
APTKLSPISVLYKDSSNNVILKYHYNMVV

SEQ ID NO: 46070 - protein, 23 aa, Artificial Sequence
  Cyclic GFR-binding peptide
NAISVLYFDDMGVPTLKKYREGM

SEQ ID NO: 46071 - protein, 35 aa, Artificial Sequence; identical to SEQ ID NO: 6985
  Cyclic GFR-binding peptide
  MOD_RES (1)..(2)..(33)..(35): Xaa is C or S

SEQ ID NO: 46072 - protein, 29 aa, Artificial Sequence
  Cyclic GFR-binding peptide
SQDLSAISILYLIGKTPKILKNYQMIVKS

SEQ ID NO: 46073 - protein, 27 aa, Artificial Sequence
  Cyclic GFR-binding peptide
PQALSATSILYYVGRKPKVLRKHRMIV

SEQ ID NO: 46074 - protein, 32 aa, Artificial Sequence
  Cyclic GFR-binding peptide
  MOD_RES (32)..(32): Xaa is C or S
QLNAISVLYFEIVRKKPIFLKKYRTLEDHLAX

SEQ ID NO: 46075 - protein, 32 aa, Artificial Sequence; identical to SEQ ID NO: 6988
  Cyclic GFR-binding peptide
  MOD_RES (1)..(2): Xaa is C or S

SEQ ID NO: 46076 - protein, 43 aa, Artificial Sequence; identical to SEQ ID NO: 6991
  Cyclic GFR-binding peptide
  MOD_RES (4)..(41)..(43): Xaa is C or S

SEQ ID NO: 46077 - protein, 33 aa, Artificial Sequence; identical to SEQ ID NO: 6992
  Cyclic GFR-binding peptide
  MOD_RES (1)..(2)..(33): Xaa is C or S

SEQ ID NO: 46078 - protein, 27 aa, Artificial Sequence
  Cyclic GFR-binding peptide
LNAISVLYFDDMGVPTLKKYREGMSVA

SEQ ID NO: 46079 - protein, 38 aa, Artificial Sequence; identical to SEQ ID NO: 6993
  Cyclic GFR-binding peptide
  MOD_RES (6)..(38): Xaa is C or S

SEQ ID NO: 46080 - protein, 20 aa, Artificial Sequence
  Cyclic GFR-binding peptide
NAISVLYFDSSNNVILKKYR

SEQ ID NO: 46081 - protein, 35 aa, Artificial Sequence; identical to SEQ ID NO: 6995
  Cyclic GFR-binding peptide
  MOD_RES (1)..(2)..(33)..(35): Xaa is C or S

SEQ ID NO: 46082 - protein, 27 aa, Artificial Sequence
  Cyclic GFR-binding peptide
APTQLSPISVLYKDDSSNVILKYHYNM

SEQ ID NO: 46083 - protein, 30 aa, Artificial Sequence
  Cyclic GFR-binding peptide
  MOD_RES (3)..(4): Xaa is C or S
KAXXVPTELSPISMLYKDENEKVVLKYHYD

SEQ ID NO: 46084 - protein, 25 aa, Artificial Sequence
  Cyclic GFR-binding peptide
DLNAISILYFVGRTPKVLKKYRMVV

SEQ ID NO: 46085 - protein, 32 aa, Artificial Sequence
  Cyclic GFR-binding peptide
  MOD_RES (6)..(7): Xaa is C or S
AVPKAXXAPTKLSAISVLYLDSSNNVILKNYQ

SEQ ID NO: 46086 - protein, 25 aa, Artificial Sequence
  Cyclic GFR-binding peptide
SQDLSPISILYKIGKTPKILKYHYM

SEQ ID NO: 46087 - protein, 27 aa, Artificial Sequence
  Cyclic GFR-binding peptide
TELSPISMLYKDEYDKVVLKYHYEMVV

SEQ ID NO: 46088 - protein, 44 aa, Artificial Sequence; identical to SEQ ID NO: 6997
  Cyclic GFR-binding peptide
  MOD_RES (5)..(42)..(44): Xaa is C or S

SEQ ID NO: 46089 - protein, 27 aa, Artificial Sequence
  Cyclic GFR-binding peptide
TQVQLSATSVLYYEIVRKKPIFLRKHR

SEQ ID NO: 46090 - protein, 23 aa, Artificial Sequence
  Cyclic GFR-binding peptide
LNAISVLYFDSSNNVILKKYRNM

SEQ ID NO: 46091 - protein, 30 aa, Artificial Sequence
  Cyclic GFR-binding peptide
  MOD_RES (28)..(30): Xaa is C or S
ALSATSILYYVGRKPKVLRKHRMIVRSXKX

SEQ ID NO: 46092 - protein, 27 aa, Artificial Sequence
  Cyclic GFR-binding peptide
  MOD_RES (27)..(27): Xaa is C or S
SPISVLYKDDSSNVILKYHYNMVVRAX

SEQ ID NO: 46093 - protein, 33 aa, Artificial Sequence
  Cyclic GFR-binding peptide
  MOD_RES (1)..(2): Xaa is C or S
XXVPTKLSATSVLYYDDMGVPTLRKHREGMSVA

SEQ ID NO: 46094 - protein, 24 aa, Artificial Sequence
  Cyclic GFR-binding peptide
LSAISILYLVGRKPKVLKNYQMIV

SEQ ID NO: 46095 - protein, 41 aa, Artificial Sequence; identical to SEQ ID NO: 6999
  Cyclic GFR-binding peptide
  MOD_RES (7)..(39)..(41): Xaa is C or S

SEQ ID NO: 46096 - protein, 34 aa, Artificial Sequence; identical to SEQ ID NO: 7001
  Cyclic GFR-binding peptide
  MOD_RES (32)..(34): Xaa is C or S

SEQ ID NO: 46097 - protein, 22 aa, Artificial Sequence
  Cyclic GFR-binding peptide
DLSAISILYLVGRTPKVLKNYQ

SEQ ID NO: 46098 - protein, 28 aa, Artificial Sequence
  Cyclic GFR-binding peptide
SQDLSPISILYKIGKTPKILKYHYMIVK

SEQ ID NO: 46099 - protein, 34 aa, Artificial Sequence; identical to SEQ ID NO: 7003
  Cyclic GFR-binding peptide
  MOD_RES (3)..(4): Xaa is C or S

SEQ ID NO: 46100 - protein, 38 aa, Artificial Sequence; identical to SEQ ID NO: 7004
  Cyclic GFR-binding peptide
  MOD_RES (37)..(37): Xaa is C or S

SEQ ID NO: 46101 - protein, 39 aa, Artificial Sequence; identical to SEQ ID NO: 7005
  Cyclic GFR-binding peptide
  MOD_RES (3)..(4)..(36)..(38): Xaa is C or S

SEQ ID NO: 46102 - protein, 25 aa, Artificial Sequence
  Cyclic GFR-binding peptide
VPTKLSAISVLYLDDMGVPTLKNYQ

SEQ ID NO: 46103 - protein, 28 aa, Artificial Sequence
  Cyclic GFR-binding peptide
QVQLNAISVLYFEIVRKKPIFLKKYRTL

SEQ ID NO: 46104 - protein, 27 aa, Artificial Sequence
  Cyclic GFR-binding peptide
LSAISVLYLDDSSNVILKNYQNMVVRS

SEQ ID NO: 46105 - protein, 28 aa, Artificial Sequence
  Cyclic GFR-binding peptide
  MOD_RES (1)..(1): Xaa is C or S
XAPTKLSPISVLYKDDSSNVILKYHYNM

SEQ ID NO: 46106 - protein, 41 aa, Artificial Sequence; identical to SEQ ID NO: 7008
  Cyclic GFR-binding peptide
  MOD_RES (6)..(7)..(39)..(41): Xaa is C or S

SEQ ID NO: 46107 - protein, 28 aa, Artificial Sequence
  Cyclic GFR-binding peptide
QALSPISILYKVGRKPKVLKYHYMIVRS

SEQ ID NO: 46108 - protein, 26 aa, Artificial Sequence
  Cyclic GFR-binding peptide
APTKLSPISVLYKDDSSNVILKYHYN

SEQ ID NO: 46109 - protein, 26 aa, Artificial Sequence
  Cyclic GFR-binding peptide
  MOD_RES (1)..(1): Xaa is C or S
XVPTELSATSMLYYDEYDKVVLRKHR

SEQ ID NO: 46110 - protein, 37 aa, Artificial Sequence; identical to SEQ ID NO: 7010
  Cyclic GFR-binding peptide
  MOD_RES (1)..(1): Xaa is C or S

SEQ ID NO: 46111 - protein, 39 aa, Artificial Sequence; identical to SEQ ID NO: 7013
  Cyclic GFR-binding peptide
  MOD_RES (4)..(4): Xaa is C or S

SEQ ID NO: 46112 - protein, 37 aa, Artificial Sequence; identical to SEQ ID NO: 7012
  Cyclic GFR-binding peptide
  MOD_RES (3)..(4)..(36): Xaa is C or S

SEQ ID NO: 46113 - protein, 27 aa, Artificial Sequence
  Cyclic GFR-binding peptide
LSAISVLYLDDSSNVILKNYQNMVVRA

SEQ ID NO: 46114 - protein, 25 aa, Artificial Sequence
  Cyclic GFR-binding peptide
VPQDLSATSILYYVGRTPKVLRKHR

SEQ ID NO: 46115 - protein, 33 aa, Artificial Sequence
  Cyclic GFR-binding peptide
  MOD_RES (5)..(6): Xaa is C or S
IPKAXXVPTELNAISMLYFDENEKVVLKKYRDM

SEQ ID NO: 46116 - protein, 26 aa, Artificial Sequence
  Cyclic GFR-binding peptide
PTELSPISMLYKDEYDKVVLKYHYEM

SEQ ID NO: 46117 - protein, 34 aa, Artificial Sequence
  Cyclic GFR-binding peptide
  MOD_RES (6)..(7): Xaa is C or S
AVPKAXXAPTKLNAISVLYFDSSNNVILKKYRNM

SEQ ID NO: 46118 - protein, 26 aa, Artificial Sequence
  Cyclic GFR-binding peptide
  MOD_RES (26)..(26): Xaa is C or S
SAISILYLVGRTPKVLKNYQMVVKSX

SEQ ID NO: 46119 - protein, 31 aa, Artificial Sequence
  Cyclic GFR-binding peptide
  MOD_RES (4)..(4): Xaa is C or S
KPTXAPTKLSAISVLYLDDSSNVILKNYQNM

SEQ ID NO: 46120 - protein, 33 aa, Artificial Sequence
  Cyclic GFR-binding peptide
  MOD_RES (6)..(7): Xaa is C or S
KIPKAXXVPTELSPISMLYKDENEKVVLKYHYD

SEQ ID NO: 46121 - protein, 26 aa, Artificial Sequence
  Cyclic GFR-binding peptide
VPTELSATSMLYYDEYDKVVLRKHRE

SEQ ID NO: 46122 - protein, 29 aa, Artificial Sequence
  Cyclic GFR-binding peptide
  MOD_RES (26)..(28): Xaa is C or S
NAISILYFIGKTPKILKKYRMIVKSXKXS

SEQ ID NO: 46123 - protein, 23 aa, Artificial Sequence
  Cyclic GFR-binding peptide
LSPISMLYKDEYDKVVLKYHYEM

SEQ ID NO: 46124 - protein, 34 aa, Artificial Sequence; identical to SEQ ID NO: 7022
  Cyclic GFR-binding peptide
  MOD_RES (3)..(4): Xaa is C or S

SEQ ID NO: 46125 - protein, 42 aa, Artificial Sequence; identical to SEQ ID NO: 7023
  Cyclic GFR-binding peptide
  MOD_RES (3)..(40)..(42): Xaa is C or S

SEQ ID NO: 46126 - protein, 30 aa, Artificial Sequence
  Cyclic GFR-binding peptide
  MOD_RES (1)..(2): Xaa is C or S
XXVPQDLSATSILYYVGRTPKVLRKHRMVV

SEQ ID NO: 46127 - protein, 36 aa, Artificial Sequence; identical to SEQ ID NO: 7024
  Cyclic GFR-binding peptide
  MOD_RES (2)..(3)..(34)..(36): Xaa is C or S

SEQ ID NO: 46128 - protein, 34 aa, Artificial Sequence; identical to SEQ ID NO: 7025
  Cyclic GFR-binding peptide
  MOD_RES (32)..(34): Xaa is C or S

SEQ ID NO: 46129 - protein, 29 aa, Artificial Sequence
  Cyclic GFR-binding peptide
QVQLSATSVLYYEIVRKKPIFLRKHRTLE

SEQ ID NO: 46130 - protein, 26 aa, Artificial Sequence
  Cyclic GFR-binding peptide
  MOD_RES (1)..(1): Xaa is C or S
XVPTELSPISMLYKDEYDKVVLKYHY

SEQ ID NO: 46131 - protein, 29 aa, Artificial Sequence
  Cyclic GFR-binding peptide
TKLNAISVLYFDDMGVPTLKKYREGMSVA

SEQ ID NO: 46132 - protein, 32 aa, Artificial Sequence; identical to SEQ ID NO: 7032
  Cyclic GFR-binding peptide
  MOD_RES (1)..(1): Xaa is C or S

SEQ ID NO: 46133 - protein, 31 aa, Artificial Sequence
  Cyclic GFR-binding peptide
  MOD_RES (2)..(3): Xaa is C or S
PXXVSQDLNAISILYFIGKTPKILKKYRMIV

SEQ ID NO: 46134 - protein, 23 aa, Artificial Sequence
  Cyclic GFR-binding peptide
ELNAISMLYFDENEKVVLKKYRD

SEQ ID NO: 46135 - protein, 33 aa, Artificial Sequence; identical to SEQ ID NO: 7034
  Cyclic GFR-binding peptide
  MOD_RES (2)..(3): Xaa is C or S

SEQ ID NO: 46136 - protein, 25 aa, Artificial Sequence
  Cyclic GFR-binding peptide
ALSAISILYLVGRKPKVLKNYQMIV

SEQ ID NO: 46137 - protein, 30 aa, Artificial Sequence
  Cyclic GFR-binding peptide
  MOD_RES (4)..(5): Xaa is C or S
GKAXXVPTKLSAISVLYLDDMGVPTLKNYQ

SEQ ID NO: 46138 - protein, 33 aa, Artificial Sequence
  Cyclic GFR-binding peptide
  MOD_RES (30)..(32): Xaa is C or S
PQDLSAISILYLVGRTPKVLKNYQMVVKSXKXS

SEQ ID NO: 46139 - protein, 38 aa, Artificial Sequence; identical to SEQ ID NO: 7036
  Cyclic GFR-binding peptide
  MOD_RES (3)..(4)..(35)..(37): Xaa is C or S

SEQ ID NO: 46140 - protein, 30 aa, Artificial Sequence
  Cyclic GFR-binding peptide
  MOD_RES (2)..(3): Xaa is C or S
PXXVPQDLSPISILYKVGRTPKVLKYHYMV

SEQ ID NO: 46141 - protein, 36 aa, Artificial Sequence; identical to SEQ ID NO: 7037
  Cyclic GFR-binding peptide
  MOD_RES (36)..(36): Xaa is C or S

SEQ ID NO: 46142 - protein, 26 aa, Artificial Sequence
  Cyclic GFR-binding peptide
  MOD_RES (26)..(26): Xaa is C or S
SPISILYKVGRKPKVLKYHYMIVRSX

SEQ ID NO: 46143 - protein, 39 aa, Artificial Sequence; identical to SEQ ID NO: 7038
  Cyclic GFR-binding peptide
  MOD_RES (2)..(3)..(36)..(38): Xaa is C or S

SEQ ID NO: 46144 - protein, 30 aa, Artificial Sequence
  Cyclic GFR-binding peptide
  MOD_RES (30)..(30): Xaa is C or S
TKLSAISVLYLDDSSNVILKNYQNMVVRSX

SEQ ID NO: 46145 - protein, 32 aa, Artificial Sequence
  Cyclic GFR-binding peptide
  MOD_RES (2)..(3): Xaa is C or S
PXXVPQALSPISILYKVGRKPKVLKYHYMIVR

SEQ ID NO: 46146 - protein, 32 aa, Artificial Sequence; identical to SEQ ID NO: 7039
  Cyclic GFR-binding peptide
  MOD_RES (1)..(1): Xaa is C or S

SEQ ID NO: 46147 - protein, 32 aa, Artificial Sequence
  Cyclic GFR-binding peptide
  MOD_RES (3)..(4): Xaa is C or S
KPXXAPTKLSAISVLYLDDSSNVILKNYQNMV

SEQ ID NO: 46148 - protein, 37 aa, Artificial Sequence
  Cyclic GFR-binding peptide
  MOD_RES (5)..(5): Xaa is C or S
RNVQXRPTQVQLSPISVLYKEIVRKKPIFLKYHYTLE

SEQ ID NO: 46149 - protein, 28 aa, Artificial Sequence
  Cyclic GFR-binding peptide
  MOD_RES (26)..(28): Xaa is C or S
SAISILYLVGRTPKVLKNYQMVVKSXKX

SEQ ID NO: 46150 - protein, 30 aa, Artificial Sequence
  Cyclic GFR-binding peptide
  MOD_RES (30)..(30): Xaa is C or S
SQDLSATSILYYIGKTPKILRKHRMIVKSX

SEQ ID NO: 46151 - protein, 38 aa, Artificial Sequence; identical to SEQ ID NO: 7042
  Cyclic GFR-binding peptide
  MOD_RES (4)..(5)..(36)..(38): Xaa is C or S

SEQ ID NO: 46152 - protein, 41 aa, Artificial Sequence; identical to SEQ ID NO: 7043
  Cyclic GFR-binding peptide
  MOD_RES (6)..(7)..(38)..(40): Xaa is C or S

SEQ ID NO: 46153 - protein, 30 aa, Artificial Sequence
  Cyclic GFR-binding peptide
  MOD_RES (28)..(30): Xaa is C or S
DLSPISILYKVGRTPKVLKYHYMVVKSXKX

SEQ ID NO: 46154 - protein, 39 aa, Artificial Sequence; identical to SEQ ID NO: 7045
  Cyclic GFR-binding peptide
  MOD_RES (4)..(5)..(37)..(39): Xaa is C or S

SEQ ID NO: 46155 - protein, 29 aa, Artificial Sequence
  Cyclic GFR-binding peptide
TELSPISMLYKDEYDKVVLKYHYEMVVEG

SEQ ID NO: 46156 - protein, 25 aa, Artificial Sequence
  Cyclic GFR-binding peptide
VPTKLNAISVLYFDDMGVPTLKKYR

SEQ ID NO: 46157 - protein, 32 aa, Artificial Sequence
  Cyclic GFR-binding peptide
  MOD_RES (6)..(7): Xaa is C or S
ASASPXXVSQDLSAISILYLIGKTPKILKNYQ

SEQ ID NO: 46158 - protein, 24 aa, Artificial Sequence
  Cyclic GFR-binding peptide
QLSAISVLYLDDSSNVILKNYQNM

SEQ ID NO: 46159 - protein, 37 aa, Artificial Sequence; identical to SEQ ID NO: 7047
  Cyclic GFR-binding peptide
  MOD_RES (3)..(4)..(35)..(37): Xaa is C or S

SEQ ID NO: 46160 - protein, 36 aa, Artificial Sequence; identical to SEQ ID NO: 7048
  Cyclic GFR-binding peptide
  MOD_RES (4)..(5)..(36): Xaa is C or S

SEQ ID NO: 46161 - protein, 42 aa, Artificial Sequence; identical to SEQ ID NO: 7049
  Cyclic GFR-binding peptide
  MOD_RES (6)..(7)..(40)..(42): Xaa is C or S

SEQ ID NO: 46162 - protein, 29 aa, Artificial Sequence
  Cyclic GFR-binding peptide
  MOD_RES (28)..(28): Xaa is C or S
DLSAISILYLVGRTPKVLKNYQMVVKSXK

SEQ ID NO: 46163 - protein, 29 aa, Artificial Sequence
  Cyclic GFR-binding peptide
  MOD_RES (27)..(29): Xaa is C or S
SATSMLYYDENEKVVLRKHRDMVVEGXGX

SEQ ID NO: 46164 - protein, 32 aa, Artificial Sequence
  Cyclic GFR-binding peptide
  MOD_RES (4)..(4): Xaa is C or S
KPTXAPTKLSAISVLYLDDSSNVILKNYQNMV

SEQ ID NO: 46165 - protein, 30 aa, Artificial Sequence
  Cyclic GFR-binding peptide
  MOD_RES (1)..(1): Xaa is C or S
XVPQDLNAISILYFVGRTPKVLKKYRMVVK

SEQ ID NO: 46166 - protein, 25 aa, Artificial Sequence
  Cyclic GFR-binding peptide
LSATSMLYYDENEKVVLRKHRDMVV

SEQ ID NO: 46167 - protein, 21 aa, Artificial Sequence
  Cyclic GFR-binding peptide
SPISMLYKDENEKVVLKYHYD

SEQ ID NO: 46168 - protein, 27 aa, Artificial Sequence
  Cyclic GFR-binding peptide
APTKLSAISVLYLDDSSNVILKNYQNM

SEQ ID NO: 46169 - protein, 33 aa, Artificial Sequence
  Cyclic GFR-binding peptide
  MOD_RES (31)..(33): Xaa is C or S
TKLNAISVLYFDDMGVPTLKKYREGMSVAEXGX

SEQ ID NO: 46170 - protein, 30 aa, Artificial Sequence
  Cyclic GFR-binding peptide
  MOD_RES (1)..(2): Xaa is C or S
XXAPTKLSPISVLYKDSSNNVILKYHYNMV

SEQ ID NO: 46171 - protein, 36 aa, Artificial Sequence; identical to SEQ ID NO: 7052
  Cyclic GFR-binding peptide
  MOD_RES (2)..(3)..(35): Xaa is C or S

SEQ ID NO: 46172 - protein, 38 aa, Artificial Sequence; identical to SEQ ID NO: 7053
  Cyclic GFR-binding peptide
  MOD_RES (5)..(6)..(37): Xaa is C or S

SEQ ID NO: 46173 - protein, 38 aa, Artificial Sequence; identical to SEQ ID NO: 7055
  Cyclic GFR-binding peptide
  MOD_RES (3)..(4)..(36)..(38): Xaa is C or S

SEQ ID NO: 46174 - protein, 31 aa, Artificial Sequence
  Cyclic GFR-binding peptide
TQVQLSPISVLYKEIVRKKPIFLKYHYTLED

SEQ ID NO: 46175 - protein, 33 aa, Artificial Sequence
  Cyclic GFR-binding peptide
  MOD_RES (2)..(2): Xaa is C or S
QXRPTQVQLSATSVLYYEIVRKKPIFLRKHRTL

SEQ ID NO: 46176 - protein, 26 aa, Artificial Sequence
  Cyclic GFR-binding peptide
PTELNAISMLYFDEYDKVVLKKYREM

SEQ ID NO: 46177 - protein, 28 aa, Artificial Sequence
  Cyclic GFR-binding peptide
VPQALNAISILYFVGRKPKVLKKYRMIV

SEQ ID NO: 46178 - protein, 37 aa, Artificial Sequence; identical to SEQ ID NO: 7057
  Cyclic GFR-binding peptide
  MOD_RES (5)..(6)..(37): Xaa is C or S

SEQ ID NO: 46179 - protein, 29 aa, Artificial Sequence
  Cyclic GFR-binding peptide
  MOD_RES (1)..(1): Xaa is C or S
XVPQALNAISILYFVGRKPKVLKKYRMIV

SEQ ID NO: 46180 - protein, 38 aa, Artificial Sequence; identical to SEQ ID NO: 7059
  Cyclic GFR-binding peptide
  MOD_RES (1)..(38): Xaa is C or S

SEQ ID NO: 46181 - protein, 37 aa, Artificial Sequence; identical to SEQ ID NO: 7061
  Cyclic GFR-binding peptide
  MOD_RES (3)..(4)..(35)..(37): Xaa is C or S

SEQ ID NO: 46182 - protein, 24 aa, Artificial Sequence
  Cyclic GFR-binding peptide
TELNAISMLYFDEYDKVVLKKYRE

SEQ ID NO: 46183 - protein, 30 aa, Artificial Sequence
  Cyclic GFR-binding peptide
  MOD_RES (28)..(30): Xaa is C or S
DLSATSILYYVGRTPKVLRKHRMVVKSXKX

SEQ ID NO: 46184 - protein, 40 aa, Artificial Sequence; identical to SEQ ID NO: 7063
  Cyclic GFR-binding peptide
  MOD_RES (4)..(4): Xaa is C or S

SEQ ID NO: 46185 - protein, 31 aa, Artificial Sequence
  Cyclic GFR-binding peptide
TQVQLSAISVLYLEIVRKKPIFLKNYQTLED

SEQ ID NO: 46186 - protein, 23 aa, Artificial Sequence
  Cyclic GFR-binding peptide
KLNAISVLYFDSSNNVILKKYRN

SEQ ID NO: 46187 - protein, 31 aa, Artificial Sequence
  Cyclic GFR-binding peptide
  MOD_RES (29)..(31): Xaa is C or S
KLSPISVLYKDSSNNVILKYHYNMVVKAXGX

SEQ ID NO: 46188 - protein, 33 aa, Artificial Sequence
  Cyclic GFR-binding peptide
  MOD_RES (31)..(33): Xaa is C or S
PTKLNAISVLYFDSSNNVILKKYRNMVVKAXGX

SEQ ID NO: 46189 - protein, 32 aa, Artificial Sequence; identical to SEQ ID NO: 7065
  Cyclic GFR-binding peptide
  MOD_RES (32)..(32): Xaa is C or S

SEQ ID NO: 46190 - protein, 34 aa, Artificial Sequence; identical to SEQ ID NO: 7066
  Cyclic GFR-binding peptide
  MOD_RES (1)..(33): Xaa is C or S

SEQ ID NO: 46191 - protein, 27 aa, Artificial Sequence
  Cyclic GFR-binding peptide
SAISILYLVGRKPKVLKNYQVGRKPKV

SEQ ID NO: 46192 - protein, 25 aa, Artificial Sequence
  Cyclic GFR-binding peptide
SPISMLYKDENEKVVLKYHYDMVVE

SEQ ID NO: 46193 - protein, 29 aa, Artificial Sequence
  Cyclic GFR-binding peptide
  MOD_RES (1)..(1): Xaa is C or S
XVPTELSPISMLYKDENEKVVLKYHYDMV

SEQ ID NO: 46194 - protein, 26 aa, Artificial Sequence
  Cyclic GFR-binding peptide
PTKLSAISVLYLDDMGVPTLKNYQEG

SEQ ID NO: 46195 - protein, 39 aa, Artificial Sequence; identical to SEQ ID NO: 7071
  Cyclic GFR-binding peptide
  MOD_RES (5)..(6)..(39): Xaa is C or S

SEQ ID NO: 46196 - protein, 28 aa, Artificial Sequence
  Cyclic GFR-binding peptide
  MOD_RES (1)..(1): Xaa is C or S
XAPTQLSAISVLYLDDSSNVILKNYQNM

SEQ ID NO: 46197 - protein, 32 aa, Artificial Sequence
  Cyclic GFR-binding peptide
  MOD_RES (31)..(31): Xaa is C or S
TKLNAISVLYFDDMGVPTLKKYREGMSVAEXG

SEQ ID NO: 46198 - protein, 27 aa, Artificial Sequence
  Cyclic GFR-binding peptide
  MOD_RES (2)..(2): Xaa is C or S
TXAPTKLSAISVLYLDDSSNVILKNYQ

SEQ ID NO: 46199 - protein, 30 aa, Artificial Sequence
  Cyclic GFR-binding peptide
  MOD_RES (30)..(30): Xaa is C or S
PQDLSPISILYKVGRTPKVLKYHYMVVKSX

SEQ ID NO: 46200 - protein, 33 aa, Artificial Sequence
  Cyclic GFR-binding peptide
  MOD_RES (30)..(32): Xaa is C or S
SQDLSPISILYKIGKTPKILKYHYMIVKSXKXS

SEQ ID NO: 46201 - protein, 36 aa, Artificial Sequence; identical to SEQ ID NO: 7074
  Cyclic GFR-binding peptide
  MOD_RES (1)..(1): Xaa is C or S

SEQ ID NO: 46202 - protein, 27 aa, Artificial Sequence
  Cyclic GFR-binding peptide
SAISVLYLDDMGVPTLKNYQDDMGVPT

SEQ ID NO: 46203 - protein, 33 aa, Artificial Sequence; identical to SEQ ID NO: 7075
  Cyclic GFR-binding peptide
  MOD_RES (1)..(2)..(33): Xaa is C or S

SEQ ID NO: 46204 - protein, 35 aa, Artificial Sequence
  Cyclic GFR-binding peptide
  MOD_RES (5)..(6): Xaa is C or S
IPKAXXVPTELSPISMLYKDEYDKVVLKYHYEMVV

SEQ ID NO: 46205 - protein, 37 aa, Artificial Sequence; identical to SEQ ID NO: 7076
  Cyclic GFR-binding peptide
  MOD_RES (1)..(2)..(35)..(37): Xaa is C or S

SEQ ID NO: 46206 - protein, 24 aa, Artificial Sequence
  Cyclic GFR-binding peptide
PTQLSAISVLYLDDSSNVILKNYQ

SEQ ID NO: 46207 - protein, 28 aa, Artificial Sequence
  Cyclic GFR-binding peptide
LSAISVLYLDDMGVPTLKNYQEGMSVAE

SEQ ID NO: 46208 - protein, 29 aa, Artificial Sequence
  Cyclic GFR-binding peptide
  MOD_RES (3)..(4): Xaa is C or S
KAXXVPTKLSATSVLYYDDMGVPTLRKHR

SEQ ID NO: 46209 - protein, 36 aa, Artificial Sequence
  Cyclic GFR-binding peptide
  MOD_RES (6)..(7): Xaa is C or S
TVPKPXXAPTQLSAISVLYLDDSSNVILKNYQNMVV

SEQ ID NO: 46210 - protein, 41 aa, Artificial Sequence; identical to SEQ ID NO: 7080
  Cyclic GFR-binding peptide
  MOD_RES (3)..(40): Xaa is C or S

SEQ ID NO: 46211 - protein, 32 aa, Artificial Sequence
  Cyclic GFR-binding peptide
  MOD_RES (29)..(31): Xaa is C or S
QLSPISVLYKDDSSNVILKYHYNMVVRAXGXH

SEQ ID NO: 46212 - protein, 30 aa, Artificial Sequence
  Cyclic GFR-binding peptide
  MOD_RES (2)..(3): Xaa is C or S
PXXVSQDLSAISILYLIGKTPKILKNYQMI

SEQ ID NO: 46213 - protein, 32 aa, Artificial Sequence
  Cyclic GFR-binding peptide
  MOD_RES (5)..(6): Xaa is C or S
IPKAXXVPTELSPISMLYKDEYDKVVLKYHYE

SEQ ID NO: 46214 - protein, 34 aa, Artificial Sequence
  Cyclic GFR-binding peptide
  MOD_RES (5)..(6): Xaa is C or S
IPKAXXVPTELNAISMLYFDENEKVVLKKYRDMV

SEQ ID NO: 46215 - protein, 38 aa, Artificial Sequence; identical to SEQ ID NO: 7087
  Cyclic GFR-binding peptide
  MOD_RES (2)..(3)..(35)..(37): Xaa is C or S

SEQ ID NO: 46216 - protein, 35 aa, Artificial Sequence; identical to SEQ ID NO: 7089
  Cyclic GFR-binding peptide
  MOD_RES (2)..(34): Xaa is C or S

SEQ ID NO: 46217 - protein, 34 aa, Artificial Sequence; identical to SEQ ID NO: 7090
  Cyclic GFR-binding peptide
  MOD_RES (4)..(4): Xaa is C or S

SEQ ID NO: 46218 - protein, 28 aa, Artificial Sequence
  Cyclic GFR-binding peptide
  MOD_RES (1)..(2): Xaa is C or S
XXAPTQLSATSVLYYDDSSNVILRKHRN

SEQ ID NO: 46219 - protein, 26 aa, Artificial Sequence
  Cyclic GFR-binding peptide
VPTKLSAISVLYLDDMGVPTLKNYQE

SEQ ID NO: 46220 - protein, 32 aa, Artificial Sequence; identical to SEQ ID NO: 7093
  Cyclic GFR-binding peptide
  MOD_RES (31)..(31): Xaa is C or S

SEQ ID NO: 46221 - protein, 45 aa, Artificial Sequence; identical to SEQ ID NO: 7094
  Cyclic GFR-binding peptide
  MOD_RES (5)..(42)..(44): Xaa is C or S

SEQ ID NO: 46222 - protein, 23 aa, Artificial Sequence
  Cyclic GFR-binding peptide
LSAISVLYLDDMGVPTLKNYQEG

SEQ ID NO: 46223 - protein, 35 aa, Artificial Sequence; identical to SEQ ID NO: 7095
  Cyclic GFR-binding peptide
  MOD_RES (3)..(4)..(35): Xaa is C or S

SEQ ID NO: 46224 - protein, 31 aa, Artificial Sequence
  Cyclic GFR-binding peptide
PTQVQLSAISVLYLEIVRKKPIFLKNYQTLE

SEQ ID NO: 46225 - protein, 22 aa, Artificial Sequence
  Cyclic GFR-binding peptide
ELSPISMLYKDENEKVVLKYHY

SEQ ID NO: 46226 - protein, 31 aa, Artificial Sequence
  Cyclic GFR-binding peptide
  MOD_RES (29)..(31): Xaa is C or S
KLSAISVLYLDDSSNVILKNYQNMVVRSXGX

SEQ ID NO: 46227 - protein, 35 aa, Artificial Sequence; identical to SEQ ID NO: 7096
  Cyclic GFR-binding peptide
  MOD_RES (3)..(4): Xaa is C or S

SEQ ID NO: 46228 - protein, 35 aa, Artificial Sequence; identical to SEQ ID NO: 7100
  Cyclic GFR-binding peptide
  MOD_RES (3)..(4): Xaa is C or S

SEQ ID NO: 46229 - protein, 33 aa, Artificial Sequence
  Cyclic GFR-binding peptide
  MOD_RES (6)..(7): Xaa is C or S
SIPKAXXVPTELNAISMLYFDEYDKVVLKKYRE

SEQ ID NO: 46230 - protein, 33 aa, Artificial Sequence; identical to SEQ ID NO: 7101
  Cyclic GFR-binding peptide

SEQ ID NO: 46231 - protein, 30 aa, Artificial Sequence
  Cyclic GFR-binding peptide
  MOD_RES (4)..(5): Xaa is C or S
PKPXXAPTQLSAISVLYLDDSSNVILKNYQ

SEQ ID NO: 46232 - protein, 30 aa, Artificial Sequence
  Cyclic GFR-binding peptide
  MOD_RES (29)..(29): Xaa is C or S
ELSATSMLYYDEYDKVVLRKHREMVVEGXG

SEQ ID NO: 46233 - protein, 29 aa, Artificial Sequence
  Cyclic GFR-binding peptide
  MOD_RES (1)..(2): Xaa is C or S
XXVPTKLSATSVLYYDDMGVPTLRKHREG

SEQ ID NO: 46234 - protein, 43 aa, Artificial Sequence; identical to SEQ ID NO: 7104
  Cyclic GFR-binding peptide
  MOD_RES (3)..(40)..(42): Xaa is C or S

SEQ ID NO: 46235 - protein, 26 aa, Artificial Sequence
  Cyclic GFR-binding peptide
LNAISVLYFDDMGVPTLKKYREGMSV

SEQ ID NO: 46236 - protein, 31 aa, Artificial Sequence
  Cyclic GFR-binding peptide
  MOD_RES (3)..(4): Xaa is C or S
SPXXVPQDLNAISILYFVGRTPKVLKKYRMV

SEQ ID NO: 46237 - protein, 37 aa, Artificial Sequence; identical to SEQ ID NO: 7105
  Cyclic GFR-binding peptide
  MOD_RES (5)..(6)..(37): Xaa is C or S

SEQ ID NO: 46238 - protein, 22 aa, Artificial Sequence
  Cyclic GFR-binding peptide
LNAISMLYFDEYDKVVLKKYRE

SEQ ID NO: 46239 - protein, 25 aa, Artificial Sequence
  Cyclic GFR-binding peptide
LNAISVLYFDSSNNVILKKYRNMVV

SEQ ID NO: 46240 - protein, 27 aa, Artificial Sequence
  Cyclic GFR-binding peptide
  MOD_RES (26)..(26): Xaa is C or S
SATSILYYVGRKPKVLRKHRMIVRSXK

SEQ ID NO: 46241 - protein, 30 aa, Artificial Sequence
  Cyclic GFR-binding peptide
  MOD_RES (2)..(3): Xaa is C or S
PXXAPTQLSATSVLYYDDSSNVILRKHRNM

SEQ ID NO: 46242 - protein, 38 aa, Artificial Sequence
  Cyclic GFR-binding peptide
  MOD_RES (5)..(5): Xaa is C or S
RNVQXRPTQVQLSATSVLYYEIVRKKPIFLRKHRTLED

SEQ ID NO: 46243 - protein, 28 aa, Artificial Sequence
  Cyclic GFR-binding peptide
LNAISVLYFDDMGVPTLKKYREGMSVAE

SEQ ID NO: 46244 - protein, 23 aa, Artificial Sequence
  Cyclic GFR-binding peptide
NAISILYFVGRKPKVLKKYRMIV

SEQ ID NO: 46245 - protein, 38 aa, Artificial Sequence; identical to SEQ ID NO: 7110
  Cyclic GFR-binding peptide
  MOD_RES (4)..(5)..(36)..(38): Xaa is C or S

SEQ ID NO: 46246 - protein, 30 aa, Artificial Sequence; identical to SEQ ID NO: 7113
  Cyclic GFR-binding peptide

SEQ ID NO: 46247 - protein, 24 aa, Artificial Sequence
  Cyclic GFR-binding peptide
PTELSPISMLYKDEYDKVVLKYHY

SEQ ID NO: 46248 - protein, 39 aa, Artificial Sequence; identical to SEQ ID NO: 7116
  Cyclic GFR-binding peptide
  MOD_RES (6)..(38): Xaa is C or S

SEQ ID NO: 46249 - protein, 35 aa, Artificial Sequence; identical to SEQ ID NO: 7117
  Cyclic GFR-binding peptide
  MOD_RES (4)..(4): Xaa is C or S

SEQ ID NO: 46250 - protein, 38 aa, Artificial Sequence; identical to SEQ ID NO: 7118
  Cyclic GFR-binding peptide
  MOD_RES (2)..(3)..(35)..(37): Xaa is C or S

SEQ ID NO: 46251 - protein, 41 aa, Artificial Sequence; identical to SEQ ID NO: 7119
  Cyclic GFR-binding peptide
  MOD_RES (4)..(41): Xaa is C or S

SEQ ID NO: 46252 - protein, 30 aa, Artificial Sequence
  Cyclic GFR-binding peptide
LSATSVLYYEIVRKKPIFLRKHRTLEDHLA

SEQ ID NO: 46253 - protein, 28 aa, Artificial Sequence
  Cyclic GFR-binding peptide
TELSPISMLYKDENEKVVLKYHYDMVVE

SEQ ID NO: 46254 - protein, 29 aa, Artificial Sequence
  Cyclic GFR-binding peptide
  MOD_RES (27)..(29): Xaa is C or S
LNAISILYFVGRTPKVLKKYRMVVKSXKX

SEQ ID NO: 46255 - protein, 28 aa, Artificial Sequence
  Cyclic GFR-binding peptide
  MOD_RES (28)..(28): Xaa is C or S
DLNAISILYFIGKTPKILKKYRMIVKSX

SEQ ID NO: 46256 - protein, 40 aa, Artificial Sequence; identical to SEQ ID NO: 7122
  Cyclic GFR-binding peptide
  MOD_RES (6)..(7)..(38)..(40): Xaa is C or S

SEQ ID NO: 46257 - protein, 38 aa, Artificial Sequence; identical to SEQ ID NO: 7123
  Cyclic GFR-binding peptide
  MOD_RES (5)..(6)..(38): Xaa is C or S

SEQ ID NO: 46258 - protein, 38 aa, Artificial Sequence; identical to SEQ ID NO: 7125
  Cyclic GFR-binding peptide
  MOD_RES (6)..(7)..(38): Xaa is C or S

SEQ ID NO: 46259 - protein, 27 aa, Artificial Sequence
  Cyclic GFR-binding peptide
PTELSPISMLYKDENEKVVLKYHYDMV

SEQ ID NO: 46260 - protein, 35 aa, Artificial Sequence
  Cyclic GFR-binding peptide
  MOD_RES (6)..(7): Xaa is C or S
YVPKPXXAPTKLSATSVLYYDDSSNVILRKHRNMV

SEQ ID NO: 46261 - protein, 39 aa, Artificial Sequence; identical to SEQ ID NO: 7128
  Cyclic GFR-binding peptide
  MOD_RES (5)..(6)..(37)..(39): Xaa is C or S

SEQ ID NO: 46262 - protein, 38 aa, Artificial Sequence; identical to SEQ ID NO: 7129
  Cyclic GFR-binding peptide
  MOD_RES (3)..(4)..(37): Xaa is C or S

SEQ ID NO: 46263 - protein, 26 aa, Artificial Sequence
  Cyclic GFR-binding peptide
PTKLNAISVLYFDDMGVPTLKKYREG

SEQ ID NO: 46264 - protein, 26 aa, Artificial Sequence
  Cyclic GFR-binding peptide
SAISVLYLDDSSNVILKNYQNMVVRS

SEQ ID NO: 46265 - protein, 31 aa, Artificial Sequence
  Cyclic GFR-binding peptide
  MOD_RES (2)..(3): Xaa is C or S
PXXVSQDLSATSILYYIGKTPKILRKHRMIV

SEQ ID NO: 46266 - protein, 27 aa, Artificial Sequence
  Cyclic GFR-binding peptide
APTKLSPISVLYKDDSSNVILKYHYNM

SEQ ID NO: 46267 - protein, 33 aa, Artificial Sequence
  Cyclic GFR-binding peptide
  MOD_RES (4)..(4): Xaa is C or S
KPTXAPTKLSPISVLYKDDSSNVILKYHYNMVV

SEQ ID NO: 46268 - protein, 29 aa, Artificial Sequence
  Cyclic GFR-binding peptide
  MOD_RES (2)..(3): Xaa is C or S
PXXVPQALSATSILYYVGRKPKVLRKHRM

SEQ ID NO: 46269 - protein, 29 aa, Artificial Sequence
  Cyclic GFR-binding peptide
  MOD_RES (27)..(29): Xaa is C or S
SATSMLYYDEYDKVVLRKHREMVVEGXGX

SEQ ID NO: 46270 - protein, 34 aa, Artificial Sequence; identical to SEQ ID NO: 7131
  Cyclic GFR-binding peptide
  MOD_RES (3)..(4): Xaa is C or S

SEQ ID NO: 46271 - protein, 38 aa, Artificial Sequence; identical to SEQ ID NO: 7134
  Cyclic GFR-binding peptide
  MOD_RES (4)..(5)..(36)..(38): Xaa is C or S

SEQ ID NO: 46272 - protein, 30 aa, Artificial Sequence
  Cyclic GFR-binding peptide
LSAISVLYLEIVRKKPIFLKNYQTLEDHLA

SEQ ID NO: 46273 - protein, 37 aa, Artificial Sequence; identical to SEQ ID NO: 7137
  Cyclic GFR-binding peptide
  MOD_RES (4)..(5)..(37): Xaa is C or S

SEQ ID NO: 46274 - protein, 37 aa, Artificial Sequence; identical to SEQ ID NO: 7140
  Cyclic GFR-binding peptide
  MOD_RES (5)..(37): Xaa is C or S

SEQ ID NO: 46275 - protein, 31 aa, Artificial Sequence
  Cyclic GFR-binding peptide
  MOD_RES (28)..(30): Xaa is C or S
DLNAISILYFIGKTPKILKKYRMIVKSXKXS

SEQ ID NO: 46276 - protein, 32 aa, Artificial Sequence
  Cyclic GFR-binding peptide
  MOD_RES (4)..(5): Xaa is C or S
PKAXXVPTELSPISMLYKDENEKVVLKYHYDM

SEQ ID NO: 46277 - protein, 24 aa, Artificial Sequence
  Cyclic GFR-binding peptide
TQLSPISVLYKDDSSNVILKYHYN

SEQ ID NO: 46278 - protein, 36 aa, Artificial Sequence; identical to SEQ ID NO: 7141
  Cyclic GFR-binding peptide
  MOD_RES (1)..(2)..(33)..(35): Xaa is C or S

SEQ ID NO: 46279 - protein, 34 aa, Artificial Sequence
  Cyclic GFR-binding peptide
  MOD_RES (31)..(33): Xaa is C or S
PTELSPISMLYKDENEKVVLKYHYDMVVEGXGXR

SEQ ID NO: 46280 - protein, 36 aa, Artificial Sequence; identical to SEQ ID NO: 7142
  Cyclic GFR-binding peptide
  MOD_RES (3)..(4)..(36): Xaa is C or S

SEQ ID NO: 46281 - protein, 32 aa, Artificial Sequence
  Cyclic GFR-binding peptide
  MOD_RES (1)..(1): Xaa is C or S
XRPTQVQLSPISVLYKEIVRKKPIFLKYHYTL

SEQ ID NO: 46282 - protein, 37 aa, Artificial Sequence; identical to SEQ ID NO: 7143
  Cyclic GFR-binding peptide
  MOD_RES (35)..(37): Xaa is C or S

SEQ ID NO: 46283 - protein, 24 aa, Artificial Sequence
  Cyclic GFR-binding peptide
ELSATSMLYYDENEKVVLRKHRDM

SEQ ID NO: 46284 - protein, 36 aa, Artificial Sequence; identical to SEQ ID NO: 7144
  Cyclic GFR-binding peptide
  MOD_RES (5)..(6): Xaa is C or S

SEQ ID NO: 46285 - protein, 37 aa, Artificial Sequence; identical to SEQ ID NO: 7146
  Cyclic GFR-binding peptide
  MOD_RES (1)..(2)..(34)..(36): Xaa is C or S

SEQ ID NO: 46286 - protein, 35 aa, Artificial Sequence; identical to SEQ ID NO: 7147
  Cyclic GFR-binding peptide
  MOD_RES (3)..(4)..(35): Xaa is C or S

SEQ ID NO: 46287 - protein, 35 aa, Artificial Sequence; identical to SEQ ID NO: 7148
  Cyclic GFR-binding peptide
  MOD_RES (4)..(5): Xaa is C or S

SEQ ID NO: 46288 - protein, 35 aa, Artificial Sequence; identical to SEQ ID NO: 7149
  Cyclic GFR-binding peptide

SEQ ID NO: 46289 - protein, 37 aa, Artificial Sequence; identical to SEQ ID NO: 7151
  Cyclic GFR-binding peptide
  MOD_RES (5)..(6)..(37): Xaa is C or S

SEQ ID NO: 46290 - protein, 39 aa, Artificial Sequence; identical to SEQ ID NO: 7153
  Cyclic GFR-binding peptide
  MOD_RES (2)..(3)..(36)..(38): Xaa is C or S

SEQ ID NO: 46291 - protein, 34 aa, Artificial Sequence
  Cyclic GFR-binding peptide
  MOD_RES (4)..(4): Xaa is C or S
NVQXRPTQVQLSATSVLYYEIVRKKPIFLRKHRT

SEQ ID NO: 46292 - protein, 37 aa, Artificial Sequence; identical to SEQ ID NO: 7155
  Cyclic GFR-binding peptide
  MOD_RES (4)..(5)..(37): Xaa is C or S

SEQ ID NO: 46293 - protein, 26 aa, Artificial Sequence
  Cyclic GFR-binding peptide
LSATSVLYYDDMGVPTLRKHREGMSV

SEQ ID NO: 46294 - protein, 28 aa, Artificial Sequence
  Cyclic GFR-binding peptide
VPTELSPISMLYKDENEKVVLKYHYDMV

SEQ ID NO: 46295 - protein, 31 aa, Artificial Sequence
  Cyclic GFR-binding peptide
  MOD_RES (2)..(3): Xaa is C or S
PXXAPTQLSATSVLYYDDSSNVILRKHRNMV

SEQ ID NO: 46296 - protein, 29 aa, Artificial Sequence
  Cyclic GFR-binding peptide
TKLSAISVLYLDDMGVPTLKNYQEGMSVA

SEQ ID NO: 46297 - protein, 42 aa, Artificial Sequence; identical to SEQ ID NO: 7158
  Cyclic GFR-binding peptide
  MOD_RES (6)..(7)..(39)..(41): Xaa is C or S

SEQ ID NO: 46298 - protein, 38 aa, Artificial Sequence; identical to SEQ ID NO: 7159
  Cyclic GFR-binding peptide
  MOD_RES (4)..(5)..(37): Xaa is C or S

SEQ ID NO: 46299 - protein, 39 aa, Artificial Sequence; identical to SEQ ID NO: 7160
  Cyclic GFR-binding peptide
  MOD_RES (5)..(6)..(38): Xaa is C or S

SEQ ID NO: 46300 - protein, 38 aa, Artificial Sequence; identical to SEQ ID NO: 7162
  Cyclic GFR-binding peptide
  MOD_RES (4)..(5)..(36)..(38): Xaa is C or S

SEQ ID NO: 46301 - protein, 21 aa, Artificial Sequence
  Cyclic GFR-binding peptide
SPISVLYKDDSSNVILKYHYN

SEQ ID NO: 46302 - protein, 35 aa, Artificial Sequence; identical to SEQ ID NO: 7165
  Cyclic GFR-binding peptide
  MOD_RES (3)..(4)..(35): Xaa is C or S

SEQ ID NO: 46303 - protein, 27 aa, Artificial Sequence
  Cyclic GFR-binding peptide
PQALNAISILYFVGRKPKVLKKYRMIV

SEQ ID NO: 46304 - protein, 37 aa, Artificial Sequence; identical to SEQ ID NO: 7169
  Cyclic GFR-binding peptide
  MOD_RES (1)..(2)..(34)..(36): Xaa is C or S

SEQ ID NO: 46305 - protein, 35 aa, Artificial Sequence
  Cyclic GFR-binding peptide
  MOD_RES (6)..(7): Xaa is C or S
SIPKAXXVPTELSPISMLYKDEYDKVVLKYHYEMV

SEQ ID NO: 46306 - protein, 24 aa, Artificial Sequence
  Cyclic GFR-binding peptide
SPISVLYKDSSNNVILKYHYNMVV

SEQ ID NO: 46307 - protein, 34 aa, Artificial Sequence
  Cyclic GFR-binding peptide
  MOD_RES (3)..(3): Xaa is C or S
VQXRPTQVQLNAISVLYFEIVRKKPIFLKKYRTL

SEQ ID NO: 46308 - protein, 29 aa, Artificial Sequence
  Cyclic GFR-binding peptide
  MOD_RES (28)..(28): Xaa is C or S
NAISVLYFDDMGVPTLKKYREGMSVAEXG

SEQ ID NO: 46309 - protein, 34 aa, Artificial Sequence
  Cyclic GFR-binding peptide
  MOD_RES (5)..(6): Xaa is C or S
IPKAXXVPTELSATSMLYYDENEKVVLRKHRDMV

SEQ ID NO: 46310 - protein, 35 aa, Artificial Sequence; identical to SEQ ID NO: 7171
  Cyclic GFR-binding peptide
  MOD_RES (1)..(33)..(35): Xaa is C or S

SEQ ID NO: 46311 - protein, 32 aa, Artificial Sequence; identical to SEQ ID NO: 7173
  Cyclic GFR-binding peptide
  MOD_RES (31)..(31): Xaa is C or S

SEQ ID NO: 46312 - protein, 29 aa, Artificial Sequence
  Cyclic GFR-binding peptide
LSPISVLYKEIVRKKPIFLKYHYTLEDHL

SEQ ID NO: 46313 - protein, 29 aa, Artificial Sequence
  Cyclic GFR-binding peptide
  MOD_RES (27)..(29): Xaa is C or S
SPISVLYKDDSSNVILKYHYNMVVRAXGX

SEQ ID NO: 46314 - protein, 26 aa, Artificial Sequence
  Cyclic GFR-binding peptide
SAISVLYLDDSSNVILKNYQNMVVRA

SEQ ID NO: 46315 - protein, 31 aa, Artificial Sequence
  Cyclic GFR-binding peptide
  MOD_RES (2)..(2): Xaa is C or S
TXAPTKLSATSVLYYDDSSNVILRKHRNMVV

SEQ ID NO: 46316 - protein, 27 aa, Artificial Sequence
  Cyclic GFR-binding peptide
LSPISVLYKEIVRKKPIFLKYHYTLED

SEQ ID NO: 46317 - protein, 32 aa, Artificial Sequence
  Cyclic GFR-binding peptide
  MOD_RES (6)..(7): Xaa is C or S
ASASPXXVPQDLSPISILYKVGRTPKVLKYHY

SEQ ID NO: 46318 - protein, 36 aa, Artificial Sequence; identical to SEQ ID NO: 7175
  Cyclic GFR-binding peptide
  MOD_RES (5)..(6): Xaa is C or S

SEQ ID NO: 46319 - protein, 35 aa, Artificial Sequence; identical to SEQ ID NO: 7176
  Cyclic GFR-binding peptide
  MOD_RES (2)..(3)..(35): Xaa is C or S

SEQ ID NO: 46320 - protein, 39 aa, Artificial Sequence; identical to SEQ ID NO: 7177
  Cyclic GFR-binding peptide
  MOD_RES (4)..(36)..(38): Xaa is C or S

SEQ ID NO: 46321 - protein, 24 aa, Artificial Sequence
  Cyclic GFR-binding peptide
KLSPISVLYKDDSSNVILKYHYNM

SEQ ID NO: 46322 - protein, 42 aa, Artificial Sequence; identical to SEQ ID NO: 7179
  Cyclic GFR-binding peptide
  MOD_RES (6)..(7)..(39)..(41): Xaa is C or S

SEQ ID NO: 46323 - protein, 31 aa, Artificial Sequence
  Cyclic GFR-binding peptide
  MOD_RES (3)..(4): Xaa is C or S
SPXXVSQDLSAISILYLIGKTPKILKNYQMI

SEQ ID NO: 46324 - protein, 36 aa, Artificial Sequence
  Cyclic GFR-binding peptide
  MOD_RES (6)..(7): Xaa is C or S
AVPKAXXAPTKLSPISVLYKDSSNNVILKYHYNMVV

SEQ ID NO: 46325 - protein, 33 aa, Artificial Sequence
  Cyclic GFR-binding peptide
  MOD_RES (5)..(6): Xaa is C or S
SAAPXXVPQALSPISILYKVGRKPKVLKYHYMI

SEQ ID NO: 46326 - protein, 40 aa, Artificial Sequence; identical to SEQ ID NO: 7180
  Cyclic GFR-binding peptide
  MOD_RES (6)..(7)..(39): Xaa is C or S

SEQ ID NO: 46327 - protein, 27 aa, Artificial Sequence
  Cyclic GFR-binding peptide
QVQLSAISVLYLEIVRKKPIFLKNYQT

SEQ ID NO: 46328 - protein, 27 aa, Artificial Sequence
  Cyclic GFR-binding peptide
VPTELNAISMLYFDEYDKVVLKKYREM

SEQ ID NO: 46329 - protein, 37 aa, Artificial Sequence; identical to SEQ ID NO: 7181
  Cyclic GFR-binding peptide
  MOD_RES (1)..(2)..(34)..(36): Xaa is C or S

SEQ ID NO: 46330 - protein, 29 aa, Artificial Sequence
  Cyclic GFR-binding peptide
  MOD_RES (1)..(2): Xaa is C or S
XXAPTKLSAISVLYLDDSSNVILKNYQNM

SEQ ID NO: 46331 - protein, 35 aa, Artificial Sequence; identical to SEQ ID NO: 7182
  Cyclic GFR-binding peptide
  MOD_RES (4)..(5): Xaa is C or S

SEQ ID NO: 46332 - protein, 42 aa, Artificial Sequence; identical to SEQ ID NO: 7184
  Cyclic GFR-binding peptide
  MOD_RES (4)..(41): Xaa is C or S

SEQ ID NO: 46333 - protein, 37 aa, Artificial Sequence; identical to SEQ ID NO: 7185
  Cyclic GFR-binding peptide
  MOD_RES (5)..(6)..(37): Xaa is C or S

SEQ ID NO: 46334 - protein, 30 aa, Artificial Sequence
  Cyclic GFR-binding peptide
  MOD_RES (3)..(4): Xaa is C or S
KAXXVPTELSATSMLYYDEYDKVVLRKHRE

SEQ ID NO: 46335 - protein, 30 aa, Artificial Sequence
  Cyclic GFR-binding peptide
PTELNAISMLYFDEYDKVVLKKYREMVVEG

SEQ ID NO: 46336 - protein, 40 aa, Artificial Sequence; identical to SEQ ID NO: 7186
  Cyclic GFR-binding peptide
  MOD_RES (4)..(4): Xaa is C or S

SEQ ID NO: 46337 - protein, 33 aa, Artificial Sequence
  Cyclic GFR-binding peptide
  MOD_RES (2)..(3): Xaa is C or S
AXXVPTKLSAISVLYLDDMGVPTLKNYQEGMSV

SEQ ID NO: 46338 - protein, 32 aa, Artificial Sequence
  Cyclic GFR-binding peptide
  MOD_RES (30)..(32): Xaa is C or S
SPISVLYKEIVRKKPIFLKYHYTLEDHLAXKX

SEQ ID NO: 46339 - protein, 34 aa, Artificial Sequence; identical to SEQ ID NO: 7188
  Cyclic GFR-binding peptide
  MOD_RES (1)..(2): Xaa is C or S

SEQ ID NO: 46340 - protein, 32 aa, Artificial Sequence
  Cyclic GFR-binding peptide
  MOD_RES (5)..(6): Xaa is C or S
IPKAXXVPTELSATSMLYYDENEKVVLRKHRD

SEQ ID NO: 46341 - protein, 35 aa, Artificial Sequence
  Cyclic GFR-binding peptide
  MOD_RES (32)..(34): Xaa is C or S
QLNAISVLYFEIVRKKPIFLKKYRTLEDHLAXKXE

SEQ ID NO: 46342 - protein, 30 aa, Artificial Sequence
  Cyclic GFR-binding peptide
  MOD_RES (2)..(3): Xaa is C or S
AXXAPTKLNAISVLYFDSSNNVILKKYRNM

SEQ ID NO: 46343 - protein, 26 aa, Artificial Sequence
  Cyclic GFR-binding peptide
VPQALSAISILYLVGRKPKVLKNYQM

SEQ ID NO: 46344 - protein, 35 aa, Artificial Sequence; identical to SEQ ID NO: 7189
  Cyclic GFR-binding peptide
  MOD_RES (3)..(4): Xaa is C or S

SEQ ID NO: 46345 - protein, 29 aa, Artificial Sequence
  Cyclic GFR-binding peptide
  MOD_RES (3)..(4): Xaa is C or S
SPXXVSQDLSATSILYYIGKTPKILRKHR

SEQ ID NO: 46346 - protein, 28 aa, Artificial Sequence
  Cyclic GFR-binding peptide
QDLSATSILYYIGKTPKILRKHRMIVKS

SEQ ID NO: 46347 - protein, 27 aa, Artificial Sequence
  Cyclic GFR-binding peptide
  MOD_RES (1)..(1): Xaa is C or S
XAPTQLSATSVLYYDDSSNVILRKHRN

SEQ ID NO: 46348 - protein, 28 aa, Artificial Sequence
  Cyclic GFR-binding peptide
  MOD_RES (2)..(3): Xaa is C or S
AXXVPTELSPISMLYKDEYDKVVLKYHY

SEQ ID NO: 46349 - protein, 28 aa, Artificial Sequence
  Cyclic GFR-binding peptide
  MOD_RES (28)..(28): Xaa is C or S
LSAISVLYLDSSNNVILKNYQNMVVKAX

SEQ ID NO: 46350 - protein, 27 aa, Artificial Sequence
  Cyclic GFR-binding peptide
  MOD_RES (1)..(1): Xaa is C or S
XVPQDLSATSILYYVGRTPKVLRKHRM

SEQ ID NO: 46351 - protein, 28 aa, Artificial Sequence
  Cyclic GFR-binding peptide
  MOD_RES (27)..(27): Xaa is C or S
SPISVLYKDSSNNVILKYHYNMVVKAXG

SEQ ID NO: 46352 - protein, 38 aa, Artificial Sequence; identical to SEQ ID NO: 7195
  Cyclic GFR-binding peptide
  MOD_RES (3)..(4)..(35)..(37): Xaa is C or S

SEQ ID NO: 46353 - protein, 30 aa, Artificial Sequence
  Cyclic GFR-binding peptide
  MOD_RES (30)..(30): Xaa is C or S
KLNAISVLYFDDMGVPTLKKYREGMSVAEX

SEQ ID NO: 46354 - protein, 28 aa, Artificial Sequence
  Cyclic GFR-binding peptide
KLSATSVLYYDDSSNVILRKHRNMVVRS

SEQ ID NO: 46355 - protein, 32 aa, Artificial Sequence
  Cyclic GFR-binding peptide
  MOD_RES (4)..(5): Xaa is C or S
PKAXXVPTELSATSMLYYDEYDKVVLRKHREM

SEQ ID NO: 46356 - protein, 30 aa, Artificial Sequence
  Cyclic GFR-binding peptide
  MOD_RES (2)..(3): Xaa is C or S
PXXAPTKLSATSVLYYDDSSNVILRKHRNM

SEQ ID NO: 46357 - protein, 25 aa, Artificial Sequence
  Cyclic GFR-binding peptide
DLSATSILYYVGRTPKVLRKHRMVV

SEQ ID NO: 46358 - protein, 29 aa, Artificial Sequence
  Cyclic GFR-binding peptide
  MOD_RES (2)..(3): Xaa is C or S
PXXAPTKLSAISVLYLDDSSNVILKNYQN

SEQ ID NO: 46359 - protein, 31 aa, Artificial Sequence
  Cyclic GFR-binding peptide
  MOD_RES (28)..(30): Xaa is C or S
ALSATSILYYVGRKPKVLRKHRMIVRSXKXS

SEQ ID NO: 46360 - protein, 38 aa, Artificial Sequence; identical to SEQ ID NO: 7197
  Cyclic GFR-binding peptide
  MOD_RES (6)..(7)..(38): Xaa is C or S

SEQ ID NO: 46361 - protein, 30 aa, Artificial Sequence
  Cyclic GFR-binding peptide
PTKLSATSVLYYDDSSNVILRKHRNMVVRS

SEQ ID NO: 46362 - protein, 34 aa, Artificial Sequence; identical to SEQ ID NO: 7199
  Cyclic GFR-binding peptide
  MOD_RES (2)..(3): Xaa is C or S

SEQ ID NO: 46363 - protein, 31 aa, Artificial Sequence
  Cyclic GFR-binding peptide
  MOD_RES (30)..(30): Xaa is C or S
TELSATSMLYYDENEKVVLRKHRDMVVEGXG

SEQ ID NO: 46364 - protein, 36 aa, Artificial Sequence; identical to SEQ ID NO: 7201
  Cyclic GFR-binding peptide
  MOD_RES (5)..(6): Xaa is C or S

SEQ ID NO: 46365 - protein, 22 aa, Artificial Sequence
  Cyclic GFR-binding peptide
SPISVLYKDSSNNVILKYHYNM

SEQ ID NO: 46366 - protein, 31 aa, Artificial Sequence
  Cyclic GFR-binding peptide
  MOD_RES (3)..(4): Xaa is C or S
SPXXVPQDLSAISILYLVGRTPKVLKNYQMV

SEQ ID NO: 46367 - protein, 21 aa, Artificial Sequence
  Cyclic GFR-binding peptide
NAISILYFVGRKPKVLKKYRM

SEQ ID NO: 46368 - protein, 31 aa, Artificial Sequence
  Cyclic GFR-binding peptide
  MOD_RES (2)..(3): Xaa is C or S
PXXVPQDLSAISILYLVGRTPKVLKNYQMVV

SEQ ID NO: 46369 - protein, 27 aa, Artificial Sequence
  Cyclic GFR-binding peptide
LNAISVLYFEIVRKKPIFLKKYRTLED

SEQ ID NO: 46370 - protein, 37 aa, Artificial Sequence; identical to SEQ ID NO: 7204
  Cyclic GFR-binding peptide
  MOD_RES (3)..(4)..(36): Xaa is C or S

SEQ ID NO: 46371 - protein, 38 aa, Artificial Sequence; identical to SEQ ID NO: 7206
  Cyclic GFR-binding peptide
  MOD_RES (4)..(36)..(38): Xaa is C or S

SEQ ID NO: 46372 - protein, 30 aa, Artificial Sequence
  Cyclic GFR-binding peptide
  MOD_RES (27)..(29): Xaa is C or S
LNAISILYFVGRKPKVLKKYRMIVRSXKXS

SEQ ID NO: 46373 - protein, 35 aa, Artificial Sequence; identical to SEQ ID NO: 7208
  Cyclic GFR-binding peptide
  MOD_RES (2)..(3)..(35): Xaa is C or S

SEQ ID NO: 46374 - protein, 34 aa, Artificial Sequence
  Cyclic GFR-binding peptide
  MOD_RES (31)..(33): Xaa is C or S
PTKLSAISVLYLDDSSNVILKNYQNMVVRSXGXH

SEQ ID NO: 46375 - protein, 33 aa, Artificial Sequence; identical to SEQ ID NO: 7209
  Cyclic GFR-binding peptide
  MOD_RES (2)..(3): Xaa is C or S

SEQ ID NO: 46376 - protein, 30 aa, Artificial Sequence
  Cyclic GFR-binding peptide
  MOD_RES (3)..(4): Xaa is C or S
KAXXVPTKLSAISVLYLDDMGVPTLKNYQE

SEQ ID NO: 46377 - protein, 31 aa, Artificial Sequence
  Cyclic GFR-binding peptide
  MOD_RES (31)..(31): Xaa is C or S
TKLSATSVLYYDDMGVPTLRKHREGMSVAEX

SEQ ID NO: 46378 - protein, 41 aa, Artificial Sequence; identical to SEQ ID NO: 7210
  Cyclic GFR-binding peptide
  MOD_RES (6)..(7)..(38)..(40): Xaa is C or S

SEQ ID NO: 46379 - protein, 38 aa, Artificial Sequence; identical to SEQ ID NO: 7212
  Cyclic GFR-binding peptide
  MOD_RES (5)..(6): Xaa is C or S

SEQ ID NO: 46380 - protein, 23 aa, Artificial Sequence
  Cyclic GFR-binding peptide
SATSILYYIGKTPKILRKHRMIV

SEQ ID NO: 46381 - protein, 22 aa, Artificial Sequence
  Cyclic GFR-binding peptide
LSPISVLYKDSSNNVILKYHYN

SEQ ID NO: 46382 - protein, 34 aa, Artificial Sequence
  Cyclic GFR-binding peptide
  MOD_RES (6)..(7): Xaa is C or S
KVGKAXXVPTKLSATSVLYYDDMGVPTLRKHREG

SEQ ID NO: 46383 - protein, 34 aa, Artificial Sequence; identical to SEQ ID NO: 7213
  Cyclic GFR-binding peptide
  MOD_RES (3)..(4): Xaa is C or S

SEQ ID NO: 46384 - protein, 27 aa, Artificial Sequence
  Cyclic GFR-binding peptide
TQVQLSPISVLYKEIVRKKPIFLKYHY

SEQ ID NO: 46385 - protein, 28 aa, Artificial Sequence
  Cyclic GFR-binding peptide
ELNAISMLYFDEYDKVVLKKYREMVVEG

SEQ ID NO: 46386 - protein, 31 aa, Artificial Sequence
  Cyclic GFR-binding peptide
  MOD_RES (4)..(5): Xaa is C or S
PKAXXVPTELNAISMLYFDEYDKVVLKKYRE

SEQ ID NO: 46387 - protein, 41 aa, Artificial Sequence; identical to SEQ ID NO: 7218
  Cyclic GFR-binding peptide
  MOD_RES (1)..(38)..(40): Xaa is C or S

SEQ ID NO: 46388 - protein, 33 aa, Artificial Sequence
  Cyclic GFR-binding peptide
  MOD_RES (3)..(4): Xaa is C or S
SPXXVPQDLSATSILYYVGRTPKVLRKHRMVVK

SEQ ID NO: 46389 - protein, 34 aa, Artificial Sequence
  Cyclic GFR-binding peptide
  MOD_RES (5)..(6): Xaa is C or S
SAAPXXVPQALSATSILYYVGRKPKVLRKHRMIV

SEQ ID NO: 46390 - protein, 27 aa, Artificial Sequence
  Cyclic GFR-binding peptide
APTQLSAISVLYLDDSSNVILKNYQNM

SEQ ID NO: 46391 - protein, 30 aa, Artificial Sequence
  Cyclic GFR-binding peptide
  MOD_RES (3)..(3): Xaa is C or S
PTXAPTKLSATSVLYYDDSSNVILRKHRNM

SEQ ID NO: 46392 - protein, 38 aa, Artificial Sequence; identical to SEQ ID NO: 7225
  Cyclic GFR-binding peptide
  MOD_RES (6)..(7)..(38): Xaa is C or S

SEQ ID NO: 46393 - protein, 30 aa, Artificial Sequence
  Cyclic GFR-binding peptide
  MOD_RES (30)..(30): Xaa is C or S
SQDLSPISILYKIGKTPKILKYHYMIVKSX

SEQ ID NO: 46394 - protein, 30 aa, Artificial Sequence; identical to SEQ ID NO: 7226
  Cyclic GFR-binding peptide

SEQ ID NO: 46395 - protein, 36 aa, Artificial Sequence; identical to SEQ ID NO: 7227
  Cyclic GFR-binding peptide
  MOD_RES (1)..(1): Xaa is C or S

SEQ ID NO: 46396 - protein, 25 aa, Artificial Sequence
  Cyclic GFR-binding peptide
PTELNAISMLYFDEYDKVVLKKYRE

SEQ ID NO: 46397 - protein, 30 aa, Artificial Sequence
  Cyclic GFR-binding peptide
  MOD_RES (27)..(29): Xaa is C or S
SATSVLYYDDSSNVILRKHRNMVVRAXGXH

SEQ ID NO: 46398 - protein, 34 aa, Artificial Sequence
  Cyclic GFR-binding peptide
  MOD_RES (31)..(33): Xaa is C or S
TKLSAISVLYLDDMGVPTLKNYQEGMSVAEXGXR

SEQ ID NO: 46399 - protein, 32 aa, Artificial Sequence; identical to SEQ ID NO: 7228
  Cyclic GFR-binding peptide
  MOD_RES (1)..(32): Xaa is C or S

SEQ ID NO: 46400 - protein, 31 aa, Artificial Sequence; identical to SEQ ID NO: 7229
  Cyclic GFR-binding peptide
  MOD_RES (31)..(31): Xaa is C or S

SEQ ID NO: 46401 - protein, 23 aa, Artificial Sequence
  Cyclic GFR-binding peptide
TELNAISMLYFDEYDKVVLKKYR

SEQ ID NO: 46402 - protein, 30 aa, Artificial Sequence
  Cyclic GFR-binding peptide
  MOD_RES (4)..(5): Xaa is C or S
GKAXXVPTKLNAISVLYFDDMGVPTLKKYR

SEQ ID NO: 46403 - protein, 22 aa, Artificial Sequence
  Cyclic GFR-binding peptide
LSAISVLYLDDMGVPTLKNYQE

SEQ ID NO: 46404 - protein, 28 aa, Artificial Sequence
  Cyclic GFR-binding peptide
  MOD_RES (27)..(27): Xaa is C or S
LSAISILYLIGKTPKILKNYQMIVKSXK

SEQ ID NO: 46405 - protein, 23 aa, Artificial Sequence
  Cyclic GFR-binding peptide
SATSVLYYDDMGVPTLRKHREGM

SEQ ID NO: 46406 - protein, 30 aa, Artificial Sequence
  Cyclic GFR-binding peptide
  MOD_RES (3)..(4): Xaa is C or S
SPXXVSQDLNAISILYFIGKTPKILKKYRM

SEQ ID NO: 46407 - protein, 36 aa, Artificial Sequence; identical to SEQ ID NO: 7232
  Cyclic GFR-binding peptide
  MOD_RES (1)..(2)..(33)..(35): Xaa is C or S

SEQ ID NO: 46408 - protein, 35 aa, Artificial Sequence; identical to SEQ ID NO: 7233
  Cyclic GFR-binding peptide
  MOD_RES (1)..(32)..(34): Xaa is C or S

SEQ ID NO: 46409 - protein, 40 aa, Artificial Sequence; identical to SEQ ID NO: 7234
  Cyclic GFR-binding peptide
  MOD_RES (6)..(7)..(38)..(40): Xaa is C or S

SEQ ID NO: 46410 - protein, 34 aa, Artificial Sequence
  Cyclic GFR-binding peptide
  MOD_RES (4)..(5): Xaa is C or S
AAPXXVPQALSPISILYKVGRKPKVLKYHYMIVR

SEQ ID NO: 46411 - protein, 36 aa, Artificial Sequence
  Cyclic GFR-binding peptide
  MOD_RES (5)..(5): Xaa is C or S
RNVQXRPTQVQLSPISVLYKEIVRKKPIFLKYHYTL

SEQ ID NO: 46412 - protein, 30 aa, Artificial Sequence
  Cyclic GFR-binding peptide
  MOD_RES (29)..(29): Xaa is C or S
ELNAISMLYFDENEKVVLKKYRDMVVEGXG

SEQ ID NO: 46413 - protein, 28 aa, Artificial Sequence
  Cyclic GFR-binding peptide
  MOD_RES (27)..(27): Xaa is C or S
SPISVLYKDDSSNVILKYHYNMVVRSXG

SEQ ID NO: 46414 - protein, 34 aa, Artificial Sequence
  Cyclic GFR-binding peptide
  MOD_RES (6)..(7): Xaa is C or S
SIPKAXXVPTELSATSMLYYDEYDKVVLRKHREM

SEQ ID NO: 46415 - protein, 32 aa, Artificial Sequence
  Cyclic GFR-binding peptide
  MOD_RES (5)..(6): Xaa is C or S
VPKAXXAPTKLSAISVLYLDSSNNVILKNYQN

SEQ ID NO: 46416 - protein, 37 aa, Artificial Sequence; identical to SEQ ID NO: 7236
  Cyclic GFR-binding peptide
  MOD_RES (2)..(3)..(34)..(36): Xaa is C or S

SEQ ID NO: 46417 - protein, 31 aa, Artificial Sequence
  Cyclic GFR-binding peptide
  MOD_RES (1)..(2): Xaa is C or S
XXAPTQLSATSVLYYDDSSNVILRKHRNMVV

SEQ ID NO: 46418 - protein, 35 aa, Artificial Sequence; identical to SEQ ID NO: 7238
  Cyclic GFR-binding peptide
  MOD_RES (1)..(2)..(33)..(35): Xaa is C or S

SEQ ID NO: 46419 - protein, 30 aa, Artificial Sequence
  Cyclic GFR-binding peptide
  MOD_RES (29)..(29): Xaa is C or S
QDLSPISILYKVGRTPKVLKYHYMVVKSXK

SEQ ID NO: 46420 - protein, 36 aa, Artificial Sequence; identical to SEQ ID NO: 7240
  Cyclic GFR-binding peptide
  MOD_RES (1)..(33)..(35): Xaa is C or S

SEQ ID NO: 46421 - protein, 38 aa, Artificial Sequence; identical to SEQ ID NO: 7241
  Cyclic GFR-binding peptide
  MOD_RES (5)..(6)..(38): Xaa is C or S

SEQ ID NO: 46422 - protein, 36 aa, Artificial Sequence
  Cyclic GFR-binding peptide
  MOD_RES (4)..(4): Xaa is C or S
NVQXRPTQVQLNAISVLYFEIVRKKPIFLKKYRTLE

SEQ ID NO: 46423 - protein, 30 aa, Artificial Sequence
  Cyclic GFR-binding peptide
  MOD_RES (29)..(29): Xaa is C or S
LSAISVLYLDDMGVPTLKNYQEGMSVAEXG

SEQ ID NO: 46424 - protein, 29 aa, Artificial Sequence
  Cyclic GFR-binding peptide
  MOD_RES (28)..(28): Xaa is C or S
LSPISVLYKDDSSNVILKYHYNMVVRSXG

SEQ ID NO: 46425 - protein, 29 aa, Artificial Sequence
  Cyclic GFR-binding peptide
  MOD_RES (26)..(28): Xaa is C or S
SPISILYKVGRTPKVLKYHYMVVKSXKXS

SEQ ID NO: 46426 - protein, 25 aa, Artificial Sequence
  Cyclic GFR-binding peptide
TKLSPISVLYKDDSSNVILKYHYNM

SEQ ID NO: 46427 - protein, 29 aa, Artificial Sequence
  Cyclic GFR-binding peptide
  MOD_RES (26)..(28): Xaa is C or S
NAISILYFVGRKPKVLKKYRMIVRSXKXS

SEQ ID NO: 46428 - protein, 30 aa, Artificial Sequence; identical to SEQ ID NO: 785
  Cyclic GFR-binding peptide

SEQ ID NO: 46429 - protein, 29 aa, Artificial Sequence
  Cyclic GFR-binding peptide
  MOD_RES (1)..(1): Xaa is C or S
XAPTKLSAISVLYLDSSNNVILKNYQNMV

SEQ ID NO: 46430 - protein, 23 aa, Artificial Sequence
  Cyclic GFR-binding peptide
KLSPISVLYKDDSSNVILKYHYN

SEQ ID NO: 46431 - protein, 37 aa, Artificial Sequence; identical to SEQ ID NO: 7246
  Cyclic GFR-binding peptide
  MOD_RES (2)..(3)..(35)..(37): Xaa is C or S

SEQ ID NO: 46432 - protein, 26 aa, Artificial Sequence
  Cyclic GFR-binding peptide
SPISVLYKEIVRKKPIFLKYHYTLED

SEQ ID NO: 46433 - protein, 33 aa, Artificial Sequence
  Cyclic GFR-binding peptide
  MOD_RES (4)..(5): Xaa is C or S
GKAXXVPTKLSATSVLYYDDMGVPTLRKHREGM

SEQ ID NO: 46434 - protein, 38 aa, Artificial Sequence; identical to SEQ ID NO: 7251
  Cyclic GFR-binding peptide
  MOD_RES (3)..(4)..(37): Xaa is C or S

SEQ ID NO: 46435 - protein, 31 aa, Artificial Sequence; identical to SEQ ID NO: 7254
  Cyclic GFR-binding peptide
  MOD_RES (1)..(1): Xaa is C or S

SEQ ID NO: 46436 - protein, 33 aa, Artificial Sequence
  Cyclic GFR-binding peptide
  MOD_RES (4)..(5): Xaa is C or S
PKAXXVPTELSATSMLYYDEYDKVVLRKHREMV

SEQ ID NO: 46437 - protein, 38 aa, Artificial Sequence; identical to SEQ ID NO: 7255
  Cyclic GFR-binding peptide
  MOD_RES (6)..(38): Xaa is C or S

SEQ ID NO: 46438 - protein, 31 aa, Artificial Sequence
  Cyclic GFR-binding peptide
  MOD_RES (3)..(4): Xaa is C or S
KAXXVPTELSPISMLYKDEYDKVVLKYHYEM

SEQ ID NO: 46439 - protein, 27 aa, Artificial Sequence
  Cyclic GFR-binding peptide
ALSATSILYYVGRKPKVLRKHRMIVRS

SEQ ID NO: 46440 - protein, 35 aa, Artificial Sequence; identical to SEQ ID NO: 7256
  Cyclic GFR-binding peptide
  MOD_RES (1)..(32)..(34): Xaa is C or S

SEQ ID NO: 46441 - protein, 30 aa, Artificial Sequence
  Cyclic GFR-binding peptide
  MOD_RES (30)..(30): Xaa is C or S
SATSVLYYEIVRKKPIFLRKHRTLEDHLAX

SEQ ID NO: 46442 - protein, 29 aa, Artificial Sequence
  Cyclic GFR-binding peptide
  MOD_RES (3)..(4): Xaa is C or S
SPXXVPQDLNAISILYFVGRTPKVLKKYR

SEQ ID NO: 46443 - protein, 21 aa, Artificial Sequence
  Cyclic GFR-binding peptide
LSATSILYYIGKTPKILRKHR

SEQ ID NO: 46444 - protein, 35 aa, Artificial Sequence; identical to SEQ ID NO: 7257
  Cyclic GFR-binding peptide
  MOD_RES (1)..(33)..(35): Xaa is C or S

SEQ ID NO: 46445 - protein, 35 aa, Artificial Sequence; identical to SEQ ID NO: 7258
  Cyclic GFR-binding peptide
  MOD_RES (1)..(34): Xaa is C or S

SEQ ID NO: 46446 - protein, 37 aa, Artificial Sequence; identical to SEQ ID NO: 7259
  Cyclic GFR-binding peptide
  MOD_RES (6)..(7): Xaa is C or S

SEQ ID NO: 46447 - protein, 29 aa, Artificial Sequence
  Cyclic GFR-binding peptide
  MOD_RES (2)..(2): Xaa is C or S
TXAPTKLSAISVLYLDDSSNVILKNYQNM

SEQ ID NO: 46448 - protein, 29 aa, Artificial Sequence
  Cyclic GFR-binding peptide
  MOD_RES (2)..(3): Xaa is C or S
AXXAPTKLSPISVLYKDSSNNVILKYHYN

SEQ ID NO: 46449 - protein, 32 aa, Artificial Sequence
  Cyclic GFR-binding peptide
  MOD_RES (29)..(31): Xaa is C or S
KLSATSVLYYDDSSNVILRKHRNMVVRSXGXH

SEQ ID NO: 46450 - protein, 27 aa, Artificial Sequence
  Cyclic GFR-binding peptide
PTKLSAISVLYLDDMGVPTLKNYQEGM

SEQ ID NO: 46451 - protein, 27 aa, Artificial Sequence
  Cyclic GFR-binding peptide
  MOD_RES (27)..(27): Xaa is C or S
LNAISILYFVGRTPKVLKKYRMVVKSX

SEQ ID NO: 46452 - protein, 22 aa, Artificial Sequence
  Cyclic GFR-binding peptide
LSAISVLYLDDSSNVILKNYQN

SEQ ID NO: 46453 - protein, 26 aa, Artificial Sequence
  Cyclic GFR-binding peptide
ELSATSMLYYDEYDKVVLRKHREMVV

SEQ ID NO: 46454 - protein, 41 aa, Artificial Sequence; identical to SEQ ID NO: 7260
  Cyclic GFR-binding peptide
  MOD_RES (4)..(41): Xaa is C or S

SEQ ID NO: 46455 - protein, 28 aa, Artificial Sequence
  Cyclic GFR-binding peptide
VPTELNAISMLYFDENEKVVLKKYRDMV

SEQ ID NO: 46456 - protein, 41 aa, Artificial Sequence; identical to SEQ ID NO: 7261
  Cyclic GFR-binding peptide
  MOD_RES (5)..(6)..(38)..(40): Xaa is C or S

SEQ ID NO: 46457 - protein, 29 aa, Artificial Sequence
  Cyclic GFR-binding peptide
  MOD_RES (1)..(1): Xaa is C or S
XVPQDLSPISILYKVGRTPKVLKYHYMVV

SEQ ID NO: 46458 - protein, 26 aa, Artificial Sequence
  Cyclic GFR-binding peptide
  MOD_RES (26)..(26): Xaa is C or S
SPISILYKVGRTPKVLKYHYMVVKSX

SEQ ID NO: 46459 - protein, 27 aa, Artificial Sequence
  Cyclic GFR-binding peptide
LSATSVLYYEIVRKKPIFLRKHRTLED

SEQ ID NO: 46460 - protein, 27 aa, Artificial Sequence
  Cyclic GFR-binding peptide
  MOD_RES (26)..(26): Xaa is C or S
SPISILYKIGKTPKILKYHYMIVKSXK

SEQ ID NO: 46461 - protein, 24 aa, Artificial Sequence
  Cyclic GFR-binding peptide
LNAISILYFVGRKPKVLKKYRMIV

SEQ ID NO: 46462 - protein, 29 aa, Artificial Sequence
  Cyclic GFR-binding peptide
  MOD_RES (2)..(3): Xaa is C or S
AXXVPTELSATSMLYYDEYDKVVLRKHRE

SEQ ID NO: 46463 - protein, 37 aa, Artificial Sequence; identical to SEQ ID NO: 7263
  Cyclic GFR-binding peptide
  MOD_RES (2)..(3)..(34)..(36): Xaa is C or S

SEQ ID NO: 46464 - protein, 44 aa, Artificial Sequence; identical to SEQ ID NO: 7264
  Cyclic GFR-binding peptide
  MOD_RES (4)..(41)..(43): Xaa is C or S

SEQ ID NO: 46465 - protein, 29 aa, Artificial Sequence
  Cyclic GFR-binding peptide
  MOD_RES (1)..(1): Xaa is C or S
XAPTKLSAISVLYLDDSSNVILKNYQNMV

SEQ ID NO: 46466 - protein, 31 aa, Artificial Sequence
  Cyclic GFR-binding peptide
  MOD_RES (30)..(30): Xaa is C or S
KLSATSVLYYDDMGVPTLRKHREGMSVAEXG

SEQ ID NO: 46467 - protein, 27 aa, Artificial Sequence
  Cyclic GFR-binding peptide
QDLNAISILYFVGRTPKVLKKYRMVVK

SEQ ID NO: 46468 - protein, 29 aa, Artificial Sequence
  Cyclic GFR-binding peptide
PTELSATSMLYYDEYDKVVLRKHREMVVE

SEQ ID NO: 46469 - protein, 34 aa, Artificial Sequence; identical to SEQ ID NO: 7268
  Cyclic GFR-binding peptide
  MOD_RES (1)..(32)..(34): Xaa is C or S

SEQ ID NO: 46470 - protein, 36 aa, Artificial Sequence; identical to SEQ ID NO: 7269
  Cyclic GFR-binding peptide
  MOD_RES (3)..(4)..(35): Xaa is C or S

SEQ ID NO: 46471 - protein, 35 aa, Artificial Sequence
  Cyclic GFR-binding peptide
  MOD_RES (5)..(6): Xaa is C or S
IPKAXXVPTELNAISMLYFDEYDKVVLKKYREMVV

SEQ ID NO: 46472 - protein, 27 aa, Artificial Sequence
  Cyclic GFR-binding peptide
  MOD_RES (26)..(26): Xaa is C or S
SPISILYKVGRKPKVLKYHYMIVRSXK

SEQ ID NO: 46473 - protein, 36 aa, Artificial Sequence; identical to SEQ ID NO: 7270
  Cyclic GFR-binding peptide
  MOD_RES (1)..(2)..(35): Xaa is C or S

SEQ ID NO: 46474 - protein, 34 aa, Artificial Sequence
  Cyclic GFR-binding peptide
  MOD_RES (6)..(6): Xaa is C or S
VTKPTXAPTKLSAISVLYLDDSSNVILKNYQNMV

SEQ ID NO: 46475 - protein, 30 aa, Artificial Sequence
  Cyclic GFR-binding peptide
  MOD_RES (3)..(4): Xaa is C or S
SPXXVPQDLSAISILYLVGRTPKVLKNYQM

SEQ ID NO: 46476 - protein, 32 aa, Artificial Sequence
  Cyclic GFR-binding peptide
  MOD_RES (6)..(7): Xaa is C or S
AVPKAXXAPTKLNAISVLYFDSSNNVILKKYR

SEQ ID NO: 46477 - protein, 27 aa, Artificial Sequence
  Cyclic GFR-binding peptide
  MOD_RES (1)..(2): Xaa is C or S
XXAPTQLSATSVLYYDDSSNVILRKHR

SEQ ID NO: 46478 - protein, 34 aa, Artificial Sequence
  Cyclic GFR-binding peptide
  MOD_RES (5)..(5): Xaa is C or S
RNVQXRPTQVQLNAISVLYFEIVRKKPIFLKKYR

SEQ ID NO: 46479 - protein, 35 aa, Artificial Sequence; identical to SEQ ID NO: 7273
  Cyclic GFR-binding peptide

SEQ ID NO: 46480 - protein, 42 aa, Artificial Sequence; identical to SEQ ID NO: 7274
  Cyclic GFR-binding peptide
  MOD_RES (5)..(42): Xaa is C or S

SEQ ID NO: 46481 - protein, 34 aa, Artificial Sequence; identical to SEQ ID NO: 7276
  Cyclic GFR-binding peptide
  MOD_RES (2)..(3)..(34): Xaa is C or S

SEQ ID NO: 46482 - protein, 29 aa, Artificial Sequence
  Cyclic GFR-binding peptide
TELSPISMLYKDENEKVVLKYHYDMVVEG

SEQ ID NO: 46483 - protein, 28 aa, Artificial Sequence
  Cyclic GFR-binding peptide
  MOD_RES (2)..(3): Xaa is C or S
AXXVPTELNAISMLYFDENEKVVLKKYR

SEQ ID NO: 46484 - protein, 31 aa, Artificial Sequence
  Cyclic GFR-binding peptide
  MOD_RES (3)..(4): Xaa is C or S
KAXXVPTELSATSMLYYDEYDKVVLRKHREM

SEQ ID NO: 46485 - protein, 27 aa, Artificial Sequence
  Cyclic GFR-binding peptide
  MOD_RES (1)..(2): Xaa is C or S
XXAPTKLSPISVLYKDSSNNVILKYHY

SEQ ID NO: 46486 - protein, 42 aa, Artificial Sequence; identical to SEQ ID NO: 7278
  Cyclic GFR-binding peptide
  MOD_RES (5)..(6)..(39)..(41): Xaa is C or S

SEQ ID NO: 46487 - protein, 29 aa, Artificial Sequence
  Cyclic GFR-binding peptide
  MOD_RES (2)..(3): Xaa is C or S
AXXVPTKLNAISVLYFDDMGVPTLKKYRE

SEQ ID NO: 46488 - protein, 32 aa, Artificial Sequence
  Cyclic GFR-binding peptide
  MOD_RES (4)..(5): Xaa is C or S
PKPXXAPTQLSPISVLYKDDSSNVILKYHYNM

SEQ ID NO: 46489 - protein, 39 aa, Artificial Sequence; identical to SEQ ID NO: 7282
  Cyclic GFR-binding peptide
  MOD_RES (7)..(39): Xaa is C or S

SEQ ID NO: 46490 - protein, 25 aa, Artificial Sequence
  Cyclic GFR-binding peptide
LSAISILYLVGRKPKVLKNYQMIVR

SEQ ID NO: 46491 - protein, 37 aa, Artificial Sequence; identical to SEQ ID NO: 7283
  Cyclic GFR-binding peptide
  MOD_RES (2)..(34)..(36): Xaa is C or S

SEQ ID NO: 46492 - protein, 30 aa, Artificial Sequence
  Cyclic GFR-binding peptide
  MOD_RES (28)..(30): Xaa is C or S
ALNAISILYFVGRKPKVLKKYRMIVRSXKX

SEQ ID NO: 46493 - protein, 34 aa, Artificial Sequence
  Cyclic GFR-binding peptide
  MOD_RES (34)..(34): Xaa is C or S
QVQLSPISVLYKEIVRKKPIFLKYHYTLEDHLAX

SEQ ID NO: 46494 - protein, 27 aa, Artificial Sequence
  Cyclic GFR-binding peptide
LSPISMLYKDENEKVVLKYHYDMVVEG

SEQ ID NO: 46495 - protein, 29 aa, Artificial Sequence
  Cyclic GFR-binding peptide
  MOD_RES (1)..(1): Xaa is C or S
XAPTKLSATSVLYYDDSSNVILRKHRNMV

SEQ ID NO: 46496 - protein, 33 aa, Artificial Sequence
  Cyclic GFR-binding peptide
  MOD_RES (6)..(7): Xaa is C or S
ASASPXXVSQDLSAISILYLIGKTPKILKNYQM

SEQ ID NO: 46497 - protein, 33 aa, Artificial Sequence; identical to SEQ ID NO: 7285
  Cyclic GFR-binding peptide
  MOD_RES (3)..(3): Xaa is C or S

SEQ ID NO: 46498 - protein, 32 aa, Artificial Sequence
  Cyclic GFR-binding peptide
  MOD_RES (4)..(5): Xaa is C or S
PKPXXAPTQLSATSVLYYDDSSNVILRKHRNM

SEQ ID NO: 46499 - protein, 22 aa, Artificial Sequence
  Cyclic GFR-binding peptide
NAISILYFVGRTPKVLKKYRMV

SEQ ID NO: 46500 - protein, 30 aa, Artificial Sequence
  Cyclic GFR-binding peptide
  MOD_RES (3)..(4): Xaa is C or S
KPXXAPTQLSPISVLYKDDSSNVILKYHYN

SEQ ID NO: 46501 - protein, 30 aa, Artificial Sequence
  Cyclic GFR-binding peptide
  MOD_RES (4)..(5): Xaa is C or S
AAPXXVPQALSAISILYLVGRKPKVLKNYQ

SEQ ID NO: 46502 - protein, 37 aa, Artificial Sequence
  Cyclic GFR-binding peptide
  MOD_RES (5)..(5): Xaa is C or S
RNVQXRPTQVQLSATSVLYYEIVRKKPIFLRKHRTLE

SEQ ID NO: 46503 - protein, 31 aa, Artificial Sequence
  Cyclic GFR-binding peptide
  MOD_RES (2)..(3): Xaa is C or S
AXXAPTKLSAISVLYLDSSNNVILKNYQNMV

SEQ ID NO: 46504 - protein, 39 aa, Artificial Sequence; identical to SEQ ID NO: 7287
  Cyclic GFR-binding peptide
  MOD_RES (6)..(7)..(38): Xaa is C or S

SEQ ID NO: 46505 - protein, 35 aa, Artificial Sequence; identical to SEQ ID NO: 7288
  Cyclic GFR-binding peptide
  MOD_RES (1)..(2)..(33)..(35): Xaa is C or S

SEQ ID NO: 46506 - protein, 28 aa, Artificial Sequence
  Cyclic GFR-binding peptide
TQVQLNAISVLYFEIVRKKPIFLKKYRT

SEQ ID NO: 46507 - protein, 20 aa, Artificial Sequence
  Cyclic GFR-binding peptide
SAISMLYLDENEKVVLKNYQ

SEQ ID NO: 46508 - protein, 30 aa, Artificial Sequence
  Cyclic GFR-binding peptide
RPTQVQLNAISVLYFEIVRKKPIFLKKYRT

SEQ ID NO: 46509 - protein, 31 aa, Artificial Sequence
  Cyclic GFR-binding peptide
  MOD_RES (30)..(30): Xaa is C or S
SAISVLYLEIVRKKPIFLKNYQTLEDHLAXK

SEQ ID NO: 46510 - protein, 31 aa, Artificial Sequence
  Cyclic GFR-binding peptide
  MOD_RES (28)..(30): Xaa is C or S
LSAISVLYLDDSSNVILKNYQNMVVRSXGXH

SEQ ID NO: 46511 - protein, 40 aa, Artificial Sequence; identical to SEQ ID NO: 7295
  Cyclic GFR-binding peptide
  MOD_RES (4)..(5)..(37)..(39): Xaa is C or S

SEQ ID NO: 46512 - protein, 31 aa, Artificial Sequence
  Cyclic GFR-binding peptide
  MOD_RES (3)..(4): Xaa is C or S
SPXXVSQDLNAISILYFIGKTPKILKKYRMI

SEQ ID NO: 46513 - protein, 32 aa, Artificial Sequence
  Cyclic GFR-binding peptide
VQLNAISVLYFEIVRKKPIFLKKYRTLEDHLA

SEQ ID NO: 46514 - protein, 26 aa, Artificial Sequence
  Cyclic GFR-binding peptide
DLSAISILYLVGRTPKVLKNYQMVVK

SEQ ID NO: 46515 - protein, 26 aa, Artificial Sequence
  Cyclic GFR-binding peptide
QDLSATSILYYVGRTPKVLRKHRMVV

SEQ ID NO: 46516 - protein, 26 aa, Artificial Sequence
  Cyclic GFR-binding peptide
VQLSAISVLYLEIVRKKPIFLKNYQT

SEQ ID NO: 46517 - protein, 31 aa, Artificial Sequence
  Cyclic GFR-binding peptide
  MOD_RES (1)..(2): Xaa is C or S
XXVSQDLSATSILYYIGKTPKILRKHRMIVK

SEQ ID NO: 46518 - protein, 31 aa, Artificial Sequence
  Cyclic GFR-binding peptide
  MOD_RES (30)..(30): Xaa is C or S
TKLSAISVLYLDDSSNVILKNYQNMVVRSXG

SEQ ID NO: 46519 - protein, 33 aa, Artificial Sequence; identical to SEQ ID NO: 7298
  Cyclic GFR-binding peptide
  MOD_RES (1)..(32): Xaa is C or S

SEQ ID NO: 46520 - protein, 26 aa, Artificial Sequence
  Cyclic GFR-binding peptide
QLNAISVLYFEIVRKKPIFLKKYRTL

SEQ ID NO: 46521 - protein, 30 aa, Artificial Sequence
  Cyclic GFR-binding peptide
  MOD_RES (27)..(29): Xaa is C or S
LNAISILYFVGRTPKVLKKYRMVVKSXKXS

SEQ ID NO: 46522 - protein, 33 aa, Artificial Sequence
  Cyclic GFR-binding peptide
  MOD_RES (5)..(6): Xaa is C or S
SASPXXVPQDLSPISILYKVGRTPKVLKYHYMV

SEQ ID NO: 46523 - protein, 28 aa, Artificial Sequence
  Cyclic GFR-binding peptide
TELSATSMLYYDEYDKVVLRKHREMVVE

SEQ ID NO: 46524 - protein, 33 aa, Artificial Sequence; identical to SEQ ID NO: 7300
  Cyclic GFR-binding peptide
  MOD_RES (1)..(32): Xaa is C or S

SEQ ID NO: 46525 - protein, 36 aa, Artificial Sequence; identical to SEQ ID NO: 7302
  Cyclic GFR-binding peptide
  MOD_RES (3)..(4)..(35): Xaa is C or S

SEQ ID NO: 46526 - protein, 26 aa, Artificial Sequence
  Cyclic GFR-binding peptide
KLSAISVLYLDSSNNVILKNYQNMVV

SEQ ID NO: 46527 - protein, 40 aa, Artificial Sequence; identical to SEQ ID NO: 7303
  Cyclic GFR-binding peptide
  MOD_RES (7)..(39): Xaa is C or S

SEQ ID NO: 46528 - protein, 29 aa, Artificial Sequence
  Cyclic GFR-binding peptide
  MOD_RES (29)..(29): Xaa is C or S
ELSATSMLYYDENEKVVLRKHRDMVVEGX

SEQ ID NO: 46529 - protein, 24 aa, Artificial Sequence
  Cyclic GFR-binding peptide
TELSPISMLYKDEYDKVVLKYHYE

SEQ ID NO: 46530 - protein, 20 aa, Artificial Sequence
  Cyclic GFR-binding peptide
SATSILYYVGRKPKVLRKHR

SEQ ID NO: 46531 - protein, 36 aa, Artificial Sequence; identical to SEQ ID NO: 7306
  Cyclic GFR-binding peptide
  MOD_RES (1)..(2)..(33)..(35): Xaa is C or S

SEQ ID NO: 46532 - protein, 40 aa, Artificial Sequence; identical to SEQ ID NO: 7307
  Cyclic GFR-binding peptide
  MOD_RES (4)..(5)..(37)..(39): Xaa is C or S

SEQ ID NO: 46533 - protein, 40 aa, Artificial Sequence; identical to SEQ ID NO: 7308
  Cyclic GFR-binding peptide
  MOD_RES (5)..(6)..(39): Xaa is C or S

SEQ ID NO: 46534 - protein, 32 aa, Artificial Sequence; identical to SEQ ID NO: 7309
  Cyclic GFR-binding peptide
  MOD_RES (1)..(2): Xaa is C or S

SEQ ID NO: 46535 - protein, 27 aa, Artificial Sequence
  Cyclic GFR-binding peptide
  MOD_RES (1)..(1): Xaa is C or S
XVPTELSATSMLYYDEYDKVVLRKHRE

SEQ ID NO: 46536 - protein, 27 aa, Artificial Sequence
  Cyclic GFR-binding peptide
VQLNAISVLYFEIVRKKPIFLKKYRTL

SEQ ID NO: 46537 - protein, 36 aa, Artificial Sequence; identical to SEQ ID NO: 7313
  Cyclic GFR-binding peptide
  MOD_RES (2)..(3)..(36): Xaa is C or S

SEQ ID NO: 46538 - protein, 32 aa, Artificial Sequence
  Cyclic GFR-binding peptide
  MOD_RES (29)..(31): Xaa is C or S
QDLSATSILYYIGKTPKILRKHRMIVKSXKXS

SEQ ID NO: 46539 - protein, 32 aa, Artificial Sequence; identical to SEQ ID NO: 7314
  Cyclic GFR-binding peptide
  MOD_RES (32)..(32): Xaa is C or S

SEQ ID NO: 46540 - protein, 30 aa, Artificial Sequence; identical to SEQ ID NO: 849
  Cyclic GFR-binding peptide

SEQ ID NO: 46541 - protein, 39 aa, Artificial Sequence; identical to SEQ ID NO: 7316
  Cyclic GFR-binding peptide
  MOD_RES (6)..(7)..(38): Xaa is C or S

SEQ ID NO: 46542 - protein, 31 aa, Artificial Sequence
  Cyclic GFR-binding peptide
  MOD_RES (1)..(2): Xaa is C or S
XXAPTKLNAISVLYFDSSNNVILKKYRNMVV

SEQ ID NO: 46543 - protein, 23 aa, Artificial Sequence
  Cyclic GFR-binding peptide
QALNAISILYFVGRKPKVLKKYR

SEQ ID NO: 46544 - protein, 38 aa, Artificial Sequence; identical to SEQ ID NO: 7317
  Cyclic GFR-binding peptide
  MOD_RES (3)..(4)..(36)..(38): Xaa is C or S

SEQ ID NO: 46545 - protein, 33 aa, Artificial Sequence
  Cyclic GFR-binding peptide
  MOD_RES (4)..(5): Xaa is C or S
GKAXXVPTKLSAISVLYLDDMGVPTLKNYQEGM

SEQ ID NO: 46546 - protein, 33 aa, Artificial Sequence
  Cyclic GFR-binding peptide
  MOD_RES (5)..(6): Xaa is C or S
VPKAXXAPTKLSAISVLYLDSSNNVILKNYQNM

SEQ ID NO: 46547 - protein, 36 aa, Artificial Sequence; identical to SEQ ID NO: 7319
  Cyclic GFR-binding peptide
  MOD_RES (1)..(2)..(34)..(36): Xaa is C or S

SEQ ID NO: 46548 - protein, 28 aa, Artificial Sequence
  Cyclic GFR-binding peptide
  MOD_RES (2)..(3): Xaa is C or S
PXXVSQDLSATSILYYIGKTPKILRKHR

SEQ ID NO: 46549 - protein, 33 aa, Artificial Sequence
  Cyclic GFR-binding peptide
  MOD_RES (31)..(33): Xaa is C or S
PTKLSPISVLYKDDSSNVILKYHYNMVVRSXGX

SEQ ID NO: 46550 - protein, 32 aa, Artificial Sequence
  Cyclic GFR-binding peptide
  MOD_RES (30)..(32): Xaa is C or S
TELSATSMLYYDEYDKVVLRKHREMVVEGXGX

SEQ ID NO: 46551 - protein, 34 aa, Artificial Sequence; identical to SEQ ID NO: 7323
  Cyclic GFR-binding peptide
  MOD_RES (1)..(33): Xaa is C or S

SEQ ID NO: 46552 - protein, 38 aa, Artificial Sequence; identical to SEQ ID NO: 7324
  Cyclic GFR-binding peptide
  MOD_RES (4)..(5)..(37): Xaa is C or S

SEQ ID NO: 46553 - protein, 37 aa, Artificial Sequence; identical to SEQ ID NO: 7325
  Cyclic GFR-binding peptide
  MOD_RES (6)..(7): Xaa is C or S

SEQ ID NO: 46554 - protein, 26 aa, Artificial Sequence
  Cyclic GFR-binding peptide
QDLSAISILYLVGRTPKVLKNYQMVV

SEQ ID NO: 46555 - protein, 33 aa, Artificial Sequence; identical to SEQ ID NO: 7326
  Cyclic GFR-binding peptide
  MOD_RES (2)..(3): Xaa is C or S

SEQ ID NO: 46556 - protein, 33 aa, Artificial Sequence
  Cyclic GFR-binding peptide
  MOD_RES (5)..(6): Xaa is C or S
VGKAXXVPTKLSAISVLYLDDMGVPTLKNYQEG

SEQ ID NO: 46557 - protein, 35 aa, Artificial Sequence; identical to SEQ ID NO: 7327
  Cyclic GFR-binding peptide
  MOD_RES (4)..(5): Xaa is C or S

SEQ ID NO: 46558 - protein, 25 aa, Artificial Sequence
  Cyclic GFR-binding peptide
TKLSATSVLYYDDSSNVILRKHRNM

SEQ ID NO: 46559 - protein, 21 aa, Artificial Sequence
  Cyclic GFR-binding peptide
LSATSMLYYDEYDKVVLRKHR

SEQ ID NO: 46560 - protein, 28 aa, Artificial Sequence
  Cyclic GFR-binding peptide
  MOD_RES (27)..(27): Xaa is C or S
LSATSILYYVGRKPKVLRKHRMIVRSXK

SEQ ID NO: 46561 - protein, 29 aa, Artificial Sequence
  Cyclic GFR-binding peptide
SATSVLYYEIVRKKPIFLRKHRTLEDHLA

SEQ ID NO: 46562 - protein, 25 aa, Artificial Sequence
  Cyclic GFR-binding peptide
VPQALSAISILYLVGRKPKVLKNYQ

SEQ ID NO: 46563 - protein, 22 aa, Artificial Sequence
  Cyclic GFR-binding peptide
ALSAISILYLVGRKPKVLKNYQ

SEQ ID NO: 46564 - protein, 34 aa, Artificial Sequence
  Cyclic GFR-binding peptide
  MOD_RES (6)..(7): Xaa is C or S
SIPKAXXVPTELSPISMLYKDEYDKVVLKYHYEM

SEQ ID NO: 46565 - protein, 30 aa, Artificial Sequence
  Cyclic GFR-binding peptide
PTKLSPISVLYKDSSNNVILKYHYNMVVKA

SEQ ID NO: 46566 - protein, 24 aa, Artificial Sequence
  Cyclic GFR-binding peptide
KLSATSVLYYDDMGVPTLRKHREG

SEQ ID NO: 46567 - protein, 37 aa, Artificial Sequence; identical to SEQ ID NO: 7329
  Cyclic GFR-binding peptide
  MOD_RES (2)..(3)..(34)..(36): Xaa is C or S

SEQ ID NO: 46568 - protein, 27 aa, Artificial Sequence
  Cyclic GFR-binding peptide
  MOD_RES (1)..(1): Xaa is C or S
XVPTELSPISMLYKDENEKVVLKYHYD

SEQ ID NO: 46569 - protein, 33 aa, Artificial Sequence
  Cyclic GFR-binding peptide
  MOD_RES (5)..(6): Xaa is C or S
IPKAXXVPTELSATSMLYYDENEKVVLRKHRDM

SEQ ID NO: 46570 - protein, 39 aa, Artificial Sequence; identical to SEQ ID NO: 7334
  Cyclic GFR-binding peptide
  MOD_RES (1)..(38): Xaa is C or S

SEQ ID NO: 46571 - protein, 22 aa, Artificial Sequence
  Cyclic GFR-binding peptide
LSPISMLYKDEYDKVVLKYHYE

SEQ ID NO: 46572 - protein, 28 aa, Artificial Sequence
  Cyclic GFR-binding peptide
  MOD_RES (26)..(28): Xaa is C or S
NAISILYFVGRKPKVLKKYRMIVRSXKX

SEQ ID NO: 46573 - protein, 25 aa, Artificial Sequence
  Cyclic GFR-binding peptide
ELSATSMLYYDEYDKVVLRKHREMV

SEQ ID NO: 46574 - protein, 30 aa, Artificial Sequence
  Cyclic GFR-binding peptide
  MOD_RES (2)..(3): Xaa is C or S
AXXVPTELSPISMLYKDENEKVVLKYHYDM

SEQ ID NO: 46575 - protein, 36 aa, Artificial Sequence; identical to SEQ ID NO: 7336
  Cyclic GFR-binding peptide
  MOD_RES (4)..(5): Xaa is C or S

SEQ ID NO: 46576 - protein, 39 aa, Artificial Sequence; identical to SEQ ID NO: 7337
  Cyclic GFR-binding peptide
  MOD_RES (6)..(7)..(38): Xaa is C or S

SEQ ID NO: 46577 - protein, 37 aa, Artificial Sequence; identical to SEQ ID NO: 7338
  Cyclic GFR-binding peptide
  MOD_RES (1)..(1): Xaa is C or S

SEQ ID NO: 46578 - protein, 27 aa, Artificial Sequence
  Cyclic GFR-binding peptide
PTELSPISMLYKDEYDKVVLKYHYEMV

SEQ ID NO: 46579 - protein, 24 aa, Artificial Sequence
  Cyclic GFR-binding peptide
ALSAISILYLVGRKPKVLKNYQMI

SEQ ID NO: 46580 - protein, 26 aa, Artificial Sequence
  Cyclic GFR-binding peptide
QVQLSPISVLYKEIVRKKPIFLKYHY

SEQ ID NO: 46581 - protein, 31 aa, Artificial Sequence
  Cyclic GFR-binding peptide
  MOD_RES (30)..(30): Xaa is C or S
SATSVLYYEIVRKKPIFLRKHRTLEDHLAXK

SEQ ID NO: 46582 - protein, 36 aa, Artificial Sequence; identical to SEQ ID NO: 7339
  Cyclic GFR-binding peptide
  MOD_RES (2)..(3)..(35): Xaa is C or S

SEQ ID NO: 46583 - protein, 28 aa, Artificial Sequence
  Cyclic GFR-binding peptide
SATSVLYYEIVRKKPIFLRKHRTLEDHL

SEQ ID NO: 46584 - protein, 36 aa, Artificial Sequence; identical to SEQ ID NO: 7341
  Cyclic GFR-binding peptide
  MOD_RES (4)..(5)..(36): Xaa is C or S

SEQ ID NO: 46585 - protein, 22 aa, Artificial Sequence
  Cyclic GFR-binding peptide
ALSATSILYYVGRKPKVLRKHR

SEQ ID NO: 46586 - protein, 31 aa, Artificial Sequence
  Cyclic GFR-binding peptide
  MOD_RES (3)..(3): Xaa is C or S
PTXAPTKLSATSVLYYDDSSNVILRKHRNMV

SEQ ID NO: 46587 - protein, 32 aa, Artificial Sequence
  Cyclic GFR-binding peptide
  MOD_RES (5)..(5): Xaa is C or S
TKPTXAPTKLSAISVLYLDDSSNVILKNYQNM

SEQ ID NO: 46588 - protein, 32 aa, Artificial Sequence
  Cyclic GFR-binding peptide
  MOD_RES (29)..(31): Xaa is C or S
QDLSAISILYLIGKTPKILKNYQMIVKSXKXS

SEQ ID NO: 46589 - protein, 34 aa, Artificial Sequence
  Cyclic GFR-binding peptide
  MOD_RES (1)..(1): Xaa is C or S
XRPTQVQLSPISVLYKEIVRKKPIFLKYHYTLED

SEQ ID NO: 46590 - protein, 35 aa, Artificial Sequence; identical to SEQ ID NO: 7345
  Cyclic GFR-binding peptide
  MOD_RES (1)..(1): Xaa is C or S

SEQ ID NO: 46591 - protein, 34 aa, Artificial Sequence; identical to SEQ ID NO: 7347
  Cyclic GFR-binding peptide
  MOD_RES (2)..(3)..(34): Xaa is C or S

SEQ ID NO: 46592 - protein, 25 aa, Artificial Sequence
  Cyclic GFR-binding peptide
LSATSVLYYDDSSNVILRKHRNMVV

SEQ ID NO: 46593 - protein, 38 aa, Artificial Sequence; identical to SEQ ID NO: 7348
  Cyclic GFR-binding peptide
  MOD_RES (2)..(2): Xaa is C or S

SEQ ID NO: 46594 - protein, 37 aa, Artificial Sequence; identical to SEQ ID NO: 7349
  Cyclic GFR-binding peptide
  MOD_RES (1)..(2)..(34)..(36): Xaa is C or S

SEQ ID NO: 46595 - protein, 30 aa, Artificial Sequence
  Cyclic GFR-binding peptide
  MOD_RES (2)..(3): Xaa is C or S
AXXVPTELSATSMLYYDENEKVVLRKHRDM

SEQ ID NO: 46596 - protein, 33 aa, Artificial Sequence; identical to SEQ ID NO: 7350
  Cyclic GFR-binding peptide
  MOD_RES (33)..(33): Xaa is C or S

SEQ ID NO: 46597 - protein, 37 aa, Artificial Sequence; identical to SEQ ID NO: 7351
  Cyclic GFR-binding peptide
  MOD_RES (1)..(2)..(34)..(36): Xaa is C or S

SEQ ID NO: 46598 - protein, 34 aa, Artificial Sequence
  Cyclic GFR-binding peptide
  MOD_RES (5)..(6): Xaa is C or S
SASPXXVSQDLSPISILYKIGKTPKILKYHYMIV

SEQ ID NO: 46599 - protein, 34 aa, Artificial Sequence
  Cyclic GFR-binding peptide
  MOD_RES (31)..(33): Xaa is C or S
PTELSATSMLYYDEYDKVVLRKHREMVVEGXGXR

SEQ ID NO: 46600 - protein, 32 aa, Artificial Sequence
  Cyclic GFR-binding peptide
  MOD_RES (5)..(6): Xaa is C or S
VGKAXXVPTKLSAISVLYLDDMGVPTLKNYQE

SEQ ID NO: 46601 - protein, 32 aa, Artificial Sequence; identical to SEQ ID NO: 7356
  Cyclic GFR-binding peptide
  MOD_RES (1)..(1): Xaa is C or S

SEQ ID NO: 46602 - protein, 35 aa, Artificial Sequence; identical to SEQ ID NO: 7355
  Cyclic GFR-binding peptide
  MOD_RES (4)..(5): Xaa is C or S

SEQ ID NO: 46603 - protein, 25 aa, Artificial Sequence
  Cyclic GFR-binding peptide
TKLNAISVLYFDDMGVPTLKKYREG

SEQ ID NO: 46604 - protein, 40 aa, Artificial Sequence; identical to SEQ ID NO: 7357
  Cyclic GFR-binding peptide
  MOD_RES (5)..(6)..(38)..(40): Xaa is C or S

SEQ ID NO: 46605 - protein, 35 aa, Artificial Sequence
  Cyclic GFR-binding peptide
  MOD_RES (5)..(6): Xaa is C or S
SASPXXVPQDLSAISILYLVGRTPKVLKNYQMVVK

SEQ ID NO: 46606 - protein, 23 aa, Artificial Sequence
  Cyclic GFR-binding peptide
LSAISVLYLEIVRKKPIFLKNYQ

SEQ ID NO: 46607 - protein, 34 aa, Artificial Sequence
  Cyclic GFR-binding peptide
  MOD_RES (5)..(5): Xaa is C or S
TKPTXAPTKLSPISVLYKDDSSNVILKYHYNMVV

SEQ ID NO: 46608 - protein, 24 aa, Artificial Sequence
  Cyclic GFR-binding peptide
DLSATSILYYVGRTPKVLRKHRMV

SEQ ID NO: 46609 - protein, 30 aa, Artificial Sequence
  Cyclic GFR-binding peptide
  MOD_RES (2)..(3): Xaa is C or S
PXXAPTQLSAISVLYLDDSSNVILKNYQNM

SEQ ID NO: 46610 - protein, 32 aa, Artificial Sequence
  Cyclic GFR-binding peptide
  MOD_RES (31)..(31): Xaa is C or S
LNAISVLYFEIVRKKPIFLKKYRTLEDHLAXK

SEQ ID NO: 46611 - protein, 27 aa, Artificial Sequence
  Cyclic GFR-binding peptide
  MOD_RES (27)..(27): Xaa is C or S
SPISVLYKDSSNNVILKYHYNMVVKAX

SEQ ID NO: 46612 - protein, 27 aa, Artificial Sequence
  Cyclic GFR-binding peptide
  MOD_RES (1)..(1): Xaa is C or S
XVPQALSAISILYLVGRKPKVLKNYQM

SEQ ID NO: 46613 - protein, 32 aa, Artificial Sequence
  Cyclic GFR-binding peptide
  MOD_RES (7)..(7): Xaa is C or S
HVTKPTXAPTKLSATSVLYYDDSSNVILRKHR

SEQ ID NO: 46614 - protein, 24 aa, Artificial Sequence
  Cyclic GFR-binding peptide
PTKLSAISVLYLDSSNNVILKNYQ

SEQ ID NO: 46615 - protein, 38 aa, Artificial Sequence; identical to SEQ ID NO: 7358
  Cyclic GFR-binding peptide
  MOD_RES (2)..(2): Xaa is C or S

SEQ ID NO: 46616 - protein, 30 aa, Artificial Sequence
  Cyclic GFR-binding peptide
  MOD_RES (27)..(29): Xaa is C or S
SATSVLYYDDSSNVILRKHRNMVVRSXGXH

SEQ ID NO: 46617 - protein, 39 aa, Artificial Sequence; identical to SEQ ID NO: 7360
  Cyclic GFR-binding peptide
  MOD_RES (4)..(5)..(38): Xaa is C or S

SEQ ID NO: 46618 - protein, 29 aa, Artificial Sequence
  Cyclic GFR-binding peptide
  MOD_RES (28)..(28): Xaa is C or S
LSATSMLYYDENEKVVLRKHRDMVVEGXG

SEQ ID NO: 46619 - protein, 24 aa, Artificial Sequence
  Cyclic GFR-binding peptide
DLSPISILYKVGRTPKVLKYHYMV

SEQ ID NO: 46620 - protein, 29 aa, Artificial Sequence
  Cyclic GFR-binding peptide
  MOD_RES (2)..(3): Xaa is C or S
AXXVPTKLSATSVLYYDDMGVPTLRKHRE

SEQ ID NO: 46621 - protein, 29 aa, Artificial Sequence
  Cyclic GFR-binding peptide
PTQVQLNAISVLYFEIVRKKPIFLKKYRT

SEQ ID NO: 46622 - protein, 27 aa, Artificial Sequence
  Cyclic GFR-binding peptide
VQLSATSVLYYEIVRKKPIFLRKHRTL

SEQ ID NO: 46623 - protein, 31 aa, Artificial Sequence
  Cyclic GFR-binding peptide
  MOD_RES (4)..(5): Xaa is C or S
PKAXXVPTELSPISMLYKDENEKVVLKYHYD

SEQ ID NO: 46624 - protein, 24 aa, Artificial Sequence
  Cyclic GFR-binding peptide
PTELSATSMLYYDEYDKVVLRKHR

SEQ ID NO: 46625 - protein, 31 aa, Artificial Sequence
  Cyclic GFR-binding peptide
  MOD_RES (31)..(31): Xaa is C or S
PTELSATSMLYYDENEKVVLRKHRDMVVEGX

SEQ ID NO: 46626 - protein, 33 aa, Artificial Sequence
  Cyclic GFR-binding peptide
  MOD_RES (31)..(33): Xaa is C or S
TKLSATSVLYYDDMGVPTLRKHREGMSVAEXGX

SEQ ID NO: 46627 - protein, 31 aa, Artificial Sequence
  Cyclic GFR-binding peptide
  MOD_RES (4)..(5): Xaa is C or S
ASPXXVPQDLSPISILYKVGRTPKVLKYHYM

SEQ ID NO: 46628 - protein, 26 aa, Artificial Sequence
  Cyclic GFR-binding peptide
VPTKLNAISVLYFDDMGVPTLKKYRE

SEQ ID NO: 46629 - protein, 31 aa, Artificial Sequence
  Cyclic GFR-binding peptide
  MOD_RES (3)..(3): Xaa is C or S
PTXAPTKLSPISVLYKDDSSNVILKYHYNMV

SEQ ID NO: 46630 - protein, 36 aa, Artificial Sequence; identical to SEQ ID NO: 7363
  Cyclic GFR-binding peptide
  MOD_RES (3)..(35): Xaa is C or S

SEQ ID NO: 46631 - protein, 37 aa, Artificial Sequence; identical to SEQ ID NO: 7364
  Cyclic GFR-binding peptide
  MOD_RES (1)..(1): Xaa is C or S

SEQ ID NO: 46632 - protein, 28 aa, Artificial Sequence
  Cyclic GFR-binding peptide
ELSATSMLYYDENEKVVLRKHRDMVVEG

SEQ ID NO: 46633 - protein, 29 aa, Artificial Sequence
  Cyclic GFR-binding peptide
VPTELSATSMLYYDEYDKVVLRKHREMVV

SEQ ID NO: 46634 - protein, 39 aa, Artificial Sequence; identical to SEQ ID NO: 7365
  Cyclic GFR-binding peptide
  MOD_RES (6)..(7)..(39): Xaa is C or S

SEQ ID NO: 46635 - protein, 29 aa, Artificial Sequence
  Cyclic GFR-binding peptide
QVQLNAISVLYFEIVRKKPIFLKKYRTLE

SEQ ID NO: 46636 - protein, 27 aa, Artificial Sequence
  Cyclic GFR-binding peptide
PTELSATSMLYYDEYDKVVLRKHREMV

SEQ ID NO: 46637 - protein, 39 aa, Artificial Sequence; identical to SEQ ID NO: 7366
  Cyclic GFR-binding peptide
  MOD_RES (3)..(4)..(37)..(39): Xaa is C or S

SEQ ID NO: 46638 - protein, 39 aa, Artificial Sequence; identical to SEQ ID NO: 7367
  Cyclic GFR-binding peptide
  MOD_RES (4)..(5)..(36)..(38): Xaa is C or S

SEQ ID NO: 46639 - protein, 33 aa, Artificial Sequence
  Cyclic GFR-binding peptide
  MOD_RES (5)..(6): Xaa is C or S
IPKAXXVPTELSPISMLYKDENEKVVLKYHYDM

SEQ ID NO: 46640 - protein, 20 aa, Artificial Sequence
  Cyclic GFR-binding peptide
SAISVLYLDSSNNVILKNYQ

SEQ ID NO: 46641 - protein, 25 aa, Artificial Sequence
  Cyclic GFR-binding peptide
QLNAISVLYFEIVRKKPIFLKKYRT

SEQ ID NO: 46642 - protein, 27 aa, Artificial Sequence
  Cyclic GFR-binding peptide
LNAISVLYFDSSNNVILKKYRNMVVKA

SEQ ID NO: 46643 - protein, 33 aa, Artificial Sequence; identical to SEQ ID NO: 7375
  Cyclic GFR-binding peptide
  MOD_RES (1)..(2): Xaa is C or S

SEQ ID NO: 46644 - protein, 33 aa, Artificial Sequence; identical to SEQ ID NO: 7376
  Cyclic GFR-binding peptide
  MOD_RES (31)..(33): Xaa is C or S

SEQ ID NO: 46645 - protein, 30 aa, Artificial Sequence
  Cyclic GFR-binding peptide
  MOD_RES (29)..(29): Xaa is C or S
QLSAISVLYLDDSSNVILKNYQNMVVRAXG

SEQ ID NO: 46646 - protein, 34 aa, Artificial Sequence; identical to SEQ ID NO: 7377
  Cyclic GFR-binding peptide

SEQ ID NO: 46647 - protein, 37 aa, Artificial Sequence; identical to SEQ ID NO: 7378
  Cyclic GFR-binding peptide
  MOD_RES (3)..(3): Xaa is C or S

SEQ ID NO: 46648 - protein, 33 aa, Artificial Sequence; identical to SEQ ID NO: 7379
  Cyclic GFR-binding peptide
  MOD_RES (1)..(2): Xaa is C or S

SEQ ID NO: 46649 - protein, 34 aa, Artificial Sequence
  Cyclic GFR-binding peptide
  MOD_RES (6)..(7): Xaa is C or S
YVPKPXXAPTKLSAISVLYLDDSSNVILKNYQNM

SEQ ID NO: 46650 - protein, 28 aa, Artificial Sequence
  Cyclic GFR-binding peptide
VPQDLNAISILYFVGRTPKVLKKYRMVV

SEQ ID NO: 46651 - protein, 31 aa, Artificial Sequence
  Cyclic GFR-binding peptide
PTQVQLSPISVLYKEIVRKKPIFLKYHYTLE

SEQ ID NO: 46652 - protein, 35 aa, Artificial Sequence; identical to SEQ ID NO: 7381
  Cyclic GFR-binding peptide
  MOD_RES (2)..(3)..(34): Xaa is C or S

SEQ ID NO: 46653 - protein, 24 aa, Artificial Sequence
  Cyclic GFR-binding peptide
KLSAISVLYLDDSSNVILKNYQNM

SEQ ID NO: 46654 - protein, 33 aa, Artificial Sequence
  Cyclic GFR-binding peptide
  MOD_RES (6)..(7): Xaa is C or S
ASASPXXVPQDLSAISILYLVGRTPKVLKNYQM

SEQ ID NO: 46655 - protein, 21 aa, Artificial Sequence
  Cyclic GFR-binding peptide
LSAISILYLIGKTPKILKNYQ

SEQ ID NO: 46656 - protein, 27 aa, Artificial Sequence
  Cyclic GFR-binding peptide
DLNAISILYFVGRTPKVLKKYRMVVKS

SEQ ID NO: 46657 - protein, 41 aa, Artificial Sequence; identical to SEQ ID NO: 7383
  Cyclic GFR-binding peptide
  MOD_RES (5)..(6)..(38)..(40): Xaa is C or S

SEQ ID NO: 46658 - protein, 33 aa, Artificial Sequence; identical to SEQ ID NO: 7384
  Cyclic GFR-binding peptide
  MOD_RES (1)..(33): Xaa is C or S

SEQ ID NO: 46659 - protein, 31 aa, Artificial Sequence
  Cyclic GFR-binding peptide
  MOD_RES (5)..(6): Xaa is C or S
VPKPXXAPTQLSAISVLYLDDSSNVILKNYQ

SEQ ID NO: 46660 - protein, 29 aa, Artificial Sequence
  Cyclic GFR-binding peptide
  MOD_RES (27)..(29): Xaa is C or S
LSPISILYKVGRKPKVLKYHYMIVRSXKX

SEQ ID NO: 46661 - protein, 38 aa, Artificial Sequence; identical to SEQ ID NO: 7386
  Cyclic GFR-binding peptide
  MOD_RES (4)..(5)..(36)..(38): Xaa is C or S

SEQ ID NO: 46662 - protein, 34 aa, Artificial Sequence; identical to SEQ ID NO: 7387
  Cyclic GFR-binding peptide
  MOD_RES (32)..(34): Xaa is C or S

SEQ ID NO: 46663 - protein, 28 aa, Artificial Sequence
  Cyclic GFR-binding peptide
VPQALSPISILYKVGRKPKVLKYHYMIV

SEQ ID NO: 46664 - protein, 30 aa, Artificial Sequence
  Cyclic GFR-binding peptide
  MOD_RES (27)..(29): Xaa is C or S
LSPISILYKIGKTPKILKYHYMIVKSXKXS

SEQ ID NO: 46665 - protein, 25 aa, Artificial Sequence
  Cyclic GFR-binding peptide
QALNAISILYFVGRKPKVLKKYRMI

SEQ ID NO: 46666 - protein, 24 aa, Artificial Sequence
  Cyclic GFR-binding peptide
PTKLSPISVLYKDDSSNVILKYHY

SEQ ID NO: 46667 - protein, 32 aa, Artificial Sequence
  Cyclic GFR-binding peptide
  MOD_RES (30)..(32): Xaa is C or S
PQDLSAISILYLVGRTPKVLKNYQMVVKSXKX

SEQ ID NO: 46668 - protein, 28 aa, Artificial Sequence
  Cyclic GFR-binding peptide
  MOD_RES (27)..(27): Xaa is C or S
LSATSILYYIGKTPKILRKHRMIVKSXK

SEQ ID NO: 46669 - protein, 34 aa, Artificial Sequence; identical to SEQ ID NO: 7388
  Cyclic GFR-binding peptide
  MOD_RES (3)..(4): Xaa is C or S

SEQ ID NO: 46670 - protein, 43 aa, Artificial Sequence; identical to SEQ ID NO: 7390
  Cyclic GFR-binding peptide
  MOD_RES (5)..(42): Xaa is C or S

SEQ ID NO: 46671 - protein, 34 aa, Artificial Sequence; identical to SEQ ID NO: 7391
  Cyclic GFR-binding peptide
  MOD_RES (1)..(33): Xaa is C or S

SEQ ID NO: 46672 - protein, 42 aa, Artificial Sequence; identical to SEQ ID NO: 7394
  Cyclic GFR-binding peptide
  MOD_RES (6)..(7)..(39)..(41): Xaa is C or S

SEQ ID NO: 46673 - protein, 35 aa, Artificial Sequence; identical to SEQ ID NO: 7395
  Cyclic GFR-binding peptide
  MOD_RES (2)..(3)..(34): Xaa is C or S

SEQ ID NO: 46674 - protein, 33 aa, Artificial Sequence; identical to SEQ ID NO: 7396
  Cyclic GFR-binding peptide
  MOD_RES (1)..(2)..(33): Xaa is C or S

SEQ ID NO: 46675 - protein, 35 aa, Artificial Sequence; identical to SEQ ID NO: 7397
  Cyclic GFR-binding peptide
  MOD_RES (1)..(2)..(33)..(35): Xaa is C or S

SEQ ID NO: 46676 - protein, 35 aa, Artificial Sequence; identical to SEQ ID NO: 7398
  Cyclic GFR-binding peptide
  MOD_RES (4)..(5): Xaa is C or S

SEQ ID NO: 46677 - protein, 32 aa, Artificial Sequence; identical to SEQ ID NO: 862
  Cyclic GFR-binding peptide

SEQ ID NO: 46678 - protein, 21 aa, Artificial Sequence
  Cyclic GFR-binding peptide
LNAISVLYFDSSNNVILKKYR

SEQ ID NO: 46679 - protein, 23 aa, Artificial Sequence
  Cyclic GFR-binding peptide
QALSPISILYKVGRKPKVLKYHY

SEQ ID NO: 46680 - protein, 28 aa, Artificial Sequence
  Cyclic GFR-binding peptide
  MOD_RES (27)..(27): Xaa is C or S
SAISVLYLDDSSNVILKNYQNMVVRAXG

SEQ ID NO: 46681 - protein, 28 aa, Artificial Sequence
  Cyclic GFR-binding peptide
  MOD_RES (3)..(3): Xaa is C or S
PTXAPTKLSPISVLYKDDSSNVILKYHY

SEQ ID NO: 46682 - protein, 29 aa, Artificial Sequence
  Cyclic GFR-binding peptide
  MOD_RES (1)..(1): Xaa is C or S
XVPQDLSAISILYLVGRTPKVLKNYQMVV

SEQ ID NO: 46683 - protein, 33 aa, Artificial Sequence; identical to SEQ ID NO: 7401
  Cyclic GFR-binding peptide
  MOD_RES (2)..(3): Xaa is C or S

SEQ ID NO: 46684 - protein, 33 aa, Artificial Sequence; identical to SEQ ID NO: 7403
  Cyclic GFR-binding peptide
  MOD_RES (2)..(3): Xaa is C or S

SEQ ID NO: 46685 - protein, 28 aa, Artificial Sequence
  Cyclic GFR-binding peptide
LSAISVLYLEIVRKKPIFLKNYQTLEDH

SEQ ID NO: 46686 - protein, 36 aa, Artificial Sequence
  Cyclic GFR-binding peptide
  MOD_RES (4)..(5): Xaa is C or S
GKAXXVPTKLSAISVLYLDDMGVPTLKNYQEGMSVA

SEQ ID NO: 46687 - protein, 34 aa, Artificial Sequence; identical to SEQ ID NO: 7405
  Cyclic GFR-binding peptide
  MOD_RES (31)..(33): Xaa is C or S

SEQ ID NO: 46688 - protein, 31 aa, Artificial Sequence
  Cyclic GFR-binding peptide
  MOD_RES (3)..(4): Xaa is C or S
KPXXAPTKLSATSVLYYDDSSNVILRKHRNM

SEQ ID NO: 46689 - protein, 33 aa, Artificial Sequence
  Cyclic GFR-binding peptide
  MOD_RES (5)..(6): Xaa is C or S
SAAPXXVPQALSAISILYLVGRKPKVLKNYQMI

SEQ ID NO: 46690 - protein, 36 aa, Artificial Sequence; identical to SEQ ID NO: 7409
  Cyclic GFR-binding peptide
  MOD_RES (33)..(35): Xaa is C or S

SEQ ID NO: 46691 - protein, 36 aa, Artificial Sequence
  Cyclic GFR-binding peptide
  MOD_RES (6)..(7): Xaa is C or S
KVGKAXXVPTKLNAISVLYFDDMGVPTLKKYREGMS

SEQ ID NO: 46692 - protein, 33 aa, Artificial Sequence; identical to SEQ ID NO: 7410
  Cyclic GFR-binding peptide
  MOD_RES (2)..(3): Xaa is C or S

SEQ ID NO: 46693 - protein, 38 aa, Artificial Sequence; identical to SEQ ID NO: 7411
  Cyclic GFR-binding peptide
  MOD_RES (5)..(6)..(37): Xaa is C or S

SEQ ID NO: 46694 - protein, 28 aa, Artificial Sequence
  Cyclic GFR-binding peptide
  MOD_RES (26)..(28): Xaa is C or S
SPISILYKVGRKPKVLKYHYMIVRSXKX

SEQ ID NO: 46695 - protein, 25 aa, Artificial Sequence
  Cyclic GFR-binding peptide
LNAISMLYFDEYDKVVLKKYREMVV

SEQ ID NO: 46696 - protein, 28 aa, Artificial Sequence
  Cyclic GFR-binding peptide
VPQALSATSILYYVGRKPKVLRKHRMIV

SEQ ID NO: 46697 - protein, 31 aa, Artificial Sequence
  Cyclic GFR-binding peptide
  MOD_RES (5)..(6): Xaa is C or S
VPKPXXAPTQLSATSVLYYDDSSNVILRKHR

SEQ ID NO: 46698 - protein, 25 aa, Artificial Sequence
  Cyclic GFR-binding peptide
APTKLSATSVLYYDDSSNVILRKHR

SEQ ID NO: 46699 - protein, 34 aa, Artificial Sequence
  Cyclic GFR-binding peptide
  MOD_RES (31)..(33): Xaa is C or S
TKLNAISVLYFDDMGVPTLKKYREGMSVAEXGXR

SEQ ID NO: 46700 - protein, 25 aa, Artificial Sequence
  Cyclic GFR-binding peptide
LNAISILYFVGRTPKVLKKYRMVVK

SEQ ID NO: 46701 - protein, 29 aa, Artificial Sequence
  Cyclic GFR-binding peptide
  MOD_RES (27)..(29): Xaa is C or S
NAISVLYFDSSNNVILKKYRNMVVKAXGX

SEQ ID NO: 46702 - protein, 35 aa, Artificial Sequence; identical to SEQ ID NO: 7413
  Cyclic GFR-binding peptide
  MOD_RES (32)..(34): Xaa is C or S

SEQ ID NO: 46703 - protein, 23 aa, Artificial Sequence
  Cyclic GFR-binding peptide
TKLSAISVLYLDDSSNVILKNYQ

SEQ ID NO: 46704 - protein, 34 aa, Artificial Sequence; identical to SEQ ID NO: 7415
  Cyclic GFR-binding peptide
  MOD_RES (1)..(2)..(34): Xaa is C or S

SEQ ID NO: 46705 - protein, 31 aa, Artificial Sequence
  Cyclic GFR-binding peptide
QVQLNAISVLYFEIVRKKPIFLKKYRTLEDH

SEQ ID NO: 46706 - protein, 29 aa, Artificial Sequence
  Cyclic GFR-binding peptide
VSQDLSPISILYKIGKTPKILKYHYMIVK

SEQ ID NO: 46707 - protein, 34 aa, Artificial Sequence
  Cyclic GFR-binding peptide
  MOD_RES (31)..(33): Xaa is C or S
LSATSVLYYEIVRKKPIFLRKHRTLEDHLAXKXE

SEQ ID NO: 46708 - protein, 29 aa, Artificial Sequence
  Cyclic GFR-binding peptide
  MOD_RES (26)..(28): Xaa is C or S
SATSILYYIGKTPKILRKHRMIVKSXKXS

SEQ ID NO: 46709 - protein, 35 aa, Artificial Sequence; identical to SEQ ID NO: 7416
  Cyclic GFR-binding peptide
  MOD_RES (1)..(2)..(34): Xaa is C or S

SEQ ID NO: 46710 - protein, 33 aa, Artificial Sequence; identical to SEQ ID NO: 7417
  Cyclic GFR-binding peptide
  MOD_RES (1)..(2)..(33): Xaa is C or S

SEQ ID NO: 46711 - protein, 30 aa, Artificial Sequence
  Cyclic GFR-binding peptide
  MOD_RES (29)..(29): Xaa is C or S
KLSPISVLYKDSSNNVILKYHYNMVVKAXG

SEQ ID NO: 46712 - protein, 38 aa, Artificial Sequence; identical to SEQ ID NO: 7419
  Cyclic GFR-binding peptide
  MOD_RES (2)..(3)..(36)..(38): Xaa is C or S

SEQ ID NO: 46713 - protein, 36 aa, Artificial Sequence; identical to SEQ ID NO: 7421
  Cyclic GFR-binding peptide
  MOD_RES (4)..(5): Xaa is C or S

SEQ ID NO: 46714 - protein, 39 aa, Artificial Sequence; identical to SEQ ID NO: 7422
  Cyclic GFR-binding peptide
  MOD_RES (5)..(6)..(38): Xaa is C or S

SEQ ID NO: 46715 - protein, 29 aa, Artificial Sequence
  Cyclic GFR-binding peptide
  MOD_RES (1)..(1): Xaa is C or S
XAPTKLSPISVLYKDSSNNVILKYHYNMV

SEQ ID NO: 46716 - protein, 28 aa, Artificial Sequence
  Cyclic GFR-binding peptide
  MOD_RES (28)..(28): Xaa is C or S
ALSPISILYKVGRKPKVLKYHYMIVRSX

SEQ ID NO: 46717 - protein, 26 aa, Artificial Sequence
  Cyclic GFR-binding peptide
APTQLSATSVLYYDDSSNVILRKHRN

SEQ ID NO: 46718 - protein, 23 aa, Artificial Sequence
  Cyclic GFR-binding peptide
SAISVLYLDSSNNVILKNYQNMV

SEQ ID NO: 46719 - protein, 23 aa, Artificial Sequence
  Cyclic GFR-binding peptide
KLNAISVLYFDDMGVPTLKKYRE

SEQ ID NO: 46720 - protein, 32 aa, Artificial Sequence; identical to SEQ ID NO: 7424
  Cyclic GFR-binding peptide
  MOD_RES (31)..(31): Xaa is C or S

SEQ ID NO: 46721 - protein, 34 aa, Artificial Sequence; identical to SEQ ID NO: 7425
  Cyclic GFR-binding peptide
  MOD_RES (1)..(2): Xaa is C or S

SEQ ID NO: 46722 - protein, 26 aa, Artificial Sequence
  Cyclic GFR-binding peptide
TELSPISMLYKDENEKVVLKYHYDMV

SEQ ID NO: 46723 - protein, 36 aa, Artificial Sequence; identical to SEQ ID NO: 7427
  Cyclic GFR-binding peptide
  MOD_RES (5)..(6): Xaa is C or S

SEQ ID NO: 46724 - protein, 38 aa, Artificial Sequence; identical to SEQ ID NO: 7428
  Cyclic GFR-binding peptide
  MOD_RES (4)..(5)..(37): Xaa is C or S

SEQ ID NO: 46725 - protein, 39 aa, Artificial Sequence; identical to SEQ ID NO: 7429
  Cyclic GFR-binding peptide
  MOD_RES (4)..(5)..(36)..(38): Xaa is C or S

SEQ ID NO: 46726 - protein, 37 aa, Artificial Sequence
  Cyclic GFR-binding peptide
  MOD_RES (34)..(36): Xaa is C or S
QVQLSATSVLYYEIVRKKPIFLRKHRTLEDHLAXKXE

SEQ ID NO: 46727 - protein, 31 aa, Artificial Sequence
  Cyclic GFR-binding peptide
  MOD_RES (31)..(31): Xaa is C or S
PTELNAISMLYFDEYDKVVLKKYREMVVEGX

SEQ ID NO: 46728 - protein, 25 aa, Artificial Sequence
  Cyclic GFR-binding peptide
LSPISVLYKDSSNNVILKYHYNMVV

SEQ ID NO: 46729 - protein, 33 aa, Artificial Sequence; identical to SEQ ID NO: 7431
  Cyclic GFR-binding peptide
  MOD_RES (2)..(3): Xaa is C or S

SEQ ID NO: 46730 - protein, 27 aa, Artificial Sequence
  Cyclic GFR-binding peptide
SQDLSPISILYKIGKTPKILKYHYMIV

SEQ ID NO: 46731 - protein, 31 aa, Artificial Sequence
  Cyclic GFR-binding peptide
  MOD_RES (3)..(4): Xaa is C or S
KPXXAPTKLSPISVLYKDDSSNVILKYHYNM

SEQ ID NO: 46732 - protein, 27 aa, Artificial Sequence
  Cyclic GFR-binding peptide
SQDLSATSILYYIGKTPKILRKHRMIV

SEQ ID NO: 46733 - protein, 27 aa, Artificial Sequence
  Cyclic GFR-binding peptide
  MOD_RES (1)..(2): Xaa is C or S
XXVPQALNAISILYFVGRKPKVLKKYR

SEQ ID NO: 46734 - protein, 31 aa, Artificial Sequence
  Cyclic GFR-binding peptide
  MOD_RES (2)..(3): Xaa is C or S
PXXVPQALSPISILYKVGRKPKVLKYHYMIV

SEQ ID NO: 46735 - protein, 34 aa, Artificial Sequence
  Cyclic GFR-binding peptide
  MOD_RES (5)..(6): Xaa is C or S
VGKAXXVPTKLNAISVLYFDDMGVPTLKKYREGM

SEQ ID NO: 46736 - protein, 39 aa, Artificial Sequence; identical to SEQ ID NO: 7434
  Cyclic GFR-binding peptide
  MOD_RES (37)..(39): Xaa is C or S

SEQ ID NO: 46737 - protein, 38 aa, Artificial Sequence; identical to SEQ ID NO: 7435
  Cyclic GFR-binding peptide
  MOD_RES (4)..(5)..(38): Xaa is C or S

SEQ ID NO: 46738 - protein, 28 aa, Artificial Sequence
  Cyclic GFR-binding peptide
SAISVLYLEIVRKKPIFLKNYQTLEDHL

SEQ ID NO: 46739 - protein, 30 aa, Artificial Sequence
  Cyclic GFR-binding peptide
  MOD_RES (1)..(1): Xaa is C or S
XVSQDLSPISILYKIGKTPKILKYHYMIVK

SEQ ID NO: 46740 - protein, 39 aa, Artificial Sequence; identical to SEQ ID NO: 7436
  Cyclic GFR-binding peptide
  MOD_RES (5)..(6)..(38): Xaa is C or S

SEQ ID NO: 46741 - protein, 29 aa, Artificial Sequence
  Cyclic GFR-binding peptide
  MOD_RES (1)..(2): Xaa is C or S
XXVPTELNAISMLYFDEYDKVVLKKYREM

SEQ ID NO: 46742 - protein, 25 aa, Artificial Sequence
  Cyclic GFR-binding peptide
PTELSPISMLYKDEYDKVVLKYHYE

SEQ ID NO: 46743 - protein, 29 aa, Artificial Sequence
  Cyclic GFR-binding peptide
  MOD_RES (29)..(29): Xaa is C or S
QDLSPISILYKVGRTPKVLKYHYMVVKSX

SEQ ID NO: 46744 - protein, 34 aa, Artificial Sequence; identical to SEQ ID NO: 7440
  Cyclic GFR-binding peptide
  MOD_RES (1)..(32)..(34): Xaa is C or S

SEQ ID NO: 46745 - protein, 32 aa, Artificial Sequence
  Cyclic GFR-binding peptide
  MOD_RES (2)..(3): Xaa is C or S
AXXVPTKLNAISVLYFDDMGVPTLKKYREGMS

SEQ ID NO: 46746 - protein, 22 aa, Artificial Sequence
  Cyclic GFR-binding peptide
LSPISILYKVGRTPKVLKYHYM

SEQ ID NO: 46747 - protein, 31 aa, Artificial Sequence
  Cyclic GFR-binding peptide
VPTKLSAISVLYLDDMGVPTLKNYQEGMSVA

SEQ ID NO: 46748 - protein, 34 aa, Artificial Sequence
  Cyclic GFR-binding peptide
  MOD_RES (4)..(5): Xaa is C or S
ASPXXVPQDLSPISILYKVGRTPKVLKYHYMVVK

SEQ ID NO: 46749 - protein, 35 aa, Artificial Sequence; identical to SEQ ID NO: 7443
  Cyclic GFR-binding peptide
  MOD_RES (2)..(3)..(35): Xaa is C or S

SEQ ID NO: 46750 - protein, 30 aa, Artificial Sequence
  Cyclic GFR-binding peptide
  MOD_RES (30)..(30): Xaa is C or S
PQALSPISILYKVGRKPKVLKYHYMIVRSX

SEQ ID NO: 46751 - protein, 25 aa, Artificial Sequence
  Cyclic GFR-binding peptide
APTKLSAISVLYLDDSSNVILKNYQ

SEQ ID NO: 46752 - protein, 30 aa, Artificial Sequence
  Cyclic GFR-binding peptide
  MOD_RES (1)..(2): Xaa is C or S
XXVSQDLSATSILYYIGKTPKILRKHRMIV

SEQ ID NO: 46753 - protein, 36 aa, Artificial Sequence
  Cyclic GFR-binding peptide
  MOD_RES (5)..(5): Xaa is C or S
RNVQXRPTQVQLNAISVLYFEIVRKKPIFLKKYRTL

SEQ ID NO: 46754 - protein, 31 aa, Artificial Sequence
  Cyclic GFR-binding peptide
  MOD_RES (28)..(30): Xaa is C or S
SATSVLYYDDMGVPTLRKHREGMSVAEXGXR

SEQ ID NO: 46755 - protein, 28 aa, Artificial Sequence
  Cyclic GFR-binding peptide
VQLSPISVLYKEIVRKKPIFLKYHYTLE

SEQ ID NO: 46756 - protein, 26 aa, Artificial Sequence
  Cyclic GFR-binding peptide
PTELSATSMLYYDEYDKVVLRKHREM

SEQ ID NO: 46757 - protein, 21 aa, Artificial Sequence
  Cyclic GFR-binding peptide
LSPISILYKIGKTPKILKYHY

SEQ ID NO: 46758 - protein, 26 aa, Artificial Sequence
  Cyclic GFR-binding peptide
QDLSPISILYKVGRTPKVLKYHYMVV

SEQ ID NO: 46759 - protein, 33 aa, Artificial Sequence; identical to SEQ ID NO: 7449
  Cyclic GFR-binding peptide
  MOD_RES (32)..(32): Xaa is C or S

SEQ ID NO: 46760 - protein, 37 aa, Artificial Sequence; identical to SEQ ID NO: 7448
  Cyclic GFR-binding peptide
  MOD_RES (3)..(4)..(36): Xaa is C or S

SEQ ID NO: 46761 - protein, 33 aa, Artificial Sequence
  Cyclic GFR-binding peptide
  MOD_RES (4)..(5): Xaa is C or S
ASPXXVSQDLNAISILYFIGKTPKILKKYRMIV

SEQ ID NO: 46762 - protein, 30 aa, Artificial Sequence
  Cyclic GFR-binding peptide
VQLSATSVLYYEIVRKKPIFLRKHRTLEDH

SEQ ID NO: 46763 - protein, 29 aa, Artificial Sequence
  Cyclic GFR-binding peptide
PQALSATSILYYVGRKPKVLRKHRMIVRS

SEQ ID NO: 46764 - protein, 30 aa, Artificial Sequence
  Cyclic GFR-binding peptide
  MOD_RES (28)..(30): Xaa is C or S
LSATSVLYYDDSSNVILRKHRNMVVRAXGX

SEQ ID NO: 46765 - protein, 38 aa, Artificial Sequence; identical to SEQ ID NO: 7454
  Cyclic GFR-binding peptide
  MOD_RES (37)..(37): Xaa is C or S

SEQ ID NO: 46766 - protein, 35 aa, Artificial Sequence; identical to SEQ ID NO: 7456
  Cyclic GFR-binding peptide
  MOD_RES (4)..(5): Xaa is C or S

SEQ ID NO: 46767 - protein, 29 aa, Artificial Sequence
  Cyclic GFR-binding peptide
  MOD_RES (1)..(2): Xaa is C or S
XXAPTKLSPISVLYKDDSSNVILKYHYNM

SEQ ID NO: 46768 - protein, 35 aa, Artificial Sequence
  Cyclic GFR-binding peptide
  MOD_RES (5)..(6): Xaa is C or S
VGKAXXVPTKLNAISVLYFDDMGVPTLKKYREGMS

SEQ ID NO: 46769 - protein, 32 aa, Artificial Sequence
  Cyclic GFR-binding peptide
  MOD_RES (30)..(32): Xaa is C or S
NAISVLYFEIVRKKPIFLKKYRTLEDHLAXKX

SEQ ID NO: 46770 - protein, 32 aa, Artificial Sequence
  Cyclic GFR-binding peptide
  MOD_RES (3)..(4): Xaa is C or S
APXXVPQALNAISILYFVGRKPKVLKKYRMIV

SEQ ID NO: 46771 - protein, 30 aa, Artificial Sequence
  Cyclic GFR-binding peptide
  MOD_RES (28)..(30): Xaa is C or S
DLSATSILYYIGKTPKILRKHRMIVKSXKX

SEQ ID NO: 46772 - protein, 29 aa, Artificial Sequence
  Cyclic GFR-binding peptide
  MOD_RES (3)..(4): Xaa is C or S
SPXXVPQDLSPISILYKVGRTPKVLKYHY

SEQ ID NO: 46773 - protein, 37 aa, Artificial Sequence; identical to SEQ ID NO: 7460
  Cyclic GFR-binding peptide
  MOD_RES (4)..(5)..(36): Xaa is C or S

SEQ ID NO: 46774 - protein, 33 aa, Artificial Sequence
  Cyclic GFR-binding peptide
  MOD_RES (4)..(5): Xaa is C or S
PKAXXVPTELSPISMLYKDEYDKVVLKYHYEMV

SEQ ID NO: 46775 - protein, 31 aa, Artificial Sequence
  Cyclic GFR-binding peptide
  MOD_RES (31)..(31): Xaa is C or S
PTELNAISMLYFDENEKVVLKKYRDMVVEGX

SEQ ID NO: 46776 - protein, 28 aa, Artificial Sequence
  Cyclic GFR-binding peptide
  MOD_RES (2)..(2): Xaa is C or S
TXAPTKLSPISVLYKDDSSNVILKYHYN

SEQ ID NO: 46777 - protein, 29 aa, Artificial Sequence
  Cyclic GFR-binding peptide
  MOD_RES (29)..(29): Xaa is C or S
QDLSPISILYKIGKTPKILKYHYMIVKSX

SEQ ID NO: 46778 - protein, 34 aa, Artificial Sequence; identical to SEQ ID NO: 7461
  Cyclic GFR-binding peptide
  MOD_RES (1)..(2)..(33): Xaa is C or S

SEQ ID NO: 46779 - protein, 35 aa, Artificial Sequence
  Cyclic GFR-binding peptide
  MOD_RES (6)..(7): Xaa is C or S
ASASPXXVPQDLNAISILYFVGRTPKVLKKYRMVV

SEQ ID NO: 46780 - protein, 32 aa, Artificial Sequence
  Cyclic GFR-binding peptide
  MOD_RES (29)..(31): Xaa is C or S
QDLSPISILYKVGRTPKVLKYHYMVVKSXKXS

SEQ ID NO: 46781 - protein, 24 aa, Artificial Sequence
  Cyclic GFR-binding peptide
SPISMLYKDEYDKVVLKYHYEMVV

SEQ ID NO: 46782 - protein, 41 aa, Artificial Sequence; identical to SEQ ID NO: 7463
  Cyclic GFR-binding peptide
  MOD_RES (6)..(7)..(39)..(41): Xaa is C or S

SEQ ID NO: 46783 - protein, 36 aa, Artificial Sequence
  Cyclic GFR-binding peptide
  MOD_RES (6)..(7): Xaa is C or S
AVPKAXXAPTKLNAISVLYFDSSNNVILKKYRNMVV

SEQ ID NO: 46784 - protein, 38 aa, Artificial Sequence; identical to SEQ ID NO: 7464
  Cyclic GFR-binding peptide
  MOD_RES (6)..(7)..(38): Xaa is C or S

SEQ ID NO: 46785 - protein, 27 aa, Artificial Sequence
  Cyclic GFR-binding peptide
  MOD_RES (1)..(2): Xaa is C or S
XXAPTKLNAISVLYFDSSNNVILKKYR

SEQ ID NO: 46786 - protein, 34 aa, Artificial Sequence
  Cyclic GFR-binding peptide
  MOD_RES (34)..(34): Xaa is C or S
QVQLSAISVLYLEIVRKKPIFLKNYQTLEDHLAX

SEQ ID NO: 46787 - protein, 35 aa, Artificial Sequence; identical to SEQ ID NO: 7465
  Cyclic GFR-binding peptide
  MOD_RES (2)..(3)..(35): Xaa is C or S

SEQ ID NO: 46788 - protein, 32 aa, Artificial Sequence; identical to SEQ ID NO: 818
  Cyclic GFR-binding peptide

SEQ ID NO: 46789 - protein, 33 aa, Artificial Sequence
  Cyclic GFR-binding peptide
QVQLSATSVLYYEIVRKKPIFLRKHRTLEDHLA

SEQ ID NO: 46790 - protein, 33 aa, Artificial Sequence
  Cyclic GFR-binding peptide
  MOD_RES (30)..(32): Xaa is C or S
KLSATSVLYYDDMGVPTLRKHREGMSVAEXGXR

SEQ ID NO: 46791 - protein, 31 aa, Artificial Sequence
  Cyclic GFR-binding peptide
  MOD_RES (2)..(2): Xaa is C or S
QXRPTQVQLNAISVLYFEIVRKKPIFLKKYR

SEQ ID NO: 46792 - protein, 31 aa, Artificial Sequence
  Cyclic GFR-binding peptide
  MOD_RES (1)..(2): Xaa is C or S
XXVPQDLSAISILYLVGRTPKVLKNYQMVVK

SEQ ID NO: 46793 - protein, 38 aa, Artificial Sequence; identical to SEQ ID NO: 7467
  Cyclic GFR-binding peptide
  MOD_RES (4)..(5)..(36)..(38): Xaa is C or S

SEQ ID NO: 46794 - protein, 41 aa, Artificial Sequence; identical to SEQ ID NO: 7468
  Cyclic GFR-binding peptide
  MOD_RES (6)..(7)..(39)..(41): Xaa is C or S

SEQ ID NO: 46795 - protein, 30 aa, Artificial Sequence
  Cyclic GFR-binding peptide
TKLSATSVLYYDDMGVPTLRKHREGMSVAE

SEQ ID NO: 46796 - protein, 29 aa, Artificial Sequence
  Cyclic GFR-binding peptide
PTKLNAISVLYFDDMGVPTLKKYREGMSV

SEQ ID NO: 46797 - protein, 28 aa, Artificial Sequence
  Cyclic GFR-binding peptide
QVQLSATSVLYYEIVRKKPIFLRKHRTL

SEQ ID NO: 46798 - protein, 34 aa, Artificial Sequence
  Cyclic GFR-binding peptide
  MOD_RES (4)..(5): Xaa is C or S
PKPXXAPTKLSPISVLYKDDSSNVILKYHYNMVV

SEQ ID NO: 46799 - protein, 36 aa, Artificial Sequence
  Cyclic GFR-binding peptide
  MOD_RES (3)..(3): Xaa is C or S
VQXRPTQVQLSPISVLYKEIVRKKPIFLKYHYTLED

SEQ ID NO: 46800 - protein, 29 aa, Artificial Sequence
  Cyclic GFR-binding peptide
  MOD_RES (2)..(3): Xaa is C or S
AXXVPTELSPISMLYKDENEKVVLKYHYD

SEQ ID NO: 46801 - protein, 23 aa, Artificial Sequence
  Cyclic GFR-binding peptide
LSAISILYLVGRTPKVLKNYQMV

SEQ ID NO: 46802 - protein, 37 aa, Artificial Sequence; identical to SEQ ID NO: 7474
  Cyclic GFR-binding peptide
  MOD_RES (3)..(4)..(36): Xaa is C or S

SEQ ID NO: 46803 - protein, 29 aa, Artificial Sequence
  Cyclic GFR-binding peptide
TKLSPISVLYKDDSSNVILKYHYNMVVRS

SEQ ID NO: 46804 - protein, 20 aa, Artificial Sequence
  Cyclic GFR-binding peptide
SPISILYKVGRKPKVLKYHY

SEQ ID NO: 46805 - protein, 25 aa, Artificial Sequence
  Cyclic GFR-binding peptide
ALSATSILYYVGRKPKVLRKHRMIV

SEQ ID NO: 46806 - protein, 20 aa, Artificial Sequence
  Cyclic GFR-binding peptide
SPISVLYKDDSSNVILKYHY

SEQ ID NO: 46807 - protein, 32 aa, Artificial Sequence
  Cyclic GFR-binding peptide
  MOD_RES (5)..(6): Xaa is C or S
VPKPXXAPTKLSATSVLYYDDSSNVILRKHRN

SEQ ID NO: 46808 - protein, 32 aa, Artificial Sequence
  Cyclic GFR-binding peptide
  MOD_RES (30)..(32): Xaa is C or S
PQALSPISILYKVGRKPKVLKYHYMIVRSXKX

SEQ ID NO: 46809 - protein, 34 aa, Artificial Sequence
  Cyclic GFR-binding peptide
  MOD_RES (4)..(5): Xaa is C or S
PKAXXVPTELSATSMLYYDEYDKVVLRKHREMVV

SEQ ID NO: 46810 - protein, 30 aa, Artificial Sequence
  Cyclic GFR-binding peptide
  MOD_RES (1)..(2): Xaa is C or S
XXVPTKLSATSVLYYDDMGVPTLRKHREGM

SEQ ID NO: 46811 - protein, 26 aa, Artificial Sequence
  Cyclic GFR-binding peptide
  MOD_RES (26)..(26): Xaa is C or S
SATSILYYIGKTPKILRKHRMIVKSX

SEQ ID NO: 46812 - protein, 39 aa, Artificial Sequence; identical to SEQ ID NO: 7477
  Cyclic GFR-binding peptide
  MOD_RES (6)..(7)..(39): Xaa is C or S

SEQ ID NO: 46813 - protein, 37 aa, Artificial Sequence; identical to SEQ ID NO: 7478
  Cyclic GFR-binding peptide
  MOD_RES (2)..(3)..(34)..(36): Xaa is C or S

SEQ ID NO: 46814 - protein, 32 aa, Artificial Sequence
  Cyclic GFR-binding peptide
  MOD_RES (30)..(32): Xaa is C or S
SQDLSAISILYLIGKTPKILKNYQMIVKSXKX

SEQ ID NO: 46815 - protein, 41 aa, Artificial Sequence; identical to SEQ ID NO: 7480
  Cyclic GFR-binding peptide
  MOD_RES (6)..(7)..(39)..(41): Xaa is C or S

SEQ ID NO: 46816 - protein, 21 aa, Artificial Sequence
  Cyclic GFR-binding peptide
LNAISILYFVGRKPKVLKKYR

SEQ ID NO: 46817 - protein, 32 aa, Artificial Sequence
  Cyclic GFR-binding peptide
  MOD_RES (2)..(3): Xaa is C or S
AXXAPTKLSPISVLYKDSSNNVILKYHYNMVV

SEQ ID NO: 46818 - protein, 27 aa, Artificial Sequence
  Cyclic GFR-binding peptide
TKLSPISVLYKDSSNNVILKYHYNMVV

SEQ ID NO: 46819 - protein, 32 aa, Artificial Sequence
  Cyclic GFR-binding peptide
  MOD_RES (30)..(32): Xaa is C or S
KLSAISVLYLDDMGVPTLKNYQEGMSVAEXGX

SEQ ID NO: 46820 - protein, 32 aa, Artificial Sequence
  Cyclic GFR-binding peptide
  MOD_RES (32)..(32): Xaa is C or S
QLSAISVLYLEIVRKKPIFLKNYQTLEDHLAX

SEQ ID NO: 46821 - protein, 22 aa, Artificial Sequence
  Cyclic GFR-binding peptide
LSPISILYKVGRKPKVLKYHYM

SEQ ID NO: 46822 - protein, 37 aa, Artificial Sequence; identical to SEQ ID NO: 7488
  Cyclic GFR-binding peptide
  MOD_RES (4)..(36): Xaa is C or S

SEQ ID NO: 46823 - protein, 37 aa, Artificial Sequence; identical to SEQ ID NO: 7491
  Cyclic GFR-binding peptide
  MOD_RES (2)..(3)..(35)..(37): Xaa is C or S

SEQ ID NO: 46824 - protein, 27 aa, Artificial Sequence
  Cyclic GFR-binding peptide
  MOD_RES (1)..(1): Xaa is C or S
XAPTKLSPISVLYKDSSNNVILKYHYN

SEQ ID NO: 46825 - protein, 33 aa, Artificial Sequence; identical to SEQ ID NO: 7492
  Cyclic GFR-binding peptide
  MOD_RES (2)..(3): Xaa is C or S

SEQ ID NO: 46826 - protein, 36 aa, Artificial Sequence; identical to SEQ ID NO: 7494
  Cyclic GFR-binding peptide
  MOD_RES (4)..(36): Xaa is C or S

SEQ ID NO: 46827 - protein, 31 aa, Artificial Sequence
  Cyclic GFR-binding peptide
  MOD_RES (31)..(31): Xaa is C or S
PTQLSAISVLYLDDSSNVILKNYQNMVVRAX

SEQ ID NO: 46828 - protein, 42 aa, Artificial Sequence; identical to SEQ ID NO: 7497
  Cyclic GFR-binding peptide
  MOD_RES (7)..(39)..(41): Xaa is C or S

SEQ ID NO: 46829 - protein, 24 aa, Artificial Sequence
  Cyclic GFR-binding peptide
LSATSVLYYEIVRKKPIFLRKHRT

SEQ ID NO: 46830 - protein, 35 aa, Artificial Sequence; identical to SEQ ID NO: 7499
  Cyclic GFR-binding peptide
  MOD_RES (3)..(4): Xaa is C or S

SEQ ID NO: 46831 - protein, 31 aa, Artificial Sequence
  Cyclic GFR-binding peptide
  MOD_RES (29)..(31): Xaa is C or S
ELSPISMLYKDENEKVVLKYHYDMVVEGXGX

SEQ ID NO: 46832 - protein, 34 aa, Artificial Sequence
  Cyclic GFR-binding peptide
  MOD_RES (31)..(33): Xaa is C or S
PTKLSAISVLYLDSSNNVILKNYQNMVVKAXGXH

SEQ ID NO: 46833 - protein, 38 aa, Artificial Sequence; identical to SEQ ID NO: 7501
  Cyclic GFR-binding peptide
  MOD_RES (2)..(3)..(35)..(37): Xaa is C or S

SEQ ID NO: 46834 - protein, 34 aa, Artificial Sequence; identical to SEQ ID NO: 7502
  Cyclic GFR-binding peptide
  MOD_RES (31)..(33): Xaa is C or S

SEQ ID NO: 46835 - protein, 31 aa, Artificial Sequence
  Cyclic GFR-binding peptide
  MOD_RES (31)..(31): Xaa is C or S
TKLNAISVLYFDDMGVPTLKKYREGMSVAEX

SEQ ID NO: 46836 - protein, 23 aa, Artificial Sequence
  Cyclic GFR-binding peptide
SPISVLYKEIVRKKPIFLKYHYT

SEQ ID NO: 46837 - protein, 30 aa, Artificial Sequence
  Cyclic GFR-binding peptide
PTKLSATSVLYYDDMGVPTLRKHREGMSVA

SEQ ID NO: 46838 - protein, 29 aa, Artificial Sequence
  Cyclic GFR-binding peptide
  MOD_RES (1)..(1): Xaa is C or S
XAPTKLSPISVLYKDDSSNVILKYHYNMV

SEQ ID NO: 46839 - protein, 20 aa, Artificial Sequence
  Cyclic GFR-binding peptide
SAISILYLVGRKPKVLKNYQ

SEQ ID NO: 46840 - protein, 38 aa, Artificial Sequence; identical to SEQ ID NO: 7506
  Cyclic GFR-binding peptide
  MOD_RES (3)..(35)..(37): Xaa is C or S

SEQ ID NO: 46841 - protein, 21 aa, Artificial Sequence
  Cyclic GFR-binding peptide
NAISVLYFDSSNNVILKKYRN

SEQ ID NO: 46842 - protein, 35 aa, Artificial Sequence; identical to SEQ ID NO: 7508
  Cyclic GFR-binding peptide
  MOD_RES (32)..(34): Xaa is C or S

SEQ ID NO: 46843 - protein, 34 aa, Artificial Sequence; identical to SEQ ID NO: 7509
  Cyclic GFR-binding peptide
  MOD_RES (1)..(2)..(33): Xaa is C or S

SEQ ID NO: 46844 - protein, 30 aa, Artificial Sequence
  Cyclic GFR-binding peptide
  MOD_RES (1)..(2): Xaa is C or S
XXVSQDLNAISILYFIGKTPKILKKYRMIV

SEQ ID NO: 46845 - protein, 34 aa, Artificial Sequence; identical to SEQ ID NO: 7510
  Cyclic GFR-binding peptide
  MOD_RES (2)..(3): Xaa is C or S

SEQ ID NO: 46846 - protein, 34 aa, Artificial Sequence; identical to SEQ ID NO: 7511
  Cyclic GFR-binding peptide
  MOD_RES (1)..(33): Xaa is C or S

SEQ ID NO: 46847 - protein, 25 aa, Artificial Sequence
  Cyclic GFR-binding peptide
PQALSATSILYYVGRKPKVLRKHRM

SEQ ID NO: 46848 - protein, 38 aa, Artificial Sequence; identical to SEQ ID NO: 7513
  Cyclic GFR-binding peptide
  MOD_RES (5)..(37): Xaa is C or S

SEQ ID NO: 46849 - protein, 40 aa, Artificial Sequence; identical to SEQ ID NO: 7514
  Cyclic GFR-binding peptide
  MOD_RES (6)..(7)..(38)..(40): Xaa is C or S

SEQ ID NO: 46850 - protein, 39 aa, Artificial Sequence; identical to SEQ ID NO: 7515
  Cyclic GFR-binding peptide
  MOD_RES (3)..(4)..(36)..(38): Xaa is C or S

SEQ ID NO: 46851 - protein, 20 aa, Artificial Sequence
  Cyclic GFR-binding peptide
NAISVLYFDSSNNVILKKYR

SEQ ID NO: 46852 - protein, 35 aa, Artificial Sequence
  Cyclic GFR-binding peptide
  MOD_RES (6)..(7): Xaa is C or S
ASAAPXXVPQALNAISILYFVGRKPKVLKKYRMIV

SEQ ID NO: 46853 - protein, 25 aa, Artificial Sequence
  Cyclic GFR-binding peptide
VPQALSATSILYYVGRKPKVLRKHR

SEQ ID NO: 46854 - protein, 28 aa, Artificial Sequence
  Cyclic GFR-binding peptide
  MOD_RES (1)..(1): Xaa is C or S
XVPTELSATSMLYYDENEKVVLRKHRDM

SEQ ID NO: 46855 - protein, 34 aa, Artificial Sequence; identical to SEQ ID NO: 7521
  Cyclic GFR-binding peptide
  MOD_RES (3)..(4): Xaa is C or S

SEQ ID NO: 46856 - protein, 34 aa, Artificial Sequence
  Cyclic GFR-binding peptide
  MOD_RES (5)..(6): Xaa is C or S
SASPXXVSQDLSAISILYLIGKTPKILKNYQMIV

SEQ ID NO: 46857 - protein, 27 aa, Artificial Sequence
  Cyclic GFR-binding peptide
  MOD_RES (1)..(2): Xaa is C or S
XXVPTELSATSMLYYDEYDKVVLRKHR

SEQ ID NO: 46858 - protein, 30 aa, Artificial Sequence
  Cyclic GFR-binding peptide
  MOD_RES (4)..(5): Xaa is C or S
AAPXXVPQALSATSILYYVGRKPKVLRKHR

SEQ ID NO: 46859 - protein, 33 aa, Artificial Sequence
  Cyclic GFR-binding peptide
  MOD_RES (30)..(32): Xaa is C or S
TKLSPISVLYKDDSSNVILKYHYNMVVRSXGXH

SEQ ID NO: 46860 - protein, 30 aa, Artificial Sequence
  Cyclic GFR-binding peptide
VQLSPISVLYKEIVRKKPIFLKYHYTLEDH

SEQ ID NO: 46861 - protein, 23 aa, Artificial Sequence
  Cyclic GFR-binding peptide
NAISMLYFDEYDKVVLKKYREMV

SEQ ID NO: 46862 - protein, 26 aa, Artificial Sequence
  Cyclic GFR-binding peptide
PTKLSAISVLYLDSSNNVILKNYQNM

SEQ ID NO: 46863 - protein, 38 aa, Artificial Sequence; identical to SEQ ID NO: 7527
  Cyclic GFR-binding peptide
  MOD_RES (5)..(6)..(38): Xaa is C or S

SEQ ID NO: 46864 - protein, 32 aa, Artificial Sequence; identical to SEQ ID NO: 830
  Cyclic GFR-binding peptide

SEQ ID NO: 46865 - protein, 20 aa, Artificial Sequence
  Cyclic GFR-binding peptide
SAISILYLVGRKPKVLKNYQ

SEQ ID NO: 46866 - protein, 39 aa, Artificial Sequence; identical to SEQ ID NO: 7531
  Cyclic GFR-binding peptide
  MOD_RES (37)..(39): Xaa is C or S

SEQ ID NO: 46867 - protein, 28 aa, Artificial Sequence
  Cyclic GFR-binding peptide
SQDLNAISILYFIGKTPKILKKYRMIVK

SEQ ID NO: 46868 - protein, 29 aa, Artificial Sequence
  Cyclic GFR-binding peptide
  MOD_RES (1)..(2): Xaa is C or S
XXAPTKLSATSVLYYDDSSNVILRKHRNM

SEQ ID NO: 46869 - protein, 34 aa, Artificial Sequence
  Cyclic GFR-binding peptide
  MOD_RES (5)..(5): Xaa is C or S
TKPTXAPTKLSATSVLYYDDSSNVILRKHRNMVV

SEQ ID NO: 46870 - protein, 36 aa, Artificial Sequence; identical to SEQ ID NO: 7535
  Cyclic GFR-binding peptide
  MOD_RES (3)..(4)..(35): Xaa is C or S

SEQ ID NO: 46871 - protein, 39 aa, Artificial Sequence; identical to SEQ ID NO: 7537
  Cyclic GFR-binding peptide
  MOD_RES (4)..(5)..(37)..(39): Xaa is C or S

SEQ ID NO: 46872 - protein, 36 aa, Artificial Sequence
  Cyclic GFR-binding peptide
  MOD_RES (6)..(7): Xaa is C or S
ASAAPXXVPQALSATSILYYVGRKPKVLRKHRMIVR

SEQ ID NO: 46873 - protein, 31 aa, Artificial Sequence
  Cyclic GFR-binding peptide
  MOD_RES (30)..(30): Xaa is C or S
SQDLSAISILYLIGKTPKILKNYQMIVKSXK

SEQ ID NO: 46874 - protein, 33 aa, Artificial Sequence
  Cyclic GFR-binding peptide
  MOD_RES (33)..(33): Xaa is C or S
VQLSPISVLYKEIVRKKPIFLKYHYTLEDHLAX

SEQ ID NO: 46875 - protein, 41 aa, Artificial Sequence; identical to SEQ ID NO: 7542
  Cyclic GFR-binding peptide
  MOD_RES (6)..(7)..(39)..(41): Xaa is C or S

SEQ ID NO: 46876 - protein, 32 aa, Artificial Sequence
  Cyclic GFR-binding peptide
  MOD_RES (5)..(6): Xaa is C or S
SASPXXVSQDLSPISILYKIGKTPKILKYHYM

SEQ ID NO: 46877 - protein, 21 aa, Artificial Sequence
  Cyclic GFR-binding peptide
SATSILYYVGRTPKVLRKHRM

SEQ ID NO: 46878 - protein, 22 aa, Artificial Sequence
  Cyclic GFR-binding peptide
KLSATSVLYYDDMGVPTLRKHR

SEQ ID NO: 46879 - protein, 26 aa, Artificial Sequence
  Cyclic GFR-binding peptide
NAISVLYFDDMGVPTLKKYREGMSVA

SEQ ID NO: 46880 - protein, 26 aa, Artificial Sequence
  Cyclic GFR-binding peptide
  MOD_RES (1)..(1): Xaa is C or S
XAPTKLSATSVLYYDDSSNVILRKHR

SEQ ID NO: 46881 - protein, 35 aa, Artificial Sequence
  Cyclic GFR-binding peptide
  MOD_RES (4)..(5): Xaa is C or S
GKAXXVPTKLSATSVLYYDDMGVPTLRKHREGMSV

SEQ ID NO: 46882 - protein, 38 aa, Artificial Sequence; identical to SEQ ID NO: 7545
  Cyclic GFR-binding peptide
  MOD_RES (6)..(7): Xaa is C or S

SEQ ID NO: 46883 - protein, 27 aa, Artificial Sequence
  Cyclic GFR-binding peptide
SPISVLYKEIVRKKPIFLKYHYTLEDH

SEQ ID NO: 46884 - protein, 27 aa, Artificial Sequence
  Cyclic GFR-binding peptide
TELSPISMLYKDENEKVVLKYHYDMVV

SEQ ID NO: 46885 - protein, 29 aa, Artificial Sequence
  Cyclic GFR-binding peptide
TKLSAISVLYLDSSNNVILKNYQNMVVKA

SEQ ID NO: 46886 - protein, 20 aa, Artificial Sequence
  Cyclic GFR-binding peptide
SPISVLYKDDSSNVILKYHY

SEQ ID NO: 46887 - protein, 36 aa, Artificial Sequence
  Cyclic GFR-binding peptide
  MOD_RES (6)..(7): Xaa is C or S
ASAAPXXVPQALSPISILYKVGRKPKVLKYHYMIVR

SEQ ID NO: 46888 - protein, 31 aa, Artificial Sequence
  Cyclic GFR-binding peptide
  MOD_RES (4)..(5): Xaa is C or S
PKPXXAPTQLSATSVLYYDDSSNVILRKHRN

SEQ ID NO: 46889 - protein, 31 aa, Artificial Sequence; identical to SEQ ID NO: 7550
  Cyclic GFR-binding peptide

SEQ ID NO: 46890 - protein, 28 aa, Artificial Sequence
  Cyclic GFR-binding peptide
  MOD_RES (1)..(1): Xaa is C or S
XVPTELSPISMLYKDENEKVVLKYHYDM

SEQ ID NO: 46891 - protein, 41 aa, Artificial Sequence; identical to SEQ ID NO: 7551
  Cyclic GFR-binding peptide
  MOD_RES (5)..(5): Xaa is C or S

SEQ ID NO: 46892 - protein, 33 aa, Artificial Sequence
  Cyclic GFR-binding peptide
  MOD_RES (32)..(32): Xaa is C or S
QLSPISVLYKEIVRKKPIFLKYHYTLEDHLAXK

SEQ ID NO: 46893 - protein, 34 aa, Artificial Sequence
  Cyclic GFR-binding peptide
  MOD_RES (6)..(6): Xaa is C or S
VTKPTXAPTKLSATSVLYYDDSSNVILRKHRNMV

SEQ ID NO: 46894 - protein, 33 aa, Artificial Sequence
  Cyclic GFR-binding peptide
  MOD_RES (6)..(7): Xaa is C or S
SIPKAXXVPTELSPISMLYKDEYDKVVLKYHYE

SEQ ID NO: 46895 - protein, 32 aa, Artificial Sequence
  Cyclic GFR-binding peptide
  MOD_RES (4)..(5): Xaa is C or S
GKAXXVPTKLSAISVLYLDDMGVPTLKNYQEG

SEQ ID NO: 46896 - protein, 21 aa, Artificial Sequence
  Cyclic GFR-binding peptide
NAISVLYFDDMGVPTLKKYRE

SEQ ID NO: 46897 - protein, 27 aa, Artificial Sequence
  Cyclic GFR-binding peptide
PTKLSATSVLYYDDMGVPTLRKHREGM

SEQ ID NO: 46898 - protein, 30 aa, Artificial Sequence
  Cyclic GFR-binding peptide
  MOD_RES (4)..(5): Xaa is C or S
PKPXXAPTQLSATSVLYYDDSSNVILRKHR

SEQ ID NO: 46899 - protein, 36 aa, Artificial Sequence; identical to SEQ ID NO: 7555
  Cyclic GFR-binding peptide

SEQ ID NO: 46900 - protein, 29 aa, Artificial Sequence
  Cyclic GFR-binding peptide
  MOD_RES (29)..(29): Xaa is C or S
QLSAISVLYLDDSSNVILKNYQNMVVRAX

SEQ ID NO: 46901 - protein, 33 aa, Artificial Sequence
  Cyclic GFR-binding peptide
  MOD_RES (5)..(5): Xaa is C or S
TKPTXAPTKLSPISVLYKDDSSNVILKYHYNMV

SEQ ID NO: 46902 - protein, 25 aa, Artificial Sequence
  Cyclic GFR-binding peptide
SPISVLYKEIVRKKPIFLKYHYTLE

SEQ ID NO: 46903 - protein, 33 aa, Artificial Sequence; identical to SEQ ID NO: 7556
  Cyclic GFR-binding peptide
  MOD_RES (3)..(3): Xaa is C or S

SEQ ID NO: 46904 - protein, 33 aa, Artificial Sequence; identical to SEQ ID NO: 7557
  Cyclic GFR-binding peptide
  MOD_RES (1)..(2)..(33): Xaa is C or S

SEQ ID NO: 46905 - protein, 28 aa, Artificial Sequence
  Cyclic GFR-binding peptide
APTQLSPISVLYKDDSSNVILKYHYNMV

SEQ ID NO: 46906 - protein, 23 aa, Artificial Sequence
  Cyclic GFR-binding peptide
SATSVLYYDDSSNVILRKHRNMV

SEQ ID NO: 46907 - protein, 35 aa, Artificial Sequence
  Cyclic GFR-binding peptide
  MOD_RES (32)..(34): Xaa is C or S
PTKLSAISVLYLDDMGVPTLKNYQEGMSVAEXGXR

SEQ ID NO: 46908 - protein, 36 aa, Artificial Sequence; identical to SEQ ID NO: 7561
  Cyclic GFR-binding peptide
  MOD_RES (3)..(4)..(36): Xaa is C or S

SEQ ID NO: 46909 - protein, 33 aa, Artificial Sequence
  Cyclic GFR-binding peptide
  MOD_RES (5)..(5): Xaa is C or S
TKPTXAPTKLSATSVLYYDDSSNVILRKHRNMV

SEQ ID NO: 46910 - protein, 24 aa, Artificial Sequence
  Cyclic GFR-binding peptide
SATSVLYYDDSSNVILRKHRNMVV

SEQ ID NO: 46911 - protein, 27 aa, Artificial Sequence
  Cyclic GFR-binding peptide
TKLNAISVLYFDDMGVPTLKKYREGMS

SEQ ID NO: 46912 - protein, 40 aa, Artificial Sequence; identical to SEQ ID NO: 7563
  Cyclic GFR-binding peptide
  MOD_RES (5)..(6)..(38)..(40): Xaa is C or S

SEQ ID NO: 46913 - protein, 36 aa, Artificial Sequence
  Cyclic GFR-binding peptide
  MOD_RES (4)..(4): Xaa is C or S
NVQXRPTQVQLSATSVLYYEIVRKKPIFLRKHRTLE

SEQ ID NO: 46914 - protein, 27 aa, Artificial Sequence
  Cyclic GFR-binding peptide
TQVQLNAISVLYFEIVRKKPIFLKKYR

SEQ ID NO: 46915 - protein, 31 aa, Artificial Sequence
  Cyclic GFR-binding peptide
  MOD_RES (3)..(4): Xaa is C or S
APXXVPQALSPISILYKVGRKPKVLKYHYMI

SEQ ID NO: 46916 - protein, 31 aa, Artificial Sequence
  Cyclic GFR-binding peptide
  MOD_RES (28)..(30): Xaa is C or S
LSATSVLYYDDSSNVILRKHRNMVVRAXGXH

SEQ ID NO: 46917 - protein, 34 aa, Artificial Sequence; identical to SEQ ID NO: 7564
  Cyclic GFR-binding peptide
  MOD_RES (1)..(32)..(34): Xaa is C or S

SEQ ID NO: 46918 - protein, 34 aa, Artificial Sequence; identical to SEQ ID NO: 7565
  Cyclic GFR-binding peptide
  MOD_RES (1)..(32)..(34): Xaa is C or S

SEQ ID NO: 46919 - protein, 21 aa, Artificial Sequence
  Cyclic GFR-binding peptide
LSPISILYKVGRKPKVLKYHY

SEQ ID NO: 46920 - protein, 28 aa, Artificial Sequence
  Cyclic GFR-binding peptide
  MOD_RES (3)..(3): Xaa is C or S
PTXAPTKLSATSVLYYDDSSNVILRKHR

SEQ ID NO: 46921 - protein, 30 aa, Artificial Sequence
  Cyclic GFR-binding peptide
  MOD_RES (3)..(4): Xaa is C or S
SPXXVSQDLSAISILYLIGKTPKILKNYQM

SEQ ID NO: 46922 - protein, 22 aa, Artificial Sequence
  Cyclic GFR-binding peptide
SPISMLYKDENEKVVLKYHYDM

SEQ ID NO: 46923 - protein, 36 aa, Artificial Sequence; identical to SEQ ID NO: 7570
  Cyclic GFR-binding peptide
  MOD_RES (1)..(2)..(33)..(35): Xaa is C or S

SEQ ID NO: 46924 - protein, 23 aa, Artificial Sequence
  Cyclic GFR-binding peptide
SPISVLYKDDSSNVILKYHYNMV

SEQ ID NO: 46925 - protein, 34 aa, Artificial Sequence; identical to SEQ ID NO: 7572
  Cyclic GFR-binding peptide
  MOD_RES (3)..(4): Xaa is C or S

SEQ ID NO: 46926 - protein, 24 aa, Artificial Sequence
  Cyclic GFR-binding peptide
PTKLSATSVLYYDDSSNVILRKHR

SEQ ID NO: 46927 - protein, 28 aa, Artificial Sequence
  Cyclic GFR-binding peptide
APTQLSATSVLYYDDSSNVILRKHRNMV

SEQ ID NO: 46928 - protein, 38 aa, Artificial Sequence; identical to SEQ ID NO: 7573
  Cyclic GFR-binding peptide
  MOD_RES (3)..(3): Xaa is C or S

SEQ ID NO: 46929 - protein, 38 aa, Artificial Sequence; identical to SEQ ID NO: 7574
  Cyclic GFR-binding peptide
  MOD_RES (36)..(38): Xaa is C or S

SEQ ID NO: 46930 - protein, 30 aa, Artificial Sequence
  Cyclic GFR-binding peptide
  MOD_RES (30)..(30): Xaa is C or S
TKLSPISVLYKDSSNNVILKYHYNMVVKAX

SEQ ID NO: 46931 - protein, 40 aa, Artificial Sequence; identical to SEQ ID NO: 7575
  Cyclic GFR-binding peptide
  MOD_RES (6)..(38)..(40): Xaa is C or S

SEQ ID NO: 46932 - protein, 36 aa, Artificial Sequence; identical to SEQ ID NO: 7576
  Cyclic GFR-binding peptide
  MOD_RES (1)..(2)..(34)..(36): Xaa is C or S

SEQ ID NO: 46933 - protein, 26 aa, Artificial Sequence
  Cyclic GFR-binding peptide
VPTELNAISMLYFDEYDKVVLKKYRE

SEQ ID NO: 46934 - protein, 34 aa, Artificial Sequence
  Cyclic GFR-binding peptide
  MOD_RES (31)..(33): Xaa is C or S
LNAISVLYFEIVRKKPIFLKKYRTLEDHLAXKXE

SEQ ID NO: 46935 - protein, 37 aa, Artificial Sequence; identical to SEQ ID NO: 7578
  Cyclic GFR-binding peptide
  MOD_RES (3)..(4)..(36): Xaa is C or S

SEQ ID NO: 46936 - protein, 31 aa, Artificial Sequence
  Cyclic GFR-binding peptide
  MOD_RES (4)..(5): Xaa is C or S
PKAXXAPTKLSPISVLYKDSSNNVILKYHYN

SEQ ID NO: 46937 - protein, 33 aa, Artificial Sequence; identical to SEQ ID NO: 7580
  Cyclic GFR-binding peptide
  MOD_RES (1)..(33): Xaa is C or S

SEQ ID NO: 46938 - protein, 35 aa, Artificial Sequence
  Cyclic GFR-binding peptide
  MOD_RES (6)..(7): Xaa is C or S
ASAAPXXVPQALSAISILYLVGRKPKVLKNYQMIV

SEQ ID NO: 46939 - protein, 20 aa, Artificial Sequence
  Cyclic GFR-binding peptide
NAISILYFVGRKPKVLKKYR

SEQ ID NO: 46940 - protein, 35 aa, Artificial Sequence
  Cyclic GFR-binding peptide
  MOD_RES (2)..(2): Xaa is C or S
QXRPTQVQLSAISVLYLEIVRKKPIFLKNYQTLED

SEQ ID NO: 46941 - protein, 38 aa, Artificial Sequence; identical to SEQ ID NO: 7581
  Cyclic GFR-binding peptide
  MOD_RES (2)..(3)..(36)..(38): Xaa is C or S

SEQ ID NO: 46942 - protein, 33 aa, Artificial Sequence
  Cyclic GFR-binding peptide
  MOD_RES (31)..(33): Xaa is C or S
PTELSPISMLYKDEYDKVVLKYHYEMVVEGXGX

SEQ ID NO: 46943 - protein, 34 aa, Artificial Sequence
  Cyclic GFR-binding peptide
  MOD_RES (6)..(6): Xaa is C or S
VTKPTXAPTKLSPISVLYKDDSSNVILKYHYNMV

SEQ ID NO: 46944 - protein, 31 aa, Artificial Sequence; identical to SEQ ID NO: 7582
  Cyclic GFR-binding peptide
  MOD_RES (31)..(31): Xaa is C or S

SEQ ID NO: 46945 - protein, 31 aa, Artificial Sequence
  Cyclic GFR-binding peptide
  MOD_RES (5)..(5): Xaa is C or S
TKPTXAPTKLSAISVLYLDDSSNVILKNYQN

SEQ ID NO: 46946 - protein, 37 aa, Artificial Sequence; identical to SEQ ID NO: 7585
  Cyclic GFR-binding peptide
  MOD_RES (3)..(35)..(37): Xaa is C or S

SEQ ID NO: 46947 - protein, 36 aa, Artificial Sequence; identical to SEQ ID NO: 7586
  Cyclic GFR-binding peptide
  MOD_RES (4)..(5)..(36): Xaa is C or S

SEQ ID NO: 46948 - protein, 34 aa, Artificial Sequence; identical to SEQ ID NO: 7587
  Cyclic GFR-binding peptide
  MOD_RES (3)..(4): Xaa is C or S

SEQ ID NO: 46949 - protein, 33 aa, Artificial Sequence; identical to SEQ ID NO: 7588
  Cyclic GFR-binding peptide
  MOD_RES (31)..(33): Xaa is C or S

SEQ ID NO: 46950 - protein, 29 aa, Artificial Sequence
  Cyclic GFR-binding peptide
  MOD_RES (29)..(29): Xaa is C or S
ELNAISMLYFDEYDKVVLKKYREMVVEGX

SEQ ID NO: 46951 - protein, 27 aa, Artificial Sequence
  Cyclic GFR-binding peptide
QVQLSPISVLYKEIVRKKPIFLKYHYT

SEQ ID NO: 46952 - protein, 32 aa, Artificial Sequence
  Cyclic GFR-binding peptide
  MOD_RES (32)..(32): Xaa is C or S
PTKLSATSVLYYDDMGVPTLRKHREGMSVAEX

SEQ ID NO: 46953 - protein, 37 aa, Artificial Sequence; identical to SEQ ID NO: 7590
  Cyclic GFR-binding peptide
  MOD_RES (3)..(4)..(36): Xaa is C or S

SEQ ID NO: 46954 - protein, 31 aa, Artificial Sequence
  Cyclic GFR-binding peptide
  MOD_RES (29)..(31): Xaa is C or S
ELSATSMLYYDENEKVVLRKHRDMVVEGXGX

SEQ ID NO: 46955 - protein, 31 aa, Artificial Sequence
  Cyclic GFR-binding peptide
  MOD_RES (29)..(31): Xaa is C or S
QDLNAISILYFIGKTPKILKKYRMIVKSXKX

SEQ ID NO: 46956 - protein, 34 aa, Artificial Sequence
  Cyclic GFR-binding peptide
  MOD_RES (33)..(33): Xaa is C or S
VQLSPISVLYKEIVRKKPIFLKYHYTLEDHLAXK

SEQ ID NO: 46957 - protein, 31 aa, Artificial Sequence
  Cyclic GFR-binding peptide
  MOD_RES (30)..(30): Xaa is C or S
TQLSATSVLYYDDSSNVILRKHRNMVVRAXG

SEQ ID NO: 46958 - protein, 32 aa, Artificial Sequence
  Cyclic GFR-binding peptide
  MOD_RES (6)..(7): Xaa is C or S
AVPKAXXAPTKLSPISVLYKDSSNNVILKYHY

SEQ ID NO: 46959 - protein, 38 aa, Artificial Sequence; identical to SEQ ID NO: 7594
  Cyclic GFR-binding peptide
  MOD_RES (2)..(3)..(35)..(37): Xaa is C or S

SEQ ID NO: 46960 - protein, 28 aa, Artificial Sequence
  Cyclic GFR-binding peptide
PTKLSAISVLYLDDSSNVILKNYQNMVV

SEQ ID NO: 46961 - protein, 27 aa, Artificial Sequence
  Cyclic GFR-binding peptide
TELSATSMLYYDENEKVVLRKHRDMVV

SEQ ID NO: 46962 - protein, 29 aa, Artificial Sequence
  Cyclic GFR-binding peptide
PTQVQLSPISVLYKEIVRKKPIFLKYHYT

SEQ ID NO: 46963 - protein, 23 aa, Artificial Sequence
  Cyclic GFR-binding peptide
LNAISILYFIGKTPKILKKYRMI

SEQ ID NO: 46964 - protein, 35 aa, Artificial Sequence; identical to SEQ ID NO: 7595
  Cyclic GFR-binding peptide
  MOD_RES (3)..(4): Xaa is C or S

SEQ ID NO: 46965 - protein, 29 aa, Artificial Sequence
  Cyclic GFR-binding peptide
  MOD_RES (3)..(4): Xaa is C or S
KPXXAPTKLSAISVLYLDDSSNVILKNYQ

SEQ ID NO: 46966 - protein, 27 aa, Artificial Sequence
  Cyclic GFR-binding peptide
VPTELSATSMLYYDEYDKVVLRKHREM

SEQ ID NO: 46967 - protein, 29 aa, Artificial Sequence
  Cyclic GFR-binding peptide
  MOD_RES (29)..(29): Xaa is C or S
KLSATSVLYYDDSSNVILRKHRNMVVRSX

SEQ ID NO: 46968 - protein, 34 aa, Artificial Sequence; identical to SEQ ID NO: 7597
  Cyclic GFR-binding peptide
  MOD_RES (33)..(33): Xaa is C or S

SEQ ID NO: 46969 - protein, 28 aa, Artificial Sequence
  Cyclic GFR-binding peptide
  MOD_RES (1)..(2): Xaa is C or S
XXVPQALSATSILYYVGRKPKVLRKHRM

SEQ ID NO: 46970 - protein, 41 aa, Artificial Sequence; identical to SEQ ID NO: 7598
  Cyclic GFR-binding peptide
  MOD_RES (5)..(6)..(38)..(40): Xaa is C or S

SEQ ID NO: 46971 - protein, 21 aa, Artificial Sequence
  Cyclic GFR-binding peptide
SATSILYYIGKTPKILRKHRM

SEQ ID NO: 46972 - protein, 33 aa, Artificial Sequence; identical to SEQ ID NO: 7599
  Cyclic GFR-binding peptide
  MOD_RES (32)..(32): Xaa is C or S

SEQ ID NO: 46973 - protein, 24 aa, Artificial Sequence
  Cyclic GFR-binding peptide
TKLSPISVLYKDSSNNVILKYHYN

SEQ ID NO: 46974 - protein, 38 aa, Artificial Sequence; identical to SEQ ID NO: 7600
  Cyclic GFR-binding peptide
  MOD_RES (4)..(5)..(36)..(38): Xaa is C or S

SEQ ID NO: 46975 - protein, 22 aa, Artificial Sequence
  Cyclic GFR-binding peptide
SATSVLYYDDMGVPTLRKHREG

SEQ ID NO: 46976 - protein, 28 aa, Artificial Sequence
  Cyclic GFR-binding peptide
PTQVQLSAISVLYLEIVRKKPIFLKNYQ

SEQ ID NO: 46977 - protein, 29 aa, Artificial Sequence
  Cyclic GFR-binding peptide
QVQLSPISVLYKEIVRKKPIFLKYHYTLE

SEQ ID NO: 46978 - protein, 32 aa, Artificial Sequence
  Cyclic GFR-binding peptide
  MOD_RES (6)..(7): Xaa is C or S
KVGKAXXVPTKLNAISVLYFDDMGVPTLKKYR

SEQ ID NO: 46979 - protein, 40 aa, Artificial Sequence; identical to SEQ ID NO: 7603
  Cyclic GFR-binding peptide
  MOD_RES (5)..(6)..(38)..(40): Xaa is C or S

SEQ ID NO: 46980 - protein, 37 aa, Artificial Sequence
  Cyclic GFR-binding peptide
  MOD_RES (4)..(4): Xaa is C or S
NVQXRPTQVQLSATSVLYYEIVRKKPIFLRKHRTLED

SEQ ID NO: 46981 - protein, 31 aa, Artificial Sequence
  Cyclic GFR-binding peptide
  MOD_RES (4)..(5): Xaa is C or S
PKAXXVPTELSATSMLYYDEYDKVVLRKHRE

SEQ ID NO: 46982 - protein, 43 aa, Artificial Sequence; identical to SEQ ID NO: 7606
  Cyclic GFR-binding peptide
  MOD_RES (4)..(41)..(43): Xaa is C or S

SEQ ID NO: 46983 - protein, 36 aa, Artificial Sequence; identical to SEQ ID NO: 7605
  Cyclic GFR-binding peptide
  MOD_RES (3)..(4)..(36): Xaa is C or S

SEQ ID NO: 46984 - protein, 32 aa, Artificial Sequence
  Cyclic GFR-binding peptide
  MOD_RES (2)..(3): Xaa is C or S
PXXVPQDLSPISILYKVGRTPKVLKYHYMVVK

SEQ ID NO: 46985 - protein, 32 aa, Artificial Sequence
  Cyclic GFR-binding peptide
  MOD_RES (4)..(5): Xaa is C or S
PKAXXVPTELNAISMLYFDENEKVVLKKYRDM

SEQ ID NO: 46986 - protein, 30 aa, Artificial Sequence
  Cyclic GFR-binding peptide
  MOD_RES (30)..(30): Xaa is C or S
NAISVLYFEIVRKKPIFLKKYRTLEDHLAX

SEQ ID NO: 46987 - protein, 32 aa, Artificial Sequence
  Cyclic GFR-binding peptide
  MOD_RES (30)..(32): Xaa is C or S
TELNAISMLYFDENEKVVLKKYRDMVVEGXGX

SEQ ID NO: 46988 - protein, 34 aa, Artificial Sequence
  Cyclic GFR-binding peptide
  MOD_RES (5)..(6): Xaa is C or S
VPKPXXAPTKLSPISVLYKDDSSNVILKYHYNMV

SEQ ID NO: 46989 - protein, 33 aa, Artificial Sequence
  Cyclic GFR-binding peptide
  MOD_RES (3)..(4): Xaa is C or S
SPXXVPQDLSAISILYLVGRTPKVLKNYQMVVK

SEQ ID NO: 46990 - protein, 33 aa, Artificial Sequence
  Cyclic GFR-binding peptide
  MOD_RES (5)..(6): Xaa is C or S
VPKPXXAPTQLSAISVLYLDDSSNVILKNYQNM

SEQ ID NO: 46991 - protein, 38 aa, Artificial Sequence; identical to SEQ ID NO: 7608
  Cyclic GFR-binding peptide
  MOD_RES (4)..(5)..(36)..(38): Xaa is C or S

SEQ ID NO: 46992 - protein, 37 aa, Artificial Sequence; identical to SEQ ID NO: 7610
  Cyclic GFR-binding peptide
  MOD_RES (6)..(6): Xaa is C or S

SEQ ID NO: 46993 - protein, 26 aa, Artificial Sequence
  Cyclic GFR-binding peptide
QLSATSVLYYEIVRKKPIFLRKHRTL

SEQ ID NO: 46994 - protein, 37 aa, Artificial Sequence; identical to SEQ ID NO: 7609
  Cyclic GFR-binding peptide
  MOD_RES (4)..(5)..(36): Xaa is C or S

SEQ ID NO: 46995 - protein, 23 aa, Artificial Sequence
  Cyclic GFR-binding peptide
TKLSPISVLYKDDSSNVILKYHY

SEQ ID NO: 46996 - protein, 37 aa, Artificial Sequence; identical to SEQ ID NO: 7612
  Cyclic GFR-binding peptide
  MOD_RES (3)..(35)..(37): Xaa is C or S

SEQ ID NO: 46997 - protein, 39 aa, Artificial Sequence; identical to SEQ ID NO: 7611
  Cyclic GFR-binding peptide
  MOD_RES (5)..(6)..(37)..(39): Xaa is C or S

SEQ ID NO: 46998 - protein, 31 aa, Artificial Sequence; identical to SEQ ID NO: 7613
  Cyclic GFR-binding peptide
  MOD_RES (31)..(31): Xaa is C or S

SEQ ID NO: 46999 - protein, 27 aa, Artificial Sequence
  Cyclic GFR-binding peptide
SQDLSAISILYLIGKTPKILKNYQMIV

SEQ ID NO: 47000 - protein, 30 aa, Artificial Sequence
  Cyclic GFR-binding peptide
  MOD_RES (3)..(4): Xaa is C or S
KAXXAPTKLNAISVLYFDSSNNVILKKYRN

SEQ ID NO: 47001 - protein, 28 aa, Artificial Sequence
  Cyclic GFR-binding peptide
  MOD_RES (2)..(3): Xaa is C or S
PXXVPQDLSAISILYLVGRTPKVLKNYQ

SEQ ID NO: 47002 - protein, 34 aa, Artificial Sequence
  Cyclic GFR-binding peptide
  MOD_RES (5)..(6): Xaa is C or S
VPKPXXAPTKLSATSVLYYDDSSNVILRKHRNMV

SEQ ID NO: 47003 - protein, 33 aa, Artificial Sequence
  Cyclic GFR-binding peptide
QVQLSAISVLYLEIVRKKPIFLKNYQTLEDHLA

SEQ ID NO: 47004 - protein, 22 aa, Artificial Sequence
  Cyclic GFR-binding peptide
SATSMLYYDENEKVVLRKHRDM

SEQ ID NO: 47005 - protein, 32 aa, Artificial Sequence; identical to SEQ ID NO: 7615
  Cyclic GFR-binding peptide
  MOD_RES (1)..(1): Xaa is C or S

SEQ ID NO: 47006 - protein, 29 aa, Artificial Sequence
  Cyclic GFR-binding peptide
  MOD_RES (3)..(4): Xaa is C or S
KAXXVPTKLNAISVLYFDDMGVPTLKKYR

SEQ ID NO: 47007 - protein, 27 aa, Artificial Sequence
  Cyclic GFR-binding peptide
  MOD_RES (27)..(27): Xaa is C or S
LSAISILYLVGRTPKVLKNYQMVVKSX

SEQ ID NO: 47008 - protein, 32 aa, Artificial Sequence
  Cyclic GFR-binding peptide
  MOD_RES (3)..(4): Xaa is C or S
APXXVPQALSATSILYYVGRKPKVLRKHRMIV

SEQ ID NO: 47009 - protein, 31 aa, Artificial Sequence; identical to SEQ ID NO: 7620
  Cyclic GFR-binding peptide

SEQ ID NO: 47010 - protein, 31 aa, Artificial Sequence
  Cyclic GFR-binding peptide
  MOD_RES (4)..(5): Xaa is C or S
ASPXXVSQDLSPISILYKIGKTPKILKYHYM

SEQ ID NO: 47011 - protein, 31 aa, Artificial Sequence
  Cyclic GFR-binding peptide
  MOD_RES (29)..(31): Xaa is C or S
QDLSATSILYYVGRTPKVLRKHRMVVKSXKX

SEQ ID NO: 47012 - protein, 31 aa, Artificial Sequence
  Cyclic GFR-binding peptide
  MOD_RES (1)..(2): Xaa is C or S
XXVPTKLSAISVLYLDDMGVPTLKNYQEGMS

SEQ ID NO: 47013 - protein, 40 aa, Artificial Sequence; identical to SEQ ID NO: 7623
  Cyclic GFR-binding peptide
  MOD_RES (5)..(6)..(38)..(40): Xaa is C or S

SEQ ID NO: 47014 - protein, 24 aa, Artificial Sequence
  Cyclic GFR-binding peptide
LSATSMLYYDEYDKVVLRKHREMV

SEQ ID NO: 47015 - protein, 28 aa, Artificial Sequence
  Cyclic GFR-binding peptide
TELSATSMLYYDENEKVVLRKHRDMVVE

SEQ ID NO: 47016 - protein, 28 aa, Artificial Sequence
  Cyclic GFR-binding peptide
TKLNAISVLYFDDMGVPTLKKYREGMSV

SEQ ID NO: 47017 - protein, 28 aa, Artificial Sequence
  Cyclic GFR-binding peptide
KLSAISVLYLDDSSNVILKNYQNMVVRS

SEQ ID NO: 47018 - protein, 28 aa, Artificial Sequence
  Cyclic GFR-binding peptide
  MOD_RES (1)..(2): Xaa is C or S
XXAPTKLSAISVLYLDSSNNVILKNYQN

SEQ ID NO: 47019 - protein, 31 aa, Artificial Sequence
  Cyclic GFR-binding peptide
  MOD_RES (3)..(3): Xaa is C or S
PTXAPTKLSAISVLYLDDSSNVILKNYQNMV

SEQ ID NO: 47020 - protein, 39 aa, Artificial Sequence; identical to SEQ ID NO: 7625
  Cyclic GFR-binding peptide
  MOD_RES (5)..(6)..(37)..(39): Xaa is C or S

SEQ ID NO: 47021 - protein, 37 aa, Artificial Sequence; identical to SEQ ID NO: 7626
  Cyclic GFR-binding peptide
  MOD_RES (5)..(6): Xaa is C or S

SEQ ID NO: 47022 - protein, 30 aa, Artificial Sequence
  Cyclic GFR-binding peptide
  MOD_RES (28)..(30): Xaa is C or S
LSPISMLYKDENEKVVLKYHYDMVVEGXGX

SEQ ID NO: 47023 - protein, 32 aa, Artificial Sequence
  Cyclic GFR-binding peptide
  MOD_RES (30)..(32): Xaa is C or S
SQDLNAISILYFIGKTPKILKKYRMIVKSXKX

SEQ ID NO: 47024 - protein, 29 aa, Artificial Sequence
  Cyclic GFR-binding peptide
  MOD_RES (29)..(29): Xaa is C or S
ELNAISMLYFDENEKVVLKKYRDMVVEGX

SEQ ID NO: 47025 - protein, 30 aa, Artificial Sequence
  Cyclic GFR-binding peptide
  MOD_RES (28)..(30): Xaa is C or S
LSATSMLYYDENEKVVLRKHRDMVVEGXGX

SEQ ID NO: 47026 - protein, 25 aa, Artificial Sequence
  Cyclic GFR-binding peptide
KLSATSVLYYDDMGVPTLRKHREGM

SEQ ID NO: 47027 - protein, 34 aa, Artificial Sequence
  Cyclic GFR-binding peptide
  MOD_RES (5)..(6): Xaa is C or S
VGKAXXVPTKLSATSVLYYDDMGVPTLRKHREGM

SEQ ID NO: 47028 - protein, 25 aa, Artificial Sequence
  Cyclic GFR-binding peptide
PTKLSPISVLYKDSSNNVILKYHYN

SEQ ID NO: 47029 - protein, 29 aa, Artificial Sequence
  Cyclic GFR-binding peptide
  MOD_RES (2)..(3): Xaa is C or S
PXXAPTQLSATSVLYYDDSSNVILRKHRN

SEQ ID NO: 47030 - protein, 29 aa, Artificial Sequence
  Cyclic GFR-binding peptide
  MOD_RES (3)..(4): Xaa is C or S
SPXXVSQDLNAISILYFIGKTPKILKKYR

SEQ ID NO: 47031 - protein, 40 aa, Artificial Sequence; identical to SEQ ID NO: 7632
  Cyclic GFR-binding peptide
  MOD_RES (6)..(7)..(39): Xaa is C or S

SEQ ID NO: 47032 - protein, 40 aa, Artificial Sequence; identical to SEQ ID NO: 7633
  Cyclic GFR-binding peptide
  MOD_RES (1)..(38)..(40): Xaa is C or S

SEQ ID NO: 47033 - protein, 37 aa, Artificial Sequence; identical to SEQ ID NO: 7634
  Cyclic GFR-binding peptide
  MOD_RES (3)..(4)..(35)..(37): Xaa is C or S

SEQ ID NO: 47034 - protein, 27 aa, Artificial Sequence
  Cyclic GFR-binding peptide
QLSAISVLYLEIVRKKPIFLKNYQTLE

SEQ ID NO: 47035 - protein, 36 aa, Artificial Sequence; identical to SEQ ID NO: 7635
  Cyclic GFR-binding peptide
  MOD_RES (3)..(4)..(35): Xaa is C or S

SEQ ID NO: 47036 - protein, 42 aa, Artificial Sequence; identical to SEQ ID NO: 7636
  Cyclic GFR-binding peptide
  MOD_RES (5)..(42): Xaa is C or S

SEQ ID NO: 47037 - protein, 36 aa, Artificial Sequence; identical to SEQ ID NO: 7637
  Cyclic GFR-binding peptide
  MOD_RES (35)..(35): Xaa is C or S

SEQ ID NO: 47038 - protein, 30 aa, Artificial Sequence
  Cyclic GFR-binding peptide
  MOD_RES (27)..(29): Xaa is C or S
SATSMLYYDENEKVVLRKHRDMVVEGXGXR

SEQ ID NO: 47039 - protein, 32 aa, Artificial Sequence; identical to SEQ ID NO: 7638
  Cyclic GFR-binding peptide
  MOD_RES (1)..(32): Xaa is C or S

SEQ ID NO: 47040 - protein, 27 aa, Artificial Sequence
  Cyclic GFR-binding peptide
  MOD_RES (1)..(1): Xaa is C or S
XVPTKLSATSVLYYDDMGVPTLRKHRE

SEQ ID NO: 47041 - protein, 34 aa, Artificial Sequence
  Cyclic GFR-binding peptide
  MOD_RES (4)..(5): Xaa is C or S
PKPXXAPTKLSATSVLYYDDSSNVILRKHRNMVV

SEQ ID NO: 47042 - protein, 27 aa, Artificial Sequence
  Cyclic GFR-binding peptide
VPTELSPISMLYKDEYDKVVLKYHYEM

SEQ ID NO: 47043 - protein, 31 aa, Artificial Sequence
  Cyclic GFR-binding peptide
  MOD_RES (1)..(1): Xaa is C or S
XRPTQVQLSATSVLYYEIVRKKPIFLRKHRT

SEQ ID NO: 47044 - protein, 32 aa, Artificial Sequence
  Cyclic GFR-binding peptide
  MOD_RES (29)..(31): Xaa is C or S
ELSPISMLYKDEYDKVVLKYHYEMVVEGXGXR

SEQ ID NO: 47045 - protein, 31 aa, Artificial Sequence
  Cyclic GFR-binding peptide
  MOD_RES (28)..(30): Xaa is C or S
LSAISVLYLDSSNNVILKNYQNMVVKAXGXH

SEQ ID NO: 47046 - protein, 24 aa, Artificial Sequence
  Cyclic GFR-binding peptide
LSPISMLYKDEYDKVVLKYHYEMV

SEQ ID NO: 47047 - protein, 31 aa, Artificial Sequence
  Cyclic GFR-binding peptide
  MOD_RES (3)..(4): Xaa is C or S
APXXVPQALSATSILYYVGRKPKVLRKHRMI

SEQ ID NO: 47048 - protein, 28 aa, Artificial Sequence
  Cyclic GFR-binding peptide
  MOD_RES (28)..(28): Xaa is C or S
LSPISMLYKDENEKVVLKYHYDMVVEGX

SEQ ID NO: 47049 - protein, 31 aa, Artificial Sequence
  Cyclic GFR-binding peptide
  MOD_RES (28)..(30): Xaa is C or S
LSPISMLYKDEYDKVVLKYHYEMVVEGXGXR

SEQ ID NO: 47050 - protein, 31 aa, Artificial Sequence
  Cyclic GFR-binding peptide
  MOD_RES (31)..(31): Xaa is C or S
PTELSATSMLYYDEYDKVVLRKHREMVVEGX

SEQ ID NO: 47051 - protein, 24 aa, Artificial Sequence
  Cyclic GFR-binding peptide
QALSATSILYYVGRKPKVLRKHRM

SEQ ID NO: 47052 - protein, 33 aa, Artificial Sequence
  Cyclic GFR-binding peptide
  MOD_RES (30)..(32): Xaa is C or S
TQLSATSVLYYDDSSNVILRKHRNMVVRAXGXH

SEQ ID NO: 47053 - protein, 30 aa, Artificial Sequence
  Cyclic GFR-binding peptide
  MOD_RES (30)..(30): Xaa is C or S
TQLSAISVLYLDDSSNVILKNYQNMVVRAX

SEQ ID NO: 47054 - protein, 31 aa, Artificial Sequence
  Cyclic GFR-binding peptide
  MOD_RES (6)..(6): Xaa is C or S
VTKPTXAPTKLSPISVLYKDDSSNVILKYHY

SEQ ID NO: 47055 - protein, 39 aa, Artificial Sequence; identical to SEQ ID NO: 7646
  Cyclic GFR-binding peptide
  MOD_RES (6)..(7)..(39): Xaa is C or S

SEQ ID NO: 47056 - protein, 34 aa, Artificial Sequence; identical to SEQ ID NO: 7647
  Cyclic GFR-binding peptide
  MOD_RES (1)..(2)..(33): Xaa is C or S

SEQ ID NO: 47057 - protein, 29 aa, Artificial Sequence
  Cyclic GFR-binding peptide
  MOD_RES (3)..(3): Xaa is C or S
PTXAPTKLSATSVLYYDDSSNVILRKHRN

SEQ ID NO: 47058 - protein, 38 aa, Artificial Sequence; identical to SEQ ID NO: 7649
  Cyclic GFR-binding peptide
  MOD_RES (5)..(6)..(38): Xaa is C or S

SEQ ID NO: 47059 - protein, 28 aa, Artificial Sequence
  Cyclic GFR-binding peptide
  MOD_RES (1)..(2): Xaa is C or S
XXAPTKLSATSVLYYDDSSNVILRKHRN

SEQ ID NO: 47060 - protein, 25 aa, Artificial Sequence
  Cyclic GFR-binding peptide
QALSPISILYKVGRKPKVLKYHYMI

SEQ ID NO: 47061 - protein, 32 aa, Artificial Sequence
  Cyclic GFR-binding peptide
  MOD_RES (2)..(3): Xaa is C or S
PXXAPTKLSAISVLYLDDSSNVILKNYQNMVV

SEQ ID NO: 47062 - protein, 32 aa, Artificial Sequence
  Cyclic GFR-binding peptide
  MOD_RES (5)..(5): Xaa is C or S
TKPTXAPTKLSATSVLYYDDSSNVILRKHRNM

SEQ ID NO: 47063 - protein, 39 aa, Artificial Sequence; identical to SEQ ID NO: 7653
  Cyclic GFR-binding peptide
  MOD_RES (3)..(4)..(36)..(38): Xaa is C or S

SEQ ID NO: 47064 - protein, 35 aa, Artificial Sequence; identical to SEQ ID NO: 7654
  Cyclic GFR-binding peptide
  MOD_RES (1)..(2)..(33)..(35): Xaa is C or S

SEQ ID NO: 47065 - protein, 38 aa, Artificial Sequence; identical to SEQ ID NO: 7655
  Cyclic GFR-binding peptide
  MOD_RES (3)..(4)..(35)..(37): Xaa is C or S

SEQ ID NO: 47066 - protein, 34 aa, Artificial Sequence; identical to SEQ ID NO: 7656
  Cyclic GFR-binding peptide
  MOD_RES (1)..(2)..(34): Xaa is C or S

SEQ ID NO: 47067 - protein, 36 aa, Artificial Sequence; identical to SEQ ID NO: 7662
  Cyclic GFR-binding peptide
  MOD_RES (1)..(2)..(34)..(36): Xaa is C or S

SEQ ID NO: 47068 - protein, 36 aa, Artificial Sequence
  Cyclic GFR-binding peptide
  MOD_RES (6)..(7): Xaa is C or S
KIPKAXXVPTELSATSMLYYDENEKVVLRKHRDMVV

SEQ ID NO: 47069 - protein, 24 aa, Artificial Sequence
  Cyclic GFR-binding peptide
PTQLSATSVLYYDDSSNVILRKHR

SEQ ID NO: 47070 - protein, 33 aa, Artificial Sequence
  Cyclic GFR-binding peptide
  MOD_RES (3)..(4): Xaa is C or S
KPXXAPTQLSATSVLYYDDSSNVILRKHRNMVV

SEQ ID NO: 47071 - protein, 37 aa, Artificial Sequence; identical to SEQ ID NO: 7665
  Cyclic GFR-binding peptide
  MOD_RES (5)..(6)..(37): Xaa is C or S

SEQ ID NO: 47072 - protein, 29 aa, Artificial Sequence
  Cyclic GFR-binding peptide
  MOD_RES (26)..(28): Xaa is C or S
SAISILYLVGRTPKVLKNYQMVVKSXKXS

SEQ ID NO: 47073 - protein, 37 aa, Artificial Sequence; identical to SEQ ID NO: 7668
  Cyclic GFR-binding peptide
  MOD_RES (3)..(3): Xaa is C or S

SEQ ID NO: 47074 - protein, 25 aa, Artificial Sequence
  Cyclic GFR-binding peptide
PQALNAISILYFVGRKPKVLKKYRM

SEQ ID NO: 47075 - protein, 25 aa, Artificial Sequence
  Cyclic GFR-binding peptide
APTKLSAISVLYLDSSNNVILKNYQ

SEQ ID NO: 47076 - protein, 22 aa, Artificial Sequence
  Cyclic GFR-binding peptide
SPISVLYKDDSSNVILKYHYNM

SEQ ID NO: 47077 - protein, 37 aa, Artificial Sequence; identical to SEQ ID NO: 7671
  Cyclic GFR-binding peptide
  MOD_RES (3)..(3): Xaa is C or S

SEQ ID NO: 47078 - protein, 39 aa, Artificial Sequence; identical to SEQ ID NO: 7672
  Cyclic GFR-binding peptide
  MOD_RES (4)..(5)..(37)..(39): Xaa is C or S

SEQ ID NO: 47079 - protein, 24 aa, Artificial Sequence
  Cyclic GFR-binding peptide
LNAISMLYFDEYDKVVLKKYREMV

SEQ ID NO: 47080 - protein, 37 aa, Artificial Sequence; identical to SEQ ID NO: 7673
  Cyclic GFR-binding peptide
  MOD_RES (5)..(6): Xaa is C or S

SEQ ID NO: 47081 - protein, 35 aa, Artificial Sequence
  Cyclic GFR-binding peptide
  MOD_RES (6)..(6): Xaa is C or S
VTKPTXAPTKLSPISVLYKDDSSNVILKYHYNMVV

SEQ ID NO: 47082 - protein, 23 aa, Artificial Sequence
  Cyclic GFR-binding peptide
ALSATSILYYVGRKPKVLRKHRM

SEQ ID NO: 47083 - protein, 24 aa, Artificial Sequence
  Cyclic GFR-binding peptide
PTKLSPISVLYKDSSNNVILKYHY

SEQ ID NO: 47084 - protein, 22 aa, Artificial Sequence
  Cyclic GFR-binding peptide
SAISILYLVGRKPKVLKNYQMI

SEQ ID NO: 47085 - protein, 33 aa, Artificial Sequence; identical to SEQ ID NO: 7676
  Cyclic GFR-binding peptide
  MOD_RES (2)..(3): Xaa is C or S

SEQ ID NO: 47086 - protein, 32 aa, Artificial Sequence; identical to SEQ ID NO: 7677
  Cyclic GFR-binding peptide
  MOD_RES (1)..(2): Xaa is C or S

SEQ ID NO: 47087 - protein, 33 aa, Artificial Sequence
  Cyclic GFR-binding peptide
  MOD_RES (6)..(7): Xaa is C or S
TVPKPXXAPTQLSAISVLYLDDSSNVILKNYQN

SEQ ID NO: 47088 - protein, 30 aa, Artificial Sequence
  Cyclic GFR-binding peptide
QVQLSATSVLYYEIVRKKPIFLRKHRTLED

SEQ ID NO: 47089 - protein, 35 aa, Artificial Sequence; identical to SEQ ID NO: 7678
  Cyclic GFR-binding peptide
  MOD_RES (33)..(35): Xaa is C or S

SEQ ID NO: 47090 - protein, 20 aa, Artificial Sequence
  Cyclic GFR-binding peptide
NAISVLYFDDSSNVILKKYR

SEQ ID NO: 47091 - protein, 31 aa, Artificial Sequence
  Cyclic GFR-binding peptide
  MOD_RES (28)..(30): Xaa is C or S
ALSAISILYLVGRKPKVLKNYQMIVRSXKXS

SEQ ID NO: 47092 - protein, 27 aa, Artificial Sequence
  Cyclic GFR-binding peptide
QVQLSATSVLYYEIVRKKPIFLRKHRT

SEQ ID NO: 47093 - protein, 37 aa, Artificial Sequence; identical to SEQ ID NO: 7681
  Cyclic GFR-binding peptide
  MOD_RES (37)..(37): Xaa is C or S

SEQ ID NO: 47094 - protein, 40 aa, Artificial Sequence; identical to SEQ ID NO: 7683
  Cyclic GFR-binding peptide
  MOD_RES (6)..(7)..(38)..(40): Xaa is C or S

SEQ ID NO: 47095 - protein, 29 aa, Artificial Sequence
  Cyclic GFR-binding peptide
  MOD_RES (2)..(3): Xaa is C or S
PXXVPQDLSATSILYYVGRTPKVLRKHRM

SEQ ID NO: 47096 - protein, 28 aa, Artificial Sequence
  Cyclic GFR-binding peptide
  MOD_RES (1)..(1): Xaa is C or S
XVSQDLSAISILYLIGKTPKILKNYQMI

SEQ ID NO: 47097 - protein, 24 aa, Artificial Sequence
  Cyclic GFR-binding peptide
NAISMLYFDEYDKVVLKKYREMVV

SEQ ID NO: 47098 - protein, 29 aa, Artificial Sequence
  Cyclic GFR-binding peptide
VQLNAISVLYFEIVRKKPIFLKKYRTLED

SEQ ID NO: 47099 - protein, 30 aa, Artificial Sequence
  Cyclic GFR-binding peptide
  MOD_RES (1)..(2): Xaa is C or S
XXVSQDLSPISILYKIGKTPKILKYHYMIV

SEQ ID NO: 47100 - protein, 30 aa, Artificial Sequence
  Cyclic GFR-binding peptide
  MOD_RES (4)..(5): Xaa is C or S
PKPXXAPTKLSATSVLYYDDSSNVILRKHR

SEQ ID NO: 47101 - protein, 25 aa, Artificial Sequence
  Cyclic GFR-binding peptide
SATSMLYYDENEKVVLRKHRDMVVE

SEQ ID NO: 47102 - protein, 32 aa, Artificial Sequence
  Cyclic GFR-binding peptide
  MOD_RES (31)..(31): Xaa is C or S
PTELSATSMLYYDEYDKVVLRKHREMVVEGXG

SEQ ID NO: 47103 - protein, 29 aa, Artificial Sequence
  Cyclic GFR-binding peptide
  MOD_RES (27)..(29): Xaa is C or S
LSAISILYLVGRTPKVLKNYQMVVKSXKX

SEQ ID NO: 47104 - protein, 41 aa, Artificial Sequence; identical to SEQ ID NO: 7684
  Cyclic GFR-binding peptide
  MOD_RES (1)..(38)..(40): Xaa is C or S

SEQ ID NO: 47105 - protein, 27 aa, Artificial Sequence
  Cyclic GFR-binding peptide
  MOD_RES (2)..(2): Xaa is C or S
TXAPTKLSATSVLYYDDSSNVILRKHR

SEQ ID NO: 47106 - protein, 23 aa, Artificial Sequence
  Cyclic GFR-binding peptide
NAISVLYFDSSNNVILKKYRNMV

SEQ ID NO: 47107 - protein, 32 aa, Artificial Sequence
  Cyclic GFR-binding peptide
  MOD_RES (2)..(3): Xaa is C or S
AXXVPTELNAISMLYFDENEKVVLKKYRDMVV

SEQ ID NO: 47108 - protein, 33 aa, Artificial Sequence
  Cyclic GFR-binding peptide
  MOD_RES (4)..(5): Xaa is C or S
PKPXXAPTKLSPISVLYKDDSSNVILKYHYNMV

SEQ ID NO: 47109 - protein, 31 aa, Artificial Sequence
  Cyclic GFR-binding peptide
PTQVQLNAISVLYFEIVRKKPIFLKKYRTLE

SEQ ID NO: 47110 - protein, 37 aa, Artificial Sequence; identical to SEQ ID NO: 7690
  Cyclic GFR-binding peptide
  MOD_RES (6)..(7): Xaa is C or S

SEQ ID NO: 47111 - protein, 25 aa, Artificial Sequence
  Cyclic GFR-binding peptide
ALSPISILYKVGRKPKVLKYHYMIV

SEQ ID NO: 47112 - protein, 32 aa, Artificial Sequence
  Cyclic GFR-binding peptide
  MOD_RES (6)..(7): Xaa is C or S
KVGKAXXVPTKLSAISVLYLDDMGVPTLKNYQ

SEQ ID NO: 47113 - protein, 33 aa, Artificial Sequence; identical to SEQ ID NO: 7692
  Cyclic GFR-binding peptide
  MOD_RES (2)..(3): Xaa is C or S

SEQ ID NO: 47114 - protein, 29 aa, Artificial Sequence
  Cyclic GFR-binding peptide
  MOD_RES (27)..(29): Xaa is C or S
LSAISILYLIGKTPKILKNYQMIVKSXKX

SEQ ID NO: 47115 - protein, 37 aa, Artificial Sequence; identical to SEQ ID NO: 7694
  Cyclic GFR-binding peptide
  MOD_RES (2)..(3)..(35)..(37): Xaa is C or S

SEQ ID NO: 47116 - protein, 27 aa, Artificial Sequence
  Cyclic GFR-binding peptide
  MOD_RES (1)..(2): Xaa is C or S
XXVPQALSPISILYKVGRKPKVLKYHY

SEQ ID NO: 47117 - protein, 31 aa, Artificial Sequence
  Cyclic GFR-binding peptide
  MOD_RES (30)..(30): Xaa is C or S
TELNAISMLYFDEYDKVVLKKYREMVVEGXG

SEQ ID NO: 47118 - protein, 23 aa, Artificial Sequence
  Cyclic GFR-binding peptide
LSPISILYKVGRTPKVLKYHYMV

SEQ ID NO: 47119 - protein, 30 aa, Artificial Sequence
  Cyclic GFR-binding peptide
  MOD_RES (1)..(1): Xaa is C or S
XAPTKLSAISVLYLDSSNNVILKNYQNMVV

SEQ ID NO: 47120 - protein, 26 aa, Artificial Sequence
  Cyclic GFR-binding peptide
LSATSMLYYDENEKVVLRKHRDMVVE

SEQ ID NO: 47121 - protein, 32 aa, Artificial Sequence
  Cyclic GFR-binding peptide
  MOD_RES (6)..(6): Xaa is C or S
VTKPTXAPTKLSPISVLYKDDSSNVILKYHYN

SEQ ID NO: 47122 - protein, 34 aa, Artificial Sequence
  Cyclic GFR-binding peptide
  MOD_RES (4)..(5): Xaa is C or S
ASPXXVPQDLNAISILYFVGRTPKVLKKYRMVVK

SEQ ID NO: 47123 - protein, 29 aa, Artificial Sequence
  Cyclic GFR-binding peptide
LNAISVLYFEIVRKKPIFLKKYRTLEDHL

SEQ ID NO: 47124 - protein, 34 aa, Artificial Sequence; identical to SEQ ID NO: 7696
  Cyclic GFR-binding peptide
  MOD_RES (3)..(4): Xaa is C or S

SEQ ID NO: 47125 - protein, 38 aa, Artificial Sequence; identical to SEQ ID NO: 7698
  Cyclic GFR-binding peptide
  MOD_RES (3)..(4)..(36)..(38): Xaa is C or S

SEQ ID NO: 47126 - protein, 30 aa, Artificial Sequence
  Cyclic GFR-binding peptide
  MOD_RES (30)..(30): Xaa is C or S
PQDLNAISILYFVGRTPKVLKKYRMVVKSX

SEQ ID NO: 47127 - protein, 33 aa, Artificial Sequence
  Cyclic GFR-binding peptide
  MOD_RES (2)..(2): Xaa is C or S
QXRPTQVQLSAISVLYLEIVRKKPIFLKNYQTL

SEQ ID NO: 47128 - protein, 39 aa, Artificial Sequence; identical to SEQ ID NO: 7700
  Cyclic GFR-binding peptide
  MOD_RES (5)..(5): Xaa is C or S

SEQ ID NO: 47129 - protein, 33 aa, Artificial Sequence
  Cyclic GFR-binding peptide
RPTQVQLSATSVLYYEIVRKKPIFLRKHRTLED

SEQ ID NO: 47130 - protein, 36 aa, Artificial Sequence
  Cyclic GFR-binding peptide
  MOD_RES (4)..(4): Xaa is C or S
NVQXRPTQVQLSPISVLYKEIVRKKPIFLKYHYTLE

SEQ ID NO: 47131 - protein, 24 aa, Artificial Sequence
  Cyclic GFR-binding peptide
SAISVLYLEIVRKKPIFLKNYQTL

SEQ ID NO: 47132 - protein, 35 aa, Artificial Sequence; identical to SEQ ID NO: 7701
  Cyclic GFR-binding peptide
  MOD_RES (1)..(1): Xaa is C or S

SEQ ID NO: 47133 - protein, 28 aa, Artificial Sequence
  Cyclic GFR-binding peptide
  MOD_RES (28)..(28): Xaa is C or S
LNAISVLYFDSSNNVILKKYRNMVVKAX

SEQ ID NO: 47134 - protein, 38 aa, Artificial Sequence; identical to SEQ ID NO: 7702
  Cyclic GFR-binding peptide
  MOD_RES (6)..(7): Xaa is C or S

SEQ ID NO: 47135 - protein, 31 aa, Artificial Sequence
  Cyclic GFR-binding peptide
  MOD_RES (4)..(5): Xaa is C or S
PKPXXAPTKLSATSVLYYDDSSNVILRKHRN

SEQ ID NO: 47136 - protein, 33 aa, Artificial Sequence
  Cyclic GFR-binding peptide
  MOD_RES (6)..(7): Xaa is C or S
KIPKAXXVPTELNAISMLYFDENEKVVLKKYRD

SEQ ID NO: 47137 - protein, 33 aa, Artificial Sequence; identical to SEQ ID NO: 7705
  Cyclic GFR-binding peptide
  MOD_RES (31)..(33): Xaa is C or S

SEQ ID NO: 47138 - protein, 31 aa, Artificial Sequence
  Cyclic GFR-binding peptide
  MOD_RES (2)..(3): Xaa is C or S
PXXAPTKLSATSVLYYDDSSNVILRKHRNMV

SEQ ID NO: 47139 - protein, 24 aa, Artificial Sequence
  Cyclic GFR-binding peptide
PTELSPISMLYKDENEKVVLKYHY

SEQ ID NO: 47140 - protein, 29 aa, Artificial Sequence
  Cyclic GFR-binding peptide
  MOD_RES (29)..(29): Xaa is C or S
QDLSATSILYYIGKTPKILRKHRMIVKSX

SEQ ID NO: 47141 - protein, 30 aa, Artificial Sequence
  Cyclic GFR-binding peptide
  MOD_RES (4)..(5): Xaa is C or S
ASPXXVPQDLNAISILYFVGRTPKVLKKYR

SEQ ID NO: 47142 - protein, 39 aa, Artificial Sequence; identical to SEQ ID NO: 7708
  Cyclic GFR-binding peptide
  MOD_RES (5)..(6)..(37)..(39): Xaa is C or S

SEQ ID NO: 47143 - protein, 21 aa, Artificial Sequence
  Cyclic GFR-binding peptide
LNAISILYFIGKTPKILKKYR

SEQ ID NO: 47144 - protein, 33 aa, Artificial Sequence; identical to SEQ ID NO: 7710
  Cyclic GFR-binding peptide
  MOD_RES (31)..(33): Xaa is C or S

SEQ ID NO: 47145 - protein, 41 aa, Artificial Sequence; identical to SEQ ID NO: 7711
  Cyclic GFR-binding peptide
  MOD_RES (6)..(7)..(39)..(41): Xaa is C or S

SEQ ID NO: 47146 - protein, 26 aa, Artificial Sequence
  Cyclic GFR-binding peptide
  MOD_RES (1)..(1): Xaa is C or S
XAPTKLSPISVLYKDDSSNVILKYHY

SEQ ID NO: 47147 - protein, 24 aa, Artificial Sequence
  Cyclic GFR-binding peptide
KLSATSVLYYDDSSNVILRKHRNM

SEQ ID NO: 47148 - protein, 40 aa, Artificial Sequence; identical to SEQ ID NO: 7712
  Cyclic GFR-binding peptide
  MOD_RES (5)..(6)..(37)..(39): Xaa is C or S

SEQ ID NO: 47149 - protein, 30 aa, Artificial Sequence
  Cyclic GFR-binding peptide
  MOD_RES (1)..(2): Xaa is C or S
XXVPTELSPISMLYKDEYDKVVLKYHYEMV

SEQ ID NO: 47150 - protein, 29 aa, Artificial Sequence
  Cyclic GFR-binding peptide
  MOD_RES (27)..(29): Xaa is C or S
LSPISILYKVGRTPKVLKYHYMVVKSXKX

SEQ ID NO: 47151 - protein, 33 aa, Artificial Sequence
  Cyclic GFR-binding peptide
  MOD_RES (30)..(32): Xaa is C or S
TELNAISMLYFDEYDKVVLKKYREMVVEGXGXR

SEQ ID NO: 47152 - protein, 23 aa, Artificial Sequence
  Cyclic GFR-binding peptide
QLSAISVLYLDDSSNVILKNYQN

SEQ ID NO: 47153 - protein, 25 aa, Artificial Sequence
  Cyclic GFR-binding peptide
ALNAISILYFVGRKPKVLKKYRMIV

SEQ ID NO: 47154 - protein, 32 aa, Artificial Sequence
  Cyclic GFR-binding peptide
  MOD_RES (2)..(3): Xaa is C or S
PXXAPTQLSAISVLYLDDSSNVILKNYQNMVV

SEQ ID NO: 47155 - protein, 37 aa, Artificial Sequence
  Cyclic GFR-binding peptide
  MOD_RES (4)..(4): Xaa is C or S
NVQXRPTQVQLNAISVLYFEIVRKKPIFLKKYRTLED

SEQ ID NO: 47156 - protein, 20 aa, Artificial Sequence
  Cyclic GFR-binding peptide
SATSVLYYDDSSNVILRKHR

SEQ ID NO: 47157 - protein, 27 aa, Artificial Sequence
  Cyclic GFR-binding peptide
SAISMLYLDEYDKVVLKNYQDEYDKVV

SEQ ID NO: 47158 - protein, 29 aa, Artificial Sequence
  Cyclic GFR-binding peptide
VPQALSAISILYLVGRKPKVLKNYQMIVR

SEQ ID NO: 47159 - protein, 35 aa, Artificial Sequence; identical to SEQ ID NO: 7714
  Cyclic GFR-binding peptide
  MOD_RES (4)..(4): Xaa is C or S

SEQ ID NO: 47160 - protein, 36 aa, Artificial Sequence; identical to SEQ ID NO: 7715
  Cyclic GFR-binding peptide
  MOD_RES (33)..(35): Xaa is C or S

SEQ ID NO: 47161 - protein, 30 aa, Artificial Sequence
  Cyclic GFR-binding peptide
  MOD_RES (28)..(30): Xaa is C or S
LSAISVLYLDDSSNVILKNYQNMVVRAXGX

SEQ ID NO: 47162 - protein, 28 aa, Artificial Sequence
  Cyclic GFR-binding peptide
QDLNAISILYFVGRTPKVLKKYRMVVKS

SEQ ID NO: 47163 - protein, 31 aa, Artificial Sequence
  Cyclic GFR-binding peptide
  MOD_RES (1)..(2): Xaa is C or S
XXAPTQLSPISVLYKDDSSNVILKYHYNMVV

SEQ ID NO: 47164 - protein, 38 aa, Artificial Sequence; identical to SEQ ID NO: 7718
  Cyclic GFR-binding peptide
  MOD_RES (5)..(6)..(38): Xaa is C or S

SEQ ID NO: 47165 - protein, 30 aa, Artificial Sequence; identical to SEQ ID NO: 7720
  Cyclic GFR-binding peptide

SEQ ID NO: 47166 - protein, 33 aa, Artificial Sequence
  Cyclic GFR-binding peptide
  MOD_RES (30)..(32): Xaa is C or S
PQALSATSILYYVGRKPKVLRKHRMIVRSXKXS

SEQ ID NO: 47167 - protein, 36 aa, Artificial Sequence; identical to SEQ ID NO: 7724
  Cyclic GFR-binding peptide
  MOD_RES (5)..(6): Xaa is C or S

SEQ ID NO: 47168 - protein, 32 aa, Artificial Sequence
  Cyclic GFR-binding peptide
  MOD_RES (29)..(31): Xaa is C or S
QLSAISVLYLDDSSNVILKNYQNMVVRAXGXH

SEQ ID NO: 47169 - protein, 22 aa, Artificial Sequence
  Cyclic GFR-binding peptide
SAISVLYLDDMGVPTLKNYQEG

SEQ ID NO: 47170 - protein, 42 aa, Artificial Sequence
  Cyclic GFR-binding peptide
  MOD_RES (6)..(7)..(39)..(41): Xaa is C or S
KIPKAXXVPTELSPISMLYKDENEKVVLKYHYDMVVEGXGXR

SEQ ID NO: 47171 - protein, 35 aa, Artificial Sequence
  Cyclic GFR-binding peptide
  MOD_RES (4)..(4): Xaa is C or S
NVQXRPTQVQLSAISVLYLEIVRKKPIFLKNYQTL

SEQ ID NO: 47172 - protein, 32 aa, Artificial Sequence
  Cyclic GFR-binding peptide
  MOD_RES (29)..(31): Xaa is C or S
LNAISVLYFDDMGVPTLKKYREGMSVAEXGXR

SEQ ID NO: 47173 - protein, 38 aa, Artificial Sequence; identical to SEQ ID NO: 7726
  Cyclic GFR-binding peptide
  MOD_RES (5)..(6)..(37): Xaa is C or S

SEQ ID NO: 47174 - protein, 27 aa, Artificial Sequence
  Cyclic GFR-binding peptide
  MOD_RES (1)..(1): Xaa is C or S
XAPTKLSATSVLYYDDSSNVILRKHRN

SEQ ID NO: 47175 - protein, 31 aa, Artificial Sequence
  Cyclic GFR-binding peptide
  MOD_RES (3)..(4): Xaa is C or S
SPXXVSQDLSATSILYYIGKTPKILRKHRMI

SEQ ID NO: 47176 - protein, 31 aa, Artificial Sequence
  Cyclic GFR-binding peptide
  MOD_RES (2)..(3): Xaa is C or S
PXXVPQALSATSILYYVGRKPKVLRKHRMIV

SEQ ID NO: 47177 - protein, 38 aa, Artificial Sequence; identical to SEQ ID NO: 7727
  Cyclic GFR-binding peptide
  MOD_RES (5)..(6)..(37): Xaa is C or S

SEQ ID NO: 47178 - protein, 35 aa, Artificial Sequence; identical to SEQ ID NO: 7728
  Cyclic GFR-binding peptide
  MOD_RES (5)..(5): Xaa is C or S

SEQ ID NO: 47179 - protein, 36 aa, Artificial Sequence; identical to SEQ ID NO: 7729
  Cyclic GFR-binding peptide
  MOD_RES (5)..(6): Xaa is C or S

SEQ ID NO: 47180 - protein, 34 aa, Artificial Sequence
  Cyclic GFR-binding peptide
  MOD_RES (31)..(33): Xaa is C or S
PTQLSPISVLYKDDSSNVILKYHYNMVVRAXGXH

SEQ ID NO: 47181 - protein, 38 aa, Artificial Sequence
  Cyclic GFR-binding peptide
  MOD_RES (5)..(5): Xaa is C or S
RNVQXRPTQVQLSPISVLYKEIVRKKPIFLKYHYTLED

SEQ ID NO: 47182 - protein, 33 aa, Artificial Sequence; identical to SEQ ID NO: 7732
  Cyclic GFR-binding peptide
  MOD_RES (31)..(33): Xaa is C or S

SEQ ID NO: 47183 - protein, 34 aa, Artificial Sequence; identical to SEQ ID NO: 7734
  Cyclic GFR-binding peptide
  MOD_RES (3)..(4): Xaa is C or S

SEQ ID NO: 47184 - protein, 30 aa, Artificial Sequence
  Cyclic GFR-binding peptide
QLNAISVLYFEIVRKKPIFLKKYRTLEDHL

SEQ ID NO: 47185 - protein, 35 aa, Artificial Sequence; identical to SEQ ID NO: 7737
  Cyclic GFR-binding peptide
  MOD_RES (1)..(1): Xaa is C or S

SEQ ID NO: 47186 - protein, 29 aa, Artificial Sequence
  Cyclic GFR-binding peptide
VSQDLNAISILYFIGKTPKILKKYRMIVK

SEQ ID NO: 47187 - protein, 39 aa, Artificial Sequence; identical to SEQ ID NO: 7739
  Cyclic GFR-binding peptide
  MOD_RES (4)..(5)..(36)..(38): Xaa is C or S

SEQ ID NO: 47188 - protein, 32 aa, Artificial Sequence
  Cyclic GFR-binding peptide
  MOD_RES (4)..(5): Xaa is C or S
AAPXXVPQALNAISILYFVGRKPKVLKKYRMI

SEQ ID NO: 47189 - protein, 29 aa, Artificial Sequence
  Cyclic GFR-binding peptide
  MOD_RES (3)..(4): Xaa is C or S
SPXXVPQDLSATSILYYVGRTPKVLRKHR

SEQ ID NO: 47190 - protein, 33 aa, Artificial Sequence; identical to SEQ ID NO: 7740
  Cyclic GFR-binding peptide
  MOD_RES (31)..(33): Xaa is C or S

SEQ ID NO: 47191 - protein, 33 aa, Artificial Sequence
  Cyclic GFR-binding peptide
  MOD_RES (30)..(32): Xaa is C or S
SATSVLYYEIVRKKPIFLRKHRTLEDHLAXKXE

SEQ ID NO: 47192 - protein, 37 aa, Artificial Sequence; identical to SEQ ID NO: 7741
  Cyclic GFR-binding peptide
  MOD_RES (2)..(3)..(35)..(37): Xaa is C or S

SEQ ID NO: 47193 - protein, 31 aa, Artificial Sequence
  Cyclic GFR-binding peptide
  MOD_RES (31)..(31): Xaa is C or S
PTQLSATSVLYYDDSSNVILRKHRNMVVRAX

SEQ ID NO: 47194 - protein, 22 aa, Artificial Sequence
  Cyclic GFR-binding peptide
SATSILYYVGRTPKVLRKHRMV

SEQ ID NO: 47195 - protein, 32 aa, Artificial Sequence; identical to SEQ ID NO: 7742
  Cyclic GFR-binding peptide
  MOD_RES (32)..(32): Xaa is C or S

SEQ ID NO: 47196 - protein, 33 aa, Artificial Sequence
  Cyclic GFR-binding peptide
  MOD_RES (5)..(6): Xaa is C or S
SASPXXVPQDLSAISILYLVGRTPKVLKNYQMV

SEQ ID NO: 47197 - protein, 25 aa, Artificial Sequence
  Cyclic GFR-binding peptide
PQDLSPISILYKVGRTPKVLKYHYM

SEQ ID NO: 47198 - protein, 27 aa, Artificial Sequence
  Cyclic GFR-binding peptide
ELSPISMLYKDEYDKVVLKYHYEMVVE

SEQ ID NO: 47199 - protein, 31 aa, Artificial Sequence
  Cyclic GFR-binding peptide
  MOD_RES (2)..(3): Xaa is C or S
AXXVPTELSATSMLYYDENEKVVLRKHRDMV

SEQ ID NO: 47200 - protein, 29 aa, Artificial Sequence
  Cyclic GFR-binding peptide
VPTELSPISMLYKDEYDKVVLKYHYEMVV

SEQ ID NO: 47201 - protein, 30 aa, Artificial Sequence
  Cyclic GFR-binding peptide
  MOD_RES (1)..(1): Xaa is C or S
XVPQDLSATSILYYVGRTPKVLRKHRMVVK

SEQ ID NO: 47202 - protein, 29 aa, Artificial Sequence
  Cyclic GFR-binding peptide
  MOD_RES (3)..(4): Xaa is C or S
APXXVPQALSAISILYLVGRKPKVLKNYQ

SEQ ID NO: 47203 - protein, 27 aa, Artificial Sequence
  Cyclic GFR-binding peptide
SATSVLYYEIVRKKPIFLRKHRTLEDH

SEQ ID NO: 47204 - protein, 33 aa, Artificial Sequence
  Cyclic GFR-binding peptide
  MOD_RES (31)..(33): Xaa is C or S
PTQLSAISVLYLDDSSNVILKNYQNMVVRAXGX

SEQ ID NO: 47205 - protein, 33 aa, Artificial Sequence
  Cyclic GFR-binding peptide
  MOD_RES (31)..(33): Xaa is C or S
PTELNAISMLYFDEYDKVVLKKYREMVVEGXGX

SEQ ID NO: 47206 - protein, 31 aa, Artificial Sequence; identical to SEQ ID NO: 7747
  Cyclic GFR-binding peptide
  MOD_RES (1)..(1): Xaa is C or S

SEQ ID NO: 47207 - protein, 31 aa, Artificial Sequence
  Cyclic GFR-binding peptide
  MOD_RES (31)..(31): Xaa is C or S
PTKLSAISVLYLDDSSNVILKNYQNMVVRSX

SEQ ID NO: 47208 - protein, 37 aa, Artificial Sequence; identical to SEQ ID NO: 7749
  Cyclic GFR-binding peptide
  MOD_RES (4)..(5)..(37): Xaa is C or S

SEQ ID NO: 47209 - protein, 31 aa, Artificial Sequence
  Cyclic GFR-binding peptide
  MOD_RES (2)..(3): Xaa is C or S
PXXVPQALSAISILYLVGRKPKVLKNYQMIV

SEQ ID NO: 47210 - protein, 37 aa, Artificial Sequence; identical to SEQ ID NO: 7752
  Cyclic GFR-binding peptide
  MOD_RES (5)..(6): Xaa is C or S

SEQ ID NO: 47211 - protein, 39 aa, Artificial Sequence; identical to SEQ ID NO: 7753
  Cyclic GFR-binding peptide
  MOD_RES (4)..(5)..(38): Xaa is C or S

SEQ ID NO: 47212 - protein, 33 aa, Artificial Sequence; identical to SEQ ID NO: 7754
  Cyclic GFR-binding peptide
  MOD_RES (1)..(2)..(33): Xaa is C or S

SEQ ID NO: 47213 - protein, 37 aa, Artificial Sequence; identical to SEQ ID NO: 7755
  Cyclic GFR-binding peptide
  MOD_RES (6)..(7): Xaa is C or S

SEQ ID NO: 47214 - protein, 28 aa, Artificial Sequence
  Cyclic GFR-binding peptide
QLSAISVLYLDDSSNVILKNYQNMVVRA

SEQ ID NO: 47215 - protein, 32 aa, Artificial Sequence
  Cyclic GFR-binding peptide
  MOD_RES (7)..(7): Xaa is C or S
HVTKPTXAPTKLSAISVLYLDDSSNVILKNYQ

SEQ ID NO: 47216 - protein, 33 aa, Artificial Sequence; identical to SEQ ID NO: 7757
  Cyclic GFR-binding peptide
  MOD_RES (1)..(32): Xaa is C or S

SEQ ID NO: 47217 - protein, 34 aa, Artificial Sequence
  Cyclic GFR-binding peptide
  MOD_RES (5)..(6): Xaa is C or S
SASPXXVSQDLSATSILYYIGKTPKILRKHRMIV

SEQ ID NO: 47218 - protein, 20 aa, Artificial Sequence
  Cyclic GFR-binding peptide
SATSILYYVGRTPKVLRKHR

SEQ ID NO: 47219 - protein, 35 aa, Artificial Sequence; identical to SEQ ID NO: 7760
  Cyclic GFR-binding peptide
  MOD_RES (1)..(2)..(33)..(35): Xaa is C or S

SEQ ID NO: 47220 - protein, 41 aa, Artificial Sequence; identical to SEQ ID NO: 7761
  Cyclic GFR-binding peptide
  MOD_RES (5)..(6)..(38)..(40): Xaa is C or S

SEQ ID NO: 47221 - protein, 39 aa, Artificial Sequence; identical to SEQ ID NO: 7763
  Cyclic GFR-binding peptide
  MOD_RES (6)..(7)..(39): Xaa is C or S

SEQ ID NO: 47222 - protein, 36 aa, Artificial Sequence; identical to SEQ ID NO: 7764
  Cyclic GFR-binding peptide
  MOD_RES (5)..(6): Xaa is C or S

SEQ ID NO: 47223 - protein, 33 aa, Artificial Sequence
  Cyclic GFR-binding peptide
  MOD_RES (5)..(6): Xaa is C or S
SASPXXVSQDLSAISILYLIGKTPKILKNYQMI

SEQ ID NO: 47224 - protein, 28 aa, Artificial Sequence
  Cyclic GFR-binding peptide
  MOD_RES (27)..(27): Xaa is C or S
LNAISILYFIGKTPKILKKYRMIVKSXK

SEQ ID NO: 47225 - protein, 23 aa, Artificial Sequence
  Cyclic GFR-binding peptide
KLSATSVLYYDDMGVPTLRKHRE

SEQ ID NO: 47226 - protein, 26 aa, Artificial Sequence
  Cyclic GFR-binding peptide
  MOD_RES (1)..(1): Xaa is C or S
XVPQALSATSILYYVGRKPKVLRKHR

SEQ ID NO: 47227 - protein, 37 aa, Artificial Sequence; identical to SEQ ID NO: 7766
  Cyclic GFR-binding peptide
  MOD_RES (6)..(7): Xaa is C or S

SEQ ID NO: 47228 - protein, 24 aa, Artificial Sequence
  Cyclic GFR-binding peptide
NAISVLYFDDMGVPTLKKYREGMS

SEQ ID NO: 47229 - protein, 28 aa, Artificial Sequence
  Cyclic GFR-binding peptide
  MOD_RES (1)..(1): Xaa is C or S
XAPTKLSATSVLYYDDSSNVILRKHRNM

SEQ ID NO: 47230 - protein, 36 aa, Artificial Sequence; identical to SEQ ID NO: 7767
  Cyclic GFR-binding peptide
  MOD_RES (4)..(5)..(36): Xaa is C or S

SEQ ID NO: 47231 - protein, 43 aa, Artificial Sequence; identical to SEQ ID NO: 7770
  Cyclic GFR-binding peptide
  MOD_RES (3)..(40)..(42): Xaa is C or S

SEQ ID NO: 47232 - protein, 38 aa, Artificial Sequence; identical to SEQ ID NO: 7771
  Cyclic GFR-binding peptide
  MOD_RES (2)..(3)..(35)..(37): Xaa is C or S

SEQ ID NO: 47233 - protein, 39 aa, Artificial Sequence; identical to SEQ ID NO: 7774
  Cyclic GFR-binding peptide
  MOD_RES (4)..(5)..(36)..(38): Xaa is C or S

SEQ ID NO: 47234 - protein, 29 aa, Artificial Sequence
  Cyclic GFR-binding peptide
  MOD_RES (27)..(29): Xaa is C or S
LNAISILYFVGRKPKVLKKYRMIVRSXKX

SEQ ID NO: 47235 - protein, 33 aa, Artificial Sequence
  Cyclic GFR-binding peptide
  MOD_RES (1)..(1): Xaa is C or S
XRPTQVQLSPISVLYKEIVRKKPIFLKYHYTLE

SEQ ID NO: 47236 - protein, 28 aa, Artificial Sequence
  Cyclic GFR-binding peptide
  MOD_RES (26)..(28): Xaa is C or S
NAISILYFVGRTPKVLKKYRMVVKSXKX

SEQ ID NO: 47237 - protein, 33 aa, Artificial Sequence
  Cyclic GFR-binding peptide
  MOD_RES (31)..(33): Xaa is C or S
PTKLSAISVLYLDDSSNVILKNYQNMVVRSXGX

SEQ ID NO: 47238 - protein, 27 aa, Artificial Sequence
  Cyclic GFR-binding peptide
  MOD_RES (27)..(27): Xaa is C or S
LSAISILYLIGKTPKILKNYQMIVKSX

SEQ ID NO: 47239 - protein, 22 aa, Artificial Sequence
  Cyclic GFR-binding peptide
ELNAISMLYFDENEKVVLKKYR

SEQ ID NO: 47240 - protein, 32 aa, Artificial Sequence; identical to SEQ ID NO: 7777
  Cyclic GFR-binding peptide
  MOD_RES (1)..(1): Xaa is C or S

SEQ ID NO: 47241 - protein, 37 aa, Artificial Sequence; identical to SEQ ID NO: 7779
  Cyclic GFR-binding peptide
  MOD_RES (2)..(3)..(35)..(37): Xaa is C or S

SEQ ID NO: 47242 - protein, 27 aa, Artificial Sequence
  Cyclic GFR-binding peptide
  MOD_RES (1)..(2): Xaa is C or S
XXVPTELSATSMLYYDENEKVVLRKHR

SEQ ID NO: 47243 - protein, 38 aa, Artificial Sequence; identical to SEQ ID NO: 7781
  Cyclic GFR-binding peptide
  MOD_RES (4)..(5)..(37): Xaa is C or S

SEQ ID NO: 47244 - protein, 26 aa, Artificial Sequence
  Cyclic GFR-binding peptide
LSAISILYLVGRTPKVLKNYQMVVKS

SEQ ID NO: 47245 - protein, 33 aa, Artificial Sequence
  Cyclic GFR-binding peptide
  MOD_RES (3)..(3): Xaa is C or S
VQXRPTQVQLNAISVLYFEIVRKKPIFLKKYRT

SEQ ID NO: 47246 - protein, 31 aa, Artificial Sequence
  Cyclic GFR-binding peptide
  MOD_RES (28)..(30): Xaa is C or S
LNAISVLYFDSSNNVILKKYRNMVVKAXGXH

SEQ ID NO: 47247 - protein, 29 aa, Artificial Sequence
  Cyclic GFR-binding peptide
  MOD_RES (29)..(29): Xaa is C or S
QALSATSILYYVGRKPKVLRKHRMIVRSX

SEQ ID NO: 47248 - protein, 24 aa, Artificial Sequence
  Cyclic GFR-binding peptide
TKLSATSVLYYDDSSNVILRKHRN

SEQ ID NO: 47249 - protein, 24 aa, Artificial Sequence
  Cyclic GFR-binding peptide
DLNAISILYFVGRTPKVLKKYRMV

SEQ ID NO: 47250 - protein, 26 aa, Artificial Sequence
  Cyclic GFR-binding peptide
  MOD_RES (1)..(1): Xaa is C or S
XVPQALSAISILYLVGRKPKVLKNYQ

SEQ ID NO: 47251 - protein, 32 aa, Artificial Sequence; identical to SEQ ID NO: 7785
  Cyclic GFR-binding peptide
  MOD_RES (1)..(1): Xaa is C or S

SEQ ID NO: 47252 - protein, 36 aa, Artificial Sequence; identical to SEQ ID NO: 7788
  Cyclic GFR-binding peptide
  MOD_RES (2)..(3)..(34)..(36): Xaa is C or S

SEQ ID NO: 47253 - protein, 36 aa, Artificial Sequence; identical to SEQ ID NO: 7791
  Cyclic GFR-binding peptide
  MOD_RES (2)..(3)..(34)..(36): Xaa is C or S

SEQ ID NO: 47254 - protein, 36 aa, Artificial Sequence; identical to SEQ ID NO: 7792
  Cyclic GFR-binding peptide
  MOD_RES (1)..(34)..(36): Xaa is C or S

SEQ ID NO: 47255 - protein, 40 aa, Artificial Sequence; identical to SEQ ID NO: 7793
  Cyclic GFR-binding peptide
  MOD_RES (6)..(7)..(39): Xaa is C or S

SEQ ID NO: 47256 - protein, 25 aa, Artificial Sequence
  Cyclic GFR-binding peptide
ELSPISMLYKDEYDKVVLKYHYEMV

SEQ ID NO: 47257 - protein, 26 aa, Artificial Sequence
  Cyclic GFR-binding peptide
LSATSVLYYDDSSNVILRKHRNMVVR

SEQ ID NO: 47258 - protein, 36 aa, Artificial Sequence
  Cyclic GFR-binding peptide
  MOD_RES (6)..(7): Xaa is C or S
ASASPXXVPQDLNAISILYFVGRTPKVLKKYRMVVK

SEQ ID NO: 47259 - protein, 28 aa, Artificial Sequence
  Cyclic GFR-binding peptide
SPISVLYKEIVRKKPIFLKYHYTLEDHL

SEQ ID NO: 47260 - protein, 30 aa, Artificial Sequence
  Cyclic GFR-binding peptide
  MOD_RES (1)..(2): Xaa is C or S
XXVSQDLSAISILYLIGKTPKILKNYQMIV

SEQ ID NO: 47261 - protein, 27 aa, Artificial Sequence
  Cyclic GFR-binding peptide
PTQLSAISVLYLDDSSNVILKNYQNMV

SEQ ID NO: 47262 - protein, 28 aa, Artificial Sequence
  Cyclic GFR-binding peptide
ELSATSMLYYDEYDKVVLRKHREMVVEG

SEQ ID NO: 47263 - protein, 30 aa, Artificial Sequence
  Cyclic GFR-binding peptide
PTQLSAISVLYLDDSSNVILKNYQNMVVRA

SEQ ID NO: 47264 - protein, 34 aa, Artificial Sequence; identical to SEQ ID NO: 7795
  Cyclic GFR-binding peptide
  MOD_RES (3)..(4): Xaa is C or S

SEQ ID NO: 47265 - protein, 31 aa, Artificial Sequence
  Cyclic GFR-binding peptide
  MOD_RES (1)..(2): Xaa is C or S
XXVPTELNAISMLYFDENEKVVLKKYRDMVV

SEQ ID NO: 47266 - protein, 26 aa, Artificial Sequence
  Cyclic GFR-binding peptide
ALSAISILYLVGRKPKVLKNYQMIVR

SEQ ID NO: 47267 - protein, 35 aa, Artificial Sequence; identical to SEQ ID NO: 7796
  Cyclic GFR-binding peptide
  MOD_RES (2)..(3)..(34): Xaa is C or S

SEQ ID NO: 47268 - protein, 36 aa, Artificial Sequence
  Cyclic GFR-binding peptide
  MOD_RES (5)..(5): Xaa is C or S
RNVQXRPTQVQLSATSVLYYEIVRKKPIFLRKHRTL

SEQ ID NO: 47269 - protein, 27 aa, Artificial Sequence
  Cyclic GFR-binding peptide
QDLSPISILYKVGRTPKVLKYHYMVVK

SEQ ID NO: 47270 - protein, 31 aa, Artificial Sequence
  Cyclic GFR-binding peptide
  MOD_RES (2)..(3): Xaa is C or S
PXXVPQDLSPISILYKVGRTPKVLKYHYMVV

SEQ ID NO: 47271 - protein, 30 aa, Artificial Sequence
  Cyclic GFR-binding peptide
  MOD_RES (3)..(4): Xaa is C or S
APXXVPQALSAISILYLVGRKPKVLKNYQM

SEQ ID NO: 47272 - protein, 20 aa, Artificial Sequence
  Cyclic GFR-binding peptide
SAISILYLIGKTPKILKNYQ

SEQ ID NO: 47273 - protein, 31 aa, Artificial Sequence
  Cyclic GFR-binding peptide
  MOD_RES (2)..(3): Xaa is C or S
PXXVPQDLSATSILYYVGRTPKVLRKHRMVV

SEQ ID NO: 47274 - protein, 25 aa, Artificial Sequence
  Cyclic GFR-binding peptide
LSPISVLYKDDSSNVILKYHYNMVV

SEQ ID NO: 47275 - protein, 30 aa, Artificial Sequence; identical to SEQ ID NO: 817
  Cyclic GFR-binding peptide

SEQ ID NO: 47276 - protein, 41 aa, Artificial Sequence; identical to SEQ ID NO: 7798
  Cyclic GFR-binding peptide
  MOD_RES (6)..(7)..(39)..(41): Xaa is C or S

SEQ ID NO: 47277 - protein, 25 aa, Artificial Sequence
  Cyclic GFR-binding peptide
VPQALSPISILYKVGRKPKVLKYHY

SEQ ID NO: 47278 - protein, 36 aa, Artificial Sequence; identical to SEQ ID NO: 7799
  Cyclic GFR-binding peptide
  MOD_RES (5)..(6): Xaa is C or S

SEQ ID NO: 47279 - protein, 20 aa, Artificial Sequence
  Cyclic GFR-binding peptide
SATSILYYIGKTPKILRKHR

SEQ ID NO: 47280 - protein, 40 aa, Artificial Sequence; identical to SEQ ID NO: 7800
  Cyclic GFR-binding peptide
  MOD_RES (4)..(5)..(37)..(39): Xaa is C or S

SEQ ID NO: 47281 - protein, 37 aa, Artificial Sequence; identical to SEQ ID NO: 7801
  Cyclic GFR-binding peptide
  MOD_RES (5)..(6)..(37): Xaa is C or S

SEQ ID NO: 47282 - protein, 37 aa, Artificial Sequence; identical to SEQ ID NO: 7802
  Cyclic GFR-binding peptide
  MOD_RES (2)..(3)..(34)..(36): Xaa is C or S

SEQ ID NO: 47283 - protein, 31 aa, Artificial Sequence; identical to SEQ ID NO: 7803
  Cyclic GFR-binding peptide
  MOD_RES (1)..(1): Xaa is C or S

SEQ ID NO: 47284 - protein, 28 aa, Artificial Sequence
  Cyclic GFR-binding peptide
QALSATSILYYVGRKPKVLRKHRMIVRS

SEQ ID NO: 47285 - protein, 22 aa, Artificial Sequence
  Cyclic GFR-binding peptide
SPISVLYKEIVRKKPIFLKYHY

SEQ ID NO: 47286 - protein, 29 aa, Artificial Sequence
  Cyclic GFR-binding peptide
  MOD_RES (1)..(2): Xaa is C or S
XXVSQDLSAISILYLIGKTPKILKNYQMI

SEQ ID NO: 47287 - protein, 39 aa, Artificial Sequence; identical to SEQ ID NO: 7807
  Cyclic GFR-binding peptide
  MOD_RES (3)..(4)..(36)..(38): Xaa is C or S

SEQ ID NO: 47288 - protein, 29 aa, Artificial Sequence
  Cyclic GFR-binding peptide
  MOD_RES (2)..(3): Xaa is C or S
PXXVSQDLSATSILYYIGKTPKILRKHRM

SEQ ID NO: 47289 - protein, 34 aa, Artificial Sequence; identical to SEQ ID NO: 7808
  Cyclic GFR-binding peptide
  MOD_RES (1)..(33): Xaa is C or S

SEQ ID NO: 47290 - protein, 34 aa, Artificial Sequence; identical to SEQ ID NO: 7809
  Cyclic GFR-binding peptide
  MOD_RES (2)..(3): Xaa is C or S

SEQ ID NO: 47291 - protein, 29 aa, Artificial Sequence
  Cyclic GFR-binding peptide
  MOD_RES (29)..(29): Xaa is C or S
KLSAISVLYLDSSNNVILKNYQNMVVKAX

SEQ ID NO: 47292 - protein, 37 aa, Artificial Sequence; identical to SEQ ID NO: 7813
  Cyclic GFR-binding peptide
  MOD_RES (6)..(7): Xaa is C or S

SEQ ID NO: 47293 - protein, 24 aa, Artificial Sequence
  Cyclic GFR-binding peptide
PTELNAISMLYFDEYDKVVLKKYR

SEQ ID NO: 47294 - protein, 32 aa, Artificial Sequence; identical to SEQ ID NO: 786
  Cyclic GFR-binding peptide

SEQ ID NO: 47295 - protein, 31 aa, Artificial Sequence; identical to SEQ ID NO: 7816
  Cyclic GFR-binding peptide
  MOD_RES (1)..(1): Xaa is C or S

SEQ ID NO: 47296 - protein, 37 aa, Artificial Sequence; identical to SEQ ID NO: 7817
  Cyclic GFR-binding peptide
  MOD_RES (3)..(4)..(35)..(37): Xaa is C or S

SEQ ID NO: 47297 - protein, 27 aa, Artificial Sequence
  Cyclic GFR-binding peptide
  MOD_RES (1)..(2): Xaa is C or S
XXAPTKLSPISVLYKDDSSNVILKYHY

SEQ ID NO: 47298 - protein, 27 aa, Artificial Sequence
  Cyclic GFR-binding peptide
  MOD_RES (27)..(27): Xaa is C or S
SAISVLYLDDSSNVILKNYQNMVVRSX

SEQ ID NO: 47299 - protein, 25 aa, Artificial Sequence
  Cyclic GFR-binding peptide
KLNAISVLYFDDMGVPTLKKYREGM

SEQ ID NO: 47300 - protein, 33 aa, Artificial Sequence
  Cyclic GFR-binding peptide
  MOD_RES (5)..(6): Xaa is C or S
IPKAXXVPTELNAISMLYFDEYDKVVLKKYREM

SEQ ID NO: 47301 - protein, 30 aa, Artificial Sequence
  Cyclic GFR-binding peptide
  MOD_RES (28)..(30): Xaa is C or S
LSATSVLYYDDSSNVILRKHRNMVVRSXGX

SEQ ID NO: 47302 - protein, 27 aa, Artificial Sequence
  Cyclic GFR-binding peptide
  MOD_RES (27)..(27): Xaa is C or S
LSAISILYLVGRKPKVLKNYQMIVRSX

SEQ ID NO: 47303 - protein, 34 aa, Artificial Sequence; identical to SEQ ID NO: 7818
  Cyclic GFR-binding peptide
  MOD_RES (1)..(2)..(34): Xaa is C or S

SEQ ID NO: 47304 - protein, 33 aa, Artificial Sequence
  Cyclic GFR-binding peptide
  MOD_RES (6)..(7): Xaa is C or S
ASAAPXXVPQALSAISILYLVGRKPKVLKNYQM

SEQ ID NO: 47305 - protein, 30 aa, Artificial Sequence
  Cyclic GFR-binding peptide
  MOD_RES (1)..(1): Xaa is C or S
XAPTKLSAISVLYLDDSSNVILKNYQNMVV

SEQ ID NO: 47306 - protein, 21 aa, Artificial Sequence
  Cyclic GFR-binding peptide
LSAISVLYLDDMGVPTLKNYQ

SEQ ID NO: 47307 - protein, 24 aa, Artificial Sequence
  Cyclic GFR-binding peptide
SAISILYLIGKTPKILKNYQMIVK

SEQ ID NO: 47308 - protein, 30 aa, Artificial Sequence
  Cyclic GFR-binding peptide
  MOD_RES (1)..(2): Xaa is C or S
XXVPTKLNAISVLYFDDMGVPTLKKYREGM

SEQ ID NO: 47309 - protein, 29 aa, Artificial Sequence
  Cyclic GFR-binding peptide
  MOD_RES (1)..(2): Xaa is C or S
XXVPQDLSAISILYLVGRTPKVLKNYQMV

SEQ ID NO: 47310 - protein, 34 aa, Artificial Sequence; identical to SEQ ID NO: 7822
  Cyclic GFR-binding peptide
  MOD_RES (2)..(3): Xaa is C or S

SEQ ID NO: 47311 - protein, 34 aa, Artificial Sequence; identical to SEQ ID NO: 7823
  Cyclic GFR-binding peptide
  MOD_RES (32)..(34): Xaa is C or S

SEQ ID NO: 47312 - protein, 38 aa, Artificial Sequence; identical to SEQ ID NO: 7825
  Cyclic GFR-binding peptide
  MOD_RES (7)..(7): Xaa is C or S

SEQ ID NO: 47313 - protein, 28 aa, Artificial Sequence
  Cyclic GFR-binding peptide
  MOD_RES (1)..(2): Xaa is C or S
XXVSQDLSPISILYKIGKTPKILKYHYM

SEQ ID NO: 47314 - protein, 30 aa, Artificial Sequence
  Cyclic GFR-binding peptide
  MOD_RES (2)..(3): Xaa is C or S
PXXVSQDLSATSILYYIGKTPKILRKHRMI

SEQ ID NO: 47315 - protein, 32 aa, Artificial Sequence
  Cyclic GFR-binding peptide
  MOD_RES (4)..(5): Xaa is C or S
PKAXXAPTKLSPISVLYKDSSNNVILKYHYNM

SEQ ID NO: 47316 - protein, 33 aa, Artificial Sequence
  Cyclic GFR-binding peptide
  MOD_RES (30)..(32): Xaa is C or S
PQDLNAISILYFVGRTPKVLKKYRMVVKSXKXS

SEQ ID NO: 47317 - protein, 36 aa, Artificial Sequence; identical to SEQ ID NO: 7831
  Cyclic GFR-binding peptide
  MOD_RES (36)..(36): Xaa is C or S

SEQ ID NO: 47318 - protein, 24 aa, Artificial Sequence
  Cyclic GFR-binding peptide
SPISILYKVGRTPKVLKYHYMVVK

SEQ ID NO: 47319 - protein, 32 aa, Artificial Sequence
  Cyclic GFR-binding peptide
  MOD_RES (30)..(32): Xaa is C or S
TKLSAISVLYLDDSSNVILKNYQNMVVRSXGX

SEQ ID NO: 47320 - protein, 33 aa, Artificial Sequence; identical to SEQ ID NO: 7832
  Cyclic GFR-binding peptide
  MOD_RES (1)..(33): Xaa is C or S

SEQ ID NO: 47321 - protein, 29 aa, Artificial Sequence
  Cyclic GFR-binding peptide
PQDLNAISILYFVGRTPKVLKKYRMVVKS

SEQ ID NO: 47322 - protein, 29 aa, Artificial Sequence
  Cyclic GFR-binding peptide
VPQDLSATSILYYVGRTPKVLRKHRMVVK

SEQ ID NO: 47323 - protein, 34 aa, Artificial Sequence; identical to SEQ ID NO: 7834
  Cyclic GFR-binding peptide
  MOD_RES (1)..(32)..(34): Xaa is C or S

SEQ ID NO: 47324 - protein, 28 aa, Artificial Sequence
  Cyclic GFR-binding peptide
PQDLSATSILYYVGRTPKVLRKHRMVVK

SEQ ID NO: 47325 - protein, 39 aa, Artificial Sequence; identical to SEQ ID NO: 7836
  Cyclic GFR-binding peptide
  MOD_RES (6)..(7)..(38): Xaa is C or S

SEQ ID NO: 47326 - protein, 41 aa, Artificial Sequence; identical to SEQ ID NO: 7837
  Cyclic GFR-binding peptide
  MOD_RES (6)..(7)..(38)..(40): Xaa is C or S

SEQ ID NO: 47327 - protein, 39 aa, Artificial Sequence; identical to SEQ ID NO: 7838
  Cyclic GFR-binding peptide
  MOD_RES (37)..(39): Xaa is C or S

SEQ ID NO: 47328 - protein, 28 aa, Artificial Sequence
  Cyclic GFR-binding peptide
  MOD_RES (2)..(3): Xaa is C or S
AXXVPTELSATSMLYYDENEKVVLRKHR

SEQ ID NO: 47329 - protein, 32 aa, Artificial Sequence
  Cyclic GFR-binding peptide
  MOD_RES (3)..(4): Xaa is C or S
APXXVPQALSAISILYLVGRKPKVLKNYQMIV

SEQ ID NO: 47330 - protein, 36 aa, Artificial Sequence; identical to SEQ ID NO: 7843
  Cyclic GFR-binding peptide
  MOD_RES (3)..(4)..(36): Xaa is C or S

SEQ ID NO: 47331 - protein, 30 aa, Artificial Sequence
  Cyclic GFR-binding peptide
TKLSAISVLYLDDMGVPTLKNYQEGMSVAE

SEQ ID NO: 47332 - protein, 36 aa, Artificial Sequence; identical to SEQ ID NO: 7845
  Cyclic GFR-binding peptide
  MOD_RES (5)..(6): Xaa is C or S

SEQ ID NO: 47333 - protein, 29 aa, Artificial Sequence
  Cyclic GFR-binding peptide
APTKLSAISVLYLDSSNNVILKNYQNMVV

SEQ ID NO: 47334 - protein, 30 aa, Artificial Sequence
  Cyclic GFR-binding peptide
  MOD_RES (1)..(1): Xaa is C or S
XVPTELSPISMLYKDEYDKVVLKYHYEMVV

SEQ ID NO: 47335 - protein, 25 aa, Artificial Sequence
  Cyclic GFR-binding peptide
PTKLSATSVLYYDDSSNVILRKHRN

SEQ ID NO: 47336 - protein, 35 aa, Artificial Sequence
  Cyclic GFR-binding peptide
  MOD_RES (33)..(35): Xaa is C or S
VQLNAISVLYFEIVRKKPIFLKKYRTLEDHLAXKX

SEQ ID NO: 47337 - protein, 33 aa, Artificial Sequence
  Cyclic GFR-binding peptide
  MOD_RES (4)..(5): Xaa is C or S
ASPXXVPQDLSPISILYKVGRTPKVLKYHYMVV

SEQ ID NO: 47338 - protein, 33 aa, Artificial Sequence; identical to SEQ ID NO: 7849
  Cyclic GFR-binding peptide
  MOD_RES (1)..(2): Xaa is C or S

SEQ ID NO: 47339 - protein, 26 aa, Artificial Sequence
  Cyclic GFR-binding peptide
VPTKLSATSVLYYDDMGVPTLRKHRE

SEQ ID NO: 47340 - protein, 32 aa, Artificial Sequence
  Cyclic GFR-binding peptide
  MOD_RES (6)..(7): Xaa is C or S
KIPKAXXVPTELSATSMLYYDENEKVVLRKHR

SEQ ID NO: 47341 - protein, 33 aa, Artificial Sequence
  Cyclic GFR-binding peptide
  MOD_RES (30)..(32): Xaa is C or S
TKLSPISVLYKDSSNNVILKYHYNMVVKAXGXH

SEQ ID NO: 47342 - protein, 34 aa, Artificial Sequence; identical to SEQ ID NO: 7852
  Cyclic GFR-binding peptide
  MOD_RES (1)..(2)..(33): Xaa is C or S

SEQ ID NO: 47343 - protein, 37 aa, Artificial Sequence; identical to SEQ ID NO: 7853
  Cyclic GFR-binding peptide
  MOD_RES (36)..(36): Xaa is C or S

SEQ ID NO: 47344 - protein, 30 aa, Artificial Sequence
  Cyclic GFR-binding peptide
  MOD_RES (1)..(1): Xaa is C or S
XVPQALSAISILYLVGRKPKVLKNYQMIVR

SEQ ID NO: 47345 - protein, 32 aa, Artificial Sequence
  Cyclic GFR-binding peptide
PTQVQLNAISVLYFEIVRKKPIFLKKYRTLED

SEQ ID NO: 47346 - protein, 33 aa, Artificial Sequence
  Cyclic GFR-binding peptide
  MOD_RES (4)..(5): Xaa is C or S
ASPXXVPQDLSATSILYYVGRTPKVLRKHRMVV

SEQ ID NO: 47347 - protein, 30 aa, Artificial Sequence
  Cyclic GFR-binding peptide
  MOD_RES (2)..(3): Xaa is C or S
AXXVPTELNAISMLYFDENEKVVLKKYRDM

SEQ ID NO: 47348 - protein, 27 aa, Artificial Sequence
  Cyclic GFR-binding peptide
ALSAISILYLVGRKPKVLKNYQMIVRS

SEQ ID NO: 47349 - protein, 32 aa, Artificial Sequence
  Cyclic GFR-binding peptide
  MOD_RES (4)..(5): Xaa is C or S
GKAXXVPTKLSATSVLYYDDMGVPTLRKHREG

SEQ ID NO: 47350 - protein, 35 aa, Artificial Sequence; identical to SEQ ID NO: 7860
  Cyclic GFR-binding peptide
  MOD_RES (1)..(1): Xaa is C or S

SEQ ID NO: 47351 - protein, 33 aa, Artificial Sequence
  Cyclic GFR-binding peptide
  MOD_RES (3)..(4): Xaa is C or S
KAXXVPTELSATSMLYYDENEKVVLRKHRDMVV

SEQ ID NO: 47352 - protein, 26 aa, Artificial Sequence
  Cyclic GFR-binding peptide
TELSATSMLYYDENEKVVLRKHRDMV

SEQ ID NO: 47353 - protein, 21 aa, Artificial Sequence
  Cyclic GFR-binding peptide
NAISMLYFDEYDKVVLKKYRE

SEQ ID NO: 47354 - protein, 25 aa, Artificial Sequence
  Cyclic GFR-binding peptide
SQDLSAISILYLIGKTPKILKNYQM

SEQ ID NO: 47355 - protein, 33 aa, Artificial Sequence
  Cyclic GFR-binding peptide
  MOD_RES (4)..(5): Xaa is C or S
PKAXXVPTELNAISMLYFDEYDKVVLKKYREMV

SEQ ID NO: 47356 - protein, 29 aa, Artificial Sequence
  Cyclic GFR-binding peptide
  MOD_RES (1)..(2): Xaa is C or S
XXVPTELSATSMLYYDENEKVVLRKHRDM

SEQ ID NO: 47357 - protein, 36 aa, Artificial Sequence; identical to SEQ ID NO: 7862
  Cyclic GFR-binding peptide
  MOD_RES (3)..(4)..(36): Xaa is C or S

SEQ ID NO: 47358 - protein, 35 aa, Artificial Sequence; identical to SEQ ID NO: 7863
  Cyclic GFR-binding peptide
  MOD_RES (2)..(3)..(35): Xaa is C or S

SEQ ID NO: 47359 - protein, 23 aa, Artificial Sequence
  Cyclic GFR-binding peptide
SAISILYLIGKTPKILKNYQMIV

SEQ ID NO: 47360 - protein, 29 aa, Artificial Sequence
  Cyclic GFR-binding peptide
PTELSPISMLYKDEYDKVVLKYHYEMVVE

SEQ ID NO: 47361 - protein, 43 aa, Artificial Sequence; identical to SEQ ID NO: 7865
  Cyclic GFR-binding peptide
  MOD_RES (4)..(41)..(43): Xaa is C or S

SEQ ID NO: 47362 - protein, 27 aa, Artificial Sequence
  Cyclic GFR-binding peptide
  MOD_RES (2)..(2): Xaa is C or S
TXAPTKLSPISVLYKDDSSNVILKYHY

SEQ ID NO: 47363 - protein, 21 aa, Artificial Sequence
  Cyclic GFR-binding peptide
LNAISMLYFDENEKVVLKKYR

SEQ ID NO: 47364 - protein, 29 aa, Artificial Sequence
  Cyclic GFR-binding peptide
  MOD_RES (2)..(3): Xaa is C or S
PXXVPQALSAISILYLVGRKPKVLKNYQM

SEQ ID NO: 47365 - protein, 30 aa, Artificial Sequence
  Cyclic GFR-binding peptide
  MOD_RES (2)..(3): Xaa is C or S
PXXVPQDLSATSILYYVGRTPKVLRKHRMV

SEQ ID NO: 47366 - protein, 31 aa, Artificial Sequence; identical to SEQ ID NO: 7866
  Cyclic GFR-binding peptide

SEQ ID NO: 47367 - protein, 33 aa, Artificial Sequence
  Cyclic GFR-binding peptide
  MOD_RES (31)..(33): Xaa is C or S
PTKLSAISVLYLDSSNNVILKNYQNMVVKAXGX

SEQ ID NO: 47368 - protein, 28 aa, Artificial Sequence
  Cyclic GFR-binding peptide
  MOD_RES (2)..(3): Xaa is C or S
AXXVPTELNAISMLYFDEYDKVVLKKYR

SEQ ID NO: 47369 - protein, 35 aa, Artificial Sequence
  Cyclic GFR-binding peptide
  MOD_RES (5)..(6): Xaa is C or S
SAAPXXVPQALNAISILYFVGRKPKVLKKYRMIVR

SEQ ID NO: 47370 - protein, 27 aa, Artificial Sequence
  Cyclic GFR-binding peptide
  MOD_RES (1)..(1): Xaa is C or S
XVPTELNAISMLYFDEYDKVVLKKYRE

SEQ ID NO: 47371 - protein, 33 aa, Artificial Sequence; identical to SEQ ID NO: 7867
  Cyclic GFR-binding peptide
  MOD_RES (1)..(32): Xaa is C or S

SEQ ID NO: 47372 - protein, 21 aa, Artificial Sequence
  Cyclic GFR-binding peptide
LSPISMLYKDEYDKVVLKYHY

SEQ ID NO: 47373 - protein, 38 aa, Artificial Sequence; identical to SEQ ID NO: 7868
  Cyclic GFR-binding peptide
  MOD_RES (4)..(36)..(38): Xaa is C or S

SEQ ID NO: 47374 - protein, 34 aa, Artificial Sequence
  Cyclic GFR-binding peptide
  MOD_RES (32)..(34): Xaa is C or S
QLSAISVLYLEIVRKKPIFLKNYQTLEDHLAXKX

SEQ ID NO: 47375 - protein, 23 aa, Artificial Sequence
  Cyclic GFR-binding peptide
LSATSMLYYDEYDKVVLRKHREM

SEQ ID NO: 47376 - protein, 33 aa, Artificial Sequence; identical to SEQ ID NO: 7869
  Cyclic GFR-binding peptide
  MOD_RES (1)..(2): Xaa is C or S

SEQ ID NO: 47377 - protein, 35 aa, Artificial Sequence; identical to SEQ ID NO: 7870
  Cyclic GFR-binding peptide
  MOD_RES (3)..(35): Xaa is C or S

SEQ ID NO: 47378 - protein, 26 aa, Artificial Sequence
  Cyclic GFR-binding peptide
QDLSAISILYLIGKTPKILKNYQMIV

SEQ ID NO: 47379 - protein, 33 aa, Artificial Sequence
  Cyclic GFR-binding peptide
  MOD_RES (6)..(7): Xaa is C or S
YVPKPXXAPTKLSAISVLYLDDSSNVILKNYQN

SEQ ID NO: 47380 - protein, 29 aa, Artificial Sequence
  Cyclic GFR-binding peptide
  MOD_RES (1)..(1): Xaa is C or S
XVPQDLSATSILYYVGRTPKVLRKHRMVV

SEQ ID NO: 47381 - protein, 37 aa, Artificial Sequence; identical to SEQ ID NO: 7871
  Cyclic GFR-binding peptide
  MOD_RES (3)..(4)..(36): Xaa is C or S

SEQ ID NO: 47382 - protein, 36 aa, Artificial Sequence; identical to SEQ ID NO: 7872
  Cyclic GFR-binding peptide
  MOD_RES (2)..(3)..(35): Xaa is C or S

SEQ ID NO: 47383 - protein, 34 aa, Artificial Sequence; identical to SEQ ID NO: 7873
  Cyclic GFR-binding peptide
  MOD_RES (31)..(33): Xaa is C or S

SEQ ID NO: 47384 - protein, 35 aa, Artificial Sequence; identical to SEQ ID NO: 7874
  Cyclic GFR-binding peptide
  MOD_RES (3)..(4)..(35): Xaa is C or S

SEQ ID NO: 47385 - protein, 38 aa, Artificial Sequence; identical to SEQ ID NO: 7879
  Cyclic GFR-binding peptide
  MOD_RES (6)..(7)..(38): Xaa is C or S

SEQ ID NO: 47386 - protein, 33 aa, Artificial Sequence; identical to SEQ ID NO: 7880
  Cyclic GFR-binding peptide
  MOD_RES (1)..(2)..(33): Xaa is C or S

SEQ ID NO: 47387 - protein, 31 aa, Artificial Sequence
  Cyclic GFR-binding peptide
  MOD_RES (2)..(3): Xaa is C or S
AXXVPTKLNAISVLYFDDMGVPTLKKYREGM

SEQ ID NO: 47388 - protein, 26 aa, Artificial Sequence
  Cyclic GFR-binding peptide
APTKLSAISVLYLDDSSNVILKNYQN

SEQ ID NO: 47389 - protein, 31 aa, Artificial Sequence
  Cyclic GFR-binding peptide
QLSATSVLYYEIVRKKPIFLRKHRTLEDHLA

SEQ ID NO: 47390 - protein, 30 aa, Artificial Sequence
  Cyclic GFR-binding peptide
VPTKLSATSVLYYDDMGVPTLRKHREGMSV

SEQ ID NO: 47391 - protein, 28 aa, Artificial Sequence
  Cyclic GFR-binding peptide
  MOD_RES (1)..(1): Xaa is C or S
XVPQDLSAISILYLVGRTPKVLKNYQMV

SEQ ID NO: 47392 - protein, 31 aa, Artificial Sequence
  Cyclic GFR-binding peptide
  MOD_RES (5)..(6): Xaa is C or S
SAAPXXVPQALNAISILYFVGRKPKVLKKYR

SEQ ID NO: 47393 - protein, 21 aa, Artificial Sequence
  Cyclic GFR-binding peptide
LSPISVLYKDSSNNVILKYHY

SEQ ID NO: 47394 - protein, 36 aa, Artificial Sequence; identical to SEQ ID NO: 7883
  Cyclic GFR-binding peptide
  MOD_RES (1)..(2)..(33)..(35): Xaa is C or S

SEQ ID NO: 47395 - protein, 26 aa, Artificial Sequence
  Cyclic GFR-binding peptide
SAISVLYLDSSNNVILKNYQNMVVKA

SEQ ID NO: 47396 - protein, 30 aa, Artificial Sequence
  Cyclic GFR-binding peptide
  MOD_RES (29)..(29): Xaa is C or S
ELNAISMLYFDEYDKVVLKKYREMVVEGXG

SEQ ID NO: 47397 - protein, 35 aa, Artificial Sequence
  Cyclic GFR-binding peptide
  MOD_RES (5)..(5): Xaa is C or S
RNVQXRPTQVQLNAISVLYFEIVRKKPIFLKKYRT

SEQ ID NO: 47398 - protein, 36 aa, Artificial Sequence
  Cyclic GFR-binding peptide
  MOD_RES (4)..(5): Xaa is C or S
GKAXXVPTKLSATSVLYYDDMGVPTLRKHREGMSVA

SEQ ID NO: 47399 - protein, 36 aa, Artificial Sequence; identical to SEQ ID NO: 7884
  Cyclic GFR-binding peptide
  MOD_RES (1)..(33)..(35): Xaa is C or S

SEQ ID NO: 47400 - protein, 24 aa, Artificial Sequence
  Cyclic GFR-binding peptide
PTQLSPISVLYKDDSSNVILKYHY

SEQ ID NO: 47401 - protein, 34 aa, Artificial Sequence
  Cyclic GFR-binding peptide
  MOD_RES (4)..(5): Xaa is C or S
PKPXXAPTQLSATSVLYYDDSSNVILRKHRNMVV

SEQ ID NO: 47402 - protein, 31 aa, Artificial Sequence
  Cyclic GFR-binding peptide
  MOD_RES (2)..(3): Xaa is C or S
PXXVPQDLNAISILYFVGRTPKVLKKYRMVV

SEQ ID NO: 47403 - protein, 42 aa, Artificial Sequence; identical to SEQ ID NO: 7885
  Cyclic GFR-binding peptide
  MOD_RES (2)..(39)..(41): Xaa is C or S

SEQ ID NO: 47404 - protein, 30 aa, Artificial Sequence
  Cyclic GFR-binding peptide
  MOD_RES (1)..(1): Xaa is C or S
XVPTELSATSMLYYDEYDKVVLRKHREMVV

SEQ ID NO: 47405 - protein, 27 aa, Artificial Sequence
  Cyclic GFR-binding peptide
  MOD_RES (27)..(27): Xaa is C or S
SAISVLYLDDSSNVILKNYQNMVVRAX

SEQ ID NO: 47406 - protein, 30 aa, Artificial Sequence
  Cyclic GFR-binding peptide
  MOD_RES (4)..(5): Xaa is C or S
PKPXXAPTKLSAISVLYLDDSSNVILKNYQ

SEQ ID NO: 47407 - protein, 27 aa, Artificial Sequence
  Cyclic GFR-binding peptide
QALSPISILYKVGRKPKVLKYHYMIVR

SEQ ID NO: 47408 - protein, 36 aa, Artificial Sequence
  Cyclic GFR-binding peptide
  MOD_RES (6)..(7): Xaa is C or S
SIPKAXXVPTELNAISMLYFDEYDKVVLKKYREMVV

SEQ ID NO: 47409 - protein, 26 aa, Artificial Sequence
  Cyclic GFR-binding peptide
KLSAISVLYLDDSSNVILKNYQNMVV

SEQ ID NO: 47410 - protein, 33 aa, Artificial Sequence
  Cyclic GFR-binding peptide
  MOD_RES (30)..(32): Xaa is C or S
TQLSPISVLYKDDSSNVILKYHYNMVVRAXGXH

SEQ ID NO: 47411 - protein, 26 aa, Artificial Sequence
  Cyclic GFR-binding peptide
VQLSATSVLYYEIVRKKPIFLRKHRT

SEQ ID NO: 47412 - protein, 38 aa, Artificial Sequence
  Cyclic GFR-binding peptide
  MOD_RES (3)..(4)..(35)..(37): Xaa is C or S
SPXXVPQDLNAISILYFVGRTPKVLKKYRMVVKSXKXS

SEQ ID NO: 47413 - protein, 24 aa, Artificial Sequence
  Cyclic GFR-binding peptide
PTELSATSMLYYDENEKVVLRKHR

SEQ ID NO: 47414 - protein, 33 aa, Artificial Sequence
  Cyclic GFR-binding peptide
  MOD_RES (4)..(5): Xaa is C or S
PKPXXAPTKLSATSVLYYDDSSNVILRKHRNMV

SEQ ID NO: 47415 - protein, 31 aa, Artificial Sequence
  Cyclic GFR-binding peptide
QLSAISVLYLEIVRKKPIFLKNYQTLEDHLA

SEQ ID NO: 47416 - protein, 25 aa, Artificial Sequence
  Cyclic GFR-binding peptide
NAISVLYFDDMGVPTLKKYREGMSV

SEQ ID NO: 47417 - protein, 33 aa, Artificial Sequence
  Cyclic GFR-binding peptide
  MOD_RES (3)..(3): Xaa is C or S
VQXRPTQVQLSPISVLYKEIVRKKPIFLKYHYT

SEQ ID NO: 47418 - protein, 38 aa, Artificial Sequence; identical to SEQ ID NO: 7898
  Cyclic GFR-binding peptide
  MOD_RES (5)..(6)..(37): Xaa is C or S

SEQ ID NO: 47419 - protein, 27 aa, Artificial Sequence
  Cyclic GFR-binding peptide
LSATSVLYYDDSSNVILRKHRNMVVRA

SEQ ID NO: 47420 - protein, 26 aa, Artificial Sequence
  Cyclic GFR-binding peptide
DLSPISILYKIGKTPKILKYHYMIVK

SEQ ID NO: 47421 - protein, 28 aa, Artificial Sequence
  Cyclic GFR-binding peptide
QLNAISVLYFEIVRKKPIFLKKYRTLED

SEQ ID NO: 47422 - protein, 24 aa, Artificial Sequence
  Cyclic GFR-binding peptide
QDLSPISILYKVGRTPKVLKYHYM

SEQ ID NO: 47423 - protein, 36 aa, Artificial Sequence; identical to SEQ ID NO: 7901
  Cyclic GFR-binding peptide
  MOD_RES (1)..(2)..(34)..(36): Xaa is C or S

SEQ ID NO: 47424 - protein, 31 aa, Artificial Sequence
  Cyclic GFR-binding peptide
  MOD_RES (2)..(3): Xaa is C or S
AXXVPTELNAISMLYFDEYDKVVLKKYREMV

SEQ ID NO: 47425 - protein, 42 aa, Artificial Sequence; identical to SEQ ID NO: 7902
  Cyclic GFR-binding peptide
  MOD_RES (4)..(41): Xaa is C or S

SEQ ID NO: 47426 - protein, 28 aa, Artificial Sequence
  Cyclic GFR-binding peptide
VPQDLSATSILYYVGRTPKVLRKHRMVV

SEQ ID NO: 47427 - protein, 34 aa, Artificial Sequence; identical to SEQ ID NO: 7903
  Cyclic GFR-binding peptide

SEQ ID NO: 47428 - protein, 33 aa, Artificial Sequence
  Cyclic GFR-binding peptide
  MOD_RES (5)..(6): Xaa is C or S
SASPXXVSQDLSPISILYKIGKTPKILKYHYMI

SEQ ID NO: 47429 - protein, 30 aa, Artificial Sequence
  Cyclic GFR-binding peptide
  MOD_RES (2)..(3): Xaa is C or S
PXXVPQALSAISILYLVGRKPKVLKNYQMI

SEQ ID NO: 47430 - protein, 35 aa, Artificial Sequence; identical to SEQ ID NO: 7905
  Cyclic GFR-binding peptide
  MOD_RES (1)..(2)..(34): Xaa is C or S

SEQ ID NO: 47431 - protein, 32 aa, Artificial Sequence
  Cyclic GFR-binding peptide
  MOD_RES (2)..(3): Xaa is C or S
AXXVPTELSPISMLYKDENEKVVLKYHYDMVV

SEQ ID NO: 47432 - protein, 20 aa, Artificial Sequence
  Cyclic GFR-binding peptide
SATSILYYIGKTPKILRKHR

SEQ ID NO: 47433 - protein, 27 aa, Artificial Sequence
  Cyclic GFR-binding peptide
LSATSVLYYDDSSNVILRKHRNMVVRS

SEQ ID NO: 47434 - protein, 39 aa, Artificial Sequence; identical to SEQ ID NO: 7906
  Cyclic GFR-binding peptide
  MOD_RES (3)..(4)..(36)..(38): Xaa is C or S

SEQ ID NO: 47435 - protein, 31 aa, Artificial Sequence
  Cyclic GFR-binding peptide
  MOD_RES (1)..(2): Xaa is C or S
XXVPQALSAISILYLVGRKPKVLKNYQMIVR

SEQ ID NO: 47436 - protein, 31 aa, Artificial Sequence; identical to SEQ ID NO: 7907
  Cyclic GFR-binding peptide
  MOD_RES (1)..(1): Xaa is C or S

SEQ ID NO: 47437 - protein, 31 aa, Artificial Sequence
  Cyclic GFR-binding peptide
  MOD_RES (3)..(4): Xaa is C or S
APXXVPQALSAISILYLVGRKPKVLKNYQMI

SEQ ID NO: 47438 - protein, 27 aa, Artificial Sequence
  Cyclic GFR-binding peptide
  MOD_RES (26)..(26): Xaa is C or S
SPISILYKVGRTPKVLKYHYMVVKSXK

SEQ ID NO: 47439 - protein, 31 aa, Artificial Sequence
  Cyclic GFR-binding peptide
  MOD_RES (30)..(30): Xaa is C or S
TKLNAISVLYFDSSNNVILKKYRNMVVKAXG

SEQ ID NO: 47440 - protein, 34 aa, Artificial Sequence
  Cyclic GFR-binding peptide
  MOD_RES (4)..(4): Xaa is C or S
NVQXRPTQVQLSAISVLYLEIVRKKPIFLKNYQT

SEQ ID NO: 47441 - protein, 27 aa, Artificial Sequence
  Cyclic GFR-binding peptide
  MOD_RES (27)..(27): Xaa is C or S
SATSMLYYDENEKVVLRKHRDMVVEGX

SEQ ID NO: 47442 - protein, 39 aa, Artificial Sequence; identical to SEQ ID NO: 7908
  Cyclic GFR-binding peptide
  MOD_RES (4)..(5)..(37)..(39): Xaa is C or S

SEQ ID NO: 47443 - protein, 23 aa, Artificial Sequence
  Cyclic GFR-binding peptide
DLSPISILYKVGRTPKVLKYHYM

SEQ ID NO: 47444 - protein, 33 aa, Artificial Sequence; identical to SEQ ID NO: 7909
  Cyclic GFR-binding peptide
  MOD_RES (2)..(3): Xaa is C or S

SEQ ID NO: 47445 - protein, 37 aa, Artificial Sequence; identical to SEQ ID NO: 7910
  Cyclic GFR-binding peptide
  MOD_RES (3)..(4)..(35)..(37): Xaa is C or S

SEQ ID NO: 47446 - protein, 31 aa, Artificial Sequence
  Cyclic GFR-binding peptide
  MOD_RES (30)..(30): Xaa is C or S
TQLSAISVLYLDDSSNVILKNYQNMVVRAXG

SEQ ID NO: 47447 - protein, 27 aa, Artificial Sequence
  Cyclic GFR-binding peptide
  MOD_RES (1)..(2): Xaa is C or S
XXVPTELNAISMLYFDEYDKVVLKKYR

SEQ ID NO: 47448 - protein, 39 aa, Artificial Sequence; identical to SEQ ID NO: 7911
  Cyclic GFR-binding peptide
  MOD_RES (2)..(39): Xaa is C or S

SEQ ID NO: 47449 - protein, 37 aa, Artificial Sequence; identical to SEQ ID NO: 7912
  Cyclic GFR-binding peptide
  MOD_RES (1)..(2)..(35)..(37): Xaa is C or S

SEQ ID NO: 47450 - protein, 33 aa, Artificial Sequence
  Cyclic GFR-binding peptide
  MOD_RES (5)..(6): Xaa is C or S
VPKPXXAPTQLSPISVLYKDDSSNVILKYHYNM

SEQ ID NO: 47451 - protein, 27 aa, Artificial Sequence
  Cyclic GFR-binding peptide
ALSPISILYKVGRKPKVLKYHYMIVRS

SEQ ID NO: 47452 - protein, 24 aa, Artificial Sequence
  Cyclic GFR-binding peptide
SAISILYLVGRKPKVLKNYQMIVR

SEQ ID NO: 47453 - protein, 29 aa, Artificial Sequence
  Cyclic GFR-binding peptide
  MOD_RES (26)..(28): Xaa is C or S
SAISILYLIGKTPKILKNYQMIVKSXKXS

SEQ ID NO: 47454 - protein, 37 aa, Artificial Sequence; identical to SEQ ID NO: 7915
  Cyclic GFR-binding peptide
  MOD_RES (5)..(6)..(37): Xaa is C or S

SEQ ID NO: 47455 - protein, 22 aa, Artificial Sequence
  Cyclic GFR-binding peptide
ALSPISILYKVGRKPKVLKYHY

SEQ ID NO: 47456 - protein, 37 aa, Artificial Sequence; identical to SEQ ID NO: 7916
  Cyclic GFR-binding peptide
  MOD_RES (1)..(34)..(36): Xaa is C or S

SEQ ID NO: 47457 - protein, 30 aa, Artificial Sequence
  Cyclic GFR-binding peptide
PTKLSAISVLYLDDMGVPTLKNYQEGMSVA

SEQ ID NO: 47458 - protein, 33 aa, Artificial Sequence
  Cyclic GFR-binding peptide
  MOD_RES (5)..(5): Xaa is C or S
TKPTXAPTKLSAISVLYLDDSSNVILKNYQNMV

SEQ ID NO: 47459 - protein, 37 aa, Artificial Sequence; identical to SEQ ID NO: 7917
  Cyclic GFR-binding peptide
  MOD_RES (6)..(7): Xaa is C or S

SEQ ID NO: 47460 - protein, 36 aa, Artificial Sequence; identical to SEQ ID NO: 7920
  Cyclic GFR-binding peptide
  MOD_RES (2)..(3)..(35): Xaa is C or S

SEQ ID NO: 47461 - protein, 36 aa, Artificial Sequence
  Cyclic GFR-binding peptide
  MOD_RES (6)..(7): Xaa is C or S
YVPKPXXAPTKLSAISVLYLDDSSNVILKNYQNMVV

SEQ ID NO: 47462 - protein, 40 aa, Artificial Sequence; identical to SEQ ID NO: 7922
  Cyclic GFR-binding peptide
  MOD_RES (37)..(39): Xaa is C or S

SEQ ID NO: 47463 - protein, 28 aa, Artificial Sequence
  Cyclic GFR-binding peptide
  MOD_RES (28)..(28): Xaa is C or S
SATSVLYYDDMGVPTLRKHREGMSVAEX

SEQ ID NO: 47464 - protein, 26 aa, Artificial Sequence
  Cyclic GFR-binding peptide
APTKLSPISVLYKDSSNNVILKYHYN

SEQ ID NO: 47465 - protein, 31 aa, Artificial Sequence
  Cyclic GFR-binding peptide
  MOD_RES (2)..(3): Xaa is C or S
PXXAPTKLSPISVLYKDDSSNVILKYHYNMV

SEQ ID NO: 47466 - protein, 28 aa, Artificial Sequence
  Cyclic GFR-binding peptide
KLSAISVLYLDDMGVPTLKNYQEGMSVA

SEQ ID NO: 47467 - protein, 27 aa, Artificial Sequence
  Cyclic GFR-binding peptide
DLSATSILYYIGKTPKILRKHRMIVKS

SEQ ID NO: 47468 - protein, 34 aa, Artificial Sequence; identical to SEQ ID NO: 7927
  Cyclic GFR-binding peptide
  MOD_RES (2)..(34): Xaa is C or S

SEQ ID NO: 47469 - protein, 32 aa, Artificial Sequence
  Cyclic GFR-binding peptide
  MOD_RES (29)..(31): Xaa is C or S
ELNAISMLYFDENEKVVLKKYRDMVVEGXGXR

SEQ ID NO: 47470 - protein, 33 aa, Artificial Sequence; identical to SEQ ID NO: 7929
  Cyclic GFR-binding peptide
  MOD_RES (2)..(2): Xaa is C or S

SEQ ID NO: 47471 - protein, 33 aa, Artificial Sequence; identical to SEQ ID NO: 7930
  Cyclic GFR-binding peptide
  MOD_RES (2)..(3): Xaa is C or S

SEQ ID NO: 47472 - protein, 40 aa, Artificial Sequence; identical to SEQ ID NO: 7931
  Cyclic GFR-binding peptide
  MOD_RES (3)..(4)..(37)..(39): Xaa is C or S

SEQ ID NO: 47473 - protein, 32 aa, Artificial Sequence; identical to SEQ ID NO: 7932
  Cyclic GFR-binding peptide
  MOD_RES (1)..(1): Xaa is C or S

SEQ ID NO: 47474 - protein, 28 aa, Artificial Sequence
  Cyclic GFR-binding peptide
  MOD_RES (1)..(1): Xaa is C or S
XVPTELNAISMLYFDENEKVVLKKYRDM

SEQ ID NO: 47475 - protein, 36 aa, Artificial Sequence; identical to SEQ ID NO: 7933
  Cyclic GFR-binding peptide
  MOD_RES (5)..(5): Xaa is C or S

SEQ ID NO: 47476 - protein, 30 aa, Artificial Sequence
  Cyclic GFR-binding peptide
  MOD_RES (2)..(3): Xaa is C or S
PXXAPTQLSPISVLYKDDSSNVILKYHYNM

SEQ ID NO: 47477 - protein, 30 aa, Artificial Sequence
  Cyclic GFR-binding peptide
  MOD_RES (30)..(30): Xaa is C or S
PQDLSAISILYLVGRTPKVLKNYQMVVKSX

SEQ ID NO: 47478 - protein, 28 aa, Artificial Sequence
  Cyclic GFR-binding peptide
PQALSATSILYYVGRKPKVLRKHRMIVR

SEQ ID NO: 47479 - protein, 27 aa, Artificial Sequence
  Cyclic GFR-binding peptide
TELNAISMLYFDEYDKVVLKKYREMVV

SEQ ID NO: 47480 - protein, 37 aa, Artificial Sequence; identical to SEQ ID NO: 7936
  Cyclic GFR-binding peptide
  MOD_RES (6)..(7): Xaa is C or S

SEQ ID NO: 47481 - protein, 32 aa, Artificial Sequence
  Cyclic GFR-binding peptide
  MOD_RES (32)..(32): Xaa is C or S
QLSPISVLYKEIVRKKPIFLKYHYTLEDHLAX

SEQ ID NO: 47482 - protein, 35 aa, Artificial Sequence; identical to SEQ ID NO: 7937
  Cyclic GFR-binding peptide
  MOD_RES (1)..(33)..(35): Xaa is C or S

SEQ ID NO: 47483 - protein, 29 aa, Artificial Sequence
  Cyclic GFR-binding peptide
  MOD_RES (3)..(4): Xaa is C or S
APXXVPQALSATSILYYVGRKPKVLRKHR

SEQ ID NO: 47484 - protein, 37 aa, Artificial Sequence; identical to SEQ ID NO: 7938
  Cyclic GFR-binding peptide
  MOD_RES (3)..(3): Xaa is C or S

SEQ ID NO: 47485 - protein, 38 aa, Artificial Sequence; identical to SEQ ID NO: 7939
  Cyclic GFR-binding peptide
  MOD_RES (1)..(2)..(35)..(37): Xaa is C or S

SEQ ID NO: 47486 - protein, 42 aa, Artificial Sequence; identical to SEQ ID NO: 7940
  Cyclic GFR-binding peptide
  MOD_RES (6)..(7)..(40)..(42): Xaa is C or S

SEQ ID NO: 47487 - protein, 34 aa, Artificial Sequence; identical to SEQ ID NO: 7941
  Cyclic GFR-binding peptide
  MOD_RES (2)..(3): Xaa is C or S

SEQ ID NO: 47488 - protein, 27 aa, Artificial Sequence
  Cyclic GFR-binding peptide
NAISVLYFEIVRKKPIFLKKYRTLEDH

SEQ ID NO: 47489 - protein, 30 aa, Artificial Sequence
  Cyclic GFR-binding peptide
  MOD_RES (1)..(2): Xaa is C or S
XXVPTELSATSMLYYDEYDKVVLRKHREMV

SEQ ID NO: 47490 - protein, 23 aa, Artificial Sequence
  Cyclic GFR-binding peptide
SAISVLYLDDSSNVILKNYQNMV

SEQ ID NO: 47491 - protein, 37 aa, Artificial Sequence; identical to SEQ ID NO: 7943
  Cyclic GFR-binding peptide
  MOD_RES (5)..(6): Xaa is C or S

SEQ ID NO: 47492 - protein, 36 aa, Artificial Sequence
  Cyclic GFR-binding peptide
  MOD_RES (33)..(35): Xaa is C or S
VQLSATSVLYYEIVRKKPIFLRKHRTLEDHLAXKXE

SEQ ID NO: 47493 - protein, 43 aa, Artificial Sequence; identical to SEQ ID NO: 7944
  Cyclic GFR-binding peptide
  MOD_RES (4)..(41)..(43): Xaa is C or S

SEQ ID NO: 47494 - protein, 33 aa, Artificial Sequence
  Cyclic GFR-binding peptide
  MOD_RES (31)..(33): Xaa is C or S
PTKLSPISVLYKDSSNNVILKYHYNMVVKAXGX

SEQ ID NO: 47495 - protein, 23 aa, Artificial Sequence
  Cyclic GFR-binding peptide
TELSPISMLYKDEYDKVVLKYHY

SEQ ID NO: 47496 - protein, 31 aa, Artificial Sequence
  Cyclic GFR-binding peptide
RPTQVQLSAISVLYLEIVRKKPIFLKNYQTL

SEQ ID NO: 47497 - protein, 31 aa, Artificial Sequence
  Cyclic GFR-binding peptide
  MOD_RES (29)..(31): Xaa is C or S
KLNAISVLYFDSSNNVILKKYRNMVVKAXGX

SEQ ID NO: 47498 - protein, 31 aa, Artificial Sequence
  Cyclic GFR-binding peptide
  MOD_RES (30)..(30): Xaa is C or S
TKLSPISVLYKDSSNNVILKYHYNMVVKAXG

SEQ ID NO: 47499 - protein, 30 aa, Artificial Sequence
  Cyclic GFR-binding peptide
  MOD_RES (27)..(29): Xaa is C or S
NAISVLYFDSSNNVILKKYRNMVVKAXGXH

SEQ ID NO: 47500 - protein, 32 aa, Artificial Sequence
  Cyclic GFR-binding peptide
  MOD_RES (2)..(3): Xaa is C or S
AXXVPTELSATSMLYYDENEKVVLRKHRDMVV

SEQ ID NO: 47501 - protein, 32 aa, Artificial Sequence
  Cyclic GFR-binding peptide
  MOD_RES (31)..(31): Xaa is C or S
PTELSPISMLYKDENEKVVLKYHYDMVVEGXG

SEQ ID NO: 47502 - protein, 42 aa, Artificial Sequence; identical to SEQ ID NO: 7947
  Cyclic GFR-binding peptide
  MOD_RES (6)..(7)..(39)..(41): Xaa is C or S

SEQ ID NO: 47503 - protein, 39 aa, Artificial Sequence; identical to SEQ ID NO: 7948
  Cyclic GFR-binding peptide
  MOD_RES (1)..(38): Xaa is C or S

SEQ ID NO: 47504 - protein, 31 aa, Artificial Sequence
  Cyclic GFR-binding peptide
  MOD_RES (2)..(3): Xaa is C or S
AXXVPTELSPISMLYKDENEKVVLKYHYDMV

SEQ ID NO: 47505 - protein, 40 aa, Artificial Sequence; identical to SEQ ID NO: 7951
  Cyclic GFR-binding peptide
  MOD_RES (6)..(7)..(39): Xaa is C or S

SEQ ID NO: 47506 - protein, 30 aa, Artificial Sequence
  Cyclic GFR-binding peptide
  MOD_RES (2)..(2): Xaa is C or S
TXAPTKLSAISVLYLDDSSNVILKNYQNMV

SEQ ID NO: 47507 - protein, 31 aa, Artificial Sequence
  Cyclic GFR-binding peptide
VQLNAISVLYFEIVRKKPIFLKKYRTLEDHL

SEQ ID NO: 47508 - protein, 30 aa, Artificial Sequence
  Cyclic GFR-binding peptide
TQVQLSATSVLYYEIVRKKPIFLRKHRTLE

SEQ ID NO: 47509 - protein, 35 aa, Artificial Sequence; identical to SEQ ID NO: 7953
  Cyclic GFR-binding peptide
  MOD_RES (1)..(33)..(35): Xaa is C or S

SEQ ID NO: 47510 - protein, 33 aa, Artificial Sequence
  Cyclic GFR-binding peptide
  MOD_RES (30)..(32): Xaa is C or S
SQDLNAISILYFIGKTPKILKKYRMIVKSXKXS

SEQ ID NO: 47511 - protein, 29 aa, Artificial Sequence
  Cyclic GFR-binding peptide
  MOD_RES (28)..(28): Xaa is C or S
SAISVLYLDDMGVPTLKNYQEGMSVAEXG

SEQ ID NO: 47512 - protein, 37 aa, Artificial Sequence
  Cyclic GFR-binding peptide
  MOD_RES (5)..(5): Xaa is C or S
RNVQXRPTQVQLNAISVLYFEIVRKKPIFLKKYRTLE

SEQ ID NO: 47513 - protein, 22 aa, Artificial Sequence
  Cyclic GFR-binding peptide
LSATSVLYYDDMGVPTLRKHRE

SEQ ID NO: 47514 - protein, 26 aa, Artificial Sequence
  Cyclic GFR-binding peptide
VSQDLNAISILYFIGKTPKILKKYRM

SEQ ID NO: 47515 - protein, 29 aa, Artificial Sequence
  Cyclic GFR-binding peptide
APTQLSPISVLYKDDSSNVILKYHYNMVV

SEQ ID NO: 47516 - protein, 26 aa, Artificial Sequence
  Cyclic GFR-binding peptide
DLSATSILYYIGKTPKILRKHRMIVK

SEQ ID NO: 47517 - protein, 32 aa, Artificial Sequence
  Cyclic GFR-binding peptide
  MOD_RES (2)..(3): Xaa is C or S
PXXVSQDLNAISILYFIGKTPKILKKYRMIVK

SEQ ID NO: 47518 - protein, 36 aa, Artificial Sequence; identical to SEQ ID NO: 7957
  Cyclic GFR-binding peptide
  MOD_RES (5)..(6): Xaa is C or S

SEQ ID NO: 47519 - protein, 40 aa, Artificial Sequence; identical to SEQ ID NO: 7958
  Cyclic GFR-binding peptide
  MOD_RES (6)..(7)..(40): Xaa is C or S

SEQ ID NO: 47520 - protein, 20 aa, Artificial Sequence
  Cyclic GFR-binding peptide
SPISVLYKDSSNNVILKYHY

SEQ ID NO: 47521 - protein, 24 aa, Artificial Sequence
  Cyclic GFR-binding peptide
PTKLSAISVLYLDDSSNVILKNYQ

SEQ ID NO: 47522 - protein, 23 aa, Artificial Sequence
  Cyclic GFR-binding peptide
LSPISILYKIGKTPKILKYHYMI

SEQ ID NO: 47523 - protein, 33 aa, Artificial Sequence
  Cyclic GFR-binding peptide
  MOD_RES (3)..(4): Xaa is C or S
KAXXAPTKLSAISVLYLDSSNNVILKNYQNMVV

SEQ ID NO: 47524 - protein, 24 aa, Artificial Sequence
  Cyclic GFR-binding peptide
LSPISVLYKDDSSNVILKYHYNMV

SEQ ID NO: 47525 - protein, 36 aa, Artificial Sequence; identical to SEQ ID NO: 7962
  Cyclic GFR-binding peptide
  MOD_RES (5)..(6): Xaa is C or S

SEQ ID NO: 47526 - protein, 28 aa, Artificial Sequence
  Cyclic GFR-binding peptide
TELSPISMLYKDEYDKVVLKYHYEMVVE

SEQ ID NO: 47527 - protein, 32 aa, Artificial Sequence
  Cyclic GFR-binding peptide
RPTQVQLSATSVLYYEIVRKKPIFLRKHRTLE

SEQ ID NO: 47528 - protein, 20 aa, Artificial Sequence
  Cyclic GFR-binding peptide
SATSVLYYDDMGVPTLRKHR

SEQ ID NO: 47529 - protein, 42 aa, Artificial Sequence; identical to SEQ ID NO: 7963
  Cyclic GFR-binding peptide
  MOD_RES (6)..(7)..(39)..(41): Xaa is C or S

SEQ ID NO: 47530 - protein, 36 aa, Artificial Sequence
  Cyclic GFR-binding peptide
  MOD_RES (3)..(4)..(36): Xaa is C or S
KAXXAPTKLNAISVLYFDSSNNVILKKYRNMVVKAX

SEQ ID NO: 47531 - protein, 29 aa, Artificial Sequence
  Cyclic GFR-binding peptide
SAISVLYLEIVRKKPIFLKNYQTLEDHLA

SEQ ID NO: 47532 - protein, 28 aa, Artificial Sequence
  Cyclic GFR-binding peptide
  MOD_RES (28)..(28): Xaa is C or S
DLSPISILYKIGKTPKILKYHYMIVKSX

SEQ ID NO: 47533 - protein, 28 aa, Artificial Sequence
  Cyclic GFR-binding peptide
TQLSPISVLYKDDSSNVILKYHYNMVVR

SEQ ID NO: 47534 - protein, 28 aa, Artificial Sequence
  Cyclic GFR-binding peptide
APTKLNAISVLYFDSSNNVILKKYRNMV

SEQ ID NO: 47535 - protein, 35 aa, Artificial Sequence; identical to SEQ ID NO: 7966
  Cyclic GFR-binding peptide
  MOD_RES (5)..(5): Xaa is C or S

SEQ ID NO: 47536 - protein, 35 aa, Artificial Sequence; identical to SEQ ID NO: 7968
  Cyclic GFR-binding peptide
  MOD_RES (1)..(2)..(33)..(35): Xaa is C or S

SEQ ID NO: 47537 - protein, 31 aa, Artificial Sequence; identical to SEQ ID NO: 7967
  Cyclic GFR-binding peptide
  MOD_RES (1)..(1): Xaa is C or S

SEQ ID NO: 47538 - protein, 28 aa, Artificial Sequence
  Cyclic GFR-binding peptide
  MOD_RES (2)..(3): Xaa is C or S
AXXVPTELSPISMLYKDENEKVVLKYHY

SEQ ID NO: 47539 - protein, 28 aa, Artificial Sequence
  Cyclic GFR-binding peptide
TKLNAISVLYFDSSNNVILKKYRNMVVK

SEQ ID NO: 47540 - protein, 37 aa, Artificial Sequence; identical to SEQ ID NO: 7969
  Cyclic GFR-binding peptide
  MOD_RES (1)..(2)..(34)..(36): Xaa is C or S

SEQ ID NO: 47541 - protein, 25 aa, Artificial Sequence
  Cyclic GFR-binding peptide
QDLNAISILYFVGRTPKVLKKYRMV

SEQ ID NO: 47542 - protein, 36 aa, Artificial Sequence; identical to SEQ ID NO: 7970
  Cyclic GFR-binding peptide
  MOD_RES (2)..(3)..(35): Xaa is C or S

SEQ ID NO: 47543 - protein, 30 aa, Artificial Sequence
  Cyclic GFR-binding peptide
VPTKLSAISVLYLDDMGVPTLKNYQEGMSV

SEQ ID NO: 47544 - protein, 31 aa, Artificial Sequence
  Cyclic GFR-binding peptide
  MOD_RES (29)..(31): Xaa is C or S
QDLSPISILYKIGKTPKILKYHYMIVKSXKX

SEQ ID NO: 47545 - protein, 27 aa, Artificial Sequence
  Cyclic GFR-binding peptide
  MOD_RES (1)..(2): Xaa is C or S
XXVPQALSATSILYYVGRKPKVLRKHR

SEQ ID NO: 47546 - protein, 29 aa, Artificial Sequence
  Cyclic GFR-binding peptide
  MOD_RES (28)..(28): Xaa is C or S
DLSPISILYKVGRTPKVLKYHYMVVKSXK

SEQ ID NO: 47547 - protein, 38 aa, Artificial Sequence; identical to SEQ ID NO: 7974
  Cyclic GFR-binding peptide
  MOD_RES (6)..(7): Xaa is C or S

SEQ ID NO: 47548 - protein, 32 aa, Artificial Sequence; identical to SEQ ID NO: 7975
  Cyclic GFR-binding peptide
  MOD_RES (32)..(32): Xaa is C or S

SEQ ID NO: 47549 - protein, 32 aa, Artificial Sequence; identical to SEQ ID NO: 798
  Cyclic GFR-binding peptide

SEQ ID NO: 47550 - protein, 37 aa, Artificial Sequence; identical to SEQ ID NO: 7977
  Cyclic GFR-binding peptide
  MOD_RES (6)..(7): Xaa is C or S

SEQ ID NO: 47551 - protein, 27 aa, Artificial Sequence
  Cyclic GFR-binding peptide
SATSVLYYDDMGVPTLRKHREGMSVAE

SEQ ID NO: 47552 - protein, 35 aa, Artificial Sequence; identical to SEQ ID NO: 7979
  Cyclic GFR-binding peptide
  MOD_RES (1)..(33)..(35): Xaa is C or S

SEQ ID NO: 47553 - protein, 29 aa, Artificial Sequence
  Cyclic GFR-binding peptide
  MOD_RES (3)..(4): Xaa is C or S
SPXXVPQDLSAISILYLVGRTPKVLKNYQ

SEQ ID NO: 47554 - protein, 24 aa, Artificial Sequence
  Cyclic GFR-binding peptide
QALNAISILYFVGRKPKVLKKYRM

SEQ ID NO: 47555 - protein, 34 aa, Artificial Sequence
  Cyclic GFR-binding peptide
  MOD_RES (6)..(7): Xaa is C or S
TVPKPXXAPTQLSAISVLYLDDSSNVILKNYQNM

SEQ ID NO: 47556 - protein, 39 aa, Artificial Sequence; identical to SEQ ID NO: 7982
  Cyclic GFR-binding peptide
  MOD_RES (4)..(36)..(38): Xaa is C or S

SEQ ID NO: 47557 - protein, 33 aa, Artificial Sequence
  Cyclic GFR-binding peptide
  MOD_RES (6)..(6): Xaa is C or S
VTKPTXAPTKLSAISVLYLDDSSNVILKNYQNM

SEQ ID NO: 47558 - protein, 20 aa, Artificial Sequence
  Cyclic GFR-binding peptide
SPISMLYKDEYDKVVLKYHY

SEQ ID NO: 47559 - protein, 38 aa, Artificial Sequence; identical to SEQ ID NO: 7984
  Cyclic GFR-binding peptide
  MOD_RES (2)..(3)..(35)..(37): Xaa is C or S

SEQ ID NO: 47560 - protein, 23 aa, Artificial Sequence
  Cyclic GFR-binding peptide
SPISVLYKDSSNNVILKYHYNMV

SEQ ID NO: 47561 - protein, 37 aa, Artificial Sequence; identical to SEQ ID NO: 7985
  Cyclic GFR-binding peptide
  MOD_RES (2)..(2): Xaa is C or S

SEQ ID NO: 47562 - protein, 38 aa, Artificial Sequence; identical to SEQ ID NO: 7986
  Cyclic GFR-binding peptide
  MOD_RES (3)..(3): Xaa is C or S

SEQ ID NO: 47563 - protein, 33 aa, Artificial Sequence
  Cyclic GFR-binding peptide
  MOD_RES (5)..(6): Xaa is C or S
SAAPXXVPQALSATSILYYVGRKPKVLRKHRMI

SEQ ID NO: 47564 - protein, 26 aa, Artificial Sequence
  Cyclic GFR-binding peptide
  MOD_RES (1)..(1): Xaa is C or S
XVPTKLNAISVLYFDDMGVPTLKKYR

SEQ ID NO: 47565 - protein, 41 aa, Artificial Sequence; identical to SEQ ID NO: 7988
  Cyclic GFR-binding peptide
  MOD_RES (6)..(7)..(40): Xaa is C or S

SEQ ID NO: 47566 - protein, 36 aa, Artificial Sequence; identical to SEQ ID NO: 7990
  Cyclic GFR-binding peptide
  MOD_RES (4)..(5)..(36): Xaa is C or S

SEQ ID NO: 47567 - protein, 27 aa, Artificial Sequence
  Cyclic GFR-binding peptide
KLSATSVLYYDDSSNVILRKHRNMVVR

SEQ ID NO: 47568 - protein, 23 aa, Artificial Sequence
  Cyclic GFR-binding peptide
ALNAISILYFVGRKPKVLKKYRM

SEQ ID NO: 47569 - protein, 29 aa, Artificial Sequence
  Cyclic GFR-binding peptide
APTQLSATSVLYYDDSSNVILRKHRNMVV

SEQ ID NO: 47570 - protein, 31 aa, Artificial Sequence; identical to SEQ ID NO: 7991
  Cyclic GFR-binding peptide

SEQ ID NO: 47571 - protein, 30 aa, Artificial Sequence
  Cyclic GFR-binding peptide
  MOD_RES (4)..(5): Xaa is C or S
PKPXXAPTQLSPISVLYKDDSSNVILKYHY

SEQ ID NO: 47572 - protein, 32 aa, Artificial Sequence
  Cyclic GFR-binding peptide
  MOD_RES (4)..(5): Xaa is C or S
PKAXXAPTKLSAISVLYLDSSNNVILKNYQNM

SEQ ID NO: 47573 - protein, 27 aa, Artificial Sequence
  Cyclic GFR-binding peptide
TKLSATSVLYYDDSSNVILRKHRNMVV

SEQ ID NO: 47574 - protein, 30 aa, Artificial Sequence
  Cyclic GFR-binding peptide
  MOD_RES (27)..(29): Xaa is C or S
SAISVLYLDDSSNVILKNYQNMVVRAXGXH

SEQ ID NO: 47575 - protein, 34 aa, Artificial Sequence
  Cyclic GFR-binding peptide
  MOD_RES (4)..(5): Xaa is C or S
ASPXXVSQDLSAISILYLIGKTPKILKNYQMIVK

SEQ ID NO: 47576 - protein, 37 aa, Artificial Sequence; identical to SEQ ID NO: 7993
  Cyclic GFR-binding peptide
  MOD_RES (1)..(2)..(34)..(36): Xaa is C or S

SEQ ID NO: 47577 - protein, 33 aa, Artificial Sequence
  Cyclic GFR-binding peptide
  MOD_RES (4)..(5): Xaa is C or S
GKAXXVPTKLNAISVLYFDDMGVPTLKKYREGM

SEQ ID NO: 47578 - protein, 26 aa, Artificial Sequence
  Cyclic GFR-binding peptide
TKLNAISVLYFDDMGVPTLKKYREGM

SEQ ID NO: 47579 - protein, 33 aa, Artificial Sequence
  Cyclic GFR-binding peptide
  MOD_RES (3)..(4): Xaa is C or S
KAXXVPTELNAISMLYFDEYDKVVLKKYREMVV

SEQ ID NO: 47580 - protein, 35 aa, Artificial Sequence; identical to SEQ ID NO: 7996
  Cyclic GFR-binding peptide
  MOD_RES (5)..(5): Xaa is C or S

SEQ ID NO: 47581 - protein, 30 aa, Artificial Sequence; identical to SEQ ID NO: 7997
  Cyclic GFR-binding peptide

SEQ ID NO: 47582 - protein, 28 aa, Artificial Sequence
  Cyclic GFR-binding peptide
TQLSAISVLYLDDSSNVILKNYQNMVVR

SEQ ID NO: 47583 - protein, 24 aa, Artificial Sequence
  Cyclic GFR-binding peptide
LSATSVLYYDDSSNVILRKHRNMV

SEQ ID NO: 47584 - protein, 35 aa, Artificial Sequence; identical to SEQ ID NO: 7998
  Cyclic GFR-binding peptide
  MOD_RES (3)..(4)..(35): Xaa is C or S

SEQ ID NO: 47585 - protein, 32 aa, Artificial Sequence
  Cyclic GFR-binding peptide
  MOD_RES (6)..(7): Xaa is C or S
KVGKAXXVPTKLSATSVLYYDDMGVPTLRKHR

SEQ ID NO: 47586 - protein, 34 aa, Artificial Sequence; identical to SEQ ID NO: 8001
  Cyclic GFR-binding peptide
  MOD_RES (1)..(33): Xaa is C or S

SEQ ID NO: 47587 - protein, 31 aa, Artificial Sequence; identical to SEQ ID NO: 8002
  Cyclic GFR-binding peptide
  MOD_RES (31)..(31): Xaa is C or S

SEQ ID NO: 47588 - protein, 35 aa, Artificial Sequence; identical to SEQ ID NO: 8003
  Cyclic GFR-binding peptide
  MOD_RES (33)..(35): Xaa is C or S

SEQ ID NO: 47589 - protein, 26 aa, Artificial Sequence
  Cyclic GFR-binding peptide
TKLSAISVLYLDSSNNVILKNYQNMV

SEQ ID NO: 47590 - protein, 36 aa, Artificial Sequence; identical to SEQ ID NO: 8004
  Cyclic GFR-binding peptide
  MOD_RES (5)..(6): Xaa is C or S

SEQ ID NO: 47591 - protein, 30 aa, Artificial Sequence
  Cyclic GFR-binding peptide
  MOD_RES (1)..(2): Xaa is C or S
XXVPTELNAISMLYFDEYDKVVLKKYREMV

SEQ ID NO: 47592 - protein, 37 aa, Artificial Sequence; identical to SEQ ID NO: 8005
  Cyclic GFR-binding peptide
  MOD_RES (7)..(7): Xaa is C or S

SEQ ID NO: 47593 - protein, 32 aa, Artificial Sequence; identical to SEQ ID NO: 8006
  Cyclic GFR-binding peptide
  MOD_RES (1)..(2): Xaa is C or S

SEQ ID NO: 47594 - protein, 36 aa, Artificial Sequence; identical to SEQ ID NO: 8007
  Cyclic GFR-binding peptide
  MOD_RES (1)..(34)..(36): Xaa is C or S

SEQ ID NO: 47595 - protein, 28 aa, Artificial Sequence
  Cyclic GFR-binding peptide
  MOD_RES (1)..(2): Xaa is C or S
XXVPQDLSAISILYLVGRTPKVLKNYQM

SEQ ID NO: 47596 - protein, 28 aa, Artificial Sequence
  Cyclic GFR-binding peptide
LNAISVLYFEIVRKKPIFLKKYRTLEDH

SEQ ID NO: 47597 - protein, 26 aa, Artificial Sequence
  Cyclic GFR-binding peptide
SPISVLYKDDSSNVILKYHYNMVVRS

SEQ ID NO: 47598 - protein, 33 aa, Artificial Sequence; identical to SEQ ID NO: 8008
  Cyclic GFR-binding peptide
  MOD_RES (31)..(33): Xaa is C or S

SEQ ID NO: 47599 - protein, 22 aa, Artificial Sequence
  Cyclic GFR-binding peptide
QLSAISVLYLDDSSNVILKNYQ

SEQ ID NO: 47600 - protein, 41 aa, Artificial Sequence; identical to SEQ ID NO: 8009
  Cyclic GFR-binding peptide
  MOD_RES (5)..(6)..(38)..(40): Xaa is C or S

SEQ ID NO: 47601 - protein, 31 aa, Artificial Sequence
  Cyclic GFR-binding peptide
  MOD_RES (1)..(2): Xaa is C or S
XXAPTKLSPISVLYKDDSSNVILKYHYNMVV

SEQ ID NO: 47602 - protein, 26 aa, Artificial Sequence
  Cyclic GFR-binding peptide
LSPISILYKVGRTPKVLKYHYMVVKS

SEQ ID NO: 47603 - protein, 26 aa, Artificial Sequence
  Cyclic GFR-binding peptide
SPISVLYKDDSSNVILKYHYNMVVRA

SEQ ID NO: 47604 - protein, 22 aa, Artificial Sequence
  Cyclic GFR-binding peptide
SAISVLYLDDSSNVILKNYQNM

SEQ ID NO: 47605 - protein, 27 aa, Artificial Sequence
  Cyclic GFR-binding peptide
  MOD_RES (1)..(2): Xaa is C or S
XXAPTQLSAISVLYLDDSSNVILKNYQ

SEQ ID NO: 47606 - protein, 31 aa, Artificial Sequence
  Cyclic GFR-binding peptide
  MOD_RES (5)..(6): Xaa is C or S
VPKPXXAPTQLSPISVLYKDDSSNVILKYHY

SEQ ID NO: 47607 - protein, 37 aa, Artificial Sequence; identical to SEQ ID NO: 8014
  Cyclic GFR-binding peptide
  MOD_RES (3)..(4)..(36): Xaa is C or S

SEQ ID NO: 47608 - protein, 34 aa, Artificial Sequence; identical to SEQ ID NO: 8016
  Cyclic GFR-binding peptide
  MOD_RES (1)..(2): Xaa is C or S

SEQ ID NO: 47609 - protein, 28 aa, Artificial Sequence
  Cyclic GFR-binding peptide
  MOD_RES (2)..(3): Xaa is C or S
PXXVSQDLSPISILYKIGKTPKILKYHY

SEQ ID NO: 47610 - protein, 20 aa, Artificial Sequence
  Cyclic GFR-binding peptide
SPISVLYKDDMGVPTLKYHY

SEQ ID NO: 47611 - protein, 40 aa, Artificial Sequence; identical to SEQ ID NO: 8018
  Cyclic GFR-binding peptide
  MOD_RES (5)..(37)..(39): Xaa is C or S

SEQ ID NO: 47612 - protein, 24 aa, Artificial Sequence
  Cyclic GFR-binding peptide
LSPISVLYKEIVRKKPIFLKYHYT

SEQ ID NO: 47613 - protein, 30 aa, Artificial Sequence
  Cyclic GFR-binding peptide
  MOD_RES (4)..(5): Xaa is C or S
AAPXXVPQALNAISILYFVGRKPKVLKKYR

SEQ ID NO: 47614 - protein, 37 aa, Artificial Sequence; identical to SEQ ID NO: 8021
  Cyclic GFR-binding peptide
  MOD_RES (5)..(6): Xaa is C or S

SEQ ID NO: 47615 - protein, 30 aa, Artificial Sequence
  Cyclic GFR-binding peptide
  MOD_RES (1)..(1): Xaa is C or S
XVSQDLNAISILYFIGKTPKILKKYRMIVK

SEQ ID NO: 47616 - protein, 33 aa, Artificial Sequence
  Cyclic GFR-binding peptide
  MOD_RES (3)..(4): Xaa is C or S
APXXVPQALSAISILYLVGRKPKVLKNYQMIVR

SEQ ID NO: 47617 - protein, 32 aa, Artificial Sequence
  Cyclic GFR-binding peptide
  MOD_RES (31)..(31): Xaa is C or S
PTKLSATSVLYYDDSSNVILRKHRNMVVRSXG

SEQ ID NO: 47618 - protein, 33 aa, Artificial Sequence
  Cyclic GFR-binding peptide
  MOD_RES (3)..(4): Xaa is C or S
SPXXVSQDLSATSILYYIGKTPKILRKHRMIVK

SEQ ID NO: 47619 - protein, 25 aa, Artificial Sequence
  Cyclic GFR-binding peptide
QLSPISVLYKEIVRKKPIFLKYHYT

SEQ ID NO: 47620 - protein, 27 aa, Artificial Sequence
  Cyclic GFR-binding peptide
  MOD_RES (1)..(2): Xaa is C or S
XXVPTELSPISMLYKDENEKVVLKYHY

SEQ ID NO: 47621 - protein, 38 aa, Artificial Sequence; identical to SEQ ID NO: 8024
  Cyclic GFR-binding peptide
  MOD_RES (4)..(5)..(37): Xaa is C or S

SEQ ID NO: 47622 - protein, 32 aa, Artificial Sequence; identical to SEQ ID NO: 8025
  Cyclic GFR-binding peptide
  MOD_RES (32)..(32): Xaa is C or S

SEQ ID NO: 47623 - protein, 31 aa, Artificial Sequence
  Cyclic GFR-binding peptide
  MOD_RES (1)..(2): Xaa is C or S
XXAPTKLSATSVLYYDDSSNVILRKHRNMVV

SEQ ID NO: 47624 - protein, 24 aa, Artificial Sequence
  Cyclic GFR-binding peptide
DLNAISILYFIGKTPKILKKYRMI

SEQ ID NO: 47625 - protein, 28 aa, Artificial Sequence
  Cyclic GFR-binding peptide
  MOD_RES (2)..(3): Xaa is C or S
AXXVPTKLSAISVLYLDDMGVPTLKNYQ

SEQ ID NO: 47626 - protein, 27 aa, Artificial Sequence
  Cyclic GFR-binding peptide
TKLSPISVLYKDDSSNVILKYHYNMVV

SEQ ID NO: 47627 - protein, 37 aa, Artificial Sequence; identical to SEQ ID NO: 8027
  Cyclic GFR-binding peptide
  MOD_RES (6)..(7): Xaa is C or S

SEQ ID NO: 47628 - protein, 32 aa, Artificial Sequence
  Cyclic GFR-binding peptide
  MOD_RES (1)..(32): Xaa is C or S
XVPQALSPISILYKVGRKPKVLKYHYMIVRSX

SEQ ID NO: 47629 - protein, 29 aa, Artificial Sequence
  Cyclic GFR-binding peptide
  MOD_RES (1)..(1): Xaa is C or S
XAPTKLNAISVLYFDSSNNVILKKYRNMV

SEQ ID NO: 47630 - protein, 29 aa, Artificial Sequence
  Cyclic GFR-binding peptide
  MOD_RES (2)..(3): Xaa is C or S
PXXVPQDLNAISILYFVGRTPKVLKKYRM

SEQ ID NO: 47631 - protein, 34 aa, Artificial Sequence
  Cyclic GFR-binding peptide
  MOD_RES (6)..(7): Xaa is C or S
YVPKPXXAPTKLSPISVLYKDDSSNVILKYHYNM

SEQ ID NO: 47632 - protein, 30 aa, Artificial Sequence
  Cyclic GFR-binding peptide
  MOD_RES (1)..(1): Xaa is C or S
XAPTQLSPISVLYKDDSSNVILKYHYNMVV

SEQ ID NO: 47633 - protein, 42 aa, Artificial Sequence; identical to SEQ ID NO: 8028
  Cyclic GFR-binding peptide
  MOD_RES (4)..(41): Xaa is C or S

SEQ ID NO: 47634 - protein, 34 aa, Artificial Sequence
  Cyclic GFR-binding peptide
  MOD_RES (6)..(7): Xaa is C or S
ASASPXXVSQDLNAISILYFIGKTPKILKKYRMI

SEQ ID NO: 47635 - protein, 39 aa, Artificial Sequence; identical to SEQ ID NO: 8029
  Cyclic GFR-binding peptide
  MOD_RES (6)..(7)..(39): Xaa is C or S

SEQ ID NO: 47636 - protein, 36 aa, Artificial Sequence; identical to SEQ ID NO: 8030
  Cyclic GFR-binding peptide
  MOD_RES (1)..(2)..(33)..(35): Xaa is C or S

SEQ ID NO: 47637 - protein, 30 aa, Artificial Sequence
  Cyclic GFR-binding peptide
  MOD_RES (1)..(1): Xaa is C or S
XAPTQLSATSVLYYDDSSNVILRKHRNMVV

SEQ ID NO: 47638 - protein, 29 aa, Artificial Sequence
  Cyclic GFR-binding peptide
  MOD_RES (28)..(28): Xaa is C or S
ALSATSILYYVGRKPKVLRKHRMIVRSXK

SEQ ID NO: 47639 - protein, 21 aa, Artificial Sequence
  Cyclic GFR-binding peptide
NAISILYFIGKTPKILKKYRM

SEQ ID NO: 47640 - protein, 33 aa, Artificial Sequence
  Cyclic GFR-binding peptide
  MOD_RES (3)..(4): Xaa is C or S
SPXXVSQDLSPISILYKIGKTPKILKYHYMIVK

SEQ ID NO: 47641 - protein, 30 aa, Artificial Sequence
  Cyclic GFR-binding peptide
PTKLNAISVLYFDDMGVPTLKKYREGMSVA

SEQ ID NO: 47642 - protein, 31 aa, Artificial Sequence; identical to SEQ ID NO: 8034
  Cyclic GFR-binding peptide
  MOD_RES (1)..(1): Xaa is C or S

SEQ ID NO: 47643 - protein, 38 aa, Artificial Sequence; identical to SEQ ID NO: 8035
  Cyclic GFR-binding peptide
  MOD_RES (6)..(7): Xaa is C or S

SEQ ID NO: 47644 - protein, 31 aa, Artificial Sequence
  Cyclic GFR-binding peptide
  MOD_RES (3)..(4): Xaa is C or S
KPXXAPTKLSAISVLYLDDSSNVILKNYQNM

SEQ ID NO: 47645 - protein, 29 aa, Artificial Sequence
  Cyclic GFR-binding peptide
  MOD_RES (28)..(28): Xaa is C or S
LSAISVLYLDDSSNVILKNYQNMVVRAXG

SEQ ID NO: 47646 - protein, 36 aa, Artificial Sequence; identical to SEQ ID NO: 8036
  Cyclic GFR-binding peptide
  MOD_RES (2)..(3)..(35): Xaa is C or S

SEQ ID NO: 47647 - protein, 28 aa, Artificial Sequence
  Cyclic GFR-binding peptide
  MOD_RES (28)..(28): Xaa is C or S
DLSAISILYLVGRTPKVLKNYQMVVKSX

SEQ ID NO: 47648 - protein, 36 aa, Artificial Sequence; identical to SEQ ID NO: 8037
  Cyclic GFR-binding peptide
  MOD_RES (3)..(4)..(36): Xaa is C or S

SEQ ID NO: 47649 - protein, 28 aa, Artificial Sequence
  Cyclic GFR-binding peptide
  MOD_RES (27)..(27): Xaa is C or S
SATSMLYYDENEKVVLRKHRDMVVEGXG

SEQ ID NO: 47650 - protein, 35 aa, Artificial Sequence; identical to SEQ ID NO: 8038
  Cyclic GFR-binding peptide
  MOD_RES (1)..(33)..(35): Xaa is C or S

SEQ ID NO: 47651 - protein, 22 aa, Artificial Sequence
  Cyclic GFR-binding peptide
DLSAISILYLIGKTPKILKNYQ

SEQ ID NO: 47652 - protein, 35 aa, Artificial Sequence; identical to SEQ ID NO: 8040
  Cyclic GFR-binding peptide
  MOD_RES (32)..(34): Xaa is C or S

SEQ ID NO: 47653 - protein, 27 aa, Artificial Sequence
  Cyclic GFR-binding peptide
  MOD_RES (27)..(27): Xaa is C or S
LNAISILYFVGRKPKVLKKYRMIVRSX

SEQ ID NO: 47654 - protein, 24 aa, Artificial Sequence
  Cyclic GFR-binding peptide
LSPISILYKVGRKPKVLKYHYMIV

SEQ ID NO: 47655 - protein, 41 aa, Artificial Sequence; identical to SEQ ID NO: 8041
  Cyclic GFR-binding peptide
  MOD_RES (6)..(38)..(40): Xaa is C or S

SEQ ID NO: 47656 - protein, 22 aa, Artificial Sequence
  Cyclic GFR-binding peptide
NAISVLYFDDMGVPTLKKYREG

SEQ ID NO: 47657 - protein, 40 aa, Artificial Sequence; identical to SEQ ID NO: 8042
  Cyclic GFR-binding peptide
  MOD_RES (2)..(39): Xaa is C or S

SEQ ID NO: 47658 - protein, 30 aa, Artificial Sequence
  Cyclic GFR-binding peptide
  MOD_RES (3)..(3): Xaa is C or S
PTXAPTKLSPISVLYKDDSSNVILKYHYNM

SEQ ID NO: 47659 - protein, 31 aa, Artificial Sequence
  Cyclic GFR-binding peptide
  MOD_RES (28)..(30): Xaa is C or S
LSATSMLYYDEYDKVVLRKHREMVVEGXGXR

SEQ ID NO: 47660 - protein, 34 aa, Artificial Sequence
  Cyclic GFR-binding peptide
  MOD_RES (2)..(3): Xaa is C or S
AXXVPTKLNAISVLYFDDMGVPTLKKYREGMSVA

SEQ ID NO: 47661 - protein, 26 aa, Artificial Sequence
  Cyclic GFR-binding peptide
QALSPISILYKVGRKPKVLKYHYMIV

SEQ ID NO: 47662 - protein, 36 aa, Artificial Sequence; identical to SEQ ID NO: 8045
  Cyclic GFR-binding peptide
  MOD_RES (3)..(4)..(36): Xaa is C or S

SEQ ID NO: 47663 - protein, 32 aa, Artificial Sequence
  Cyclic GFR-binding peptide
  MOD_RES (4)..(5): Xaa is C or S
PKAXXVPTELSATSMLYYDENEKVVLRKHRDM

SEQ ID NO: 47664 - protein, 20 aa, Artificial Sequence
  Cyclic GFR-binding peptide
SPISVLYKDSSNNVILKYHY

SEQ ID NO: 47665 - protein, 30 aa, Artificial Sequence
  Cyclic GFR-binding peptide
  MOD_RES (29)..(29): Xaa is C or S
LNAISVLYFDDMGVPTLKKYREGMSVAEXG

SEQ ID NO: 47666 - protein, 32 aa, Artificial Sequence
  Cyclic GFR-binding peptide
  MOD_RES (3)..(4): Xaa is C or S
KPXXAPTQLSAISVLYLDDSSNVILKNYQNMV

SEQ ID NO: 47667 - protein, 29 aa, Artificial Sequence
  Cyclic GFR-binding peptide
TQVQLSAISVLYLEIVRKKPIFLKNYQTL

SEQ ID NO: 47668 - protein, 37 aa, Artificial Sequence; identical to SEQ ID NO: 8048
  Cyclic GFR-binding peptide
  MOD_RES (5)..(6)..(37): Xaa is C or S

SEQ ID NO: 47669 - protein, 31 aa, Artificial Sequence
  Cyclic GFR-binding peptide
  MOD_RES (3)..(4): Xaa is C or S
APXXVPQALNAISILYFVGRKPKVLKKYRMI

SEQ ID NO: 47670 - protein, 32 aa, Artificial Sequence; identical to SEQ ID NO: 8049
  Cyclic GFR-binding peptide
  MOD_RES (1)..(2): Xaa is C or S

SEQ ID NO: 47671 - protein, 32 aa, Artificial Sequence
  Cyclic GFR-binding peptide
  MOD_RES (30)..(32): Xaa is C or S
PQALNAISILYFVGRKPKVLKKYRMIVRSXKX

SEQ ID NO: 47672 - protein, 30 aa, Artificial Sequence; identical to SEQ ID NO: 8051
  Cyclic GFR-binding peptide

SEQ ID NO: 47673 - protein, 35 aa, Artificial Sequence; identical to SEQ ID NO: 8052
  Cyclic GFR-binding peptide
  MOD_RES (1)..(2)..(34): Xaa is C or S

SEQ ID NO: 47674 - protein, 31 aa, Artificial Sequence
  Cyclic GFR-binding peptide
  MOD_RES (5)..(6): Xaa is C or S
SAAPXXVPQALSAISILYLVGRKPKVLKNYQ

SEQ ID NO: 47675 - protein, 35 aa, Artificial Sequence
  Cyclic GFR-binding peptide
  MOD_RES (6)..(6): Xaa is C or S
VTKPTXAPTKLSATSVLYYDDSSNVILRKHRNMVV

SEQ ID NO: 47676 - protein, 34 aa, Artificial Sequence
  Cyclic GFR-binding peptide
  MOD_RES (6)..(7): Xaa is C or S
ASASPXXVPQDLNAISILYFVGRTPKVLKKYRMV

SEQ ID NO: 47677 - protein, 34 aa, Artificial Sequence; identical to SEQ ID NO: 8053
  Cyclic GFR-binding peptide
  MOD_RES (1)..(32)..(34): Xaa is C or S

SEQ ID NO: 47678 - protein, 38 aa, Artificial Sequence; identical to SEQ ID NO: 8054
  Cyclic GFR-binding peptide
  MOD_RES (4)..(5)..(38): Xaa is C or S

SEQ ID NO: 47679 - protein, 32 aa, Artificial Sequence
  Cyclic GFR-binding peptide
  MOD_RES (3)..(4): Xaa is C or S
KAXXVPTELNAISMLYFDENEKVVLKKYRDMV

SEQ ID NO: 47680 - protein, 32 aa, Artificial Sequence; identical to SEQ ID NO: 8056
  Cyclic GFR-binding peptide
  MOD_RES (32)..(32): Xaa is C or S

SEQ ID NO: 47681 - protein, 30 aa, Artificial Sequence
  Cyclic GFR-binding peptide
VQLNAISVLYFEIVRKKPIFLKKYRTLEDH

SEQ ID NO: 47682 - protein, 28 aa, Artificial Sequence
  Cyclic GFR-binding peptide
VPQALSAISILYLVGRKPKVLKNYQMIV

SEQ ID NO: 47683 - protein, 22 aa, Artificial Sequence
  Cyclic GFR-binding peptide
NAISMLYFDEYDKVVLKKYREM

SEQ ID NO: 47684 - protein, 33 aa, Artificial Sequence
  Cyclic GFR-binding peptide
  MOD_RES (3)..(4): Xaa is C or S
KPXXAPTQLSPISVLYKDDSSNVILKYHYNMVV

SEQ ID NO: 47685 - protein, 32 aa, Artificial Sequence
  Cyclic GFR-binding peptide
  MOD_RES (31)..(31): Xaa is C or S
PTKLSAISVLYLDSSNNVILKNYQNMVVKAXG

SEQ ID NO: 47686 - protein, 31 aa, Artificial Sequence
  Cyclic GFR-binding peptide
  MOD_RES (31)..(31): Xaa is C or S
PTKLSPISVLYKDSSNNVILKYHYNMVVKAX

SEQ ID NO: 47687 - protein, 28 aa, Artificial Sequence
  Cyclic GFR-binding peptide
PTKLSAISVLYLDSSNNVILKNYQNMVV

SEQ ID NO: 47688 - protein, 29 aa, Artificial Sequence
  Cyclic GFR-binding peptide
  MOD_RES (27)..(29): Xaa is C or S
SPISMLYKDEYDKVVLKYHYEMVVEGXGX

SEQ ID NO: 47689 - protein, 40 aa, Artificial Sequence; identical to SEQ ID NO: 8059
  Cyclic GFR-binding peptide
  MOD_RES (37)..(39): Xaa is C or S

SEQ ID NO: 47690 - protein, 38 aa, Artificial Sequence; identical to SEQ ID NO: 8060
  Cyclic GFR-binding peptide
  MOD_RES (6)..(7)..(38): Xaa is C or S

SEQ ID NO: 47691 - protein, 32 aa, Artificial Sequence
  Cyclic GFR-binding peptide
  MOD_RES (5)..(6): Xaa is C or S
VPKPXXAPTQLSPISVLYKDDSSNVILKYHYN

SEQ ID NO: 47692 - protein, 24 aa, Artificial Sequence
  Cyclic GFR-binding peptide
DLSAISILYLVGRTPKVLKNYQMV

SEQ ID NO: 47693 - protein, 26 aa, Artificial Sequence
  Cyclic GFR-binding peptide
QALSATSILYYVGRKPKVLRKHRMIV

SEQ ID NO: 47694 - protein, 36 aa, Artificial Sequence; identical to SEQ ID NO: 8061
  Cyclic GFR-binding peptide
  MOD_RES (3)..(4)..(35): Xaa is C or S

SEQ ID NO: 47695 - protein, 37 aa, Artificial Sequence; identical to SEQ ID NO: 8063
  Cyclic GFR-binding peptide
  MOD_RES (5)..(6)..(37): Xaa is C or S

SEQ ID NO: 47696 - protein, 25 aa, Artificial Sequence
  Cyclic GFR-binding peptide
ELNAISMLYFDEYDKVVLKKYREMV

SEQ ID NO: 47697 - protein, 32 aa, Artificial Sequence; identical to SEQ ID NO: 8064
  Cyclic GFR-binding peptide

SEQ ID NO: 47698 - protein, 31 aa, Artificial Sequence
  Cyclic GFR-binding peptide
  MOD_RES (28)..(30): Xaa is C or S
DLSPISILYKIGKTPKILKYHYMIVKSXKXS

SEQ ID NO: 47699 - protein, 23 aa, Artificial Sequence
  Cyclic GFR-binding peptide
LSPISVLYKEIVRKKPIFLKYHY

SEQ ID NO: 47700 - protein, 24 aa, Artificial Sequence
  Cyclic GFR-binding peptide
LSATSILYYVGRKPKVLRKHRMIV

SEQ ID NO: 47701 - protein, 38 aa, Artificial Sequence; identical to SEQ ID NO: 8066
  Cyclic GFR-binding peptide
  MOD_RES (1)..(38): Xaa is C or S

SEQ ID NO: 47702 - protein, 25 aa, Artificial Sequence
  Cyclic GFR-binding peptide
QLSPISVLYKDDSSNVILKYHYNMV

SEQ ID NO: 47703 - protein, 35 aa, Artificial Sequence; identical to SEQ ID NO: 8067
  Cyclic GFR-binding peptide
  MOD_RES (1)..(33)..(35): Xaa is C or S

SEQ ID NO: 47704 - protein, 26 aa, Artificial Sequence
  Cyclic GFR-binding peptide
QLSPISVLYKDDSSNVILKYHYNMVV

SEQ ID NO: 47705 - protein, 38 aa, Artificial Sequence; identical to SEQ ID NO: 8071
  Cyclic GFR-binding peptide
  MOD_RES (3)..(4)..(36)..(38): Xaa is C or S

SEQ ID NO: 47706 - protein, 35 aa, Artificial Sequence; identical to SEQ ID NO: 8070
  Cyclic GFR-binding peptide
  MOD_RES (3)..(4)..(35): Xaa is C or S

SEQ ID NO: 47707 - protein, 25 aa, Artificial Sequence
  Cyclic GFR-binding peptide
QLSATSVLYYDDSSNVILRKHRNMV

SEQ ID NO: 47708 - protein, 36 aa, Artificial Sequence; identical to SEQ ID NO: 8073
  Cyclic GFR-binding peptide
  MOD_RES (4)..(5): Xaa is C or S

SEQ ID NO: 47709 - protein, 41 aa, Artificial Sequence; identical to SEQ ID NO: 8074
  Cyclic GFR-binding peptide
  MOD_RES (7)..(39)..(41): Xaa is C or S

SEQ ID NO: 47710 - protein, 38 aa, Artificial Sequence; identical to SEQ ID NO: 8075
  Cyclic GFR-binding peptide
  MOD_RES (5)..(6)..(38): Xaa is C or S

SEQ ID NO: 47711 - protein, 20 aa, Artificial Sequence
  Cyclic GFR-binding peptide
SATSVLYYDSSNNVILRKHR

SEQ ID NO: 47712 - protein, 26 aa, Artificial Sequence
  Cyclic GFR-binding peptide
  MOD_RES (1)..(1): Xaa is C or S
XVPQDLSATSILYYVGRTPKVLRKHR

SEQ ID NO: 47713 - protein, 36 aa, Artificial Sequence; identical to SEQ ID NO: 8076
  Cyclic GFR-binding peptide
  MOD_RES (3)..(4): Xaa is C or S

SEQ ID NO: 47714 - protein, 24 aa, Artificial Sequence
  Cyclic GFR-binding peptide
QDLSAISILYLIGKTPKILKNYQM

SEQ ID NO: 47715 - protein, 33 aa, Artificial Sequence
  Cyclic GFR-binding peptide
  MOD_RES (3)..(4): Xaa is C or S
KPXXAPTKLSAISVLYLDDSSNVILKNYQNMVV

SEQ ID NO: 47716 - protein, 31 aa, Artificial Sequence
  Cyclic GFR-binding peptide
  MOD_RES (31)..(31): Xaa is C or S
PTKLNAISVLYFDSSNNVILKKYRNMVVKAX

SEQ ID NO: 47717 - protein, 37 aa, Artificial Sequence; identical to SEQ ID NO: 8080
  Cyclic GFR-binding peptide
  MOD_RES (3)..(4)..(36): Xaa is C or S

SEQ ID NO: 47718 - protein, 31 aa, Artificial Sequence; identical to SEQ ID NO: 8082
  Cyclic GFR-binding peptide
  MOD_RES (31)..(31): Xaa is C or S

SEQ ID NO: 47719 - protein, 39 aa, Artificial Sequence; identical to SEQ ID NO: 8084
  Cyclic GFR-binding peptide
  MOD_RES (3)..(3): Xaa is C or S

SEQ ID NO: 47720 - protein, 21 aa, Artificial Sequence
  Cyclic GFR-binding peptide
LSPISVLYKDDSSNVILKYHY

SEQ ID NO: 47721 - protein, 26 aa, Artificial Sequence
  Cyclic GFR-binding peptide
LSPISVLYKDDSSNVILKYHYNMVVR

SEQ ID NO: 47722 - protein, 26 aa, Artificial Sequence
  Cyclic GFR-binding peptide
  MOD_RES (1)..(1): Xaa is C or S
XVSQDLNAISILYFIGKTPKILKKYR

SEQ ID NO: 47723 - protein, 26 aa, Artificial Sequence
  Cyclic GFR-binding peptide
  MOD_RES (1)..(1): Xaa is C or S
XVPTKLSAISVLYLDDMGVPTLKNYQ

SEQ ID NO: 47724 - protein, 32 aa, Artificial Sequence
  Cyclic GFR-binding peptide
  MOD_RES (4)..(5): Xaa is C or S
ASPXXVPQDLNAISILYFVGRTPKVLKKYRMV

SEQ ID NO: 47725 - protein, 39 aa, Artificial Sequence; identical to SEQ ID NO: 8085
  Cyclic GFR-binding peptide
  MOD_RES (3)..(3): Xaa is C or S

SEQ ID NO: 47726 - protein, 26 aa, Artificial Sequence
  Cyclic GFR-binding peptide
VPQALSPISILYKVGRKPKVLKYHYM

SEQ ID NO: 47727 - protein, 30 aa, Artificial Sequence
  Cyclic GFR-binding peptide
  MOD_RES (28)..(30): Xaa is C or S
LNAISVLYFDSSNNVILKKYRNMVVKAXGX

SEQ ID NO: 47728 - protein, 39 aa, Artificial Sequence; identical to SEQ ID NO: 8086
  Cyclic GFR-binding peptide
  MOD_RES (4)..(4): Xaa is C or S

SEQ ID NO: 47729 - protein, 25 aa, Artificial Sequence
  Cyclic GFR-binding peptide
TELSATSMLYYDEYDKVVLRKHREM

SEQ ID NO: 47730 - protein, 26 aa, Artificial Sequence
  Cyclic GFR-binding peptide
SPISMLYKDEYDKVVLKYHYEMVVEG

SEQ ID NO: 47731 - protein, 34 aa, Artificial Sequence
  Cyclic GFR-binding peptide
  MOD_RES (6)..(7): Xaa is C or S
TVPKPXXAPTQLSATSVLYYDDSSNVILRKHRNM

SEQ ID NO: 47732 - protein, 32 aa, Artificial Sequence; identical to SEQ ID NO: 8088
  Cyclic GFR-binding peptide
  MOD_RES (1)..(2): Xaa is C or S

SEQ ID NO: 47733 - protein, 33 aa, Artificial Sequence
  Cyclic GFR-binding peptide
  MOD_RES (31)..(33): Xaa is C or S
PTQLSPISVLYKDDSSNVILKYHYNMVVRAXGX

SEQ ID NO: 47734 - protein, 40 aa, Artificial Sequence; identical to SEQ ID NO: 8092
  Cyclic GFR-binding peptide
  MOD_RES (5)..(6)..(38)..(40): Xaa is C or S

SEQ ID NO: 47735 - protein, 28 aa, Artificial Sequence
  Cyclic GFR-binding peptide
APTKLSATSVLYYDDSSNVILRKHRNMV

SEQ ID NO: 47736 - protein, 29 aa, Artificial Sequence
  Cyclic GFR-binding peptide
  MOD_RES (27)..(29): Xaa is C or S
LSATSILYYVGRKPKVLRKHRMIVRSXKX

SEQ ID NO: 47737 - protein, 35 aa, Artificial Sequence; identical to SEQ ID NO: 8093
  Cyclic GFR-binding peptide
  MOD_RES (1)..(2)..(34): Xaa is C or S

SEQ ID NO: 47738 - protein, 40 aa, Artificial Sequence; identical to SEQ ID NO: 8094
  Cyclic GFR-binding peptide
  MOD_RES (5)..(6)..(37)..(39): Xaa is C or S

SEQ ID NO: 47739 - protein, 30 aa, Artificial Sequence
  Cyclic GFR-binding peptide
  MOD_RES (29)..(29): Xaa is C or S
QDLSATSILYYIGKTPKILRKHRMIVKSXK

SEQ ID NO: 47740 - protein, 27 aa, Artificial Sequence
  Cyclic GFR-binding peptide
  MOD_RES (1)..(2): Xaa is C or S
XXVPTELNAISMLYFDENEKVVLKKYR

SEQ ID NO: 47741 - protein, 37 aa, Artificial Sequence; identical to SEQ ID NO: 8097
  Cyclic GFR-binding peptide
  MOD_RES (6)..(7): Xaa is C or S

SEQ ID NO: 47742 - protein, 41 aa, Artificial Sequence; identical to SEQ ID NO: 8099
  Cyclic GFR-binding peptide
  MOD_RES (6)..(7)..(38)..(40): Xaa is C or S

SEQ ID NO: 47743 - protein, 26 aa, Artificial Sequence
  Cyclic GFR-binding peptide
LNAISILYFVGRTPKVLKKYRMVVKS

SEQ ID NO: 47744 - protein, 32 aa, Artificial Sequence
  Cyclic GFR-binding peptide
  MOD_RES (3)..(4): Xaa is C or S
KPXXAPTQLSPISVLYKDDSSNVILKYHYNMV

SEQ ID NO: 47745 - protein, 35 aa, Artificial Sequence; identical to SEQ ID NO: 8104
  Cyclic GFR-binding peptide
  MOD_RES (2)..(3): Xaa is C or S

SEQ ID NO: 47746 - protein, 32 aa, Artificial Sequence
  Cyclic GFR-binding peptide
  MOD_RES (2)..(3): Xaa is C or S
PXXAPTKLSATSVLYYDDSSNVILRKHRNMVV

SEQ ID NO: 47747 - protein, 30 aa, Artificial Sequence
  Cyclic GFR-binding peptide
  MOD_RES (29)..(29): Xaa is C or S
QLSATSVLYYDDSSNVILRKHRNMVVRAXG

SEQ ID NO: 47748 - protein, 25 aa, Artificial Sequence
  Cyclic GFR-binding peptide
TELSPISMLYKDEYDKVVLKYHYEM

SEQ ID NO: 47749 - protein, 27 aa, Artificial Sequence
  Cyclic GFR-binding peptide
KLNAISVLYFDDMGVPTLKKYREGMSV

SEQ ID NO: 47750 - protein, 36 aa, Artificial Sequence; identical to SEQ ID NO: 8105
  Cyclic GFR-binding peptide
  MOD_RES (4)..(5)..(36): Xaa is C or S

SEQ ID NO: 47751 - protein, 32 aa, Artificial Sequence
  Cyclic GFR-binding peptide
  MOD_RES (29)..(31): Xaa is C or S
KLNAISVLYFDSSNNVILKKYRNMVVKAXGXH

SEQ ID NO: 47752 - protein, 35 aa, Artificial Sequence; identical to SEQ ID NO: 8106
  Cyclic GFR-binding peptide
  MOD_RES (1)..(2)..(34): Xaa is C or S

SEQ ID NO: 47753 - protein, 35 aa, Artificial Sequence; identical to SEQ ID NO: 8107
  Cyclic GFR-binding peptide
  MOD_RES (1)..(32)..(34): Xaa is C or S

SEQ ID NO: 47754 - protein, 35 aa, Artificial Sequence
  Cyclic GFR-binding peptide
  MOD_RES (2)..(2): Xaa is C or S
QXRPTQVQLNAISVLYFEIVRKKPIFLKKYRTLED

SEQ ID NO: 47755 - protein, 26 aa, Artificial Sequence
  Cyclic GFR-binding peptide
LNAISVLYFEIVRKKPIFLKKYRTLE

SEQ ID NO: 47756 - protein, 33 aa, Artificial Sequence
  Cyclic GFR-binding peptide
  MOD_RES (30)..(32): Xaa is C or S
TKLSAISVLYLDDSSNVILKNYQNMVVRSXGXH

SEQ ID NO: 47757 - protein, 31 aa, Artificial Sequence; identical to SEQ ID NO: 8108
  Cyclic GFR-binding peptide
  MOD_RES (1)..(1): Xaa is C or S

SEQ ID NO: 47758 - protein, 30 aa, Artificial Sequence
  Cyclic GFR-binding peptide
  MOD_RES (1)..(2): Xaa is C or S
XXAPTKLSAISVLYLDDSSNVILKNYQNMV

SEQ ID NO: 47759 - protein, 22 aa, Artificial Sequence
  Cyclic GFR-binding peptide
LNAISVLYFDDMGVPTLKKYRE

SEQ ID NO: 47760 - protein, 30 aa, Artificial Sequence
  Cyclic GFR-binding peptide
  MOD_RES (3)..(4): Xaa is C or S
SPXXVSQDLSATSILYYIGKTPKILRKHRM

SEQ ID NO: 47761 - protein, 30 aa, Artificial Sequence
  Cyclic GFR-binding peptide
TQVQLNAISVLYFEIVRKKPIFLKKYRTLE

SEQ ID NO: 47762 - protein, 35 aa, Artificial Sequence
  Cyclic GFR-binding peptide
  MOD_RES (5)..(6): Xaa is C or S
VGKAXXVPTKLSATSVLYYDDMGVPTLRKHREGMS

SEQ ID NO: 47763 - protein, 29 aa, Artificial Sequence
  Cyclic GFR-binding peptide
  MOD_RES (27)..(29): Xaa is C or S
SPISVLYKDSSNNVILKYHYNMVVKAXGX

SEQ ID NO: 47764 - protein, 25 aa, Artificial Sequence
  Cyclic GFR-binding peptide
SAISVLYLDDSSNVILKNYQNMVVR

SEQ ID NO: 47765 - protein, 34 aa, Artificial Sequence; identical to SEQ ID NO: 8111
  Cyclic GFR-binding peptide
  MOD_RES (1)..(32)..(34): Xaa is C or S

SEQ ID NO: 47766 - protein, 35 aa, Artificial Sequence; identical to SEQ ID NO: 8116
  Cyclic GFR-binding peptide
  MOD_RES (32)..(34): Xaa is C or S

SEQ ID NO: 47767 - protein, 24 aa, Artificial Sequence
  Cyclic GFR-binding peptide
PQALSATSILYYVGRKPKVLRKHR

SEQ ID NO: 47768 - protein, 36 aa, Artificial Sequence; identical to SEQ ID NO: 8117
  Cyclic GFR-binding peptide
  MOD_RES (3)..(4)..(35): Xaa is C or S

SEQ ID NO: 47769 - protein, 35 aa, Artificial Sequence; identical to SEQ ID NO: 8118
  Cyclic GFR-binding peptide
  MOD_RES (4)..(5): Xaa is C or S

SEQ ID NO: 47770 - protein, 32 aa, Artificial Sequence
  Cyclic GFR-binding peptide
  MOD_RES (2)..(2): Xaa is C or S
QXRPTQVQLSPISVLYKEIVRKKPIFLKYHYT

SEQ ID NO: 47771 - protein, 37 aa, Artificial Sequence
  Cyclic GFR-binding peptide
  MOD_RES (5)..(6): Xaa is C or S
VGKAXXVPTKLSATSVLYYDDMGVPTLRKHREGMSVA

SEQ ID NO: 47772 - protein, 25 aa, Artificial Sequence
  Cyclic GFR-binding peptide
TKLSAISVLYLDSSNNVILKNYQNM

SEQ ID NO: 47773 - protein, 39 aa, Artificial Sequence; identical to SEQ ID NO: 8119
  Cyclic GFR-binding peptide
  MOD_RES (2)..(3)..(36)..(38): Xaa is C or S

SEQ ID NO: 47774 - protein, 30 aa, Artificial Sequence
  Cyclic GFR-binding peptide
QLSATSVLYYEIVRKKPIFLRKHRTLEDHL

SEQ ID NO: 47775 - protein, 38 aa, Artificial Sequence; identical to SEQ ID NO: 8120
  Cyclic GFR-binding peptide
  MOD_RES (3)..(4)..(36)..(38): Xaa is C or S

SEQ ID NO: 47776 - protein, 21 aa, Artificial Sequence
  Cyclic GFR-binding peptide
SAISVLYLDDSSNVILKNYQN

SEQ ID NO: 47777 - protein, 37 aa, Artificial Sequence; identical to SEQ ID NO: 8123
  Cyclic GFR-binding peptide
  MOD_RES (3)..(4)..(37): Xaa is C or S

SEQ ID NO: 47778 - protein, 34 aa, Artificial Sequence
  Cyclic GFR-binding peptide
  MOD_RES (5)..(6): Xaa is C or S
SASPXXVSQDLNAISILYFIGKTPKILKKYRMIV

SEQ ID NO: 47779 - protein, 36 aa, Artificial Sequence; identical to SEQ ID NO: 8124
  Cyclic GFR-binding peptide
  MOD_RES (1)..(33)..(35): Xaa is C or S

SEQ ID NO: 47780 - protein, 40 aa, Artificial Sequence; identical to SEQ ID NO: 8126
  Cyclic GFR-binding peptide
  MOD_RES (5)..(6)..(38)..(40): Xaa is C or S

SEQ ID NO: 47781 - protein, 39 aa, Artificial Sequence; identical to SEQ ID NO: 8127
  Cyclic GFR-binding peptide
  MOD_RES (6)..(7)..(38): Xaa is C or S

SEQ ID NO: 47782 - protein, 35 aa, Artificial Sequence
  Cyclic GFR-binding peptide
  MOD_RES (7)..(7): Xaa is C or S
HVTKPTXAPTKLSAISVLYLDDSSNVILKNYQNMV

SEQ ID NO: 47783 - protein, 36 aa, Artificial Sequence; identical to SEQ ID NO: 8130
  Cyclic GFR-binding peptide
  MOD_RES (2)..(2): Xaa is C or S

SEQ ID NO: 47784 - protein, 32 aa, Artificial Sequence; identical to SEQ ID NO: 8132
  Cyclic GFR-binding peptide
  MOD_RES (31)..(31): Xaa is C or S

SEQ ID NO: 47785 - protein, 30 aa, Artificial Sequence
  Cyclic GFR-binding peptide
  MOD_RES (4)..(5): Xaa is C or S
ASPXXVPQDLSAISILYLVGRTPKVLKNYQ

SEQ ID NO: 47786 - protein, 27 aa, Artificial Sequence
  Cyclic GFR-binding peptide
TELNAISMLYFDENEKVVLKKYRDMVV

SEQ ID NO: 47787 - protein, 35 aa, Artificial Sequence; identical to SEQ ID NO: 8135
  Cyclic GFR-binding peptide
  MOD_RES (1)..(32)..(34): Xaa is C or S

SEQ ID NO: 47788 - protein, 38 aa, Artificial Sequence; identical to SEQ ID NO: 8137
  Cyclic GFR-binding peptide
  MOD_RES (6)..(7): Xaa is C or S

SEQ ID NO: 47789 - protein, 36 aa, Artificial Sequence; identical to SEQ ID NO: 8138
  Cyclic GFR-binding peptide
  MOD_RES (4)..(5)..(36): Xaa is C or S

SEQ ID NO: 47790 - protein, 29 aa, Artificial Sequence
  Cyclic GFR-binding peptide
  MOD_RES (2)..(3): Xaa is C or S
PXXVPQALSPISILYKVGRKPKVLKYHYM

SEQ ID NO: 47791 - protein, 28 aa, Artificial Sequence
  Cyclic GFR-binding peptide
  MOD_RES (27)..(27): Xaa is C or S
LSAISILYLVGRKPKVLKNYQMIVRSXK

SEQ ID NO: 47792 - protein, 26 aa, Artificial Sequence
  Cyclic GFR-binding peptide
LSATSMLYYDEYDKVVLRKHREMVVE

SEQ ID NO: 47793 - protein, 31 aa, Artificial Sequence
  Cyclic GFR-binding peptide
  MOD_RES (28)..(30): Xaa is C or S
DLSAISILYLIGKTPKILKNYQMIVKSXKXS

SEQ ID NO: 47794 - protein, 29 aa, Artificial Sequence
  Cyclic GFR-binding peptide
  MOD_RES (1)..(2): Xaa is C or S
XXVPQDLSATSILYYVGRTPKVLRKHRMV

SEQ ID NO: 47795 - protein, 43 aa, Artificial Sequence; identical to SEQ ID NO: 8142
  Cyclic GFR-binding peptide
  MOD_RES (3)..(40)..(42): Xaa is C or S

SEQ ID NO: 47796 - protein, 40 aa, Artificial Sequence; identical to SEQ ID NO: 8143
  Cyclic GFR-binding peptide
  MOD_RES (6)..(7)..(39): Xaa is C or S

SEQ ID NO: 47797 - protein, 34 aa, Artificial Sequence
  Cyclic GFR-binding peptide
  MOD_RES (6)..(7): Xaa is C or S
ASAAPXXVPQALSPISILYKVGRKPKVLKYHYMI

SEQ ID NO: 47798 - protein, 27 aa, Artificial Sequence
  Cyclic GFR-binding peptide
QDLSATSILYYIGKTPKILRKHRMIVK

SEQ ID NO: 47799 - protein, 41 aa, Artificial Sequence; identical to SEQ ID NO: 8145
  Cyclic GFR-binding peptide
  MOD_RES (5)..(6)..(38)..(40): Xaa is C or S

SEQ ID NO: 47800 - protein, 29 aa, Artificial Sequence
  Cyclic GFR-binding peptide
  MOD_RES (26)..(28): Xaa is C or S
SPISILYKVGRKPKVLKYHYMIVRSXKXS

SEQ ID NO: 47801 - protein, 34 aa, Artificial Sequence
  Cyclic GFR-binding peptide
  MOD_RES (5)..(6): Xaa is C or S
VPKAXXAPTKLSAISVLYLDSSNNVILKNYQNMV

SEQ ID NO: 47802 - protein, 35 aa, Artificial Sequence; identical to SEQ ID NO: 8147
  Cyclic GFR-binding peptide
  MOD_RES (2)..(3)..(35): Xaa is C or S

SEQ ID NO: 47803 - protein, 31 aa, Artificial Sequence
  Cyclic GFR-binding peptide
RPTQVQLSPISVLYKEIVRKKPIFLKYHYTL

SEQ ID NO: 47804 - protein, 39 aa, Artificial Sequence; identical to SEQ ID NO: 8148
  Cyclic GFR-binding peptide
  MOD_RES (5)..(6)..(38): Xaa is C or S

SEQ ID NO: 47805 - protein, 23 aa, Artificial Sequence
  Cyclic GFR-binding peptide
QDLSPISILYKIGKTPKILKYHY

SEQ ID NO: 47806 - protein, 42 aa, Artificial Sequence; identical to SEQ ID NO: 8149
  Cyclic GFR-binding peptide
  MOD_RES (3)..(40)..(42): Xaa is C or S

SEQ ID NO: 47807 - protein, 42 aa, Artificial Sequence; identical to SEQ ID NO: 8151
  Cyclic GFR-binding peptide
  MOD_RES (6)..(7)..(39)..(41): Xaa is C or S

SEQ ID NO: 47808 - protein, 26 aa, Artificial Sequence
  Cyclic GFR-binding peptide
VSQDLSPISILYKIGKTPKILKYHYM

SEQ ID NO: 47809 - protein, 35 aa, Artificial Sequence; identical to SEQ ID NO: 8153
  Cyclic GFR-binding peptide
  MOD_RES (1)..(33)..(35): Xaa is C or S

SEQ ID NO: 47810 - protein, 31 aa, Artificial Sequence; identical to SEQ ID NO: 8152
  Cyclic GFR-binding peptide
  MOD_RES (1)..(1): Xaa is C or S

SEQ ID NO: 47811 - protein, 33 aa, Artificial Sequence; identical to SEQ ID NO: 8154
  Cyclic GFR-binding peptide
  MOD_RES (2)..(3): Xaa is C or S

SEQ ID NO: 47812 - protein, 39 aa, Artificial Sequence; identical to SEQ ID NO: 8156
  Cyclic GFR-binding peptide
  MOD_RES (6)..(7)..(38): Xaa is C or S

SEQ ID NO: 47813 - protein, 36 aa, Artificial Sequence; identical to SEQ ID NO: 8157
  Cyclic GFR-binding peptide
  MOD_RES (2)..(34)..(36): Xaa is C or S

SEQ ID NO: 47814 - protein, 32 aa, Artificial Sequence; identical to SEQ ID NO: 8158
  Cyclic GFR-binding peptide
  MOD_RES (1)..(2): Xaa is C or S

SEQ ID NO: 47815 - protein, 32 aa, Artificial Sequence
  Cyclic GFR-binding peptide
  MOD_RES (3)..(3): Xaa is C or S
PTXAPTKLSAISVLYLDDSSNVILKNYQNMVV

SEQ ID NO: 47816 - protein, 25 aa, Artificial Sequence
  Cyclic GFR-binding peptide
SPISVLYKDDSSNVILKYHYNMVVR

SEQ ID NO: 47817 - protein, 34 aa, Artificial Sequence; identical to SEQ ID NO: 8160
  Cyclic GFR-binding peptide
  MOD_RES (32)..(34): Xaa is C or S

SEQ ID NO: 47818 - protein, 25 aa, Artificial Sequence
  Cyclic GFR-binding peptide
PTELNAISMLYFDENEKVVLKKYRD

SEQ ID NO: 47819 - protein, 29 aa, Artificial Sequence
  Cyclic GFR-binding peptide
  MOD_RES (2)..(3): Xaa is C or S
PXXAPTQLSAISVLYLDDSSNVILKNYQN

SEQ ID NO: 47820 - protein, 20 aa, Artificial Sequence
  Cyclic GFR-binding peptide
NAISILYFIGKTPKILKKYR

SEQ ID NO: 47821 - protein, 34 aa, Artificial Sequence
  Cyclic GFR-binding peptide
  MOD_RES (6)..(7): Xaa is C or S
ASAAPXXVPQALSATSILYYVGRKPKVLRKHRMI

SEQ ID NO: 47822 - protein, 37 aa, Artificial Sequence; identical to SEQ ID NO: 8161
  Cyclic GFR-binding peptide
  MOD_RES (5)..(6): Xaa is C or S

SEQ ID NO: 47823 - protein, 33 aa, Artificial Sequence
  Cyclic GFR-binding peptide
  MOD_RES (31)..(33): Xaa is C or S
PTELSATSMLYYDEYDKVVLRKHREMVVEGXGX

SEQ ID NO: 47824 - protein, 35 aa, Artificial Sequence; identical to SEQ ID NO: 8164
  Cyclic GFR-binding peptide
  MOD_RES (32)..(34): Xaa is C or S

SEQ ID NO: 47825 - protein, 20 aa, Artificial Sequence
  Cyclic GFR-binding peptide
SATSMLYYDENEKVVLRKHR

SEQ ID NO: 47826 - protein, 38 aa, Artificial Sequence; identical to SEQ ID NO: 8166
  Cyclic GFR-binding peptide
  MOD_RES (3)..(4)..(35)..(37): Xaa is C or S

SEQ ID NO: 47827 - protein, 36 aa, Artificial Sequence; identical to SEQ ID NO: 8167
  Cyclic GFR-binding peptide
  MOD_RES (5)..(6): Xaa is C or S

SEQ ID NO: 47828 - protein, 32 aa, Artificial Sequence
  Cyclic GFR-binding peptide
  MOD_RES (5)..(6): Xaa is C or S
VPKPXXAPTQLSATSVLYYDDSSNVILRKHRN

SEQ ID NO: 47829 - protein, 22 aa, Artificial Sequence
  Cyclic GFR-binding peptide
LNAISILYFIGKTPKILKKYRM

SEQ ID NO: 47830 - protein, 29 aa, Artificial Sequence
  Cyclic GFR-binding peptide
APTKLSPISVLYKDDSSNVILKYHYNMVV

SEQ ID NO: 47831 - protein, 32 aa, Artificial Sequence
  Cyclic GFR-binding peptide
  MOD_RES (29)..(31): Xaa is C or S
QLSATSVLYYDDSSNVILRKHRNMVVRAXGXH

SEQ ID NO: 47832 - protein, 30 aa, Artificial Sequence
  Cyclic GFR-binding peptide
  MOD_RES (4)..(5): Xaa is C or S
ASPXXVSQDLSPISILYKIGKTPKILKYHY

SEQ ID NO: 47833 - protein, 33 aa, Artificial Sequence; identical to SEQ ID NO: 8170
  Cyclic GFR-binding peptide
  MOD_RES (1)..(2): Xaa is C or S

SEQ ID NO: 47834 - protein, 38 aa, Artificial Sequence; identical to SEQ ID NO: 8169
  Cyclic GFR-binding peptide
  MOD_RES (4)..(5)..(37): Xaa is C or S

SEQ ID NO: 47835 - protein, 31 aa, Artificial Sequence; identical to SEQ ID NO: 8171
  Cyclic GFR-binding peptide
  MOD_RES (1)..(1): Xaa is C or S

SEQ ID NO: 47836 - protein, 39 aa, Artificial Sequence; identical to SEQ ID NO: 8173
  Cyclic GFR-binding peptide
  MOD_RES (3)..(4)..(36)..(38): Xaa is C or S

SEQ ID NO: 47837 - protein, 38 aa, Artificial Sequence; identical to SEQ ID NO: 8176
  Cyclic GFR-binding peptide
  MOD_RES (5)..(6)..(38): Xaa is C or S

SEQ ID NO: 47838 - protein, 23 aa, Artificial Sequence
  Cyclic GFR-binding peptide
LNAISILYFVGRTPKVLKKYRMV

SEQ ID NO: 47839 - protein, 34 aa, Artificial Sequence
  Cyclic GFR-binding peptide
  MOD_RES (3)..(3): Xaa is C or S
VQXRPTQVQLSATSVLYYEIVRKKPIFLRKHRTL

SEQ ID NO: 47840 - protein, 32 aa, Artificial Sequence; identical to SEQ ID NO: 8177
  Cyclic GFR-binding peptide
  MOD_RES (31)..(31): Xaa is C or S

SEQ ID NO: 47841 - protein, 25 aa, Artificial Sequence
  Cyclic GFR-binding peptide
LSATSILYYIGKTPKILRKHRMIVK

SEQ ID NO: 47842 - protein, 25 aa, Artificial Sequence
  Cyclic GFR-binding peptide
SATSMLYYDEYDKVVLRKHREMVVE

SEQ ID NO: 47843 - protein, 38 aa, Artificial Sequence; identical to SEQ ID NO: 8179
  Cyclic GFR-binding peptide
  MOD_RES (5)..(6)..(37): Xaa is C or S

SEQ ID NO: 47844 - protein, 32 aa, Artificial Sequence
  Cyclic GFR-binding peptide
  MOD_RES (4)..(5): Xaa is C or S
AAPXXVPQALSATSILYYVGRKPKVLRKHRMI

SEQ ID NO: 47845 - protein, 25 aa, Artificial Sequence
  Cyclic GFR-binding peptide
TKLSAISVLYLDDMGVPTLKNYQEG

SEQ ID NO: 47846 - protein, 27 aa, Artificial Sequence
  Cyclic GFR-binding peptide
  MOD_RES (1)..(1): Xaa is C or S
XAPTKLSAISVLYLDSSNNVILKNYQN

SEQ ID NO: 47847 - protein, 33 aa, Artificial Sequence
  Cyclic GFR-binding peptide
  MOD_RES (4)..(4): Xaa is C or S
NVQXRPTQVQLSAISVLYLEIVRKKPIFLKNYQ

SEQ ID NO: 47848 - protein, 21 aa, Artificial Sequence
  Cyclic GFR-binding peptide
SAISVLYLDDMGVPTLKNYQE

SEQ ID NO: 47849 - protein, 39 aa, Artificial Sequence; identical to SEQ ID NO: 8182
  Cyclic GFR-binding peptide
  MOD_RES (36)..(38): Xaa is C or S

SEQ ID NO: 47850 - protein, 37 aa, Artificial Sequence
  Cyclic GFR-binding peptide
  MOD_RES (4)..(4): Xaa is C or S
NVQXRPTQVQLSAISVLYLEIVRKKPIFLKNYQTLED

SEQ ID NO: 47851 - protein, 35 aa, Artificial Sequence; identical to SEQ ID NO: 8184
  Cyclic GFR-binding peptide
  MOD_RES (35)..(35): Xaa is C or S

SEQ ID NO: 47852 - protein, 30 aa, Artificial Sequence
  Cyclic GFR-binding peptide
  MOD_RES (28)..(30): Xaa is C or S
NAISVLYFDDMGVPTLKKYREGMSVAEXGX

SEQ ID NO: 47853 - protein, 28 aa, Artificial Sequence
  Cyclic GFR-binding peptide
VPQDLSAISILYLVGRTPKVLKNYQMVV

SEQ ID NO: 47854 - protein, 33 aa, Artificial Sequence; identical to SEQ ID NO: 8186
  Cyclic GFR-binding peptide
  MOD_RES (1)..(33): Xaa is C or S

SEQ ID NO: 47855 - protein, 30 aa, Artificial Sequence; identical to SEQ ID NO: 8187
  Cyclic GFR-binding peptide

SEQ ID NO: 47856 - protein, 31 aa, Artificial Sequence
  Cyclic GFR-binding peptide
  MOD_RES (29)..(31): Xaa is C or S
QLSATSVLYYDDSSNVILRKHRNMVVRAXGX

SEQ ID NO: 47857 - protein, 27 aa, Artificial Sequence
  Cyclic GFR-binding peptide
TKLNAISVLYFDSSNNVILKKYRNMVV

SEQ ID NO: 47858 - protein, 22 aa, Artificial Sequence
  Cyclic GFR-binding peptide
KLSAISVLYLDSSNNVILKNYQ

SEQ ID NO: 47859 - protein, 38 aa, Artificial Sequence; identical to SEQ ID NO: 8188
  Cyclic GFR-binding peptide
  MOD_RES (36)..(38): Xaa is C or S

SEQ ID NO: 47860 - protein, 26 aa, Artificial Sequence
  Cyclic GFR-binding peptide
  MOD_RES (1)..(1): Xaa is C or S
XAPTKLSAISVLYLDSSNNVILKNYQ

SEQ ID NO: 47861 - protein, 32 aa, Artificial Sequence
  Cyclic GFR-binding peptide
  MOD_RES (29)..(31): Xaa is C or S
QALNAISILYFVGRKPKVLKKYRMIVRSXKXS

SEQ ID NO: 47862 - protein, 28 aa, Artificial Sequence
  Cyclic GFR-binding peptide
PQDLSPISILYKVGRTPKVLKYHYMVVK

SEQ ID NO: 47863 - protein, 33 aa, Artificial Sequence; identical to SEQ ID NO: 8191
  Cyclic GFR-binding peptide
  MOD_RES (1)..(33): Xaa is C or S

SEQ ID NO: 47864 - protein, 26 aa, Artificial Sequence
  Cyclic GFR-binding peptide
APTKLSATSVLYYDDSSNVILRKHRN

SEQ ID NO: 47865 - protein, 25 aa, Artificial Sequence
  Cyclic GFR-binding peptide
QDLSAISILYLIGKTPKILKNYQMI

SEQ ID NO: 47866 - protein, 28 aa, Artificial Sequence
  Cyclic GFR-binding peptide
PTQLSAISVLYLDDSSNVILKNYQNMVV

SEQ ID NO: 47867 - protein, 32 aa, Artificial Sequence
  Cyclic GFR-binding peptide
  MOD_RES (29)..(31): Xaa is C or S
ELSATSMLYYDEYDKVVLRKHREMVVEGXGXR

SEQ ID NO: 47868 - protein, 35 aa, Artificial Sequence
  Cyclic GFR-binding peptide
  MOD_RES (6)..(7): Xaa is C or S
ASASPXXVPQDLSATSILYYVGRTPKVLRKHRMVV

SEQ ID NO: 47869 - protein, 27 aa, Artificial Sequence
  Cyclic GFR-binding peptide
  MOD_RES (27)..(27): Xaa is C or S
LSATSILYYVGRTPKVLRKHRMVVKSX

SEQ ID NO: 47870 - protein, 25 aa, Artificial Sequence
  Cyclic GFR-binding peptide
SPISVLYKDSSNNVILKYHYNMVVK

SEQ ID NO: 47871 - protein, 22 aa, Artificial Sequence
  Cyclic GFR-binding peptide
SAISILYLVGRTPKVLKNYQMV

SEQ ID NO: 47872 - protein, 40 aa, Artificial Sequence; identical to SEQ ID NO: 8193
  Cyclic GFR-binding peptide
  MOD_RES (6)..(7)..(38)..(40): Xaa is C or S

SEQ ID NO: 47873 - protein, 39 aa, Artificial Sequence; identical to SEQ ID NO: 8194
  Cyclic GFR-binding peptide
  MOD_RES (7)..(39): Xaa is C or S

SEQ ID NO: 47874 - protein, 24 aa, Artificial Sequence
  Cyclic GFR-binding peptide
LNAISVLYFEIVRKKPIFLKKYRT

SEQ ID NO: 47875 - protein, 31 aa, Artificial Sequence
  Cyclic GFR-binding peptide
  MOD_RES (5)..(6): Xaa is C or S
VPKAXXAPTKLNAISVLYFDSSNNVILKKYR

SEQ ID NO: 47876 - protein, 23 aa, Artificial Sequence
  Cyclic GFR-binding peptide
SATSMLYYDEYDKVVLRKHREMV

SEQ ID NO: 47877 - protein, 32 aa, Artificial Sequence
  Cyclic GFR-binding peptide
  MOD_RES (5)..(6): Xaa is C or S
VGKAXXVPTKLNAISVLYFDDMGVPTLKKYRE

SEQ ID NO: 47878 - protein, 30 aa, Artificial Sequence
  Cyclic GFR-binding peptide
  MOD_RES (30)..(30): Xaa is C or S
TQLSPISVLYKDDSSNVILKYHYNMVVRAX

SEQ ID NO: 47879 - protein, 30 aa, Artificial Sequence
  Cyclic GFR-binding peptide
  MOD_RES (3)..(4): Xaa is C or S
SPXXVPQDLSPISILYKVGRTPKVLKYHYM

SEQ ID NO: 47880 - protein, 39 aa, Artificial Sequence; identical to SEQ ID NO: 8195
  Cyclic GFR-binding peptide
  MOD_RES (36)..(38): Xaa is C or S

SEQ ID NO: 47881 - protein, 30 aa, Artificial Sequence
  Cyclic GFR-binding peptide
  MOD_RES (3)..(4): Xaa is C or S
KPXXAPTQLSAISVLYLDDSSNVILKNYQN

SEQ ID NO: 47882 - protein, 31 aa, Artificial Sequence; identical to SEQ ID NO: 8196
  Cyclic GFR-binding peptide
  MOD_RES (1)..(1): Xaa is C or S

SEQ ID NO: 47883 - protein, 34 aa, Artificial Sequence
  Cyclic GFR-binding peptide
  MOD_RES (4)..(5): Xaa is C or S
PKAXXAPTKLSAISVLYLDSSNNVILKNYQNMVV

SEQ ID NO: 47884 - protein, 40 aa, Artificial Sequence; identical to SEQ ID NO: 8197
  Cyclic GFR-binding peptide
  MOD_RES (37)..(39): Xaa is C or S

SEQ ID NO: 47885 - protein, 25 aa, Artificial Sequence
  Cyclic GFR-binding peptide
APTKLSPISVLYKDSSNNVILKYHY

SEQ ID NO: 47886 - protein, 25 aa, Artificial Sequence
  Cyclic GFR-binding peptide
LSAISILYLVGRTPKVLKNYQMVVK

SEQ ID NO: 47887 - protein, 25 aa, Artificial Sequence
  Cyclic GFR-binding peptide
APTQLSPISVLYKDDSSNVILKYHY

SEQ ID NO: 47888 - protein, 38 aa, Artificial Sequence; identical to SEQ ID NO: 8198
  Cyclic GFR-binding peptide
  MOD_RES (3)..(4)..(36)..(38): Xaa is C or S

SEQ ID NO: 47889 - protein, 33 aa, Artificial Sequence
  Cyclic GFR-binding peptide
  MOD_RES (6)..(7): Xaa is C or S
ASASPXXVPQDLSPISILYKVGRTPKVLKYHYM

SEQ ID NO: 47890 - protein, 29 aa, Artificial Sequence
  Cyclic GFR-binding peptide
  MOD_RES (28)..(28): Xaa is C or S
LSATSVLYYDDSSNVILRKHRNMVVRAXG

SEQ ID NO: 47891 - protein, 26 aa, Artificial Sequence
  Cyclic GFR-binding peptide
SQDLNAISILYFIGKTPKILKKYRMI

SEQ ID NO: 47892 - protein, 29 aa, Artificial Sequence
  Cyclic GFR-binding peptide
  MOD_RES (1)..(1): Xaa is C or S
XVPQDLNAISILYFVGRTPKVLKKYRMVV

SEQ ID NO: 47893 - protein, 30 aa, Artificial Sequence
  Cyclic GFR-binding peptide
  MOD_RES (27)..(29): Xaa is C or S
LSATSILYYIGKTPKILRKHRMIVKSXKXS

SEQ ID NO: 47894 - protein, 39 aa, Artificial Sequence; identical to SEQ ID NO: 8201
  Cyclic GFR-binding peptide
  MOD_RES (4)..(36)..(38): Xaa is C or S

SEQ ID NO: 47895 - protein, 32 aa, Artificial Sequence; identical to SEQ ID NO: 8202
  Cyclic GFR-binding peptide
  MOD_RES (1)..(2): Xaa is C or S

SEQ ID NO: 47896 - protein, 28 aa, Artificial Sequence
  Cyclic GFR-binding peptide
  MOD_RES (27)..(27): Xaa is C or S
SATSVLYYDDSSNVILRKHRNMVVRAXG

SEQ ID NO: 47897 - protein, 33 aa, Artificial Sequence; identical to SEQ ID NO: 8203
  Cyclic GFR-binding peptide
  MOD_RES (1)..(2): Xaa is C or S

SEQ ID NO: 47898 - protein, 32 aa, Artificial Sequence; identical to SEQ ID NO: 8204
  Cyclic GFR-binding peptide
  MOD_RES (1)..(2): Xaa is C or S

SEQ ID NO: 47899 - protein, 30 aa, Artificial Sequence
  Cyclic GFR-binding peptide
  MOD_RES (28)..(30): Xaa is C or S
LSAISVLYLDDSSNVILKNYQNMVVRSXGX

SEQ ID NO: 47900 - protein, 39 aa, Artificial Sequence; identical to SEQ ID NO: 8205
  Cyclic GFR-binding peptide
  MOD_RES (4)..(5)..(37)..(39): Xaa is C or S

SEQ ID NO: 47901 - protein, 35 aa, Artificial Sequence
  Cyclic GFR-binding peptide
  MOD_RES (5)..(6): Xaa is C or S
VPKPXXAPTQLSATSVLYYDDSSNVILRKHRNMVV

SEQ ID NO: 47902 - protein, 27 aa, Artificial Sequence
  Cyclic GFR-binding peptide
VPQALSATSILYYVGRKPKVLRKHRMI

SEQ ID NO: 47903 - protein, 34 aa, Artificial Sequence
  Cyclic GFR-binding peptide
  MOD_RES (2)..(3): Xaa is C or S
AXXVPTKLSATSVLYYDDMGVPTLRKHREGMSVA

SEQ ID NO: 47904 - protein, 34 aa, Artificial Sequence; identical to SEQ ID NO: 8206
  Cyclic GFR-binding peptide
  MOD_RES (1)..(32)..(34): Xaa is C or S

SEQ ID NO: 47905 - protein, 33 aa, Artificial Sequence; identical to SEQ ID NO: 8207
  Cyclic GFR-binding peptide
  MOD_RES (2)..(3): Xaa is C or S

SEQ ID NO: 47906 - protein, 25 aa, Artificial Sequence
  Cyclic GFR-binding peptide
DLSAISILYLVGRTPKVLKNYQMVV

SEQ ID NO: 47907 - protein, 37 aa, Artificial Sequence; identical to SEQ ID NO: 8210
  Cyclic GFR-binding peptide
  MOD_RES (6)..(7): Xaa is C or S

SEQ ID NO: 47908 - protein, 31 aa, Artificial Sequence
  Cyclic GFR-binding peptide
  MOD_RES (28)..(30): Xaa is C or S
LSPISVLYKDSSNNVILKYHYNMVVKAXGXH

SEQ ID NO: 47909 - protein, 27 aa, Artificial Sequence
  Cyclic GFR-binding peptide
APTKLNAISVLYFDSSNNVILKKYRNM

SEQ ID NO: 47910 - protein, 32 aa, Artificial Sequence
  Cyclic GFR-binding peptide
  MOD_RES (29)..(31): Xaa is C or S
QDLSATSILYYVGRTPKVLRKHRMVVKSXKXS

SEQ ID NO: 47911 - protein, 32 aa, Artificial Sequence
  Cyclic GFR-binding peptide
  MOD_RES (29)..(31): Xaa is C or S
ELSATSMLYYDENEKVVLRKHRDMVVEGXGXR

SEQ ID NO: 47912 - protein, 35 aa, Artificial Sequence; identical to SEQ ID NO: 8215
  Cyclic GFR-binding peptide
  MOD_RES (3)..(4): Xaa is C or S

SEQ ID NO: 47913 - protein, 26 aa, Artificial Sequence
  Cyclic GFR-binding peptide
VPQDLSPISILYKVGRTPKVLKYHYM

SEQ ID NO: 47914 - protein, 35 aa, Artificial Sequence; identical to SEQ ID NO: 8216
  Cyclic GFR-binding peptide
  MOD_RES (4)..(5): Xaa is C or S

SEQ ID NO: 47915 - protein, 37 aa, Artificial Sequence; identical to SEQ ID NO: 8217
  Cyclic GFR-binding peptide
  MOD_RES (2)..(3)..(35)..(37): Xaa is C or S

SEQ ID NO: 47916 - protein, 27 aa, Artificial Sequence
  Cyclic GFR-binding peptide
QVQLNAISVLYFEIVRKKPIFLKKYRT

SEQ ID NO: 47917 - protein, 24 aa, Artificial Sequence
  Cyclic GFR-binding peptide
LSPISILYKIGKTPKILKYHYMIV

SEQ ID NO: 47918 - protein, 26 aa, Artificial Sequence
  Cyclic GFR-binding peptide
  MOD_RES (1)..(1): Xaa is C or S
XAPTQLSAISVLYLDDSSNVILKNYQ

SEQ ID NO: 47919 - protein, 30 aa, Artificial Sequence
  Cyclic GFR-binding peptide
  MOD_RES (4)..(4): Xaa is C or S
KPTXAPTKLSATSVLYYDDSSNVILRKHRN

SEQ ID NO: 47920 - protein, 33 aa, Artificial Sequence; identical to SEQ ID NO: 8221
  Cyclic GFR-binding peptide
  MOD_RES (2)..(3): Xaa is C or S

SEQ ID NO: 47921 - protein, 28 aa, Artificial Sequence
  Cyclic GFR-binding peptide
KLSPISVLYKDSSNNVILKYHYNMVVKA

SEQ ID NO: 47922 - protein, 35 aa, Artificial Sequence; identical to SEQ ID NO: 8222
  Cyclic GFR-binding peptide
  MOD_RES (2)..(3): Xaa is C or S

SEQ ID NO: 47923 - protein, 35 aa, Artificial Sequence
  Cyclic GFR-binding peptide
  MOD_RES (5)..(6): Xaa is C or S
SASPXXVSQDLSAISILYLIGKTPKILKNYQMIVK

SEQ ID NO: 47924 - protein, 33 aa, Artificial Sequence; identical to SEQ ID NO: 8223
  Cyclic GFR-binding peptide
  MOD_RES (1)..(33): Xaa is C or S

SEQ ID NO: 47925 - protein, 20 aa, Artificial Sequence
  Cyclic GFR-binding peptide
SPISILYKVGRTPKVLKYHY

SEQ ID NO: 47926 - protein, 27 aa, Artificial Sequence
  Cyclic GFR-binding peptide
TKLSATSVLYYDDMGVPTLRKHREGMS

SEQ ID NO: 47927 - protein, 36 aa, Artificial Sequence; identical to SEQ ID NO: 8225
  Cyclic GFR-binding peptide
  MOD_RES (2)..(34)..(36): Xaa is C or S

SEQ ID NO: 47928 - protein, 29 aa, Artificial Sequence
  Cyclic GFR-binding peptide
APTKLSAISVLYLDDSSNVILKNYQNMVV

SEQ ID NO: 47929 - protein, 26 aa, Artificial Sequence
  Cyclic GFR-binding peptide
TELNAISMLYFDEYDKVVLKKYREMV

SEQ ID NO: 47930 - protein, 25 aa, Artificial Sequence
  Cyclic GFR-binding peptide
SATSVLYYEIVRKKPIFLRKHRTLE

SEQ ID NO: 47931 - protein, 33 aa, Artificial Sequence
  Cyclic GFR-binding peptide
  MOD_RES (6)..(7): Xaa is C or S
ASASPXXVPQDLNAISILYFVGRTPKVLKKYRM

SEQ ID NO: 47932 - protein, 35 aa, Artificial Sequence
  Cyclic GFR-binding peptide
  MOD_RES (3)..(3): Xaa is C or S
VQXRPTQVQLSAISVLYLEIVRKKPIFLKNYQTLE

SEQ ID NO: 47933 - protein, 29 aa, Artificial Sequence
  Cyclic GFR-binding peptide
  MOD_RES (29)..(29): Xaa is C or S
QALSPISILYKVGRKPKVLKYHYMIVRSX

SEQ ID NO: 47934 - protein, 25 aa, Artificial Sequence
  Cyclic GFR-binding peptide
LNAISVLYFEIVRKKPIFLKKYRTL

SEQ ID NO: 47935 - protein, 21 aa, Artificial Sequence
  Cyclic GFR-binding peptide
SPISMLYKDEYDKVVLKYHYE

SEQ ID NO: 47936 - protein, 24 aa, Artificial Sequence
  Cyclic GFR-binding peptide
TELNAISMLYFDENEKVVLKKYRD

SEQ ID NO: 47937 - protein, 41 aa, Artificial Sequence; identical to SEQ ID NO: 8232
  Cyclic GFR-binding peptide
  MOD_RES (6)..(38)..(40): Xaa is C or S

SEQ ID NO: 47938 - protein, 39 aa, Artificial Sequence; identical to SEQ ID NO: 8233
  Cyclic GFR-binding peptide
  MOD_RES (5)..(6)..(38): Xaa is C or S

SEQ ID NO: 47939 - protein, 28 aa, Artificial Sequence
  Cyclic GFR-binding peptide
  MOD_RES (27)..(27): Xaa is C or S
LSATSILYYVGRTPKVLRKHRMVVKSXK

SEQ ID NO: 47940 - protein, 36 aa, Artificial Sequence
  Cyclic GFR-binding peptide
  MOD_RES (6)..(7): Xaa is C or S
ASAAPXXVPQALNAISILYFVGRKPKVLKKYRMIVR

SEQ ID NO: 47941 - protein, 33 aa, Artificial Sequence
  Cyclic GFR-binding peptide
  MOD_RES (3)..(4): Xaa is C or S
KPXXAPTKLSPISVLYKDDSSNVILKYHYNMVV

SEQ ID NO: 47942 - protein, 28 aa, Artificial Sequence
  Cyclic GFR-binding peptide
APTKLSAISVLYLDDSSNVILKNYQNMV

SEQ ID NO: 47943 - protein, 40 aa, Artificial Sequence; identical to SEQ ID NO: 8238
  Cyclic GFR-binding peptide
  MOD_RES (5)..(6)..(38)..(40): Xaa is C or S

SEQ ID NO: 47944 - protein, 21 aa, Artificial Sequence
  Cyclic GFR-binding peptide
LSATSVLYYDDMGVPTLRKHR

SEQ ID NO: 47945 - protein, 40 aa, Artificial Sequence; identical to SEQ ID NO: 8239
  Cyclic GFR-binding peptide
  MOD_RES (5)..(6)..(37)..(39): Xaa is C or S

SEQ ID NO: 47946 - protein, 35 aa, Artificial Sequence; identical to SEQ ID NO: 8243
  Cyclic GFR-binding peptide
  MOD_RES (4)..(5): Xaa is C or S

SEQ ID NO: 47947 - protein, 36 aa, Artificial Sequence; identical to SEQ ID NO: 8246
  Cyclic GFR-binding peptide
  MOD_RES (5)..(6): Xaa is C or S

SEQ ID NO: 47948 - protein, 32 aa, Artificial Sequence
  Cyclic GFR-binding peptide
  MOD_RES (3)..(4): Xaa is C or S
KAXXVPTELSATSMLYYDENEKVVLRKHRDMV

SEQ ID NO: 47949 - protein, 31 aa, Artificial Sequence
  Cyclic GFR-binding peptide
  MOD_RES (6)..(6): Xaa is C or S
VTKPTXAPTKLSAISVLYLDDSSNVILKNYQ

SEQ ID NO: 47950 - protein, 30 aa, Artificial Sequence
  Cyclic GFR-binding peptide
  MOD_RES (4)..(5): Xaa is C or S
PKAXXVPTELSATSMLYYDEYDKVVLRKHR

SEQ ID NO: 47951 - protein, 40 aa, Artificial Sequence; identical to SEQ ID NO: 8250
  Cyclic GFR-binding peptide
  MOD_RES (1)..(38)..(40): Xaa is C or S

SEQ ID NO: 47952 - protein, 37 aa, Artificial Sequence; identical to SEQ ID NO: 8251
  Cyclic GFR-binding peptide
  MOD_RES (2)..(3)..(34)..(36): Xaa is C or S

SEQ ID NO: 47953 - protein, 30 aa, Artificial Sequence
  Cyclic GFR-binding peptide
  MOD_RES (2)..(3): Xaa is C or S
AXXVPTELSPISMLYKDEYDKVVLKYHYEM

SEQ ID NO: 47954 - protein, 28 aa, Artificial Sequence
  Cyclic GFR-binding peptide
  MOD_RES (26)..(28): Xaa is C or S
SATSILYYVGRKPKVLRKHRMIVRSXKX

SEQ ID NO: 47955 - protein, 30 aa, Artificial Sequence
  Cyclic GFR-binding peptide
  MOD_RES (30)..(30): Xaa is C or S
PQALSATSILYYVGRKPKVLRKHRMIVRSX

SEQ ID NO: 47956 - protein, 25 aa, Artificial Sequence
  Cyclic GFR-binding peptide
LSATSVLYYEIVRKKPIFLRKHRTL

SEQ ID NO: 47957 - protein, 28 aa, Artificial Sequence
  Cyclic GFR-binding peptide
SQDLSATSILYYIGKTPKILRKHRMIVK

SEQ ID NO: 47958 - protein, 30 aa, Artificial Sequence
  Cyclic GFR-binding peptide
PTELSPISMLYKDEYDKVVLKYHYEMVVEG

SEQ ID NO: 47959 - protein, 22 aa, Artificial Sequence
  Cyclic GFR-binding peptide
LNAISMLYFDENEKVVLKKYRD

SEQ ID NO: 47960 - protein, 35 aa, Artificial Sequence; identical to SEQ ID NO: 8256
  Cyclic GFR-binding peptide
  MOD_RES (3)..(4): Xaa is C or S

SEQ ID NO: 47961 - protein, 44 aa, Artificial Sequence; identical to SEQ ID NO: 8257
  Cyclic GFR-binding peptide
  MOD_RES (5)..(42)..(44): Xaa is C or S

SEQ ID NO: 47962 - protein, 30 aa, Artificial Sequence
  Cyclic GFR-binding peptide
VQLSAISVLYLEIVRKKPIFLKNYQTLEDH

SEQ ID NO: 47963 - protein, 32 aa, Artificial Sequence
  Cyclic GFR-binding peptide
  MOD_RES (3)..(4): Xaa is C or S
KAXXVPTKLSATSVLYYDDMGVPTLRKHREGM

SEQ ID NO: 47964 - protein, 30 aa, Artificial Sequence
  Cyclic GFR-binding peptide
  MOD_RES (1)..(2): Xaa is C or S
XXVPQDLSPISILYKVGRTPKVLKYHYMVV

SEQ ID NO: 47965 - protein, 32 aa, Artificial Sequence
  Cyclic GFR-binding peptide
  MOD_RES (4)..(5): Xaa is C or S
PKAXXAPTKLNAISVLYFDSSNNVILKKYRNM

SEQ ID NO: 47966 - protein, 39 aa, Artificial Sequence; identical to SEQ ID NO: 8261
  Cyclic GFR-binding peptide
  MOD_RES (4)..(5)..(36)..(38): Xaa is C or S

SEQ ID NO: 47967 - protein, 35 aa, Artificial Sequence
  Cyclic GFR-binding peptide
  MOD_RES (5)..(5): Xaa is C or S
RNVQXRPTQVQLSAISVLYLEIVRKKPIFLKNYQT

SEQ ID NO: 47968 - protein, 37 aa, Artificial Sequence; identical to SEQ ID NO: 8263
  Cyclic GFR-binding peptide
  MOD_RES (1)..(2)..(34)..(36): Xaa is C or S

SEQ ID NO: 47969 - protein, 29 aa, Artificial Sequence
  Cyclic GFR-binding peptide
PTELNAISMLYFDENEKVVLKKYRDMVVE

SEQ ID NO: 47970 - protein, 33 aa, Artificial Sequence
  Cyclic GFR-binding peptide
  MOD_RES (5)..(6): Xaa is C or S
VPKAXXAPTKLNAISVLYFDSSNNVILKKYRNM

SEQ ID NO: 47971 - protein, 23 aa, Artificial Sequence
  Cyclic GFR-binding peptide
LSATSVLYYEIVRKKPIFLRKHR

SEQ ID NO: 47972 - protein, 31 aa, Artificial Sequence; identical to SEQ ID NO: 8268
  Cyclic GFR-binding peptide
  MOD_RES (1)..(1): Xaa is C or S

SEQ ID NO: 47973 - protein, 28 aa, Artificial Sequence
  Cyclic GFR-binding peptide
  MOD_RES (28)..(28): Xaa is C or S
DLNAISILYFVGRTPKVLKKYRMVVKSX

SEQ ID NO: 47974 - protein, 38 aa, Artificial Sequence; identical to SEQ ID NO: 8270
  Cyclic GFR-binding peptide
  MOD_RES (1)..(2)..(35)..(37): Xaa is C or S

SEQ ID NO: 47975 - protein, 41 aa, Artificial Sequence; identical to SEQ ID NO: 8271
  Cyclic GFR-binding peptide
  MOD_RES (6)..(7)..(39)..(41): Xaa is C or S

SEQ ID NO: 47976 - protein, 34 aa, Artificial Sequence; identical to SEQ ID NO: 8272
  Cyclic GFR-binding peptide
  MOD_RES (31)..(33): Xaa is C or S

SEQ ID NO: 47977 - protein, 29 aa, Artificial Sequence
  Cyclic GFR-binding peptide
  MOD_RES (26)..(28): Xaa is C or S
SPISILYKIGKTPKILKYHYMIVKSXKXS

SEQ ID NO: 47978 - protein, 34 aa, Artificial Sequence; identical to SEQ ID NO: 8274
  Cyclic GFR-binding peptide
  MOD_RES (2)..(3)..(34): Xaa is C or S

SEQ ID NO: 47979 - protein, 31 aa, Artificial Sequence
  Cyclic GFR-binding peptide
  MOD_RES (29)..(31): Xaa is C or S
QDLSAISILYLIGKTPKILKNYQMIVKSXKX

SEQ ID NO: 47980 - protein, 33 aa, Artificial Sequence
  Cyclic GFR-binding peptide
  MOD_RES (30)..(32): Xaa is C or S
KLNAISVLYFDDMGVPTLKKYREGMSVAEXGXR

SEQ ID NO: 47981 - protein, 31 aa, Artificial Sequence
  Cyclic GFR-binding peptide
  MOD_RES (5)..(6): Xaa is C or S
VGKAXXVPTKLSAISVLYLDDMGVPTLKNYQ

SEQ ID NO: 47982 - protein, 39 aa, Artificial Sequence; identical to SEQ ID NO: 8275
  Cyclic GFR-binding peptide
  MOD_RES (4)..(5)..(37)..(39): Xaa is C or S

SEQ ID NO: 47983 - protein, 30 aa, Artificial Sequence
  Cyclic GFR-binding peptide
  MOD_RES (2)..(3): Xaa is C or S
AXXVPTELSATSMLYYDEYDKVVLRKHREM

SEQ ID NO: 47984 - protein, 23 aa, Artificial Sequence
  Cyclic GFR-binding peptide
TKLSPISVLYKDSSNNVILKYHY

SEQ ID NO: 47985 - protein, 32 aa, Artificial Sequence
  Cyclic GFR-binding peptide
  MOD_RES (6)..(7): Xaa is C or S
YVPKPXXAPTKLSAISVLYLDDSSNVILKNYQ

SEQ ID NO: 47986 - protein, 24 aa, Artificial Sequence
  Cyclic GFR-binding peptide
KLNAISVLYFDSSNNVILKKYRNM

SEQ ID NO: 47987 - protein, 24 aa, Artificial Sequence
  Cyclic GFR-binding peptide
SQDLSATSILYYIGKTPKILRKHR

SEQ ID NO: 47988 - protein, 28 aa, Artificial Sequence
  Cyclic GFR-binding peptide
PTELNAISMLYFDEYDKVVLKKYREMVV

SEQ ID NO: 47989 - protein, 33 aa, Artificial Sequence; identical to SEQ ID NO: 8279
  Cyclic GFR-binding peptide
  MOD_RES (1)..(33): Xaa is C or S

SEQ ID NO: 47990 - protein, 29 aa, Artificial Sequence
  Cyclic GFR-binding peptide
  MOD_RES (28)..(28): Xaa is C or S
LNAISMLYFDEYDKVVLKKYREMVVEGXG

SEQ ID NO: 47991 - protein, 30 aa, Artificial Sequence
  Cyclic GFR-binding peptide
  MOD_RES (30)..(30): Xaa is C or S
TKLSATSVLYYDDSSNVILRKHRNMVVRSX

SEQ ID NO: 47992 - protein, 33 aa, Artificial Sequence
  Cyclic GFR-binding peptide
  MOD_RES (6)..(7): Xaa is C or S
YVPKPXXAPTKLSATSVLYYDDSSNVILRKHRN

SEQ ID NO: 47993 - protein, 44 aa, Artificial Sequence; identical to SEQ ID NO: 8283
  Cyclic GFR-binding peptide
  MOD_RES (4)..(41)..(43): Xaa is C or S

SEQ ID NO: 47994 - protein, 32 aa, Artificial Sequence
  Cyclic GFR-binding peptide
RPTQVQLSAISVLYLEIVRKKPIFLKNYQTLE

SEQ ID NO: 47995 - protein, 33 aa, Artificial Sequence
  Cyclic GFR-binding peptide
  MOD_RES (31)..(33): Xaa is C or S
LSPISVLYKEIVRKKPIFLKYHYTLEDHLAXKX

SEQ ID NO: 47996 - protein, 32 aa, Artificial Sequence; identical to SEQ ID NO: 8284
  Cyclic GFR-binding peptide
  MOD_RES (1)..(2): Xaa is C or S

SEQ ID NO: 47997 - protein, 29 aa, Artificial Sequence
  Cyclic GFR-binding peptide
  MOD_RES (28)..(28): Xaa is C or S
DLSATSILYYIGKTPKILRKHRMIVKSXK

SEQ ID NO: 47998 - protein, 23 aa, Artificial Sequence
  Cyclic GFR-binding peptide
SATSVLYYEIVRKKPIFLRKHRT

SEQ ID NO: 47999 - protein, 30 aa, Artificial Sequence
  Cyclic GFR-binding peptide
  MOD_RES (1)..(1): Xaa is C or S
XAPTKLSPISVLYKDDSSNVILKYHYNMVV

SEQ ID NO: 48000 - protein, 24 aa, Artificial Sequence
  Cyclic GFR-binding peptide
SQDLSAISILYLIGKTPKILKNYQ

SEQ ID NO: 48001 - protein, 20 aa, Artificial Sequence
  Cyclic GFR-binding peptide
SATSVLYYDDSSNVILRKHR

SEQ ID NO: 48002 - protein, 39 aa, Artificial Sequence; identical to SEQ ID NO: 8286
  Cyclic GFR-binding peptide
  MOD_RES (1)..(38): Xaa is C or S

SEQ ID NO: 48003 - protein, 34 aa, Artificial Sequence; identical to SEQ ID NO: 8288
  Cyclic GFR-binding peptide
  MOD_RES (1)..(33): Xaa is C or S

SEQ ID NO: 48004 - protein, 33 aa, Artificial Sequence; identical to SEQ ID NO: 8289
  Cyclic GFR-binding peptide
  MOD_RES (1)..(2)..(33): Xaa is C or S

SEQ ID NO: 48005 - protein, 23 aa, Artificial Sequence
  Cyclic GFR-binding peptide
TKLSAISVLYLDSSNNVILKNYQ

SEQ ID NO: 48006 - protein, 26 aa, Artificial Sequence
  Cyclic GFR-binding peptide
LSAISVLYLEIVRKKPIFLKNYQTLE

SEQ ID NO: 48007 - protein, 34 aa, Artificial Sequence; identical to SEQ ID NO: 8291
  Cyclic GFR-binding peptide
  MOD_RES (1)..(33): Xaa is C or S

SEQ ID NO: 48008 - protein, 32 aa, Artificial Sequence
  Cyclic GFR-binding peptide
  MOD_RES (30)..(32): Xaa is C or S
KLNAISVLYFDDMGVPTLKKYREGMSVAEXGX

SEQ ID NO: 48009 - protein, 30 aa, Artificial Sequence
  Cyclic GFR-binding peptide
PTQVQLSATSVLYYEIVRKKPIFLRKHRTL

SEQ ID NO: 48010 - protein, 31 aa, Artificial Sequence; identical to SEQ ID NO: 8293
  Cyclic GFR-binding peptide
  MOD_RES (31)..(31): Xaa is C or S

SEQ ID NO: 48011 - protein, 25 aa, Artificial Sequence
  Cyclic GFR-binding peptide
VQLSATSVLYYEIVRKKPIFLRKHR

SEQ ID NO: 48012 - protein, 24 aa, Artificial Sequence
  Cyclic GFR-binding peptide
TKLSAISVLYLDDSSNVILKNYQN

SEQ ID NO: 48013 - protein, 41 aa, Artificial Sequence; identical to SEQ ID NO: 8296
  Cyclic GFR-binding peptide
  MOD_RES (4)..(5)..(38)..(40): Xaa is C or S

SEQ ID NO: 48014 - protein, 29 aa, Artificial Sequence
  Cyclic GFR-binding peptide
  MOD_RES (2)..(3): Xaa is C or S
PXXVPQALNAISILYFVGRKPKVLKKYRM

SEQ ID NO: 48015 - protein, 28 aa, Artificial Sequence
  Cyclic GFR-binding peptide
PQALSAISILYLVGRKPKVLKNYQMIVR

SEQ ID NO: 48016 - protein, 28 aa, Artificial Sequence
  Cyclic GFR-binding peptide
  MOD_RES (1)..(2): Xaa is C or S
XXVSQDLSAISILYLIGKTPKILKNYQM

SEQ ID NO: 48017 - protein, 26 aa, Artificial Sequence
  Cyclic GFR-binding peptide
QLSAISVLYLDDSSNVILKNYQNMVV

SEQ ID NO: 48018 - protein, 27 aa, Artificial Sequence
  Cyclic GFR-binding peptide
SQDLNAISILYFIGKTPKILKKYRMIV

SEQ ID NO: 48019 - protein, 25 aa, Artificial Sequence
  Cyclic GFR-binding peptide
NAISILYFIGKTPKILKKYRMIVKS

SEQ ID NO: 48020 - protein, 28 aa, Artificial Sequence
  Cyclic GFR-binding peptide
PTQVQLSATSVLYYEIVRKKPIFLRKHR

SEQ ID NO: 48021 - protein, 31 aa, Artificial Sequence; identical to SEQ ID NO: 8303
  Cyclic GFR-binding peptide
  MOD_RES (1)..(1): Xaa is C or S

SEQ ID NO: 48022 - protein, 27 aa, Artificial Sequence
  Cyclic GFR-binding peptide
QALSATSILYYVGRKPKVLRKHRMIVR

SEQ ID NO: 48023 - protein, 37 aa, Artificial Sequence; identical to SEQ ID NO: 8304
  Cyclic GFR-binding peptide
  MOD_RES (6)..(7): Xaa is C or S

SEQ ID NO: 48024 - protein, 32 aa, Artificial Sequence
  Cyclic GFR-binding peptide
  MOD_RES (3)..(3): Xaa is C or S
VQXRPTQVQLSAISVLYLEIVRKKPIFLKNYQ

SEQ ID NO: 48025 - protein, 36 aa, Artificial Sequence; identical to SEQ ID NO: 8310
  Cyclic GFR-binding peptide
  MOD_RES (4)..(36): Xaa is C or S

SEQ ID NO: 48026 - protein, 37 aa, Artificial Sequence; identical to SEQ ID NO: 8309
  Cyclic GFR-binding peptide
  MOD_RES (4)..(5)..(36): Xaa is C or S

SEQ ID NO: 48027 - protein, 24 aa, Artificial Sequence
  Cyclic GFR-binding peptide
ALSPISILYKVGRKPKVLKYHYMI

SEQ ID NO: 48028 - protein, 33 aa, Artificial Sequence
  Cyclic GFR-binding peptide
RPTQVQLSPISVLYKEIVRKKPIFLKYHYTLED

SEQ ID NO: 48029 - protein, 32 aa, Artificial Sequence; identical to SEQ ID NO: 8311
  Cyclic GFR-binding peptide
  MOD_RES (1)..(2): Xaa is C or S

SEQ ID NO: 48030 - protein, 31 aa, Artificial Sequence
  Cyclic GFR-binding peptide
  MOD_RES (5)..(6): Xaa is C or S
VGKAXXVPTKLSATSVLYYDDMGVPTLRKHR

SEQ ID NO: 48031 - protein, 20 aa, Artificial Sequence
  Cyclic GFR-binding peptide
SATSMLYYDEYDKVVLRKHR

SEQ ID NO: 48032 - protein, 38 aa, Artificial Sequence; identical to SEQ ID NO: 8314
  Cyclic GFR-binding peptide
  MOD_RES (5)..(6)..(38): Xaa is C or S

SEQ ID NO: 48033 - protein, 34 aa, Artificial Sequence
  Cyclic GFR-binding peptide
  MOD_RES (6)..(7): Xaa is C or S
ASASPXXVSQDLSPISILYKIGKTPKILKYHYMI

SEQ ID NO: 48034 - protein, 28 aa, Artificial Sequence
  Cyclic GFR-binding peptide
QDLSAISILYLVGRTPKVLKNYQMVVKS

SEQ ID NO: 48035 - protein, 38 aa, Artificial Sequence
  Cyclic GFR-binding peptide
  MOD_RES (1)..(2)..(35)..(37): Xaa is C or S
XXVPTKLSAISVLYLDDMGVPTLKNYQEGMSVAEXGXR

SEQ ID NO: 48036 - protein, 32 aa, Artificial Sequence
  Cyclic GFR-binding peptide
  MOD_RES (30)..(32): Xaa is C or S
PQALSATSILYYVGRKPKVLRKHRMIVRSXKX

SEQ ID NO: 48037 - protein, 26 aa, Artificial Sequence
  Cyclic GFR-binding peptide
  MOD_RES (1)..(1): Xaa is C or S
XVPTKLSATSVLYYDDMGVPTLRKHR

SEQ ID NO: 48038 - protein, 28 aa, Artificial Sequence
  Cyclic GFR-binding peptide
  MOD_RES (27)..(27): Xaa is C or S
SPISMLYKDENEKVVLKYHYDMVVEGXG

SEQ ID NO: 48039 - protein, 34 aa, Artificial Sequence; identical to SEQ ID NO: 8317
  Cyclic GFR-binding peptide
  MOD_RES (1)..(33): Xaa is C or S

SEQ ID NO: 48040 - protein, 29 aa, Artificial Sequence
  Cyclic GFR-binding peptide
  MOD_RES (1)..(1): Xaa is C or S
XVPTELSATSMLYYDEYDKVVLRKHREMV

SEQ ID NO: 48041 - protein, 28 aa, Artificial Sequence
  Cyclic GFR-binding peptide
LSATSVLYYEIVRKKPIFLRKHRTLEDH

SEQ ID NO: 48042 - protein, 36 aa, Artificial Sequence; identical to SEQ ID NO: 8320
  Cyclic GFR-binding peptide
  MOD_RES (1)..(2)..(33)..(35): Xaa is C or S

SEQ ID NO: 48043 - protein, 36 aa, Artificial Sequence; identical to SEQ ID NO: 8322
  Cyclic GFR-binding peptide
  MOD_RES (5)..(6): Xaa is C or S

SEQ ID NO: 48044 - protein, 38 aa, Artificial Sequence; identical to SEQ ID NO: 8321
  Cyclic GFR-binding peptide
  MOD_RES (4)..(5)..(37): Xaa is C or S

SEQ ID NO: 48045 - protein, 34 aa, Artificial Sequence
  Cyclic GFR-binding peptide
  MOD_RES (4)..(5): Xaa is C or S
PKAXXVPTELSPISMLYKDEYDKVVLKYHYEMVV

SEQ ID NO: 48046 - protein, 36 aa, Artificial Sequence; identical to SEQ ID NO: 8323
  Cyclic GFR-binding peptide
  MOD_RES (4)..(5): Xaa is C or S

SEQ ID NO: 48047 - protein, 32 aa, Artificial Sequence; identical to SEQ ID NO: 8325
  Cyclic GFR-binding peptide
  MOD_RES (1)..(2): Xaa is C or S

SEQ ID NO: 48048 - protein, 33 aa, Artificial Sequence
  Cyclic GFR-binding peptide
  MOD_RES (6)..(6): Xaa is C or S
VTKPTXAPTKLSPISVLYKDDSSNVILKYHYNM

SEQ ID NO: 48049 - protein, 33 aa, Artificial Sequence
  Cyclic GFR-binding peptide
  MOD_RES (4)..(4): Xaa is C or S
NVQXRPTQVQLNAISVLYFEIVRKKPIFLKKYR

SEQ ID NO: 48050 - protein, 32 aa, Artificial Sequence
  Cyclic GFR-binding peptide
  MOD_RES (31)..(31): Xaa is C or S
PTELSATSMLYYDENEKVVLRKHRDMVVEGXG

SEQ ID NO: 48051 - protein, 32 aa, Artificial Sequence
  Cyclic GFR-binding peptide
  MOD_RES (30)..(32): Xaa is C or S
PQDLNAISILYFVGRTPKVLKKYRMVVKSXKX

SEQ ID NO: 48052 - protein, 30 aa, Artificial Sequence
  Cyclic GFR-binding peptide
  MOD_RES (1)..(1): Xaa is C or S
XVSQDLSATSILYYIGKTPKILRKHRMIVK

SEQ ID NO: 48053 - protein, 34 aa, Artificial Sequence; identical to SEQ ID NO: 8326
  Cyclic GFR-binding peptide
  MOD_RES (32)..(34): Xaa is C or S

SEQ ID NO: 48054 - protein, 32 aa, Artificial Sequence
  Cyclic GFR-binding peptide
  MOD_RES (6)..(7): Xaa is C or S
ASAAPXXVPQALSPISILYKVGRKPKVLKYHY

SEQ ID NO: 48055 - protein, 31 aa, Artificial Sequence
  Cyclic GFR-binding peptide
  MOD_RES (30)..(30): Xaa is C or S
TELSPISMLYKDENEKVVLKYHYDMVVEGXG

SEQ ID NO: 48056 - protein, 31 aa, Artificial Sequence
  Cyclic GFR-binding peptide
  MOD_RES (31)..(31): Xaa is C or S
LSPISVLYKEIVRKKPIFLKYHYTLEDHLAX

SEQ ID NO: 48057 - protein, 36 aa, Artificial Sequence
  Cyclic GFR-binding peptide
  MOD_RES (3)..(3): Xaa is C or S
VQXRPTQVQLSAISVLYLEIVRKKPIFLKNYQTLED

SEQ ID NO: 48058 - protein, 30 aa, Artificial Sequence
  Cyclic GFR-binding peptide
  MOD_RES (1)..(2): Xaa is C or S
XXAPTKLSPISVLYKDDSSNVILKYHYNMV

SEQ ID NO: 48059 - protein, 34 aa, Artificial Sequence; identical to SEQ ID NO: 8329
  Cyclic GFR-binding peptide
  MOD_RES (3)..(4): Xaa is C or S

SEQ ID NO: 48060 - protein, 38 aa, Artificial Sequence; identical to SEQ ID NO: 8330
  Cyclic GFR-binding peptide
  MOD_RES (35)..(37): Xaa is C or S

SEQ ID NO: 48061 - protein, 31 aa, Artificial Sequence
  Cyclic GFR-binding peptide
  MOD_RES (1)..(2): Xaa is C or S
XXVSQDLNAISILYFIGKTPKILKKYRMIVK

SEQ ID NO: 48062 - protein, 33 aa, Artificial Sequence
  Cyclic GFR-binding peptide
  MOD_RES (4)..(5): Xaa is C or S
ASPXXVPQDLNAISILYFVGRTPKVLKKYRMVV

SEQ ID NO: 48063 - protein, 31 aa, Artificial Sequence
  Cyclic GFR-binding peptide
  MOD_RES (5)..(5): Xaa is C or S
TKPTXAPTKLSPISVLYKDDSSNVILKYHYN

SEQ ID NO: 48064 - protein, 29 aa, Artificial Sequence
  Cyclic GFR-binding peptide
KLSATSVLYYDDMGVPTLRKHREGMSVAE

SEQ ID NO: 48065 - protein, 33 aa, Artificial Sequence
  Cyclic GFR-binding peptide
  MOD_RES (30)..(32): Xaa is C or S
PQDLSPISILYKVGRTPKVLKYHYMVVKSXKXS

SEQ ID NO: 48066 - protein, 35 aa, Artificial Sequence; identical to SEQ ID NO: 8333
  Cyclic GFR-binding peptide

SEQ ID NO: 48067 - protein, 26 aa, Artificial Sequence
  Cyclic GFR-binding peptide
  MOD_RES (1)..(1): Xaa is C or S
XAPTQLSATSVLYYDDSSNVILRKHR

SEQ ID NO: 48068 - protein, 26 aa, Artificial Sequence
  Cyclic GFR-binding peptide
  MOD_RES (1)..(1): Xaa is C or S
XAPTKLSPISVLYKDSSNNVILKYHY

SEQ ID NO: 48069 - protein, 31 aa, Artificial Sequence
  Cyclic GFR-binding peptide
  MOD_RES (29)..(31): Xaa is C or S
ELNAISMLYFDENEKVVLKKYRDMVVEGXGX

SEQ ID NO: 48070 - protein, 33 aa, Artificial Sequence
  Cyclic GFR-binding peptide
  MOD_RES (5)..(6): Xaa is C or S
VGKAXXVPTKLSATSVLYYDDMGVPTLRKHREG

SEQ ID NO: 48071 - protein, 20 aa, Artificial Sequence
  Cyclic GFR-binding peptide
SAISILYLIGKTPKILKNYQ

SEQ ID NO: 48072 - protein, 25 aa, Artificial Sequence
  Cyclic GFR-binding peptide
PTELSPISMLYKDENEKVVLKYHYD

SEQ ID NO: 48073 - protein, 37 aa, Artificial Sequence; identical to SEQ ID NO: 8336
  Cyclic GFR-binding peptide
  MOD_RES (4)..(5)..(37): Xaa is C or S

SEQ ID NO: 48074 - protein, 26 aa, Artificial Sequence
  Cyclic GFR-binding peptide
PTKLSATSVLYYDDSSNVILRKHRNM

SEQ ID NO: 48075 - protein, 32 aa, Artificial Sequence
  Cyclic GFR-binding peptide
  MOD_RES (30)..(32): Xaa is C or S
TELSPISMLYKDEYDKVVLKYHYEMVVEGXGX

SEQ ID NO: 48076 - protein, 37 aa, Artificial Sequence; identical to SEQ ID NO: 8337
  Cyclic GFR-binding peptide
  MOD_RES (37)..(37): Xaa is C or S

SEQ ID NO: 48077 - protein, 30 aa, Artificial Sequence
  Cyclic GFR-binding peptide
  MOD_RES (29)..(29): Xaa is C or S
QALSATSILYYVGRKPKVLRKHRMIVRSXK

SEQ ID NO: 48078 - protein, 30 aa, Artificial Sequence
  Cyclic GFR-binding peptide
  MOD_RES (4)..(5): Xaa is C or S
ASPXXVSQDLSATSILYYIGKTPKILRKHR

SEQ ID NO: 48079 - protein, 34 aa, Artificial Sequence; identical to SEQ ID NO: 8341
  Cyclic GFR-binding peptide
  MOD_RES (2)..(3): Xaa is C or S

SEQ ID NO: 48080 - protein, 22 aa, Artificial Sequence
  Cyclic GFR-binding peptide
QLSATSVLYYDDSSNVILRKHR

SEQ ID NO: 48081 - protein, 22 aa, Artificial Sequence
  Cyclic GFR-binding peptide
KLSPISVLYKDSSNNVILKYHY

SEQ ID NO: 48082 - protein, 35 aa, Artificial Sequence; identical to SEQ ID NO: 8342
  Cyclic GFR-binding peptide
  MOD_RES (32)..(34): Xaa is C or S

SEQ ID NO: 48083 - protein, 34 aa, Artificial Sequence; identical to SEQ ID NO: 8345
  Cyclic GFR-binding peptide
  MOD_RES (3)..(3): Xaa is C or S

SEQ ID NO: 48084 - protein, 31 aa, Artificial Sequence
  Cyclic GFR-binding peptide
  MOD_RES (2)..(3): Xaa is C or S
PXXAPTQLSAISVLYLDDSSNVILKNYQNMV

SEQ ID NO: 48085 - protein, 29 aa, Artificial Sequence
  Cyclic GFR-binding peptide
  MOD_RES (1)..(2): Xaa is C or S
XXAPTKLSAISVLYLDSSNNVILKNYQNM

SEQ ID NO: 48086 - protein, 32 aa, Artificial Sequence; identical to SEQ ID NO: 8347
  Cyclic GFR-binding peptide
  MOD_RES (1)..(2): Xaa is C or S

SEQ ID NO: 48087 - protein, 31 aa, Artificial Sequence
  Cyclic GFR-binding peptide
  MOD_RES (31)..(31): Xaa is C or S
TKLSAISVLYLDDMGVPTLKNYQEGMSVAEX

SEQ ID NO: 48088 - protein, 25 aa, Artificial Sequence
  Cyclic GFR-binding peptide
LSATSILYYVGRTPKVLRKHRMVVK

SEQ ID NO: 48089 - protein, 31 aa, Artificial Sequence
  Cyclic GFR-binding peptide
  MOD_RES (5)..(6): Xaa is C or S
VPKAXXAPTKLSPISVLYKDSSNNVILKYHY

SEQ ID NO: 48090 - protein, 41 aa, Artificial Sequence; identical to SEQ ID NO: 8348
  Cyclic GFR-binding peptide
  MOD_RES (5)..(6)..(38)..(40): Xaa is C or S

SEQ ID NO: 48091 - protein, 31 aa, Artificial Sequence
  Cyclic GFR-binding peptide
  MOD_RES (3)..(4): Xaa is C or S
KAXXAPTKLNAISVLYFDSSNNVILKKYRNM

SEQ ID NO: 48092 - protein, 35 aa, Artificial Sequence
  Cyclic GFR-binding peptide
  MOD_RES (4)..(4): Xaa is C or S
NVQXRPTQVQLSPISVLYKEIVRKKPIFLKYHYTL

SEQ ID NO: 48093 - protein, 39 aa, Artificial Sequence; identical to SEQ ID NO: 8349
  Cyclic GFR-binding peptide
  MOD_RES (3)..(4)..(37)..(39): Xaa is C or S

SEQ ID NO: 48094 - protein, 33 aa, Artificial Sequence
  Cyclic GFR-binding peptide
  MOD_RES (32)..(32): Xaa is C or S
PTKLSAISVLYLDDMGVPTLKNYQEGMSVAEXG

SEQ ID NO: 48095 - protein, 34 aa, Artificial Sequence; identical to SEQ ID NO: 8351
  Cyclic GFR-binding peptide

SEQ ID NO: 48096 - protein, 21 aa, Artificial Sequence
  Cyclic GFR-binding peptide
LSAISILYLVGRKPKVLKNYQ

SEQ ID NO: 48097 - protein, 32 aa, Artificial Sequence
  Cyclic GFR-binding peptide
  MOD_RES (1)..(2): Xaa is C or S
XXVPTKLSAISVLYLDDMGVPTLKNYQEGMSV

SEQ ID NO: 48098 - protein, 26 aa, Artificial Sequence
  Cyclic GFR-binding peptide
VPQALNAISILYFVGRKPKVLKKYRM

SEQ ID NO: 48099 - protein, 21 aa, Artificial Sequence
  Cyclic GFR-binding peptide
SPISILYKVGRTPKVLKYHYM

SEQ ID NO: 48100 - protein, 22 aa, Artificial Sequence
  Cyclic GFR-binding peptide
LSPISILYKIGKTPKILKYHYM

SEQ ID NO: 48101 - protein, 36 aa, Artificial Sequence; identical to SEQ ID NO: 8353
  Cyclic GFR-binding peptide
  MOD_RES (35)..(35): Xaa is C or S

SEQ ID NO: 48102 - protein, 31 aa, Artificial Sequence
  Cyclic GFR-binding peptide
QLSPISVLYKEIVRKKPIFLKYHYTLEDHLA

SEQ ID NO: 48103 - protein, 32 aa, Artificial Sequence
  Cyclic GFR-binding peptide
  MOD_RES (6)..(7): Xaa is C or S
TVPKPXXAPTQLSATSVLYYDDSSNVILRKHR

SEQ ID NO: 48104 - protein, 26 aa, Artificial Sequence
  Cyclic GFR-binding peptide
  MOD_RES (1)..(1): Xaa is C or S
XVPQDLSPISILYKVGRTPKVLKYHY

SEQ ID NO: 48105 - protein, 23 aa, Artificial Sequence
  Cyclic GFR-binding peptide
TQLSATSVLYYDDSSNVILRKHR

SEQ ID NO: 48106 - protein, 32 aa, Artificial Sequence; identical to SEQ ID NO: 8354
  Cyclic GFR-binding peptide
  MOD_RES (1)..(1): Xaa is C or S

SEQ ID NO: 48107 - protein, 23 aa, Artificial Sequence
  Cyclic GFR-binding peptide
QDLSATSILYYIGKTPKILRKHR

SEQ ID NO: 48108 - protein, 32 aa, Artificial Sequence; identical to SEQ ID NO: 8355
  Cyclic GFR-binding peptide
  MOD_RES (1)..(2): Xaa is C or S

SEQ ID NO: 48109 - protein, 30 aa, Artificial Sequence
  Cyclic GFR-binding peptide
  MOD_RES (28)..(30): Xaa is C or S
DLSAISILYLVGRTPKVLKNYQMVVKSXKX

SEQ ID NO: 48110 - protein, 32 aa, Artificial Sequence
  Cyclic GFR-binding peptide
  MOD_RES (5)..(6): Xaa is C or S
SASPXXVSQDLSATSILYYIGKTPKILRKHRM

SEQ ID NO: 48111 - protein, 24 aa, Artificial Sequence
  Cyclic GFR-binding peptide
SPISVLYKDDSSNVILKYHYNMVV

SEQ ID NO: 48112 - protein, 35 aa, Artificial Sequence
  Cyclic GFR-binding peptide
  MOD_RES (32)..(34): Xaa is C or S
PTKLNAISVLYFDDMGVPTLKKYREGMSVAEXGXR

SEQ ID NO: 48113 - protein, 32 aa, Artificial Sequence; identical to SEQ ID NO: 8359
  Cyclic GFR-binding peptide
  MOD_RES (1)..(32): Xaa is C or S

SEQ ID NO: 48114 - protein, 29 aa, Artificial Sequence
  Cyclic GFR-binding peptide
TELSATSMLYYDEYDKVVLRKHREMVVEG

SEQ ID NO: 48115 - protein, 20 aa, Artificial Sequence
  Cyclic GFR-binding peptide
SATSMLYYDEYDKVVLRKHR

SEQ ID NO: 48116 - protein, 30 aa, Artificial Sequence
  Cyclic GFR-binding peptide
  MOD_RES (27)..(29): Xaa is C or S
LSAISILYLIGKTPKILKNYQMIVKSXKXS

SEQ ID NO: 48117 - protein, 29 aa, Artificial Sequence
  Cyclic GFR-binding peptide
  MOD_RES (2)..(2): Xaa is C or S
TXAPTKLSPISVLYKDDSSNVILKYHYNM

SEQ ID NO: 48118 - protein, 26 aa, Artificial Sequence
  Cyclic GFR-binding peptide
PQALSATSILYYVGRKPKVLRKHRMI

SEQ ID NO: 48119 - protein, 25 aa, Artificial Sequence
  Cyclic GFR-binding peptide
DLNAISILYFIGKTPKILKKYRMIV

SEQ ID NO: 48120 - protein, 29 aa, Artificial Sequence
  Cyclic GFR-binding peptide
  MOD_RES (1)..(1): Xaa is C or S
XVSQDLNAISILYFIGKTPKILKKYRMIV

SEQ ID NO: 48121 - protein, 26 aa, Artificial Sequence
  Cyclic GFR-binding peptide
PQDLNAISILYFVGRTPKVLKKYRMV

SEQ ID NO: 48122 - protein, 35 aa, Artificial Sequence; identical to SEQ ID NO: 8365
  Cyclic GFR-binding peptide
  MOD_RES (4)..(5): Xaa is C or S

SEQ ID NO: 48123 - protein, 30 aa, Artificial Sequence
  Cyclic GFR-binding peptide
PTKLSPISVLYKDDSSNVILKYHYNMVVRS

SEQ ID NO: 48124 - protein, 28 aa, Artificial Sequence
  Cyclic GFR-binding peptide
  MOD_RES (2)..(3): Xaa is C or S
AXXAPTKLNAISVLYFDSSNNVILKKYR

SEQ ID NO: 48125 - protein, 29 aa, Artificial Sequence
  Cyclic GFR-binding peptide
VQLSPISVLYKEIVRKKPIFLKYHYTLED

SEQ ID NO: 48126 - protein, 29 aa, Artificial Sequence
  Cyclic GFR-binding peptide
  MOD_RES (4)..(4): Xaa is C or S
KPTXAPTKLSAISVLYLDDSSNVILKNYQ

SEQ ID NO: 48127 - protein, 31 aa, Artificial Sequence; identical to SEQ ID NO: 8369
  Cyclic GFR-binding peptide

SEQ ID NO: 48128 - protein, 23 aa, Artificial Sequence
  Cyclic GFR-binding peptide
KLSAISVLYLDSSNNVILKNYQN

SEQ ID NO: 48129 - protein, 30 aa, Artificial Sequence
  Cyclic GFR-binding peptide
  MOD_RES (2)..(2): Xaa is C or S
TXAPTKLSPISVLYKDDSSNVILKYHYNMV

SEQ ID NO: 48130 - protein, 33 aa, Artificial Sequence; identical to SEQ ID NO: 8371
  Cyclic GFR-binding peptide
  MOD_RES (1)..(33): Xaa is C or S

SEQ ID NO: 48131 - protein, 27 aa, Artificial Sequence
  Cyclic GFR-binding peptide
VPQALSPISILYKVGRKPKVLKYHYMI

SEQ ID NO: 48132 - protein, 28 aa, Artificial Sequence
  Cyclic GFR-binding peptide
  MOD_RES (2)..(3): Xaa is C or S
PXXVPQDLNAISILYFVGRTPKVLKKYR

SEQ ID NO: 48133 - protein, 34 aa, Artificial Sequence; identical to SEQ ID NO: 8374
  Cyclic GFR-binding peptide
  MOD_RES (31)..(33): Xaa is C or S

SEQ ID NO: 48134 - protein, 27 aa, Artificial Sequence
  Cyclic GFR-binding peptide
LSPISVLYKDDSSNVILKYHYNMVVRA

SEQ ID NO: 48135 - protein, 32 aa, Artificial Sequence
  Cyclic GFR-binding peptide
  MOD_RES (3)..(4): Xaa is C or S
SPXXVPQDLSPISILYKVGRTPKVLKYHYMVV

SEQ ID NO: 48136 - protein, 34 aa, Artificial Sequence
  Cyclic GFR-binding peptide
  MOD_RES (5)..(5): Xaa is C or S
RNVQXRPTQVQLSATSVLYYEIVRKKPIFLRKHR

SEQ ID NO: 48137 - protein, 37 aa, Artificial Sequence; identical to SEQ ID NO: 8376
  Cyclic GFR-binding peptide
  MOD_RES (35)..(37): Xaa is C or S

SEQ ID NO: 48138 - protein, 27 aa, Artificial Sequence
  Cyclic GFR-binding peptide
QDLSAISILYLVGRTPKVLKNYQMVVK

SEQ ID NO: 48139 - protein, 37 aa, Artificial Sequence; identical to SEQ ID NO: 8377
  Cyclic GFR-binding peptide
  MOD_RES (2)..(3)..(35)..(37): Xaa is C or S

SEQ ID NO: 48140 - protein, 30 aa, Artificial Sequence
  Cyclic GFR-binding peptide
  MOD_RES (28)..(30): Xaa is C or S
LNAISMLYFDEYDKVVLKKYREMVVEGXGX

SEQ ID NO: 48141 - protein, 37 aa, Artificial Sequence; identical to SEQ ID NO: 8378
  Cyclic GFR-binding peptide
  MOD_RES (4)..(5)..(37): Xaa is C or S

SEQ ID NO: 48142 - protein, 25 aa, Artificial Sequence
  Cyclic GFR-binding peptide
QDLSPISILYKVGRTPKVLKYHYMV

SEQ ID NO: 48143 - protein, 24 aa, Artificial Sequence
  Cyclic GFR-binding peptide
ALSATSILYYVGRKPKVLRKHRMI

SEQ ID NO: 48144 - protein, 32 aa, Artificial Sequence; identical to SEQ ID NO: 8379
  Cyclic GFR-binding peptide
  MOD_RES (1)..(2): Xaa is C or S

SEQ ID NO: 48145 - protein, 27 aa, Artificial Sequence
  Cyclic GFR-binding peptide
LSPISVLYKDDSSNVILKYHYNMVVRS

SEQ ID NO: 48146 - protein, 40 aa, Artificial Sequence; identical to SEQ ID NO: 8383
  Cyclic GFR-binding peptide
  MOD_RES (5)..(6)..(38)..(40): Xaa is C or S

SEQ ID NO: 48147 - protein, 27 aa, Artificial Sequence
  Cyclic GFR-binding peptide
PTKLNAISVLYFDDMGVPTLKKYREGM

SEQ ID NO: 48148 - protein, 33 aa, Artificial Sequence
  Cyclic GFR-binding peptide
  MOD_RES (4)..(5): Xaa is C or S
AAPXXVPQALSAISILYLVGRKPKVLKNYQMIV

SEQ ID NO: 48149 - protein, 23 aa, Artificial Sequence
  Cyclic GFR-binding peptide
DLSATSILYYIGKTPKILRKHRM

SEQ ID NO: 48150 - protein, 40 aa, Artificial Sequence; identical to SEQ ID NO: 8384
  Cyclic GFR-binding peptide
  MOD_RES (3)..(40): Xaa is C or S

SEQ ID NO: 48151 - protein, 26 aa, Artificial Sequence
  Cyclic GFR-binding peptide
LNAISILYFIGKTPKILKKYRMIVKS

SEQ ID NO: 48152 - protein, 26 aa, Artificial Sequence
  Cyclic GFR-binding peptide
PQALSPISILYKVGRKPKVLKYHYMI

SEQ ID NO: 48153 - protein, 32 aa, Artificial Sequence
  Cyclic GFR-binding peptide
  MOD_RES (29)..(31): Xaa is C or S
LSAISVLYLDDMGVPTLKNYQEGMSVAEXGXR

SEQ ID NO: 48154 - protein, 29 aa, Artificial Sequence
  Cyclic GFR-binding peptide
  MOD_RES (1)..(2): Xaa is C or S
XXVSQDLSATSILYYIGKTPKILRKHRMI

SEQ ID NO: 48155 - protein, 31 aa, Artificial Sequence
  Cyclic GFR-binding peptide
  MOD_RES (3)..(4): Xaa is C or S
KAXXVPTELSATSMLYYDENEKVVLRKHRDM

SEQ ID NO: 48156 - protein, 36 aa, Artificial Sequence
  Cyclic GFR-binding peptide
  MOD_RES (7)..(7): Xaa is C or S
HVTKPTXAPTKLSPISVLYKDDSSNVILKYHYNMVV

SEQ ID NO: 48157 - protein, 28 aa, Artificial Sequence
  Cyclic GFR-binding peptide
  MOD_RES (1)..(1): Xaa is C or S
XVSQDLSATSILYYIGKTPKILRKHRMI

SEQ ID NO: 48158 - protein, 31 aa, Artificial Sequence
  Cyclic GFR-binding peptide
  MOD_RES (2)..(3): Xaa is C or S
AXXVPTKLSATSVLYYDDMGVPTLRKHREGM

SEQ ID NO: 48159 - protein, 33 aa, Artificial Sequence
  Cyclic GFR-binding peptide
  MOD_RES (3)..(4): Xaa is C or S
APXXVPQALSPISILYKVGRKPKVLKYHYMIVR

SEQ ID NO: 48160 - protein, 34 aa, Artificial Sequence
  Cyclic GFR-binding peptide
  MOD_RES (2)..(2): Xaa is C or S
QXRPTQVQLNAISVLYFEIVRKKPIFLKKYRTLE

SEQ ID NO: 48161 - protein, 35 aa, Artificial Sequence; identical to SEQ ID NO: 8390
  Cyclic GFR-binding peptide
  MOD_RES (2)..(3)..(34): Xaa is C or S

SEQ ID NO: 48162 - protein, 31 aa, Artificial Sequence
  Cyclic GFR-binding peptide
  MOD_RES (30)..(30): Xaa is C or S
TKLSAISVLYLDSSNNVILKNYQNMVVKAXG

SEQ ID NO: 48163 - protein, 32 aa, Artificial Sequence
  Cyclic GFR-binding peptide
  MOD_RES (30)..(32): Xaa is C or S
TELSPISMLYKDENEKVVLKYHYDMVVEGXGX

SEQ ID NO: 48164 - protein, 23 aa, Artificial Sequence
  Cyclic GFR-binding peptide
ELSATSMLYYDENEKVVLRKHRD

SEQ ID NO: 48165 - protein, 34 aa, Artificial Sequence; identical to SEQ ID NO: 8396
  Cyclic GFR-binding peptide
  MOD_RES (2)..(3)..(34): Xaa is C or S

SEQ ID NO: 48166 - protein, 32 aa, Artificial Sequence
  Cyclic GFR-binding peptide
  MOD_RES (6)..(7): Xaa is C or S
KIPKAXXVPTELSPISMLYKDENEKVVLKYHY

SEQ ID NO: 48167 - protein, 26 aa, Artificial Sequence
  Cyclic GFR-binding peptide
TELNAISMLYFDENEKVVLKKYRDMV

SEQ ID NO: 48168 - protein, 31 aa, Artificial Sequence
  Cyclic GFR-binding peptide
  MOD_RES (1)..(1): Xaa is C or S
XVPTKLSAISVLYLDDMGVPTLKNYQEGMSV

SEQ ID NO: 48169 - protein, 27 aa, Artificial Sequence
  Cyclic GFR-binding peptide
PTKLNAISVLYFDSSNNVILKKYRNMV

SEQ ID NO: 48170 - protein, 32 aa, Artificial Sequence; identical to SEQ ID NO: 8399
  Cyclic GFR-binding peptide
  MOD_RES (1)..(2): Xaa is C or S

SEQ ID NO: 48171 - protein, 22 aa, Artificial Sequence
  Cyclic GFR-binding peptide
SPISILYKVGRKPKVLKYHYMI

SEQ ID NO: 48172 - protein, 37 aa, Artificial Sequence; identical to SEQ ID NO: 8403
  Cyclic GFR-binding peptide
  MOD_RES (4)..(5): Xaa is C or S

SEQ ID NO: 48173 - protein, 33 aa, Artificial Sequence; identical to SEQ ID NO: 8406
  Cyclic GFR-binding peptide
  MOD_RES (1)..(33): Xaa is C or S

SEQ ID NO: 48174 - protein, 32 aa, Artificial Sequence
  Cyclic GFR-binding peptide
  MOD_RES (5)..(6): Xaa is C or S
SAAPXXVPQALSPISILYKVGRKPKVLKYHYM

SEQ ID NO: 48175 - protein, 27 aa, Artificial Sequence
  Cyclic GFR-binding peptide
  MOD_RES (1)..(1): Xaa is C or S
XVSQDLSPISILYKIGKTPKILKYHYM

SEQ ID NO: 48176 - protein, 27 aa, Artificial Sequence
  Cyclic GFR-binding peptide
  MOD_RES (1)..(2): Xaa is C or S
XXAPTKLSATSVLYYDDSSNVILRKHR

SEQ ID NO: 48177 - protein, 34 aa, Artificial Sequence
  Cyclic GFR-binding peptide
  MOD_RES (4)..(5): Xaa is C or S
GKAXXVPTKLSAISVLYLDDMGVPTLKNYQEGMS

SEQ ID NO: 48178 - protein, 29 aa, Artificial Sequence
  Cyclic GFR-binding peptide
  MOD_RES (1)..(1): Xaa is C or S
XVPQALSPISILYKVGRKPKVLKYHYMIV

SEQ ID NO: 48179 - protein, 33 aa, Artificial Sequence
  Cyclic GFR-binding peptide
  MOD_RES (31)..(33): Xaa is C or S
PTELSATSMLYYDENEKVVLRKHRDMVVEGXGX

SEQ ID NO: 48180 - protein, 31 aa, Artificial Sequence
  Cyclic GFR-binding peptide
  MOD_RES (4)..(5): Xaa is C or S
GKAXXVPTKLSAISVLYLDDMGVPTLKNYQE

SEQ ID NO: 48181 - protein, 31 aa, Artificial Sequence
  Cyclic GFR-binding peptide
  MOD_RES (29)..(31): Xaa is C or S
QDLSPISILYKVGRTPKVLKYHYMVVKSXKX

SEQ ID NO: 48182 - protein, 32 aa, Artificial Sequence
  Cyclic GFR-binding peptide
  MOD_RES (3)..(4): Xaa is C or S
APXXVPQALSPISILYKVGRKPKVLKYHYMIV

SEQ ID NO: 48183 - protein, 28 aa, Artificial Sequence
  Cyclic GFR-binding peptide
  MOD_RES (2)..(3): Xaa is C or S
AXXAPTKLSPISVLYKDSSNNVILKYHY

SEQ ID NO: 48184 - protein, 32 aa, Artificial Sequence
  Cyclic GFR-binding peptide
  MOD_RES (30)..(32): Xaa is C or S
SAISVLYLEIVRKKPIFLKNYQTLEDHLAXKX

SEQ ID NO: 48185 - protein, 34 aa, Artificial Sequence
  Cyclic GFR-binding peptide
  MOD_RES (31)..(33): Xaa is C or S
LSPISVLYKEIVRKKPIFLKYHYTLEDHLAXKXE

SEQ ID NO: 48186 - protein, 40 aa, Artificial Sequence; identical to SEQ ID NO: 8412
  Cyclic GFR-binding peptide
  MOD_RES (4)..(5)..(37)..(39): Xaa is C or S

SEQ ID NO: 48187 - protein, 35 aa, Artificial Sequence
  Cyclic GFR-binding peptide
  MOD_RES (6)..(7): Xaa is C or S
TVPKPXXAPTQLSPISVLYKDDSSNVILKYHYNMV

SEQ ID NO: 48188 - protein, 39 aa, Artificial Sequence; identical to SEQ ID NO: 8414
  Cyclic GFR-binding peptide
  MOD_RES (3)..(4)..(36)..(38): Xaa is C or S

SEQ ID NO: 48189 - protein, 24 aa, Artificial Sequence
  Cyclic GFR-binding peptide
SPISVLYKEIVRKKPIFLKYHYTL

SEQ ID NO: 48190 - protein, 34 aa, Artificial Sequence
  Cyclic GFR-binding peptide
  MOD_RES (2)..(2): Xaa is C or S
QXRPTQVQLSAISVLYLEIVRKKPIFLKNYQTLE

SEQ ID NO: 48191 - protein, 34 aa, Artificial Sequence; identical to SEQ ID NO: 8415
  Cyclic GFR-binding peptide
  MOD_RES (1)..(2)..(34): Xaa is C or S

SEQ ID NO: 48192 - protein, 24 aa, Artificial Sequence
  Cyclic GFR-binding peptide
LSAISVLYLEIVRKKPIFLKNYQT

SEQ ID NO: 48193 - protein, 29 aa, Artificial Sequence
  Cyclic GFR-binding peptide
  MOD_RES (28)..(28): Xaa is C or S
DLSPISILYKIGKTPKILKYHYMIVKSXK

SEQ ID NO: 48194 - protein, 38 aa, Artificial Sequence; identical to SEQ ID NO: 8417
  Cyclic GFR-binding peptide
  MOD_RES (37)..(37): Xaa is C or S

SEQ ID NO: 48195 - protein, 23 aa, Artificial Sequence
  Cyclic GFR-binding peptide
QALSAISILYLVGRKPKVLKNYQ

SEQ ID NO: 48196 - protein, 29 aa, Artificial Sequence
  Cyclic GFR-binding peptide
  MOD_RES (2)..(3): Xaa is C or S
PXXVPQDLSPISILYKVGRTPKVLKYHYM

SEQ ID NO: 48197 - protein, 33 aa, Artificial Sequence
  Cyclic GFR-binding peptide
  MOD_RES (5)..(6): Xaa is C or S
SASPXXVPQDLNAISILYFVGRTPKVLKKYRMV

SEQ ID NO: 48198 - protein, 31 aa, Artificial Sequence
  Cyclic GFR-binding peptide
  MOD_RES (1)..(2): Xaa is C or S
XXVPTELSATSMLYYDEYDKVVLRKHREMVV

SEQ ID NO: 48199 - protein, 29 aa, Artificial Sequence
  Cyclic GFR-binding peptide
  MOD_RES (1)..(2): Xaa is C or S
XXVPQALSAISILYLVGRKPKVLKNYQMI

SEQ ID NO: 48200 - protein, 38 aa, Artificial Sequence; identical to SEQ ID NO: 8420
  Cyclic GFR-binding peptide
  MOD_RES (5)..(6)..(37): Xaa is C or S

SEQ ID NO: 48201 - protein, 29 aa, Artificial Sequence
  Cyclic GFR-binding peptide
  MOD_RES (2)..(3): Xaa is C or S
AXXAPTKLSAISVLYLDSSNNVILKNYQN

SEQ ID NO: 48202 - protein, 32 aa, Artificial Sequence
  Cyclic GFR-binding peptide
  MOD_RES (1)..(1): Xaa is C or S
XRPTQVQLSAISVLYLEIVRKKPIFLKNYQTL

SEQ ID NO: 48203 - protein, 25 aa, Artificial Sequence
  Cyclic GFR-binding peptide
NAISILYFVGRKPKVLKKYRMIVRS

SEQ ID NO: 48204 - protein, 29 aa, Artificial Sequence
  Cyclic GFR-binding peptide
  MOD_RES (1)..(1): Xaa is C or S
XVPTKLSAISVLYLDDMGVPTLKNYQEGM

SEQ ID NO: 48205 - protein, 27 aa, Artificial Sequence
  Cyclic GFR-binding peptide
LSATSVLYYDDMGVPTLRKHREGMSVA

SEQ ID NO: 48206 - protein, 28 aa, Artificial Sequence
  Cyclic GFR-binding peptide
  MOD_RES (1)..(1): Xaa is C or S
XAPTKLSAISVLYLDSSNNVILKNYQNM

SEQ ID NO: 48207 - protein, 28 aa, Artificial Sequence
  Cyclic GFR-binding peptide
  MOD_RES (2)..(2): Xaa is C or S
TXAPTKLSAISVLYLDDSSNVILKNYQN

SEQ ID NO: 48208 - protein, 36 aa, Artificial Sequence; identical to SEQ ID NO: 8421
  Cyclic GFR-binding peptide
  MOD_RES (1)..(33)..(35): Xaa is C or S

SEQ ID NO: 48209 - protein, 31 aa, Artificial Sequence
  Cyclic GFR-binding peptide
  MOD_RES (29)..(31): Xaa is C or S
ELNAISMLYFDEYDKVVLKKYREMVVEGXGX

SEQ ID NO: 48210 - protein, 36 aa, Artificial Sequence; identical to SEQ ID NO: 8423
  Cyclic GFR-binding peptide
  MOD_RES (6)..(6): Xaa is C or S

SEQ ID NO: 48211 - protein, 37 aa, Artificial Sequence; identical to SEQ ID NO: 8422
  Cyclic GFR-binding peptide
  MOD_RES (4)..(5)..(36): Xaa is C or S

SEQ ID NO: 48212 - protein, 25 aa, Artificial Sequence
  Cyclic GFR-binding peptide
SAISVLYLDSSNNVILKNYQNMVVK

SEQ ID NO: 48213 - protein, 34 aa, Artificial Sequence; identical to SEQ ID NO: 8425
  Cyclic GFR-binding peptide
  MOD_RES (3)..(4): Xaa is C or S

SEQ ID NO: 48214 - protein, 30 aa, Artificial Sequence
  Cyclic GFR-binding peptide
  MOD_RES (29)..(29): Xaa is C or S
QALNAISILYFVGRKPKVLKKYRMIVRSXK

SEQ ID NO: 48215 - protein, 30 aa, Artificial Sequence
  Cyclic GFR-binding peptide
  MOD_RES (30)..(30): Xaa is C or S
TELSATSMLYYDENEKVVLRKHRDMVVEGX

SEQ ID NO: 48216 - protein, 27 aa, Artificial Sequence
  Cyclic GFR-binding peptide
  MOD_RES (1)..(2): Xaa is C or S
XXVSQDLSATSILYYIGKTPKILRKHR

SEQ ID NO: 48217 - protein, 40 aa, Artificial Sequence; identical to SEQ ID NO: 8428
  Cyclic GFR-binding peptide
  MOD_RES (4)..(5)..(37)..(39): Xaa is C or S

SEQ ID NO: 48218 - protein, 24 aa, Artificial Sequence
  Cyclic GFR-binding peptide
LSAISVLYLDSSNNVILKNYQNMV

SEQ ID NO: 48219 - protein, 29 aa, Artificial Sequence
  Cyclic GFR-binding peptide
  MOD_RES (3)..(4): Xaa is C or S
APXXVPQALSPISILYKVGRKPKVLKYHY

SEQ ID NO: 48220 - protein, 32 aa, Artificial Sequence; identical to SEQ ID NO: 8430
  Cyclic GFR-binding peptide
  MOD_RES (1)..(32): Xaa is C or S

SEQ ID NO: 48221 - protein, 24 aa, Artificial Sequence
  Cyclic GFR-binding peptide
QALSPISILYKVGRKPKVLKYHYM

SEQ ID NO: 48222 - protein, 33 aa, Artificial Sequence
  Cyclic GFR-binding peptide
  MOD_RES (3)..(4): Xaa is C or S
SPXXVPQDLNAISILYFVGRTPKVLKKYRMVVK

SEQ ID NO: 48223 - protein, 26 aa, Artificial Sequence
  Cyclic GFR-binding peptide
PTQLSPISVLYKDDSSNVILKYHYNM

SEQ ID NO: 48224 - protein, 30 aa, Artificial Sequence
  Cyclic GFR-binding peptide
  MOD_RES (3)..(4): Xaa is C or S
KPXXAPTKLSPISVLYKDDSSNVILKYHYN

SEQ ID NO: 48225 - protein, 33 aa, Artificial Sequence
  Cyclic GFR-binding peptide
  MOD_RES (4)..(5): Xaa is C or S
ASPXXVSQDLSATSILYYIGKTPKILRKHRMIV

SEQ ID NO: 48226 - protein, 26 aa, Artificial Sequence
  Cyclic GFR-binding peptide
TKLSAISVLYLDDSSNVILKNYQNMV

SEQ ID NO: 48227 - protein, 31 aa, Artificial Sequence
  Cyclic GFR-binding peptide
QVQLSAISVLYLEIVRKKPIFLKNYQTLEDH

SEQ ID NO: 48228 - protein, 23 aa, Artificial Sequence
  Cyclic GFR-binding peptide
SATSILYYVGRTPKVLRKHRMVV

SEQ ID NO: 48229 - protein, 23 aa, Artificial Sequence
  Cyclic GFR-binding peptide
SATSMLYYDENEKVVLRKHRDMV

SEQ ID NO: 48230 - protein, 31 aa, Artificial Sequence; identical to SEQ ID NO: 8439
  Cyclic GFR-binding peptide
  MOD_RES (31)..(31): Xaa is C or S

SEQ ID NO: 48231 - protein, 41 aa, Artificial Sequence; identical to SEQ ID NO: 8440
  Cyclic GFR-binding peptide
  MOD_RES (6)..(7)..(38)..(40): Xaa is C or S

SEQ ID NO: 48232 - protein, 28 aa, Artificial Sequence
  Cyclic GFR-binding peptide
QDLSPISILYKVGRTPKVLKYHYMVVKS

SEQ ID NO: 48233 - protein, 31 aa, Artificial Sequence
  Cyclic GFR-binding peptide
  MOD_RES (2)..(3): Xaa is C or S
PXXVPQALNAISILYFVGRKPKVLKKYRMIV

SEQ ID NO: 48234 - protein, 33 aa, Artificial Sequence
  Cyclic GFR-binding peptide
  MOD_RES (4)..(4): Xaa is C or S
KPTXAPTKLSAISVLYLDDSSNVILKNYQNMVV

SEQ ID NO: 48235 - protein, 30 aa, Artificial Sequence
  Cyclic GFR-binding peptide
  MOD_RES (28)..(30): Xaa is C or S
LNAISMLYFDENEKVVLKKYRDMVVEGXGX

SEQ ID NO: 48236 - protein, 39 aa, Artificial Sequence; identical to SEQ ID NO: 8443
  Cyclic GFR-binding peptide
  MOD_RES (4)..(5)..(36)..(38): Xaa is C or S

SEQ ID NO: 48237 - protein, 28 aa, Artificial Sequence
  Cyclic GFR-binding peptide
  MOD_RES (1)..(1): Xaa is C or S
XVPQALSAISILYLVGRKPKVLKNYQMI

SEQ ID NO: 48238 - protein, 21 aa, Artificial Sequence
  Cyclic GFR-binding peptide
SATSILYYVGRKPKVLRKHRM

SEQ ID NO: 48239 - protein, 34 aa, Artificial Sequence
  Cyclic GFR-binding peptide
  MOD_RES (32)..(34): Xaa is C or S
QLSPISVLYKEIVRKKPIFLKYHYTLEDHLAXKX

SEQ ID NO: 48240 - protein, 36 aa, Artificial Sequence; identical to SEQ ID NO: 8444
  Cyclic GFR-binding peptide
  MOD_RES (1)..(2)..(34)..(36): Xaa is C or S

SEQ ID NO: 48241 - protein, 22 aa, Artificial Sequence
  Cyclic GFR-binding peptide
DLSATSILYYIGKTPKILRKHR

SEQ ID NO: 48242 - protein, 33 aa, Artificial Sequence
  Cyclic GFR-binding peptide
  MOD_RES (6)..(7): Xaa is C or S
AVPKAXXAPTKLSPISVLYKDSSNNVILKYHYN

SEQ ID NO: 48243 - protein, 37 aa, Artificial Sequence
  Cyclic GFR-binding peptide
  MOD_RES (34)..(36): Xaa is C or S
QVQLSPISVLYKEIVRKKPIFLKYHYTLEDHLAXKXE

SEQ ID NO: 48244 - protein, 27 aa, Artificial Sequence
  Cyclic GFR-binding peptide
KLSATSVLYYDDMGVPTLRKHREGMSV

SEQ ID NO: 48245 - protein, 33 aa, Artificial Sequence; identical to SEQ ID NO: 8446
  Cyclic GFR-binding peptide
  MOD_RES (32)..(32): Xaa is C or S

SEQ ID NO: 48246 - protein, 33 aa, Artificial Sequence
  Cyclic GFR-binding peptide
  MOD_RES (3)..(4): Xaa is C or S
KAXXVPTELSATSMLYYDEYDKVVLRKHREMVV

SEQ ID NO: 48247 - protein, 40 aa, Artificial Sequence; identical to SEQ ID NO: 8449
  Cyclic GFR-binding peptide
  MOD_RES (5)..(6)..(38)..(40): Xaa is C or S

SEQ ID NO: 48248 - protein, 39 aa, Artificial Sequence; identical to SEQ ID NO: 8450
  Cyclic GFR-binding peptide
  MOD_RES (5)..(6)..(39): Xaa is C or S

SEQ ID NO: 48249 - protein, 32 aa, Artificial Sequence
  Cyclic GFR-binding peptide
  MOD_RES (4)..(5): Xaa is C or S
ASPXXVSQDLSPISILYKIGKTPKILKYHYMI

SEQ ID NO: 48250 - protein, 32 aa, Artificial Sequence
  Cyclic GFR-binding peptide
  MOD_RES (29)..(31): Xaa is C or S
LSATSVLYYDDMGVPTLRKHREGMSVAEXGXR

SEQ ID NO: 48251 - protein, 27 aa, Artificial Sequence
  Cyclic GFR-binding peptide
ELSATSMLYYDENEKVVLRKHRDMVVE

SEQ ID NO: 48252 - protein, 34 aa, Artificial Sequence; identical to SEQ ID NO: 8451
  Cyclic GFR-binding peptide
  MOD_RES (3)..(4): Xaa is C or S

SEQ ID NO: 48253 - protein, 39 aa, Artificial Sequence; identical to SEQ ID NO: 8452
  Cyclic GFR-binding peptide
  MOD_RES (5)..(6)..(38): Xaa is C or S

SEQ ID NO: 48254 - protein, 31 aa, Artificial Sequence
  Cyclic GFR-binding peptide
  MOD_RES (30)..(30): Xaa is C or S
TKLSATSVLYYDDSSNVILRKHRNMVVRSXG

SEQ ID NO: 48255 - protein, 26 aa, Artificial Sequence
  Cyclic GFR-binding peptide
  MOD_RES (1)..(1): Xaa is C or S
XVPQALSPISILYKVGRKPKVLKYHY

SEQ ID NO: 48256 - protein, 30 aa, Artificial Sequence
  Cyclic GFR-binding peptide
PTKLSAISVLYLDDSSNVILKNYQNMVVRS

SEQ ID NO: 48257 - protein, 21 aa, Artificial Sequence
  Cyclic GFR-binding peptide
LSATSILYYVGRTPKVLRKHR

SEQ ID NO: 48258 - protein, 31 aa, Artificial Sequence
  Cyclic GFR-binding peptide
  MOD_RES (29)..(31): Xaa is C or S
QALNAISILYFVGRKPKVLKKYRMIVRSXKX

SEQ ID NO: 48259 - protein, 25 aa, Artificial Sequence
  Cyclic GFR-binding peptide
SATSVLYYDDSSNVILRKHRNMVVR

SEQ ID NO: 48260 - protein, 24 aa, Artificial Sequence
  Cyclic GFR-binding peptide
TKLSAISVLYLDDMGVPTLKNYQE

SEQ ID NO: 48261 - protein, 22 aa, Artificial Sequence
  Cyclic GFR-binding peptide
LSAISILYLVGRTPKVLKNYQM

SEQ ID NO: 48262 - protein, 32 aa, Artificial Sequence
  Cyclic GFR-binding peptide
  MOD_RES (3)..(4): Xaa is C or S
KAXXVPTELSATSMLYYDEYDKVVLRKHREMV

SEQ ID NO: 48263 - protein, 36 aa, Artificial Sequence; identical to SEQ ID NO: 8459
  Cyclic GFR-binding peptide
  MOD_RES (5)..(6): Xaa is C or S

SEQ ID NO: 48264 - protein, 30 aa, Artificial Sequence
  Cyclic GFR-binding peptide
  MOD_RES (30)..(30): Xaa is C or S
TQLSATSVLYYDDSSNVILRKHRNMVVRAX

SEQ ID NO: 48265 - protein, 24 aa, Artificial Sequence
  Cyclic GFR-binding peptide
DLSATSILYYIGKTPKILRKHRMI

SEQ ID NO: 48266 - protein, 28 aa, Artificial Sequence
  Cyclic GFR-binding peptide
  MOD_RES (2)..(3): Xaa is C or S
AXXVPTKLSATSVLYYDDMGVPTLRKHR

SEQ ID NO: 48267 - protein, 34 aa, Artificial Sequence
  Cyclic GFR-binding peptide
  MOD_RES (4)..(5): Xaa is C or S
ASPXXVPQDLSATSILYYVGRTPKVLRKHRMVVK

SEQ ID NO: 48268 - protein, 26 aa, Artificial Sequence
  Cyclic GFR-binding peptide
PTQLSATSVLYYDDSSNVILRKHRNM

SEQ ID NO: 48269 - protein, 33 aa, Artificial Sequence; identical to SEQ ID NO: 8463
  Cyclic GFR-binding peptide
  MOD_RES (31)..(33): Xaa is C or S

SEQ ID NO: 48270 - protein, 29 aa, Artificial Sequence
  Cyclic GFR-binding peptide
  MOD_RES (1)..(1): Xaa is C or S
XVPTKLNAISVLYFDDMGVPTLKKYREGM

SEQ ID NO: 48271 - protein, 29 aa, Artificial Sequence
  Cyclic GFR-binding peptide
  MOD_RES (28)..(28): Xaa is C or S
LSPISMLYKDENEKVVLKYHYDMVVEGXG

SEQ ID NO: 48272 - protein, 34 aa, Artificial Sequence
  Cyclic GFR-binding peptide
  MOD_RES (6)..(7): Xaa is C or S
KIPKAXXVPTELSATSMLYYDENEKVVLRKHRDM

SEQ ID NO: 48273 - protein, 32 aa, Artificial Sequence
  Cyclic GFR-binding peptide
  MOD_RES (4)..(4): Xaa is C or S
KPTXAPTKLSATSVLYYDDSSNVILRKHRNMV

SEQ ID NO: 48274 - protein, 30 aa, Artificial Sequence
  Cyclic GFR-binding peptide
  MOD_RES (29)..(29): Xaa is C or S
QALSPISILYKVGRKPKVLKYHYMIVRSXK

SEQ ID NO: 48275 - protein, 28 aa, Artificial Sequence
  Cyclic GFR-binding peptide
  MOD_RES (1)..(1): Xaa is C or S
XVPQDLSATSILYYVGRTPKVLRKHRMV

SEQ ID NO: 48276 - protein, 41 aa, Artificial Sequence; identical to SEQ ID NO: 8465
  Cyclic GFR-binding peptide
  MOD_RES (5)..(6)..(38)..(40): Xaa is C or S

SEQ ID NO: 48277 - protein, 36 aa, Artificial Sequence
  Cyclic GFR-binding peptide
  MOD_RES (6)..(7): Xaa is C or S
AVPKAXXAPTKLSAISVLYLDSSNNVILKNYQNMVV

SEQ ID NO: 48278 - protein, 35 aa, Artificial Sequence
  Cyclic GFR-binding peptide
  MOD_RES (6)..(7): Xaa is C or S
ASASPXXVSQDLSPISILYKIGKTPKILKYHYMIV

SEQ ID NO: 48279 - protein, 27 aa, Artificial Sequence
  Cyclic GFR-binding peptide
VPTELSATSMLYYDENEKVVLRKHRDM

SEQ ID NO: 48280 - protein, 27 aa, Artificial Sequence
  Cyclic GFR-binding peptide
  MOD_RES (1)..(1): Xaa is C or S
XVPQDLNAISILYFVGRTPKVLKKYRM

SEQ ID NO: 48281 - protein, 39 aa, Artificial Sequence; identical to SEQ ID NO: 8468
  Cyclic GFR-binding peptide
  MOD_RES (5)..(37)..(39): Xaa is C or S

SEQ ID NO: 48282 - protein, 33 aa, Artificial Sequence
  Cyclic GFR-binding peptide
  MOD_RES (4)..(5): Xaa is C or S
ASPXXVPQDLSAISILYLVGRTPKVLKNYQMVV

SEQ ID NO: 48283 - protein, 34 aa, Artificial Sequence
  Cyclic GFR-binding peptide
  MOD_RES (6)..(7): Xaa is C or S
KIPKAXXVPTELSPISMLYKDENEKVVLKYHYDM

SEQ ID NO: 48284 - protein, 25 aa, Artificial Sequence
  Cyclic GFR-binding peptide
PQALSPISILYKVGRKPKVLKYHYM

SEQ ID NO: 48285 - protein, 29 aa, Artificial Sequence
  Cyclic GFR-binding peptide
  MOD_RES (3)..(4): Xaa is C or S
KPXXAPTQLSPISVLYKDDSSNVILKYHY

SEQ ID NO: 48286 - protein, 33 aa, Artificial Sequence; identical to SEQ ID NO: 8471
  Cyclic GFR-binding peptide
  MOD_RES (32)..(32): Xaa is C or S

SEQ ID NO: 48287 - protein, 30 aa, Artificial Sequence
  Cyclic GFR-binding peptide
  MOD_RES (2)..(3): Xaa is C or S
PXXVPQALSATSILYYVGRKPKVLRKHRMI

SEQ ID NO: 48288 - protein, 36 aa, Artificial Sequence; identical to SEQ ID NO: 8473
  Cyclic GFR-binding peptide
  MOD_RES (1)..(2)..(34)..(36): Xaa is C or S

SEQ ID NO: 48289 - protein, 22 aa, Artificial Sequence
  Cyclic GFR-binding peptide
SATSMLYYDEYDKVVLRKHREM

SEQ ID NO: 48290 - protein, 26 aa, Artificial Sequence
  Cyclic GFR-binding peptide
LSATSILYYVGRTPKVLRKHRMVVKS

SEQ ID NO: 48291 - protein, 33 aa, Artificial Sequence
  Cyclic GFR-binding peptide
  MOD_RES (3)..(4): Xaa is C or S
KAXXVPTKLSAISVLYLDDMGVPTLKNYQEGMS

SEQ ID NO: 48292 - protein, 32 aa, Artificial Sequence
  Cyclic GFR-binding peptide
  MOD_RES (2)..(3): Xaa is C or S
PXXVSQDLSPISILYKIGKTPKILKYHYMIVK

SEQ ID NO: 48293 - protein, 38 aa, Artificial Sequence; identical to SEQ ID NO: 8476
  Cyclic GFR-binding peptide
  MOD_RES (5)..(6)..(38): Xaa is C or S

SEQ ID NO: 48294 - protein, 40 aa, Artificial Sequence; identical to SEQ ID NO: 8477
  Cyclic GFR-binding peptide
  MOD_RES (4)..(4): Xaa is C or S

SEQ ID NO: 48295 - protein, 30 aa, Artificial Sequence
  Cyclic GFR-binding peptide
TKLNAISVLYFDDMGVPTLKKYREGMSVAE

SEQ ID NO: 48296 - protein, 37 aa, Artificial Sequence; identical to SEQ ID NO: 8478
  Cyclic GFR-binding peptide
  MOD_RES (3)..(35)..(37): Xaa is C or S

SEQ ID NO: 48297 - protein, 33 aa, Artificial Sequence; identical to SEQ ID NO: 8480
  Cyclic GFR-binding peptide
  MOD_RES (1)..(32): Xaa is C or S

SEQ ID NO: 48298 - protein, 31 aa, Artificial Sequence
  Cyclic GFR-binding peptide
  MOD_RES (1)..(1): Xaa is C or S
XRPTQVQLSAISVLYLEIVRKKPIFLKNYQT

SEQ ID NO: 48299 - protein, 32 aa, Artificial Sequence
  Cyclic GFR-binding peptide
  MOD_RES (4)..(5): Xaa is C or S
ASPXXVSQDLSATSILYYIGKTPKILRKHRMI

SEQ ID NO: 48300 - protein, 31 aa, Artificial Sequence
  Cyclic GFR-binding peptide
  MOD_RES (1)..(2): Xaa is C or S
XXAPTKLSPISVLYKDSSNNVILKYHYNMVV

SEQ ID NO: 48301 - protein, 24 aa, Artificial Sequence
  Cyclic GFR-binding peptide
PQALSPISILYKVGRKPKVLKYHY

SEQ ID NO: 48302 - protein, 27 aa, Artificial Sequence
  Cyclic GFR-binding peptide
VQLSPISVLYKEIVRKKPIFLKYHYTL

SEQ ID NO: 48303 - protein, 35 aa, Artificial Sequence; identical to SEQ ID NO: 8482
  Cyclic GFR-binding peptide
  MOD_RES (1)..(33)..(35): Xaa is C or S

SEQ ID NO: 48304 - protein, 33 aa, Artificial Sequence
  Cyclic GFR-binding peptide
  MOD_RES (5)..(6): Xaa is C or S
SASPXXVSQDLNAISILYFIGKTPKILKKYRMI

SEQ ID NO: 48305 - protein, 30 aa, Artificial Sequence
  Cyclic GFR-binding peptide
  MOD_RES (1)..(2): Xaa is C or S
XXVPQDLSAISILYLVGRTPKVLKNYQMVV

SEQ ID NO: 48306 - protein, 30 aa, Artificial Sequence
  Cyclic GFR-binding peptide
  MOD_RES (30)..(30): Xaa is C or S
TKLSAISVLYLDSSNNVILKNYQNMVVKAX

SEQ ID NO: 48307 - protein, 31 aa, Artificial Sequence
  Cyclic GFR-binding peptide
QVQLSPISVLYKEIVRKKPIFLKYHYTLEDH

SEQ ID NO: 48308 - protein, 26 aa, Artificial Sequence
  Cyclic GFR-binding peptide
  MOD_RES (1)..(1): Xaa is C or S
XAPTQLSPISVLYKDDSSNVILKYHY

SEQ ID NO: 48309 - protein, 26 aa, Artificial Sequence
  Cyclic GFR-binding peptide
ELSPISMLYKDEYDKVVLKYHYEMVV

SEQ ID NO: 48310 - protein, 27 aa, Artificial Sequence
  Cyclic GFR-binding peptide
  MOD_RES (1)..(1): Xaa is C or S
XAPTQLSPISVLYKDDSSNVILKYHYN

SEQ ID NO: 48311 - protein, 37 aa, Artificial Sequence; identical to SEQ ID NO: 8486
  Cyclic GFR-binding peptide
  MOD_RES (3)..(4)..(36): Xaa is C or S

SEQ ID NO: 48312 - protein, 27 aa, Artificial Sequence
  Cyclic GFR-binding peptide
PTELNAISMLYFDENEKVVLKKYRDMV

SEQ ID NO: 48313 - protein, 34 aa, Artificial Sequence
  Cyclic GFR-binding peptide
  MOD_RES (33)..(33): Xaa is C or S
VQLNAISVLYFEIVRKKPIFLKKYRTLEDHLAXK

SEQ ID NO: 48314 - protein, 26 aa, Artificial Sequence
  Cyclic GFR-binding peptide
PTQLSAISVLYLDDSSNVILKNYQNM

SEQ ID NO: 48315 - protein, 29 aa, Artificial Sequence
  Cyclic GFR-binding peptide
  MOD_RES (3)..(4): Xaa is C or S
KPXXAPTKLSPISVLYKDDSSNVILKYHY

SEQ ID NO: 48316 - protein, 32 aa, Artificial Sequence
  Cyclic GFR-binding peptide
  MOD_RES (3)..(3): Xaa is C or S
VQXRPTQVQLNAISVLYFEIVRKKPIFLKKYR

SEQ ID NO: 48317 - protein, 27 aa, Artificial Sequence
  Cyclic GFR-binding peptide
  MOD_RES (27)..(27): Xaa is C or S
LNAISILYFIGKTPKILKKYRMIVKSX

SEQ ID NO: 48318 - protein, 35 aa, Artificial Sequence; identical to SEQ ID NO: 8489
  Cyclic GFR-binding peptide
  MOD_RES (3)..(4)..(35): Xaa is C or S

SEQ ID NO: 48319 - protein, 29 aa, Artificial Sequence
  Cyclic GFR-binding peptide
  MOD_RES (3)..(4): Xaa is C or S
KAXXVPTELSPISMLYKDENEKVVLKYHY

SEQ ID NO: 48320 - protein, 35 aa, Artificial Sequence; identical to SEQ ID NO: 8492
  Cyclic GFR-binding peptide
  MOD_RES (2)..(3)..(34): Xaa is C or S

SEQ ID NO: 48321 - protein, 35 aa, Artificial Sequence
  Cyclic GFR-binding peptide
  MOD_RES (4)..(5): Xaa is C or S
GKAXXVPTKLSAISVLYLDDMGVPTLKNYQEGMSV

SEQ ID NO: 48322 - protein, 32 aa, Artificial Sequence
  Cyclic GFR-binding peptide
  MOD_RES (3)..(3): Xaa is C or S
PTXAPTKLSATSVLYYDDSSNVILRKHRNMVV

SEQ ID NO: 48323 - protein, 36 aa, Artificial Sequence; identical to SEQ ID NO: 8493
  Cyclic GFR-binding peptide
  MOD_RES (3)..(4)..(36): Xaa is C or S

SEQ ID NO: 48324 - protein, 22 aa, Artificial Sequence
  Cyclic GFR-binding peptide
SPISILYKVGRTPKVLKYHYMV

SEQ ID NO: 48325 - protein, 28 aa, Artificial Sequence
  Cyclic GFR-binding peptide
  MOD_RES (27)..(27): Xaa is C or S
SPISMLYKDEYDKVVLKYHYEMVVEGXG

SEQ ID NO: 48326 - protein, 34 aa, Artificial Sequence; identical to SEQ ID NO: 8495
  Cyclic GFR-binding peptide

SEQ ID NO: 48327 - protein, 33 aa, Artificial Sequence
  Cyclic GFR-binding peptide
  MOD_RES (6)..(7): Xaa is C or S
KVGKAXXVPTKLSATSVLYYDDMGVPTLRKHRE

SEQ ID NO: 48328 - protein, 26 aa, Artificial Sequence
  Cyclic GFR-binding peptide
  MOD_RES (26)..(26): Xaa is C or S
SPISILYKIGKTPKILKYHYMIVKSX

SEQ ID NO: 48329 - protein, 41 aa, Artificial Sequence; identical to SEQ ID NO: 8497
  Cyclic GFR-binding peptide
  MOD_RES (6)..(7)..(38)..(40): Xaa is C or S

SEQ ID NO: 48330 - protein, 31 aa, Artificial Sequence; identical to SEQ ID NO: 8498
  Cyclic GFR-binding peptide

SEQ ID NO: 48331 - protein, 27 aa, Artificial Sequence
  Cyclic GFR-binding peptide
NAISVLYFDDMGVPTLKKYREGMSVAE

SEQ ID NO: 48332 - protein, 32 aa, Artificial Sequence
  Cyclic GFR-binding peptide
  MOD_RES (2)..(3): Xaa is C or S
PXXVPQDLNAISILYFVGRTPKVLKKYRMVVK

SEQ ID NO: 48333 - protein, 28 aa, Artificial Sequence
  Cyclic GFR-binding peptide
QVQLSAISVLYLEIVRKKPIFLKNYQTL

SEQ ID NO: 48334 - protein, 25 aa, Artificial Sequence
  Cyclic GFR-binding peptide
QDLSPISILYKIGKTPKILKYHYMI

SEQ ID NO: 48335 - protein, 28 aa, Artificial Sequence
  Cyclic GFR-binding peptide
  MOD_RES (2)..(3): Xaa is C or S
PXXVPQDLSPISILYKVGRTPKVLKYHY

SEQ ID NO: 48336 - protein, 23 aa, Artificial Sequence
  Cyclic GFR-binding peptide
QDLSAISILYLIGKTPKILKNYQ

SEQ ID NO: 48337 - protein, 25 aa, Artificial Sequence
  Cyclic GFR-binding peptide
TELNAISMLYFDEYDKVVLKKYREM

SEQ ID NO: 48338 - protein, 23 aa, Artificial Sequence
  Cyclic GFR-binding peptide
NAISMLYFDENEKVVLKKYRDMV

SEQ ID NO: 48339 - protein, 38 aa, Artificial Sequence; identical to SEQ ID NO: 8504
  Cyclic GFR-binding peptide
  MOD_RES (3)..(4)..(35)..(37): Xaa is C or S

SEQ ID NO: 48340 - protein, 37 aa, Artificial Sequence; identical to SEQ ID NO: 8505
  Cyclic GFR-binding peptide
  MOD_RES (5)..(6): Xaa is C or S

SEQ ID NO: 48341 - protein, 32 aa, Artificial Sequence
  Cyclic GFR-binding peptide
  MOD_RES (1)..(1): Xaa is C or S
XVPTKLNAISVLYFDDMGVPTLKKYREGMSVA

SEQ ID NO: 48342 - protein, 37 aa, Artificial Sequence
  Cyclic GFR-binding peptide
  MOD_RES (5)..(5): Xaa is C or S
RNVQXRPTQVQLSAISVLYLEIVRKKPIFLKNYQTLE

SEQ ID NO: 48343 - protein, 39 aa, Artificial Sequence; identical to SEQ ID NO: 8506
  Cyclic GFR-binding peptide
  MOD_RES (5)..(6)..(38): Xaa is C or S

SEQ ID NO: 48344 - protein, 32 aa, Artificial Sequence
  Cyclic GFR-binding peptide
  MOD_RES (5)..(6): Xaa is C or S
VPKPXXAPTKLSPISVLYKDDSSNVILKYHYN

SEQ ID NO: 48345 - protein, 29 aa, Artificial Sequence
  Cyclic GFR-binding peptide
SPISVLYKEIVRKKPIFLKYHYTLEDHLA

SEQ ID NO: 48346 - protein, 37 aa, Artificial Sequence; identical to SEQ ID NO: 8509
  Cyclic GFR-binding peptide
  MOD_RES (4)..(5)..(37): Xaa is C or S

SEQ ID NO: 48347 - protein, 36 aa, Artificial Sequence
  Cyclic GFR-binding peptide
  MOD_RES (1)..(2)..(34)..(36): Xaa is C or S
XXVPTELSPISMLYKDENEKVVLKYHYDMVVEGXGX

SEQ ID NO: 48348 - protein, 33 aa, Artificial Sequence
  Cyclic GFR-binding peptide
  MOD_RES (5)..(6): Xaa is C or S
VPKPXXAPTKLSATSVLYYDDSSNVILRKHRNM

SEQ ID NO: 48349 - protein, 29 aa, Artificial Sequence
  Cyclic GFR-binding peptide
  MOD_RES (1)..(1): Xaa is C or S
XVPTELSATSMLYYDENEKVVLRKHRDMV

SEQ ID NO: 48350 - protein, 32 aa, Artificial Sequence
  Cyclic GFR-binding peptide
  MOD_RES (4)..(5): Xaa is C or S
ASPXXVPQDLSPISILYKVGRTPKVLKYHYMV

SEQ ID NO: 48351 - protein, 27 aa, Artificial Sequence
  Cyclic GFR-binding peptide
  MOD_RES (27)..(27): Xaa is C or S
NAISMLYFDENEKVVLKKYRDMVVEGX

SEQ ID NO: 48352 - protein, 33 aa, Artificial Sequence; identical to SEQ ID NO: 8510
  Cyclic GFR-binding peptide
  MOD_RES (1)..(1): Xaa is C or S

SEQ ID NO: 48353 - protein, 35 aa, Artificial Sequence; identical to SEQ ID NO: 8511
  Cyclic GFR-binding peptide
  MOD_RES (4)..(5): Xaa is C or S

SEQ ID NO: 48354 - protein, 27 aa, Artificial Sequence
  Cyclic GFR-binding peptide
QDLSAISILYLIGKTPKILKNYQMIVK

SEQ ID NO: 48355 - protein, 36 aa, Artificial Sequence; identical to SEQ ID NO: 8512
  Cyclic GFR-binding peptide
  MOD_RES (1)..(33)..(35): Xaa is C or S

SEQ ID NO: 48356 - protein, 38 aa, Artificial Sequence; identical to SEQ ID NO: 8514
  Cyclic GFR-binding peptide
  MOD_RES (4)..(4): Xaa is C or S

SEQ ID NO: 48357 - protein, 31 aa, Artificial Sequence
  Cyclic GFR-binding peptide
  MOD_RES (28)..(30): Xaa is C or S
LNAISMLYFDENEKVVLKKYRDMVVEGXGXR

SEQ ID NO: 48358 - protein, 25 aa, Artificial Sequence
  Cyclic GFR-binding peptide
PTKLSAISVLYLDDMGVPTLKNYQE

SEQ ID NO: 48359 - protein, 28 aa, Artificial Sequence
  Cyclic GFR-binding peptide
  MOD_RES (1)..(2): Xaa is C or S
XXAPTQLSPISVLYKDDSSNVILKYHYN

SEQ ID NO: 48360 - protein, 38 aa, Artificial Sequence; identical to SEQ ID NO: 8516
  Cyclic GFR-binding peptide
  MOD_RES (5)..(6)..(37): Xaa is C or S

SEQ ID NO: 48361 - protein, 35 aa, Artificial Sequence
  Cyclic GFR-binding peptide
  MOD_RES (6)..(7): Xaa is C or S
SIPKAXXVPTELNAISMLYFDEYDKVVLKKYREMV

SEQ ID NO: 48362 - protein, 25 aa, Artificial Sequence
  Cyclic GFR-binding peptide
SATSILYYIGKTPKILRKHRMIVKS

SEQ ID NO: 48363 - protein, 32 aa, Artificial Sequence
  Cyclic GFR-binding peptide
  MOD_RES (3)..(4): Xaa is C or S
SPXXVSQDLSAISILYLIGKTPKILKNYQMIV

SEQ ID NO: 48364 - protein, 33 aa, Artificial Sequence
  Cyclic GFR-binding peptide
  MOD_RES (5)..(6): Xaa is C or S
VPKAXXAPTKLSPISVLYKDSSNNVILKYHYNM

SEQ ID NO: 48365 - protein, 31 aa, Artificial Sequence; identical to SEQ ID NO: 8518
  Cyclic GFR-binding peptide
  MOD_RES (1)..(1): Xaa is C or S

SEQ ID NO: 48366 - protein, 30 aa, Artificial Sequence
  Cyclic GFR-binding peptide
  MOD_RES (1)..(1): Xaa is C or S
XRPTQVQLNAISVLYFEIVRKKPIFLKKYR

SEQ ID NO: 48367 - protein, 34 aa, Artificial Sequence; identical to SEQ ID NO: 8520
  Cyclic GFR-binding peptide
  MOD_RES (1)..(2)..(34): Xaa is C or S

SEQ ID NO: 48368 - protein, 26 aa, Artificial Sequence
  Cyclic GFR-binding peptide
  MOD_RES (1)..(1): Xaa is C or S
XAPTKLNAISVLYFDSSNNVILKKYR

SEQ ID NO: 48369 - protein, 43 aa, Artificial Sequence; identical to SEQ ID NO: 8522
  Cyclic GFR-binding peptide
  MOD_RES (6)..(7)..(40)..(42): Xaa is C or S

SEQ ID NO: 48370 - protein, 33 aa, Artificial Sequence
  Cyclic GFR-binding peptide
RPTQVQLNAISVLYFEIVRKKPIFLKKYRTLED

SEQ ID NO: 48371 - protein, 35 aa, Artificial Sequence
  Cyclic GFR-binding peptide
  MOD_RES (5)..(6): Xaa is C or S
VGKAXXVPTKLSAISVLYLDDMGVPTLKNYQEGMS

SEQ ID NO: 48372 - protein, 41 aa, Artificial Sequence; identical to SEQ ID NO: 8523
  Cyclic GFR-binding peptide
  MOD_RES (6)..(7)..(39)..(41): Xaa is C or S

SEQ ID NO: 48373 - protein, 28 aa, Artificial Sequence
  Cyclic GFR-binding peptide
  MOD_RES (1)..(2): Xaa is C or S
XXVPTELSPISMLYKDEYDKVVLKYHYE

SEQ ID NO: 48374 - protein, 30 aa, Artificial Sequence
  Cyclic GFR-binding peptide
  MOD_RES (1)..(2): Xaa is C or S
XXAPTQLSATSVLYYDDSSNVILRKHRNMV

SEQ ID NO: 48375 - protein, 39 aa, Artificial Sequence; identical to SEQ ID NO: 8525
  Cyclic GFR-binding peptide
  MOD_RES (4)..(5)..(36)..(38): Xaa is C or S

SEQ ID NO: 48376 - protein, 22 aa, Artificial Sequence
  Cyclic GFR-binding peptide
KLNAISVLYFDSSNNVILKKYR

SEQ ID NO: 48377 - protein, 28 aa, Artificial Sequence
  Cyclic GFR-binding peptide
  MOD_RES (28)..(28): Xaa is C or S
LSATSMLYYDENEKVVLRKHRDMVVEGX

SEQ ID NO: 48378 - protein, 33 aa, Artificial Sequence; identical to SEQ ID NO: 8527
  Cyclic GFR-binding peptide
  MOD_RES (32)..(32): Xaa is C or S

SEQ ID NO: 48379 - protein, 26 aa, Artificial Sequence
  Cyclic GFR-binding peptide
QVQLSAISVLYLEIVRKKPIFLKNYQ

SEQ ID NO: 48380 - protein, 30 aa, Artificial Sequence
  Cyclic GFR-binding peptide
PTQVQLSAISVLYLEIVRKKPIFLKNYQTL

SEQ ID NO: 48381 - protein, 31 aa, Artificial Sequence
  Cyclic GFR-binding peptide
  MOD_RES (29)..(31): Xaa is C or S
QLSPISVLYKDDSSNVILKYHYNMVVRAXGX

SEQ ID NO: 48382 - protein, 32 aa, Artificial Sequence
  Cyclic GFR-binding peptide
  MOD_RES (5)..(6): Xaa is C or S
IPKAXXVPTELSATSMLYYDEYDKVVLRKHRE

SEQ ID NO: 48383 - protein, 37 aa, Artificial Sequence; identical to SEQ ID NO: 8528
  Cyclic GFR-binding peptide
  MOD_RES (5)..(6): Xaa is C or S

SEQ ID NO: 48384 - protein, 21 aa, Artificial Sequence
  Cyclic GFR-binding peptide
LNAISMLYFDEYDKVVLKKYR

SEQ ID NO: 48385 - protein, 27 aa, Artificial Sequence
  Cyclic GFR-binding peptide
  MOD_RES (1)..(2): Xaa is C or S
XXVSQDLSPISILYKIGKTPKILKYHY

SEQ ID NO: 48386 - protein, 36 aa, Artificial Sequence; identical to SEQ ID NO: 8531
  Cyclic GFR-binding peptide
  MOD_RES (5)..(6): Xaa is C or S

SEQ ID NO: 48387 - protein, 42 aa, Artificial Sequence; identical to SEQ ID NO: 8535
  Cyclic GFR-binding peptide
  MOD_RES (6)..(7)..(39)..(41): Xaa is C or S

SEQ ID NO: 48388 - protein, 31 aa, Artificial Sequence
  Cyclic GFR-binding peptide
  MOD_RES (1)..(1): Xaa is C or S
XVPTKLNAISVLYFDDMGVPTLKKYREGMSV

SEQ ID NO: 48389 - protein, 35 aa, Artificial Sequence
  Cyclic GFR-binding peptide
  MOD_RES (5)..(6): Xaa is C or S
VPKPXXAPTQLSAISVLYLDDSSNVILKNYQNMVV

SEQ ID NO: 48390 - protein, 35 aa, Artificial Sequence; identical to SEQ ID NO: 8538
  Cyclic GFR-binding peptide
  MOD_RES (4)..(5): Xaa is C or S

SEQ ID NO: 48391 - protein, 37 aa, Artificial Sequence; identical to SEQ ID NO: 8539
  Cyclic GFR-binding peptide
  MOD_RES (2)..(3)..(35)..(37): Xaa is C or S

SEQ ID NO: 48392 - protein, 27 aa, Artificial Sequence
  Cyclic GFR-binding peptide
SAISILYLVGRTPKVLKNYQVGRTPKV

SEQ ID NO: 48393 - protein, 25 aa, Artificial Sequence
  Cyclic GFR-binding peptide
PTELSATSMLYYDEYDKVVLRKHRE

SEQ ID NO: 48394 - protein, 33 aa, Artificial Sequence
  Cyclic GFR-binding peptide
  MOD_RES (6)..(7): Xaa is C or S
KIPKAXXVPTELSATSMLYYDENEKVVLRKHRD

SEQ ID NO: 48395 - protein, 29 aa, Artificial Sequence
  Cyclic GFR-binding peptide
  MOD_RES (29)..(29): Xaa is C or S
ELSATSMLYYDEYDKVVLRKHREMVVEGX

SEQ ID NO: 48396 - protein, 34 aa, Artificial Sequence; identical to SEQ ID NO: 8543
  Cyclic GFR-binding peptide
  MOD_RES (3)..(4): Xaa is C or S

SEQ ID NO: 48397 - protein, 33 aa, Artificial Sequence
  Cyclic GFR-binding peptide
  MOD_RES (1)..(2): Xaa is C or S
XXVPTKLSAISVLYLDDMGVPTLKNYQEGMSVA

SEQ ID NO: 48398 - protein, 30 aa, Artificial Sequence
  Cyclic GFR-binding peptide
  MOD_RES (4)..(5): Xaa is C or S
ASPXXVSQDLSAISILYLIGKTPKILKNYQ

SEQ ID NO: 48399 - protein, 37 aa, Artificial Sequence
  Cyclic GFR-binding peptide
  MOD_RES (6)..(7): Xaa is C or S
KVGKAXXVPTKLSAISVLYLDDMGVPTLKNYQEGMSV

SEQ ID NO: 48400 - protein, 34 aa, Artificial Sequence; identical to SEQ ID NO: 8545
  Cyclic GFR-binding peptide

SEQ ID NO: 48401 - protein, 30 aa, Artificial Sequence
  Cyclic GFR-binding peptide
PTQLSATSVLYYDDSSNVILRKHRNMVVRA

SEQ ID NO: 48402 - protein, 31 aa, Artificial Sequence
  Cyclic GFR-binding peptide
  MOD_RES (4)..(5): Xaa is C or S
AAPXXVPQALSPISILYKVGRKPKVLKYHYM

SEQ ID NO: 48403 - protein, 24 aa, Artificial Sequence
  Cyclic GFR-binding peptide
LNAISILYFVGRTPKVLKKYRMVV

SEQ ID NO: 48404 - protein, 32 aa, Artificial Sequence
  Cyclic GFR-binding peptide
  MOD_RES (2)..(2): Xaa is C or S
QXRPTQVQLNAISVLYFEIVRKKPIFLKKYRT

SEQ ID NO: 48405 - protein, 21 aa, Artificial Sequence
  Cyclic GFR-binding peptide
LSATSILYYVGRKPKVLRKHR

SEQ ID NO: 48406 - protein, 28 aa, Artificial Sequence
  Cyclic GFR-binding peptide
  MOD_RES (28)..(28): Xaa is C or S
LSAISVLYLDDSSNVILKNYQNMVVRAX

SEQ ID NO: 48407 - protein, 33 aa, Artificial Sequence
  Cyclic GFR-binding peptide
  MOD_RES (30)..(32): Xaa is C or S
SPISVLYKEIVRKKPIFLKYHYTLEDHLAXKXE

SEQ ID NO: 48408 - protein, 32 aa, Artificial Sequence
  Cyclic GFR-binding peptide
  MOD_RES (1)..(1): Xaa is C or S
XVPTKLSAISVLYLDDMGVPTLKNYQEGMSVA

SEQ ID NO: 48409 - protein, 29 aa, Artificial Sequence
  Cyclic GFR-binding peptide
PTELSATSMLYYDENEKVVLRKHRDMVVE

SEQ ID NO: 48410 - protein, 32 aa, Artificial Sequence
  Cyclic GFR-binding peptide
  MOD_RES (30)..(32): Xaa is C or S
TKLSATSVLYYDDSSNVILRKHRNMVVRSXGX

SEQ ID NO: 48411 - protein, 23 aa, Artificial Sequence
  Cyclic GFR-binding peptide
LSPISVLYKDDSSNVILKYHYNM

SEQ ID NO: 48412 - protein, 25 aa, Artificial Sequence
  Cyclic GFR-binding peptide
VPTELNAISMLYFDEYDKVVLKKYR

SEQ ID NO: 48413 - protein, 29 aa, Artificial Sequence
  Cyclic GFR-binding peptide
PQALSPISILYKVGRKPKVLKYHYMIVRS

SEQ ID NO: 48414 - protein, 34 aa, Artificial Sequence; identical to SEQ ID NO: 8556
  Cyclic GFR-binding peptide
  MOD_RES (1)..(2)..(34): Xaa is C or S

SEQ ID NO: 48415 - protein, 36 aa, Artificial Sequence; identical to SEQ ID NO: 8555
  Cyclic GFR-binding peptide
  MOD_RES (4)..(5)..(36): Xaa is C or S

SEQ ID NO: 48416 - protein, 28 aa, Artificial Sequence
  Cyclic GFR-binding peptide
  MOD_RES (1)..(2): Xaa is C or S
XXVPTELSATSMLYYDENEKVVLRKHRD

SEQ ID NO: 48417 - protein, 25 aa, Artificial Sequence
  Cyclic GFR-binding peptide
PQDLSAISILYLVGRTPKVLKNYQM

SEQ ID NO: 48418 - protein, 25 aa, Artificial Sequence
  Cyclic GFR-binding peptide
LSPISMLYKDEYDKVVLKYHYEMVV

SEQ ID NO: 48419 - protein, 31 aa, Artificial Sequence
  Cyclic GFR-binding peptide
RPTQVQLSATSVLYYEIVRKKPIFLRKHRTL

SEQ ID NO: 48420 - protein, 37 aa, Artificial Sequence; identical to SEQ ID NO: 8558
  Cyclic GFR-binding peptide
  MOD_RES (4)..(5)..(36): Xaa is C or S

SEQ ID NO: 48421 - protein, 35 aa, Artificial Sequence
  Cyclic GFR-binding peptide
  MOD_RES (3)..(3): Xaa is C or S
VQXRPTQVQLNAISVLYFEIVRKKPIFLKKYRTLE

SEQ ID NO: 48422 - protein, 35 aa, Artificial Sequence
  Cyclic GFR-binding peptide
  MOD_RES (33)..(35): Xaa is C or S
VQLSATSVLYYEIVRKKPIFLRKHRTLEDHLAXKX

SEQ ID NO: 48423 - protein, 36 aa, Artificial Sequence; identical to SEQ ID NO: 8560
  Cyclic GFR-binding peptide
  MOD_RES (1)..(2)..(35): Xaa is C or S

SEQ ID NO: 48424 - protein, 30 aa, Artificial Sequence
  Cyclic GFR-binding peptide
LSPISVLYKEIVRKKPIFLKYHYTLEDHLA

SEQ ID NO: 48425 - protein, 27 aa, Artificial Sequence
  Cyclic GFR-binding peptide
ELNAISMLYFDENEKVVLKKYRDMVVE

SEQ ID NO: 48426 - protein, 41 aa, Artificial Sequence; identical to SEQ ID NO: 8562
  Cyclic GFR-binding peptide
  MOD_RES (4)..(5)..(38)..(40): Xaa is C or S

SEQ ID NO: 48427 - protein, 31 aa, Artificial Sequence
  Cyclic GFR-binding peptide
  MOD_RES (30)..(30): Xaa is C or S
PQDLSATSILYYVGRTPKVLRKHRMVVKSXK

SEQ ID NO: 48428 - protein, 25 aa, Artificial Sequence
  Cyclic GFR-binding peptide
PTKLSAISVLYLDDSSNVILKNYQN

SEQ ID NO: 48429 - protein, 24 aa, Artificial Sequence
  Cyclic GFR-binding peptide
KLSAISVLYLDDMGVPTLKNYQEG

SEQ ID NO: 48430 - protein, 42 aa, Artificial Sequence; identical to SEQ ID NO: 8564
  Cyclic GFR-binding peptide
  MOD_RES (2)..(39)..(41): Xaa is C or S

SEQ ID NO: 48431 - protein, 27 aa, Artificial Sequence
  Cyclic GFR-binding peptide
  MOD_RES (26)..(26): Xaa is C or S
SAISILYLVGRKPKVLKNYQMIVRSXK

SEQ ID NO: 48432 - protein, 35 aa, Artificial Sequence; identical to SEQ ID NO: 8565
  Cyclic GFR-binding peptide
  MOD_RES (2)..(3)..(34): Xaa is C or S

SEQ ID NO: 48433 - protein, 31 aa, Artificial Sequence
  Cyclic GFR-binding peptide
  MOD_RES (2)..(2): Xaa is C or S
TXAPTKLSPISVLYKDDSSNVILKYHYNMVV

SEQ ID NO: 48434 - protein, 32 aa, Artificial Sequence; identical to SEQ ID NO: 8567
  Cyclic GFR-binding peptide
  MOD_RES (1)..(32): Xaa is C or S

SEQ ID NO: 48435 - protein, 24 aa, Artificial Sequence
  Cyclic GFR-binding peptide
NAISILYFIGKTPKILKKYRMIVK

SEQ ID NO: 48436 - protein, 36 aa, Artificial Sequence; identical to SEQ ID NO: 8568
  Cyclic GFR-binding peptide
  MOD_RES (2)..(3)..(35): Xaa is C or S

SEQ ID NO: 48437 - protein, 21 aa, Artificial Sequence
  Cyclic GFR-binding peptide
NAISILYFVGRTPKVLKKYRM

SEQ ID NO: 48438 - protein, 40 aa, Artificial Sequence; identical to SEQ ID NO: 8569
  Cyclic GFR-binding peptide
  MOD_RES (6)..(38)..(40): Xaa is C or S

SEQ ID NO: 48439 - protein, 31 aa, Artificial Sequence
  Cyclic GFR-binding peptide
  MOD_RES (1)..(2): Xaa is C or S
XXVPQDLNAISILYFVGRTPKVLKKYRMVVK

SEQ ID NO: 48440 - protein, 23 aa, Artificial Sequence
  Cyclic GFR-binding peptide
LSATSILYYVGRTPKVLRKHRMV

SEQ ID NO: 48441 - protein, 25 aa, Artificial Sequence
  Cyclic GFR-binding peptide
SQDLSATSILYYIGKTPKILRKHRM

SEQ ID NO: 48442 - protein, 22 aa, Artificial Sequence
  Cyclic GFR-binding peptide
QLSPISVLYKDDSSNVILKYHY

SEQ ID NO: 48443 - protein, 31 aa, Artificial Sequence
  Cyclic GFR-binding peptide
  MOD_RES (28)..(30): Xaa is C or S
LSATSVLYYDDSSNVILRKHRNMVVRSXGXH

SEQ ID NO: 48444 - protein, 27 aa, Artificial Sequence
  Cyclic GFR-binding peptide
  MOD_RES (1)..(2): Xaa is C or S
XXAPTKLSAISVLYLDSSNNVILKNYQ

SEQ ID NO: 48445 - protein, 29 aa, Artificial Sequence
  Cyclic GFR-binding peptide
KLSAISVLYLDDMGVPTLKNYQEGMSVAE

SEQ ID NO: 48446 - protein, 37 aa, Artificial Sequence; identical to SEQ ID NO: 8572
  Cyclic GFR-binding peptide
  MOD_RES (4)..(5): Xaa is C or S

SEQ ID NO: 48447 - protein, 40 aa, Artificial Sequence; identical to SEQ ID NO: 8573
  Cyclic GFR-binding peptide
  MOD_RES (37)..(39): Xaa is C or S

SEQ ID NO: 48448 - protein, 39 aa, Artificial Sequence; identical to SEQ ID NO: 8574
  Cyclic GFR-binding peptide
  MOD_RES (3)..(4)..(36)..(38): Xaa is C or S

SEQ ID NO: 48449 - protein, 39 aa, Artificial Sequence; identical to SEQ ID NO: 8575
  Cyclic GFR-binding peptide
  MOD_RES (6)..(7)..(39): Xaa is C or S

SEQ ID NO: 48450 - protein, 25 aa, Artificial Sequence
  Cyclic GFR-binding peptide
LSAISILYLIGKTPKILKNYQMIVK

SEQ ID NO: 48451 - protein, 38 aa, Artificial Sequence; identical to SEQ ID NO: 8576
  Cyclic GFR-binding peptide
  MOD_RES (35)..(37): Xaa is C or S

SEQ ID NO: 48452 - protein, 23 aa, Artificial Sequence
  Cyclic GFR-binding peptide
SPISILYKVGRKPKVLKYHYMIV

SEQ ID NO: 48453 - protein, 29 aa, Artificial Sequence
  Cyclic GFR-binding peptide
  MOD_RES (29)..(29): Xaa is C or S
KLSAISVLYLDDSSNVILKNYQNMVVRSX

SEQ ID NO: 48454 - protein, 23 aa, Artificial Sequence
  Cyclic GFR-binding peptide
TQLSPISVLYKDDSSNVILKYHY

SEQ ID NO: 48455 - protein, 30 aa, Artificial Sequence
  Cyclic GFR-binding peptide
  MOD_RES (30)..(30): Xaa is C or S
TELSPISMLYKDENEKVVLKYHYDMVVEGX

SEQ ID NO: 48456 - protein, 25 aa, Artificial Sequence
  Cyclic GFR-binding peptide
KLNAISVLYFDSSNNVILKKYRNMV

SEQ ID NO: 48457 - protein, 32 aa, Artificial Sequence; identical to SEQ ID NO: 8579
  Cyclic GFR-binding peptide
  MOD_RES (1)..(32): Xaa is C or S

SEQ ID NO: 48458 - protein, 31 aa, Artificial Sequence
  Cyclic GFR-binding peptide
  MOD_RES (31)..(31): Xaa is C or S
PTKLSATSVLYYDDSSNVILRKHRNMVVRSX

SEQ ID NO: 48459 - protein, 37 aa, Artificial Sequence; identical to SEQ ID NO: 8580
  Cyclic GFR-binding peptide
  MOD_RES (5)..(6): Xaa is C or S

SEQ ID NO: 48460 - protein, 33 aa, Artificial Sequence
  Cyclic GFR-binding peptide
  MOD_RES (3)..(4): Xaa is C or S
KAXXAPTKLNAISVLYFDSSNNVILKKYRNMVV

SEQ ID NO: 48461 - protein, 26 aa, Artificial Sequence
  Cyclic GFR-binding peptide
TKLSPISVLYKDDSSNVILKYHYNMV

SEQ ID NO: 48462 - protein, 33 aa, Artificial Sequence
  Cyclic GFR-binding peptide
  MOD_RES (30)..(32): Xaa is C or S
PQALSAISILYLVGRKPKVLKNYQMIVRSXKXS

SEQ ID NO: 48463 - protein, 24 aa, Artificial Sequence
  Cyclic GFR-binding peptide
LSPISVLYKDSSNNVILKYHYNMV

SEQ ID NO: 48464 - protein, 26 aa, Artificial Sequence
  Cyclic GFR-binding peptide
  MOD_RES (1)..(1): Xaa is C or S
XVSQDLSATSILYYIGKTPKILRKHR

SEQ ID NO: 48465 - protein, 39 aa, Artificial Sequence; identical to SEQ ID NO: 8582
  Cyclic GFR-binding peptide
  MOD_RES (3)..(4)..(37)..(39): Xaa is C or S

SEQ ID NO: 48466 - protein, 34 aa, Artificial Sequence
  Cyclic GFR-binding peptide
  MOD_RES (5)..(6): Xaa is C or S
VPKPXXAPTKLSAISVLYLDDSSNVILKNYQNMV

SEQ ID NO: 48467 - protein, 31 aa, Artificial Sequence
  Cyclic GFR-binding peptide
  MOD_RES (28)..(30): Xaa is C or S
SAISVLYLDDMGVPTLKNYQEGMSVAEXGXR

SEQ ID NO: 48468 - protein, 34 aa, Artificial Sequence; identical to SEQ ID NO: 8585
  Cyclic GFR-binding peptide

SEQ ID NO: 48469 - protein, 35 aa, Artificial Sequence
  Cyclic GFR-binding peptide
  MOD_RES (5)..(6): Xaa is C or S
SASPXXVSQDLSATSILYYIGKTPKILRKHRMIVK

SEQ ID NO: 48470 - protein, 34 aa, Artificial Sequence; identical to SEQ ID NO: 8586
  Cyclic GFR-binding peptide
  MOD_RES (32)..(34): Xaa is C or S

SEQ ID NO: 48471 - protein, 34 aa, Artificial Sequence
  Cyclic GFR-binding peptide
  MOD_RES (6)..(7): Xaa is C or S
ASAAPXXVPQALNAISILYFVGRKPKVLKKYRMI

SEQ ID NO: 48472 - protein, 31 aa, Artificial Sequence; identical to SEQ ID NO: 8590
  Cyclic GFR-binding peptide
  MOD_RES (31)..(31): Xaa is C or S

SEQ ID NO: 48473 - protein, 30 aa, Artificial Sequence
  Cyclic GFR-binding peptide
  MOD_RES (4)..(5): Xaa is C or S
ASPXXVPQDLSPISILYKVGRTPKVLKYHY

SEQ ID NO: 48474 - protein, 30 aa, Artificial Sequence
  Cyclic GFR-binding peptide
  MOD_RES (1)..(2): Xaa is C or S
XXVPTKLSAISVLYLDDMGVPTLKNYQEGM

SEQ ID NO: 48475 - protein, 36 aa, Artificial Sequence; identical to SEQ ID NO: 8591
  Cyclic GFR-binding peptide
  MOD_RES (2)..(3)..(35): Xaa is C or S

SEQ ID NO: 48476 - protein, 39 aa, Artificial Sequence; identical to SEQ ID NO: 8592
  Cyclic GFR-binding peptide
  MOD_RES (6)..(7)..(39): Xaa is C or S

SEQ ID NO: 48477 - protein, 30 aa, Artificial Sequence
  Cyclic GFR-binding peptide
  MOD_RES (3)..(4): Xaa is C or S
KAXXVPTELSATSMLYYDENEKVVLRKHRD

SEQ ID NO: 48478 - protein, 34 aa, Artificial Sequence; identical to SEQ ID NO: 8593
  Cyclic GFR-binding peptide
  MOD_RES (31)..(33): Xaa is C or S

SEQ ID NO: 48479 - protein, 34 aa, Artificial Sequence
  Cyclic GFR-binding peptide
  MOD_RES (5)..(6): Xaa is C or S
SASPXXVPQDLSPISILYKVGRTPKVLKYHYMVV

SEQ ID NO: 48480 - protein, 30 aa, Artificial Sequence; identical to SEQ ID NO: 8594
  Cyclic GFR-binding peptide

SEQ ID NO: 48481 - protein, 25 aa, Artificial Sequence
  Cyclic GFR-binding peptide
LSAISVLYLDDSSNVILKNYQNMVV

SEQ ID NO: 48482 - protein, 23 aa, Artificial Sequence
  Cyclic GFR-binding peptide
TKLNAISVLYFDDMGVPTLKKYR

SEQ ID NO: 48483 - protein, 38 aa, Artificial Sequence; identical to SEQ ID NO: 8595
  Cyclic GFR-binding peptide
  MOD_RES (5)..(6)..(37): Xaa is C or S

SEQ ID NO: 48484 - protein, 38 aa, Artificial Sequence; identical to SEQ ID NO: 8596
  Cyclic GFR-binding peptide
  MOD_RES (6)..(7): Xaa is C or S

SEQ ID NO: 48485 - protein, 33 aa, Artificial Sequence
  Cyclic GFR-binding peptide
  MOD_RES (30)..(32): Xaa is C or S
TELNAISMLYFDENEKVVLKKYRDMVVEGXGXR

SEQ ID NO: 48486 - protein, 38 aa, Artificial Sequence; identical to SEQ ID NO: 8597
  Cyclic GFR-binding peptide
  MOD_RES (4)..(5)..(36)..(38): Xaa is C or S

SEQ ID NO: 48487 - protein, 31 aa, Artificial Sequence; identical to SEQ ID NO: 8598
  Cyclic GFR-binding peptide

SEQ ID NO: 48488 - protein, 35 aa, Artificial Sequence; identical to SEQ ID NO: 8600
  Cyclic GFR-binding peptide
  MOD_RES (3)..(4)..(35): Xaa is C or S

SEQ ID NO: 48489 - protein, 28 aa, Artificial Sequence
  Cyclic GFR-binding peptide
  MOD_RES (26)..(28): Xaa is C or S
SPISILYKVGRTPKVLKYHYMVVKSXKX

SEQ ID NO: 48490 - protein, 21 aa, Artificial Sequence
  Cyclic GFR-binding peptide
LSATSMLYYDENEKVVLRKHR

SEQ ID NO: 48491 - protein, 31 aa, Artificial Sequence
  Cyclic GFR-binding peptide
  MOD_RES (5)..(6): Xaa is C or S
VGKAXXVPTKLNAISVLYFDDMGVPTLKKYR

SEQ ID NO: 48492 - protein, 40 aa, Artificial Sequence; identical to SEQ ID NO: 8603
  Cyclic GFR-binding peptide
  MOD_RES (4)..(5)..(37)..(39): Xaa is C or S

SEQ ID NO: 48493 - protein, 23 aa, Artificial Sequence
  Cyclic GFR-binding peptide
LSATSMLYYDENEKVVLRKHRDM

SEQ ID NO: 48494 - protein, 21 aa, Artificial Sequence
  Cyclic GFR-binding peptide
SAISVLYLDSSNNVILKNYQN

SEQ ID NO: 48495 - protein, 36 aa, Artificial Sequence; identical to SEQ ID NO: 8606
  Cyclic GFR-binding peptide
  MOD_RES (35)..(35): Xaa is C or S

SEQ ID NO: 48496 - protein, 38 aa, Artificial Sequence; identical to SEQ ID NO: 8607
  Cyclic GFR-binding peptide
  MOD_RES (2)..(3)..(35)..(37): Xaa is C or S

SEQ ID NO: 48497 - protein, 34 aa, Artificial Sequence
  Cyclic GFR-binding peptide
  MOD_RES (1)..(1): Xaa is C or S
XRPTQVQLSAISVLYLEIVRKKPIFLKNYQTLED

SEQ ID NO: 48498 - protein, 34 aa, Artificial Sequence; identical to SEQ ID NO: 8609
  Cyclic GFR-binding peptide
  MOD_RES (1)..(33): Xaa is C or S

SEQ ID NO: 48499 - protein, 27 aa, Artificial Sequence
  Cyclic GFR-binding peptide
SAISVLYLDDMGVPTLKNYQEGMSVAE

SEQ ID NO: 48500 - protein, 32 aa, Artificial Sequence
  Cyclic GFR-binding peptide
  MOD_RES (30)..(32): Xaa is C or S
TQLSATSVLYYDDSSNVILRKHRNMVVRAXGX

SEQ ID NO: 48501 - protein, 25 aa, Artificial Sequence
  Cyclic GFR-binding peptide
VPTELSPISMLYKDENEKVVLKYHY

SEQ ID NO: 48502 - protein, 28 aa, Artificial Sequence
  Cyclic GFR-binding peptide
  MOD_RES (1)..(1): Xaa is C or S
XVPQALSATSILYYVGRKPKVLRKHRMI

SEQ ID NO: 48503 - protein, 39 aa, Artificial Sequence; identical to SEQ ID NO: 8612
  Cyclic GFR-binding peptide
  MOD_RES (7)..(39): Xaa is C or S

SEQ ID NO: 48504 - protein, 39 aa, Artificial Sequence; identical to SEQ ID NO: 8613
  Cyclic GFR-binding peptide
  MOD_RES (3)..(4)..(36)..(38): Xaa is C or S

SEQ ID NO: 48505 - protein, 45 aa, Artificial Sequence; identical to SEQ ID NO: 8614
  Cyclic GFR-binding peptide
  MOD_RES (5)..(42)..(44): Xaa is C or S

SEQ ID NO: 48506 - protein, 34 aa, Artificial Sequence; identical to SEQ ID NO: 8615
  Cyclic GFR-binding peptide
  MOD_RES (3)..(4): Xaa is C or S

SEQ ID NO: 48507 - protein, 24 aa, Artificial Sequence
  Cyclic GFR-binding peptide
KLNAISVLYFDDMGVPTLKKYREG

SEQ ID NO: 48508 - protein, 25 aa, Artificial Sequence
  Cyclic GFR-binding peptide
SAISVLYLEIVRKKPIFLKNYQTLE

SEQ ID NO: 48509 - protein, 27 aa, Artificial Sequence
  Cyclic GFR-binding peptide
PQDLSAISILYLVGRTPKVLKNYQMVV

SEQ ID NO: 48510 - protein, 36 aa, Artificial Sequence; identical to SEQ ID NO: 8617
  Cyclic GFR-binding peptide
  MOD_RES (3)..(4)..(35): Xaa is C or S

SEQ ID NO: 48511 - protein, 37 aa, Artificial Sequence; identical to SEQ ID NO: 8618
  Cyclic GFR-binding peptide
  MOD_RES (1)..(2)..(34)..(36): Xaa is C or S

SEQ ID NO: 48512 - protein, 27 aa, Artificial Sequence
  Cyclic GFR-binding peptide
  MOD_RES (1)..(1): Xaa is C or S
XVPTELSPISMLYKDEYDKVVLKYHYE

SEQ ID NO: 48513 - protein, 29 aa, Artificial Sequence
  Cyclic GFR-binding peptide
PQALSAISILYLVGRKPKVLKNYQMIVRS

SEQ ID NO: 48514 - protein, 30 aa, Artificial Sequence
  Cyclic GFR-binding peptide
  MOD_RES (30)..(30): Xaa is C or S
TELNAISMLYFDENEKVVLKKYRDMVVEGX

SEQ ID NO: 48515 - protein, 29 aa, Artificial Sequence
  Cyclic GFR-binding peptide
NAISVLYFEIVRKKPIFLKKYRTLEDHLA

SEQ ID NO: 48516 - protein, 36 aa, Artificial Sequence; identical to SEQ ID NO: 8619
  Cyclic GFR-binding peptide
  MOD_RES (1)..(2)..(34)..(36): Xaa is C or S

SEQ ID NO: 48517 - protein, 22 aa, Artificial Sequence
  Cyclic GFR-binding peptide
DLSPISILYKIGKTPKILKYHY

SEQ ID NO: 48518 - protein, 35 aa, Artificial Sequence; identical to SEQ ID NO: 8621
  Cyclic GFR-binding peptide
  MOD_RES (2)..(3)..(34): Xaa is C or S

SEQ ID NO: 48519 - protein, 29 aa, Artificial Sequence
  Cyclic GFR-binding peptide
VSQDLSATSILYYIGKTPKILRKHRMIVK

SEQ ID NO: 48520 - protein, 39 aa, Artificial Sequence; identical to SEQ ID NO: 8622
  Cyclic GFR-binding peptide
  MOD_RES (5)..(6)..(38): Xaa is C or S

SEQ ID NO: 48521 - protein, 33 aa, Artificial Sequence
  Cyclic GFR-binding peptide
  MOD_RES (33)..(33): Xaa is C or S
VQLSATSVLYYEIVRKKPIFLRKHRTLEDHLAX

SEQ ID NO: 48522 - protein, 28 aa, Artificial Sequence
  Cyclic GFR-binding peptide
LSPISVLYKEIVRKKPIFLKYHYTLEDH

SEQ ID NO: 48523 - protein, 35 aa, Artificial Sequence
  Cyclic GFR-binding peptide
  MOD_RES (6)..(7): Xaa is C or S
TVPKPXXAPTQLSAISVLYLDDSSNVILKNYQNMV

SEQ ID NO: 48524 - protein, 37 aa, Artificial Sequence; identical to SEQ ID NO: 8626
  Cyclic GFR-binding peptide
  MOD_RES (5)..(6): Xaa is C or S

SEQ ID NO: 48525 - protein, 39 aa, Artificial Sequence; identical to SEQ ID NO: 8629
  Cyclic GFR-binding peptide
  MOD_RES (6)..(7)..(38): Xaa is C or S

SEQ ID NO: 48526 - protein, 27 aa, Artificial Sequence
  Cyclic GFR-binding peptide
VPQALNAISILYFVGRKPKVLKKYRMI

SEQ ID NO: 48527 - protein, 32 aa, Artificial Sequence; identical to SEQ ID NO: 8630
  Cyclic GFR-binding peptide

SEQ ID NO: 48528 - protein, 28 aa, Artificial Sequence
  Cyclic GFR-binding peptide
  MOD_RES (26)..(28): Xaa is C or S
NAISILYFIGKTPKILKKYRMIVKSXKX

SEQ ID NO: 48529 - protein, 35 aa, Artificial Sequence; identical to SEQ ID NO: 8631
  Cyclic GFR-binding peptide
  MOD_RES (1)..(2)..(34): Xaa is C or S

SEQ ID NO: 48530 - protein, 31 aa, Artificial Sequence
  Cyclic GFR-binding peptide
  MOD_RES (31)..(31): Xaa is C or S
PTQLSPISVLYKDDSSNVILKYHYNMVVRAX

SEQ ID NO: 48531 - protein, 37 aa, Artificial Sequence; identical to SEQ ID NO: 8633
  Cyclic GFR-binding peptide
  MOD_RES (6)..(7): Xaa is C or S

SEQ ID NO: 48532 - protein, 36 aa, Artificial Sequence; identical to SEQ ID NO: 8635
  Cyclic GFR-binding peptide
  MOD_RES (5)..(5): Xaa is C or S

SEQ ID NO: 48533 - protein, 37 aa, Artificial Sequence; identical to SEQ ID NO: 8636
  Cyclic GFR-binding peptide
  MOD_RES (2)..(3)..(34)..(36): Xaa is C or S

SEQ ID NO: 48534 - protein, 34 aa, Artificial Sequence; identical to SEQ ID NO: 8637
  Cyclic GFR-binding peptide
  MOD_RES (2)..(3): Xaa is C or S

SEQ ID NO: 48535 - protein, 32 aa, Artificial Sequence
  Cyclic GFR-binding peptide
  MOD_RES (29)..(31): Xaa is C or S
QDLSAISILYLVGRTPKVLKNYQMVVKSXKXS

SEQ ID NO: 48536 - protein, 25 aa, Artificial Sequence
  Cyclic GFR-binding peptide
TKLSATSVLYYDDMGVPTLRKHREG

SEQ ID NO: 48537 - protein, 34 aa, Artificial Sequence
  Cyclic GFR-binding peptide
  MOD_RES (5)..(6): Xaa is C or S
VGKAXXVPTKLSAISVLYLDDMGVPTLKNYQEGM

SEQ ID NO: 48538 - protein, 34 aa, Artificial Sequence
  Cyclic GFR-binding peptide
  MOD_RES (6)..(7): Xaa is C or S
ASAAPXXVPQALSAISILYLVGRKPKVLKNYQMI

SEQ ID NO: 48539 - protein, 25 aa, Artificial Sequence
  Cyclic GFR-binding peptide
QLSAISVLYLDDSSNVILKNYQNMV

SEQ ID NO: 48540 - protein, 40 aa, Artificial Sequence; identical to SEQ ID NO: 8641
  Cyclic GFR-binding peptide
  MOD_RES (6)..(7)..(39): Xaa is C or S

SEQ ID NO: 48541 - protein, 32 aa, Artificial Sequence; identical to SEQ ID NO: 8642
  Cyclic GFR-binding peptide
  MOD_RES (1)..(2): Xaa is C or S

SEQ ID NO: 48542 - protein, 26 aa, Artificial Sequence
  Cyclic GFR-binding peptide
QDLSATSILYYIGKTPKILRKHRMIV

SEQ ID NO: 48543 - protein, 30 aa, Artificial Sequence
  Cyclic GFR-binding peptide
  MOD_RES (1)..(2): Xaa is C or S
XXAPTKLNAISVLYFDSSNNVILKKYRNMV

SEQ ID NO: 48544 - protein, 28 aa, Artificial Sequence
  Cyclic GFR-binding peptide
VPTELSATSMLYYDEYDKVVLRKHREMV

SEQ ID NO: 48545 - protein, 27 aa, Artificial Sequence
  Cyclic GFR-binding peptide
  MOD_RES (1)..(1): Xaa is C or S
XVPTELSATSMLYYDENEKVVLRKHRD

SEQ ID NO: 48546 - protein, 28 aa, Artificial Sequence
  Cyclic GFR-binding peptide
VSQDLSATSILYYIGKTPKILRKHRMIV

SEQ ID NO: 48547 - protein, 29 aa, Artificial Sequence
  Cyclic GFR-binding peptide
  MOD_RES (27)..(29): Xaa is C or S
SATSVLYYDDSSNVILRKHRNMVVRSXGX

SEQ ID NO: 48548 - protein, 37 aa, Artificial Sequence; identical to SEQ ID NO: 8645
  Cyclic GFR-binding peptide
  MOD_RES (2)..(2): Xaa is C or S

SEQ ID NO: 48549 - protein, 41 aa, Artificial Sequence; identical to SEQ ID NO: 8648
  Cyclic GFR-binding peptide
  MOD_RES (6)..(7)..(38)..(40): Xaa is C or S

SEQ ID NO: 48550 - protein, 33 aa, Artificial Sequence
  Cyclic GFR-binding peptide
  MOD_RES (5)..(6): Xaa is C or S
VGKAXXVPTKLNAISVLYFDDMGVPTLKKYREG

SEQ ID NO: 48551 - protein, 35 aa, Artificial Sequence; identical to SEQ ID NO: 8649
  Cyclic GFR-binding peptide
  MOD_RES (4)..(5): Xaa is C or S

SEQ ID NO: 48552 - protein, 35 aa, Artificial Sequence; identical to SEQ ID NO: 8650
  Cyclic GFR-binding peptide
  MOD_RES (1)..(2)..(34): Xaa is C or S

SEQ ID NO: 48553 - protein, 36 aa, Artificial Sequence; identical to SEQ ID NO: 8651
  Cyclic GFR-binding peptide
  MOD_RES (1)..(33)..(35): Xaa is C or S

SEQ ID NO: 48554 - protein, 30 aa, Artificial Sequence
  Cyclic GFR-binding peptide
  MOD_RES (2)..(3): Xaa is C or S
AXXVPTELNAISMLYFDEYDKVVLKKYREM

SEQ ID NO: 48555 - protein, 28 aa, Artificial Sequence
  Cyclic GFR-binding peptide
  MOD_RES (2)..(3): Xaa is C or S
AXXAPTKLSAISVLYLDSSNNVILKNYQ

SEQ ID NO: 48556 - protein, 30 aa, Artificial Sequence
  Cyclic GFR-binding peptide
QVQLSAISVLYLEIVRKKPIFLKNYQTLED

SEQ ID NO: 48557 - protein, 29 aa, Artificial Sequence
  Cyclic GFR-binding peptide
  MOD_RES (1)..(1): Xaa is C or S
XAPTQLSATSVLYYDDSSNVILRKHRNMV

SEQ ID NO: 48558 - protein, 30 aa, Artificial Sequence
  Cyclic GFR-binding peptide
  MOD_RES (4)..(5): Xaa is C or S
PKPXXAPTKLSPISVLYKDDSSNVILKYHY

SEQ ID NO: 48559 - protein, 26 aa, Artificial Sequence
  Cyclic GFR-binding peptide
PTKLSPISVLYKDDSSNVILKYHYNM

SEQ ID NO: 48560 - protein, 32 aa, Artificial Sequence
  Cyclic GFR-binding peptide
  MOD_RES (30)..(32): Xaa is C or S
SATSVLYYEIVRKKPIFLRKHRTLEDHLAXKX

SEQ ID NO: 48561 - protein, 23 aa, Artificial Sequence
  Cyclic GFR-binding peptide
DLNAISILYFVGRTPKVLKKYRM

SEQ ID NO: 48562 - protein, 26 aa, Artificial Sequence
  Cyclic GFR-binding peptide
NAISMLYFDENEKVVLKKYRDMVVEG

SEQ ID NO: 48563 - protein, 29 aa, Artificial Sequence
  Cyclic GFR-binding peptide
  MOD_RES (1)..(1): Xaa is C or S
XVPTELNAISMLYFDEYDKVVLKKYREMV

SEQ ID NO: 48564 - protein, 29 aa, Artificial Sequence
  Cyclic GFR-binding peptide
  MOD_RES (29)..(29): Xaa is C or S
QALNAISILYFVGRKPKVLKKYRMIVRSX

SEQ ID NO: 48565 - protein, 23 aa, Artificial Sequence
  Cyclic GFR-binding peptide
LNAISILYFVGRKPKVLKKYRMI

SEQ ID NO: 48566 - protein, 38 aa, Artificial Sequence; identical to SEQ ID NO: 8655
  Cyclic GFR-binding peptide
  MOD_RES (3)..(4)..(36)..(38): Xaa is C or S

SEQ ID NO: 48567 - protein, 34 aa, Artificial Sequence
  Cyclic GFR-binding peptide
  MOD_RES (31)..(33): Xaa is C or S
PTELSATSMLYYDENEKVVLRKHRDMVVEGXGXR

SEQ ID NO: 48568 - protein, 30 aa, Artificial Sequence
  Cyclic GFR-binding peptide
RPTQVQLSAISVLYLEIVRKKPIFLKNYQT

SEQ ID NO: 48569 - protein, 31 aa, Artificial Sequence
  Cyclic GFR-binding peptide
  MOD_RES (6)..(6): Xaa is C or S
VTKPTXAPTKLSATSVLYYDDSSNVILRKHR

SEQ ID NO: 48570 - protein, 35 aa, Artificial Sequence
  Cyclic GFR-binding peptide
  MOD_RES (5)..(6): Xaa is C or S
SAAPXXVPQALSPISILYKVGRKPKVLKYHYMIVR

SEQ ID NO: 48571 - protein, 30 aa, Artificial Sequence
  Cyclic GFR-binding peptide
  MOD_RES (1)..(1): Xaa is C or S
XVPQALSPISILYKVGRKPKVLKYHYMIVR

SEQ ID NO: 48572 - protein, 37 aa, Artificial Sequence; identical to SEQ ID NO: 8657
  Cyclic GFR-binding peptide
  MOD_RES (4)..(5)..(36): Xaa is C or S

SEQ ID NO: 48573 - protein, 33 aa, Artificial Sequence; identical to SEQ ID NO: 8658
  Cyclic GFR-binding peptide
  MOD_RES (1)..(2)..(33): Xaa is C or S

SEQ ID NO: 48574 - protein, 35 aa, Artificial Sequence
  Cyclic GFR-binding peptide
  MOD_RES (5)..(6): Xaa is C or S
IPKAXXVPTELSATSMLYYDENEKVVLRKHRDMVV

SEQ ID NO: 48575 - protein, 31 aa, Artificial Sequence; identical to SEQ ID NO: 8663
  Cyclic GFR-binding peptide

SEQ ID NO: 48576 - protein, 31 aa, Artificial Sequence
  Cyclic GFR-binding peptide
QLNAISVLYFEIVRKKPIFLKKYRTLEDHLA

SEQ ID NO: 48577 - protein, 26 aa, Artificial Sequence
  Cyclic GFR-binding peptide
LSPISMLYKDEYDKVVLKYHYEMVVE

SEQ ID NO: 48578 - protein, 32 aa, Artificial Sequence; identical to SEQ ID NO: 8664
  Cyclic GFR-binding peptide
  MOD_RES (31)..(31): Xaa is C or S

SEQ ID NO: 48579 - protein, 36 aa, Artificial Sequence; identical to SEQ ID NO: 8668
  Cyclic GFR-binding peptide
  MOD_RES (3)..(4)..(35): Xaa is C or S

SEQ ID NO: 48580 - protein, 42 aa, Artificial Sequence; identical to SEQ ID NO: 8670
  Cyclic GFR-binding peptide
  MOD_RES (2)..(39)..(41): Xaa is C or S

SEQ ID NO: 48581 - protein, 39 aa, Artificial Sequence; identical to SEQ ID NO: 8671
  Cyclic GFR-binding peptide
  MOD_RES (4)..(5)..(36)..(38): Xaa is C or S

SEQ ID NO: 48582 - protein, 30 aa, Artificial Sequence
  Cyclic GFR-binding peptide
  MOD_RES (30)..(30): Xaa is C or S
KLSAISVLYLDDMGVPTLKNYQEGMSVAEX

SEQ ID NO: 48583 - protein, 28 aa, Artificial Sequence
  Cyclic GFR-binding peptide
  MOD_RES (26)..(28): Xaa is C or S
SATSILYYIGKTPKILRKHRMIVKSXKX

SEQ ID NO: 48584 - protein, 28 aa, Artificial Sequence
  Cyclic GFR-binding peptide
  MOD_RES (26)..(28): Xaa is C or S
SPISILYKIGKTPKILKYHYMIVKSXKX

SEQ ID NO: 48585 - protein, 30 aa, Artificial Sequence; identical to SEQ ID NO: 8673
  Cyclic GFR-binding peptide

SEQ ID NO: 48586 - protein, 29 aa, Artificial Sequence
  Cyclic GFR-binding peptide
  MOD_RES (3)..(4): Xaa is C or S
KAXXVPTELNAISMLYFDEYDKVVLKKYR

SEQ ID NO: 48587 - protein, 38 aa, Artificial Sequence; identical to SEQ ID NO: 8675
  Cyclic GFR-binding peptide
  MOD_RES (6)..(7): Xaa is C or S

SEQ ID NO: 48588 - protein, 22 aa, Artificial Sequence
  Cyclic GFR-binding peptide
SPISVLYKEIVRKKPIFLKYHY

SEQ ID NO: 48589 - protein, 40 aa, Artificial Sequence; identical to SEQ ID NO: 8676
  Cyclic GFR-binding peptide
  MOD_RES (5)..(6)..(37)..(39): Xaa is C or S

SEQ ID NO: 48590 - protein, 37 aa, Artificial Sequence; identical to SEQ ID NO: 8677
  Cyclic GFR-binding peptide
  MOD_RES (4)..(36): Xaa is C or S

SEQ ID NO: 48591 - protein, 41 aa, Artificial Sequence; identical to SEQ ID NO: 8678
  Cyclic GFR-binding peptide
  MOD_RES (3)..(40): Xaa is C or S

SEQ ID NO: 48592 - protein, 28 aa, Artificial Sequence
  Cyclic GFR-binding peptide
  MOD_RES (27)..(27): Xaa is C or S
LNAISILYFVGRKPKVLKKYRMIVRSXK

SEQ ID NO: 48593 - protein, 26 aa, Artificial Sequence
  Cyclic GFR-binding peptide
PTELSATSMLYYDENEKVVLRKHRDM

SEQ ID NO: 48594 - protein, 27 aa, Artificial Sequence
  Cyclic GFR-binding peptide
  MOD_RES (27)..(27): Xaa is C or S
SPISMLYKDENEKVVLKYHYDMVVEGX

SEQ ID NO: 48595 - protein, 26 aa, Artificial Sequence
  Cyclic GFR-binding peptide
QLSPISVLYKEIVRKKPIFLKYHYTL

SEQ ID NO: 48596 - protein, 30 aa, Artificial Sequence
  Cyclic GFR-binding peptide
  MOD_RES (27)..(29): Xaa is C or S
SPISVLYKDDSSNVILKYHYNMVVRAXGXH

SEQ ID NO: 48597 - protein, 39 aa, Artificial Sequence; identical to SEQ ID NO: 8680
  Cyclic GFR-binding peptide
  MOD_RES (2)..(39): Xaa is C or S

SEQ ID NO: 48598 - protein, 24 aa, Artificial Sequence
  Cyclic GFR-binding peptide
PTELNAISMLYFDENEKVVLKKYR

SEQ ID NO: 48599 - protein, 33 aa, Artificial Sequence; identical to SEQ ID NO: 8681
  Cyclic GFR-binding peptide
  MOD_RES (3)..(3): Xaa is C or S

SEQ ID NO: 48600 - protein, 29 aa, Artificial Sequence
  Cyclic GFR-binding peptide
VPQALNAISILYFVGRKPKVLKKYRMIVR

SEQ ID NO: 48601 - protein, 28 aa, Artificial Sequence
  Cyclic GFR-binding peptide
  MOD_RES (26)..(28): Xaa is C or S
SATSILYYVGRTPKVLRKHRMVVKSXKX

SEQ ID NO: 48602 - protein, 34 aa, Artificial Sequence; identical to SEQ ID NO: 8682
  Cyclic GFR-binding peptide
  MOD_RES (1)..(33): Xaa is C or S

SEQ ID NO: 48603 - protein, 32 aa, Artificial Sequence
  Cyclic GFR-binding peptide
  MOD_RES (6)..(7): Xaa is C or S
YVPKPXXAPTKLSATSVLYYDDSSNVILRKHR

SEQ ID NO: 48604 - protein, 39 aa, Artificial Sequence; identical to SEQ ID NO: 8683
  Cyclic GFR-binding peptide
  MOD_RES (6)..(7)..(38): Xaa is C or S

SEQ ID NO: 48605 - protein, 37 aa, Artificial Sequence; identical to SEQ ID NO: 8685
  Cyclic GFR-binding peptide
  MOD_RES (1)..(2)..(35)..(37): Xaa is C or S

SEQ ID NO: 48606 - protein, 26 aa, Artificial Sequence
  Cyclic GFR-binding peptide
  MOD_RES (1)..(1): Xaa is C or S
XVPTELNAISMLYFDENEKVVLKKYR

SEQ ID NO: 48607 - protein, 32 aa, Artificial Sequence
  Cyclic GFR-binding peptide
  MOD_RES (29)..(31): Xaa is C or S
KLSPISVLYKDSSNNVILKYHYNMVVKAXGXH

SEQ ID NO: 48608 - protein, 27 aa, Artificial Sequence
  Cyclic GFR-binding peptide
PTELNAISMLYFDEYDKVVLKKYREMV

SEQ ID NO: 48609 - protein, 35 aa, Artificial Sequence
  Cyclic GFR-binding peptide
  MOD_RES (6)..(7): Xaa is C or S
ASAAPXXVPQALSATSILYYVGRKPKVLRKHRMIV

SEQ ID NO: 48610 - protein, 34 aa, Artificial Sequence
  Cyclic GFR-binding peptide
  MOD_RES (6)..(7): Xaa is C or S
KIPKAXXVPTELNAISMLYFDENEKVVLKKYRDM

SEQ ID NO: 48611 - protein, 32 aa, Artificial Sequence
  Cyclic GFR-binding peptide
  MOD_RES (5)..(6): Xaa is C or S
IPKAXXVPTELSPISMLYKDENEKVVLKYHYD

SEQ ID NO: 48612 - protein, 40 aa, Artificial Sequence; identical to SEQ ID NO: 8689
  Cyclic GFR-binding peptide
  MOD_RES (6)..(7)..(40): Xaa is C or S

SEQ ID NO: 48613 - protein, 29 aa, Artificial Sequence
  Cyclic GFR-binding peptide
  MOD_RES (1)..(2): Xaa is C or S
XXVPQALSATSILYYVGRKPKVLRKHRMI

SEQ ID NO: 48614 - protein, 40 aa, Artificial Sequence; identical to SEQ ID NO: 8690
  Cyclic GFR-binding peptide
  MOD_RES (3)..(40): Xaa is C or S

SEQ ID NO: 48615 - protein, 32 aa, Artificial Sequence; identical to SEQ ID NO: 8692
  Cyclic GFR-binding peptide
  MOD_RES (1)..(1): Xaa is C or S

SEQ ID NO: 48616 - protein, 25 aa, Artificial Sequence
  Cyclic GFR-binding peptide
KLSAISVLYLDDMGVPTLKNYQEGM

SEQ ID NO: 48617 - protein, 30 aa, Artificial Sequence
  Cyclic GFR-binding peptide
  MOD_RES (3)..(4): Xaa is C or S
KAXXVPTELSPISMLYKDEYDKVVLKYHYE

SEQ ID NO: 48618 - protein, 38 aa, Artificial Sequence; identical to SEQ ID NO: 8694
  Cyclic GFR-binding peptide
  MOD_RES (2)..(2): Xaa is C or S

SEQ ID NO: 48619 - protein, 28 aa, Artificial Sequence
  Cyclic GFR-binding peptide
PTQVQLSPISVLYKEIVRKKPIFLKYHY

SEQ ID NO: 48620 - protein, 35 aa, Artificial Sequence
  Cyclic GFR-binding peptide
  MOD_RES (7)..(7): Xaa is C or S
HVTKPTXAPTKLSPISVLYKDDSSNVILKYHYNMV

SEQ ID NO: 48621 - protein, 34 aa, Artificial Sequence; identical to SEQ ID NO: 8695
  Cyclic GFR-binding peptide
  MOD_RES (1)..(32)..(34): Xaa is C or S

SEQ ID NO: 48622 - protein, 40 aa, Artificial Sequence; identical to SEQ ID NO: 8696
  Cyclic GFR-binding peptide
  MOD_RES (5)..(5): Xaa is C or S

SEQ ID NO: 48623 - protein, 32 aa, Artificial Sequence; identical to SEQ ID NO: 8698
  Cyclic GFR-binding peptide
  MOD_RES (2)..(2): Xaa is C or S

SEQ ID NO: 48624 - protein, 21 aa, Artificial Sequence
  Cyclic GFR-binding peptide
SATSVLYYDDMGVPTLRKHRE

SEQ ID NO: 48625 - protein, 27 aa, Artificial Sequence
  Cyclic GFR-binding peptide
  MOD_RES (1)..(1): Xaa is C or S
XVPQDLSPISILYKVGRTPKVLKYHYM

SEQ ID NO: 48626 - protein, 36 aa, Artificial Sequence; identical to SEQ ID NO: 8699
  Cyclic GFR-binding peptide
  MOD_RES (1)..(33)..(35): Xaa is C or S

SEQ ID NO: 48627 - protein, 29 aa, Artificial Sequence
  Cyclic GFR-binding peptide
  MOD_RES (1)..(1): Xaa is C or S
XVSQDLSATSILYYIGKTPKILRKHRMIV

SEQ ID NO: 48628 - protein, 34 aa, Artificial Sequence
  Cyclic GFR-binding peptide
  MOD_RES (2)..(2): Xaa is C or S
QXRPTQVQLSATSVLYYEIVRKKPIFLRKHRTLE

SEQ ID NO: 48629 - protein, 37 aa, Artificial Sequence; identical to SEQ ID NO: 8701
  Cyclic GFR-binding peptide
  MOD_RES (3)..(4)..(36): Xaa is C or S

SEQ ID NO: 48630 - protein, 36 aa, Artificial Sequence; identical to SEQ ID NO: 8702
  Cyclic GFR-binding peptide
  MOD_RES (4)..(5)..(36): Xaa is C or S

SEQ ID NO: 48631 - protein, 29 aa, Artificial Sequence
  Cyclic GFR-binding peptide
  MOD_RES (28)..(28): Xaa is C or S
ALNAISILYFVGRKPKVLKKYRMIVRSXK

SEQ ID NO: 48632 - protein, 25 aa, Artificial Sequence
  Cyclic GFR-binding peptide
KLSPISVLYKDDSSNVILKYHYNMV

SEQ ID NO: 48633 - protein, 26 aa, Artificial Sequence
  Cyclic GFR-binding peptide
VPQDLNAISILYFVGRTPKVLKKYRM

SEQ ID NO: 48634 - protein, 32 aa, Artificial Sequence
  Cyclic GFR-binding peptide
  MOD_RES (2)..(3): Xaa is C or S
PXXVPQALSATSILYYVGRKPKVLRKHRMIVR

SEQ ID NO: 48635 - protein, 33 aa, Artificial Sequence
  Cyclic GFR-binding peptide
  MOD_RES (5)..(6): Xaa is C or S
SASPXXVSQDLSATSILYYIGKTPKILRKHRMI

SEQ ID NO: 48636 - protein, 22 aa, Artificial Sequence
  Cyclic GFR-binding peptide
KLNAISVLYFDDMGVPTLKKYR

SEQ ID NO: 48637 - protein, 35 aa, Artificial Sequence
  Cyclic GFR-binding peptide
  MOD_RES (34)..(34): Xaa is C or S
QVQLNAISVLYFEIVRKKPIFLKKYRTLEDHLAXK

SEQ ID NO: 48638 - protein, 31 aa, Artificial Sequence
  Cyclic GFR-binding peptide
  MOD_RES (5)..(6): Xaa is C or S
SASPXXVSQDLNAISILYFIGKTPKILKKYR

SEQ ID NO: 48639 - protein, 31 aa, Artificial Sequence
  Cyclic GFR-binding peptide
  MOD_RES (28)..(30): Xaa is C or S
DLSATSILYYIGKTPKILRKHRMIVKSXKXS

SEQ ID NO: 48640 - protein, 20 aa, Artificial Sequence
  Cyclic GFR-binding peptide
SAISMLYLDEYDKVVLKNYQ

SEQ ID NO: 48641 - protein, 23 aa, Artificial Sequence
  Cyclic GFR-binding peptide
TKLSATSVLYYDDSSNVILRKHR

SEQ ID NO: 48642 - protein, 21 aa, Artificial Sequence
  Cyclic GFR-binding peptide
LNAISILYFVGRTPKVLKKYR

SEQ ID NO: 48643 - protein, 42 aa, Artificial Sequence; identical to SEQ ID NO: 8708
  Cyclic GFR-binding peptide
  MOD_RES (5)..(6)..(39)..(41): Xaa is C or S

SEQ ID NO: 48644 - protein, 28 aa, Artificial Sequence
  Cyclic GFR-binding peptide
  MOD_RES (27)..(27): Xaa is C or S
NAISVLYFDSSNNVILKKYRNMVVKAXG

SEQ ID NO: 48645 - protein, 40 aa, Artificial Sequence; identical to SEQ ID NO: 8709
  Cyclic GFR-binding peptide
  MOD_RES (2)..(39): Xaa is C or S

SEQ ID NO: 48646 - protein, 32 aa, Artificial Sequence
  Cyclic GFR-binding peptide
  MOD_RES (30)..(32): Xaa is C or S
SQDLSATSILYYIGKTPKILRKHRMIVKSXKX

SEQ ID NO: 48647 - protein, 38 aa, Artificial Sequence; identical to SEQ ID NO: 8710
  Cyclic GFR-binding peptide
  MOD_RES (3)..(3): Xaa is C or S

SEQ ID NO: 48648 - protein, 38 aa, Artificial Sequence; identical to SEQ ID NO: 8712
  Cyclic GFR-binding peptide
  MOD_RES (4)..(5)..(37): Xaa is C or S

SEQ ID NO: 48649 - protein, 28 aa, Artificial Sequence
  Cyclic GFR-binding peptide
  MOD_RES (2)..(3): Xaa is C or S
PXXVSQDLNAISILYFIGKTPKILKKYR

SEQ ID NO: 48650 - protein, 34 aa, Artificial Sequence; identical to SEQ ID NO: 8714
  Cyclic GFR-binding peptide
  MOD_RES (3)..(4): Xaa is C or S

SEQ ID NO: 48651 - protein, 30 aa, Artificial Sequence
  Cyclic GFR-binding peptide
  MOD_RES (4)..(4): Xaa is C or S
KPTXAPTKLSAISVLYLDDSSNVILKNYQN

SEQ ID NO: 48652 - protein, 29 aa, Artificial Sequence
  Cyclic GFR-binding peptide
  MOD_RES (28)..(28): Xaa is C or S
ALSPISILYKVGRKPKVLKYHYMIVRSXK

SEQ ID NO: 48653 - protein, 26 aa, Artificial Sequence
  Cyclic GFR-binding peptide
LNAISMLYFDEYDKVVLKKYREMVVE

SEQ ID NO: 48654 - protein, 34 aa, Artificial Sequence
  Cyclic GFR-binding peptide
  MOD_RES (1)..(1): Xaa is C or S
XRPTQVQLNAISVLYFEIVRKKPIFLKKYRTLED

SEQ ID NO: 48655 - protein, 23 aa, Artificial Sequence
  Cyclic GFR-binding peptide
QDLSPISILYKVGRTPKVLKYHY

SEQ ID NO: 48656 - protein, 38 aa, Artificial Sequence; identical to SEQ ID NO: 8717
  Cyclic GFR-binding peptide
  MOD_RES (6)..(7): Xaa is C or S

SEQ ID NO: 48657 - protein, 39 aa, Artificial Sequence; identical to SEQ ID NO: 8719
  Cyclic GFR-binding peptide
  MOD_RES (5)..(6)..(39): Xaa is C or S

SEQ ID NO: 48658 - protein, 32 aa, Artificial Sequence; identical to SEQ ID NO: 8718
  Cyclic GFR-binding peptide
  MOD_RES (31)..(31): Xaa is C or S

SEQ ID NO: 48659 - protein, 31 aa, Artificial Sequence
  Cyclic GFR-binding peptide
  MOD_RES (29)..(31): Xaa is C or S
QALSATSILYYVGRKPKVLRKHRMIVRSXKX

SEQ ID NO: 48660 - protein, 35 aa, Artificial Sequence; identical to SEQ ID NO: 8720
  Cyclic GFR-binding peptide
  MOD_RES (1)..(2)..(34): Xaa is C or S

SEQ ID NO: 48661 - protein, 20 aa, Artificial Sequence
  Cyclic GFR-binding peptide
SAISILYLVGRTPKVLKNYQ

SEQ ID NO: 48662 - protein, 31 aa, Artificial Sequence
  Cyclic GFR-binding peptide
  MOD_RES (1)..(1): Xaa is C or S
XVPTKLSATSVLYYDDMGVPTLRKHREGMSV

SEQ ID NO: 48663 - protein, 31 aa, Artificial Sequence
  Cyclic GFR-binding peptide
  MOD_RES (29)..(31): Xaa is C or S
KLSAISVLYLDSSNNVILKNYQNMVVKAXGX

SEQ ID NO: 48664 - protein, 34 aa, Artificial Sequence; identical to SEQ ID NO: 8721
  Cyclic GFR-binding peptide
  MOD_RES (32)..(34): Xaa is C or S

SEQ ID NO: 48665 - protein, 29 aa, Artificial Sequence
  Cyclic GFR-binding peptide
  MOD_RES (3)..(4): Xaa is C or S
KPXXAPTKLSATSVLYYDDSSNVILRKHR

SEQ ID NO: 48666 - protein, 30 aa, Artificial Sequence; identical to SEQ ID NO: 8722
  Cyclic GFR-binding peptide

SEQ ID NO: 48667 - protein, 29 aa, Artificial Sequence
  Cyclic GFR-binding peptide
  MOD_RES (27)..(29): Xaa is C or S
NAISMLYFDEYDKVVLKKYREMVVEGXGX

SEQ ID NO: 48668 - protein, 28 aa, Artificial Sequence
  Cyclic GFR-binding peptide
  MOD_RES (1)..(2): Xaa is C or S
XXVPQDLSPISILYKVGRTPKVLKYHYM

SEQ ID NO: 48669 - protein, 37 aa, Artificial Sequence; identical to SEQ ID NO: 8723
  Cyclic GFR-binding peptide
  MOD_RES (2)..(3)..(35)..(37): Xaa is C or S

SEQ ID NO: 48670 - protein, 28 aa, Artificial Sequence
  Cyclic GFR-binding peptide
  MOD_RES (2)..(3): Xaa is C or S
PXXVPQDLSATSILYYVGRTPKVLRKHR

SEQ ID NO: 48671 - protein, 36 aa, Artificial Sequence; identical to SEQ ID NO: 8728
  Cyclic GFR-binding peptide
  MOD_RES (6)..(6): Xaa is C or S

SEQ ID NO: 48672 - protein, 32 aa, Artificial Sequence
  Cyclic GFR-binding peptide
  MOD_RES (30)..(32): Xaa is C or S
SQDLSPISILYKIGKTPKILKYHYMIVKSXKX

SEQ ID NO: 48673 - protein, 28 aa, Artificial Sequence
  Cyclic GFR-binding peptide
  MOD_RES (28)..(28): Xaa is C or S
NAISVLYFDDMGVPTLKKYREGMSVAEX

SEQ ID NO: 48674 - protein, 32 aa, Artificial Sequence
  Cyclic GFR-binding peptide
QVQLSATSVLYYEIVRKKPIFLRKHRTLEDHL

SEQ ID NO: 48675 - protein, 35 aa, Artificial Sequence
  Cyclic GFR-binding peptide
  MOD_RES (5)..(6): Xaa is C or S
VPKAXXAPTKLSAISVLYLDSSNNVILKNYQNMVV

SEQ ID NO: 48676 - protein, 31 aa, Artificial Sequence
  Cyclic GFR-binding peptide
  MOD_RES (2)..(3): Xaa is C or S
AXXAPTKLSPISVLYKDSSNNVILKYHYNMV

SEQ ID NO: 48677 - protein, 25 aa, Artificial Sequence
  Cyclic GFR-binding peptide
SPISILYKVGRKPKVLKYHYMIVRS

SEQ ID NO: 48678 - protein, 27 aa, Artificial Sequence
  Cyclic GFR-binding peptide
  MOD_RES (1)..(1): Xaa is C or S
XVPTKLNAISVLYFDDMGVPTLKKYRE

SEQ ID NO: 48679 - protein, 33 aa, Artificial Sequence
  Cyclic GFR-binding peptide
  MOD_RES (3)..(4): Xaa is C or S
SPXXVPQDLSPISILYKVGRTPKVLKYHYMVVK

SEQ ID NO: 48680 - protein, 25 aa, Artificial Sequence
  Cyclic GFR-binding peptide
VQLSPISVLYKEIVRKKPIFLKYHY

SEQ ID NO: 48681 - protein, 40 aa, Artificial Sequence; identical to SEQ ID NO: 8732
  Cyclic GFR-binding peptide
  MOD_RES (5)..(5): Xaa is C or S

SEQ ID NO: 48682 - protein, 28 aa, Artificial Sequence
  Cyclic GFR-binding peptide
  MOD_RES (1)..(2): Xaa is C or S
XXVPTKLNAISVLYFDDMGVPTLKKYRE

SEQ ID NO: 48683 - protein, 31 aa, Artificial Sequence
  Cyclic GFR-binding peptide
VQLSPISVLYKEIVRKKPIFLKYHYTLEDHL

SEQ ID NO: 48684 - protein, 29 aa, Artificial Sequence
  Cyclic GFR-binding peptide
  MOD_RES (2)..(3): Xaa is C or S
PXXVSQDLSAISILYLIGKTPKILKNYQM

SEQ ID NO: 48685 - protein, 37 aa, Artificial Sequence; identical to SEQ ID NO: 8733
  Cyclic GFR-binding peptide
  MOD_RES (4)..(5)..(37): Xaa is C or S

SEQ ID NO: 48686 - protein, 33 aa, Artificial Sequence; identical to SEQ ID NO: 8734
  Cyclic GFR-binding peptide
  MOD_RES (1)..(2): Xaa is C or S

SEQ ID NO: 48687 - protein, 39 aa, Artificial Sequence; identical to SEQ ID NO: 8735
  Cyclic GFR-binding peptide
  MOD_RES (4)..(5)..(37)..(39): Xaa is C or S

SEQ ID NO: 48688 - protein, 32 aa, Artificial Sequence
  Cyclic GFR-binding peptide
  MOD_RES (30)..(32): Xaa is C or S
TKLNAISVLYFDSSNNVILKKYRNMVVKAXGX

SEQ ID NO: 48689 - protein, 34 aa, Artificial Sequence
  Cyclic GFR-binding peptide
  MOD_RES (31)..(33): Xaa is C or S
PTKLNAISVLYFDSSNNVILKKYRNMVVKAXGXH

SEQ ID NO: 48690 - protein, 22 aa, Artificial Sequence
  Cyclic GFR-binding peptide
NAISILYFIGKTPKILKKYRMI

SEQ ID NO: 48691 - protein, 36 aa, Artificial Sequence
  Cyclic GFR-binding peptide
  MOD_RES (33)..(35): Xaa is C or S
VQLNAISVLYFEIVRKKPIFLKKYRTLEDHLAXKXE

SEQ ID NO: 48692 - protein, 30 aa, Artificial Sequence
  Cyclic GFR-binding peptide
  MOD_RES (2)..(3): Xaa is C or S
AXXVPTKLSAISVLYLDDMGVPTLKNYQEG

SEQ ID NO: 48693 - protein, 36 aa, Artificial Sequence; identical to SEQ ID NO: 8738
  Cyclic GFR-binding peptide
  MOD_RES (3)..(4)..(36): Xaa is C or S

SEQ ID NO: 48694 - protein, 35 aa, Artificial Sequence; identical to SEQ ID NO: 8739
  Cyclic GFR-binding peptide
  MOD_RES (32)..(34): Xaa is C or S

SEQ ID NO: 48695 - protein, 31 aa, Artificial Sequence
  Cyclic GFR-binding peptide
  MOD_RES (28)..(30): Xaa is C or S
LSPISMLYKDENEKVVLKYHYDMVVEGXGXR

SEQ ID NO: 48696 - protein, 23 aa, Artificial Sequence
  Cyclic GFR-binding peptide
LSAISVLYLDDSSNVILKNYQNM

SEQ ID NO: 48697 - protein, 33 aa, Artificial Sequence
  Cyclic GFR-binding peptide
  MOD_RES (30)..(32): Xaa is C or S
SQDLSAISILYLIGKTPKILKNYQMIVKSXKXS

SEQ ID NO: 48698 - protein, 23 aa, Artificial Sequence
  Cyclic GFR-binding peptide
QLSPISVLYKDDSSNVILKYHYN

SEQ ID NO: 48699 - protein, 32 aa, Artificial Sequence
  Cyclic GFR-binding peptide
VQLSAISVLYLEIVRKKPIFLKNYQTLEDHLA

SEQ ID NO: 48700 - protein, 35 aa, Artificial Sequence; identical to SEQ ID NO: 8742
  Cyclic GFR-binding peptide
  MOD_RES (4)..(5): Xaa is C or S

SEQ ID NO: 48701 - protein, 30 aa, Artificial Sequence
  Cyclic GFR-binding peptide
  MOD_RES (1)..(1): Xaa is C or S
XVSQDLSAISILYLIGKTPKILKNYQMIVK

SEQ ID NO: 48702 - protein, 23 aa, Artificial Sequence
  Cyclic GFR-binding peptide
ELNAISMLYFDEYDKVVLKKYRE

SEQ ID NO: 48703 - protein, 43 aa, Artificial Sequence; identical to SEQ ID NO: 8743
  Cyclic GFR-binding peptide
  MOD_RES (6)..(7)..(40)..(42): Xaa is C or S

SEQ ID NO: 48704 - protein, 30 aa, Artificial Sequence
  Cyclic GFR-binding peptide
  MOD_RES (28)..(30): Xaa is C or S
SAISVLYLDDMGVPTLKNYQEGMSVAEXGX

SEQ ID NO: 48705 - protein, 36 aa, Artificial Sequence; identical to SEQ ID NO: 8745
  Cyclic GFR-binding peptide
  MOD_RES (4)..(5): Xaa is C or S

SEQ ID NO: 48706 - protein, 31 aa, Artificial Sequence
  Cyclic GFR-binding peptide
  MOD_RES (29)..(31): Xaa is C or S
QDLNAISILYFVGRTPKVLKKYRMVVKSXKX

SEQ ID NO: 48707 - protein, 24 aa, Artificial Sequence
  Cyclic GFR-binding peptide
TQLSATSVLYYDDSSNVILRKHRN

SEQ ID NO: 48708 - protein, 36 aa, Artificial Sequence; identical to SEQ ID NO: 8748
  Cyclic GFR-binding peptide
  MOD_RES (2)..(3)..(35): Xaa is C or S

SEQ ID NO: 48709 - protein, 25 aa, Artificial Sequence
  Cyclic GFR-binding peptide
APTKLSPISVLYKDDSSNVILKYHY

SEQ ID NO: 48710 - protein, 24 aa, Artificial Sequence
  Cyclic GFR-binding peptide
QDLSPISILYKIGKTPKILKYHYM

SEQ ID NO: 48711 - protein, 33 aa, Artificial Sequence
  Cyclic GFR-binding peptide
  MOD_RES (3)..(4): Xaa is C or S
APXXVPQALNAISILYFVGRKPKVLKKYRMIVR

SEQ ID NO: 48712 - protein, 24 aa, Artificial Sequence
  Cyclic GFR-binding peptide
SATSVLYYEIVRKKPIFLRKHRTL

SEQ ID NO: 48713 - protein, 39 aa, Artificial Sequence; identical to SEQ ID NO: 8753
  Cyclic GFR-binding peptide
  MOD_RES (36)..(38): Xaa is C or S

SEQ ID NO: 48714 - protein, 30 aa, Artificial Sequence
  Cyclic GFR-binding peptide
QVQLSPISVLYKEIVRKKPIFLKYHYTLED

SEQ ID NO: 48715 - protein, 36 aa, Artificial Sequence; identical to SEQ ID NO: 8755
  Cyclic GFR-binding peptide
  MOD_RES (1)..(2)..(33)..(35): Xaa is C or S

SEQ ID NO: 48716 - protein, 33 aa, Artificial Sequence
  Cyclic GFR-binding peptide
  MOD_RES (4)..(5): Xaa is C or S
PKPXXAPTKLSAISVLYLDDSSNVILKNYQNMV

SEQ ID NO: 48717 - protein, 33 aa, Artificial Sequence; identical to SEQ ID NO: 8757
  Cyclic GFR-binding peptide
  MOD_RES (2)..(3): Xaa is C or S

SEQ ID NO: 48718 - protein, 37 aa, Artificial Sequence
  Cyclic GFR-binding peptide
  MOD_RES (6)..(7): Xaa is C or S
KVGKAXXVPTKLSATSVLYYDDMGVPTLRKHREGMSV

SEQ ID NO: 48719 - protein, 32 aa, Artificial Sequence
  Cyclic GFR-binding peptide
  MOD_RES (4)..(5): Xaa is C or S
ASPXXVPQDLSAISILYLVGRTPKVLKNYQMV

SEQ ID NO: 48720 - protein, 25 aa, Artificial Sequence
  Cyclic GFR-binding peptide
PTQLSATSVLYYDDSSNVILRKHRN

SEQ ID NO: 48721 - protein, 32 aa, Artificial Sequence
  Cyclic GFR-binding peptide
VQLSATSVLYYEIVRKKPIFLRKHRTLEDHLA

SEQ ID NO: 48722 - protein, 42 aa, Artificial Sequence; identical to SEQ ID NO: 8760
  Cyclic GFR-binding peptide
  MOD_RES (5)..(42): Xaa is C or S

SEQ ID NO: 48723 - protein, 34 aa, Artificial Sequence
  Cyclic GFR-binding peptide
  MOD_RES (3)..(3): Xaa is C or S
VQXRPTQVQLSAISVLYLEIVRKKPIFLKNYQTL

SEQ ID NO: 48724 - protein, 29 aa, Artificial Sequence
  Cyclic GFR-binding peptide
  MOD_RES (26)..(28): Xaa is C or S
SATSILYYVGRTPKVLRKHRMVVKSXKXS

SEQ ID NO: 48725 - protein, 30 aa, Artificial Sequence
  Cyclic GFR-binding peptide
  MOD_RES (29)..(29): Xaa is C or S
KLSAISVLYLDSSNNVILKNYQNMVVKAXG

SEQ ID NO: 48726 - protein, 24 aa, Artificial Sequence
  Cyclic GFR-binding peptide
ALNAISILYFVGRKPKVLKKYRMI

SEQ ID NO: 48727 - protein, 26 aa, Artificial Sequence
  Cyclic GFR-binding peptide
SATSVLYYDDMGVPTLRKHREGMSVA

SEQ ID NO: 48728 - protein, 29 aa, Artificial Sequence
  Cyclic GFR-binding peptide
PTELSPISMLYKDENEKVVLKYHYDMVVE

SEQ ID NO: 48729 - protein, 33 aa, Artificial Sequence
  Cyclic GFR-binding peptide
  MOD_RES (5)..(6): Xaa is C or S
VPKPXXAPTQLSATSVLYYDDSSNVILRKHRNM

SEQ ID NO: 48730 - protein, 28 aa, Artificial Sequence
  Cyclic GFR-binding peptide
VPTELNAISMLYFDEYDKVVLKKYREMV

SEQ ID NO: 48731 - protein, 28 aa, Artificial Sequence
  Cyclic GFR-binding peptide
  MOD_RES (28)..(28): Xaa is C or S
ALSATSILYYVGRKPKVLRKHRMIVRSX

SEQ ID NO: 48732 - protein, 22 aa, Artificial Sequence
  Cyclic GFR-binding peptide
SAISVLYLEIVRKKPIFLKNYQ

SEQ ID NO: 48733 - protein, 36 aa, Artificial Sequence; identical to SEQ ID NO: 8762
  Cyclic GFR-binding peptide
  MOD_RES (4)..(5): Xaa is C or S

SEQ ID NO: 48734 - protein, 25 aa, Artificial Sequence
  Cyclic GFR-binding peptide
LSPISMLYKDENEKVVLKYHYDMVV

SEQ ID NO: 48735 - protein, 36 aa, Artificial Sequence
  Cyclic GFR-binding peptide
  MOD_RES (4)..(5): Xaa is C or S
GKAXXVPTKLNAISVLYFDDMGVPTLKKYREGMSVA

SEQ ID NO: 48736 - protein, 33 aa, Artificial Sequence; identical to SEQ ID NO: 8764
  Cyclic GFR-binding peptide
  MOD_RES (32)..(32): Xaa is C or S

SEQ ID NO: 48737 - protein, 32 aa, Artificial Sequence; identical to SEQ ID NO: 8765
  Cyclic GFR-binding peptide
  MOD_RES (1)..(32): Xaa is C or S

SEQ ID NO: 48738 - protein, 30 aa, Artificial Sequence
  Cyclic GFR-binding peptide
  MOD_RES (4)..(5): Xaa is C or S
ASPXXVPQDLSATSILYYVGRTPKVLRKHR

SEQ ID NO: 48739 - protein, 40 aa, Artificial Sequence; identical to SEQ ID NO: 8766
  Cyclic GFR-binding peptide
  MOD_RES (6)..(7)..(39): Xaa is C or S

SEQ ID NO: 48740 - protein, 40 aa, Artificial Sequence; identical to SEQ ID NO: 8767
  Cyclic GFR-binding peptide
  MOD_RES (7)..(39): Xaa is C or S

SEQ ID NO: 48741 - protein, 20 aa, Artificial Sequence
  Cyclic GFR-binding peptide
NAISILYFVGRTPKVLKKYR

SEQ ID NO: 48742 - protein, 26 aa, Artificial Sequence
  Cyclic GFR-binding peptide
LSATSVLYYEIVRKKPIFLRKHRTLE

SEQ ID NO: 48743 - protein, 23 aa, Artificial Sequence
  Cyclic GFR-binding peptide
NAISVLYFEIVRKKPIFLKKYRT

SEQ ID NO: 48744 - protein, 36 aa, Artificial Sequence; identical to SEQ ID NO: 8771
  Cyclic GFR-binding peptide
  MOD_RES (4)..(5): Xaa is C or S

SEQ ID NO: 48745 - protein, 30 aa, Artificial Sequence
  Cyclic GFR-binding peptide
  MOD_RES (29)..(29): Xaa is C or S
KLSATSVLYYDDSSNVILRKHRNMVVRSXG

SEQ ID NO: 48746 - protein, 33 aa, Artificial Sequence
  Cyclic GFR-binding peptide
  MOD_RES (6)..(7): Xaa is C or S
ASAAPXXVPQALSATSILYYVGRKPKVLRKHRM

SEQ ID NO: 48747 - protein, 27 aa, Artificial Sequence
  Cyclic GFR-binding peptide
  MOD_RES (1)..(1): Xaa is C or S
XVPQALNAISILYFVGRKPKVLKKYRM

SEQ ID NO: 48748 - protein, 31 aa, Artificial Sequence
  Cyclic GFR-binding peptide
  MOD_RES (2)..(3): Xaa is C or S
PXXVSQDLSPISILYKIGKTPKILKYHYMIV

SEQ ID NO: 48749 - protein, 26 aa, Artificial Sequence
  Cyclic GFR-binding peptide
ALNAISILYFVGRKPKVLKKYRMIVR

SEQ ID NO: 48750 - protein, 41 aa, Artificial Sequence; identical to SEQ ID NO: 8775
  Cyclic GFR-binding peptide
  MOD_RES (5)..(6)..(38)..(40): Xaa is C or S

SEQ ID NO: 48751 - protein, 41 aa, Artificial Sequence; identical to SEQ ID NO: 8777
  Cyclic GFR-binding peptide
  MOD_RES (5)..(6)..(38)..(40): Xaa is C or S

SEQ ID NO: 48752 - protein, 33 aa, Artificial Sequence
  Cyclic GFR-binding peptide
  MOD_RES (30)..(32): Xaa is C or S
TELSPISMLYKDENEKVVLKYHYDMVVEGXGXR

SEQ ID NO: 48753 - protein, 24 aa, Artificial Sequence
  Cyclic GFR-binding peptide
LSATSILYYVGRTPKVLRKHRMVV

SEQ ID NO: 48754 - protein, 32 aa, Artificial Sequence; identical to SEQ ID NO: 8778
  Cyclic GFR-binding peptide
  MOD_RES (31)..(31): Xaa is C or S

SEQ ID NO: 48755 - protein, 28 aa, Artificial Sequence
  Cyclic GFR-binding peptide
  MOD_RES (2)..(3): Xaa is C or S
PXXAPTQLSAISVLYLDDSSNVILKNYQ

SEQ ID NO: 48756 - protein, 27 aa, Artificial Sequence
  Cyclic GFR-binding peptide
PTQLSATSVLYYDDSSNVILRKHRNMV

SEQ ID NO: 48757 - protein, 38 aa, Artificial Sequence; identical to SEQ ID NO: 8781
  Cyclic GFR-binding peptide
  MOD_RES (3)..(3): Xaa is C or S

SEQ ID NO: 48758 - protein, 28 aa, Artificial Sequence
  Cyclic GFR-binding peptide
  MOD_RES (2)..(3): Xaa is C or S
PXXVSQDLSAISILYLIGKTPKILKNYQ

SEQ ID NO: 48759 - protein, 26 aa, Artificial Sequence
  Cyclic GFR-binding peptide
SQDLSATSILYYIGKTPKILRKHRMI

SEQ ID NO: 48760 - protein, 31 aa, Artificial Sequence
  Cyclic GFR-binding peptide
VPTKLSATSVLYYDDMGVPTLRKHREGMSVA

SEQ ID NO: 48761 - protein, 37 aa, Artificial Sequence; identical to SEQ ID NO: 8783
  Cyclic GFR-binding peptide
  MOD_RES (1)..(2)..(34)..(36): Xaa is C or S

SEQ ID NO: 48762 - protein, 27 aa, Artificial Sequence
  Cyclic GFR-binding peptide
LSPISMLYKDEYDKVVLKYHYEMVVEG

SEQ ID NO: 48763 - protein, 35 aa, Artificial Sequence
  Cyclic GFR-binding peptide
  MOD_RES (6)..(7): Xaa is C or S
YVPKPXXAPTKLSPISVLYKDDSSNVILKYHYNMV

SEQ ID NO: 48764 - protein, 39 aa, Artificial Sequence; identical to SEQ ID NO: 8784
  Cyclic GFR-binding peptide
  MOD_RES (5)..(5): Xaa is C or S

SEQ ID NO: 48765 - protein, 26 aa, Artificial Sequence
  Cyclic GFR-binding peptide
APTKLSAISVLYLDSSNNVILKNYQN

SEQ ID NO: 48766 - protein, 35 aa, Artificial Sequence; identical to SEQ ID NO: 8787
  Cyclic GFR-binding peptide
  MOD_RES (4)..(5): Xaa is C or S

SEQ ID NO: 48767 - protein, 36 aa, Artificial Sequence; identical to SEQ ID NO: 8788
  Cyclic GFR-binding peptide
  MOD_RES (3)..(4)..(36): Xaa is C or S

SEQ ID NO: 48768 - protein, 31 aa, Artificial Sequence
  Cyclic GFR-binding peptide
  MOD_RES (5)..(6): Xaa is C or S
VPKAXXAPTKLSAISVLYLDSSNNVILKNYQ

SEQ ID NO: 48769 - protein, 42 aa, Artificial Sequence; identical to SEQ ID NO: 8790
  Cyclic GFR-binding peptide
  MOD_RES (4)..(41): Xaa is C or S

SEQ ID NO: 48770 - protein, 34 aa, Artificial Sequence
  Cyclic GFR-binding peptide
  MOD_RES (4)..(5): Xaa is C or S
ASPXXVSQDLNAISILYFIGKTPKILKKYRMIVK

SEQ ID NO: 48771 - protein, 26 aa, Artificial Sequence
  Cyclic GFR-binding peptide
TKLNAISVLYFDSSNNVILKKYRNMV

SEQ ID NO: 48772 - protein, 27 aa, Artificial Sequence
  Cyclic GFR-binding peptide
  MOD_RES (1)..(2): Xaa is C or S
XXAPTQLSPISVLYKDDSSNVILKYHY

SEQ ID NO: 48773 - protein, 39 aa, Artificial Sequence; identical to SEQ ID NO: 8792
  Cyclic GFR-binding peptide
  MOD_RES (4)..(5)..(37)..(39): Xaa is C or S

SEQ ID NO: 48774 - protein, 35 aa, Artificial Sequence
  Cyclic GFR-binding peptide
  MOD_RES (33)..(35): Xaa is C or S
VQLSAISVLYLEIVRKKPIFLKNYQTLEDHLAXKX

SEQ ID NO: 48775 - protein, 32 aa, Artificial Sequence
  Cyclic GFR-binding peptide
  MOD_RES (30)..(32): Xaa is C or S
PQDLSATSILYYVGRTPKVLRKHRMVVKSXKX

SEQ ID NO: 48776 - protein, 35 aa, Artificial Sequence; identical to SEQ ID NO: 8793
  Cyclic GFR-binding peptide
  MOD_RES (2)..(3)..(34): Xaa is C or S

SEQ ID NO: 48777 - protein, 31 aa, Artificial Sequence
  Cyclic GFR-binding peptide
  MOD_RES (29)..(31): Xaa is C or S
KLSPISVLYKDDSSNVILKYHYNMVVRSXGX

SEQ ID NO: 48778 - protein, 35 aa, Artificial Sequence; identical to SEQ ID NO: 8796
  Cyclic GFR-binding peptide
  MOD_RES (4)..(5): Xaa is C or S

SEQ ID NO: 48779 - protein, 38 aa, Artificial Sequence; identical to SEQ ID NO: 8798
  Cyclic GFR-binding peptide
  MOD_RES (3)..(4)..(36)..(38): Xaa is C or S

SEQ ID NO: 48780 - protein, 40 aa, Artificial Sequence; identical to SEQ ID NO: 8799
  Cyclic GFR-binding peptide
  MOD_RES (6)..(7)..(39): Xaa is C or S

SEQ ID NO: 48781 - protein, 30 aa, Artificial Sequence
  Cyclic GFR-binding peptide
  MOD_RES (27)..(29): Xaa is C or S
LSATSILYYVGRKPKVLRKHRMIVRSXKXS

SEQ ID NO: 48782 - protein, 33 aa, Artificial Sequence; identical to SEQ ID NO: 8800
  Cyclic GFR-binding peptide
  MOD_RES (1)..(2)..(33): Xaa is C or S

SEQ ID NO: 48783 - protein, 23 aa, Artificial Sequence
  Cyclic GFR-binding peptide
LSATSILYYIGKTPKILRKHRMI

SEQ ID NO: 48784 - protein, 37 aa, Artificial Sequence
  Cyclic GFR-binding peptide
  MOD_RES (6)..(7): Xaa is C or S
KVGKAXXVPTKLNAISVLYFDDMGVPTLKKYREGMSV

SEQ ID NO: 48785 - protein, 31 aa, Artificial Sequence; identical to SEQ ID NO: 8801
  Cyclic GFR-binding peptide
  MOD_RES (1)..(1): Xaa is C or S

SEQ ID NO: 48786 - protein, 30 aa, Artificial Sequence
  Cyclic GFR-binding peptide
  MOD_RES (4)..(5): Xaa is C or S
PKAXXVPTELSPISMLYKDEYDKVVLKYHY

SEQ ID NO: 48787 - protein, 31 aa, Artificial Sequence
  Cyclic GFR-binding peptide
  MOD_RES (5)..(6): Xaa is C or S
SASPXXVSQDLSAISILYLIGKTPKILKNYQ

SEQ ID NO: 48788 - protein, 21 aa, Artificial Sequence
  Cyclic GFR-binding peptide
LSAISILYLVGRTPKVLKNYQ

SEQ ID NO: 48789 - protein, 23 aa, Artificial Sequence
  Cyclic GFR-binding peptide
QALSATSILYYVGRKPKVLRKHR

SEQ ID NO: 48790 - protein, 29 aa, Artificial Sequence
  Cyclic GFR-binding peptide
QLSAISVLYLEIVRKKPIFLKNYQTLEDH

SEQ ID NO: 48791 - protein, 36 aa, Artificial Sequence; identical to SEQ ID NO: 8807
  Cyclic GFR-binding peptide
  MOD_RES (1)..(2)..(34)..(36): Xaa is C or S

SEQ ID NO: 48792 - protein, 28 aa, Artificial Sequence
  Cyclic GFR-binding peptide
PTELSPISMLYKDEYDKVVLKYHYEMVV

SEQ ID NO: 48793 - protein, 36 aa, Artificial Sequence; identical to SEQ ID NO: 8808
  Cyclic GFR-binding peptide
  MOD_RES (5)..(6): Xaa is C or S

SEQ ID NO: 48794 - protein, 29 aa, Artificial Sequence
  Cyclic GFR-binding peptide
RPTQVQLNAISVLYFEIVRKKPIFLKKYR

SEQ ID NO: 48795 - protein, 32 aa, Artificial Sequence
  Cyclic GFR-binding peptide
  MOD_RES (31)..(31): Xaa is C or S
PTELSPISMLYKDEYDKVVLKYHYEMVVEGXG

SEQ ID NO: 48796 - protein, 34 aa, Artificial Sequence; identical to SEQ ID NO: 8809
  Cyclic GFR-binding peptide
  MOD_RES (1)..(2)..(33): Xaa is C or S

SEQ ID NO: 48797 - protein, 24 aa, Artificial Sequence
  Cyclic GFR-binding peptide
TKLNAISVLYFDSSNNVILKKYRN

SEQ ID NO: 48798 - protein, 40 aa, Artificial Sequence; identical to SEQ ID NO: 8811
  Cyclic GFR-binding peptide
  MOD_RES (5)..(37)..(39): Xaa is C or S

SEQ ID NO: 48799 - protein, 42 aa, Artificial Sequence; identical to SEQ ID NO: 8812
  Cyclic GFR-binding peptide
  MOD_RES (3)..(40)..(42): Xaa is C or S

SEQ ID NO: 48800 - protein, 30 aa, Artificial Sequence
  Cyclic GFR-binding peptide
  MOD_RES (27)..(29): Xaa is C or S
SPISVLYKDDSSNVILKYHYNMVVRSXGXH

SEQ ID NO: 48801 - protein, 25 aa, Artificial Sequence
  Cyclic GFR-binding peptide
DLSPISILYKVGRTPKVLKYHYMVV

SEQ ID NO: 48802 - protein, 26 aa, Artificial Sequence
  Cyclic GFR-binding peptide
PQDLSATSILYYVGRTPKVLRKHRMV

SEQ ID NO: 48803 - protein, 26 aa, Artificial Sequence
  Cyclic GFR-binding peptide
QVQLSATSVLYYEIVRKKPIFLRKHR

SEQ ID NO: 48804 - protein, 26 aa, Artificial Sequence
  Cyclic GFR-binding peptide
PQALSAISILYLVGRKPKVLKNYQMI

SEQ ID NO: 48805 - protein, 31 aa, Artificial Sequence
  Cyclic GFR-binding peptide
  MOD_RES (31)..(31): Xaa is C or S
PTKLSAISVLYLDSSNNVILKNYQNMVVKAX

SEQ ID NO: 48806 - protein, 37 aa, Artificial Sequence; identical to SEQ ID NO: 8813
  Cyclic GFR-binding peptide
  MOD_RES (6)..(7): Xaa is C or S

SEQ ID NO: 48807 - protein, 27 aa, Artificial Sequence
  Cyclic GFR-binding peptide
  MOD_RES (27)..(27): Xaa is C or S
LSATSILYYVGRKPKVLRKHRMIVRSX

SEQ ID NO: 48808 - protein, 24 aa, Artificial Sequence
  Cyclic GFR-binding peptide
NAISILYFVGRTPKVLKKYRMVVK

SEQ ID NO: 48809 - protein, 22 aa, Artificial Sequence
  Cyclic GFR-binding peptide
KLSAISVLYLDDSSNVILKNYQ

SEQ ID NO: 48810 - protein, 28 aa, Artificial Sequence
  Cyclic GFR-binding peptide
  MOD_RES (3)..(3): Xaa is C or S
PTXAPTKLSAISVLYLDDSSNVILKNYQ

SEQ ID NO: 48811 - protein, 28 aa, Artificial Sequence
  Cyclic GFR-binding peptide
QLSATSVLYYDDSSNVILRKHRNMVVRA

SEQ ID NO: 48812 - protein, 42 aa, Artificial Sequence; identical to SEQ ID NO: 8817
  Cyclic GFR-binding peptide
  MOD_RES (6)..(7)..(40)..(42): Xaa is C or S

SEQ ID NO: 48813 - protein, 32 aa, Artificial Sequence
  Cyclic GFR-binding peptide
  MOD_RES (6)..(7): Xaa is C or S
YVPKPXXAPTKLSPISVLYKDDSSNVILKYHY

SEQ ID NO: 48814 - protein, 22 aa, Artificial Sequence
  Cyclic GFR-binding peptide
KLSAISVLYLDDMGVPTLKNYQ

SEQ ID NO: 48815 - protein, 35 aa, Artificial Sequence
  Cyclic GFR-binding peptide
  MOD_RES (4)..(4): Xaa is C or S
NVQXRPTQVQLSATSVLYYEIVRKKPIFLRKHRTL

SEQ ID NO: 48816 - protein, 40 aa, Artificial Sequence; identical to SEQ ID NO: 8819
  Cyclic GFR-binding peptide
  MOD_RES (2)..(39): Xaa is C or S

SEQ ID NO: 48817 - protein, 33 aa, Artificial Sequence
  Cyclic GFR-binding peptide
  MOD_RES (31)..(33): Xaa is C or S
LNAISVLYFEIVRKKPIFLKKYRTLEDHLAXKX

SEQ ID NO: 48818 - protein, 26 aa, Artificial Sequence
  Cyclic GFR-binding peptide
  MOD_RES (1)..(1): Xaa is C or S
XAPTKLSAISVLYLDDSSNVILKNYQ

SEQ ID NO: 48819 - protein, 31 aa, Artificial Sequence
  Cyclic GFR-binding peptide
  MOD_RES (30)..(30): Xaa is C or S
PQALSPISILYKVGRKPKVLKYHYMIVRSXK

SEQ ID NO: 48820 - protein, 30 aa, Artificial Sequence
  Cyclic GFR-binding peptide
  MOD_RES (27)..(29): Xaa is C or S
SAISVLYLDSSNNVILKNYQNMVVKAXGXH

SEQ ID NO: 48821 - protein, 35 aa, Artificial Sequence
  Cyclic GFR-binding peptide
  MOD_RES (5)..(6): Xaa is C or S
VPKPXXAPTKLSAISVLYLDDSSNVILKNYQNMVV

SEQ ID NO: 48822 - protein, 30 aa, Artificial Sequence; identical to SEQ ID NO: 8820
  Cyclic GFR-binding peptide

SEQ ID NO: 48823 - protein, 27 aa, Artificial Sequence
  Cyclic GFR-binding peptide
  MOD_RES (1)..(2): Xaa is C or S
XXAPTKLSAISVLYLDDSSNVILKNYQ

SEQ ID NO: 48824 - protein, 42 aa, Artificial Sequence; identical to SEQ ID NO: 8822
  Cyclic GFR-binding peptide
  MOD_RES (5)..(6)..(39)..(41): Xaa is C or S

SEQ ID NO: 48825 - protein, 36 aa, Artificial Sequence
  Cyclic GFR-binding peptide
  MOD_RES (34)..(36): Xaa is C or S
QVQLNAISVLYFEIVRKKPIFLKKYRTLEDHLAXKX

SEQ ID NO: 48826 - protein, 25 aa, Artificial Sequence
  Cyclic GFR-binding peptide
LSPISVLYKEIVRKKPIFLKYHYTL

SEQ ID NO: 48827 - protein, 26 aa, Artificial Sequence
  Cyclic GFR-binding peptide
PQALNAISILYFVGRKPKVLKKYRMI

SEQ ID NO: 48828 - protein, 34 aa, Artificial Sequence
  Cyclic GFR-binding peptide
  MOD_RES (3)..(4): Xaa is C or S
KAXXVPTKLNAISVLYFDDMGVPTLKKYREGMSV

SEQ ID NO: 48829 - protein, 34 aa, Artificial Sequence
  Cyclic GFR-binding peptide
  MOD_RES (4)..(5): Xaa is C or S
AAPXXVPQALSATSILYYVGRKPKVLRKHRMIVR

SEQ ID NO: 48830 - protein, 27 aa, Artificial Sequence
  Cyclic GFR-binding peptide
PTELSATSMLYYDENEKVVLRKHRDMV

SEQ ID NO: 48831 - protein, 25 aa, Artificial Sequence
  Cyclic GFR-binding peptide
LNAISVLYFDDMGVPTLKKYREGMS

SEQ ID NO: 48832 - protein, 21 aa, Artificial Sequence
  Cyclic GFR-binding peptide
SATSVLYYDDSSNVILRKHRN

SEQ ID NO: 48833 - protein, 29 aa, Artificial Sequence
  Cyclic GFR-binding peptide
  MOD_RES (1)..(1): Xaa is C or S
XVPTELNAISMLYFDENEKVVLKKYRDMV

SEQ ID NO: 48834 - protein, 37 aa, Artificial Sequence; identical to SEQ ID NO: 8829
  Cyclic GFR-binding peptide
  MOD_RES (4)..(36): Xaa is C or S

SEQ ID NO: 48835 - protein, 33 aa, Artificial Sequence; identical to SEQ ID NO: 8830
  Cyclic GFR-binding peptide
  MOD_RES (31)..(33): Xaa is C or S

SEQ ID NO: 48836 - protein, 34 aa, Artificial Sequence
  Cyclic GFR-binding peptide
  MOD_RES (6)..(7): Xaa is C or S
YVPKPXXAPTKLSATSVLYYDDSSNVILRKHRNM

SEQ ID NO: 48837 - protein, 34 aa, Artificial Sequence
  Cyclic GFR-binding peptide
  MOD_RES (5)..(6): Xaa is C or S
IPKAXXVPTELSPISMLYKDENEKVVLKYHYDMV

SEQ ID NO: 48838 - protein, 33 aa, Artificial Sequence
  Cyclic GFR-binding peptide
  MOD_RES (6)..(7): Xaa is C or S
AVPKAXXAPTKLNAISVLYFDSSNNVILKKYRN

SEQ ID NO: 48839 - protein, 23 aa, Artificial Sequence
  Cyclic GFR-binding peptide
LSAISILYLVGRKPKVLKNYQMI

SEQ ID NO: 48840 - protein, 30 aa, Artificial Sequence
  Cyclic GFR-binding peptide
QVQLNAISVLYFEIVRKKPIFLKKYRTLED

SEQ ID NO: 48841 - protein, 37 aa, Artificial Sequence; identical to SEQ ID NO: 8834
  Cyclic GFR-binding peptide
  MOD_RES (2)..(3)..(36): Xaa is C or S

SEQ ID NO: 48842 - protein, 33 aa, Artificial Sequence
  Cyclic GFR-binding peptide
  MOD_RES (4)..(4): Xaa is C or S
KPTXAPTKLSATSVLYYDDSSNVILRKHRNMVV

SEQ ID NO: 48843 - protein, 35 aa, Artificial Sequence; identical to SEQ ID NO: 8837
  Cyclic GFR-binding peptide
  MOD_RES (4)..(5): Xaa is C or S

SEQ ID NO: 48844 - protein, 28 aa, Artificial Sequence
  Cyclic GFR-binding peptide
  MOD_RES (2)..(3): Xaa is C or S
PXXVPQALSATSILYYVGRKPKVLRKHR

SEQ ID NO: 48845 - protein, 20 aa, Artificial Sequence
  Cyclic GFR-binding peptide
SPISMLYKDENEKVVLKYHY

SEQ ID NO: 48846 - protein, 31 aa, Artificial Sequence
  Cyclic GFR-binding peptide
  MOD_RES (5)..(6): Xaa is C or S
SASPXXVPQDLSPISILYKVGRTPKVLKYHY

SEQ ID NO: 48847 - protein, 35 aa, Artificial Sequence
  Cyclic GFR-binding peptide
  MOD_RES (6)..(7): Xaa is C or S
SIPKAXXVPTELSATSMLYYDEYDKVVLRKHREMV

SEQ ID NO: 48848 - protein, 33 aa, Artificial Sequence
  Cyclic GFR-binding peptide
  MOD_RES (5)..(6): Xaa is C or S
SASPXXVPQDLSATSILYYVGRTPKVLRKHRMV

SEQ ID NO: 48849 - protein, 24 aa, Artificial Sequence
  Cyclic GFR-binding peptide
SQDLSPISILYKIGKTPKILKYHY

SEQ ID NO: 48850 - protein, 34 aa, Artificial Sequence; identical to SEQ ID NO: 8841
  Cyclic GFR-binding peptide
  MOD_RES (2)..(3): Xaa is C or S

SEQ ID NO: 48851 - protein, 31 aa, Artificial Sequence
  Cyclic GFR-binding peptide
  MOD_RES (2)..(3): Xaa is C or S
PXXAPTQLSPISVLYKDDSSNVILKYHYNMV

SEQ ID NO: 48852 - protein, 21 aa, Artificial Sequence
  Cyclic GFR-binding peptide
LSPISMLYKDENEKVVLKYHY

SEQ ID NO: 48853 - protein, 29 aa, Artificial Sequence
  Cyclic GFR-binding peptide
  MOD_RES (29)..(29): Xaa is C or S
LSATSVLYYDDMGVPTLRKHREGMSVAEX

SEQ ID NO: 48854 - protein, 22 aa, Artificial Sequence
  Cyclic GFR-binding peptide
SAISILYLIGKTPKILKNYQMI

SEQ ID NO: 48855 - protein, 37 aa, Artificial Sequence; identical to SEQ ID NO: 8844
  Cyclic GFR-binding peptide
  MOD_RES (4)..(5)..(37): Xaa is C or S

SEQ ID NO: 48856 - protein, 32 aa, Artificial Sequence
  Cyclic GFR-binding peptide
  MOD_RES (1)..(2): Xaa is C or S
XXVPTKLSATSVLYYDDMGVPTLRKHREGMSV

SEQ ID NO: 48857 - protein, 38 aa, Artificial Sequence; identical to SEQ ID NO: 8846
  Cyclic GFR-binding peptide
  MOD_RES (3)..(4)..(36)..(38): Xaa is C or S

SEQ ID NO: 48858 - protein, 32 aa, Artificial Sequence
  Cyclic GFR-binding peptide
  MOD_RES (5)..(6): Xaa is C or S
VPKPXXAPTQLSAISVLYLDDSSNVILKNYQN

SEQ ID NO: 48859 - protein, 35 aa, Artificial Sequence
  Cyclic GFR-binding peptide
  MOD_RES (32)..(34): Xaa is C or S
QLSPISVLYKEIVRKKPIFLKYHYTLEDHLAXKXE

SEQ ID NO: 48860 - protein, 26 aa, Artificial Sequence
  Cyclic GFR-binding peptide
  MOD_RES (1)..(1): Xaa is C or S
XVSQDLSPISILYKIGKTPKILKYHY

SEQ ID NO: 48861 - protein, 38 aa, Artificial Sequence; identical to SEQ ID NO: 8848
  Cyclic GFR-binding peptide
  MOD_RES (5)..(37): Xaa is C or S

SEQ ID NO: 48862 - protein, 32 aa, Artificial Sequence
  Cyclic GFR-binding peptide
  MOD_RES (7)..(7): Xaa is C or S
HVTKPTXAPTKLSPISVLYKDDSSNVILKYHY

SEQ ID NO: 48863 - protein, 32 aa, Artificial Sequence
  Cyclic GFR-binding peptide
  MOD_RES (5)..(6): Xaa is C or S
SAAPXXVPQALNAISILYFVGRKPKVLKKYRM

SEQ ID NO: 48864 - protein, 32 aa, Artificial Sequence
  Cyclic GFR-binding peptide
  MOD_RES (30)..(32): Xaa is C or S
PQDLSPISILYKVGRTPKVLKYHYMVVKSXKX

SEQ ID NO: 48865 - protein, 26 aa, Artificial Sequence
  Cyclic GFR-binding peptide
QDLNAISILYFIGKTPKILKKYRMIV

SEQ ID NO: 48866 - protein, 30 aa, Artificial Sequence
  Cyclic GFR-binding peptide
  MOD_RES (29)..(29): Xaa is C or S
ELSPISMLYKDENEKVVLKYHYDMVVEGXG

SEQ ID NO: 48867 - protein, 39 aa, Artificial Sequence; identical to SEQ ID NO: 8849
  Cyclic GFR-binding peptide
  MOD_RES (37)..(39): Xaa is C or S

SEQ ID NO: 48868 - protein, 31 aa, Artificial Sequence
  Cyclic GFR-binding peptide
  MOD_RES (30)..(30): Xaa is C or S
PQALNAISILYFVGRKPKVLKKYRMIVRSXK

SEQ ID NO: 48869 - protein, 26 aa, Artificial Sequence
  Cyclic GFR-binding peptide
VPTELSPISMLYKDEYDKVVLKYHYE

SEQ ID NO: 48870 - protein, 31 aa, Artificial Sequence
  Cyclic GFR-binding peptide
  MOD_RES (4)..(5): Xaa is C or S
PKPXXAPTKLSAISVLYLDDSSNVILKNYQN

SEQ ID NO: 48871 - protein, 30 aa, Artificial Sequence; identical to SEQ ID NO: 8852
  Cyclic GFR-binding peptide

SEQ ID NO: 48872 - protein, 29 aa, Artificial Sequence
  Cyclic GFR-binding peptide
  MOD_RES (29)..(29): Xaa is C or S
QALSAISILYLVGRKPKVLKNYQMIVRSX

SEQ ID NO: 48873 - protein, 40 aa, Artificial Sequence; identical to SEQ ID NO: 8854
  Cyclic GFR-binding peptide
  MOD_RES (6)..(7)..(39): Xaa is C or S

SEQ ID NO: 48874 - protein, 27 aa, Artificial Sequence
  Cyclic GFR-binding peptide
ELSPISMLYKDENEKVVLKYHYDMVVE

SEQ ID NO: 48875 - protein, 26 aa, Artificial Sequence
  Cyclic GFR-binding peptide
LSPISILYKIGKTPKILKYHYMIVKS

SEQ ID NO: 48876 - protein, 29 aa, Artificial Sequence
  Cyclic GFR-binding peptide
  MOD_RES (27)..(29): Xaa is C or S
NAISMLYFDENEKVVLKKYRDMVVEGXGX

SEQ ID NO: 48877 - protein, 33 aa, Artificial Sequence
  Cyclic GFR-binding peptide
QVQLSPISVLYKEIVRKKPIFLKYHYTLEDHLA

SEQ ID NO: 48878 - protein, 37 aa, Artificial Sequence; identical to SEQ ID NO: 8856
  Cyclic GFR-binding peptide
  MOD_RES (3)..(4)..(35)..(37): Xaa is C or S

SEQ ID NO: 48879 - protein, 38 aa, Artificial Sequence; identical to SEQ ID NO: 8858
  Cyclic GFR-binding peptide
  MOD_RES (4)..(4): Xaa is C or S

SEQ ID NO: 48880 - protein, 43 aa, Artificial Sequence; identical to SEQ ID NO: 8859
  Cyclic GFR-binding peptide
  MOD_RES (3)..(40)..(42): Xaa is C or S

SEQ ID NO: 48881 - protein, 37 aa, Artificial Sequence; identical to SEQ ID NO: 8860
  Cyclic GFR-binding peptide
  MOD_RES (4)..(5)..(37): Xaa is C or S

SEQ ID NO: 48882 - protein, 42 aa, Artificial Sequence; identical to SEQ ID NO: 8861
  Cyclic GFR-binding peptide
  MOD_RES (6)..(7)..(39)..(41): Xaa is C or S

SEQ ID NO: 48883 - protein, 23 aa, Artificial Sequence
  Cyclic GFR-binding peptide
SPISILYKIGKTPKILKYHYMIV

SEQ ID NO: 48884 - protein, 31 aa, Artificial Sequence
  Cyclic GFR-binding peptide
  MOD_RES (1)..(2): Xaa is C or S
XXVSQDLSPISILYKIGKTPKILKYHYMIVK

SEQ ID NO: 48885 - protein, 28 aa, Artificial Sequence
  Cyclic GFR-binding peptide
VPTELSATSMLYYDENEKVVLRKHRDMV

SEQ ID NO: 48886 - protein, 32 aa, Artificial Sequence; identical to SEQ ID NO: 8862
  Cyclic GFR-binding peptide
  MOD_RES (1)..(2): Xaa is C or S

SEQ ID NO: 48887 - protein, 20 aa, Artificial Sequence
  Cyclic GFR-binding peptide
NAISMLYFDEYDKVVLKKYR

SEQ ID NO: 48888 - protein, 38 aa, Artificial Sequence; identical to SEQ ID NO: 8865
  Cyclic GFR-binding peptide
  MOD_RES (2)..(3)..(35)..(37): Xaa is C or S

SEQ ID NO: 48889 - protein, 30 aa, Artificial Sequence
  Cyclic GFR-binding peptide
PTELNAISMLYFDENEKVVLKKYRDMVVEG

SEQ ID NO: 48890 - protein, 29 aa, Artificial Sequence
  Cyclic GFR-binding peptide
  MOD_RES (27)..(29): Xaa is C or S
SAISVLYLDDSSNVILKNYQNMVVRAXGX

SEQ ID NO: 48891 - protein, 30 aa, Artificial Sequence
  Cyclic GFR-binding peptide
  MOD_RES (28)..(30): Xaa is C or S
ALSAISILYLVGRKPKVLKNYQMIVRSXKX

SEQ ID NO: 48892 - protein, 37 aa, Artificial Sequence; identical to SEQ ID NO: 8866
  Cyclic GFR-binding peptide
  MOD_RES (4)..(5)..(36): Xaa is C or S

SEQ ID NO: 48893 - protein, 28 aa, Artificial Sequence
  Cyclic GFR-binding peptide
TQVQLSAISVLYLEIVRKKPIFLKNYQT

SEQ ID NO: 48894 - protein, 35 aa, Artificial Sequence
  Cyclic GFR-binding peptide
  MOD_RES (5)..(6): Xaa is C or S
IPKAXXVPTELSATSMLYYDEYDKVVLRKHREMVV

SEQ ID NO: 48895 - protein, 24 aa, Artificial Sequence
  Cyclic GFR-binding peptide
QDLSAISILYLVGRTPKVLKNYQM

SEQ ID NO: 48896 - protein, 38 aa, Artificial Sequence; identical to SEQ ID NO: 8870
  Cyclic GFR-binding peptide
  MOD_RES (6)..(38): Xaa is C or S

SEQ ID NO: 48897 - protein, 31 aa, Artificial Sequence
  Cyclic GFR-binding peptide
  MOD_RES (31)..(31): Xaa is C or S
LNAISVLYFEIVRKKPIFLKKYRTLEDHLAX

SEQ ID NO: 48898 - protein, 40 aa, Artificial Sequence; identical to SEQ ID NO: 8872
  Cyclic GFR-binding peptide
  MOD_RES (6)..(7)..(39): Xaa is C or S

SEQ ID NO: 48899 - protein, 36 aa, Artificial Sequence; identical to SEQ ID NO: 8873
  Cyclic GFR-binding peptide
  MOD_RES (1)..(34)..(36): Xaa is C or S

SEQ ID NO: 48900 - protein, 36 aa, Artificial Sequence
  Cyclic GFR-binding peptide
  MOD_RES (6)..(7): Xaa is C or S
ASASPXXVPQDLSPISILYKVGRTPKVLKYHYMVVK

SEQ ID NO: 48901 - protein, 32 aa, Artificial Sequence
  Cyclic GFR-binding peptide
  MOD_RES (4)..(5): Xaa is C or S
ASPXXVSQDLNAISILYFIGKTPKILKKYRMI

SEQ ID NO: 48902 - protein, 35 aa, Artificial Sequence; identical to SEQ ID NO: 8874
  Cyclic GFR-binding peptide
  MOD_RES (1)..(2)..(34): Xaa is C or S

SEQ ID NO: 48903 - protein, 34 aa, Artificial Sequence
  Cyclic GFR-binding peptide
  MOD_RES (3)..(4): Xaa is C or S
KAXXVPTKLSATSVLYYDDMGVPTLRKHREGMSV

SEQ ID NO: 48904 - protein, 39 aa, Artificial Sequence; identical to SEQ ID NO: 8875
  Cyclic GFR-binding peptide
  MOD_RES (3)..(4)..(36)..(38): Xaa is C or S

SEQ ID NO: 48905 - protein, 23 aa, Artificial Sequence
  Cyclic GFR-binding peptide
QDLNAISILYFIGKTPKILKKYR

SEQ ID NO: 48906 - protein, 31 aa, Artificial Sequence
  Cyclic GFR-binding peptide
  MOD_RES (28)..(30): Xaa is C or S
ALNAISILYFVGRKPKVLKKYRMIVRSXKXS

SEQ ID NO: 48907 - protein, 22 aa, Artificial Sequence
  Cyclic GFR-binding peptide
SATSVLYYEIVRKKPIFLRKHR

SEQ ID NO: 48908 - protein, 24 aa, Artificial Sequence
  Cyclic GFR-binding peptide
ELSPISMLYKDEYDKVVLKYHYEM

SEQ ID NO: 48909 - protein, 26 aa, Artificial Sequence
  Cyclic GFR-binding peptide
PTKLSAISVLYLDDSSNVILKNYQNM

SEQ ID NO: 48910 - protein, 26 aa, Artificial Sequence
  Cyclic GFR-binding peptide
TKLSAISVLYLDDMGVPTLKNYQEGM

SEQ ID NO: 48911 - protein, 34 aa, Artificial Sequence
  Cyclic GFR-binding peptide
  MOD_RES (4)..(5): Xaa is C or S
GKAXXVPTKLSATSVLYYDDMGVPTLRKHREGMS

SEQ ID NO: 48912 - protein, 20 aa, Artificial Sequence
  Cyclic GFR-binding peptide
SAISVLYLDDSSNVILKNYQ

SEQ ID NO: 48913 - protein, 32 aa, Artificial Sequence; identical to SEQ ID NO: 8878
  Cyclic GFR-binding peptide
  MOD_RES (1)..(1): Xaa is C or S

SEQ ID NO: 48914 - protein, 26 aa, Artificial Sequence
  Cyclic GFR-binding peptide
VPTELSATSMLYYDENEKVVLRKHRD

SEQ ID NO: 48915 - protein, 36 aa, Artificial Sequence; identical to SEQ ID NO: 8879
  Cyclic GFR-binding peptide
  MOD_RES (6)..(6): Xaa is C or S

SEQ ID NO: 48916 - protein, 28 aa, Artificial Sequence
  Cyclic GFR-binding peptide
  MOD_RES (1)..(2): Xaa is C or S
XXVPQALNAISILYFVGRKPKVLKKYRM

SEQ ID NO: 48917 - protein, 30 aa, Artificial Sequence
  Cyclic GFR-binding peptide
  MOD_RES (3)..(4): Xaa is C or S
KAXXAPTKLSAISVLYLDSSNNVILKNYQN

SEQ ID NO: 48918 - protein, 40 aa, Artificial Sequence; identical to SEQ ID NO: 8880
  Cyclic GFR-binding peptide
  MOD_RES (4)..(5)..(37)..(39): Xaa is C or S

SEQ ID NO: 48919 - protein, 31 aa, Artificial Sequence
  Cyclic GFR-binding peptide
  MOD_RES (29)..(31): Xaa is C or S
QALSPISILYKVGRKPKVLKYHYMIVRSXKX

SEQ ID NO: 48920 - protein, 33 aa, Artificial Sequence
  Cyclic GFR-binding peptide
  MOD_RES (3)..(4): Xaa is C or S
KAXXVPTKLSATSVLYYDDMGVPTLRKHREGMS

SEQ ID NO: 48921 - protein, 22 aa, Artificial Sequence
  Cyclic GFR-binding peptide
NAISMLYFDENEKVVLKKYRDM

SEQ ID NO: 48922 - protein, 37 aa, Artificial Sequence; identical to SEQ ID NO: 8882
  Cyclic GFR-binding peptide
  MOD_RES (3)..(4)..(35)..(37): Xaa is C or S

SEQ ID NO: 48923 - protein, 32 aa, Artificial Sequence
  Cyclic GFR-binding peptide
  MOD_RES (6)..(7): Xaa is C or S
TVPKPXXAPTQLSPISVLYKDDSSNVILKYHY

SEQ ID NO: 48924 - protein, 41 aa, Artificial Sequence; identical to SEQ ID NO: 8883
  Cyclic GFR-binding peptide
  MOD_RES (2)..(39)..(41): Xaa is C or S

SEQ ID NO: 48925 - protein, 36 aa, Artificial Sequence; identical to SEQ ID NO: 8885
  Cyclic GFR-binding peptide
  MOD_RES (2)..(3)..(35): Xaa is C or S

SEQ ID NO: 48926 - protein, 27 aa, Artificial Sequence
  Cyclic GFR-binding peptide
  MOD_RES (27)..(27): Xaa is C or S
LSPISILYKVGRKPKVLKYHYMIVRSX

SEQ ID NO: 48927 - protein, 29 aa, Artificial Sequence
  Cyclic GFR-binding peptide
  MOD_RES (2)..(3): Xaa is C or S
AXXVPTELNAISMLYFDEYDKVVLKKYRE

SEQ ID NO: 48928 - protein, 27 aa, Artificial Sequence
  Cyclic GFR-binding peptide
  MOD_RES (26)..(26): Xaa is C or S
SATSILYYVGRTPKVLRKHRMVVKSXK

SEQ ID NO: 48929 - protein, 34 aa, Artificial Sequence
  Cyclic GFR-binding peptide
  MOD_RES (5)..(6): Xaa is C or S
SAAPXXVPQALSPISILYKVGRKPKVLKYHYMIV

SEQ ID NO: 48930 - protein, 32 aa, Artificial Sequence
  Cyclic GFR-binding peptide
  MOD_RES (5)..(6): Xaa is C or S
SASPXXVPQDLSATSILYYVGRTPKVLRKHRM

SEQ ID NO: 48931 - protein, 30 aa, Artificial Sequence
  Cyclic GFR-binding peptide
  MOD_RES (4)..(5): Xaa is C or S
ASPXXVSQDLNAISILYFIGKTPKILKKYR

SEQ ID NO: 48932 - protein, 35 aa, Artificial Sequence; identical to SEQ ID NO: 8887
  Cyclic GFR-binding peptide
  MOD_RES (1)..(32)..(34): Xaa is C or S

SEQ ID NO: 48933 - protein, 39 aa, Artificial Sequence; identical to SEQ ID NO: 8890
  Cyclic GFR-binding peptide
  MOD_RES (3)..(4)..(36)..(38): Xaa is C or S

SEQ ID NO: 48934 - protein, 28 aa, Artificial Sequence
  Cyclic GFR-binding peptide
ELNAISMLYFDENEKVVLKKYRDMVVEG

SEQ ID NO: 48935 - protein, 31 aa, Artificial Sequence
  Cyclic GFR-binding peptide
QVQLSATSVLYYEIVRKKPIFLRKHRTLEDH

SEQ ID NO: 48936 - protein, 33 aa, Artificial Sequence; identical to SEQ ID NO: 8892
  Cyclic GFR-binding peptide
  MOD_RES (2)..(3): Xaa is C or S

SEQ ID NO: 48937 - protein, 25 aa, Artificial Sequence
  Cyclic GFR-binding peptide
VPTELSATSMLYYDENEKVVLRKHR

SEQ ID NO: 48938 - protein, 34 aa, Artificial Sequence
  Cyclic GFR-binding peptide
  MOD_RES (4)..(5): Xaa is C or S
ASPXXVPQDLSAISILYLVGRTPKVLKNYQMVVK

SEQ ID NO: 48939 - protein, 31 aa, Artificial Sequence
  Cyclic GFR-binding peptide
  MOD_RES (1)..(2): Xaa is C or S
XXVPTKLSATSVLYYDDMGVPTLRKHREGMS

SEQ ID NO: 48940 - protein, 33 aa, Artificial Sequence; identical to SEQ ID NO: 8893
  Cyclic GFR-binding peptide
  MOD_RES (1)..(32): Xaa is C or S

SEQ ID NO: 48941 - protein, 31 aa, Artificial Sequence
  Cyclic GFR-binding peptide
  MOD_RES (4)..(5): Xaa is C or S
ASPXXVSQDLNAISILYFIGKTPKILKKYRM

SEQ ID NO: 48942 - protein, 30 aa, Artificial Sequence
  Cyclic GFR-binding peptide
  MOD_RES (29)..(30): Xaa is C or S
VMDNSLQEVVNNASDYYLITLPELRTPVXX

SEQ ID NO: 48943 - protein, 36 aa, Artificial Sequence; identical to SEQ ID NO: 8894
  Cyclic GFR-binding peptide
  MOD_RES (2)..(4)..(36): Xaa is C or S

SEQ ID NO: 48944 - protein, 32 aa, Artificial Sequence
  Cyclic GFR-binding peptide
  MOD_RES (26)..(27): Xaa is C or S
NSLQEIVNSSDDYYVVPLPELKTPAXXPKPVY

SEQ ID NO: 48945 - protein, 35 aa, Artificial Sequence; identical to SEQ ID NO: 8895
  Cyclic GFR-binding peptide
  MOD_RES (1)..(33)..(34): Xaa is C or S

SEQ ID NO: 48946 - protein, 34 aa, Artificial Sequence; identical to SEQ ID NO: 8896
  Cyclic GFR-binding peptide
  MOD_RES (2)..(34): Xaa is C or S

SEQ ID NO: 48947 - protein, 25 aa, Artificial Sequence
  Cyclic GFR-binding peptide
RYKKLVVNNASDFYLISIANLRTPV

SEQ ID NO: 48948 - protein, 25 aa, Artificial Sequence
  Cyclic GFR-binding peptide
EYQKYIVNSSDDIFLVSIPSLKTPA

SEQ ID NO: 48949 - protein, 28 aa, Artificial Sequence
  Cyclic GFR-binding peptide
  MOD_RES (27)..(28): Xaa is C or S
DNSLQEVVNNASDYYVIPLPELRTPVXX

SEQ ID NO: 48950 - protein, 32 aa, Artificial Sequence
  Cyclic GFR-binding peptide
  MOD_RES (26)..(27): Xaa is C or S
NSLQEVKPTRGVYYVIPLPELDQPVXXPSASA

SEQ ID NO: 48951 - protein, 40 aa, Artificial Sequence; identical to SEQ ID NO: 8897
  Cyclic GFR-binding peptide
  MOD_RES (2)..(34)..(35): Xaa is C or S

SEQ ID NO: 48952 - protein, 27 aa, Artificial Sequence
  Cyclic GFR-binding peptide
  MOD_RES (26)..(26): Xaa is C or S
NSLQEIVNSSDDYYLVTLPELKTPAXT

SEQ ID NO: 48953 - protein, 26 aa, Artificial Sequence
  Cyclic GFR-binding peptide
VMNNSLQEIVNSSDDYYLVTLPELQT

SEQ ID NO: 48954 - protein, 35 aa, Artificial Sequence; identical to SEQ ID NO: 8898
  Cyclic GFR-binding peptide
  MOD_RES (1)..(33)..(34): Xaa is C or S

SEQ ID NO: 48955 - protein, 34 aa, Artificial Sequence
  Cyclic GFR-binding peptide
  MOD_RES (28)..(29): Xaa is C or S
VMNSLQEVKPTRGVYYVIPLPELDQPVXXPSASA

SEQ ID NO: 48956 - protein, 31 aa, Artificial Sequence
  Cyclic GFR-binding peptide
  MOD_RES (29)..(30): Xaa is C or S
VVMEYQKYVKPTRGVIFLISIPSLDQPVXXP

SEQ ID NO: 48957 - protein, 29 aa, Artificial Sequence
  Cyclic GFR-binding peptide
RVVMNEYQKYIVNSSDDIFLVSIPSLQTP

SEQ ID NO: 48958 - protein, 32 aa, Artificial Sequence
  Cyclic GFR-binding peptide
  MOD_RES (26)..(27): Xaa is C or S
QYNKLVVNNASDLYLISIASLRTPVXXTPPTS

SEQ ID NO: 48959 - protein, 36 aa, Artificial Sequence
  Cyclic GFR-binding peptide
  MOD_RES (30)..(31): Xaa is C or S
RVIMEYQKYVKPKRGVIFLISIPSLAQPVXXPAASA

SEQ ID NO: 48960 - protein, 33 aa, Artificial Sequence
  Cyclic GFR-binding peptide
  MOD_RES (27)..(28): Xaa is C or S
MNSLQEIKPTKGIYYVIPLPELDQSVXXPSASA

SEQ ID NO: 48961 - protein, 35 aa, Artificial Sequence; identical to SEQ ID NO: 8901
  Cyclic GFR-binding peptide
  MOD_RES (1)..(33)..(34): Xaa is C or S

SEQ ID NO: 48962 - protein, 35 aa, Artificial Sequence; identical to SEQ ID NO: 8902
  Cyclic GFR-binding peptide
  MOD_RES (2)..(34)..(35): Xaa is C or S

SEQ ID NO: 48963 - protein, 27 aa, Artificial Sequence
  Cyclic GFR-binding peptide
  MOD_RES (27)..(27): Xaa is C or S
DRYKKLVVNNASDFYLISIANLRTPVX

SEQ ID NO: 48964 - protein, 30 aa, Artificial Sequence
  Cyclic GFR-binding peptide
  MOD_RES (27)..(28): Xaa is C or S
MNSLQEIKPTKGIYYVIPLPELDQSVXXPS

SEQ ID NO: 48965 - protein, 27 aa, Artificial Sequence
  Cyclic GFR-binding peptide
EVVMDEYQKYVVKENEDIFLMSIPSLE

SEQ ID NO: 48966 - protein, 37 aa, Artificial Sequence; identical to SEQ ID NO: 8907
  Cyclic GFR-binding peptide
  MOD_RES (32)..(33): Xaa is C or S

SEQ ID NO: 48967 - protein, 22 aa, Artificial Sequence
  Cyclic GFR-binding peptide
NNSLQEIVNSSDDYYVVPLPEL

SEQ ID NO: 48968 - protein, 27 aa, Artificial Sequence
  Cyclic GFR-binding peptide
VVMDEYQKYVVKENEDIFLMSIPSLET

SEQ ID NO: 48969 - protein, 35 aa, Artificial Sequence; identical to SEQ ID NO: 8909
  Cyclic GFR-binding peptide
  MOD_RES (31)..(32): Xaa is C or S

SEQ ID NO: 48970 - protein, 33 aa, Artificial Sequence
  Cyclic GFR-binding peptide
  MOD_RES (2)..(4): Xaa is C or S
HXGXSRVVMNNSLQEIVNSSDDYYVVPLPELKT

SEQ ID NO: 48971 - protein, 25 aa, Artificial Sequence
  Cyclic GFR-binding peptide
DNSLQEVVKENEDYYVMPLPELETP

SEQ ID NO: 48972 - protein, 34 aa, Artificial Sequence
  Cyclic GFR-binding peptide
  MOD_RES (2)..(4): Xaa is C or S
RXGXSEVVMDQYNKLVVNNASDLYLISIASLRTP

SEQ ID NO: 48973 - protein, 33 aa, Artificial Sequence; identical to SEQ ID NO: 8912
  Cyclic GFR-binding peptide
  MOD_RES (2)..(2): Xaa is C or S

SEQ ID NO: 48974 - protein, 37 aa, Artificial Sequence; identical to SEQ ID NO: 8913
  Cyclic GFR-binding peptide
  MOD_RES (1)..(33)..(34): Xaa is C or S

SEQ ID NO: 48975 - protein, 24 aa, Artificial Sequence
  Cyclic GFR-binding peptide
NSLQEIVNSSDDYYLVTLPELKTP

SEQ ID NO: 48976 - protein, 30 aa, Artificial Sequence
  Cyclic GFR-binding peptide
  MOD_RES (1)..(1): Xaa is C or S
XSKVIMNSLQEIKPTKGIYYVIPLPELDQS

SEQ ID NO: 48977 - protein, 26 aa, Artificial Sequence
  Cyclic GFR-binding peptide
SEVVMDNSLQEVVNNASDYYLITLPE

SEQ ID NO: 48978 - protein, 25 aa, Artificial Sequence
  Cyclic GFR-binding peptide
IMEYQKYVKPKRGVIFLISIPSLAQ

SEQ ID NO: 48979 - protein, 41 aa, Artificial Sequence; identical to SEQ ID NO: 8914
  Cyclic GFR-binding peptide
  MOD_RES (1)..(3)..(35)..(36): Xaa is C or S

SEQ ID NO: 48980 - protein, 20 aa, Artificial Sequence
  Cyclic GFR-binding peptide
EYQKYVKPKRGVIFLISIPS

SEQ ID NO: 48981 - protein, 29 aa, Artificial Sequence
  Cyclic GFR-binding peptide
  MOD_RES (1)..(3): Xaa is C or S
XGXGEVVMEEYQKYVVKDYEDIFLMSIPS

SEQ ID NO: 48982 - protein, 35 aa, Artificial Sequence
  Cyclic GFR-binding peptide
  MOD_RES (30)..(31): Xaa is C or S
VVMDQYNKLVVNNASDLYLISIASLRTPVXXTPPT

SEQ ID NO: 48983 - protein, 30 aa, Artificial Sequence
  Cyclic GFR-binding peptide
  MOD_RES (27)..(28): Xaa is C or S
DEYQKYVVKENEDIFLMSIPSLETPVXXAK

SEQ ID NO: 48984 - protein, 40 aa, Artificial Sequence; identical to SEQ ID NO: 8917
  Cyclic GFR-binding peptide
  MOD_RES (1)..(3)..(34)..(35): Xaa is C or S

SEQ ID NO: 48985 - protein, 35 aa, Artificial Sequence; identical to SEQ ID NO: 8918
  Cyclic GFR-binding peptide
  MOD_RES (2)..(4): Xaa is C or S

SEQ ID NO: 48986 - protein, 25 aa, Artificial Sequence
  Cyclic GFR-binding peptide
VMNNSLQEIVNSSDDYYLVTLPELK

SEQ ID NO: 48987 - protein, 34 aa, Artificial Sequence
  Cyclic GFR-binding peptide
  MOD_RES (28)..(29): Xaa is C or S
MENSLQEVVKDYEDYYLMTLPELETPVXXAKPIS

SEQ ID NO: 48988 - protein, 25 aa, Artificial Sequence
  Cyclic GFR-binding peptide
VVMNEYQKYIVNSSDDIFLVSIPSL

SEQ ID NO: 48989 - protein, 31 aa, Artificial Sequence; identical to SEQ ID NO: 8921
  Cyclic GFR-binding peptide

SEQ ID NO: 48990 - protein, 24 aa, Artificial Sequence
  Cyclic GFR-binding peptide
EYQKYVVKDYEDIFLMSIPSLETP

SEQ ID NO: 48991 - protein, 32 aa, Artificial Sequence; identical to SEQ ID NO: 8923
  Cyclic GFR-binding peptide
  MOD_RES (1)..(1): Xaa is C or S

SEQ ID NO: 48992 - protein, 24 aa, Artificial Sequence
  Cyclic GFR-binding peptide
MDNSLQEVVKENEDYYVMPLPELE

SEQ ID NO: 48993 - protein, 30 aa, Artificial Sequence
  Cyclic GFR-binding peptide
  MOD_RES (30)..(30): Xaa is C or S
VVMEEYQKYVVKDYEDIFLMSIPSLETPVX

SEQ ID NO: 48994 - protein, 27 aa, Artificial Sequence
  Cyclic GFR-binding peptide
  MOD_RES (26)..(27): Xaa is C or S
EYQKYIVNSSDDIFLVSIPSLQTPAXX

SEQ ID NO: 48995 - protein, 27 aa, Artificial Sequence
  Cyclic GFR-binding peptide
  MOD_RES (1)..(1): Xaa is C or S
XSRVIMEYQKYVKPKRGVIFLISIPSL

SEQ ID NO: 48996 - protein, 35 aa, Artificial Sequence; identical to SEQ ID NO: 8925
  Cyclic GFR-binding peptide
  MOD_RES (31)..(32): Xaa is C or S

SEQ ID NO: 48997 - protein, 27 aa, Artificial Sequence
  Cyclic GFR-binding peptide
VMNNSLQEIVNSSDDYYVVPLPELQTP

SEQ ID NO: 48998 - protein, 28 aa, Artificial Sequence
  Cyclic GFR-binding peptide
  MOD_RES (26)..(26): Xaa is C or S
NSLQEIVNSSDDYYLVTLPELKTPAXTP

SEQ ID NO: 48999 - protein, 25 aa, Artificial Sequence
  Cyclic GFR-binding peptide
NSLQEVVKENEDYYVMPLPELETPV

SEQ ID NO: 49000 - protein, 36 aa, Artificial Sequence; identical to SEQ ID NO: 8929
  Cyclic GFR-binding peptide
  MOD_RES (1)..(33)..(34): Xaa is C or S

SEQ ID NO: 49001 - protein, 30 aa, Artificial Sequence
  Cyclic GFR-binding peptide
  MOD_RES (29)..(30): Xaa is C or S
VMDQYNKLVVNNASDLYLISIASLRTPVXX

SEQ ID NO: 49002 - protein, 27 aa, Artificial Sequence
  Cyclic GFR-binding peptide
SKVIMNSLQEIKPTKGIYYVIPLPELD

SEQ ID NO: 49003 - protein, 21 aa, Artificial Sequence
  Cyclic GFR-binding peptide
NSLQEVKPTRGVYYVIPLPEL

SEQ ID NO: 49004 - protein, 30 aa, Artificial Sequence
  Cyclic GFR-binding peptide
  MOD_RES (27)..(28): Xaa is C or S
DNSLQEVVNNASDYYVIPLPELRTPVXXTP

SEQ ID NO: 49005 - protein, 27 aa, Artificial Sequence
  Cyclic GFR-binding peptide
EVVMDNSLQEVVNNASDYYVIPLPELR

SEQ ID NO: 49006 - protein, 31 aa, Artificial Sequence
  Cyclic GFR-binding peptide
  MOD_RES (1)..(3): Xaa is C or S
XGXARVVMNNSLQEIVNSSDDYYVVPLPELQ

SEQ ID NO: 49007 - protein, 27 aa, Artificial Sequence
  Cyclic GFR-binding peptide
VVMNEYQKYIVNSSDDIFLVSIPSLKT

SEQ ID NO: 49008 - protein, 41 aa, Artificial Sequence; identical to SEQ ID NO: 8933
  Cyclic GFR-binding peptide
  MOD_RES (2)..(4)..(36)..(37): Xaa is C or S

SEQ ID NO: 49009 - protein, 32 aa, Artificial Sequence
  Cyclic GFR-binding peptide
  MOD_RES (30)..(30): Xaa is C or S
VVMNNSLQEIVNSSDDYYVVPLPELKTPAXTP

SEQ ID NO: 49010 - protein, 29 aa, Artificial Sequence
  Cyclic GFR-binding peptide
SKVVMEYQKYVKPTRGVIFLISIPSLDQP

SEQ ID NO: 49011 - protein, 34 aa, Artificial Sequence
  Cyclic GFR-binding peptide
  MOD_RES (30)..(31): Xaa is C or S
VVMNEYQKYIVNSSDDIFLVSIPSLKTPAXXPKP

SEQ ID NO: 49012 - protein, 32 aa, Artificial Sequence
  Cyclic GFR-binding peptide
  MOD_RES (1)..(3): Xaa is C or S
XGXSEVVMDQYNKLVVNNASDLYLISIASLRT

SEQ ID NO: 49013 - protein, 32 aa, Artificial Sequence; identical to SEQ ID NO: 8935
  Cyclic GFR-binding peptide
  MOD_RES (31)..(32): Xaa is C or S

SEQ ID NO: 49014 - protein, 30 aa, Artificial Sequence
  Cyclic GFR-binding peptide
  MOD_RES (2)..(2): Xaa is C or S
GXSEVVMDNSLQEVVNNASDYYLITLPELR

SEQ ID NO: 49015 - protein, 40 aa, Artificial Sequence; identical to SEQ ID NO: 8936
  Cyclic GFR-binding peptide
  MOD_RES (2)..(4)..(35)..(36): Xaa is C or S

SEQ ID NO: 49016 - protein, 30 aa, Artificial Sequence
  Cyclic GFR-binding peptide
  MOD_RES (1)..(3): Xaa is C or S
XGXSEVVMDRYKKLVVNNASDFYLISIANL

SEQ ID NO: 49017 - protein, 30 aa, Artificial Sequence
  Cyclic GFR-binding peptide
  MOD_RES (26)..(27): Xaa is C or S
NSLQEVVNNASDYYLITLPELRTPVXXTPP

SEQ ID NO: 49018 - protein, 32 aa, Artificial Sequence; identical to SEQ ID NO: 8939
  Cyclic GFR-binding peptide
  MOD_RES (32)..(32): Xaa is C or S

SEQ ID NO: 49019 - protein, 39 aa, Artificial Sequence; identical to SEQ ID NO: 8940
  Cyclic GFR-binding peptide
  MOD_RES (1)..(3)..(35)..(36): Xaa is C or S

SEQ ID NO: 49020 - protein, 26 aa, Artificial Sequence
  Cyclic GFR-binding peptide
  MOD_RES (26)..(26): Xaa is C or S
NSLQEIVNSSDDYYVVPLPELQTPAX

SEQ ID NO: 49021 - protein, 32 aa, Artificial Sequence
  Cyclic GFR-binding peptide
  MOD_RES (26)..(27): Xaa is C or S
NSLQEVVKDYEDYYVMPLPELETPVXXAKPIS

SEQ ID NO: 49022 - protein, 32 aa, Artificial Sequence
  Cyclic GFR-binding peptide
  MOD_RES (28)..(29): Xaa is C or S
VMNSLQEVKPTRGVYYVIPLPELDQPVXXPSA

SEQ ID NO: 49023 - protein, 25 aa, Artificial Sequence
  Cyclic GFR-binding peptide
MNNSLQEIVNSSDDYYLVTLPELKT

SEQ ID NO: 49024 - protein, 33 aa, Artificial Sequence
  Cyclic GFR-binding peptide
  MOD_RES (1)..(3): Xaa is C or S
XGXSEVVMDNSLQEVVNNASDYYLITLPELRTP

SEQ ID NO: 49025 - protein, 31 aa, Artificial Sequence
  Cyclic GFR-binding peptide
  MOD_RES (29)..(30): Xaa is C or S
VVMNSLQEVKPTRGVYYVIPLPELDQPVXXP

SEQ ID NO: 49026 - protein, 31 aa, Artificial Sequence; identical to SEQ ID NO: 8943
  Cyclic GFR-binding peptide
  MOD_RES (31)..(31): Xaa is C or S

SEQ ID NO: 49027 - protein, 32 aa, Artificial Sequence; identical to SEQ ID NO: 8945
  Cyclic GFR-binding peptide
  MOD_RES (31)..(32): Xaa is C or S

SEQ ID NO: 49028 - protein, 29 aa, Artificial Sequence
  Cyclic GFR-binding peptide
VVMDNSLQEVVNNASDYYVIPLPELRTPV

SEQ ID NO: 49029 - protein, 30 aa, Artificial Sequence
  Cyclic GFR-binding peptide
  MOD_RES (30)..(30): Xaa is C or S
KVVMNSLQEVKPTRGVYYVIPLPELDQPVX

SEQ ID NO: 49030 - protein, 31 aa, Artificial Sequence
  Cyclic GFR-binding peptide
  MOD_RES (28)..(29): Xaa is C or S
MDNSLQEVVNNASDYYLITLPELRTPVXXTP

SEQ ID NO: 49031 - protein, 23 aa, Artificial Sequence
  Cyclic GFR-binding peptide
NNSLQEIVNSSDDYYLVTLPELQ

SEQ ID NO: 49032 - protein, 34 aa, Artificial Sequence; identical to SEQ ID NO: 8950
  Cyclic GFR-binding peptide
  MOD_RES (31)..(31): Xaa is C or S

SEQ ID NO: 49033 - protein, 20 aa, Artificial Sequence
  Cyclic GFR-binding peptide
NSLQEVVKDYEDYYLMTLPE

SEQ ID NO: 49034 - protein, 38 aa, Artificial Sequence; identical to SEQ ID NO: 8957
  Cyclic GFR-binding peptide
  MOD_RES (1)..(33)..(34): Xaa is C or S

SEQ ID NO: 49035 - protein, 25 aa, Artificial Sequence
  Cyclic GFR-binding peptide
NEYQKYIVNSSDDIFLVSIPSLKTP

SEQ ID NO: 49036 - protein, 28 aa, Artificial Sequence
  Cyclic GFR-binding peptide
  MOD_RES (2)..(2): Xaa is C or S
GXSRVVMNNSLQEIVNSSDDYYVVPLPE

SEQ ID NO: 49037 - protein, 30 aa, Artificial Sequence
  Cyclic GFR-binding peptide
  MOD_RES (29)..(30): Xaa is C or S
VIMEYQKYIKPTKGIIFLISIPSLDQSVXX

SEQ ID NO: 49038 - protein, 39 aa, Artificial Sequence; identical to SEQ ID NO: 8961
  Cyclic GFR-binding peptide
  MOD_RES (2)..(34): Xaa is C or S

SEQ ID NO: 49039 - protein, 33 aa, Artificial Sequence
  Cyclic GFR-binding peptide
  MOD_RES (27)..(28): Xaa is C or S
MNSLQEVKPTRGVYYVIPLPELDQPVXXPSASA

SEQ ID NO: 49040 - protein, 34 aa, Artificial Sequence
  Cyclic GFR-binding peptide
  MOD_RES (30)..(31): Xaa is C or S
VVMDNSLQEVVNNASDYYLITLPELRTPVXXTPP

SEQ ID NO: 49041 - protein, 32 aa, Artificial Sequence
  Cyclic GFR-binding peptide
  MOD_RES (26)..(26): Xaa is C or S
EYQKYIVNSSDDIFLVSIPSLKTPAXTPKTVH

SEQ ID NO: 49042 - protein, 30 aa, Artificial Sequence
  Cyclic GFR-binding peptide
  MOD_RES (27)..(28): Xaa is C or S
MNSLQEVKPKRGVYYLITLPELAQPVXXPA

SEQ ID NO: 49043 - protein, 28 aa, Artificial Sequence
  Cyclic GFR-binding peptide
GEVVMENSLQEVVKDYEDYYVMPLPELE

SEQ ID NO: 49044 - protein, 30 aa, Artificial Sequence
  Cyclic GFR-binding peptide
  MOD_RES (1)..(1): Xaa is C or S
XSEVVMDRYKKLVVNNASDFYLISIANLRT

SEQ ID NO: 49045 - protein, 35 aa, Artificial Sequence; identical to SEQ ID NO: 8964
  Cyclic GFR-binding peptide
  MOD_RES (1)..(3)..(34)..(35): Xaa is C or S

SEQ ID NO: 49046 - protein, 38 aa, Artificial Sequence; identical to SEQ ID NO: 8965
  Cyclic GFR-binding peptide
  MOD_RES (2)..(4)..(36)..(37): Xaa is C or S

SEQ ID NO: 49047 - protein, 30 aa, Artificial Sequence
  Cyclic GFR-binding peptide
  MOD_RES (29)..(30): Xaa is C or S
VMENSLQEVVKDYEDYYVMPLPELETPVXX

SEQ ID NO: 49048 - protein, 34 aa, Artificial Sequence; identical to SEQ ID NO: 8967
  Cyclic GFR-binding peptide
  MOD_RES (32)..(33): Xaa is C or S

SEQ ID NO: 49049 - protein, 40 aa, Artificial Sequence; identical to SEQ ID NO: 8968
  Cyclic GFR-binding peptide
  MOD_RES (2)..(34)..(35): Xaa is C or S

SEQ ID NO: 49050 - protein, 32 aa, Artificial Sequence
  Cyclic GFR-binding peptide
  MOD_RES (28)..(29): Xaa is C or S
IMNSLQEIKPTKGIYYVIPLPELDQSVXXPSA

SEQ ID NO: 49051 - protein, 33 aa, Artificial Sequence
  Cyclic GFR-binding peptide
  MOD_RES (30)..(31): Xaa is C or S
KVIMNSLQEIKPTKGIYYVIPLPELDQSVXXPS

SEQ ID NO: 49052 - protein, 29 aa, Artificial Sequence
  Cyclic GFR-binding peptide
  MOD_RES (2)..(2): Xaa is C or S
GXGEVVMDNSLQEVVKENEDYYLMTLPEL

SEQ ID NO: 49053 - protein, 34 aa, Artificial Sequence; identical to SEQ ID NO: 8970
  Cyclic GFR-binding peptide
  MOD_RES (1)..(3): Xaa is C or S

SEQ ID NO: 49054 - protein, 30 aa, Artificial Sequence
  Cyclic GFR-binding peptide
  MOD_RES (1)..(1): Xaa is C or S
XSEVVMDNSLQEVVNNASDYYVIPLPELRT

SEQ ID NO: 49055 - protein, 22 aa, Artificial Sequence
  Cyclic GFR-binding peptide
MEEYQKYVVKDYEDIFLMSIPS

SEQ ID NO: 49056 - protein, 30 aa, Artificial Sequence; identical to SEQ ID NO: 8972
  Cyclic GFR-binding peptide

SEQ ID NO: 49057 - protein, 37 aa, Artificial Sequence; identical to SEQ ID NO: 8974
  Cyclic GFR-binding peptide
  MOD_RES (1)..(3)..(34)..(35): Xaa is C or S

SEQ ID NO: 49058 - protein, 26 aa, Artificial Sequence
  Cyclic GFR-binding peptide
VVMDNSLQEVVNNASDYYVIPLPELR

SEQ ID NO: 49059 - protein, 24 aa, Artificial Sequence
  Cyclic GFR-binding peptide
DNSLQEVVKENEDYYVMPLPELET

SEQ ID NO: 49060 - protein, 38 aa, Artificial Sequence; identical to SEQ ID NO: 8977
  Cyclic GFR-binding peptide
  MOD_RES (2)..(4)..(36)..(37): Xaa is C or S

SEQ ID NO: 49061 - protein, 32 aa, Artificial Sequence
  Cyclic GFR-binding peptide
  MOD_RES (1)..(3): Xaa is C or S
XGXSRVVMNNSLQEIVNSSDDYYLVTLPELKT

SEQ ID NO: 49062 - protein, 24 aa, Artificial Sequence
  Cyclic GFR-binding peptide
VVMDNSLQEVVKENEDYYLMTLPE

SEQ ID NO: 49063 - protein, 31 aa, Artificial Sequence; identical to SEQ ID NO: 8980
  Cyclic GFR-binding peptide
  MOD_RES (31)..(31): Xaa is C or S

SEQ ID NO: 49064 - protein, 20 aa, Artificial Sequence
  Cyclic GFR-binding peptide
RYKKLVVNNASDFYLISIAN

SEQ ID NO: 49065 - protein, 22 aa, Artificial Sequence
  Cyclic GFR-binding peptide
DNSLQEVVKENEDYYVMPLPEL

SEQ ID NO: 49066 - protein, 41 aa, Artificial Sequence; identical to SEQ ID NO: 8984
  Cyclic GFR-binding peptide
  MOD_RES (2)..(4)..(35)..(36): Xaa is C or S

SEQ ID NO: 49067 - protein, 37 aa, Artificial Sequence; identical to SEQ ID NO: 8985
  Cyclic GFR-binding peptide
  MOD_RES (31)..(32): Xaa is C or S

SEQ ID NO: 49068 - protein, 33 aa, Artificial Sequence
  Cyclic GFR-binding peptide
  MOD_RES (28)..(29): Xaa is C or S
MNNSLQEIVNSSDDYYVVPLPELKTPAXXPKPV

SEQ ID NO: 49069 - protein, 36 aa, Artificial Sequence; identical to SEQ ID NO: 8986
  Cyclic GFR-binding peptide
  MOD_RES (32)..(33): Xaa is C or S

SEQ ID NO: 49070 - protein, 31 aa, Artificial Sequence
  Cyclic GFR-binding peptide
  MOD_RES (28)..(29): Xaa is C or S
VMEYQKYVKPTRGVIFLISIPSLDQPVXXPS

SEQ ID NO: 49071 - protein, 31 aa, Artificial Sequence; identical to SEQ ID NO: 8989
  Cyclic GFR-binding peptide
  MOD_RES (1)..(1): Xaa is C or S

SEQ ID NO: 49072 - protein, 28 aa, Artificial Sequence
  Cyclic GFR-binding peptide
RVVMNEYQKYIVNSSDDIFLVSIPSLQT

SEQ ID NO: 49073 - protein, 28 aa, Artificial Sequence
  Cyclic GFR-binding peptide
  MOD_RES (26)..(27): Xaa is C or S
EYQKYIKPTKGIIFLISIPSLDQSVXXP

SEQ ID NO: 49074 - protein, 34 aa, Artificial Sequence; identical to SEQ ID NO: 8991
  Cyclic GFR-binding peptide
  MOD_RES (1)..(3): Xaa is C or S

SEQ ID NO: 49075 - protein, 28 aa, Artificial Sequence
  Cyclic GFR-binding peptide
EVVMDQYNKLVVNNASDLYLISIASLRT

SEQ ID NO: 49076 - protein, 33 aa, Artificial Sequence
  Cyclic GFR-binding peptide
  MOD_RES (29)..(30): Xaa is C or S
VMNNSLQEIVNSSDDYYLVTLPELQTPAXXPKP

SEQ ID NO: 49077 - protein, 35 aa, Artificial Sequence
  Cyclic GFR-binding peptide
  MOD_RES (29)..(30): Xaa is C or S
VMNNSLQEIVNSSDDYYLVTLPELKTPAXXPKPVY

SEQ ID NO: 49078 - protein, 26 aa, Artificial Sequence
  Cyclic GFR-binding peptide
MNEYQKYIVNSSDDIFLVSIPSLKTP

SEQ ID NO: 49079 - protein, 29 aa, Artificial Sequence
  Cyclic GFR-binding peptide
RVIMNSLQEVKPKRGVYYLITLPELAQPV

SEQ ID NO: 49080 - protein, 28 aa, Artificial Sequence
  Cyclic GFR-binding peptide
GEVVMDNSLQEVVKENEDYYVMPLPELE

SEQ ID NO: 49081 - protein, 30 aa, Artificial Sequence
  Cyclic GFR-binding peptide
  MOD_RES (29)..(30): Xaa is C or S
VMEEYQKYVVKDYEDIFLMSIPSLETPVXX

SEQ ID NO: 49082 - protein, 34 aa, Artificial Sequence; identical to SEQ ID NO: 8998
  Cyclic GFR-binding peptide
  MOD_RES (32)..(33): Xaa is C or S

SEQ ID NO: 49083 - protein, 41 aa, Artificial Sequence; identical to SEQ ID NO: 9000
  Cyclic GFR-binding peptide
  MOD_RES (2)..(4)..(36)..(37): Xaa is C or S

SEQ ID NO: 49084 - protein, 31 aa, Artificial Sequence
  Cyclic GFR-binding peptide
  MOD_RES (30)..(31): Xaa is C or S
VVMNEYQKYIVNSSDDIFLVSIPSLQTPAXX

SEQ ID NO: 49085 - protein, 30 aa, Artificial Sequence
  Cyclic GFR-binding peptide
  MOD_RES (27)..(28): Xaa is C or S
MNSLQEVKPTRGVYYVIPLPELDQPVXXPS

SEQ ID NO: 49086 - protein, 23 aa, Artificial Sequence
  Cyclic GFR-binding peptide
VMDNSLQEVVNNASDYYVIPLPE

SEQ ID NO: 49087 - protein, 29 aa, Artificial Sequence
  Cyclic GFR-binding peptide
VVMDRYKKLVVNNASDFYLISIANLRTPV

SEQ ID NO: 49088 - protein, 28 aa, Artificial Sequence
  Cyclic GFR-binding peptide
SKVVMEYQKYVKPTRGVIFLISIPSLDQ

SEQ ID NO: 49089 - protein, 33 aa, Artificial Sequence; identical to SEQ ID NO: 9001
  Cyclic GFR-binding peptide
  MOD_RES (1)..(33): Xaa is C or S

SEQ ID NO: 49090 - protein, 35 aa, Artificial Sequence; identical to SEQ ID NO: 9002
  Cyclic GFR-binding peptide
  MOD_RES (1)..(33)..(34): Xaa is C or S

SEQ ID NO: 49091 - protein, 37 aa, Artificial Sequence; identical to SEQ ID NO: 9003
  Cyclic GFR-binding peptide
  MOD_RES (32)..(33): Xaa is C or S

SEQ ID NO: 49092 - protein, 31 aa, Artificial Sequence
  Cyclic GFR-binding peptide
  MOD_RES (28)..(29): Xaa is C or S
IMEYQKYIKPTKGIIFLISIPSLDQSVXXPS

SEQ ID NO: 49093 - protein, 28 aa, Artificial Sequence
  Cyclic GFR-binding peptide
VMDEYQKYVVKENEDIFLMSIPSLETPV

SEQ ID NO: 49094 - protein, 38 aa, Artificial Sequence; identical to SEQ ID NO: 9004
  Cyclic GFR-binding peptide
  MOD_RES (1)..(33)..(34): Xaa is C or S

SEQ ID NO: 49095 - protein, 26 aa, Artificial Sequence
  Cyclic GFR-binding peptide
EVVMDNSLQEVVNNASDYYVIPLPEL

SEQ ID NO: 49096 - protein, 31 aa, Artificial Sequence
  Cyclic GFR-binding peptide
  MOD_RES (1)..(3): Xaa is C or S
XGXARVVMNEYQKYIVNSSDDIFLVSIPSLQ

SEQ ID NO: 49097 - protein, 37 aa, Artificial Sequence; identical to SEQ ID NO: 9005
  Cyclic GFR-binding peptide
  MOD_RES (1)..(3)..(34)..(35): Xaa is C or S

SEQ ID NO: 49098 - protein, 35 aa, Artificial Sequence; identical to SEQ ID NO: 9006
  Cyclic GFR-binding peptide
  MOD_RES (1)..(32)..(33): Xaa is C or S

SEQ ID NO: 49099 - protein, 33 aa, Artificial Sequence
  Cyclic GFR-binding peptide
  MOD_RES (28)..(29): Xaa is C or S
MDNSLQEVVKENEDYYLMTLPELETPVXXAKPI

SEQ ID NO: 49100 - protein, 34 aa, Artificial Sequence; identical to SEQ ID NO: 9008
  Cyclic GFR-binding peptide
  MOD_RES (31)..(32): Xaa is C or S

SEQ ID NO: 49101 - protein, 30 aa, Artificial Sequence
  Cyclic GFR-binding peptide
ARVVMNNSLQEIVNSSDDYYLVTLPELQTP

SEQ ID NO: 49102 - protein, 21 aa, Artificial Sequence
  Cyclic GFR-binding peptide
EYQKYVVKDYEDIFLMSIPSL

SEQ ID NO: 49103 - protein, 32 aa, Artificial Sequence
  Cyclic GFR-binding peptide
  MOD_RES (29)..(30): Xaa is C or S
VIMEYQKYVKPKRGVIFLISIPSLAQPVXXPA

SEQ ID NO: 49104 - protein, 33 aa, Artificial Sequence
  Cyclic GFR-binding peptide
  MOD_RES (1)..(3): Xaa is C or S
XGXGEVVMENSLQEVVKDYEDYYVMPLPELETP

SEQ ID NO: 49105 - protein, 28 aa, Artificial Sequence
  Cyclic GFR-binding peptide
  MOD_RES (26)..(27): Xaa is C or S
RYKKLVVNNASDFYLISIANLRTPVXXT

SEQ ID NO: 49106 - protein, 21 aa, Artificial Sequence
  Cyclic GFR-binding peptide
EYQKYIKPTKGIIFLISIPSL

SEQ ID NO: 49107 - protein, 34 aa, Artificial Sequence; identical to SEQ ID NO: 9011
  Cyclic GFR-binding peptide
  MOD_RES (1)..(33)..(34): Xaa is C or S

SEQ ID NO: 49108 - protein, 27 aa, Artificial Sequence
  Cyclic GFR-binding peptide
VMNEYQKYIVNSSDDIFLVSIPSLQTP

SEQ ID NO: 49109 - protein, 34 aa, Artificial Sequence; identical to SEQ ID NO: 9012
  Cyclic GFR-binding peptide
  MOD_RES (1)..(3): Xaa is C or S

SEQ ID NO: 49110 - protein, 31 aa, Artificial Sequence
  Cyclic GFR-binding peptide
  MOD_RES (30)..(31): Xaa is C or S
VVMENSLQEVVKDYEDYYVMPLPELETPVXX

SEQ ID NO: 49111 - protein, 27 aa, Artificial Sequence
  Cyclic GFR-binding peptide
SEVVMDQYNKLVVNNASDLYLISIASL

SEQ ID NO: 49112 - protein, 28 aa, Artificial Sequence
  Cyclic GFR-binding peptide
  MOD_RES (26)..(27): Xaa is C or S
NSLQEVVKDYEDYYLMTLPELETPVXXA

SEQ ID NO: 49113 - protein, 27 aa, Artificial Sequence
  Cyclic GFR-binding peptide
SKVVMEYQKYVKPTRGVIFLISIPSLD

SEQ ID NO: 49114 - protein, 34 aa, Artificial Sequence; identical to SEQ ID NO: 9013
  Cyclic GFR-binding peptide
  MOD_RES (32)..(32): Xaa is C or S

SEQ ID NO: 49115 - protein, 34 aa, Artificial Sequence; identical to SEQ ID NO: 9015
  Cyclic GFR-binding peptide
  MOD_RES (2)..(33)..(34): Xaa is C or S

SEQ ID NO: 49116 - protein, 30 aa, Artificial Sequence
  Cyclic GFR-binding peptide
  MOD_RES (2)..(4): Xaa is C or S
HXGXARVVMNNSLQEIVNSSDDYYVVPLPE

SEQ ID NO: 49117 - protein, 32 aa, Artificial Sequence
  Cyclic GFR-binding peptide
  MOD_RES (2)..(4): Xaa is C or S
RXGXGEVVMENSLQEVVKDYEDYYLMTLPELE

SEQ ID NO: 49118 - protein, 36 aa, Artificial Sequence; identical to SEQ ID NO: 9019
  Cyclic GFR-binding peptide
  MOD_RES (31)..(31): Xaa is C or S

SEQ ID NO: 49119 - protein, 29 aa, Artificial Sequence
  Cyclic GFR-binding peptide
VVMEEYQKYVVKDYEDIFLMSIPSLETPV

SEQ ID NO: 49120 - protein, 33 aa, Artificial Sequence
  Cyclic GFR-binding peptide
  MOD_RES (27)..(28): Xaa is C or S
MNSLQEVKPKRGVYYLITLPELAQPVXXPAASA

SEQ ID NO: 49121 - protein, 41 aa, Artificial Sequence; identical to SEQ ID NO: 9021
  Cyclic GFR-binding peptide
  MOD_RES (2)..(4)..(36)..(37): Xaa is C or S

SEQ ID NO: 49122 - protein, 30 aa, Artificial Sequence
  Cyclic GFR-binding peptide
  MOD_RES (1)..(3): Xaa is C or S
XGXSRVVMNNSLQEIVNSSDDYYLVTLPEL

SEQ ID NO: 49123 - protein, 34 aa, Artificial Sequence; identical to SEQ ID NO: 9024
  Cyclic GFR-binding peptide
  MOD_RES (1)..(33)..(34): Xaa is C or S

SEQ ID NO: 49124 - protein, 29 aa, Artificial Sequence
  Cyclic GFR-binding peptide
RVVMNNSLQEIVNSSDDYYLVTLPELKTP

SEQ ID NO: 49125 - protein, 28 aa, Artificial Sequence
  Cyclic GFR-binding peptide
VVMEEYQKYVVKDYEDIFLMSIPSLETP

SEQ ID NO: 49126 - protein, 33 aa, Artificial Sequence; identical to SEQ ID NO: 9025
  Cyclic GFR-binding peptide
  MOD_RES (31)..(32): Xaa is C or S

SEQ ID NO: 49127 - protein, 30 aa, Artificial Sequence; identical to SEQ ID NO: 9026
  Cyclic GFR-binding peptide

SEQ ID NO: 49128 - protein, 36 aa, Artificial Sequence
  Cyclic GFR-binding peptide
  MOD_RES (30)..(31): Xaa is C or S
VVMDNSLQEVVKENEDYYVMPLPELETPVXXAKPIK

SEQ ID NO: 49129 - protein, 26 aa, Artificial Sequence
  Cyclic GFR-binding peptide
NNSLQEIVNSSDDYYVVPLPELKTPA

SEQ ID NO: 49130 - protein, 28 aa, Artificial Sequence
  Cyclic GFR-binding peptide
  MOD_RES (26)..(27): Xaa is C or S
NSLQEVVKENEDYYLMTLPELETPVXXA

SEQ ID NO: 49131 - protein, 26 aa, Artificial Sequence
  Cyclic GFR-binding peptide
EVVMENSLQEVVKDYEDYYVMPLPEL

SEQ ID NO: 49132 - protein, 28 aa, Artificial Sequence
  Cyclic GFR-binding peptide
SEVVMDRYKKLVVNNASDFYLISIANLR

SEQ ID NO: 49133 - protein, 39 aa, Artificial Sequence; identical to SEQ ID NO: 9030
  Cyclic GFR-binding peptide
  MOD_RES (2)..(34)..(35): Xaa is C or S

SEQ ID NO: 49134 - protein, 35 aa, Artificial Sequence; identical to SEQ ID NO: 9032
  Cyclic GFR-binding peptide
  MOD_RES (31)..(32): Xaa is C or S

SEQ ID NO: 49135 - protein, 31 aa, Artificial Sequence
  Cyclic GFR-binding peptide
  MOD_RES (2)..(4): Xaa is C or S
RXGXGEVVMEEYQKYVVKDYEDIFLMSIPSL

SEQ ID NO: 49136 - protein, 35 aa, Artificial Sequence; identical to SEQ ID NO: 9033
  Cyclic GFR-binding peptide
  MOD_RES (1)..(33)..(34): Xaa is C or S

SEQ ID NO: 49137 - protein, 36 aa, Artificial Sequence; identical to SEQ ID NO: 9034
  Cyclic GFR-binding peptide
  MOD_RES (2)..(34)..(35): Xaa is C or S

SEQ ID NO: 49138 - protein, 36 aa, Artificial Sequence; identical to SEQ ID NO: 9035
  Cyclic GFR-binding peptide
  MOD_RES (2)..(34)..(35): Xaa is C or S

SEQ ID NO: 49139 - protein, 24 aa, Artificial Sequence
  Cyclic GFR-binding peptide
NSLQEVKPTRGVYYVIPLPELDQP

SEQ ID NO: 49140 - protein, 33 aa, Artificial Sequence
  Cyclic GFR-binding peptide
  MOD_RES (27)..(28): Xaa is C or S
NEYQKYIVNSSDDIFLVSIPSLQTPAXXPKPVT

SEQ ID NO: 49141 - protein, 30 aa, Artificial Sequence
  Cyclic GFR-binding peptide
  MOD_RES (28)..(29): Xaa is C or S
MDNSLQEVVKENEDYYLMTLPELETPVXXA

SEQ ID NO: 49142 - protein, 34 aa, Artificial Sequence; identical to SEQ ID NO: 9036
  Cyclic GFR-binding peptide
  MOD_RES (1)..(3): Xaa is C or S

SEQ ID NO: 49143 - protein, 27 aa, Artificial Sequence
  Cyclic GFR-binding peptide
  MOD_RES (26)..(27): Xaa is C or S
NSLQEIKPTKGIYYVIPLPELDQSVXX

SEQ ID NO: 49144 - protein, 28 aa, Artificial Sequence
  Cyclic GFR-binding peptide
VVMNNSLQEIVNSSDDYYLVTLPELKTP

SEQ ID NO: 49145 - protein, 39 aa, Artificial Sequence; identical to SEQ ID NO: 9038
  Cyclic GFR-binding peptide
  MOD_RES (1)..(3)..(35)..(36): Xaa is C or S

SEQ ID NO: 49146 - protein, 23 aa, Artificial Sequence
  Cyclic GFR-binding peptide
VMNEYQKYIVNSSDDIFLVSIPS

SEQ ID NO: 49147 - protein, 29 aa, Artificial Sequence
  Cyclic GFR-binding peptide
  MOD_RES (28)..(29): Xaa is C or S
MEEYQKYVVKDYEDIFLMSIPSLETPVXX

SEQ ID NO: 49148 - protein, 35 aa, Artificial Sequence; identical to SEQ ID NO: 9039
  Cyclic GFR-binding peptide
  MOD_RES (1)..(33)..(34): Xaa is C or S

SEQ ID NO: 49149 - protein, 25 aa, Artificial Sequence
  Cyclic GFR-binding peptide
VVMDNSLQEVVKENEDYYVMPLPEL

SEQ ID NO: 49150 - protein, 25 aa, Artificial Sequence
  Cyclic GFR-binding peptide
VMEEYQKYVVKDYEDIFLMSIPSLE

SEQ ID NO: 49151 - protein, 35 aa, Artificial Sequence; identical to SEQ ID NO: 9040
  Cyclic GFR-binding peptide
  MOD_RES (1)..(33)..(34): Xaa is C or S

SEQ ID NO: 49152 - protein, 22 aa, Artificial Sequence
  Cyclic GFR-binding peptide
NSLQEIVNSSDDYYLVTLPELQ

SEQ ID NO: 49153 - protein, 34 aa, Artificial Sequence; identical to SEQ ID NO: 9041
  Cyclic GFR-binding peptide
  MOD_RES (2)..(34): Xaa is C or S

SEQ ID NO: 49154 - protein, 32 aa, Artificial Sequence; identical to SEQ ID NO: 9042
  Cyclic GFR-binding peptide
  MOD_RES (1)..(1): Xaa is C or S

SEQ ID NO: 49155 - protein, 32 aa, Artificial Sequence; identical to SEQ ID NO: 9044
  Cyclic GFR-binding peptide
  MOD_RES (2)..(2): Xaa is C or S

SEQ ID NO: 49156 - protein, 31 aa, Artificial Sequence
  Cyclic GFR-binding peptide
  MOD_RES (26)..(26): Xaa is C or S
NSLQEIVNSSDDYYLVTLPELKTPAXTPKTV

SEQ ID NO: 49157 - protein, 36 aa, Artificial Sequence; identical to SEQ ID NO: 9045
  Cyclic GFR-binding peptide
  MOD_RES (2)..(4)..(36): Xaa is C or S

SEQ ID NO: 49158 - protein, 32 aa, Artificial Sequence; identical to SEQ ID NO: 9049
  Cyclic GFR-binding peptide
  MOD_RES (31)..(32): Xaa is C or S

SEQ ID NO: 49159 - protein, 33 aa, Artificial Sequence
  Cyclic GFR-binding peptide
  MOD_RES (29)..(29): Xaa is C or S
VMNEYQKYIVNSSDDIFLVSIPSLKTPAXTPKT

SEQ ID NO: 49160 - protein, 28 aa, Artificial Sequence
  Cyclic GFR-binding peptide
VVMDNSLQEVVNNASDYYVIPLPELRTP

SEQ ID NO: 49161 - protein, 34 aa, Artificial Sequence
  Cyclic GFR-binding peptide
  MOD_RES (2)..(4): Xaa is C or S
HXGXARVVMNNSLQEIVNSSDDYYVVPLPELQTP

SEQ ID NO: 49162 - protein, 34 aa, Artificial Sequence
  Cyclic GFR-binding peptide
  MOD_RES (28)..(29): Xaa is C or S
MDRYKKLVVNNASDFYLISIANLRTPVXXTPPTS

SEQ ID NO: 49163 - protein, 31 aa, Artificial Sequence; identical to SEQ ID NO: 9051
  Cyclic GFR-binding peptide
  MOD_RES (31)..(31): Xaa is C or S

SEQ ID NO: 49164 - protein, 35 aa, Artificial Sequence; identical to SEQ ID NO: 9052
  Cyclic GFR-binding peptide
  MOD_RES (1)..(33)..(34): Xaa is C or S

SEQ ID NO: 49165 - protein, 39 aa, Artificial Sequence; identical to SEQ ID NO: 9053
  Cyclic GFR-binding peptide
  MOD_RES (1)..(3)..(35): Xaa is C or S

SEQ ID NO: 49166 - protein, 41 aa, Artificial Sequence; identical to SEQ ID NO: 9054
  Cyclic GFR-binding peptide
  MOD_RES (2)..(4)..(36): Xaa is C or S

SEQ ID NO: 49167 - protein, 36 aa, Artificial Sequence; identical to SEQ ID NO: 9055
  Cyclic GFR-binding peptide
  MOD_RES (2)..(34)..(35): Xaa is C or S

SEQ ID NO: 49168 - protein, 36 aa, Artificial Sequence; identical to SEQ ID NO: 9056
  Cyclic GFR-binding peptide
  MOD_RES (31)..(32): Xaa is C or S

SEQ ID NO: 49169 - protein, 29 aa, Artificial Sequence
  Cyclic GFR-binding peptide
  MOD_RES (2)..(2): Xaa is C or S
KXSKVVMEYQKYVKPTRGVIFLISIPSLD

SEQ ID NO: 49170 - protein, 26 aa, Artificial Sequence
  Cyclic GFR-binding peptide
IMNSLQEIKPTKGIYYVIPLPELDQS

SEQ ID NO: 49171 - protein, 32 aa, Artificial Sequence
  Cyclic GFR-binding peptide
  MOD_RES (2)..(4): Xaa is C or S
RXGXSEVVMDNSLQEVVNNASDYYVIPLPELR

SEQ ID NO: 49172 - protein, 29 aa, Artificial Sequence
  Cyclic GFR-binding peptide
RVVMNNSLQEIVNSSDDYYVVPLPELKTP

SEQ ID NO: 49173 - protein, 30 aa, Artificial Sequence
  Cyclic GFR-binding peptide
  MOD_RES (27)..(27): Xaa is C or S
NNSLQEIVNSSDDYYVVPLPELKTPAXTPK

SEQ ID NO: 49174 - protein, 33 aa, Artificial Sequence
  Cyclic GFR-binding peptide
  MOD_RES (27)..(28): Xaa is C or S
NEYQKYIVNSSDDIFLVSIPSLKTPAXXPKPVY

SEQ ID NO: 49175 - protein, 27 aa, Artificial Sequence
  Cyclic GFR-binding peptide
  MOD_RES (2)..(2): Xaa is C or S
KXSKVIMNSLQEIKPTKGIYYVIPLPE

SEQ ID NO: 49176 - protein, 29 aa, Artificial Sequence
  Cyclic GFR-binding peptide
  MOD_RES (27)..(28): Xaa is C or S
NEYQKYIVNSSDDIFLVSIPSLKTPAXXP

SEQ ID NO: 49177 - protein, 25 aa, Artificial Sequence
  Cyclic GFR-binding peptide
VMNSLQEVKPTRGVYYVIPLPELDQ

SEQ ID NO: 49178 - protein, 28 aa, Artificial Sequence
  Cyclic GFR-binding peptide
  MOD_RES (1)..(1): Xaa is C or S
XARVVMNNSLQEIVNSSDDYYLVTLPEL

SEQ ID NO: 49179 - protein, 24 aa, Artificial Sequence
  Cyclic GFR-binding peptide
VMEEYQKYVVKDYEDIFLMSIPSL

SEQ ID NO: 49180 - protein, 23 aa, Artificial Sequence
  Cyclic GFR-binding peptide
EYQKYIVNSSDDIFLVSIPSLKT

SEQ ID NO: 49181 - protein, 33 aa, Artificial Sequence
  Cyclic GFR-binding peptide
  MOD_RES (2)..(4): Xaa is C or S
HXGXARVVMNEYQKYIVNSSDDIFLVSIPSLQT

SEQ ID NO: 49182 - protein, 28 aa, Artificial Sequence
  Cyclic GFR-binding peptide
  MOD_RES (27)..(28): Xaa is C or S
DNSLQEVVKENEDYYLMTLPELETPVXX

SEQ ID NO: 49183 - protein, 40 aa, Artificial Sequence; identical to SEQ ID NO: 9060
  Cyclic GFR-binding peptide
  MOD_RES (1)..(3)..(35): Xaa is C or S

SEQ ID NO: 49184 - protein, 31 aa, Artificial Sequence; identical to SEQ ID NO: 9061
  Cyclic GFR-binding peptide
  MOD_RES (1)..(1): Xaa is C or S

SEQ ID NO: 49185 - protein, 42 aa, Artificial Sequence; identical to SEQ ID NO: 9062
  Cyclic GFR-binding peptide
  MOD_RES (2)..(4)..(36)..(37): Xaa is C or S

SEQ ID NO: 49186 - protein, 25 aa, Artificial Sequence
  Cyclic GFR-binding peptide
VMNNSLQEIVNSSDDYYVVPLPELQ

SEQ ID NO: 49187 - protein, 30 aa, Artificial Sequence
  Cyclic GFR-binding peptide
  MOD_RES (30)..(30): Xaa is C or S
RVIMNSLQEVKPKRGVYYLITLPELAQPVX

SEQ ID NO: 49188 - protein, 36 aa, Artificial Sequence; identical to SEQ ID NO: 9065
  Cyclic GFR-binding peptide
  MOD_RES (2)..(4)..(35)..(36): Xaa is C or S

SEQ ID NO: 49189 - protein, 20 aa, Artificial Sequence
  Cyclic GFR-binding peptide
NSLQEIKPTKGIYYVIPLPE

SEQ ID NO: 49190 - protein, 33 aa, Artificial Sequence
  Cyclic GFR-binding peptide
  MOD_RES (1)..(3): Xaa is C or S
XGXARVVMNNSLQEIVNSSDDYYLVTLPELQTP

SEQ ID NO: 49191 - protein, 33 aa, Artificial Sequence; identical to SEQ ID NO: 9066
  Cyclic GFR-binding peptide
  MOD_RES (1)..(3): Xaa is C or S

SEQ ID NO: 49192 - protein, 31 aa, Artificial Sequence
  Cyclic GFR-binding peptide
  MOD_RES (30)..(31): Xaa is C or S
KVIMEYQKYIKPTKGIIFLISIPSLDQSVXX

SEQ ID NO: 49193 - protein, 36 aa, Artificial Sequence; identical to SEQ ID NO: 9069
  Cyclic GFR-binding peptide
  MOD_RES (31)..(32): Xaa is C or S

SEQ ID NO: 49194 - protein, 25 aa, Artificial Sequence
  Cyclic GFR-binding peptide
EYQKYVKPKRGVIFLISIPSLAQPV

SEQ ID NO: 49195 - protein, 35 aa, Artificial Sequence; identical to SEQ ID NO: 9070
  Cyclic GFR-binding peptide
  MOD_RES (32)..(33): Xaa is C or S

SEQ ID NO: 49196 - protein, 33 aa, Artificial Sequence; identical to SEQ ID NO: 9071
  Cyclic GFR-binding peptide
  MOD_RES (31)..(32): Xaa is C or S

SEQ ID NO: 49197 - protein, 29 aa, Artificial Sequence
  Cyclic GFR-binding peptide
  MOD_RES (28)..(29): Xaa is C or S
MDNSLQEVVNNASDYYVIPLPELRTPVXX

SEQ ID NO: 49198 - protein, 34 aa, Artificial Sequence; identical to SEQ ID NO: 9073
  Cyclic GFR-binding peptide
  MOD_RES (31)..(32): Xaa is C or S

SEQ ID NO: 49199 - protein, 27 aa, Artificial Sequence
  Cyclic GFR-binding peptide
  MOD_RES (1)..(1): Xaa is C or S
XARVVMNEYQKYIVNSSDDIFLVSIPS

SEQ ID NO: 49200 - protein, 38 aa, Artificial Sequence; identical to SEQ ID NO: 9074
  Cyclic GFR-binding peptide
  MOD_RES (1)..(32)..(33): Xaa is C or S

SEQ ID NO: 49201 - protein, 33 aa, Artificial Sequence
  Cyclic GFR-binding peptide
  MOD_RES (27)..(28): Xaa is C or S
NNSLQEIVNSSDDYYVVPLPELKTPAXXPKPVY

SEQ ID NO: 49202 - protein, 34 aa, Artificial Sequence
  Cyclic GFR-binding peptide
  MOD_RES (28)..(29): Xaa is C or S
IMNSLQEIKPTKGIYYVIPLPELDQSVXXPSASA

SEQ ID NO: 49203 - protein, 20 aa, Artificial Sequence
  Cyclic GFR-binding peptide
NSLQEVKPKRGVYYLITLPE

SEQ ID NO: 49204 - protein, 22 aa, Artificial Sequence
  Cyclic GFR-binding peptide
NSLQEIKPTKGIYYVIPLPELD

SEQ ID NO: 49205 - protein, 37 aa, Artificial Sequence; identical to SEQ ID NO: 9075
  Cyclic GFR-binding peptide
  MOD_RES (31)..(32): Xaa is C or S

SEQ ID NO: 49206 - protein, 33 aa, Artificial Sequence
  Cyclic GFR-binding peptide
  MOD_RES (2)..(4): Xaa is C or S
SXKXSRVIMNSLQEVKPKRGVYYLITLPELAQP

SEQ ID NO: 49207 - protein, 35 aa, Artificial Sequence
  Cyclic GFR-binding peptide
  MOD_RES (29)..(30): Xaa is C or S
VMNEYQKYIVNSSDDIFLVSIPSLQTPAXXPKPVT

SEQ ID NO: 49208 - protein, 26 aa, Artificial Sequence
  Cyclic GFR-binding peptide
EVVMENSLQEVVKDYEDYYLMTLPEL

SEQ ID NO: 49209 - protein, 30 aa, Artificial Sequence
  Cyclic GFR-binding peptide
ARVVMNNSLQEIVNSSDDYYVVPLPELQTP

SEQ ID NO: 49210 - protein, 35 aa, Artificial Sequence
  Cyclic GFR-binding peptide
  MOD_RES (30)..(31): Xaa is C or S
KVIMNSLQEIKPTKGIYYVIPLPELDQSVXXPSAS

SEQ ID NO: 49211 - protein, 31 aa, Artificial Sequence
  Cyclic GFR-binding peptide
  MOD_RES (26)..(27): Xaa is C or S
NSLQEIVNSSDDYYLVTLPELKTPAXXPKPV

SEQ ID NO: 49212 - protein, 26 aa, Artificial Sequence
  Cyclic GFR-binding peptide
DRYKKLVVNNASDFYLISIANLRTPV

SEQ ID NO: 49213 - protein, 37 aa, Artificial Sequence; identical to SEQ ID NO: 9076
  Cyclic GFR-binding peptide
  MOD_RES (2)..(4)..(36)..(37): Xaa is C or S

SEQ ID NO: 49214 - protein, 33 aa, Artificial Sequence
  Cyclic GFR-binding peptide
  MOD_RES (2)..(4): Xaa is C or S
RXGXGEVVMDEYQKYVVKENEDIFLMSIPSLET

SEQ ID NO: 49215 - protein, 38 aa, Artificial Sequence; identical to SEQ ID NO: 9078
  Cyclic GFR-binding peptide
  MOD_RES (1)..(33)..(34): Xaa is C or S

SEQ ID NO: 49216 - protein, 33 aa, Artificial Sequence; identical to SEQ ID NO: 9079
  Cyclic GFR-binding peptide
  MOD_RES (31)..(32): Xaa is C or S

SEQ ID NO: 49217 - protein, 32 aa, Artificial Sequence
  Cyclic GFR-binding peptide
  MOD_RES (2)..(2): Xaa is C or S
GXARVVMNEYQKYIVNSSDDIFLVSIPSLQTP

SEQ ID NO: 49218 - protein, 28 aa, Artificial Sequence
  Cyclic GFR-binding peptide
VMDNSLQEVVKENEDYYVMPLPELETPV

SEQ ID NO: 49219 - protein, 38 aa, Artificial Sequence; identical to SEQ ID NO: 9080
  Cyclic GFR-binding peptide
  MOD_RES (1)..(3)..(34)..(35): Xaa is C or S

SEQ ID NO: 49220 - protein, 26 aa, Artificial Sequence
  Cyclic GFR-binding peptide
VIMEYQKYIKPTKGIIFLISIPSLDQ

SEQ ID NO: 49221 - protein, 34 aa, Artificial Sequence; identical to SEQ ID NO: 9082
  Cyclic GFR-binding peptide
  MOD_RES (1)..(3): Xaa is C or S

SEQ ID NO: 49222 - protein, 33 aa, Artificial Sequence
  Cyclic GFR-binding peptide
  MOD_RES (28)..(29): Xaa is C or S
MENSLQEVVKDYEDYYVMPLPELETPVXXAKPI

SEQ ID NO: 49223 - protein, 33 aa, Artificial Sequence
  Cyclic GFR-binding peptide
  MOD_RES (30)..(31): Xaa is C or S
VVMNEYQKYIVNSSDDIFLVSIPSLQTPAXXPK

SEQ ID NO: 49224 - protein, 34 aa, Artificial Sequence
  Cyclic GFR-binding peptide
  MOD_RES (30)..(31): Xaa is C or S
RVIMEYQKYVKPKRGVIFLISIPSLAQPVXXPAA

SEQ ID NO: 49225 - protein, 35 aa, Artificial Sequence; identical to SEQ ID NO: 9083
  Cyclic GFR-binding peptide
  MOD_RES (2)..(4)..(35): Xaa is C or S

SEQ ID NO: 49226 - protein, 36 aa, Artificial Sequence; identical to SEQ ID NO: 9085
  Cyclic GFR-binding peptide
  MOD_RES (1)..(32)..(33): Xaa is C or S

SEQ ID NO: 49227 - protein, 30 aa, Artificial Sequence
  Cyclic GFR-binding peptide
  MOD_RES (30)..(30): Xaa is C or S
VVMDNSLQEVVKENEDYYLMTLPELETPVX

SEQ ID NO: 49228 - protein, 35 aa, Artificial Sequence
  Cyclic GFR-binding peptide
  MOD_RES (29)..(30): Xaa is C or S
VMENSLQEVVKDYEDYYVMPLPELETPVXXAKPIS

SEQ ID NO: 49229 - protein, 40 aa, Artificial Sequence; identical to SEQ ID NO: 9086
  Cyclic GFR-binding peptide
  MOD_RES (1)..(3)..(35)..(36): Xaa is C or S

SEQ ID NO: 49230 - protein, 40 aa, Artificial Sequence; identical to SEQ ID NO: 9087
  Cyclic GFR-binding peptide
  MOD_RES (2)..(4)..(36)..(37): Xaa is C or S

SEQ ID NO: 49231 - protein, 30 aa, Artificial Sequence
  Cyclic GFR-binding peptide
  MOD_RES (28)..(29): Xaa is C or S
MENSLQEVVKDYEDYYVMPLPELETPVXXA

SEQ ID NO: 49232 - protein, 31 aa, Artificial Sequence
  Cyclic GFR-binding peptide
  MOD_RES (1)..(3): Xaa is C or S
XKXSKVIMNSLQEIKPTKGIYYVIPLPELDQ

SEQ ID NO: 49233 - protein, 32 aa, Artificial Sequence
  Cyclic GFR-binding peptide
  MOD_RES (26)..(26): Xaa is C or S
NSLQEIVNSSDDYYLVTLPELKTPAXTPKTVH

SEQ ID NO: 49234 - protein, 24 aa, Artificial Sequence
  Cyclic GFR-binding peptide
IMNSLQEIKPTKGIYYVIPLPELD

SEQ ID NO: 49235 - protein, 28 aa, Artificial Sequence
  Cyclic GFR-binding peptide
  MOD_RES (26)..(27): Xaa is C or S
NSLQEIVNSSDDYYVVPLPELKTPAXXP

SEQ ID NO: 49236 - protein, 25 aa, Artificial Sequence
  Cyclic GFR-binding peptide
EVVMDRYKKLVVNNASDFYLISIAN

SEQ ID NO: 49237 - protein, 35 aa, Artificial Sequence; identical to SEQ ID NO: 9090
  Cyclic GFR-binding peptide
  MOD_RES (1)..(3)..(35): Xaa is C or S

SEQ ID NO: 49238 - protein, 30 aa, Artificial Sequence
  Cyclic GFR-binding peptide
  MOD_RES (27)..(27): Xaa is C or S
NEYQKYIVNSSDDIFLVSIPSLKTPAXTPK

SEQ ID NO: 49239 - protein, 29 aa, Artificial Sequence
  Cyclic GFR-binding peptide
  MOD_RES (26)..(27): Xaa is C or S
NSLQEIVNSSDDYYVVPLPELQTPAXXPK

SEQ ID NO: 49240 - protein, 35 aa, Artificial Sequence
  Cyclic GFR-binding peptide
  MOD_RES (30)..(30): Xaa is C or S
VVMNEYQKYIVNSSDDIFLVSIPSLKTPAXTPKTV

SEQ ID NO: 49241 - protein, 36 aa, Artificial Sequence; identical to SEQ ID NO: 9093
  Cyclic GFR-binding peptide
  MOD_RES (1)..(3)..(35): Xaa is C or S

SEQ ID NO: 49242 - protein, 33 aa, Artificial Sequence
  Cyclic GFR-binding peptide
  MOD_RES (1)..(3): Xaa is C or S
XGXGEVVMEEYQKYVVKDYEDIFLMSIPSLETP

SEQ ID NO: 49243 - protein, 32 aa, Artificial Sequence
  Cyclic GFR-binding peptide
  MOD_RES (2)..(2): Xaa is C or S
GXARVVMNNSLQEIVNSSDDYYVVPLPELQTP

SEQ ID NO: 49244 - protein, 32 aa, Artificial Sequence
  Cyclic GFR-binding peptide
  MOD_RES (29)..(30): Xaa is C or S
VMNEYQKYIVNSSDDIFLVSIPSLQTPAXXPK

SEQ ID NO: 49245 - protein, 36 aa, Artificial Sequence; identical to SEQ ID NO: 9096
  Cyclic GFR-binding peptide
  MOD_RES (2)..(34)..(35): Xaa is C or S

SEQ ID NO: 49246 - protein, 30 aa, Artificial Sequence
  Cyclic GFR-binding peptide
  MOD_RES (2)..(4): Xaa is C or S
SXKXSKVVMEYQKYVKPTRGVIFLISIPSL

SEQ ID NO: 49247 - protein, 30 aa, Artificial Sequence
  Cyclic GFR-binding peptide
  MOD_RES (28)..(29): Xaa is C or S
MDRYKKLVVNNASDFYLISIANLRTPVXXT

SEQ ID NO: 49248 - protein, 23 aa, Artificial Sequence
  Cyclic GFR-binding peptide
NSLQEVVNNASDYYVIPLPELRT

SEQ ID NO: 49249 - protein, 32 aa, Artificial Sequence
  Cyclic GFR-binding peptide
  MOD_RES (2)..(4): Xaa is C or S
RXGXGEVVMENSLQEVVKDYEDYYVMPLPELE

SEQ ID NO: 49250 - protein, 24 aa, Artificial Sequence
  Cyclic GFR-binding peptide
EYQKYIVNSSDDIFLVSIPSLKTP

SEQ ID NO: 49251 - protein, 20 aa, Artificial Sequence
  Cyclic GFR-binding peptide
NSLQEVVNNASDYYVIPLPE

SEQ ID NO: 49252 - protein, 34 aa, Artificial Sequence
  Cyclic GFR-binding peptide
  MOD_RES (28)..(29): Xaa is C or S
IMEYQKYVKPKRGVIFLISIPSLAQPVXXPAASA

SEQ ID NO: 49253 - protein, 37 aa, Artificial Sequence; identical to SEQ ID NO: 9099
  Cyclic GFR-binding peptide
  MOD_RES (31)..(32): Xaa is C or S

SEQ ID NO: 49254 - protein, 35 aa, Artificial Sequence; identical to SEQ ID NO: 9100
  Cyclic GFR-binding peptide
  MOD_RES (2)..(4)..(35): Xaa is C or S

SEQ ID NO: 49255 - protein, 21 aa, Artificial Sequence
  Cyclic GFR-binding peptide
DNSLQEVVKENEDYYLMTLPE

SEQ ID NO: 49256 - protein, 35 aa, Artificial Sequence; identical to SEQ ID NO: 9101
  Cyclic GFR-binding peptide
  MOD_RES (31)..(32): Xaa is C or S

SEQ ID NO: 49257 - protein, 28 aa, Artificial Sequence
  Cyclic GFR-binding peptide
VVMNSLQEVKPTRGVYYVIPLPELDQPV

SEQ ID NO: 49258 - protein, 29 aa, Artificial Sequence
  Cyclic GFR-binding peptide
  MOD_RES (27)..(28): Xaa is C or S
NNSLQEIVNSSDDYYVVPLPELKTPAXXP

SEQ ID NO: 49259 - protein, 34 aa, Artificial Sequence
  Cyclic GFR-binding peptide
  MOD_RES (30)..(31): Xaa is C or S
VVMENSLQEVVKDYEDYYVMPLPELETPVXXAKP

SEQ ID NO: 49260 - protein, 38 aa, Artificial Sequence; identical to SEQ ID NO: 9108
  Cyclic GFR-binding peptide
  MOD_RES (1)..(3)..(34)..(35): Xaa is C or S

SEQ ID NO: 49261 - protein, 33 aa, Artificial Sequence; identical to SEQ ID NO: 9110
  Cyclic GFR-binding peptide
  MOD_RES (31)..(32): Xaa is C or S

SEQ ID NO: 49262 - protein, 31 aa, Artificial Sequence
  Cyclic GFR-binding peptide
  MOD_RES (29)..(30): Xaa is C or S
VMNNSLQEIVNSSDDYYVVPLPELKTPAXXP

SEQ ID NO: 49263 - protein, 30 aa, Artificial Sequence
  Cyclic GFR-binding peptide
  MOD_RES (1)..(3): Xaa is C or S
XGXARVVMNNSLQEIVNSSDDYYLVTLPEL

SEQ ID NO: 49264 - protein, 34 aa, Artificial Sequence; identical to SEQ ID NO: 9112
  Cyclic GFR-binding peptide
  MOD_RES (1)..(3)..(34): Xaa is C or S

SEQ ID NO: 49265 - protein, 39 aa, Artificial Sequence; identical to SEQ ID NO: 9113
  Cyclic GFR-binding peptide
  MOD_RES (2)..(4)..(36)..(37): Xaa is C or S

SEQ ID NO: 49266 - protein, 24 aa, Artificial Sequence
  Cyclic GFR-binding peptide
MNNSLQEIVNSSDDYYVVPLPELQ

SEQ ID NO: 49267 - protein, 32 aa, Artificial Sequence
  Cyclic GFR-binding peptide
  MOD_RES (28)..(29): Xaa is C or S
MNNSLQEIVNSSDDYYLVTLPELQTPAXXPKP

SEQ ID NO: 49268 - protein, 28 aa, Artificial Sequence
  Cyclic GFR-binding peptide
  MOD_RES (2)..(2): Xaa is C or S
KXSRVIMNSLQEVKPKRGVYYLITLPEL

SEQ ID NO: 49269 - protein, 32 aa, Artificial Sequence
  Cyclic GFR-binding peptide
  MOD_RES (26)..(27): Xaa is C or S
NSLQEIKPTKGIYYVIPLPELDQSVXXPSASA

SEQ ID NO: 49270 - protein, 26 aa, Artificial Sequence
  Cyclic GFR-binding peptide
SEVVMDNSLQEVVNNASDYYVIPLPE

SEQ ID NO: 49271 - protein, 38 aa, Artificial Sequence; identical to SEQ ID NO: 9115
  Cyclic GFR-binding peptide
  MOD_RES (32)..(33): Xaa is C or S

SEQ ID NO: 49272 - protein, 31 aa, Artificial Sequence; identical to SEQ ID NO: 9116
  Cyclic GFR-binding peptide

SEQ ID NO: 49273 - protein, 27 aa, Artificial Sequence
  Cyclic GFR-binding peptide
MNNSLQEIVNSSDDYYVVPLPELQTPA

SEQ ID NO: 49274 - protein, 41 aa, Artificial Sequence; identical to SEQ ID NO: 9117
  Cyclic GFR-binding peptide
  MOD_RES (2)..(4)..(36)..(37): Xaa is C or S

SEQ ID NO: 49275 - protein, 35 aa, Artificial Sequence; identical to SEQ ID NO: 9118
  Cyclic GFR-binding peptide
  MOD_RES (32)..(33): Xaa is C or S

SEQ ID NO: 49276 - protein, 31 aa, Artificial Sequence
  Cyclic GFR-binding peptide
  MOD_RES (2)..(2): Xaa is C or S
GXGEVVMDNSLQEVVKENEDYYLMTLPELET

SEQ ID NO: 49277 - protein, 31 aa, Artificial Sequence; identical to SEQ ID NO: 9119
  Cyclic GFR-binding peptide
  MOD_RES (31)..(31): Xaa is C or S

SEQ ID NO: 49278 - protein, 29 aa, Artificial Sequence
  Cyclic GFR-binding peptide
  MOD_RES (26)..(27): Xaa is C or S
EYQKYVKPTRGVIFLISIPSLDQPVXXPS

SEQ ID NO: 49279 - protein, 30 aa, Artificial Sequence
  Cyclic GFR-binding peptide
  MOD_RES (26)..(27): Xaa is C or S
NSLQEIVNSSDDYYLVTLPELKTPAXXPKP

SEQ ID NO: 49280 - protein, 25 aa, Artificial Sequence
  Cyclic GFR-binding peptide
MDNSLQEVVNNASDYYLITLPELRT

SEQ ID NO: 49281 - protein, 28 aa, Artificial Sequence
  Cyclic GFR-binding peptide
SRVVMNNSLQEIVNSSDDYYVVPLPELK

SEQ ID NO: 49282 - protein, 34 aa, Artificial Sequence; identical to SEQ ID NO: 9122
  Cyclic GFR-binding peptide
  MOD_RES (1)..(3)..(34): Xaa is C or S

SEQ ID NO: 49283 - protein, 22 aa, Artificial Sequence
  Cyclic GFR-binding peptide
NSLQEVVNNASDYYLITLPELR

SEQ ID NO: 49284 - protein, 31 aa, Artificial Sequence
  Cyclic GFR-binding peptide
  MOD_RES (2)..(2): Xaa is C or S
GXSEVVMDRYKKLVVNNASDFYLISIANLRT

SEQ ID NO: 49285 - protein, 31 aa, Artificial Sequence
  Cyclic GFR-binding peptide
  MOD_RES (30)..(31): Xaa is C or S
VVMDNSLQEVVNNASDYYLITLPELRTPVXX

SEQ ID NO: 49286 - protein, 25 aa, Artificial Sequence
  Cyclic GFR-binding peptide
RVIMNSLQEVKPKRGVYYLITLPEL

SEQ ID NO: 49287 - protein, 41 aa, Artificial Sequence; identical to SEQ ID NO: 9127
  Cyclic GFR-binding peptide
  MOD_RES (2)..(4)..(36)..(37): Xaa is C or S

SEQ ID NO: 49288 - protein, 26 aa, Artificial Sequence
  Cyclic GFR-binding peptide
VVMDRYKKLVVNNASDFYLISIANLR

SEQ ID NO: 49289 - protein, 35 aa, Artificial Sequence; identical to SEQ ID NO: 9128
  Cyclic GFR-binding peptide
  MOD_RES (1)..(32)..(33): Xaa is C or S

SEQ ID NO: 49290 - protein, 28 aa, Artificial Sequence
  Cyclic GFR-binding peptide
  MOD_RES (1)..(1): Xaa is C or S
XSRVIMNSLQEVKPKRGVYYLITLPELA

SEQ ID NO: 49291 - protein, 29 aa, Artificial Sequence
  Cyclic GFR-binding peptide
  MOD_RES (1)..(1): Xaa is C or S
XSKVVMNSLQEVKPTRGVYYVIPLPELDQ

SEQ ID NO: 49292 - protein, 22 aa, Artificial Sequence
  Cyclic GFR-binding peptide
IMNSLQEIKPTKGIYYVIPLPE

SEQ ID NO: 49293 - protein, 33 aa, Artificial Sequence; identical to SEQ ID NO: 9131
  Cyclic GFR-binding peptide
  MOD_RES (32)..(33): Xaa is C or S

SEQ ID NO: 49294 - protein, 28 aa, Artificial Sequence
  Cyclic GFR-binding peptide
RVVMNNSLQEIVNSSDDYYLVTLPELKT

SEQ ID NO: 49295 - protein, 30 aa, Artificial Sequence
  Cyclic GFR-binding peptide
  MOD_RES (1)..(1): Xaa is C or S
XSRVIMNSLQEVKPKRGVYYLITLPELAQP

SEQ ID NO: 49296 - protein, 34 aa, Artificial Sequence; identical to SEQ ID NO: 9133
  Cyclic GFR-binding peptide
  MOD_RES (31)..(31): Xaa is C or S

SEQ ID NO: 49297 - protein, 31 aa, Artificial Sequence
  Cyclic GFR-binding peptide
  MOD_RES (29)..(30): Xaa is C or S
VMDRYKKLVVNNASDFYLISIANLRTPVXXT

SEQ ID NO: 49298 - protein, 31 aa, Artificial Sequence
  Cyclic GFR-binding peptide
  MOD_RES (26)..(27): Xaa is C or S
NSLQEVKPKRGVYYLITLPELAQPVXXPAAS

SEQ ID NO: 49299 - protein, 34 aa, Artificial Sequence
  Cyclic GFR-binding peptide
  MOD_RES (29)..(30): Xaa is C or S
VMNNSLQEIVNSSDDYYLVTLPELQTPAXXPKPV

SEQ ID NO: 49300 - protein, 37 aa, Artificial Sequence; identical to SEQ ID NO: 9136
  Cyclic GFR-binding peptide
  MOD_RES (31)..(31): Xaa is C or S

SEQ ID NO: 49301 - protein, 30 aa, Artificial Sequence
  Cyclic GFR-binding peptide
GEVVMDEYQKYVVKENEDIFLMSIPSLETP

SEQ ID NO: 49302 - protein, 32 aa, Artificial Sequence; identical to SEQ ID NO: 9137
  Cyclic GFR-binding peptide
  MOD_RES (32)..(32): Xaa is C or S

SEQ ID NO: 49303 - protein, 26 aa, Artificial Sequence
  Cyclic GFR-binding peptide
KVIMEYQKYIKPTKGIIFLISIPSLD

SEQ ID NO: 49304 - protein, 27 aa, Artificial Sequence
  Cyclic GFR-binding peptide
IMNSLQEIKPTKGIYYVIPLPELDQSV

SEQ ID NO: 49305 - protein, 29 aa, Artificial Sequence
  Cyclic GFR-binding peptide
  MOD_RES (2)..(4): Xaa is C or S
SXKXSRVIMEYQKYVKPKRGVIFLISIPS

SEQ ID NO: 49306 - protein, 30 aa, Artificial Sequence
  Cyclic GFR-binding peptide
  MOD_RES (2)..(4): Xaa is C or S
SXKXSKVIMNSLQEIKPTKGIYYVIPLPEL

SEQ ID NO: 49307 - protein, 29 aa, Artificial Sequence
  Cyclic GFR-binding peptide
EVVMDQYNKLVVNNASDLYLISIASLRTP

SEQ ID NO: 49308 - protein, 28 aa, Artificial Sequence
  Cyclic GFR-binding peptide
SRVVMNNSLQEIVNSSDDYYLVTLPELK

SEQ ID NO: 49309 - protein, 25 aa, Artificial Sequence
  Cyclic GFR-binding peptide
VIMEYQKYVKPKRGVIFLISIPSLA

SEQ ID NO: 49310 - protein, 27 aa, Artificial Sequence
  Cyclic GFR-binding peptide
VVMNNSLQEIVNSSDDYYVVPLPELQT

SEQ ID NO: 49311 - protein, 34 aa, Artificial Sequence; identical to SEQ ID NO: 9140
  Cyclic GFR-binding peptide
  MOD_RES (1)..(33): Xaa is C or S

SEQ ID NO: 49312 - protein, 33 aa, Artificial Sequence
  Cyclic GFR-binding peptide
  MOD_RES (30)..(31): Xaa is C or S
VVMDQYNKLVVNNASDLYLISIASLRTPVXXTP

SEQ ID NO: 49313 - protein, 36 aa, Artificial Sequence; identical to SEQ ID NO: 9143
  Cyclic GFR-binding peptide
  MOD_RES (1)..(33)..(34): Xaa is C or S

SEQ ID NO: 49314 - protein, 33 aa, Artificial Sequence; identical to SEQ ID NO: 9144
  Cyclic GFR-binding peptide
  MOD_RES (31)..(32): Xaa is C or S

SEQ ID NO: 49315 - protein, 37 aa, Artificial Sequence; identical to SEQ ID NO: 9145
  Cyclic GFR-binding peptide
  MOD_RES (1)..(32)..(33): Xaa is C or S

SEQ ID NO: 49316 - protein, 28 aa, Artificial Sequence
  Cyclic GFR-binding peptide
SKVIMNSLQEIKPTKGIYYVIPLPELDQ

SEQ ID NO: 49317 - protein, 28 aa, Artificial Sequence
  Cyclic GFR-binding peptide
  MOD_RES (26)..(27): Xaa is C or S
NSLQEVVNNASDYYVIPLPELRTPVXXT

SEQ ID NO: 49318 - protein, 30 aa, Artificial Sequence
  Cyclic GFR-binding peptide
GEVVMEEYQKYVVKDYEDIFLMSIPSLETP

SEQ ID NO: 49319 - protein, 28 aa, Artificial Sequence
  Cyclic GFR-binding peptide
  MOD_RES (28)..(28): Xaa is C or S
MEEYQKYVVKDYEDIFLMSIPSLETPVX

SEQ ID NO: 49320 - protein, 31 aa, Artificial Sequence
  Cyclic GFR-binding peptide
  MOD_RES (27)..(28): Xaa is C or S
NEYQKYIVNSSDDIFLVSIPSLKTPAXXPKP

SEQ ID NO: 49321 - protein, 23 aa, Artificial Sequence
  Cyclic GFR-binding peptide
NSLQEIVNSSDDYYVVPLPELQT

SEQ ID NO: 49322 - protein, 33 aa, Artificial Sequence
  Cyclic GFR-binding peptide
  MOD_RES (27)..(28): Xaa is C or S
MEYQKYIKPTKGIIFLISIPSLDQSVXXPSASA

SEQ ID NO: 49323 - protein, 40 aa, Artificial Sequence; identical to SEQ ID NO: 9150
  Cyclic GFR-binding peptide
  MOD_RES (2)..(34): Xaa is C or S

SEQ ID NO: 49324 - protein, 28 aa, Artificial Sequence
  Cyclic GFR-binding peptide
  MOD_RES (2)..(2): Xaa is C or S
GXGEVVMDNSLQEVVKENEDYYLMTLPE

SEQ ID NO: 49325 - protein, 31 aa, Artificial Sequence; identical to SEQ ID NO: 9152
  Cyclic GFR-binding peptide

SEQ ID NO: 49326 - protein, 25 aa, Artificial Sequence
  Cyclic GFR-binding peptide
VVMDQYNKLVVNNASDLYLISIASL

SEQ ID NO: 49327 - protein, 26 aa, Artificial Sequence
  Cyclic GFR-binding peptide
MNSLQEVKPKRGVYYLITLPELAQPV

SEQ ID NO: 49328 - protein, 25 aa, Artificial Sequence
  Cyclic GFR-binding peptide
VVMDNSLQEVVKENEDYYLMTLPEL

SEQ ID NO: 49329 - protein, 32 aa, Artificial Sequence
  Cyclic GFR-binding peptide
  MOD_RES (28)..(29): Xaa is C or S
IMEYQKYVKPKRGVIFLISIPSLAQPVXXPAA

SEQ ID NO: 49330 - protein, 36 aa, Artificial Sequence; identical to SEQ ID NO: 9156
  Cyclic GFR-binding peptide
  MOD_RES (1)..(3)..(35)..(36): Xaa is C or S

SEQ ID NO: 49331 - protein, 28 aa, Artificial Sequence
  Cyclic GFR-binding peptide
  MOD_RES (26)..(26): Xaa is C or S
EYQKYIVNSSDDIFLVSIPSLKTPAXTP

SEQ ID NO: 49332 - protein, 30 aa, Artificial Sequence; identical to SEQ ID NO: 9161
  Cyclic GFR-binding peptide

SEQ ID NO: 49333 - protein, 27 aa, Artificial Sequence
  Cyclic GFR-binding peptide
EVVMDNSLQEVVNNASDYYLITLPELR

SEQ ID NO: 49334 - protein, 21 aa, Artificial Sequence
  Cyclic GFR-binding peptide
NSLQEVVNNASDYYVIPLPEL

SEQ ID NO: 49335 - protein, 27 aa, Artificial Sequence
  Cyclic GFR-binding peptide
VMNSLQEVKPTRGVYYVIPLPELDQPV

SEQ ID NO: 49336 - protein, 37 aa, Artificial Sequence; identical to SEQ ID NO: 9162
  Cyclic GFR-binding peptide
  MOD_RES (31)..(32): Xaa is C or S

SEQ ID NO: 49337 - protein, 36 aa, Artificial Sequence; identical to SEQ ID NO: 9163
  Cyclic GFR-binding peptide
  MOD_RES (2)..(4)..(36): Xaa is C or S

SEQ ID NO: 49338 - protein, 28 aa, Artificial Sequence
  Cyclic GFR-binding peptide
  MOD_RES (1)..(1): Xaa is C or S
XGEVVMDNSLQEVVKENEDYYVMPLPEL

SEQ ID NO: 49339 - protein, 40 aa, Artificial Sequence; identical to SEQ ID NO: 9164
  Cyclic GFR-binding peptide
  MOD_RES (2)..(34)..(35): Xaa is C or S

SEQ ID NO: 49340 - protein, 28 aa, Artificial Sequence
  Cyclic GFR-binding peptide
KVVMNSLQEVKPTRGVYYVIPLPELDQP

SEQ ID NO: 49341 - protein, 33 aa, Artificial Sequence
  Cyclic GFR-binding peptide
  MOD_RES (30)..(31): Xaa is C or S
VVMDNSLQEVVKENEDYYVMPLPELETPVXXAK

SEQ ID NO: 49342 - protein, 32 aa, Artificial Sequence
  Cyclic GFR-binding peptide
  MOD_RES (30)..(31): Xaa is C or S
RVIMEYQKYVKPKRGVIFLISIPSLAQPVXXP

SEQ ID NO: 49343 - protein, 28 aa, Artificial Sequence
  Cyclic GFR-binding peptide
RVVMNNSLQEIVNSSDDYYVVPLPELKT

SEQ ID NO: 49344 - protein, 20 aa, Artificial Sequence
  Cyclic GFR-binding peptide
NSLQEVKPTRGVYYVIPLPE

SEQ ID NO: 49345 - protein, 35 aa, Artificial Sequence; identical to SEQ ID NO: 9166
  Cyclic GFR-binding peptide
  MOD_RES (1)..(3)..(34)..(35): Xaa is C or S

SEQ ID NO: 49346 - protein, 36 aa, Artificial Sequence; identical to SEQ ID NO: 9168
  Cyclic GFR-binding peptide
  MOD_RES (32)..(32): Xaa is C or S

SEQ ID NO: 49347 - protein, 35 aa, Artificial Sequence; identical to SEQ ID NO: 9169
  Cyclic GFR-binding peptide
  MOD_RES (1)..(3)..(34)..(35): Xaa is C or S

SEQ ID NO: 49348 - protein, 31 aa, Artificial Sequence
  Cyclic GFR-binding peptide
  MOD_RES (27)..(28): Xaa is C or S
NNSLQEIVNSSDDYYVVPLPELKTPAXXPKP

SEQ ID NO: 49349 - protein, 28 aa, Artificial Sequence
  Cyclic GFR-binding peptide
EVVMDNSLQEVVNNASDYYLITLPELRT

SEQ ID NO: 49350 - protein, 25 aa, Artificial Sequence
  Cyclic GFR-binding peptide
MDNSLQEVVKENEDYYVMPLPELET

SEQ ID NO: 49351 - protein, 23 aa, Artificial Sequence
  Cyclic GFR-binding peptide
NSLQEVVKENEDYYVMPLPELET

SEQ ID NO: 49352 - protein, 28 aa, Artificial Sequence
  Cyclic GFR-binding peptide
  MOD_RES (1)..(1): Xaa is C or S
XSKVIMNSLQEIKPTKGIYYVIPLPELD

SEQ ID NO: 49353 - protein, 28 aa, Artificial Sequence
  Cyclic GFR-binding peptide
KVVMEYQKYVKPTRGVIFLISIPSLDQP

SEQ ID NO: 49354 - protein, 23 aa, Artificial Sequence
  Cyclic GFR-binding peptide
NNSLQEIVNSSDDYYVVPLPELQ

SEQ ID NO: 49355 - protein, 31 aa, Artificial Sequence
  Cyclic GFR-binding peptide
  MOD_RES (29)..(29): Xaa is C or S
VMNNSLQEIVNSSDDYYVVPLPELKTPAXTP

SEQ ID NO: 49356 - protein, 31 aa, Artificial Sequence
  Cyclic GFR-binding peptide
  MOD_RES (30)..(31): Xaa is C or S
VVMDRYKKLVVNNASDFYLISIANLRTPVXX

SEQ ID NO: 49357 - protein, 31 aa, Artificial Sequence
  Cyclic GFR-binding peptide
  MOD_RES (2)..(2): Xaa is C or S
KXSRVIMEYQKYVKPKRGVIFLISIPSLAQP

SEQ ID NO: 49358 - protein, 34 aa, Artificial Sequence
  Cyclic GFR-binding peptide
  MOD_RES (29)..(30): Xaa is C or S
VIMNSLQEVKPKRGVYYLITLPELAQPVXXPAAS

SEQ ID NO: 49359 - protein, 35 aa, Artificial Sequence; identical to SEQ ID NO: 9174
  Cyclic GFR-binding peptide
  MOD_RES (1)..(3)..(34)..(35): Xaa is C or S

SEQ ID NO: 49360 - protein, 27 aa, Artificial Sequence
  Cyclic GFR-binding peptide
  MOD_RES (26)..(27): Xaa is C or S
NSLQEIVNSSDDYYLVTLPELQTPAXX

SEQ ID NO: 49361 - protein, 32 aa, Artificial Sequence
  Cyclic GFR-binding peptide
  MOD_RES (2)..(2): Xaa is C or S
GXSRVVMNNSLQEIVNSSDDYYVVPLPELKTP

SEQ ID NO: 49362 - protein, 37 aa, Artificial Sequence; identical to SEQ ID NO: 9175
  Cyclic GFR-binding peptide
  MOD_RES (1)..(3)..(35)..(36): Xaa is C or S

SEQ ID NO: 49363 - protein, 27 aa, Artificial Sequence
  Cyclic GFR-binding peptide
KVIMNSLQEIKPTKGIYYVIPLPELDQ

SEQ ID NO: 49364 - protein, 33 aa, Artificial Sequence
  Cyclic GFR-binding peptide
  MOD_RES (1)..(3): Xaa is C or S
XGXSRVVMNNSLQEIVNSSDDYYVVPLPELKTP

SEQ ID NO: 49365 - protein, 28 aa, Artificial Sequence
  Cyclic GFR-binding peptide
  MOD_RES (28)..(28): Xaa is C or S
MDNSLQEVVNNASDYYVIPLPELRTPVX

SEQ ID NO: 49366 - protein, 34 aa, Artificial Sequence
  Cyclic GFR-binding peptide
  MOD_RES (2)..(4): Xaa is C or S
HXGXARVVMNNSLQEIVNSSDDYYLVTLPELQTP

SEQ ID NO: 49367 - protein, 31 aa, Artificial Sequence
  Cyclic GFR-binding peptide
  MOD_RES (2)..(4): Xaa is C or S
RXGXSEVVMDNSLQEVVNNASDYYVIPLPEL

SEQ ID NO: 49368 - protein, 31 aa, Artificial Sequence; identical to SEQ ID NO: 9180
  Cyclic GFR-binding peptide

SEQ ID NO: 49369 - protein, 27 aa, Artificial Sequence
  Cyclic GFR-binding peptide
VIMNSLQEVKPKRGVYYLITLPELAQP

SEQ ID NO: 49370 - protein, 39 aa, Artificial Sequence; identical to SEQ ID NO: 9181
  Cyclic GFR-binding peptide
  MOD_RES (1)..(3)..(35): Xaa is C or S

SEQ ID NO: 49371 - protein, 28 aa, Artificial Sequence
  Cyclic GFR-binding peptide
VVMDRYKKLVVNNASDFYLISIANLRTP

SEQ ID NO: 49372 - protein, 31 aa, Artificial Sequence
  Cyclic GFR-binding peptide
  MOD_RES (28)..(29): Xaa is C or S
MNNSLQEIVNSSDDYYVVPLPELQTPAXXPK

SEQ ID NO: 49373 - protein, 37 aa, Artificial Sequence; identical to SEQ ID NO: 9182
  Cyclic GFR-binding peptide
  MOD_RES (1)..(33): Xaa is C or S

SEQ ID NO: 49374 - protein, 33 aa, Artificial Sequence; identical to SEQ ID NO: 9183
  Cyclic GFR-binding peptide
  MOD_RES (31)..(32): Xaa is C or S

SEQ ID NO: 49375 - protein, 38 aa, Artificial Sequence; identical to SEQ ID NO: 9184
  Cyclic GFR-binding peptide
  MOD_RES (32)..(33): Xaa is C or S

SEQ ID NO: 49376 - protein, 32 aa, Artificial Sequence; identical to SEQ ID NO: 9185
  Cyclic GFR-binding peptide
  MOD_RES (1)..(32): Xaa is C or S

SEQ ID NO: 49377 - protein, 34 aa, Artificial Sequence; identical to SEQ ID NO: 9186
  Cyclic GFR-binding peptide
  MOD_RES (1)..(3)..(34): Xaa is C or S

SEQ ID NO: 49378 - protein, 29 aa, Artificial Sequence
  Cyclic GFR-binding peptide
  MOD_RES (1)..(3): Xaa is C or S
XKXSKVVMNSLQEVKPTRGVYYVIPLPEL

SEQ ID NO: 49379 - protein, 33 aa, Artificial Sequence
  Cyclic GFR-binding peptide
  MOD_RES (27)..(28): Xaa is C or S
MEYQKYVKPTRGVIFLISIPSLDQPVXXPSASA

SEQ ID NO: 49380 - protein, 32 aa, Artificial Sequence; identical to SEQ ID NO: 9187
  Cyclic GFR-binding peptide
  MOD_RES (31)..(31): Xaa is C or S

SEQ ID NO: 49381 - protein, 34 aa, Artificial Sequence; identical to SEQ ID NO: 9189
  Cyclic GFR-binding peptide
  MOD_RES (1)..(3)..(34): Xaa is C or S

SEQ ID NO: 49382 - protein, 32 aa, Artificial Sequence
  Cyclic GFR-binding peptide
  MOD_RES (28)..(29): Xaa is C or S
MDRYKKLVVNNASDFYLISIANLRTPVXXTPP

SEQ ID NO: 49383 - protein, 27 aa, Artificial Sequence
  Cyclic GFR-binding peptide
ARVVMNNSLQEIVNSSDDYYVVPLPEL

SEQ ID NO: 49384 - protein, 34 aa, Artificial Sequence
  Cyclic GFR-binding peptide
  MOD_RES (2)..(4): Xaa is C or S
RXGXGEVVMDNSLQEVVKENEDYYLMTLPELETP

SEQ ID NO: 49385 - protein, 31 aa, Artificial Sequence
  Cyclic GFR-binding peptide
  MOD_RES (27)..(27): Xaa is C or S
NNSLQEIVNSSDDYYVVPLPELKTPAXTPKT

SEQ ID NO: 49386 - protein, 32 aa, Artificial Sequence
  Cyclic GFR-binding peptide
  MOD_RES (2)..(2): Xaa is C or S
GXGEVVMENSLQEVVKDYEDYYVMPLPELETP

SEQ ID NO: 49387 - protein, 27 aa, Artificial Sequence
  Cyclic GFR-binding peptide
  MOD_RES (27)..(27): Xaa is C or S
DNSLQEVVNNASDYYLITLPELRTPVX

SEQ ID NO: 49388 - protein, 38 aa, Artificial Sequence; identical to SEQ ID NO: 9194
  Cyclic GFR-binding peptide
  MOD_RES (32)..(33): Xaa is C or S

SEQ ID NO: 49389 - protein, 27 aa, Artificial Sequence
  Cyclic GFR-binding peptide
SRVVMNNSLQEIVNSSDDYYVVPLPEL

SEQ ID NO: 49390 - protein, 37 aa, Artificial Sequence; identical to SEQ ID NO: 9195
  Cyclic GFR-binding peptide
  MOD_RES (1)..(33)..(34): Xaa is C or S

SEQ ID NO: 49391 - protein, 37 aa, Artificial Sequence; identical to SEQ ID NO: 9196
  Cyclic GFR-binding peptide
  MOD_RES (1)..(3)..(35)..(36): Xaa is C or S

SEQ ID NO: 49392 - protein, 36 aa, Artificial Sequence; identical to SEQ ID NO: 9198
  Cyclic GFR-binding peptide
  MOD_RES (2)..(34)..(35): Xaa is C or S

SEQ ID NO: 49393 - protein, 32 aa, Artificial Sequence
  Cyclic GFR-binding peptide
  MOD_RES (30)..(31): Xaa is C or S
VVMNNSLQEIVNSSDDYYVVPLPELKTPAXXP

SEQ ID NO: 49394 - protein, 35 aa, Artificial Sequence; identical to SEQ ID NO: 9197
  Cyclic GFR-binding peptide
  MOD_RES (1)..(3)..(35): Xaa is C or S

SEQ ID NO: 49395 - protein, 32 aa, Artificial Sequence
  Cyclic GFR-binding peptide
  MOD_RES (28)..(29): Xaa is C or S
MDNSLQEVVNNASDYYVIPLPELRTPVXXTPP

SEQ ID NO: 49396 - protein, 29 aa, Artificial Sequence
  Cyclic GFR-binding peptide
  MOD_RES (2)..(2): Xaa is C or S
GXSRVVMNEYQKYIVNSSDDIFLVSIPSL

SEQ ID NO: 49397 - protein, 30 aa, Artificial Sequence
  Cyclic GFR-binding peptide
SEVVMDNSLQEVVNNASDYYVIPLPELRTP

SEQ ID NO: 49398 - protein, 37 aa, Artificial Sequence; identical to SEQ ID NO: 9199
  Cyclic GFR-binding peptide
  MOD_RES (1)..(3)..(35)..(36): Xaa is C or S

SEQ ID NO: 49399 - protein, 34 aa, Artificial Sequence; identical to SEQ ID NO: 9200
  Cyclic GFR-binding peptide
  MOD_RES (32)..(32): Xaa is C or S

SEQ ID NO: 49400 - protein, 20 aa, Artificial Sequence
  Cyclic GFR-binding peptide
EYQKYIVNSSDDIFLVSIPS

SEQ ID NO: 49401 - protein, 33 aa, Artificial Sequence; identical to SEQ ID NO: 9201
  Cyclic GFR-binding peptide
  MOD_RES (31)..(32): Xaa is C or S

SEQ ID NO: 49402 - protein, 22 aa, Artificial Sequence
  Cyclic GFR-binding peptide
MDRYKKLVVNNASDFYLISIAN

SEQ ID NO: 49403 - protein, 31 aa, Artificial Sequence
  Cyclic GFR-binding peptide
  MOD_RES (28)..(29): Xaa is C or S
MEEYQKYVVKDYEDIFLMSIPSLETPVXXAK

SEQ ID NO: 49404 - protein, 27 aa, Artificial Sequence
  Cyclic GFR-binding peptide
  MOD_RES (26)..(26): Xaa is C or S
EYQKYIVNSSDDIFLVSIPSLKTPAXT

SEQ ID NO: 49405 - protein, 33 aa, Artificial Sequence; identical to SEQ ID NO: 9202
  Cyclic GFR-binding peptide
  MOD_RES (2)..(2): Xaa is C or S

SEQ ID NO: 49406 - protein, 35 aa, Artificial Sequence; identical to SEQ ID NO: 9204
  Cyclic GFR-binding peptide
  MOD_RES (31)..(32): Xaa is C or S

SEQ ID NO: 49407 - protein, 27 aa, Artificial Sequence
  Cyclic GFR-binding peptide
  MOD_RES (26)..(27): Xaa is C or S
NSLQEIVNSSDDYYLVTLPELKTPAXX

SEQ ID NO: 49408 - protein, 20 aa, Artificial Sequence
  Cyclic GFR-binding peptide
EYQKYIVNSSDDIFLVSIPS

SEQ ID NO: 49409 - protein, 31 aa, Artificial Sequence
  Cyclic GFR-binding peptide
  MOD_RES (2)..(2): Xaa is C or S
GXSEVVMDNSLQEVVNNASDYYVIPLPELRT

SEQ ID NO: 49410 - protein, 20 aa, Artificial Sequence
  Cyclic GFR-binding peptide
EYQKYVKPTRGVIFLISIPS

SEQ ID NO: 49411 - protein, 29 aa, Artificial Sequence
  Cyclic GFR-binding peptide
  MOD_RES (1)..(1): Xaa is C or S
XGEVVMDNSLQEVVKENEDYYLMTLPELE

SEQ ID NO: 49412 - protein, 26 aa, Artificial Sequence
  Cyclic GFR-binding peptide
EVVMDRYKKLVVNNASDFYLISIANL

SEQ ID NO: 49413 - protein, 31 aa, Artificial Sequence
  Cyclic GFR-binding peptide
  MOD_RES (2)..(2): Xaa is C or S
KXSKVIMEYQKYIKPTKGIIFLISIPSLDQS

SEQ ID NO: 49414 - protein, 24 aa, Artificial Sequence
  Cyclic GFR-binding peptide
EYQKYIVNSSDDIFLVSIPSLQTP

SEQ ID NO: 49415 - protein, 38 aa, Artificial Sequence; identical to SEQ ID NO: 9207
  Cyclic GFR-binding peptide
  MOD_RES (1)..(33)..(34): Xaa is C or S

SEQ ID NO: 49416 - protein, 26 aa, Artificial Sequence
  Cyclic GFR-binding peptide
EEYQKYVVKDYEDIFLMSIPSLETPV

SEQ ID NO: 49417 - protein, 31 aa, Artificial Sequence
  Cyclic GFR-binding peptide
  MOD_RES (2)..(2): Xaa is C or S
KXSKVVMEYQKYVKPTRGVIFLISIPSLDQP

SEQ ID NO: 49418 - protein, 35 aa, Artificial Sequence; identical to SEQ ID NO: 9208
  Cyclic GFR-binding peptide
  MOD_RES (31)..(32): Xaa is C or S

SEQ ID NO: 49419 - protein, 30 aa, Artificial Sequence
  Cyclic GFR-binding peptide
  MOD_RES (29)..(30): Xaa is C or S
VMNNSLQEIVNSSDDYYLVTLPELQTPAXX

SEQ ID NO: 49420 - protein, 30 aa, Artificial Sequence
  Cyclic GFR-binding peptide
  MOD_RES (2)..(4): Xaa is C or S
SXKXSKVIMEYQKYIKPTKGIIFLISIPSL

SEQ ID NO: 49421 - protein, 29 aa, Artificial Sequence
  Cyclic GFR-binding peptide
KVIMEYQKYIKPTKGIIFLISIPSLDQSV

SEQ ID NO: 49422 - protein, 28 aa, Artificial Sequence
  Cyclic GFR-binding peptide
  MOD_RES (1)..(1): Xaa is C or S
XSEVVMDNSLQEVVNNASDYYVIPLPEL

SEQ ID NO: 49423 - protein, 20 aa, Artificial Sequence
  Cyclic GFR-binding peptide
NSLQEVKPKRGVYYLITLPE

SEQ ID NO: 49424 - protein, 31 aa, Artificial Sequence
  Cyclic GFR-binding peptide
  MOD_RES (1)..(3): Xaa is C or S
XKXSKVVMEYQKYVKPTRGVIFLISIPSLDQ

SEQ ID NO: 49425 - protein, 34 aa, Artificial Sequence; identical to SEQ ID NO: 9211
  Cyclic GFR-binding peptide
  MOD_RES (1)..(3)..(34): Xaa is C or S

SEQ ID NO: 49426 - protein, 28 aa, Artificial Sequence
  Cyclic GFR-binding peptide
VVMEYQKYVKPTRGVIFLISIPSLDQPV

SEQ ID NO: 49427 - protein, 38 aa, Artificial Sequence; identical to SEQ ID NO: 9212
  Cyclic GFR-binding peptide
  MOD_RES (2)..(4)..(36)..(37): Xaa is C or S

SEQ ID NO: 49428 - protein, 32 aa, Artificial Sequence
  Cyclic GFR-binding peptide
  MOD_RES (28)..(29): Xaa is C or S
MDNSLQEVVKENEDYYVMPLPELETPVXXAKP

SEQ ID NO: 49429 - protein, 25 aa, Artificial Sequence
  Cyclic GFR-binding peptide
NNSLQEIVNSSDDYYVVPLPELKTP

SEQ ID NO: 49430 - protein, 23 aa, Artificial Sequence
  Cyclic GFR-binding peptide
EYQKYVVKDYEDIFLMSIPSLET

SEQ ID NO: 49431 - protein, 41 aa, Artificial Sequence; identical to SEQ ID NO: 9216
  Cyclic GFR-binding peptide
  MOD_RES (2)..(4)..(36)..(37): Xaa is C or S

SEQ ID NO: 49432 - protein, 29 aa, Artificial Sequence
  Cyclic GFR-binding peptide
VVMDNSLQEVVNNASDYYLITLPELRTPV

SEQ ID NO: 49433 - protein, 29 aa, Artificial Sequence
  Cyclic GFR-binding peptide
  MOD_RES (29)..(29): Xaa is C or S
VMNNSLQEIVNSSDDYYLVTLPELQTPAX

SEQ ID NO: 49434 - protein, 28 aa, Artificial Sequence
  Cyclic GFR-binding peptide
  MOD_RES (26)..(27): Xaa is C or S
QYNKLVVNNASDLYLISIASLRTPVXXT

SEQ ID NO: 49435 - protein, 30 aa, Artificial Sequence
  Cyclic GFR-binding peptide
  MOD_RES (27)..(28): Xaa is C or S
MEYQKYVKPTRGVIFLISIPSLDQPVXXPS

SEQ ID NO: 49436 - protein, 36 aa, Artificial Sequence; identical to SEQ ID NO: 9217
  Cyclic GFR-binding peptide
  MOD_RES (1)..(33)..(34): Xaa is C or S

SEQ ID NO: 49437 - protein, 37 aa, Artificial Sequence; identical to SEQ ID NO: 9218
  Cyclic GFR-binding peptide
  MOD_RES (2)..(4)..(35)..(36): Xaa is C or S

SEQ ID NO: 49438 - protein, 37 aa, Artificial Sequence; identical to SEQ ID NO: 9220
  Cyclic GFR-binding peptide
  MOD_RES (32)..(33): Xaa is C or S

SEQ ID NO: 49439 - protein, 26 aa, Artificial Sequence
  Cyclic GFR-binding peptide
  MOD_RES (26)..(26): Xaa is C or S
EYQKYIVNSSDDIFLVSIPSLKTPAX

SEQ ID NO: 49440 - protein, 31 aa, Artificial Sequence
  Cyclic GFR-binding peptide
  MOD_RES (1)..(3): Xaa is C or S
XKXSKVIMEYQKYIKPTKGIIFLISIPSLDQ

SEQ ID NO: 49441 - protein, 33 aa, Artificial Sequence
  Cyclic GFR-binding peptide
  MOD_RES (28)..(29): Xaa is C or S
MNNSLQEIVNSSDDYYLVTLPELQTPAXXPKPV

SEQ ID NO: 49442 - protein, 27 aa, Artificial Sequence
  Cyclic GFR-binding peptide
EVVMEEYQKYVVKDYEDIFLMSIPSLE

SEQ ID NO: 49443 - protein, 33 aa, Artificial Sequence
  Cyclic GFR-binding peptide
  MOD_RES (29)..(30): Xaa is C or S
VIMNSLQEIKPTKGIYYVIPLPELDQSVXXPSA

SEQ ID NO: 49444 - protein, 39 aa, Artificial Sequence; identical to SEQ ID NO: 9222
  Cyclic GFR-binding peptide
  MOD_RES (1)..(3)..(35)..(36): Xaa is C or S

SEQ ID NO: 49445 - protein, 32 aa, Artificial Sequence; identical to SEQ ID NO: 9223
  Cyclic GFR-binding peptide
  MOD_RES (31)..(32): Xaa is C or S

SEQ ID NO: 49446 - protein, 23 aa, Artificial Sequence
  Cyclic GFR-binding peptide
VIMNSLQEVKPKRGVYYLITLPE

SEQ ID NO: 49447 - protein, 29 aa, Artificial Sequence
  Cyclic GFR-binding peptide
  MOD_RES (29)..(29): Xaa is C or S
VVMEYQKYVKPTRGVIFLISIPSLDQPVX

SEQ ID NO: 49448 - protein, 26 aa, Artificial Sequence
  Cyclic GFR-binding peptide
  MOD_RES (1)..(1): Xaa is C or S
XSKVVMNSLQEVKPTRGVYYVIPLPE

SEQ ID NO: 49449 - protein, 23 aa, Artificial Sequence
  Cyclic GFR-binding peptide
NNSLQEIVNSSDDYYLVTLPELK

SEQ ID NO: 49450 - protein, 25 aa, Artificial Sequence
  Cyclic GFR-binding peptide
QYNKLVVNNASDLYLISIASLRTPV

SEQ ID NO: 49451 - protein, 38 aa, Artificial Sequence; identical to SEQ ID NO: 9228
  Cyclic GFR-binding peptide
  MOD_RES (32)..(33): Xaa is C or S

SEQ ID NO: 49452 - protein, 26 aa, Artificial Sequence
  Cyclic GFR-binding peptide
VVMNNSLQEIVNSSDDYYLVTLPELK

SEQ ID NO: 49453 - protein, 25 aa, Artificial Sequence
  Cyclic GFR-binding peptide
SKVIMNSLQEIKPTKGIYYVIPLPE

SEQ ID NO: 49454 - protein, 36 aa, Artificial Sequence; identical to SEQ ID NO: 9229
  Cyclic GFR-binding peptide
  MOD_RES (2)..(34)..(35): Xaa is C or S

SEQ ID NO: 49455 - protein, 29 aa, Artificial Sequence
  Cyclic GFR-binding peptide
SEVVMDNSLQEVVNNASDYYLITLPELRT

SEQ ID NO: 49456 - protein, 34 aa, Artificial Sequence; identical to SEQ ID NO: 9230
  Cyclic GFR-binding peptide
  MOD_RES (2)..(34): Xaa is C or S

SEQ ID NO: 49457 - protein, 27 aa, Artificial Sequence
  Cyclic GFR-binding peptide
  MOD_RES (26)..(27): Xaa is C or S
EYQKYVVKENEDIFLMSIPSLETPVXX

SEQ ID NO: 49458 - protein, 33 aa, Artificial Sequence; identical to SEQ ID NO: 9234
  Cyclic GFR-binding peptide
  MOD_RES (1)..(32)..(33): Xaa is C or S

SEQ ID NO: 49459 - protein, 24 aa, Artificial Sequence
  Cyclic GFR-binding peptide
NSLQEVVKDYEDYYLMTLPELETP

SEQ ID NO: 49460 - protein, 30 aa, Artificial Sequence
  Cyclic GFR-binding peptide
ARVVMNEYQKYIVNSSDDIFLVSIPSLQTP

SEQ ID NO: 49461 - protein, 38 aa, Artificial Sequence; identical to SEQ ID NO: 9235
  Cyclic GFR-binding peptide
  MOD_RES (1)..(3)..(34)..(35): Xaa is C or S

SEQ ID NO: 49462 - protein, 37 aa, Artificial Sequence; identical to SEQ ID NO: 9236
  Cyclic GFR-binding peptide
  MOD_RES (1)..(33)..(34): Xaa is C or S

SEQ ID NO: 49463 - protein, 24 aa, Artificial Sequence
  Cyclic GFR-binding peptide
VVMNNSLQEIVNSSDDYYVVPLPE

SEQ ID NO: 49464 - protein, 36 aa, Artificial Sequence; identical to SEQ ID NO: 9237
  Cyclic GFR-binding peptide
  MOD_RES (31)..(32): Xaa is C or S

SEQ ID NO: 49465 - protein, 38 aa, Artificial Sequence; identical to SEQ ID NO: 9238
  Cyclic GFR-binding peptide
  MOD_RES (1)..(3)..(35): Xaa is C or S

SEQ ID NO: 49466 - protein, 39 aa, Artificial Sequence; identical to SEQ ID NO: 9239
  Cyclic GFR-binding peptide
  MOD_RES (2)..(4)..(36)..(37): Xaa is C or S

SEQ ID NO: 49467 - protein, 42 aa, Artificial Sequence; identical to SEQ ID NO: 9240
  Cyclic GFR-binding peptide
  MOD_RES (2)..(4)..(36)..(37): Xaa is C or S

SEQ ID NO: 49468 - protein, 26 aa, Artificial Sequence
  Cyclic GFR-binding peptide
MNNSLQEIVNSSDDYYLVTLPELKTP

SEQ ID NO: 49469 - protein, 26 aa, Artificial Sequence
  Cyclic GFR-binding peptide
  MOD_RES (26)..(26): Xaa is C or S
EYQKYVKPKRGVIFLISIPSLAQPVX

SEQ ID NO: 49470 - protein, 38 aa, Artificial Sequence; identical to SEQ ID NO: 9241
  Cyclic GFR-binding peptide
  MOD_RES (1)..(3)..(35)..(36): Xaa is C or S

SEQ ID NO: 49471 - protein, 29 aa, Artificial Sequence
  Cyclic GFR-binding peptide
  MOD_RES (2)..(4): Xaa is C or S
SXKXSKVVMEYQKYVKPTRGVIFLISIPS

SEQ ID NO: 49472 - protein, 28 aa, Artificial Sequence
  Cyclic GFR-binding peptide
VMNEYQKYIVNSSDDIFLVSIPSLKTPA

SEQ ID NO: 49473 - protein, 27 aa, Artificial Sequence
  Cyclic GFR-binding peptide
  MOD_RES (1)..(1): Xaa is C or S
XSRVVMNEYQKYIVNSSDDIFLVSIPS

SEQ ID NO: 49474 - protein, 28 aa, Artificial Sequence
  Cyclic GFR-binding peptide
  MOD_RES (27)..(28): Xaa is C or S
DNSLQEVVNNASDYYLITLPELRTPVXX

SEQ ID NO: 49475 - protein, 42 aa, Artificial Sequence; identical to SEQ ID NO: 9243
  Cyclic GFR-binding peptide
  MOD_RES (2)..(4)..(36): Xaa is C or S

SEQ ID NO: 49476 - protein, 23 aa, Artificial Sequence
  Cyclic GFR-binding peptide
RYKKLVVNNASDFYLISIANLRT

SEQ ID NO: 49477 - protein, 40 aa, Artificial Sequence; identical to SEQ ID NO: 9244
  Cyclic GFR-binding peptide
  MOD_RES (2)..(34)..(35): Xaa is C or S

SEQ ID NO: 49478 - protein, 25 aa, Artificial Sequence
  Cyclic GFR-binding peptide
NSLQEVKPKRGVYYLITLPELAQPV

SEQ ID NO: 49479 - protein, 20 aa, Artificial Sequence
  Cyclic GFR-binding peptide
NSLQEVVKENEDYYLMTLPE

SEQ ID NO: 49480 - protein, 30 aa, Artificial Sequence
  Cyclic GFR-binding peptide
  MOD_RES (1)..(1): Xaa is C or S
XARVVMNNSLQEIVNSSDDYYVVPLPELQT

SEQ ID NO: 49481 - protein, 31 aa, Artificial Sequence
  Cyclic GFR-binding peptide
  MOD_RES (2)..(4): Xaa is C or S
HXGXARVVMNEYQKYIVNSSDDIFLVSIPSL

SEQ ID NO: 49482 - protein, 30 aa, Artificial Sequence
  Cyclic GFR-binding peptide
  MOD_RES (26)..(27): Xaa is C or S
EYQKYIVNSSDDIFLVSIPSLQTPAXXPKP

SEQ ID NO: 49483 - protein, 33 aa, Artificial Sequence; identical to SEQ ID NO: 9246
  Cyclic GFR-binding peptide
  MOD_RES (2)..(2): Xaa is C or S

SEQ ID NO: 49484 - protein, 39 aa, Artificial Sequence; identical to SEQ ID NO: 9249
  Cyclic GFR-binding peptide
  MOD_RES (1)..(3)..(34)..(35): Xaa is C or S

SEQ ID NO: 49485 - protein, 38 aa, Artificial Sequence; identical to SEQ ID NO: 9250
  Cyclic GFR-binding peptide
  MOD_RES (1)..(3)..(35)..(36): Xaa is C or S

SEQ ID NO: 49486 - protein, 26 aa, Artificial Sequence
  Cyclic GFR-binding peptide
MENSLQEVVKDYEDYYLMTLPELETP

SEQ ID NO: 49487 - protein, 35 aa, Artificial Sequence; identical to SEQ ID NO: 9251
  Cyclic GFR-binding peptide
  MOD_RES (31)..(32): Xaa is C or S

SEQ ID NO: 49488 - protein, 26 aa, Artificial Sequence
  Cyclic GFR-binding peptide
VMDRYKKLVVNNASDFYLISIANLRT

SEQ ID NO: 49489 - protein, 28 aa, Artificial Sequence
  Cyclic GFR-binding peptide
RVIMNSLQEVKPKRGVYYLITLPELAQP

SEQ ID NO: 49490 - protein, 34 aa, Artificial Sequence; identical to SEQ ID NO: 9252
  Cyclic GFR-binding peptide
  MOD_RES (2)..(34): Xaa is C or S

SEQ ID NO: 49491 - protein, 27 aa, Artificial Sequence
  Cyclic GFR-binding peptide
VVMNNSLQEIVNSSDDYYVVPLPELKT

SEQ ID NO: 49492 - protein, 36 aa, Artificial Sequence
  Cyclic GFR-binding peptide
  MOD_RES (30)..(31): Xaa is C or S
KVVMEYQKYVKPTRGVIFLISIPSLDQPVXXPSASA

SEQ ID NO: 49493 - protein, 38 aa, Artificial Sequence; identical to SEQ ID NO: 9254
  Cyclic GFR-binding peptide
  MOD_RES (1)..(33)..(34): Xaa is C or S

SEQ ID NO: 49494 - protein, 23 aa, Artificial Sequence
  Cyclic GFR-binding peptide
MDNSLQEVVNNASDYYVIPLPEL

SEQ ID NO: 49495 - protein, 26 aa, Artificial Sequence
  Cyclic GFR-binding peptide
SKVVMEYQKYVKPTRGVIFLISIPSL

SEQ ID NO: 49496 - protein, 32 aa, Artificial Sequence
  Cyclic GFR-binding peptide
  MOD_RES (26)..(27): Xaa is C or S
EYQKYVVKENEDIFLMSIPSLETPVXXAKPIK

SEQ ID NO: 49497 - protein, 30 aa, Artificial Sequence
  Cyclic GFR-binding peptide
  MOD_RES (2)..(2): Xaa is C or S
KXSKVVMEYQKYVKPTRGVIFLISIPSLDQ

SEQ ID NO: 49498 - protein, 38 aa, Artificial Sequence; identical to SEQ ID NO: 9257
  Cyclic GFR-binding peptide
  MOD_RES (1)..(3)..(35)..(36): Xaa is C or S

SEQ ID NO: 49499 - protein, 23 aa, Artificial Sequence
  Cyclic GFR-binding peptide
NSLQEIVNSSDDYYLVTLPELKT

SEQ ID NO: 49500 - protein, 29 aa, Artificial Sequence
  Cyclic GFR-binding peptide
  MOD_RES (29)..(29): Xaa is C or S
VMNEYQKYIVNSSDDIFLVSIPSLKTPAX

SEQ ID NO: 49501 - protein, 34 aa, Artificial Sequence
  Cyclic GFR-binding peptide
  MOD_RES (2)..(4): Xaa is C or S
RXGXSEVVMDNSLQEVVNNASDYYLITLPELRTP

SEQ ID NO: 49502 - protein, 27 aa, Artificial Sequence
  Cyclic GFR-binding peptide
VIMNSLQEIKPTKGIYYVIPLPELDQS

SEQ ID NO: 49503 - protein, 29 aa, Artificial Sequence
  Cyclic GFR-binding peptide
  MOD_RES (28)..(29): Xaa is C or S
MNEYQKYIVNSSDDIFLVSIPSLKTPAXX

SEQ ID NO: 49504 - protein, 23 aa, Artificial Sequence
  Cyclic GFR-binding peptide
MENSLQEVVKDYEDYYLMTLPEL

SEQ ID NO: 49505 - protein, 22 aa, Artificial Sequence
  Cyclic GFR-binding peptide
NSLQEVVKENEDYYLMTLPELE

SEQ ID NO: 49506 - protein, 33 aa, Artificial Sequence; identical to SEQ ID NO: 9261
  Cyclic GFR-binding peptide
  MOD_RES (1)..(33): Xaa is C or S

SEQ ID NO: 49507 - protein, 26 aa, Artificial Sequence
  Cyclic GFR-binding peptide
VVMNSLQEVKPTRGVYYVIPLPELDQ

SEQ ID NO: 49508 - protein, 39 aa, Artificial Sequence; identical to SEQ ID NO: 9263
  Cyclic GFR-binding peptide
  MOD_RES (1)..(33)..(34): Xaa is C or S

SEQ ID NO: 49509 - protein, 36 aa, Artificial Sequence; identical to SEQ ID NO: 9264
  Cyclic GFR-binding peptide
  MOD_RES (32)..(33): Xaa is C or S

SEQ ID NO: 49510 - protein, 25 aa, Artificial Sequence
  Cyclic GFR-binding peptide
IMNSLQEVKPKRGVYYLITLPELAQ

SEQ ID NO: 49511 - protein, 20 aa, Artificial Sequence
  Cyclic GFR-binding peptide
QYNKLVVNNASDLYLISIAS

SEQ ID NO: 49512 - protein, 30 aa, Artificial Sequence
  Cyclic GFR-binding peptide
  MOD_RES (27)..(28): Xaa is C or S
NNSLQEIVNSSDDYYLVTLPELQTPAXXPK

SEQ ID NO: 49513 - protein, 40 aa, Artificial Sequence; identical to SEQ ID NO: 9267
  Cyclic GFR-binding peptide
  MOD_RES (2)..(4)..(36)..(37): Xaa is C or S

SEQ ID NO: 49514 - protein, 20 aa, Artificial Sequence
  Cyclic GFR-binding peptide
NSLQEVVKENEDYYVMPLPE

SEQ ID NO: 49515 - protein, 26 aa, Artificial Sequence
  Cyclic GFR-binding peptide
IMEYQKYVKPKRGVIFLISIPSLAQP

SEQ ID NO: 49516 - protein, 35 aa, Artificial Sequence; identical to SEQ ID NO: 9269
  Cyclic GFR-binding peptide
  MOD_RES (2)..(4)..(35): Xaa is C or S

SEQ ID NO: 49517 - protein, 35 aa, Artificial Sequence
  Cyclic GFR-binding peptide
  MOD_RES (30)..(30): Xaa is C or S
VVMNNSLQEIVNSSDDYYVVPLPELKTPAXTPKTV

SEQ ID NO: 49518 - protein, 28 aa, Artificial Sequence
  Cyclic GFR-binding peptide
  MOD_RES (28)..(28): Xaa is C or S
MNNSLQEIVNSSDDYYLVTLPELKTPAX

SEQ ID NO: 49519 - protein, 27 aa, Artificial Sequence
  Cyclic GFR-binding peptide
  MOD_RES (1)..(1): Xaa is C or S
XGEVVMEEYQKYVVKDYEDIFLMSIPS

SEQ ID NO: 49520 - protein, 36 aa, Artificial Sequence; identical to SEQ ID NO: 9270
  Cyclic GFR-binding peptide
  MOD_RES (32)..(33): Xaa is C or S

SEQ ID NO: 49521 - protein, 27 aa, Artificial Sequence
  Cyclic GFR-binding peptide
VMDNSLQEVVNNASDYYLITLPELRTP

SEQ ID NO: 49522 - protein, 34 aa, Artificial Sequence; identical to SEQ ID NO: 9271
  Cyclic GFR-binding peptide
  MOD_RES (2)..(4): Xaa is C or S

SEQ ID NO: 49523 - protein, 30 aa, Artificial Sequence
  Cyclic GFR-binding peptide
  MOD_RES (1)..(1): Xaa is C or S
XGEVVMENSLQEVVKDYEDYYVMPLPELET

SEQ ID NO: 49524 - protein, 28 aa, Artificial Sequence
  Cyclic GFR-binding peptide
VMENSLQEVVKDYEDYYLMTLPELETPV

SEQ ID NO: 49525 - protein, 30 aa, Artificial Sequence
  Cyclic GFR-binding peptide
  MOD_RES (2)..(2): Xaa is C or S
KXSRVIMNSLQEVKPKRGVYYLITLPELAQ

SEQ ID NO: 49526 - protein, 35 aa, Artificial Sequence; identical to SEQ ID NO: 9275
  Cyclic GFR-binding peptide
  MOD_RES (1)..(33)..(34): Xaa is C or S

SEQ ID NO: 49527 - protein, 33 aa, Artificial Sequence; identical to SEQ ID NO: 9274
  Cyclic GFR-binding peptide
  MOD_RES (2)..(2): Xaa is C or S

SEQ ID NO: 49528 - protein, 40 aa, Artificial Sequence; identical to SEQ ID NO: 9276
  Cyclic GFR-binding peptide
  MOD_RES (2)..(4)..(36)..(37): Xaa is C or S

SEQ ID NO: 49529 - protein, 32 aa, Artificial Sequence; identical to SEQ ID NO: 9277
  Cyclic GFR-binding peptide
  MOD_RES (2)..(2): Xaa is C or S

SEQ ID NO: 49530 - protein, 32 aa, Artificial Sequence
  Cyclic GFR-binding peptide
  MOD_RES (28)..(29): Xaa is C or S
MNEYQKYIVNSSDDIFLVSIPSLQTPAXXPKP

SEQ ID NO: 49531 - protein, 20 aa, Artificial Sequence
  Cyclic GFR-binding peptide
EYQKYIKPTKGIIFLISIPS

SEQ ID NO: 49532 - protein, 25 aa, Artificial Sequence
  Cyclic GFR-binding peptide
NSLQEIVNSSDDYYLVTLPELKTPA

SEQ ID NO: 49533 - protein, 34 aa, Artificial Sequence
  Cyclic GFR-binding peptide
  MOD_RES (30)..(31): Xaa is C or S
VVMDRYKKLVVNNASDFYLISIANLRTPVXXTPP

SEQ ID NO: 49534 - protein, 35 aa, Artificial Sequence
  Cyclic GFR-binding peptide
  MOD_RES (29)..(30): Xaa is C or S
VVMNSLQEVKPTRGVYYVIPLPELDQPVXXPSASA

SEQ ID NO: 49535 - protein, 25 aa, Artificial Sequence
  Cyclic GFR-binding peptide
VMENSLQEVVKDYEDYYVMPLPELE

SEQ ID NO: 49536 - protein, 34 aa, Artificial Sequence
  Cyclic GFR-binding peptide
  MOD_RES (30)..(31): Xaa is C or S
VVMEEYQKYVVKDYEDIFLMSIPSLETPVXXAKP

SEQ ID NO: 49537 - protein, 21 aa, Artificial Sequence
  Cyclic GFR-binding peptide
RYKKLVVNNASDFYLISIANL

SEQ ID NO: 49538 - protein, 28 aa, Artificial Sequence
  Cyclic GFR-binding peptide
  MOD_RES (27)..(28): Xaa is C or S
DNSLQEVVKENEDYYVMPLPELETPVXX

SEQ ID NO: 49539 - protein, 27 aa, Artificial Sequence
  Cyclic GFR-binding peptide
  MOD_RES (1)..(1): Xaa is C or S
XARVVMNNSLQEIVNSSDDYYVVPLPE

SEQ ID NO: 49540 - protein, 28 aa, Artificial Sequence
  Cyclic GFR-binding peptide
  MOD_RES (1)..(1): Xaa is C or S
XSRVVMNNSLQEIVNSSDDYYLVTLPEL

SEQ ID NO: 49541 - protein, 30 aa, Artificial Sequence
  Cyclic GFR-binding peptide
  MOD_RES (30)..(30): Xaa is C or S
VVMDNSLQEVVNNASDYYLITLPELRTPVX

SEQ ID NO: 49542 - protein, 33 aa, Artificial Sequence; identical to SEQ ID NO: 9282
  Cyclic GFR-binding peptide
  MOD_RES (2)..(33): Xaa is C or S

SEQ ID NO: 49543 - protein, 34 aa, Artificial Sequence
  Cyclic GFR-binding peptide
  MOD_RES (29)..(30): Xaa is C or S
VMENSLQEVVKDYEDYYLMTLPELETPVXXAKPI

SEQ ID NO: 49544 - protein, 34 aa, Artificial Sequence
  Cyclic GFR-binding peptide
  MOD_RES (30)..(31): Xaa is C or S
VVMNNSLQEIVNSSDDYYLVTLPELQTPAXXPKP

SEQ ID NO: 49545 - protein, 31 aa, Artificial Sequence
  Cyclic GFR-binding peptide
  MOD_RES (26)..(27): Xaa is C or S
QYNKLVVNNASDLYLISIASLRTPVXXTPPT

SEQ ID NO: 49546 - protein, 36 aa, Artificial Sequence; identical to SEQ ID NO: 9283
  Cyclic GFR-binding peptide
  MOD_RES (32)..(33): Xaa is C or S

SEQ ID NO: 49547 - protein, 36 aa, Artificial Sequence; identical to SEQ ID NO: 9284
  Cyclic GFR-binding peptide
  MOD_RES (2)..(34)..(35): Xaa is C or S

SEQ ID NO: 49548 - protein, 42 aa, Artificial Sequence; identical to SEQ ID NO: 9286
  Cyclic GFR-binding peptide
  MOD_RES (2)..(4)..(36)..(37): Xaa is C or S

SEQ ID NO: 49549 - protein, 34 aa, Artificial Sequence; identical to SEQ ID NO: 9287
  Cyclic GFR-binding peptide
  MOD_RES (32)..(32): Xaa is C or S

SEQ ID NO: 49550 - protein, 31 aa, Artificial Sequence
  Cyclic GFR-binding peptide
  MOD_RES (1)..(3): Xaa is C or S
XGXSEVVMDNSLQEVVNNASDYYVIPLPELR

SEQ ID NO: 49551 - protein, 20 aa, Artificial Sequence
  Cyclic GFR-binding peptide
NSLQEVVNNASDYYLITLPE

SEQ ID NO: 49552 - protein, 39 aa, Artificial Sequence; identical to SEQ ID NO: 9288
  Cyclic GFR-binding peptide
  MOD_RES (2)..(34): Xaa is C or S

SEQ ID NO: 49553 - protein, 27 aa, Artificial Sequence
  Cyclic GFR-binding peptide
MNEYQKYIVNSSDDIFLVSIPSLQTPA

SEQ ID NO: 49554 - protein, 28 aa, Artificial Sequence
  Cyclic GFR-binding peptide
  MOD_RES (27)..(28): Xaa is C or S
DEYQKYVVKENEDIFLMSIPSLETPVXX

SEQ ID NO: 49555 - protein, 35 aa, Artificial Sequence; identical to SEQ ID NO: 9290
  Cyclic GFR-binding peptide
  MOD_RES (2)..(4): Xaa is C or S

SEQ ID NO: 49556 - protein, 36 aa, Artificial Sequence; identical to SEQ ID NO: 9291
  Cyclic GFR-binding peptide
  MOD_RES (2)..(4)..(36): Xaa is C or S

SEQ ID NO: 49557 - protein, 24 aa, Artificial Sequence
  Cyclic GFR-binding peptide
EYQKYVVKENEDIFLMSIPSLETP

SEQ ID NO: 49558 - protein, 26 aa, Artificial Sequence
  Cyclic GFR-binding peptide
RVVMNNSLQEIVNSSDDYYVVPLPEL

SEQ ID NO: 49559 - protein, 34 aa, Artificial Sequence
  Cyclic GFR-binding peptide
  MOD_RES (29)..(30): Xaa is C or S
VIMEYQKYIKPTKGIIFLISIPSLDQSVXXPSAS

SEQ ID NO: 49560 - protein, 37 aa, Artificial Sequence; identical to SEQ ID NO: 9293
  Cyclic GFR-binding peptide
  MOD_RES (31)..(32): Xaa is C or S

SEQ ID NO: 49561 - protein, 31 aa, Artificial Sequence
  Cyclic GFR-binding peptide
  MOD_RES (1)..(1): Xaa is C or S
XSRVVMNNSLQEIVNSSDDYYLVTLPELKTP

SEQ ID NO: 49562 - protein, 31 aa, Artificial Sequence
  Cyclic GFR-binding peptide
  MOD_RES (2)..(4): Xaa is C or S
SXKXSKVVMEYQKYVKPTRGVIFLISIPSLD

SEQ ID NO: 49563 - protein, 36 aa, Artificial Sequence; identical to SEQ ID NO: 9294
  Cyclic GFR-binding peptide
  MOD_RES (32)..(33): Xaa is C or S

SEQ ID NO: 49564 - protein, 30 aa, Artificial Sequence
  Cyclic GFR-binding peptide
  MOD_RES (2)..(2): Xaa is C or S
KXSKVVMNSLQEVKPTRGVYYVIPLPELDQ

SEQ ID NO: 49565 - protein, 36 aa, Artificial Sequence; identical to SEQ ID NO: 9295
  Cyclic GFR-binding peptide
  MOD_RES (31)..(32): Xaa is C or S

SEQ ID NO: 49566 - protein, 33 aa, Artificial Sequence; identical to SEQ ID NO: 9296
  Cyclic GFR-binding peptide
  MOD_RES (2)..(2): Xaa is C or S

SEQ ID NO: 49567 - protein, 35 aa, Artificial Sequence
  Cyclic GFR-binding peptide
  MOD_RES (30)..(31): Xaa is C or S
VVMDEYQKYVVKENEDIFLMSIPSLETPVXXAKPI

SEQ ID NO: 49568 - protein, 32 aa, Artificial Sequence
  Cyclic GFR-binding peptide
  MOD_RES (29)..(30): Xaa is C or S
VMDNSLQEVVNNASDYYVIPLPELRTPVXXTP

SEQ ID NO: 49569 - protein, 29 aa, Artificial Sequence
  Cyclic GFR-binding peptide
  MOD_RES (26)..(27): Xaa is C or S
NSLQEIVNSSDDYYLVTLPELKTPAXXPK

SEQ ID NO: 49570 - protein, 34 aa, Artificial Sequence; identical to SEQ ID NO: 9297
  Cyclic GFR-binding peptide
  MOD_RES (1)..(33)..(34): Xaa is C or S

SEQ ID NO: 49571 - protein, 27 aa, Artificial Sequence
  Cyclic GFR-binding peptide
  MOD_RES (27)..(27): Xaa is C or S
EEYQKYVVKDYEDIFLMSIPSLETPVX

SEQ ID NO: 49572 - protein, 26 aa, Artificial Sequence
  Cyclic GFR-binding peptide
RVIMNSLQEVKPKRGVYYLITLPELA

SEQ ID NO: 49573 - protein, 37 aa, Artificial Sequence; identical to SEQ ID NO: 9298
  Cyclic GFR-binding peptide
  MOD_RES (2)..(34): Xaa is C or S

SEQ ID NO: 49574 - protein, 35 aa, Artificial Sequence
  Cyclic GFR-binding peptide
  MOD_RES (30)..(31): Xaa is C or S
VVMNEYQKYIVNSSDDIFLVSIPSLQTPAXXPKPV

SEQ ID NO: 49575 - protein, 37 aa, Artificial Sequence; identical to SEQ ID NO: 9300
  Cyclic GFR-binding peptide
  MOD_RES (32)..(33): Xaa is C or S

SEQ ID NO: 49576 - protein, 26 aa, Artificial Sequence
  Cyclic GFR-binding peptide
MDNSLQEVVNNASDYYVIPLPELRTP

SEQ ID NO: 49577 - protein, 31 aa, Artificial Sequence
  Cyclic GFR-binding peptide
  MOD_RES (30)..(31): Xaa is C or S
KVVMNSLQEVKPTRGVYYVIPLPELDQPVXX

SEQ ID NO: 49578 - protein, 29 aa, Artificial Sequence
  Cyclic GFR-binding peptide
  MOD_RES (1)..(3): Xaa is C or S
XGXGEVVMENSLQEVVKDYEDYYVMPLPE

SEQ ID NO: 49579 - protein, 35 aa, Artificial Sequence; identical to SEQ ID NO: 9304
  Cyclic GFR-binding peptide
  MOD_RES (1)..(3)..(35): Xaa is C or S

SEQ ID NO: 49580 - protein, 29 aa, Artificial Sequence
  Cyclic GFR-binding peptide
SEVVMDQYNKLVVNNASDLYLISIASLRT

SEQ ID NO: 49581 - protein, 35 aa, Artificial Sequence; identical to SEQ ID NO: 9306
  Cyclic GFR-binding peptide
  MOD_RES (2)..(4): Xaa is C or S

SEQ ID NO: 49582 - protein, 27 aa, Artificial Sequence
  Cyclic GFR-binding peptide
MDNSLQEVVNNASDYYVIPLPELRTPV

SEQ ID NO: 49583 - protein, 27 aa, Artificial Sequence
  Cyclic GFR-binding peptide
  MOD_RES (1)..(1): Xaa is C or S
XSRVVMNNSLQEIVNSSDDYYVVPLPE

SEQ ID NO: 49584 - protein, 25 aa, Artificial Sequence
  Cyclic GFR-binding peptide
VMNEYQKYIVNSSDDIFLVSIPSLQ

SEQ ID NO: 49585 - protein, 39 aa, Artificial Sequence; identical to SEQ ID NO: 9313
  Cyclic GFR-binding peptide
  MOD_RES (1)..(3)..(34)..(35): Xaa is C or S

SEQ ID NO: 49586 - protein, 33 aa, Artificial Sequence
  Cyclic GFR-binding peptide
  MOD_RES (1)..(3): Xaa is C or S
XGXSRVVMNEYQKYIVNSSDDIFLVSIPSLKTP

SEQ ID NO: 49587 - protein, 30 aa, Artificial Sequence
  Cyclic GFR-binding peptide
  MOD_RES (28)..(29): Xaa is C or S
VMEYQKYVKPTRGVIFLISIPSLDQPVXXP

SEQ ID NO: 49588 - protein, 33 aa, Artificial Sequence; identical to SEQ ID NO: 9315
  Cyclic GFR-binding peptide
  MOD_RES (31)..(32): Xaa is C or S

SEQ ID NO: 49589 - protein, 31 aa, Artificial Sequence
  Cyclic GFR-binding peptide
  MOD_RES (29)..(30): Xaa is C or S
VMDEYQKYVVKENEDIFLMSIPSLETPVXXA

SEQ ID NO: 49590 - protein, 32 aa, Artificial Sequence
  Cyclic GFR-binding peptide
  MOD_RES (2)..(4): Xaa is C or S
HXGXSRVVMNEYQKYIVNSSDDIFLVSIPSLK

SEQ ID NO: 49591 - protein, 31 aa, Artificial Sequence
  Cyclic GFR-binding peptide
  MOD_RES (27)..(28): Xaa is C or S
NEYQKYIVNSSDDIFLVSIPSLQTPAXXPKP

SEQ ID NO: 49592 - protein, 26 aa, Artificial Sequence
  Cyclic GFR-binding peptide
NEYQKYIVNSSDDIFLVSIPSLKTPA

SEQ ID NO: 49593 - protein, 32 aa, Artificial Sequence; identical to SEQ ID NO: 9323
  Cyclic GFR-binding peptide
  MOD_RES (31)..(32): Xaa is C or S

SEQ ID NO: 49594 - protein, 29 aa, Artificial Sequence
  Cyclic GFR-binding peptide
  MOD_RES (26)..(27): Xaa is C or S
EYQKYVKPKRGVIFLISIPSLAQPVXXPA

SEQ ID NO: 49595 - protein, 30 aa, Artificial Sequence
  Cyclic GFR-binding peptide
  MOD_RES (1)..(3): Xaa is C or S
XKXSKVIMEYQKYIKPTKGIIFLISIPSLD

SEQ ID NO: 49596 - protein, 31 aa, Artificial Sequence
  Cyclic GFR-binding peptide
  MOD_RES (30)..(31): Xaa is C or S
VVMEEYQKYVVKDYEDIFLMSIPSLETPVXX

SEQ ID NO: 49597 - protein, 34 aa, Artificial Sequence; identical to SEQ ID NO: 9327
  Cyclic GFR-binding peptide
  MOD_RES (31)..(32): Xaa is C or S

SEQ ID NO: 49598 - protein, 32 aa, Artificial Sequence
  Cyclic GFR-binding peptide
  MOD_RES (27)..(27): Xaa is C or S
NNSLQEIVNSSDDYYVVPLPELKTPAXTPKTV

SEQ ID NO: 49599 - protein, 25 aa, Artificial Sequence
  Cyclic GFR-binding peptide
SRVIMNSLQEVKPKRGVYYLITLPE

SEQ ID NO: 49600 - protein, 36 aa, Artificial Sequence; identical to SEQ ID NO: 9329
  Cyclic GFR-binding peptide
  MOD_RES (31)..(32): Xaa is C or S

SEQ ID NO: 49601 - protein, 24 aa, Artificial Sequence
  Cyclic GFR-binding peptide
VIMEYQKYVKPKRGVIFLISIPSL

SEQ ID NO: 49602 - protein, 32 aa, Artificial Sequence; identical to SEQ ID NO: 9330
  Cyclic GFR-binding peptide
  MOD_RES (1)..(32): Xaa is C or S

SEQ ID NO: 49603 - protein, 32 aa, Artificial Sequence
  Cyclic GFR-binding peptide
  MOD_RES (2)..(4): Xaa is C or S
RXGXSEVVMDRYKKLVVNNASDFYLISIANLR

SEQ ID NO: 49604 - protein, 28 aa, Artificial Sequence
  Cyclic GFR-binding peptide
  MOD_RES (26)..(27): Xaa is C or S
EYQKYVVKENEDIFLMSIPSLETPVXXA

SEQ ID NO: 49605 - protein, 37 aa, Artificial Sequence; identical to SEQ ID NO: 9332
  Cyclic GFR-binding peptide
  MOD_RES (31)..(32): Xaa is C or S

SEQ ID NO: 49606 - protein, 31 aa, Artificial Sequence
  Cyclic GFR-binding peptide
  MOD_RES (26)..(27): Xaa is C or S
EYQKYIVNSSDDIFLVSIPSLQTPAXXPKPV

SEQ ID NO: 49607 - protein, 33 aa, Artificial Sequence; identical to SEQ ID NO: 9333
  Cyclic GFR-binding peptide
  MOD_RES (32)..(32): Xaa is C or S

SEQ ID NO: 49608 - protein, 32 aa, Artificial Sequence; identical to SEQ ID NO: 9334
  Cyclic GFR-binding peptide
  MOD_RES (1)..(1): Xaa is C or S

SEQ ID NO: 49609 - protein, 35 aa, Artificial Sequence; identical to SEQ ID NO: 9335
  Cyclic GFR-binding peptide
  MOD_RES (2)..(34): Xaa is C or S

SEQ ID NO: 49610 - protein, 32 aa, Artificial Sequence
  Cyclic GFR-binding peptide
  MOD_RES (28)..(29): Xaa is C or S
MDEYQKYVVKENEDIFLMSIPSLETPVXXAKP

SEQ ID NO: 49611 - protein, 28 aa, Artificial Sequence
  Cyclic GFR-binding peptide
VMNNSLQEIVNSSDDYYVVPLPELQTPA

SEQ ID NO: 49612 - protein, 35 aa, Artificial Sequence; identical to SEQ ID NO: 9337
  Cyclic GFR-binding peptide
  MOD_RES (2)..(4): Xaa is C or S

SEQ ID NO: 49613 - protein, 30 aa, Artificial Sequence
  Cyclic GFR-binding peptide
SRVVMNEYQKYIVNSSDDIFLVSIPSLKTP

SEQ ID NO: 49614 - protein, 26 aa, Artificial Sequence
  Cyclic GFR-binding peptide
DQYNKLVVNNASDLYLISIASLRTPV

SEQ ID NO: 49615 - protein, 29 aa, Artificial Sequence
  Cyclic GFR-binding peptide
  MOD_RES (1)..(1): Xaa is C or S
XSRVIMEYQKYVKPKRGVIFLISIPSLAQ

SEQ ID NO: 49616 - protein, 37 aa, Artificial Sequence; identical to SEQ ID NO: 9343
  Cyclic GFR-binding peptide
  MOD_RES (1)..(32)..(33): Xaa is C or S

SEQ ID NO: 49617 - protein, 35 aa, Artificial Sequence; identical to SEQ ID NO: 9344
  Cyclic GFR-binding peptide
  MOD_RES (1)..(3)..(34)..(35): Xaa is C or S

SEQ ID NO: 49618 - protein, 24 aa, Artificial Sequence
  Cyclic GFR-binding peptide
IMNSLQEVKPKRGVYYLITLPELA

SEQ ID NO: 49619 - protein, 30 aa, Artificial Sequence
  Cyclic GFR-binding peptide
  MOD_RES (26)..(27): Xaa is C or S
NSLQEVVKDYEDYYVMPLPELETPVXXAKP

SEQ ID NO: 49620 - protein, 36 aa, Artificial Sequence; identical to SEQ ID NO: 9346
  Cyclic GFR-binding peptide
  MOD_RES (2)..(4)..(36): Xaa is C or S

SEQ ID NO: 49621 - protein, 31 aa, Artificial Sequence
  Cyclic GFR-binding peptide
  MOD_RES (2)..(4): Xaa is C or S
SXKXSKVIMNSLQEIKPTKGIYYVIPLPELD

SEQ ID NO: 49622 - protein, 35 aa, Artificial Sequence; identical to SEQ ID NO: 9349
  Cyclic GFR-binding peptide
  MOD_RES (2)..(34)..(35): Xaa is C or S

SEQ ID NO: 49623 - protein, 31 aa, Artificial Sequence
  Cyclic GFR-binding peptide
  MOD_RES (1)..(3): Xaa is C or S
XKXSKVVMNSLQEVKPTRGVYYVIPLPELDQ

SEQ ID NO: 49624 - protein, 39 aa, Artificial Sequence; identical to SEQ ID NO: 9351
  Cyclic GFR-binding peptide
  MOD_RES (1)..(3)..(34)..(35): Xaa is C or S

SEQ ID NO: 49625 - protein, 34 aa, Artificial Sequence
  Cyclic GFR-binding peptide
  MOD_RES (28)..(29): Xaa is C or S
IMNSLQEVKPKRGVYYLITLPELAQPVXXPAASA

SEQ ID NO: 49626 - protein, 29 aa, Artificial Sequence
  Cyclic GFR-binding peptide
  MOD_RES (28)..(29): Xaa is C or S
MNNSLQEIVNSSDDYYLVTLPELKTPAXX

SEQ ID NO: 49627 - protein, 29 aa, Artificial Sequence
  Cyclic GFR-binding peptide
  MOD_RES (27)..(28): Xaa is C or S
NNSLQEIVNSSDDYYVVPLPELQTPAXXP

SEQ ID NO: 49628 - protein, 24 aa, Artificial Sequence
  Cyclic GFR-binding peptide
NEYQKYIVNSSDDIFLVSIPSLKT

SEQ ID NO: 49629 - protein, 30 aa, Artificial Sequence; identical to SEQ ID NO: 2133
  Cyclic GFR-binding peptide

SEQ ID NO: 49630 - protein, 20 aa, Artificial Sequence
  Cyclic GFR-binding peptide
NSLQEVKPKRGVYYVIPLPE

SEQ ID NO: 49631 - protein, 31 aa, Artificial Sequence
  Cyclic GFR-binding peptide
  MOD_RES (27)..(27): Xaa is C or S
NNSLQEIVNSSDDYYLVTLPELKTPAXTPKT

SEQ ID NO: 49632 - protein, 26 aa, Artificial Sequence
  Cyclic GFR-binding peptide
EVVMDNSLQEVVKENEDYYVMPLPEL

SEQ ID NO: 49633 - protein, 26 aa, Artificial Sequence
  Cyclic GFR-binding peptide
MEEYQKYVVKDYEDIFLMSIPSLETP

SEQ ID NO: 49634 - protein, 33 aa, Artificial Sequence
  Cyclic GFR-binding peptide
  MOD_RES (2)..(4): Xaa is C or S
RXGXGEVVMDNSLQEVVKENEDYYLMTLPELET

SEQ ID NO: 49635 - protein, 23 aa, Artificial Sequence
  Cyclic GFR-binding peptide
MEEYQKYVVKDYEDIFLMSIPSL

SEQ ID NO: 49636 - protein, 33 aa, Artificial Sequence
  Cyclic GFR-binding peptide
  MOD_RES (1)..(3): Xaa is C or S
XGXSEVVMDRYKKLVVNNASDFYLISIANLRTP

SEQ ID NO: 49637 - protein, 26 aa, Artificial Sequence
  Cyclic GFR-binding peptide
VVMEEYQKYVVKDYEDIFLMSIPSLE

SEQ ID NO: 49638 - protein, 23 aa, Artificial Sequence
  Cyclic GFR-binding peptide
MEYQKYVKPKRGVIFLISIPSLA

SEQ ID NO: 49639 - protein, 21 aa, Artificial Sequence
  Cyclic GFR-binding peptide
NSLQEVKPKRGVYYLITLPEL

SEQ ID NO: 49640 - protein, 32 aa, Artificial Sequence; identical to SEQ ID NO: 9355
  Cyclic GFR-binding peptide
  MOD_RES (32)..(32): Xaa is C or S

SEQ ID NO: 49641 - protein, 41 aa, Artificial Sequence; identical to SEQ ID NO: 9357
  Cyclic GFR-binding peptide
  MOD_RES (2)..(4)..(36)..(37): Xaa is C or S

SEQ ID NO: 49642 - protein, 28 aa, Artificial Sequence
  Cyclic GFR-binding peptide
  MOD_RES (28)..(28): Xaa is C or S
MNEYQKYIVNSSDDIFLVSIPSLKTPAX

SEQ ID NO: 49643 - protein, 29 aa, Artificial Sequence
  Cyclic GFR-binding peptide
  MOD_RES (1)..(1): Xaa is C or S
XSEVVMDNSLQEVVNNASDYYVIPLPELR

SEQ ID NO: 49644 - protein, 30 aa, Artificial Sequence
  Cyclic GFR-binding peptide
  MOD_RES (28)..(29): Xaa is C or S
MEEYQKYVVKDYEDIFLMSIPSLETPVXXA

SEQ ID NO: 49645 - protein, 33 aa, Artificial Sequence; identical to SEQ ID NO: 9360
  Cyclic GFR-binding peptide
  MOD_RES (1)..(33): Xaa is C or S

SEQ ID NO: 49646 - protein, 28 aa, Artificial Sequence
  Cyclic GFR-binding peptide
SRVVMNEYQKYIVNSSDDIFLVSIPSLK

SEQ ID NO: 49647 - protein, 32 aa, Artificial Sequence
  Cyclic GFR-binding peptide
  MOD_RES (28)..(29): Xaa is C or S
MNNSLQEIVNSSDDYYVVPLPELKTPAXXPKP

SEQ ID NO: 49648 - protein, 39 aa, Artificial Sequence; identical to SEQ ID NO: 9363
  Cyclic GFR-binding peptide
  MOD_RES (2)..(4)..(36)..(37): Xaa is C or S

SEQ ID NO: 49649 - protein, 24 aa, Artificial Sequence
  Cyclic GFR-binding peptide
RVIMNSLQEVKPKRGVYYLITLPE

SEQ ID NO: 49650 - protein, 27 aa, Artificial Sequence
  Cyclic GFR-binding peptide
  MOD_RES (26)..(27): Xaa is C or S
EYQKYVKPKRGVIFLISIPSLAQPVXX

SEQ ID NO: 49651 - protein, 35 aa, Artificial Sequence; identical to SEQ ID NO: 9366
  Cyclic GFR-binding peptide
  MOD_RES (31)..(31): Xaa is C or S

SEQ ID NO: 49652 - protein, 42 aa, Artificial Sequence; identical to SEQ ID NO: 9367
  Cyclic GFR-binding peptide
  MOD_RES (2)..(4)..(36)..(37): Xaa is C or S

SEQ ID NO: 49653 - protein, 27 aa, Artificial Sequence
  Cyclic GFR-binding peptide
MENSLQEVVKDYEDYYLMTLPELETPV

SEQ ID NO: 49654 - protein, 31 aa, Artificial Sequence
  Cyclic GFR-binding peptide
  MOD_RES (27)..(27): Xaa is C or S
NEYQKYIVNSSDDIFLVSIPSLKTPAXTPKT

SEQ ID NO: 49655 - protein, 42 aa, Artificial Sequence; identical to SEQ ID NO: 9368
  Cyclic GFR-binding peptide
  MOD_RES (2)..(4)..(36)..(37): Xaa is C or S

SEQ ID NO: 49656 - protein, 29 aa, Artificial Sequence
  Cyclic GFR-binding peptide
  MOD_RES (2)..(4): Xaa is C or S
SXKXSKVVMNSLQEVKPTRGVYYVIPLPE

SEQ ID NO: 49657 - protein, 36 aa, Artificial Sequence
  Cyclic GFR-binding peptide
  MOD_RES (30)..(31): Xaa is C or S
VVMNNSLQEIVNSSDDYYLVTLPELKTPAXXPKPVY

SEQ ID NO: 49658 - protein, 23 aa, Artificial Sequence
  Cyclic GFR-binding peptide
NSLQEVKPTRGVYYVIPLPELDQ

SEQ ID NO: 49659 - protein, 34 aa, Artificial Sequence
  Cyclic GFR-binding peptide
  MOD_RES (30)..(31): Xaa is C or S
KVVMEYQKYVKPTRGVIFLISIPSLDQPVXXPSA

SEQ ID NO: 49660 - protein, 30 aa, Artificial Sequence
  Cyclic GFR-binding peptide
  MOD_RES (29)..(30): Xaa is C or S
VMDRYKKLVVNNASDFYLISIANLRTPVXX

SEQ ID NO: 49661 - protein, 31 aa, Artificial Sequence
  Cyclic GFR-binding peptide
  MOD_RES (2)..(2): Xaa is C or S
GXARVVMNNSLQEIVNSSDDYYLVTLPELQT

SEQ ID NO: 49662 - protein, 28 aa, Artificial Sequence
  Cyclic GFR-binding peptide
EVVMENSLQEVVKDYEDYYVMPLPELET

SEQ ID NO: 49663 - protein, 38 aa, Artificial Sequence; identical to SEQ ID NO: 9371
  Cyclic GFR-binding peptide
  MOD_RES (2)..(34)..(35): Xaa is C or S

SEQ ID NO: 49664 - protein, 30 aa, Artificial Sequence
  Cyclic GFR-binding peptide
  MOD_RES (2)..(4): Xaa is C or S
HXGXARVVMNNSLQEIVNSSDDYYLVTLPE

SEQ ID NO: 49665 - protein, 29 aa, Artificial Sequence
  Cyclic GFR-binding peptide
KVVMNSLQEVKPTRGVYYVIPLPELDQPV

SEQ ID NO: 49666 - protein, 28 aa, Artificial Sequence
  Cyclic GFR-binding peptide
  MOD_RES (2)..(2): Xaa is C or S
GXSEVVMDNSLQEVVNNASDYYVIPLPE

SEQ ID NO: 49667 - protein, 35 aa, Artificial Sequence; identical to SEQ ID NO: 9372
  Cyclic GFR-binding peptide
  MOD_RES (1)..(3)..(35): Xaa is C or S

SEQ ID NO: 49668 - protein, 35 aa, Artificial Sequence; identical to SEQ ID NO: 9373
  Cyclic GFR-binding peptide
  MOD_RES (1)..(33)..(34): Xaa is C or S

SEQ ID NO: 49669 - protein, 38 aa, Artificial Sequence; identical to SEQ ID NO: 9374
  Cyclic GFR-binding peptide
  MOD_RES (1)..(3)..(35): Xaa is C or S

SEQ ID NO: 49670 - protein, 40 aa, Artificial Sequence; identical to SEQ ID NO: 9375
  Cyclic GFR-binding peptide
  MOD_RES (2)..(34)..(35): Xaa is C or S

SEQ ID NO: 49671 - protein, 34 aa, Artificial Sequence
  Cyclic GFR-binding peptide
  MOD_RES (29)..(30): Xaa is C or S
VMNNSLQEIVNSSDDYYVVPLPELKTPAXXPKPV

SEQ ID NO: 49672 - protein, 27 aa, Artificial Sequence
  Cyclic GFR-binding peptide
VMDQYNKLVVNNASDLYLISIASLRTP

SEQ ID NO: 49673 - protein, 37 aa, Artificial Sequence; identical to SEQ ID NO: 9378
  Cyclic GFR-binding peptide
  MOD_RES (1)..(33)..(34): Xaa is C or S

SEQ ID NO: 49674 - protein, 27 aa, Artificial Sequence
  Cyclic GFR-binding peptide
VMDNSLQEVVKENEDYYLMTLPELETP

SEQ ID NO: 49675 - protein, 40 aa, Artificial Sequence; identical to SEQ ID NO: 9379
  Cyclic GFR-binding peptide
  MOD_RES (1)..(3)..(34)..(35): Xaa is C or S

SEQ ID NO: 49676 - protein, 33 aa, Artificial Sequence
  Cyclic GFR-binding peptide
  MOD_RES (28)..(29): Xaa is C or S
MDEYQKYVVKENEDIFLMSIPSLETPVXXAKPI

SEQ ID NO: 49677 - protein, 35 aa, Artificial Sequence; identical to SEQ ID NO: 9380
  Cyclic GFR-binding peptide
  MOD_RES (1)..(3)..(35): Xaa is C or S

SEQ ID NO: 49678 - protein, 32 aa, Artificial Sequence; identical to SEQ ID NO: 9381
  Cyclic GFR-binding peptide
  MOD_RES (31)..(32): Xaa is C or S

SEQ ID NO: 49679 - protein, 31 aa, Artificial Sequence
  Cyclic GFR-binding peptide
  MOD_RES (26)..(27): Xaa is C or S
NSLQEVKPTRGVYYVIPLPELDQPVXXPSAS

SEQ ID NO: 49680 - protein, 24 aa, Artificial Sequence
  Cyclic GFR-binding peptide
NSLQEIKPTKGIYYVIPLPELDQS

SEQ ID NO: 49681 - protein, 29 aa, Artificial Sequence
  Cyclic GFR-binding peptide
  MOD_RES (2)..(2): Xaa is C or S
GXGEVVMENSLQEVVKDYEDYYLMTLPEL

SEQ ID NO: 49682 - protein, 29 aa, Artificial Sequence
  Cyclic GFR-binding peptide
  MOD_RES (1)..(3): Xaa is C or S
XKXSKVVMEYQKYVKPTRGVIFLISIPSL

SEQ ID NO: 49683 - protein, 26 aa, Artificial Sequence
  Cyclic GFR-binding peptide
  MOD_RES (1)..(1): Xaa is C or S
XSKVVMEYQKYVKPTRGVIFLISIPS

SEQ ID NO: 49684 - protein, 38 aa, Artificial Sequence; identical to SEQ ID NO: 9383
  Cyclic GFR-binding peptide
  MOD_RES (2)..(33)..(34): Xaa is C or S

SEQ ID NO: 49685 - protein, 25 aa, Artificial Sequence
  Cyclic GFR-binding peptide
EVVMENSLQEVVKDYEDYYVMPLPE

SEQ ID NO: 49686 - protein, 31 aa, Artificial Sequence
  Cyclic GFR-binding peptide
  MOD_RES (28)..(29): Xaa is C or S
MENSLQEVVKDYEDYYLMTLPELETPVXXAK

SEQ ID NO: 49687 - protein, 33 aa, Artificial Sequence
  Cyclic GFR-binding peptide
  MOD_RES (29)..(30): Xaa is C or S
VMDRYKKLVVNNASDFYLISIANLRTPVXXTPP

SEQ ID NO: 49688 - protein, 29 aa, Artificial Sequence
  Cyclic GFR-binding peptide
  MOD_RES (1)..(3): Xaa is C or S
XGXGEVVMDNSLQEVVKENEDYYLMTLPE

SEQ ID NO: 49689 - protein, 25 aa, Artificial Sequence
  Cyclic GFR-binding peptide
EVVMDNSLQEVVNNASDYYLITLPE

SEQ ID NO: 49690 - protein, 35 aa, Artificial Sequence; identical to SEQ ID NO: 9385
  Cyclic GFR-binding peptide
  MOD_RES (1)..(3)..(35): Xaa is C or S

SEQ ID NO: 49691 - protein, 21 aa, Artificial Sequence
  Cyclic GFR-binding peptide
MNSLQEIKPTKGIYYVIPLPE

SEQ ID NO: 49692 - protein, 26 aa, Artificial Sequence
  Cyclic GFR-binding peptide
  MOD_RES (26)..(26): Xaa is C or S
NSLQEVVKDYEDYYVMPLPELETPVX

SEQ ID NO: 49693 - protein, 26 aa, Artificial Sequence
  Cyclic GFR-binding peptide
VMDEYQKYVVKENEDIFLMSIPSLET

SEQ ID NO: 49694 - protein, 24 aa, Artificial Sequence
  Cyclic GFR-binding peptide
VVMEEYQKYVVKDYEDIFLMSIPS

SEQ ID NO: 49695 - protein, 31 aa, Artificial Sequence; identical to SEQ ID NO: 9390
  Cyclic GFR-binding peptide
  MOD_RES (1)..(1): Xaa is C or S

SEQ ID NO: 49696 - protein, 24 aa, Artificial Sequence
  Cyclic GFR-binding peptide
KVIMNSLQEIKPTKGIYYVIPLPE

SEQ ID NO: 49697 - protein, 33 aa, Artificial Sequence
  Cyclic GFR-binding peptide
  MOD_RES (30)..(31): Xaa is C or S
VVMEEYQKYVVKDYEDIFLMSIPSLETPVXXAK

SEQ ID NO: 49698 - protein, 23 aa, Artificial Sequence
  Cyclic GFR-binding peptide
NSLQEVKPKRGVYYLITLPELAQ

SEQ ID NO: 49699 - protein, 22 aa, Artificial Sequence
  Cyclic GFR-binding peptide
EYQKYVKPKRGVIFLISIPSLA

SEQ ID NO: 49700 - protein, 37 aa, Artificial Sequence; identical to SEQ ID NO: 9392
  Cyclic GFR-binding peptide
  MOD_RES (32)..(33): Xaa is C or S

SEQ ID NO: 49701 - protein, 27 aa, Artificial Sequence
  Cyclic GFR-binding peptide
  MOD_RES (27)..(27): Xaa is C or S
NEYQKYIVNSSDDIFLVSIPSLKTPAX

SEQ ID NO: 49702 - protein, 33 aa, Artificial Sequence
  Cyclic GFR-binding peptide
  MOD_RES (30)..(31): Xaa is C or S
RVIMNSLQEVKPKRGVYYLITLPELAQPVXXPA

SEQ ID NO: 49703 - protein, 24 aa, Artificial Sequence
  Cyclic GFR-binding peptide
MDRYKKLVVNNASDFYLISIANLR

SEQ ID NO: 49704 - protein, 36 aa, Artificial Sequence; identical to SEQ ID NO: 9394
  Cyclic GFR-binding peptide
  MOD_RES (2)..(34)..(35): Xaa is C or S

SEQ ID NO: 49705 - protein, 37 aa, Artificial Sequence; identical to SEQ ID NO: 9395
  Cyclic GFR-binding peptide
  MOD_RES (2)..(33)..(34): Xaa is C or S

SEQ ID NO: 49706 - protein, 31 aa, Artificial Sequence
  Cyclic GFR-binding peptide
  MOD_RES (30)..(31): Xaa is C or S
RVIMNSLQEVKPKRGVYYLITLPELAQPVXX

SEQ ID NO: 49707 - protein, 24 aa, Artificial Sequence
  Cyclic GFR-binding peptide
VMDNSLQEVVNNASDYYVIPLPEL

SEQ ID NO: 49708 - protein, 24 aa, Artificial Sequence
  Cyclic GFR-binding peptide
VMENSLQEVVKDYEDYYVMPLPEL

SEQ ID NO: 49709 - protein, 24 aa, Artificial Sequence
  Cyclic GFR-binding peptide
NNSLQEIVNSSDDYYVVPLPELKT

SEQ ID NO: 49710 - protein, 34 aa, Artificial Sequence
  Cyclic GFR-binding peptide
  MOD_RES (30)..(31): Xaa is C or S
VVMNNSLQEIVNSSDDYYVVPLPELQTPAXXPKP

SEQ ID NO: 49711 - protein, 34 aa, Artificial Sequence; identical to SEQ ID NO: 9398
  Cyclic GFR-binding peptide
  MOD_RES (31)..(32): Xaa is C or S

SEQ ID NO: 49712 - protein, 37 aa, Artificial Sequence; identical to SEQ ID NO: 9400
  Cyclic GFR-binding peptide
  MOD_RES (1)..(33)..(34): Xaa is C or S

SEQ ID NO: 49713 - protein, 31 aa, Artificial Sequence
  Cyclic GFR-binding peptide
  MOD_RES (26)..(27): Xaa is C or S
NSLQEVVKDYEDYYVMPLPELETPVXXAKPI

SEQ ID NO: 49714 - protein, 27 aa, Artificial Sequence
  Cyclic GFR-binding peptide
  MOD_RES (27)..(27): Xaa is C or S
NNSLQEIVNSSDDYYVVPLPELKTPAX

SEQ ID NO: 49715 - protein, 31 aa, Artificial Sequence
  Cyclic GFR-binding peptide
  MOD_RES (2)..(4): Xaa is C or S
SXKXSKVIMEYQKYIKPTKGIIFLISIPSLD

SEQ ID NO: 49716 - protein, 36 aa, Artificial Sequence; identical to SEQ ID NO: 9403
  Cyclic GFR-binding peptide
  MOD_RES (1)..(33)..(34): Xaa is C or S

SEQ ID NO: 49717 - protein, 39 aa, Artificial Sequence; identical to SEQ ID NO: 9404
  Cyclic GFR-binding peptide
  MOD_RES (1)..(33)..(34): Xaa is C or S

SEQ ID NO: 49718 - protein, 29 aa, Artificial Sequence
  Cyclic GFR-binding peptide
  MOD_RES (2)..(2): Xaa is C or S
GXSRVVMNNSLQEIVNSSDDYYLVTLPEL

SEQ ID NO: 49719 - protein, 25 aa, Artificial Sequence
  Cyclic GFR-binding peptide
EVVMDNSLQEVVKENEDYYLMTLPE

SEQ ID NO: 49720 - protein, 25 aa, Artificial Sequence
  Cyclic GFR-binding peptide
RVVMNNSLQEIVNSSDDYYLVTLPE

SEQ ID NO: 49721 - protein, 22 aa, Artificial Sequence
  Cyclic GFR-binding peptide
VMEYQKYVKPTRGVIFLISIPS

SEQ ID NO: 49722 - protein, 31 aa, Artificial Sequence
  Cyclic GFR-binding peptide
  MOD_RES (2)..(4): Xaa is C or S
RXGXSEVVMDNSLQEVVNNASDYYLITLPEL

SEQ ID NO: 49723 - protein, 35 aa, Artificial Sequence
  Cyclic GFR-binding peptide
  MOD_RES (29)..(30): Xaa is C or S
VMNNSLQEIVNSSDDYYVVPLPELQTPAXXPKPVT

SEQ ID NO: 49724 - protein, 32 aa, Artificial Sequence
  Cyclic GFR-binding peptide
  MOD_RES (27)..(27): Xaa is C or S
NNSLQEIVNSSDDYYLVTLPELKTPAXTPKTV

SEQ ID NO: 49725 - protein, 25 aa, Artificial Sequence
  Cyclic GFR-binding peptide
EYQKYIVNSSDDIFLVSIPSLQTPA

SEQ ID NO: 49726 - protein, 39 aa, Artificial Sequence; identical to SEQ ID NO: 9407
  Cyclic GFR-binding peptide
  MOD_RES (2)..(34)..(35): Xaa is C or S

SEQ ID NO: 49727 - protein, 32 aa, Artificial Sequence
  Cyclic GFR-binding peptide
  MOD_RES (30)..(31): Xaa is C or S
VVMNNSLQEIVNSSDDYYLVTLPELKTPAXXP

SEQ ID NO: 49728 - protein, 30 aa, Artificial Sequence
  Cyclic GFR-binding peptide
  MOD_RES (30)..(30): Xaa is C or S
VVMDNSLQEVVNNASDYYVIPLPELRTPVX

SEQ ID NO: 49729 - protein, 31 aa, Artificial Sequence
  Cyclic GFR-binding peptide
  MOD_RES (29)..(30): Xaa is C or S
VMNEYQKYIVNSSDDIFLVSIPSLKTPAXXP

SEQ ID NO: 49730 - protein, 29 aa, Artificial Sequence
  Cyclic GFR-binding peptide
  MOD_RES (27)..(28): Xaa is C or S
NEYQKYIVNSSDDIFLVSIPSLQTPAXXP

SEQ ID NO: 49731 - protein, 37 aa, Artificial Sequence; identical to SEQ ID NO: 9410
  Cyclic GFR-binding peptide
  MOD_RES (2)..(4)..(36)..(37): Xaa is C or S

SEQ ID NO: 49732 - protein, 40 aa, Artificial Sequence; identical to SEQ ID NO: 9411
  Cyclic GFR-binding peptide
  MOD_RES (1)..(3)..(35)..(36): Xaa is C or S

SEQ ID NO: 49733 - protein, 32 aa, Artificial Sequence
  Cyclic GFR-binding peptide
  MOD_RES (2)..(4): Xaa is C or S
RXGXGEVVMEEYQKYVVKDYEDIFLMSIPSLE

SEQ ID NO: 49734 - protein, 30 aa, Artificial Sequence
  Cyclic GFR-binding peptide
  MOD_RES (2)..(4): Xaa is C or S
SXKXSRVIMNSLQEVKPKRGVYYLITLPEL

SEQ ID NO: 49735 - protein, 34 aa, Artificial Sequence
  Cyclic GFR-binding peptide
  MOD_RES (28)..(29): Xaa is C or S
MEEYQKYVVKDYEDIFLMSIPSLETPVXXAKPIS

SEQ ID NO: 49736 - protein, 34 aa, Artificial Sequence
  Cyclic GFR-binding peptide
  MOD_RES (2)..(4): Xaa is C or S
RXGXGEVVMDNSLQEVVKENEDYYVMPLPELETP

SEQ ID NO: 49737 - protein, 34 aa, Artificial Sequence
  Cyclic GFR-binding peptide
  MOD_RES (29)..(29): Xaa is C or S
VMNNSLQEIVNSSDDYYVVPLPELKTPAXTPKTV

SEQ ID NO: 49738 - protein, 31 aa, Artificial Sequence
  Cyclic GFR-binding peptide
  MOD_RES (2)..(4): Xaa is C or S
SXKXSRVIMNSLQEVKPKRGVYYLITLPELA

SEQ ID NO: 49739 - protein, 35 aa, Artificial Sequence; identical to SEQ ID NO: 9413
  Cyclic GFR-binding peptide
  MOD_RES (1)..(3)..(35): Xaa is C or S

SEQ ID NO: 49740 - protein, 36 aa, Artificial Sequence; identical to SEQ ID NO: 9416
  Cyclic GFR-binding peptide
  MOD_RES (31)..(32): Xaa is C or S

SEQ ID NO: 49741 - protein, 33 aa, Artificial Sequence
  Cyclic GFR-binding peptide
  MOD_RES (29)..(30): Xaa is C or S
VMENSLQEVVKDYEDYYVMPLPELETPVXXAKP

SEQ ID NO: 49742 - protein, 25 aa, Artificial Sequence
  Cyclic GFR-binding peptide
NSLQEVVNNASDYYVIPLPELRTPV

SEQ ID NO: 49743 - protein, 41 aa, Artificial Sequence; identical to SEQ ID NO: 9417
  Cyclic GFR-binding peptide
  MOD_RES (2)..(4)..(36)..(37): Xaa is C or S

SEQ ID NO: 49744 - protein, 22 aa, Artificial Sequence
  Cyclic GFR-binding peptide
MDNSLQEVVKENEDYYLMTLPE

SEQ ID NO: 49745 - protein, 40 aa, Artificial Sequence; identical to SEQ ID NO: 9418
  Cyclic GFR-binding peptide
  MOD_RES (1)..(3)..(34)..(35): Xaa is C or S

SEQ ID NO: 49746 - protein, 40 aa, Artificial Sequence; identical to SEQ ID NO: 9422
  Cyclic GFR-binding peptide
  MOD_RES (1)..(3)..(34)..(35): Xaa is C or S

SEQ ID NO: 49747 - protein, 25 aa, Artificial Sequence
  Cyclic GFR-binding peptide
VMDRYKKLVVNNASDFYLISIANLR

SEQ ID NO: 49748 - protein, 30 aa, Artificial Sequence
  Cyclic GFR-binding peptide
  MOD_RES (30)..(30): Xaa is C or S
KVIMEYQKYIKPTKGIIFLISIPSLDQSVX

SEQ ID NO: 49749 - protein, 35 aa, Artificial Sequence; identical to SEQ ID NO: 9425
  Cyclic GFR-binding peptide
  MOD_RES (32)..(33): Xaa is C or S

SEQ ID NO: 49750 - protein, 35 aa, Artificial Sequence; identical to SEQ ID NO: 9427
  Cyclic GFR-binding peptide
  MOD_RES (2)..(4)..(35): Xaa is C or S

SEQ ID NO: 49751 - protein, 22 aa, Artificial Sequence
  Cyclic GFR-binding peptide
MNSLQEVKPKRGVYYLITLPEL

SEQ ID NO: 49752 - protein, 33 aa, Artificial Sequence; identical to SEQ ID NO: 9429
  Cyclic GFR-binding peptide
  MOD_RES (1)..(3): Xaa is C or S

SEQ ID NO: 49753 - protein, 35 aa, Artificial Sequence; identical to SEQ ID NO: 9430
  Cyclic GFR-binding peptide
  MOD_RES (31)..(32): Xaa is C or S

SEQ ID NO: 49754 - protein, 32 aa, Artificial Sequence
  Cyclic GFR-binding peptide
  MOD_RES (30)..(30): Xaa is C or S
VVMNEYQKYIVNSSDDIFLVSIPSLKTPAXTP

SEQ ID NO: 49755 - protein, 32 aa, Artificial Sequence
  Cyclic GFR-binding peptide
  MOD_RES (2)..(2): Xaa is C or S
GXGEVVMDEYQKYVVKENEDIFLMSIPSLETP

SEQ ID NO: 49756 - protein, 21 aa, Artificial Sequence
  Cyclic GFR-binding peptide
MEYQKYIKPTKGIIFLISIPS

SEQ ID NO: 49757 - protein, 20 aa, Artificial Sequence
  Cyclic GFR-binding peptide
NSLQEVVNNASDYYVIPLPE

SEQ ID NO: 49758 - protein, 23 aa, Artificial Sequence
  Cyclic GFR-binding peptide
VMEEYQKYVVKDYEDIFLMSIPS

SEQ ID NO: 49759 - protein, 35 aa, Artificial Sequence; identical to SEQ ID NO: 9434
  Cyclic GFR-binding peptide
  MOD_RES (2)..(4): Xaa is C or S

SEQ ID NO: 49760 - protein, 24 aa, Artificial Sequence
  Cyclic GFR-binding peptide
EYQKYVKPKRGVIFLISIPSLAQP

SEQ ID NO: 49761 - protein, 32 aa, Artificial Sequence
  Cyclic GFR-binding peptide
  MOD_RES (28)..(29): Xaa is C or S
VMEYQKYVKPTRGVIFLISIPSLDQPVXXPSA

SEQ ID NO: 49762 - protein, 29 aa, Artificial Sequence
  Cyclic GFR-binding peptide
  MOD_RES (1)..(3): Xaa is C or S
XGXSRVVMNEYQKYIVNSSDDIFLVSIPS

SEQ ID NO: 49763 - protein, 24 aa, Artificial Sequence
  Cyclic GFR-binding peptide
EYQKYIKPTKGIIFLISIPSLDQS

SEQ ID NO: 49764 - protein, 28 aa, Artificial Sequence
  Cyclic GFR-binding peptide
VMNNSLQEIVNSSDDYYLVTLPELKTPA

SEQ ID NO: 49765 - protein, 33 aa, Artificial Sequence
  Cyclic GFR-binding peptide
  MOD_RES (28)..(29): Xaa is C or S
MNEYQKYIVNSSDDIFLVSIPSLKTPAXXPKPV

SEQ ID NO: 49766 - protein, 29 aa, Artificial Sequence
  Cyclic GFR-binding peptide
  MOD_RES (2)..(2): Xaa is C or S
KXSKVIMEYQKYIKPTKGIIFLISIPSLD

SEQ ID NO: 49767 - protein, 36 aa, Artificial Sequence; identical to SEQ ID NO: 9436
  Cyclic GFR-binding peptide
  MOD_RES (1)..(32)..(33): Xaa is C or S

SEQ ID NO: 49768 - protein, 23 aa, Artificial Sequence
  Cyclic GFR-binding peptide
NSLQEVVKDYEDYYLMTLPELET

SEQ ID NO: 49769 - protein, 29 aa, Artificial Sequence
  Cyclic GFR-binding peptide
  MOD_RES (29)..(29): Xaa is C or S
VMDNSLQEVVNNASDYYLITLPELRTPVX

SEQ ID NO: 49770 - protein, 33 aa, Artificial Sequence
  Cyclic GFR-binding peptide
  MOD_RES (2)..(4): Xaa is C or S
HXGXARVVMNNSLQEIVNSSDDYYVVPLPELQT

SEQ ID NO: 49771 - protein, 27 aa, Artificial Sequence
  Cyclic GFR-binding peptide
SEVVMDRYKKLVVNNASDFYLISIANL

SEQ ID NO: 49772 - protein, 27 aa, Artificial Sequence
  Cyclic GFR-binding peptide
  MOD_RES (27)..(27): Xaa is C or S
DQYNKLVVNNASDLYLISIASLRTPVX

SEQ ID NO: 49773 - protein, 30 aa, Artificial Sequence
  Cyclic GFR-binding peptide
  MOD_RES (27)..(28): Xaa is C or S
ENSLQEVVKDYEDYYVMPLPELETPVXXAK

SEQ ID NO: 49774 - protein, 38 aa, Artificial Sequence; identical to SEQ ID NO: 9440
  Cyclic GFR-binding peptide
  MOD_RES (2)..(34)..(35): Xaa is C or S

SEQ ID NO: 49775 - protein, 34 aa, Artificial Sequence
  Cyclic GFR-binding peptide
  MOD_RES (30)..(31): Xaa is C or S
VVMENSLQEVVKDYEDYYLMTLPELETPVXXAKP

SEQ ID NO: 49776 - protein, 39 aa, Artificial Sequence; identical to SEQ ID NO: 9444
  Cyclic GFR-binding peptide
  MOD_RES (1)..(33): Xaa is C or S

SEQ ID NO: 49777 - protein, 26 aa, Artificial Sequence
  Cyclic GFR-binding peptide
  MOD_RES (26)..(26): Xaa is C or S
NSLQEIVNSSDDYYVVPLPELKTPAX

SEQ ID NO: 49778 - protein, 36 aa, Artificial Sequence; identical to SEQ ID NO: 9446
  Cyclic GFR-binding peptide
  MOD_RES (2)..(4)..(36): Xaa is C or S

SEQ ID NO: 49779 - protein, 42 aa, Artificial Sequence; identical to SEQ ID NO: 9447
  Cyclic GFR-binding peptide
  MOD_RES (2)..(4)..(36)..(37): Xaa is C or S

SEQ ID NO: 49780 - protein, 39 aa, Artificial Sequence; identical to SEQ ID NO: 9448
  Cyclic GFR-binding peptide
  MOD_RES (2)..(4)..(35)..(36): Xaa is C or S

SEQ ID NO: 49781 - protein, 31 aa, Artificial Sequence
  Cyclic GFR-binding peptide
  MOD_RES (1)..(1): Xaa is C or S
XARVVMNNSLQEIVNSSDDYYLVTLPELQTP

SEQ ID NO: 49782 - protein, 30 aa, Artificial Sequence
  Cyclic GFR-binding peptide
  MOD_RES (1)..(1): Xaa is C or S
XGEVVMDEYQKYVVKENEDIFLMSIPSLET

SEQ ID NO: 49783 - protein, 22 aa, Artificial Sequence
  Cyclic GFR-binding peptide
NSLQEIVNSSDDYYVVPLPELK

SEQ ID NO: 49784 - protein, 30 aa, Artificial Sequence
  Cyclic GFR-binding peptide
  MOD_RES (2)..(4): Xaa is C or S
RXGXSEVVMDQYNKLVVNNASDLYLISIAS

SEQ ID NO: 49785 - protein, 32 aa, Artificial Sequence
  Cyclic GFR-binding peptide
  MOD_RES (27)..(28): Xaa is C or S
DNSLQEVVKENEDYYVMPLPELETPVXXAKPI

SEQ ID NO: 49786 - protein, 38 aa, Artificial Sequence; identical to SEQ ID NO: 9451
  Cyclic GFR-binding peptide
  MOD_RES (1)..(33)..(34): Xaa is C or S

SEQ ID NO: 49787 - protein, 33 aa, Artificial Sequence; identical to SEQ ID NO: 9453
  Cyclic GFR-binding peptide
  MOD_RES (32)..(33): Xaa is C or S

SEQ ID NO: 49788 - protein, 28 aa, Artificial Sequence
  Cyclic GFR-binding peptide
  MOD_RES (1)..(1): Xaa is C or S
XSKVVMNSLQEVKPTRGVYYVIPLPELD

SEQ ID NO: 49789 - protein, 37 aa, Artificial Sequence; identical to SEQ ID NO: 9454
  Cyclic GFR-binding peptide
  MOD_RES (1)..(3)..(35)..(36): Xaa is C or S

SEQ ID NO: 49790 - protein, 32 aa, Artificial Sequence; identical to SEQ ID NO: 9455
  Cyclic GFR-binding peptide
  MOD_RES (32)..(32): Xaa is C or S

SEQ ID NO: 49791 - protein, 31 aa, Artificial Sequence
  Cyclic GFR-binding peptide
  MOD_RES (27)..(28): Xaa is C or S
MNSLQEIKPTKGIYYVIPLPELDQSVXXPSA

SEQ ID NO: 49792 - protein, 37 aa, Artificial Sequence; identical to SEQ ID NO: 9456
  Cyclic GFR-binding peptide
  MOD_RES (32)..(33): Xaa is C or S

SEQ ID NO: 49793 - protein, 35 aa, Artificial Sequence; identical to SEQ ID NO: 9459
  Cyclic GFR-binding peptide
  MOD_RES (2)..(34)..(35): Xaa is C or S

SEQ ID NO: 49794 - protein, 37 aa, Artificial Sequence; identical to SEQ ID NO: 9460
  Cyclic GFR-binding peptide
  MOD_RES (1)..(33)..(34): Xaa is C or S

SEQ ID NO: 49795 - protein, 39 aa, Artificial Sequence; identical to SEQ ID NO: 9461
  Cyclic GFR-binding peptide
  MOD_RES (1)..(33)..(34): Xaa is C or S

SEQ ID NO: 49796 - protein, 36 aa, Artificial Sequence; identical to SEQ ID NO: 9462
  Cyclic GFR-binding peptide
  MOD_RES (1)..(3)..(34)..(35): Xaa is C or S

SEQ ID NO: 49797 - protein, 29 aa, Artificial Sequence
  Cyclic GFR-binding peptide
  MOD_RES (27)..(28): Xaa is C or S
ENSLQEVVKDYEDYYVMPLPELETPVXXA

SEQ ID NO: 49798 - protein, 32 aa, Artificial Sequence
  Cyclic GFR-binding peptide
  MOD_RES (26)..(27): Xaa is C or S
NSLQEVKPKRGVYYLITLPELAQPVXXPAASA

SEQ ID NO: 49799 - protein, 31 aa, Artificial Sequence
  Cyclic GFR-binding peptide
  MOD_RES (1)..(3): Xaa is C or S
XGXGEVVMDEYQKYVVKENEDIFLMSIPSLE

SEQ ID NO: 49800 - protein, 30 aa, Artificial Sequence
  Cyclic GFR-binding peptide
  MOD_RES (2)..(2): Xaa is C or S
GXARVVMNNSLQEIVNSSDDYYLVTLPELQ

SEQ ID NO: 49801 - protein, 31 aa, Artificial Sequence
  Cyclic GFR-binding peptide
  MOD_RES (29)..(30): Xaa is C or S
VMEEYQKYVVKDYEDIFLMSIPSLETPVXXA

SEQ ID NO: 49802 - protein, 31 aa, Artificial Sequence
  Cyclic GFR-binding peptide
  MOD_RES (1)..(3): Xaa is C or S
XGXSRVVMNNSLQEIVNSSDDYYVVPLPELK

SEQ ID NO: 49803 - protein, 30 aa, Artificial Sequence; identical to SEQ ID NO: 9465
  Cyclic GFR-binding peptide

SEQ ID NO: 49804 - protein, 38 aa, Artificial Sequence; identical to SEQ ID NO: 9466
  Cyclic GFR-binding peptide
  MOD_RES (2)..(34)..(35): Xaa is C or S

SEQ ID NO: 49805 - protein, 34 aa, Artificial Sequence
  Cyclic GFR-binding peptide
  MOD_RES (28)..(29): Xaa is C or S
MDQYNKLVVNNASDLYLISIASLRTPVXXTPPTS

SEQ ID NO: 49806 - protein, 33 aa, Artificial Sequence
  Cyclic GFR-binding peptide
  MOD_RES (30)..(31): Xaa is C or S
VVMDRYKKLVVNNASDFYLISIANLRTPVXXTP

SEQ ID NO: 49807 - protein, 28 aa, Artificial Sequence
  Cyclic GFR-binding peptide
  MOD_RES (27)..(28): Xaa is C or S
MNSLQEVKPTRGVYYVIPLPELDQPVXX

SEQ ID NO: 49808 - protein, 29 aa, Artificial Sequence
  Cyclic GFR-binding peptide
  MOD_RES (1)..(1): Xaa is C or S
XSEVVMDRYKKLVVNNASDFYLISIANLR

SEQ ID NO: 49809 - protein, 35 aa, Artificial Sequence
  Cyclic GFR-binding peptide
  MOD_RES (29)..(29): Xaa is C or S
VMNNSLQEIVNSSDDYYLVTLPELKTPAXTPKTVH

SEQ ID NO: 49810 - protein, 20 aa, Artificial Sequence
  Cyclic GFR-binding peptide
EYQKYVVKENEDIFLMSIPS

SEQ ID NO: 49811 - protein, 32 aa, Artificial Sequence
  Cyclic GFR-binding peptide
  MOD_RES (28)..(28): Xaa is C or S
MNEYQKYIVNSSDDIFLVSIPSLKTPAXTPKT

SEQ ID NO: 49812 - protein, 37 aa, Artificial Sequence; identical to SEQ ID NO: 9468
  Cyclic GFR-binding peptide
  MOD_RES (2)..(34)..(35): Xaa is C or S

SEQ ID NO: 49813 - protein, 31 aa, Artificial Sequence
  Cyclic GFR-binding peptide
  MOD_RES (1)..(3): Xaa is C or S
XGXGEVVMDNSLQEVVKENEDYYLMTLPELE

SEQ ID NO: 49814 - protein, 33 aa, Artificial Sequence; identical to SEQ ID NO: 9469
  Cyclic GFR-binding peptide
  MOD_RES (31)..(31): Xaa is C or S

SEQ ID NO: 49815 - protein, 30 aa, Artificial Sequence
  Cyclic GFR-binding peptide
  MOD_RES (28)..(29): Xaa is C or S
MDQYNKLVVNNASDLYLISIASLRTPVXXT

SEQ ID NO: 49816 - protein, 33 aa, Artificial Sequence
  Cyclic GFR-binding peptide
  MOD_RES (29)..(30): Xaa is C or S
VVMEYQKYVKPTRGVIFLISIPSLDQPVXXPSA

SEQ ID NO: 49817 - protein, 25 aa, Artificial Sequence
  Cyclic GFR-binding peptide
VVMDEYQKYVVKENEDIFLMSIPSL

SEQ ID NO: 49818 - protein, 41 aa, Artificial Sequence; identical to SEQ ID NO: 9470
  Cyclic GFR-binding peptide
  MOD_RES (1)..(3)..(35)..(36): Xaa is C or S

SEQ ID NO: 49819 - protein, 24 aa, Artificial Sequence
  Cyclic GFR-binding peptide
NSLQEIVNSSDDYYLVTLPELQTP

SEQ ID NO: 49820 - protein, 29 aa, Artificial Sequence
  Cyclic GFR-binding peptide
  MOD_RES (28)..(29): Xaa is C or S
MNNSLQEIVNSSDDYYVVPLPELQTPAXX

SEQ ID NO: 49821 - protein, 21 aa, Artificial Sequence
  Cyclic GFR-binding peptide
QYNKLVVNNASDLYLISIASL

SEQ ID NO: 49822 - protein, 33 aa, Artificial Sequence
  Cyclic GFR-binding peptide
  MOD_RES (27)..(28): Xaa is C or S
NNSLQEIVNSSDDYYLVTLPELQTPAXXPKPVT

SEQ ID NO: 49823 - protein, 27 aa, Artificial Sequence
  Cyclic GFR-binding peptide
MNNSLQEIVNSSDDYYLVTLPELKTPA

SEQ ID NO: 49824 - protein, 22 aa, Artificial Sequence
  Cyclic GFR-binding peptide
MDEYQKYVVKENEDIFLMSIPS

SEQ ID NO: 49825 - protein, 33 aa, Artificial Sequence
  Cyclic GFR-binding peptide
  MOD_RES (27)..(27): Xaa is C or S
NNSLQEIVNSSDDYYLVTLPELKTPAXTPKTVH

SEQ ID NO: 49826 - protein, 40 aa, Artificial Sequence; identical to SEQ ID NO: 9474
  Cyclic GFR-binding peptide
  MOD_RES (2)..(34)..(35): Xaa is C or S

SEQ ID NO: 49827 - protein, 32 aa, Artificial Sequence; identical to SEQ ID NO: 9475
  Cyclic GFR-binding peptide
  MOD_RES (2)..(2): Xaa is C or S

SEQ ID NO: 49828 - protein, 34 aa, Artificial Sequence
  Cyclic GFR-binding peptide
  MOD_RES (28)..(29): Xaa is C or S
MNNSLQEIVNSSDDYYLVTLPELQTPAXXPKPVT

SEQ ID NO: 49829 - protein, 38 aa, Artificial Sequence; identical to SEQ ID NO: 9476
  Cyclic GFR-binding peptide
  MOD_RES (32)..(33): Xaa is C or S

SEQ ID NO: 49830 - protein, 25 aa, Artificial Sequence
  Cyclic GFR-binding peptide
MENSLQEVVKDYEDYYLMTLPELET

SEQ ID NO: 49831 - protein, 28 aa, Artificial Sequence
  Cyclic GFR-binding peptide
  MOD_RES (28)..(28): Xaa is C or S
MNNSLQEIVNSSDDYYVVPLPELKTPAX

SEQ ID NO: 49832 - protein, 34 aa, Artificial Sequence; identical to SEQ ID NO: 9477
  Cyclic GFR-binding peptide
  MOD_RES (1)..(3)..(34): Xaa is C or S

SEQ ID NO: 49833 - protein, 35 aa, Artificial Sequence; identical to SEQ ID NO: 9478
  Cyclic GFR-binding peptide
  MOD_RES (32)..(32): Xaa is C or S

SEQ ID NO: 49834 - protein, 35 aa, Artificial Sequence; identical to SEQ ID NO: 9479
  Cyclic GFR-binding peptide
  MOD_RES (31)..(32): Xaa is C or S

SEQ ID NO: 49835 - protein, 24 aa, Artificial Sequence
  Cyclic GFR-binding peptide
DNSLQEVVNNASDYYLITLPELRT

SEQ ID NO: 49836 - protein, 21 aa, Artificial Sequence
  Cyclic GFR-binding peptide
MEYQKYVKPTRGVIFLISIPS

SEQ ID NO: 49837 - protein, 31 aa, Artificial Sequence; identical to SEQ ID NO: 9482
  Cyclic GFR-binding peptide

SEQ ID NO: 49838 - protein, 33 aa, Artificial Sequence
  Cyclic GFR-binding peptide
  MOD_RES (30)..(31): Xaa is C or S
VVMDEYQKYVVKENEDIFLMSIPSLETPVXXAK

SEQ ID NO: 49839 - protein, 26 aa, Artificial Sequence
  Cyclic GFR-binding peptide
VVMNEYQKYIVNSSDDIFLVSIPSLQ

SEQ ID NO: 49840 - protein, 40 aa, Artificial Sequence; identical to SEQ ID NO: 9484
  Cyclic GFR-binding peptide
  MOD_RES (2)..(34)..(35): Xaa is C or S

SEQ ID NO: 49841 - protein, 28 aa, Artificial Sequence
  Cyclic GFR-binding peptide
  MOD_RES (2)..(2): Xaa is C or S
GXGEVVMDNSLQEVVKENEDYYVMPLPE

SEQ ID NO: 49842 - protein, 29 aa, Artificial Sequence
  Cyclic GFR-binding peptide
  MOD_RES (26)..(27): Xaa is C or S
NSLQEVVNNASDYYVIPLPELRTPVXXTP

SEQ ID NO: 49843 - protein, 32 aa, Artificial Sequence
  Cyclic GFR-binding peptide
  MOD_RES (1)..(3): Xaa is C or S
XGXSEVVMDNSLQEVVNNASDYYLITLPELRT

SEQ ID NO: 49844 - protein, 32 aa, Artificial Sequence
  Cyclic GFR-binding peptide
  MOD_RES (27)..(28): Xaa is C or S
DQYNKLVVNNASDLYLISIASLRTPVXXTPPT

SEQ ID NO: 49845 - protein, 31 aa, Artificial Sequence
  Cyclic GFR-binding peptide
  MOD_RES (2)..(4): Xaa is C or S
RXGXSEVVMDRYKKLVVNNASDFYLISIANL

SEQ ID NO: 49846 - protein, 26 aa, Artificial Sequence
  Cyclic GFR-binding peptide
EVVMDQYNKLVVNNASDLYLISIASL

SEQ ID NO: 49847 - protein, 39 aa, Artificial Sequence; identical to SEQ ID NO: 9488
  Cyclic GFR-binding peptide
  MOD_RES (2)..(34)..(35): Xaa is C or S

SEQ ID NO: 49848 - protein, 32 aa, Artificial Sequence
  Cyclic GFR-binding peptide
  MOD_RES (27)..(28): Xaa is C or S
DNSLQEVVNNASDYYVIPLPELRTPVXXTPPT

SEQ ID NO: 49849 - protein, 29 aa, Artificial Sequence
  Cyclic GFR-binding peptide
VVMDQYNKLVVNNASDLYLISIASLRTPV

SEQ ID NO: 49850 - protein, 26 aa, Artificial Sequence
  Cyclic GFR-binding peptide
NNSLQEIVNSSDDYYVVPLPELQTPA

SEQ ID NO: 49851 - protein, 29 aa, Artificial Sequence
  Cyclic GFR-binding peptide
  MOD_RES (29)..(29): Xaa is C or S
VMEEYQKYVVKDYEDIFLMSIPSLETPVX

SEQ ID NO: 49852 - protein, 38 aa, Artificial Sequence; identical to SEQ ID NO: 9490
  Cyclic GFR-binding peptide
  MOD_RES (2)..(34)..(35): Xaa is C or S

SEQ ID NO: 49853 - protein, 40 aa, Artificial Sequence; identical to SEQ ID NO: 9491
  Cyclic GFR-binding peptide
  MOD_RES (1)..(3)..(35)..(36): Xaa is C or S

SEQ ID NO: 49854 - protein, 28 aa, Artificial Sequence
  Cyclic GFR-binding peptide
VVMDNSLQEVVNNASDYYLITLPELRTP

SEQ ID NO: 49855 - protein, 28 aa, Artificial Sequence
  Cyclic GFR-binding peptide
  MOD_RES (26)..(27): Xaa is C or S
NSLQEVKPTRGVYYVIPLPELDQPVXXP

SEQ ID NO: 49856 - protein, 26 aa, Artificial Sequence
  Cyclic GFR-binding peptide
GEVVMENSLQEVVKDYEDYYLMTLPE

SEQ ID NO: 49857 - protein, 25 aa, Artificial Sequence
  Cyclic GFR-binding peptide
EVVMDQYNKLVVNNASDLYLISIAS

SEQ ID NO: 49858 - protein, 26 aa, Artificial Sequence
  Cyclic GFR-binding peptide
  MOD_RES (26)..(26): Xaa is C or S
EYQKYVKPTRGVIFLISIPSLDQPVX

SEQ ID NO: 49859 - protein, 32 aa, Artificial Sequence
  Cyclic GFR-binding peptide
  MOD_RES (28)..(29): Xaa is C or S
IMNSLQEVKPKRGVYYLITLPELAQPVXXPAA

SEQ ID NO: 49860 - protein, 34 aa, Artificial Sequence
  Cyclic GFR-binding peptide
  MOD_RES (2)..(4): Xaa is C or S
HXGXARVVMNEYQKYIVNSSDDIFLVSIPSLQTP

SEQ ID NO: 49861 - protein, 24 aa, Artificial Sequence
  Cyclic GFR-binding peptide
VMNNSLQEIVNSSDDYYVVPLPEL

SEQ ID NO: 49862 - protein, 26 aa, Artificial Sequence
  Cyclic GFR-binding peptide
  MOD_RES (26)..(26): Xaa is C or S
NSLQEVKPKRGVYYLITLPELAQPVX

SEQ ID NO: 49863 - protein, 35 aa, Artificial Sequence; identical to SEQ ID NO: 9495
  Cyclic GFR-binding peptide
  MOD_RES (2)..(4)..(35): Xaa is C or S

SEQ ID NO: 49864 - protein, 24 aa, Artificial Sequence
  Cyclic GFR-binding peptide
MNSLQEIKPTKGIYYVIPLPELDQ

SEQ ID NO: 49865 - protein, 30 aa, Artificial Sequence
  Cyclic GFR-binding peptide
  MOD_RES (30)..(30): Xaa is C or S
RVIMEYQKYVKPKRGVIFLISIPSLAQPVX

SEQ ID NO: 49866 - protein, 38 aa, Artificial Sequence; identical to SEQ ID NO: 9498
  Cyclic GFR-binding peptide
  MOD_RES (2)..(4)..(36): Xaa is C or S

SEQ ID NO: 49867 - protein, 33 aa, Artificial Sequence
  Cyclic GFR-binding peptide
  MOD_RES (28)..(29): Xaa is C or S
MDRYKKLVVNNASDFYLISIANLRTPVXXTPPT

SEQ ID NO: 49868 - protein, 32 aa, Artificial Sequence
  Cyclic GFR-binding peptide
  MOD_RES (1)..(3): Xaa is C or S
XGXGEVVMENSLQEVVKDYEDYYVMPLPELET

SEQ ID NO: 49869 - protein, 25 aa, Artificial Sequence
  Cyclic GFR-binding peptide
KVIMEYQKYIKPTKGIIFLISIPSL

SEQ ID NO: 49870 - protein, 40 aa, Artificial Sequence; identical to SEQ ID NO: 9501
  Cyclic GFR-binding peptide
  MOD_RES (2)..(4)..(36)..(37): Xaa is C or S

SEQ ID NO: 49871 - protein, 36 aa, Artificial Sequence; identical to SEQ ID NO: 9502
  Cyclic GFR-binding peptide
  MOD_RES (1)..(33): Xaa is C or S

SEQ ID NO: 49872 - protein, 30 aa, Artificial Sequence
  Cyclic GFR-binding peptide
  MOD_RES (2)..(4): Xaa is C or S
HXGXARVVMNEYQKYIVNSSDDIFLVSIPS

SEQ ID NO: 49873 - protein, 32 aa, Artificial Sequence
  Cyclic GFR-binding peptide
  MOD_RES (27)..(28): Xaa is C or S
NEYQKYIVNSSDDIFLVSIPSLKTPAXXPKPV

SEQ ID NO: 49874 - protein, 26 aa, Artificial Sequence
  Cyclic GFR-binding peptide
SRVIMEYQKYVKPKRGVIFLISIPSL

SEQ ID NO: 49875 - protein, 24 aa, Artificial Sequence
  Cyclic GFR-binding peptide
VMDRYKKLVVNNASDFYLISIANL

SEQ ID NO: 49876 - protein, 27 aa, Artificial Sequence
  Cyclic GFR-binding peptide
  MOD_RES (1)..(1): Xaa is C or S
XGEVVMDEYQKYVVKENEDIFLMSIPS

SEQ ID NO: 49877 - protein, 37 aa, Artificial Sequence; identical to SEQ ID NO: 9503
  Cyclic GFR-binding peptide
  MOD_RES (1)..(33)..(34): Xaa is C or S

SEQ ID NO: 49878 - protein, 30 aa, Artificial Sequence
  Cyclic GFR-binding peptide
  MOD_RES (1)..(3): Xaa is C or S
XGXGEVVMDNSLQEVVKENEDYYVMPLPEL

SEQ ID NO: 49879 - protein, 33 aa, Artificial Sequence; identical to SEQ ID NO: 9505
  Cyclic GFR-binding peptide
  MOD_RES (32)..(33): Xaa is C or S

SEQ ID NO: 49880 - protein, 28 aa, Artificial Sequence
  Cyclic GFR-binding peptide
  MOD_RES (1)..(1): Xaa is C or S
XSRVIMEYQKYVKPKRGVIFLISIPSLA

SEQ ID NO: 49881 - protein, 25 aa, Artificial Sequence
  Cyclic GFR-binding peptide
DNSLQEVVNNASDYYLITLPELRTP

SEQ ID NO: 49882 - protein, 31 aa, Artificial Sequence
  Cyclic GFR-binding peptide
  MOD_RES (27)..(28): Xaa is C or S
DNSLQEVVKENEDYYVMPLPELETPVXXAKP

SEQ ID NO: 49883 - protein, 37 aa, Artificial Sequence; identical to SEQ ID NO: 9508
  Cyclic GFR-binding peptide
  MOD_RES (1)..(33): Xaa is C or S

SEQ ID NO: 49884 - protein, 33 aa, Artificial Sequence
  Cyclic GFR-binding peptide
  MOD_RES (2)..(4): Xaa is C or S
SXKXSKVVMNSLQEVKPTRGVYYVIPLPELDQP

SEQ ID NO: 49885 - protein, 36 aa, Artificial Sequence; identical to SEQ ID NO: 9509
  Cyclic GFR-binding peptide
  MOD_RES (31)..(32): Xaa is C or S

SEQ ID NO: 49886 - protein, 32 aa, Artificial Sequence
  Cyclic GFR-binding peptide
  MOD_RES (27)..(27): Xaa is C or S
NEYQKYIVNSSDDIFLVSIPSLKTPAXTPKTV

SEQ ID NO: 49887 - protein, 30 aa, Artificial Sequence
  Cyclic GFR-binding peptide
  MOD_RES (2)..(2): Xaa is C or S
KXSKVIMEYQKYIKPTKGIIFLISIPSLDQ

SEQ ID NO: 49888 - protein, 35 aa, Artificial Sequence; identical to SEQ ID NO: 9511
  Cyclic GFR-binding peptide
  MOD_RES (31)..(32): Xaa is C or S

SEQ ID NO: 49889 - protein, 32 aa, Artificial Sequence
  Cyclic GFR-binding peptide
  MOD_RES (26)..(27): Xaa is C or S
NSLQEIVNSSDDYYLVTLPELQTPAXXPKPVT

SEQ ID NO: 49890 - protein, 30 aa, Artificial Sequence
  Cyclic GFR-binding peptide
SEVVMDRYKKLVVNNASDFYLISIANLRTP

SEQ ID NO: 49891 - protein, 34 aa, Artificial Sequence
  Cyclic GFR-binding peptide
  MOD_RES (28)..(29): Xaa is C or S
MDNSLQEVVNNASDYYVIPLPELRTPVXXTPPTS

SEQ ID NO: 49892 - protein, 27 aa, Artificial Sequence
  Cyclic GFR-binding peptide
SRVVMNNSLQEIVNSSDDYYLVTLPEL

SEQ ID NO: 49893 - protein, 27 aa, Artificial Sequence
  Cyclic GFR-binding peptide
IMNSLQEVKPKRGVYYLITLPELAQPV

SEQ ID NO: 49894 - protein, 31 aa, Artificial Sequence
  Cyclic GFR-binding peptide
  MOD_RES (29)..(30): Xaa is C or S
VIMEYQKYVKPKRGVIFLISIPSLAQPVXXP

SEQ ID NO: 49895 - protein, 33 aa, Artificial Sequence
  Cyclic GFR-binding peptide
  MOD_RES (28)..(29): Xaa is C or S
MNEYQKYIVNSSDDIFLVSIPSLQTPAXXPKPV

SEQ ID NO: 49896 - protein, 33 aa, Artificial Sequence
  Cyclic GFR-binding peptide
  MOD_RES (1)..(3): Xaa is C or S
XGXSEVVMDQYNKLVVNNASDLYLISIASLRTP

SEQ ID NO: 49897 - protein, 28 aa, Artificial Sequence
  Cyclic GFR-binding peptide
VVMNNSLQEIVNSSDDYYVVPLPELKTP

SEQ ID NO: 49898 - protein, 29 aa, Artificial Sequence
  Cyclic GFR-binding peptide
  MOD_RES (29)..(29): Xaa is C or S
VMDEYQKYVVKENEDIFLMSIPSLETPVX

SEQ ID NO: 49899 - protein, 27 aa, Artificial Sequence
  Cyclic GFR-binding peptide
  MOD_RES (26)..(27): Xaa is C or S
NSLQEVVKDYEDYYVMPLPELETPVXX

SEQ ID NO: 49900 - protein, 31 aa, Artificial Sequence
  Cyclic GFR-binding peptide
  MOD_RES (27)..(28): Xaa is C or S
MNSLQEVKPTRGVYYVIPLPELDQPVXXPSA

SEQ ID NO: 49901 - protein, 28 aa, Artificial Sequence
  Cyclic GFR-binding peptide
  MOD_RES (2)..(2): Xaa is C or S
GXARVVMNNSLQEIVNSSDDYYLVTLPE

SEQ ID NO: 49902 - protein, 32 aa, Artificial Sequence
  Cyclic GFR-binding peptide
  MOD_RES (26)..(27): Xaa is C or S
NSLQEVVKENEDYYLMTLPELETPVXXAKPIK

SEQ ID NO: 49903 - protein, 33 aa, Artificial Sequence
  Cyclic GFR-binding peptide
  MOD_RES (2)..(4): Xaa is C or S
RXGXGEVVMDNSLQEVVKENEDYYVMPLPELET

SEQ ID NO: 49904 - protein, 37 aa, Artificial Sequence; identical to SEQ ID NO: 9515
  Cyclic GFR-binding peptide
  MOD_RES (2)..(4)..(36)..(37): Xaa is C or S

SEQ ID NO: 49905 - protein, 30 aa, Artificial Sequence
  Cyclic GFR-binding peptide
  MOD_RES (1)..(1): Xaa is C or S
XSRVIMEYQKYVKPKRGVIFLISIPSLAQP

SEQ ID NO: 49906 - protein, 41 aa, Artificial Sequence; identical to SEQ ID NO: 9518
  Cyclic GFR-binding peptide
  MOD_RES (1)..(3)..(35)..(36): Xaa is C or S

SEQ ID NO: 49907 - protein, 28 aa, Artificial Sequence
  Cyclic GFR-binding peptide
  MOD_RES (27)..(28): Xaa is C or S
NEYQKYIVNSSDDIFLVSIPSLKTPAXX

SEQ ID NO: 49908 - protein, 38 aa, Artificial Sequence; identical to SEQ ID NO: 9519
  Cyclic GFR-binding peptide
  MOD_RES (2)..(4)..(35)..(36): Xaa is C or S

SEQ ID NO: 49909 - protein, 32 aa, Artificial Sequence; identical to SEQ ID NO: 9520
  Cyclic GFR-binding peptide
  MOD_RES (31)..(32): Xaa is C or S

SEQ ID NO: 49910 - protein, 37 aa, Artificial Sequence; identical to SEQ ID NO: 9521
  Cyclic GFR-binding peptide
  MOD_RES (31)..(32): Xaa is C or S

SEQ ID NO: 49911 - protein, 34 aa, Artificial Sequence; identical to SEQ ID NO: 9523
  Cyclic GFR-binding peptide
  MOD_RES (1)..(33)..(34): Xaa is C or S

SEQ ID NO: 49912 - protein, 38 aa, Artificial Sequence; identical to SEQ ID NO: 9524
  Cyclic GFR-binding peptide
  MOD_RES (2)..(4)..(36)..(37): Xaa is C or S

SEQ ID NO: 49913 - protein, 33 aa, Artificial Sequence; identical to SEQ ID NO: 9525
  Cyclic GFR-binding peptide
  MOD_RES (31)..(31): Xaa is C or S

SEQ ID NO: 49914 - protein, 38 aa, Artificial Sequence; identical to SEQ ID NO: 9526
  Cyclic GFR-binding peptide
  MOD_RES (2)..(4)..(36)..(37): Xaa is C or S

SEQ ID NO: 49915 - protein, 36 aa, Artificial Sequence; identical to SEQ ID NO: 9528
  Cyclic GFR-binding peptide
  MOD_RES (2)..(33)..(34): Xaa is C or S

SEQ ID NO: 49916 - protein, 30 aa, Artificial Sequence
  Cyclic GFR-binding peptide
SEVVMDNSLQEVVNNASDYYLITLPELRTP

SEQ ID NO: 49917 - protein, 29 aa, Artificial Sequence
  Cyclic GFR-binding peptide
  MOD_RES (1)..(1): Xaa is C or S
XARVVMNNSLQEIVNSSDDYYLVTLPELQ

SEQ ID NO: 49918 - protein, 23 aa, Artificial Sequence
  Cyclic GFR-binding peptide
NEYQKYIVNSSDDIFLVSIPSLQ

SEQ ID NO: 49919 - protein, 28 aa, Artificial Sequence
  Cyclic GFR-binding peptide
SRVIMNSLQEVKPKRGVYYLITLPELAQ

SEQ ID NO: 49920 - protein, 31 aa, Artificial Sequence
  Cyclic GFR-binding peptide
  MOD_RES (30)..(31): Xaa is C or S
VVMNNSLQEIVNSSDDYYLVTLPELQTPAXX

SEQ ID NO: 49921 - protein, 31 aa, Artificial Sequence
  Cyclic GFR-binding peptide
  MOD_RES (27)..(28): Xaa is C or S
MNSLQEVKPKRGVYYLITLPELAQPVXXPAA

SEQ ID NO: 49922 - protein, 41 aa, Artificial Sequence; identical to SEQ ID NO: 9530
  Cyclic GFR-binding peptide
  MOD_RES (1)..(3)..(35)..(36): Xaa is C or S

SEQ ID NO: 49923 - protein, 28 aa, Artificial Sequence
  Cyclic GFR-binding peptide
  MOD_RES (26)..(27): Xaa is C or S
NSLQEIVNSSDDYYVVPLPELQTPAXXP

SEQ ID NO: 49924 - protein, 26 aa, Artificial Sequence
  Cyclic GFR-binding peptide
SKVIMEYQKYIKPTKGIIFLISIPSL

SEQ ID NO: 49925 - protein, 27 aa, Artificial Sequence
  Cyclic GFR-binding peptide
  MOD_RES (1)..(1): Xaa is C or S
XSKVVMEYQKYVKPTRGVIFLISIPSL

SEQ ID NO: 49926 - protein, 31 aa, Artificial Sequence
  Cyclic GFR-binding peptide
  MOD_RES (29)..(30): Xaa is C or S
VMENSLQEVVKDYEDYYVMPLPELETPVXXA

SEQ ID NO: 49927 - protein, 39 aa, Artificial Sequence; identical to SEQ ID NO: 9532
  Cyclic GFR-binding peptide
  MOD_RES (2)..(4)..(35)..(36): Xaa is C or S

SEQ ID NO: 49928 - protein, 34 aa, Artificial Sequence; identical to SEQ ID NO: 9533
  Cyclic GFR-binding peptide
  MOD_RES (31)..(32): Xaa is C or S

SEQ ID NO: 49929 - protein, 30 aa, Artificial Sequence
  Cyclic GFR-binding peptide
  MOD_RES (30)..(30): Xaa is C or S
VVMDQYNKLVVNNASDLYLISIASLRTPVX

SEQ ID NO: 49930 - protein, 29 aa, Artificial Sequence
  Cyclic GFR-binding peptide
  MOD_RES (1)..(3): Xaa is C or S
XGXSRVVMNNSLQEIVNSSDDYYLVTLPE

SEQ ID NO: 49931 - protein, 34 aa, Artificial Sequence; identical to SEQ ID NO: 9534
  Cyclic GFR-binding peptide
  MOD_RES (31)..(32): Xaa is C or S

SEQ ID NO: 49932 - protein, 33 aa, Artificial Sequence
  Cyclic GFR-binding peptide
  MOD_RES (30)..(31): Xaa is C or S
VVMNNSLQEIVNSSDDYYVVPLPELQTPAXXPK

SEQ ID NO: 49933 - protein, 26 aa, Artificial Sequence
  Cyclic GFR-binding peptide
VMNNSLQEIVNSSDDYYVVPLPELKT

SEQ ID NO: 49934 - protein, 38 aa, Artificial Sequence; identical to SEQ ID NO: 9539
  Cyclic GFR-binding peptide
  MOD_RES (2)..(4)..(36)..(37): Xaa is C or S

SEQ ID NO: 49935 - protein, 29 aa, Artificial Sequence
  Cyclic GFR-binding peptide
  MOD_RES (28)..(29): Xaa is C or S
MDRYKKLVVNNASDFYLISIANLRTPVXX

SEQ ID NO: 49936 - protein, 21 aa, Artificial Sequence
  Cyclic GFR-binding peptide
EYQKYIVNSSDDIFLVSIPSL

SEQ ID NO: 49937 - protein, 20 aa, Artificial Sequence
  Cyclic GFR-binding peptide
NSLQEVKPTRGVYYLITLPE

SEQ ID NO: 49938 - protein, 25 aa, Artificial Sequence
  Cyclic GFR-binding peptide
VVMEEYQKYVVKDYEDIFLMSIPSL

SEQ ID NO: 49939 - protein, 36 aa, Artificial Sequence; identical to SEQ ID NO: 9543
  Cyclic GFR-binding peptide
  MOD_RES (1)..(33)..(34): Xaa is C or S

SEQ ID NO: 49940 - protein, 31 aa, Artificial Sequence
  Cyclic GFR-binding peptide
  MOD_RES (2)..(2): Xaa is C or S
GXGEVVMENSLQEVVKDYEDYYLMTLPELET

SEQ ID NO: 49941 - protein, 29 aa, Artificial Sequence
  Cyclic GFR-binding peptide
  MOD_RES (2)..(2): Xaa is C or S
KXSRVIMEYQKYVKPKRGVIFLISIPSLA

SEQ ID NO: 49942 - protein, 25 aa, Artificial Sequence
  Cyclic GFR-binding peptide
IMNSLQEIKPTKGIYYVIPLPELDQ

SEQ ID NO: 49943 - protein, 25 aa, Artificial Sequence
  Cyclic GFR-binding peptide
VVMDNSLQEVVNNASDYYVIPLPEL

SEQ ID NO: 49944 - protein, 28 aa, Artificial Sequence
  Cyclic GFR-binding peptide
  MOD_RES (27)..(28): Xaa is C or S
DRYKKLVVNNASDFYLISIANLRTPVXX

SEQ ID NO: 49945 - protein, 31 aa, Artificial Sequence
  Cyclic GFR-binding peptide
  MOD_RES (2)..(4): Xaa is C or S
RXGXGEVVMDNSLQEVVKENEDYYVMPLPEL

SEQ ID NO: 49946 - protein, 36 aa, Artificial Sequence; identical to SEQ ID NO: 9545
  Cyclic GFR-binding peptide
  MOD_RES (2)..(34)..(35): Xaa is C or S

SEQ ID NO: 49947 - protein, 42 aa, Artificial Sequence; identical to SEQ ID NO: 9546
  Cyclic GFR-binding peptide
  MOD_RES (2)..(4)..(36)..(37): Xaa is C or S

SEQ ID NO: 49948 - protein, 32 aa, Artificial Sequence; identical to SEQ ID NO: 9547
  Cyclic GFR-binding peptide
  MOD_RES (1)..(1): Xaa is C or S

SEQ ID NO: 49949 - protein, 27 aa, Artificial Sequence
  Cyclic GFR-binding peptide
  MOD_RES (27)..(27): Xaa is C or S
ENSLQEVVKDYEDYYVMPLPELETPVX

SEQ ID NO: 49950 - protein, 24 aa, Artificial Sequence
  Cyclic GFR-binding peptide
VMNEYQKYIVNSSDDIFLVSIPSL

SEQ ID NO: 49951 - protein, 33 aa, Artificial Sequence; identical to SEQ ID NO: 9548
  Cyclic GFR-binding peptide
  MOD_RES (2)..(2): Xaa is C or S

SEQ ID NO: 49952 - protein, 21 aa, Artificial Sequence
  Cyclic GFR-binding peptide
EEYQKYVVKDYEDIFLMSIPS

SEQ ID NO: 49953 - protein, 27 aa, Artificial Sequence
  Cyclic GFR-binding peptide
IMEYQKYIKPTKGIIFLISIPSLDQSV

SEQ ID NO: 49954 - protein, 32 aa, Artificial Sequence; identical to SEQ ID NO: 9549
  Cyclic GFR-binding peptide
  MOD_RES (32)..(32): Xaa is C or S

SEQ ID NO: 49955 - protein, 29 aa, Artificial Sequence
  Cyclic GFR-binding peptide
  MOD_RES (26)..(27): Xaa is C or S
NSLQEIVNSSDDYYVVPLPELKTPAXXPK

SEQ ID NO: 49956 - protein, 23 aa, Artificial Sequence
  Cyclic GFR-binding peptide
VMENSLQEVVKDYEDYYLMTLPE

SEQ ID NO: 49957 - protein, 40 aa, Artificial Sequence; identical to SEQ ID NO: 9551
  Cyclic GFR-binding peptide
  MOD_RES (2)..(34)..(35): Xaa is C or S

SEQ ID NO: 49958 - protein, 27 aa, Artificial Sequence
  Cyclic GFR-binding peptide
ARVVMNNSLQEIVNSSDDYYLVTLPEL

SEQ ID NO: 49959 - protein, 32 aa, Artificial Sequence
  Cyclic GFR-binding peptide
  MOD_RES (29)..(30): Xaa is C or S
VMDNSLQEVVKENEDYYVMPLPELETPVXXAK

SEQ ID NO: 49960 - protein, 37 aa, Artificial Sequence; identical to SEQ ID NO: 9552
  Cyclic GFR-binding peptide
  MOD_RES (32)..(32): Xaa is C or S

SEQ ID NO: 49961 - protein, 30 aa, Artificial Sequence
  Cyclic GFR-binding peptide
  MOD_RES (29)..(30): Xaa is C or S
VMNNSLQEIVNSSDDYYLVTLPELKTPAXX

SEQ ID NO: 49962 - protein, 23 aa, Artificial Sequence
  Cyclic GFR-binding peptide
VMEYQKYVKPTRGVIFLISIPSL

SEQ ID NO: 49963 - protein, 32 aa, Artificial Sequence; identical to SEQ ID NO: 9554
  Cyclic GFR-binding peptide
  MOD_RES (31)..(31): Xaa is C or S

SEQ ID NO: 49964 - protein, 33 aa, Artificial Sequence
  Cyclic GFR-binding peptide
  MOD_RES (2)..(4): Xaa is C or S
RXGXGEVVMENSLQEVVKDYEDYYVMPLPELET

SEQ ID NO: 49965 - protein, 25 aa, Artificial Sequence
  Cyclic GFR-binding peptide
KVVMEYQKYVKPTRGVIFLISIPSL

SEQ ID NO: 49966 - protein, 28 aa, Artificial Sequence
  Cyclic GFR-binding peptide
RVIMEYQKYVKPKRGVIFLISIPSLAQP

SEQ ID NO: 49967 - protein, 35 aa, Artificial Sequence; identical to SEQ ID NO: 9556
  Cyclic GFR-binding peptide
  MOD_RES (31)..(32): Xaa is C or S

SEQ ID NO: 49968 - protein, 22 aa, Artificial Sequence
  Cyclic GFR-binding peptide
NSLQEVVKDYEDYYLMTLPELE

SEQ ID NO: 49969 - protein, 33 aa, Artificial Sequence; identical to SEQ ID NO: 9557
  Cyclic GFR-binding peptide
  MOD_RES (31)..(32): Xaa is C or S

SEQ ID NO: 49970 - protein, 28 aa, Artificial Sequence
  Cyclic GFR-binding peptide
VMNEYQKYIVNSSDDIFLVSIPSLQTPA

SEQ ID NO: 49971 - protein, 34 aa, Artificial Sequence
  Cyclic GFR-binding peptide
  MOD_RES (30)..(31): Xaa is C or S
VVMNNSLQEIVNSSDDYYVVPLPELKTPAXXPKP

SEQ ID NO: 49972 - protein, 32 aa, Artificial Sequence; identical to SEQ ID NO: 9561
  Cyclic GFR-binding peptide
  MOD_RES (2)..(2): Xaa is C or S

SEQ ID NO: 49973 - protein, 41 aa, Artificial Sequence; identical to SEQ ID NO: 9563
  Cyclic GFR-binding peptide
  MOD_RES (1)..(3)..(35)..(36): Xaa is C or S

SEQ ID NO: 49974 - protein, 37 aa, Artificial Sequence; identical to SEQ ID NO: 9564
  Cyclic GFR-binding peptide
  MOD_RES (2)..(34)..(35): Xaa is C or S

SEQ ID NO: 49975 - protein, 29 aa, Artificial Sequence
  Cyclic GFR-binding peptide
EVVMENSLQEVVKDYEDYYVMPLPELETP

SEQ ID NO: 49976 - protein, 23 aa, Artificial Sequence
  Cyclic GFR-binding peptide
NNSLQEIVNSSDDYYVVPLPELK

SEQ ID NO: 49977 - protein, 39 aa, Artificial Sequence; identical to SEQ ID NO: 9565
  Cyclic GFR-binding peptide
  MOD_RES (2)..(4)..(36)..(37): Xaa is C or S

SEQ ID NO: 49978 - protein, 26 aa, Artificial Sequence
  Cyclic GFR-binding peptide
MEYQKYVKPTRGVIFLISIPSLDQPV

SEQ ID NO: 49979 - protein, 31 aa, Artificial Sequence
  Cyclic GFR-binding peptide
  MOD_RES (30)..(31): Xaa is C or S
VVMDNSLQEVVNNASDYYVIPLPELRTPVXX

SEQ ID NO: 49980 - protein, 28 aa, Artificial Sequence
  Cyclic GFR-binding peptide
  MOD_RES (1)..(1): Xaa is C or S
XGEVVMENSLQEVVKDYEDYYLMTLPEL

SEQ ID NO: 49981 - protein, 20 aa, Artificial Sequence
  Cyclic GFR-binding peptide
NSLQEIKPTKGIYYVIPLPE

SEQ ID NO: 49982 - protein, 41 aa, Artificial Sequence; identical to SEQ ID NO: 9566
  Cyclic GFR-binding peptide
  MOD_RES (1)..(3)..(35)..(36): Xaa is C or S

SEQ ID NO: 49983 - protein, 32 aa, Artificial Sequence
  Cyclic GFR-binding peptide
  MOD_RES (28)..(29): Xaa is C or S
MNEYQKYIVNSSDDIFLVSIPSLKTPAXXPKP

SEQ ID NO: 49984 - protein, 31 aa, Artificial Sequence
  Cyclic GFR-binding peptide
  MOD_RES (29)..(30): Xaa is C or S
VMNNSLQEIVNSSDDYYVVPLPELQTPAXXP

SEQ ID NO: 49985 - protein, 23 aa, Artificial Sequence
  Cyclic GFR-binding peptide
VIMNSLQEIKPTKGIYYVIPLPE

SEQ ID NO: 49986 - protein, 36 aa, Artificial Sequence; identical to SEQ ID NO: 9568
  Cyclic GFR-binding peptide
  MOD_RES (2)..(4)..(36): Xaa is C or S

SEQ ID NO: 49987 - protein, 30 aa, Artificial Sequence; identical to SEQ ID NO: 2036
  Cyclic GFR-binding peptide

SEQ ID NO: 49988 - protein, 29 aa, Artificial Sequence
  Cyclic GFR-binding peptide
  MOD_RES (26)..(27): Xaa is C or S
NSLQEVVKENEDYYLMTLPELETPVXXAK

SEQ ID NO: 49989 - protein, 32 aa, Artificial Sequence
  Cyclic GFR-binding peptide
  MOD_RES (1)..(3): Xaa is C or S
XGXGEVVMDNSLQEVVKENEDYYVMPLPELET

SEQ ID NO: 49990 - protein, 23 aa, Artificial Sequence
  Cyclic GFR-binding peptide
VMDEYQKYVVKENEDIFLMSIPS

SEQ ID NO: 49991 - protein, 31 aa, Artificial Sequence
  Cyclic GFR-binding peptide
  MOD_RES (28)..(29): Xaa is C or S
VMNSLQEVKPTRGVYYVIPLPELDQPVXXPS

SEQ ID NO: 49992 - protein, 30 aa, Artificial Sequence
  Cyclic GFR-binding peptide
  MOD_RES (1)..(3): Xaa is C or S
XGXGEVVMENSLQEVVKDYEDYYVMPLPEL

SEQ ID NO: 49993 - protein, 35 aa, Artificial Sequence; identical to SEQ ID NO: 9570
  Cyclic GFR-binding peptide
  MOD_RES (1)..(3)..(35): Xaa is C or S

SEQ ID NO: 49994 - protein, 38 aa, Artificial Sequence; identical to SEQ ID NO: 9572
  Cyclic GFR-binding peptide
  MOD_RES (1)..(3)..(34)..(35): Xaa is C or S

SEQ ID NO: 49995 - protein, 29 aa, Artificial Sequence
  Cyclic GFR-binding peptide
RVIMEYQKYVKPKRGVIFLISIPSLAQPV

SEQ ID NO: 49996 - protein, 31 aa, Artificial Sequence
  Cyclic GFR-binding peptide
  MOD_RES (2)..(4): Xaa is C or S
RXGXGEVVMENSLQEVVKDYEDYYVMPLPEL

SEQ ID NO: 49997 - protein, 29 aa, Artificial Sequence
  Cyclic GFR-binding peptide
  MOD_RES (26)..(27): Xaa is C or S
EYQKYIVNSSDDIFLVSIPSLQTPAXXPK

SEQ ID NO: 49998 - protein, 27 aa, Artificial Sequence
  Cyclic GFR-binding peptide
  MOD_RES (27)..(27): Xaa is C or S
NNSLQEIVNSSDDYYVVPLPELQTPAX

SEQ ID NO: 49999 - protein, 29 aa, Artificial Sequence
  Cyclic GFR-binding peptide
EVVMDEYQKYVVKENEDIFLMSIPSLETP

SEQ ID NO: 50000 - protein, 36 aa, Artificial Sequence; identical to SEQ ID NO: 9576
  Cyclic GFR-binding peptide
  MOD_RES (2)..(4)..(36): Xaa is C or S

SEQ ID NO: 50001 - protein, 35 aa, Artificial Sequence; identical to SEQ ID NO: 9578
  Cyclic GFR-binding peptide
  MOD_RES (2)..(34)..(35): Xaa is C or S

SEQ ID NO: 50002 - protein, 34 aa, Artificial Sequence; identical to SEQ ID NO: 9583
  Cyclic GFR-binding peptide
  MOD_RES (1)..(3): Xaa is C or S

SEQ ID NO: 50003 - protein, 24 aa, Artificial Sequence
  Cyclic GFR-binding peptide
DNSLQEVVKENEDYYLMTLPELET

SEQ ID NO: 50004 - protein, 32 aa, Artificial Sequence
  Cyclic GFR-binding peptide
  MOD_RES (30)..(31): Xaa is C or S
VVMNNSLQEIVNSSDDYYLVTLPELQTPAXXP

SEQ ID NO: 50005 - protein, 27 aa, Artificial Sequence
  Cyclic GFR-binding peptide
  MOD_RES (2)..(2): Xaa is C or S
KXSRVIMNSLQEVKPKRGVYYLITLPE

SEQ ID NO: 50006 - protein, 32 aa, Artificial Sequence; identical to SEQ ID NO: 9585
  Cyclic GFR-binding peptide
  MOD_RES (1)..(1): Xaa is C or S

SEQ ID NO: 50007 - protein, 37 aa, Artificial Sequence; identical to SEQ ID NO: 9586
  Cyclic GFR-binding peptide
  MOD_RES (1)..(3)..(35)..(36): Xaa is C or S

SEQ ID NO: 50008 - protein, 36 aa, Artificial Sequence; identical to SEQ ID NO: 9587
  Cyclic GFR-binding peptide
  MOD_RES (2)..(4)..(36): Xaa is C or S

SEQ ID NO: 50009 - protein, 22 aa, Artificial Sequence
  Cyclic GFR-binding peptide
EYQKYIKPTKGIIFLISIPSLD

SEQ ID NO: 50010 - protein, 29 aa, Artificial Sequence
  Cyclic GFR-binding peptide
EVVMDNSLQEVVNNASDYYVIPLPELRTP

SEQ ID NO: 50011 - protein, 34 aa, Artificial Sequence
  Cyclic GFR-binding peptide
  MOD_RES (30)..(31): Xaa is C or S
VVMDNSLQEVVKENEDYYLMTLPELETPVXXAKP

SEQ ID NO: 50012 - protein, 38 aa, Artificial Sequence; identical to SEQ ID NO: 9588
  Cyclic GFR-binding peptide
  MOD_RES (32)..(33): Xaa is C or S

SEQ ID NO: 50013 - protein, 32 aa, Artificial Sequence
  Cyclic GFR-binding peptide
  MOD_RES (30)..(31): Xaa is C or S
VVMDQYNKLVVNNASDLYLISIASLRTPVXXT

SEQ ID NO: 50014 - protein, 23 aa, Artificial Sequence
  Cyclic GFR-binding peptide
EYQKYIKPTKGIIFLISIPSLDQ

SEQ ID NO: 50015 - protein, 37 aa, Artificial Sequence; identical to SEQ ID NO: 9590
  Cyclic GFR-binding peptide
  MOD_RES (2)..(4)..(36): Xaa is C or S

SEQ ID NO: 50016 - protein, 31 aa, Artificial Sequence; identical to SEQ ID NO: 9593
  Cyclic GFR-binding peptide
  MOD_RES (31)..(31): Xaa is C or S

SEQ ID NO: 50017 - protein, 28 aa, Artificial Sequence
  Cyclic GFR-binding peptide
ARVVMNNSLQEIVNSSDDYYLVTLPELQ

SEQ ID NO: 50018 - protein, 29 aa, Artificial Sequence
  Cyclic GFR-binding peptide
VVMNNSLQEIVNSSDDYYVVPLPELQTPA

SEQ ID NO: 50019 - protein, 34 aa, Artificial Sequence; identical to SEQ ID NO: 9595
  Cyclic GFR-binding peptide
  MOD_RES (1)..(3): Xaa is C or S

SEQ ID NO: 50020 - protein, 41 aa, Artificial Sequence; identical to SEQ ID NO: 9596
  Cyclic GFR-binding peptide
  MOD_RES (1)..(3)..(35)..(36): Xaa is C or S

SEQ ID NO: 50021 - protein, 32 aa, Artificial Sequence
  Cyclic GFR-binding peptide
  MOD_RES (1)..(3): Xaa is C or S
XGXARVVMNNSLQEIVNSSDDYYLVTLPELQT

SEQ ID NO: 50022 - protein, 30 aa, Artificial Sequence; identical to SEQ ID NO: 9597
  Cyclic GFR-binding peptide

SEQ ID NO: 50023 - protein, 33 aa, Artificial Sequence; identical to SEQ ID NO: 9598
  Cyclic GFR-binding peptide
  MOD_RES (32)..(33): Xaa is C or S

SEQ ID NO: 50024 - protein, 27 aa, Artificial Sequence
  Cyclic GFR-binding peptide
KVIMEYQKYIKPTKGIIFLISIPSLDQ

SEQ ID NO: 50025 - protein, 36 aa, Artificial Sequence; identical to SEQ ID NO: 9599
  Cyclic GFR-binding peptide
  MOD_RES (2)..(34): Xaa is C or S

SEQ ID NO: 50026 - protein, 29 aa, Artificial Sequence
  Cyclic GFR-binding peptide
  MOD_RES (27)..(28): Xaa is C or S
NNSLQEIVNSSDDYYLVTLPELKTPAXXP

SEQ ID NO: 50027 - protein, 32 aa, Artificial Sequence
  Cyclic GFR-binding peptide
  MOD_RES (1)..(3): Xaa is C or S
XGXARVVMNEYQKYIVNSSDDIFLVSIPSLQT

SEQ ID NO: 50028 - protein, 23 aa, Artificial Sequence
  Cyclic GFR-binding peptide
EYQKYIVNSSDDIFLVSIPSLQT

SEQ ID NO: 50029 - protein, 32 aa, Artificial Sequence
  Cyclic GFR-binding peptide
  MOD_RES (2)..(4): Xaa is C or S
HXGXSRVVMNNSLQEIVNSSDDYYLVTLPELK

SEQ ID NO: 50030 - protein, 36 aa, Artificial Sequence
  Cyclic GFR-binding peptide
  MOD_RES (30)..(31): Xaa is C or S
VVMDEYQKYVVKENEDIFLMSIPSLETPVXXAKPIK

SEQ ID NO: 50031 - protein, 32 aa, Artificial Sequence
  Cyclic GFR-binding peptide
  MOD_RES (1)..(3): Xaa is C or S
XKXSKVVMNSLQEVKPTRGVYYVIPLPELDQP

SEQ ID NO: 50032 - protein, 35 aa, Artificial Sequence; identical to SEQ ID NO: 9601
  Cyclic GFR-binding peptide
  MOD_RES (1)..(3)..(35): Xaa is C or S

SEQ ID NO: 50033 - protein, 24 aa, Artificial Sequence
  Cyclic GFR-binding peptide
IMEYQKYIKPTKGIIFLISIPSLD

SEQ ID NO: 50034 - protein, 33 aa, Artificial Sequence
  Cyclic GFR-binding peptide
  MOD_RES (28)..(29): Xaa is C or S
MDNSLQEVVKENEDYYVMPLPELETPVXXAKPI

SEQ ID NO: 50035 - protein, 36 aa, Artificial Sequence; identical to SEQ ID NO: 9603
  Cyclic GFR-binding peptide
  MOD_RES (2)..(34)..(35): Xaa is C or S

SEQ ID NO: 50036 - protein, 26 aa, Artificial Sequence
  Cyclic GFR-binding peptide
  MOD_RES (1)..(1): Xaa is C or S
XSRVIMNSLQEVKPKRGVYYLITLPE

SEQ ID NO: 50037 - protein, 27 aa, Artificial Sequence
  Cyclic GFR-binding peptide
VVMDNSLQEVVKENEDYYVMPLPELET

SEQ ID NO: 50038 - protein, 30 aa, Artificial Sequence
  Cyclic GFR-binding peptide
  MOD_RES (2)..(4): Xaa is C or S
HXGXSRVVMNNSLQEIVNSSDDYYLVTLPE

SEQ ID NO: 50039 - protein, 31 aa, Artificial Sequence
  Cyclic GFR-binding peptide
  MOD_RES (26)..(26): Xaa is C or S
EYQKYIVNSSDDIFLVSIPSLKTPAXTPKTV

SEQ ID NO: 50040 - protein, 40 aa, Artificial Sequence; identical to SEQ ID NO: 9604
  Cyclic GFR-binding peptide
  MOD_RES (2)..(34)..(35): Xaa is C or S

SEQ ID NO: 50041 - protein, 32 aa, Artificial Sequence; identical to SEQ ID NO: 9606
  Cyclic GFR-binding peptide
  MOD_RES (2)..(2): Xaa is C or S

SEQ ID NO: 50042 - protein, 24 aa, Artificial Sequence
  Cyclic GFR-binding peptide
NSLQEVVNNASDYYLITLPELRTP

SEQ ID NO: 50043 - protein, 20 aa, Artificial Sequence
  Cyclic GFR-binding peptide
EYQKYVVKDYEDIFLMSIPS

SEQ ID NO: 50044 - protein, 37 aa, Artificial Sequence; identical to SEQ ID NO: 9607
  Cyclic GFR-binding peptide
  MOD_RES (31)..(31): Xaa is C or S

SEQ ID NO: 50045 - protein, 37 aa, Artificial Sequence; identical to SEQ ID NO: 9608
  Cyclic GFR-binding peptide
  MOD_RES (2)..(34)..(35): Xaa is C or S

SEQ ID NO: 50046 - protein, 30 aa, Artificial Sequence
  Cyclic GFR-binding peptide
  MOD_RES (2)..(4): Xaa is C or S
HXGXSRVVMNEYQKYIVNSSDDIFLVSIPS

SEQ ID NO: 50047 - protein, 27 aa, Artificial Sequence
  Cyclic GFR-binding peptide
VVMNNSLQEIVNSSDDYYLVTLPELKT

SEQ ID NO: 50048 - protein, 30 aa, Artificial Sequence
  Cyclic GFR-binding peptide
  MOD_RES (26)..(27): Xaa is C or S
EYQKYIKPTKGIIFLISIPSLDQSVXXPSA

SEQ ID NO: 50049 - protein, 37 aa, Artificial Sequence; identical to SEQ ID NO: 9610
  Cyclic GFR-binding peptide
  MOD_RES (2)..(34)..(35): Xaa is C or S

SEQ ID NO: 50050 - protein, 31 aa, Artificial Sequence
  Cyclic GFR-binding peptide
  MOD_RES (29)..(30): Xaa is C or S
VMDNSLQEVVNNASDYYLITLPELRTPVXXT

SEQ ID NO: 50051 - protein, 32 aa, Artificial Sequence
  Cyclic GFR-binding peptide
  MOD_RES (2)..(4): Xaa is C or S
SXKXSKVIMEYQKYIKPTKGIIFLISIPSLDQ

SEQ ID NO: 50052 - protein, 37 aa, Artificial Sequence; identical to SEQ ID NO: 9612
  Cyclic GFR-binding peptide
  MOD_RES (2)..(4)..(35)..(36): Xaa is C or S

SEQ ID NO: 50053 - protein, 29 aa, Artificial Sequence
  Cyclic GFR-binding peptide
  MOD_RES (29)..(29): Xaa is C or S
VMENSLQEVVKDYEDYYLMTLPELETPVX

SEQ ID NO: 50054 - protein, 35 aa, Artificial Sequence; identical to SEQ ID NO: 9614
  Cyclic GFR-binding peptide
  MOD_RES (31)..(32): Xaa is C or S

SEQ ID NO: 50055 - protein, 37 aa, Artificial Sequence; identical to SEQ ID NO: 9615
  Cyclic GFR-binding peptide
  MOD_RES (2)..(4)..(36): Xaa is C or S

SEQ ID NO: 50056 - protein, 25 aa, Artificial Sequence
  Cyclic GFR-binding peptide
VVMDRYKKLVVNNASDFYLISIANL

SEQ ID NO: 50057 - protein, 34 aa, Artificial Sequence; identical to SEQ ID NO: 9620
  Cyclic GFR-binding peptide
  MOD_RES (2)..(34): Xaa is C or S

SEQ ID NO: 50058 - protein, 30 aa, Artificial Sequence
  Cyclic GFR-binding peptide
  MOD_RES (29)..(30): Xaa is C or S
VMNEYQKYIVNSSDDIFLVSIPSLQTPAXX

SEQ ID NO: 50059 - protein, 33 aa, Artificial Sequence
  Cyclic GFR-binding peptide
  MOD_RES (28)..(29): Xaa is C or S
IMNSLQEVKPKRGVYYLITLPELAQPVXXPAAS

SEQ ID NO: 50060 - protein, 32 aa, Artificial Sequence
  Cyclic GFR-binding peptide
  MOD_RES (28)..(29): Xaa is C or S
IMEYQKYIKPTKGIIFLISIPSLDQSVXXPSA

SEQ ID NO: 50061 - protein, 21 aa, Artificial Sequence
  Cyclic GFR-binding peptide
NSLQEIKPTKGIYYVIPLPEL

SEQ ID NO: 50062 - protein, 40 aa, Artificial Sequence; identical to SEQ ID NO: 9623
  Cyclic GFR-binding peptide
  MOD_RES (2)..(34): Xaa is C or S

SEQ ID NO: 50063 - protein, 29 aa, Artificial Sequence
  Cyclic GFR-binding peptide
  MOD_RES (28)..(29): Xaa is C or S
MDEYQKYVVKENEDIFLMSIPSLETPVXX

SEQ ID NO: 50064 - protein, 39 aa, Artificial Sequence; identical to SEQ ID NO: 9625
  Cyclic GFR-binding peptide
  MOD_RES (1)..(33)..(34): Xaa is C or S

SEQ ID NO: 50065 - protein, 21 aa, Artificial Sequence
  Cyclic GFR-binding peptide
NSLQEVVKENEDYYLMTLPEL

SEQ ID NO: 50066 - protein, 37 aa, Artificial Sequence; identical to SEQ ID NO: 9628
  Cyclic GFR-binding peptide
  MOD_RES (2)..(34)..(35): Xaa is C or S

SEQ ID NO: 50067 - protein, 38 aa, Artificial Sequence; identical to SEQ ID NO: 9627
  Cyclic GFR-binding peptide
  MOD_RES (2)..(34)..(35): Xaa is C or S

SEQ ID NO: 50068 - protein, 22 aa, Artificial Sequence
  Cyclic GFR-binding peptide
EYQKYIVNSSDDIFLVSIPSLQ

SEQ ID NO: 50069 - protein, 27 aa, Artificial Sequence
  Cyclic GFR-binding peptide
ARVVMNEYQKYIVNSSDDIFLVSIPSL

SEQ ID NO: 50070 - protein, 36 aa, Artificial Sequence; identical to SEQ ID NO: 9630
  Cyclic GFR-binding peptide
  MOD_RES (31)..(32): Xaa is C or S

SEQ ID NO: 50071 - protein, 31 aa, Artificial Sequence
  Cyclic GFR-binding peptide
  MOD_RES (2)..(2): Xaa is C or S
KXSRVIMNSLQEVKPKRGVYYLITLPELAQP

SEQ ID NO: 50072 - protein, 37 aa, Artificial Sequence; identical to SEQ ID NO: 9631
  Cyclic GFR-binding peptide
  MOD_RES (2)..(4)..(36)..(37): Xaa is C or S

SEQ ID NO: 50073 - protein, 30 aa, Artificial Sequence
  Cyclic GFR-binding peptide
  MOD_RES (30)..(30): Xaa is C or S
VVMNEYQKYIVNSSDDIFLVSIPSLQTPAX

SEQ ID NO: 50074 - protein, 24 aa, Artificial Sequence
  Cyclic GFR-binding peptide
MNNSLQEIVNSSDDYYLVTLPELK

SEQ ID NO: 50075 - protein, 29 aa, Artificial Sequence
  Cyclic GFR-binding peptide
  MOD_RES (27)..(28): Xaa is C or S
MEYQKYVKPKRGVIFLISIPSLAQPVXXP

SEQ ID NO: 50076 - protein, 28 aa, Artificial Sequence
  Cyclic GFR-binding peptide
  MOD_RES (27)..(28): Xaa is C or S
MEYQKYVKPTRGVIFLISIPSLDQPVXX

SEQ ID NO: 50077 - protein, 27 aa, Artificial Sequence
  Cyclic GFR-binding peptide
SRVVMNEYQKYIVNSSDDIFLVSIPSL

SEQ ID NO: 50078 - protein, 30 aa, Artificial Sequence
  Cyclic GFR-binding peptide
  MOD_RES (28)..(29): Xaa is C or S
MDNSLQEVVKENEDYYVMPLPELETPVXXA

SEQ ID NO: 50079 - protein, 30 aa, Artificial Sequence; identical to SEQ ID NO: 9633
  Cyclic GFR-binding peptide

SEQ ID NO: 50080 - protein, 39 aa, Artificial Sequence; identical to SEQ ID NO: 9635
  Cyclic GFR-binding peptide
  MOD_RES (2)..(4)..(36)..(37): Xaa is C or S

SEQ ID NO: 50081 - protein, 26 aa, Artificial Sequence
  Cyclic GFR-binding peptide
MEYQKYVKPKRGVIFLISIPSLAQPV

SEQ ID NO: 50082 - protein, 22 aa, Artificial Sequence
  Cyclic GFR-binding peptide
DNSLQEVVKENEDYYLMTLPEL

SEQ ID NO: 50083 - protein, 32 aa, Artificial Sequence
  Cyclic GFR-binding peptide
  MOD_RES (29)..(30): Xaa is C or S
VMDEYQKYVVKENEDIFLMSIPSLETPVXXAK

SEQ ID NO: 50084 - protein, 29 aa, Artificial Sequence
  Cyclic GFR-binding peptide
  MOD_RES (2)..(2): Xaa is C or S
GXSEVVMDQYNKLVVNNASDLYLISIASL

SEQ ID NO: 50085 - protein, 42 aa, Artificial Sequence; identical to SEQ ID NO: 9638
  Cyclic GFR-binding peptide
  MOD_RES (2)..(4)..(36)..(37): Xaa is C or S

SEQ ID NO: 50086 - protein, 32 aa, Artificial Sequence
  Cyclic GFR-binding peptide
  MOD_RES (2)..(2): Xaa is C or S
GXSRVVMNEYQKYIVNSSDDIFLVSIPSLKTP

SEQ ID NO: 50087 - protein, 34 aa, Artificial Sequence; identical to SEQ ID NO: 9640
  Cyclic GFR-binding peptide
  MOD_RES (2)..(33)..(34): Xaa is C or S

SEQ ID NO: 50088 - protein, 37 aa, Artificial Sequence; identical to SEQ ID NO: 9639
  Cyclic GFR-binding peptide
  MOD_RES (2)..(34)..(35): Xaa is C or S

SEQ ID NO: 50089 - protein, 38 aa, Artificial Sequence; identical to SEQ ID NO: 9641
  Cyclic GFR-binding peptide
  MOD_RES (2)..(33)..(34): Xaa is C or S

SEQ ID NO: 50090 - protein, 34 aa, Artificial Sequence; identical to SEQ ID NO: 9643
  Cyclic GFR-binding peptide
  MOD_RES (32)..(33): Xaa is C or S

SEQ ID NO: 50091 - protein, 32 aa, Artificial Sequence
  Cyclic GFR-binding peptide
  MOD_RES (2)..(4): Xaa is C or S
RXGXGEVVMDNSLQEVVKENEDYYVMPLPELE

SEQ ID NO: 50092 - protein, 37 aa, Artificial Sequence; identical to SEQ ID NO: 9644
  Cyclic GFR-binding peptide
  MOD_RES (1)..(33)..(34): Xaa is C or S

SEQ ID NO: 50093 - protein, 32 aa, Artificial Sequence
  Cyclic GFR-binding peptide
  MOD_RES (28)..(29): Xaa is C or S
MDQYNKLVVNNASDLYLISIASLRTPVXXTPP

SEQ ID NO: 50094 - protein, 29 aa, Artificial Sequence
  Cyclic GFR-binding peptide
  MOD_RES (27)..(28): Xaa is C or S
DNSLQEVVNNASDYYVIPLPELRTPVXXT

SEQ ID NO: 50095 - protein, 23 aa, Artificial Sequence
  Cyclic GFR-binding peptide
NSLQEIVNSSDDYYVVPLPELKT

SEQ ID NO: 50096 - protein, 42 aa, Artificial Sequence; identical to SEQ ID NO: 9645
  Cyclic GFR-binding peptide
  MOD_RES (2)..(4)..(36): Xaa is C or S

SEQ ID NO: 50097 - protein, 33 aa, Artificial Sequence; identical to SEQ ID NO: 9646
  Cyclic GFR-binding peptide
  MOD_RES (32)..(33): Xaa is C or S

SEQ ID NO: 50098 - protein, 40 aa, Artificial Sequence; identical to SEQ ID NO: 9647
  Cyclic GFR-binding peptide
  MOD_RES (1)..(3)..(35)..(36): Xaa is C or S

SEQ ID NO: 50099 - protein, 33 aa, Artificial Sequence
  Cyclic GFR-binding peptide
  MOD_RES (27)..(28): Xaa is C or S
DQYNKLVVNNASDLYLISIASLRTPVXXTPPTS

SEQ ID NO: 50100 - protein, 26 aa, Artificial Sequence
  Cyclic GFR-binding peptide
VVMDQYNKLVVNNASDLYLISIASLR

SEQ ID NO: 50101 - protein, 31 aa, Artificial Sequence; identical to SEQ ID NO: 9648
  Cyclic GFR-binding peptide
  MOD_RES (31)..(31): Xaa is C or S

SEQ ID NO: 50102 - protein, 30 aa, Artificial Sequence
  Cyclic GFR-binding peptide
  MOD_RES (27)..(28): Xaa is C or S
EEYQKYVVKDYEDIFLMSIPSLETPVXXAK

SEQ ID NO: 50103 - protein, 27 aa, Artificial Sequence
  Cyclic GFR-binding peptide
IMEYQKYVKPKRGVIFLISIPSLAQPV

SEQ ID NO: 50104 - protein, 27 aa, Artificial Sequence
  Cyclic GFR-binding peptide
RVVMNNSLQEIVNSSDDYYLVTLPELK

SEQ ID NO: 50105 - protein, 30 aa, Artificial Sequence
  Cyclic GFR-binding peptide
  MOD_RES (2)..(2): Xaa is C or S
GXSRVVMNEYQKYIVNSSDDIFLVSIPSLK

SEQ ID NO: 50106 - protein, 37 aa, Artificial Sequence; identical to SEQ ID NO: 9652
  Cyclic GFR-binding peptide
  MOD_RES (2)..(4)..(36)..(37): Xaa is C or S

SEQ ID NO: 50107 - protein, 30 aa, Artificial Sequence
  Cyclic GFR-binding peptide
SRVVMNNSLQEIVNSSDDYYVVPLPELKTP

SEQ ID NO: 50108 - protein, 31 aa, Artificial Sequence
  Cyclic GFR-binding peptide
  MOD_RES (1)..(3): Xaa is C or S
XGXGEVVMENSLQEVVKDYEDYYLMTLPELE

SEQ ID NO: 50109 - protein, 26 aa, Artificial Sequence
  Cyclic GFR-binding peptide
MDQYNKLVVNNASDLYLISIASLRTP

SEQ ID NO: 50110 - protein, 24 aa, Artificial Sequence
  Cyclic GFR-binding peptide
VVMDNSLQEVVNNASDYYVIPLPE

SEQ ID NO: 50111 - protein, 40 aa, Artificial Sequence; identical to SEQ ID NO: 9657
  Cyclic GFR-binding peptide
  MOD_RES (2)..(4)..(35)..(36): Xaa is C or S

SEQ ID NO: 50112 - protein, 28 aa, Artificial Sequence
  Cyclic GFR-binding peptide
  MOD_RES (28)..(28): Xaa is C or S
MNNSLQEIVNSSDDYYVVPLPELQTPAX

SEQ ID NO: 50113 - protein, 34 aa, Artificial Sequence
  Cyclic GFR-binding peptide
  MOD_RES (28)..(29): Xaa is C or S
MNNSLQEIVNSSDDYYLVTLPELKTPAXXPKPVY

SEQ ID NO: 50114 - protein, 33 aa, Artificial Sequence
  Cyclic GFR-binding peptide
  MOD_RES (1)..(3): Xaa is C or S
XGXARVVMNNSLQEIVNSSDDYYVVPLPELQTP

SEQ ID NO: 50115 - protein, 20 aa, Artificial Sequence
  Cyclic GFR-binding peptide
EYQKYIKPTKGIIFLISIPS

SEQ ID NO: 50116 - protein, 31 aa, Artificial Sequence
  Cyclic GFR-binding peptide
  MOD_RES (2)..(4): Xaa is C or S
HXGXARVVMNNSLQEIVNSSDDYYLVTLPEL

SEQ ID NO: 50117 - protein, 30 aa, Artificial Sequence
  Cyclic GFR-binding peptide
  MOD_RES (26)..(27): Xaa is C or S
NSLQEIVNSSDDYYLVTLPELQTPAXXPKP

SEQ ID NO: 50118 - protein, 28 aa, Artificial Sequence
  Cyclic GFR-binding peptide
  MOD_RES (1)..(1): Xaa is C or S
XSRVVMNNSLQEIVNSSDDYYVVPLPEL

SEQ ID NO: 50119 - protein, 32 aa, Artificial Sequence; identical to SEQ ID NO: 9660
  Cyclic GFR-binding peptide
  MOD_RES (1)..(1): Xaa is C or S

SEQ ID NO: 50120 - protein, 36 aa, Artificial Sequence; identical to SEQ ID NO: 9663
  Cyclic GFR-binding peptide
  MOD_RES (31)..(32): Xaa is C or S

SEQ ID NO: 50121 - protein, 21 aa, Artificial Sequence
  Cyclic GFR-binding peptide
EYQKYVKPTRGVIFLISIPSL

SEQ ID NO: 50122 - protein, 32 aa, Artificial Sequence; identical to SEQ ID NO: 9664
  Cyclic GFR-binding peptide
  MOD_RES (31)..(32): Xaa is C or S

SEQ ID NO: 50123 - protein, 38 aa, Artificial Sequence; identical to SEQ ID NO: 9665
  Cyclic GFR-binding peptide
  MOD_RES (1)..(3)..(34)..(35): Xaa is C or S

SEQ ID NO: 50124 - protein, 35 aa, Artificial Sequence
  Cyclic GFR-binding peptide
  MOD_RES (29)..(29): Xaa is C or S
VMNNSLQEIVNSSDDYYVVPLPELKTPAXTPKTVH

SEQ ID NO: 50125 - protein, 27 aa, Artificial Sequence
  Cyclic GFR-binding peptide
  MOD_RES (26)..(27): Xaa is C or S
NSLQEVVNNASDYYLITLPELRTPVXX

SEQ ID NO: 50126 - protein, 31 aa, Artificial Sequence
  Cyclic GFR-binding peptide
  MOD_RES (29)..(30): Xaa is C or S
VMDNSLQEVVKENEDYYVMPLPELETPVXXA

SEQ ID NO: 50127 - protein, 33 aa, Artificial Sequence; identical to SEQ ID NO: 9667
  Cyclic GFR-binding peptide
  MOD_RES (1)..(3): Xaa is C or S

SEQ ID NO: 50128 - protein, 34 aa, Artificial Sequence; identical to SEQ ID NO: 9671
  Cyclic GFR-binding peptide
  MOD_RES (32)..(33): Xaa is C or S

SEQ ID NO: 50129 - protein, 32 aa, Artificial Sequence; identical to SEQ ID NO: 9672
  Cyclic GFR-binding peptide
  MOD_RES (1)..(32): Xaa is C or S

SEQ ID NO: 50130 - protein, 37 aa, Artificial Sequence; identical to SEQ ID NO: 9674
  Cyclic GFR-binding peptide
  MOD_RES (2)..(34)..(35): Xaa is C or S

SEQ ID NO: 50131 - protein, 28 aa, Artificial Sequence
  Cyclic GFR-binding peptide
GEVVMEEYQKYVVKDYEDIFLMSIPSLE

SEQ ID NO: 50132 - protein, 32 aa, Artificial Sequence
  Cyclic GFR-binding peptide
  MOD_RES (1)..(3): Xaa is C or S
XKXSKVIMNSLQEIKPTKGIYYVIPLPELDQS

SEQ ID NO: 50133 - protein, 32 aa, Artificial Sequence; identical to SEQ ID NO: 9681
  Cyclic GFR-binding peptide
  MOD_RES (31)..(31): Xaa is C or S

SEQ ID NO: 50134 - protein, 33 aa, Artificial Sequence
  Cyclic GFR-binding peptide
  MOD_RES (29)..(30): Xaa is C or S
VMNEYQKYIVNSSDDIFLVSIPSLQTPAXXPKP

SEQ ID NO: 50135 - protein, 30 aa, Artificial Sequence
  Cyclic GFR-binding peptide
  MOD_RES (1)..(1): Xaa is C or S
XSRVVMNEYQKYIVNSSDDIFLVSIPSLKT

SEQ ID NO: 50136 - protein, 37 aa, Artificial Sequence; identical to SEQ ID NO: 9683
  Cyclic GFR-binding peptide
  MOD_RES (1)..(3)..(35): Xaa is C or S

SEQ ID NO: 50137 - protein, 32 aa, Artificial Sequence
  Cyclic GFR-binding peptide
  MOD_RES (2)..(2): Xaa is C or S
GXSRVVMNNSLQEIVNSSDDYYLVTLPELKTP

SEQ ID NO: 50138 - protein, 26 aa, Artificial Sequence
  Cyclic GFR-binding peptide
ENSLQEVVKDYEDYYLMTLPELETPV

SEQ ID NO: 50139 - protein, 30 aa, Artificial Sequence
  Cyclic GFR-binding peptide
  MOD_RES (2)..(2): Xaa is C or S
GXSEVVMDQYNKLVVNNASDLYLISIASLR

SEQ ID NO: 50140 - protein, 31 aa, Artificial Sequence
  Cyclic GFR-binding peptide
  MOD_RES (1)..(3): Xaa is C or S
XGXGEVVMEEYQKYVVKDYEDIFLMSIPSLE

SEQ ID NO: 50141 - protein, 28 aa, Artificial Sequence
  Cyclic GFR-binding peptide
  MOD_RES (1)..(1): Xaa is C or S
XGEVVMENSLQEVVKDYEDYYVMPLPEL

SEQ ID NO: 50142 - protein, 37 aa, Artificial Sequence; identical to SEQ ID NO: 9687
  Cyclic GFR-binding peptide
  MOD_RES (2)..(33)..(34): Xaa is C or S

SEQ ID NO: 50143 - protein, 34 aa, Artificial Sequence
  Cyclic GFR-binding peptide
  MOD_RES (2)..(4): Xaa is C or S
RXGXGEVVMEEYQKYVVKDYEDIFLMSIPSLETP

SEQ ID NO: 50144 - protein, 25 aa, Artificial Sequence
  Cyclic GFR-binding peptide
VVMNSLQEVKPTRGVYYVIPLPELD

SEQ ID NO: 50145 - protein, 32 aa, Artificial Sequence
  Cyclic GFR-binding peptide
  MOD_RES (28)..(28): Xaa is C or S
MNNSLQEIVNSSDDYYLVTLPELKTPAXTPKT

SEQ ID NO: 50146 - protein, 26 aa, Artificial Sequence
  Cyclic GFR-binding peptide
ENSLQEVVKDYEDYYVMPLPELETPV

SEQ ID NO: 50147 - protein, 26 aa, Artificial Sequence
  Cyclic GFR-binding peptide
SEVVMDQYNKLVVNNASDLYLISIAS

SEQ ID NO: 50148 - protein, 27 aa, Artificial Sequence
  Cyclic GFR-binding peptide
MDNSLQEVVNNASDYYLITLPELRTPV

SEQ ID NO: 50149 - protein, 26 aa, Artificial Sequence
  Cyclic GFR-binding peptide
GEVVMENSLQEVVKDYEDYYVMPLPE

SEQ ID NO: 50150 - protein, 31 aa, Artificial Sequence
  Cyclic GFR-binding peptide
  MOD_RES (30)..(30): Xaa is C or S
VVMNEYQKYIVNSSDDIFLVSIPSLKTPAXT

SEQ ID NO: 50151 - protein, 39 aa, Artificial Sequence; identical to SEQ ID NO: 9693
  Cyclic GFR-binding peptide
  MOD_RES (2)..(4)..(35)..(36): Xaa is C or S

SEQ ID NO: 50152 - protein, 22 aa, Artificial Sequence
  Cyclic GFR-binding peptide
NNSLQEIVNSSDDYYLVTLPEL

SEQ ID NO: 50153 - protein, 40 aa, Artificial Sequence; identical to SEQ ID NO: 9694
  Cyclic GFR-binding peptide
  MOD_RES (1)..(3)..(35)..(36): Xaa is C or S

SEQ ID NO: 50154 - protein, 27 aa, Artificial Sequence
  Cyclic GFR-binding peptide
  MOD_RES (1)..(1): Xaa is C or S
XGEVVMDNSLQEVVKENEDYYLMTLPE

SEQ ID NO: 50155 - protein, 32 aa, Artificial Sequence; identical to SEQ ID NO: 9697
  Cyclic GFR-binding peptide
  MOD_RES (31)..(32): Xaa is C or S

SEQ ID NO: 50156 - protein, 34 aa, Artificial Sequence
  Cyclic GFR-binding peptide
  MOD_RES (29)..(30): Xaa is C or S
VMDQYNKLVVNNASDLYLISIASLRTPVXXTPPT

SEQ ID NO: 50157 - protein, 32 aa, Artificial Sequence
  Cyclic GFR-binding peptide
  MOD_RES (27)..(28): Xaa is C or S
DEYQKYVVKENEDIFLMSIPSLETPVXXAKPI

SEQ ID NO: 50158 - protein, 34 aa, Artificial Sequence; identical to SEQ ID NO: 9699
  Cyclic GFR-binding peptide
  MOD_RES (32)..(33): Xaa is C or S

SEQ ID NO: 50159 - protein, 25 aa, Artificial Sequence
  Cyclic GFR-binding peptide
VVMNNSLQEIVNSSDDYYVVPLPEL

SEQ ID NO: 50160 - protein, 40 aa, Artificial Sequence; identical to SEQ ID NO: 9700
  Cyclic GFR-binding peptide
  MOD_RES (2)..(34): Xaa is C or S

SEQ ID NO: 50161 - protein, 23 aa, Artificial Sequence
  Cyclic GFR-binding peptide
VMDNSLQEVVKENEDYYLMTLPE

SEQ ID NO: 50162 - protein, 32 aa, Artificial Sequence
  Cyclic GFR-binding peptide
  MOD_RES (28)..(29): Xaa is C or S
MDNSLQEVVKENEDYYLMTLPELETPVXXAKP

SEQ ID NO: 50163 - protein, 38 aa, Artificial Sequence; identical to SEQ ID NO: 9701
  Cyclic GFR-binding peptide
  MOD_RES (1)..(32)..(33): Xaa is C or S

SEQ ID NO: 50164 - protein, 27 aa, Artificial Sequence
  Cyclic GFR-binding peptide
KVVMEYQKYVKPTRGVIFLISIPSLDQ

SEQ ID NO: 50165 - protein, 41 aa, Artificial Sequence; identical to SEQ ID NO: 9702
  Cyclic GFR-binding peptide
  MOD_RES (1)..(3)..(35)..(36): Xaa is C or S

SEQ ID NO: 50166 - protein, 35 aa, Artificial Sequence; identical to SEQ ID NO: 9703
  Cyclic GFR-binding peptide
  MOD_RES (1)..(3)..(35): Xaa is C or S

SEQ ID NO: 50167 - protein, 27 aa, Artificial Sequence
  Cyclic GFR-binding peptide
  MOD_RES (27)..(27): Xaa is C or S
NEYQKYIVNSSDDIFLVSIPSLQTPAX

SEQ ID NO: 50168 - protein, 31 aa, Artificial Sequence
  Cyclic GFR-binding peptide
  MOD_RES (28)..(29): Xaa is C or S
IMNSLQEIKPTKGIYYVIPLPELDQSVXXPS

SEQ ID NO: 50169 - protein, 27 aa, Artificial Sequence
  Cyclic GFR-binding peptide
VMEEYQKYVVKDYEDIFLMSIPSLETP

SEQ ID NO: 50170 - protein, 34 aa, Artificial Sequence; identical to SEQ ID NO: 9704
  Cyclic GFR-binding peptide
  MOD_RES (2)..(4): Xaa is C or S

SEQ ID NO: 50171 - protein, 33 aa, Artificial Sequence
  Cyclic GFR-binding peptide
  MOD_RES (28)..(28): Xaa is C or S
MNNSLQEIVNSSDDYYVVPLPELKTPAXTPKTV

SEQ ID NO: 50172 - protein, 29 aa, Artificial Sequence
  Cyclic GFR-binding peptide
  MOD_RES (28)..(29): Xaa is C or S
MNNSLQEIVNSSDDYYVVPLPELKTPAXX

SEQ ID NO: 50173 - protein, 28 aa, Artificial Sequence
  Cyclic GFR-binding peptide
  MOD_RES (27)..(28): Xaa is C or S
NNSLQEIVNSSDDYYLVTLPELQTPAXX

SEQ ID NO: 50174 - protein, 36 aa, Artificial Sequence; identical to SEQ ID NO: 9708
  Cyclic GFR-binding peptide
  MOD_RES (1)..(3)..(35)..(36): Xaa is C or S

SEQ ID NO: 50175 - protein, 36 aa, Artificial Sequence; identical to SEQ ID NO: 9709
  Cyclic GFR-binding peptide
  MOD_RES (2)..(34): Xaa is C or S

SEQ ID NO: 50176 - protein, 39 aa, Artificial Sequence; identical to SEQ ID NO: 9710
  Cyclic GFR-binding peptide
  MOD_RES (1)..(33)..(34): Xaa is C or S

SEQ ID NO: 50177 - protein, 32 aa, Artificial Sequence
  Cyclic GFR-binding peptide
  MOD_RES (2)..(2): Xaa is C or S
GXARVVMNNSLQEIVNSSDDYYLVTLPELQTP

SEQ ID NO: 50178 - protein, 28 aa, Artificial Sequence
  Cyclic GFR-binding peptide
  MOD_RES (28)..(28): Xaa is C or S
MDEYQKYVVKENEDIFLMSIPSLETPVX

SEQ ID NO: 50179 - protein, 29 aa, Artificial Sequence
  Cyclic GFR-binding peptide
SRVVMNNSLQEIVNSSDDYYVVPLPELKT

SEQ ID NO: 50180 - protein, 27 aa, Artificial Sequence
  Cyclic GFR-binding peptide
  MOD_RES (26)..(27): Xaa is C or S
EYQKYIVNSSDDIFLVSIPSLKTPAXX

SEQ ID NO: 50181 - protein, 29 aa, Artificial Sequence
  Cyclic GFR-binding peptide
VVMDNSLQEVVKENEDYYLMTLPELETPV

SEQ ID NO: 50182 - protein, 39 aa, Artificial Sequence; identical to SEQ ID NO: 9712
  Cyclic GFR-binding peptide
  MOD_RES (1)..(3)..(35)..(36): Xaa is C or S

SEQ ID NO: 50183 - protein, 29 aa, Artificial Sequence
  Cyclic GFR-binding peptide
  MOD_RES (2)..(2): Xaa is C or S
KXSRVIMNSLQEVKPKRGVYYLITLPELA

SEQ ID NO: 50184 - protein, 33 aa, Artificial Sequence; identical to SEQ ID NO: 9716
  Cyclic GFR-binding peptide
  MOD_RES (1)..(3): Xaa is C or S

SEQ ID NO: 50185 - protein, 35 aa, Artificial Sequence; identical to SEQ ID NO: 9717
  Cyclic GFR-binding peptide
  MOD_RES (1)..(3)..(35): Xaa is C or S

SEQ ID NO: 50186 - protein, 37 aa, Artificial Sequence; identical to SEQ ID NO: 9718
  Cyclic GFR-binding peptide
  MOD_RES (1)..(3)..(35): Xaa is C or S

SEQ ID NO: 50187 - protein, 26 aa, Artificial Sequence
  Cyclic GFR-binding peptide
VVMDNSLQEVVNNASDYYLITLPELR

SEQ ID NO: 50188 - protein, 30 aa, Artificial Sequence
  Cyclic GFR-binding peptide
  MOD_RES (2)..(4): Xaa is C or S
RXGXGEVVMENSLQEVVKDYEDYYLMTLPE

SEQ ID NO: 50189 - protein, 29 aa, Artificial Sequence
  Cyclic GFR-binding peptide
  MOD_RES (26)..(27): Xaa is C or S
NSLQEVVKDYEDYYVMPLPELETPVXXAK

SEQ ID NO: 50190 - protein, 30 aa, Artificial Sequence
  Cyclic GFR-binding peptide
  MOD_RES (2)..(2): Xaa is C or S
GXSRVVMNNSLQEIVNSSDDYYVVPLPELK

SEQ ID NO: 50191 - protein, 24 aa, Artificial Sequence
  Cyclic GFR-binding peptide
IMEYQKYVKPKRGVIFLISIPSLA

SEQ ID NO: 50192 - protein, 29 aa, Artificial Sequence
  Cyclic GFR-binding peptide
EVVMEEYQKYVVKDYEDIFLMSIPSLETP

SEQ ID NO: 50193 - protein, 29 aa, Artificial Sequence
  Cyclic GFR-binding peptide
  MOD_RES (1)..(1): Xaa is C or S
XARVVMNNSLQEIVNSSDDYYVVPLPELQ

SEQ ID NO: 50194 - protein, 31 aa, Artificial Sequence
  Cyclic GFR-binding peptide
  MOD_RES (29)..(30): Xaa is C or S
VIMNSLQEVKPKRGVYYLITLPELAQPVXXP

SEQ ID NO: 50195 - protein, 32 aa, Artificial Sequence
  Cyclic GFR-binding peptide
  MOD_RES (28)..(29): Xaa is C or S
MENSLQEVVKDYEDYYVMPLPELETPVXXAKP

SEQ ID NO: 50196 - protein, 35 aa, Artificial Sequence
  Cyclic GFR-binding peptide
  MOD_RES (29)..(30): Xaa is C or S
VVMEYQKYVKPTRGVIFLISIPSLDQPVXXPSASA

SEQ ID NO: 50197 - protein, 33 aa, Artificial Sequence
  Cyclic GFR-binding peptide
  MOD_RES (1)..(3): Xaa is C or S
XGXGEVVMDNSLQEVVKENEDYYLMTLPELETP

SEQ ID NO: 50198 - protein, 24 aa, Artificial Sequence
  Cyclic GFR-binding peptide
VMDNSLQEVVNNASDYYLITLPEL

SEQ ID NO: 50199 - protein, 23 aa, Artificial Sequence
  Cyclic GFR-binding peptide
MNSLQEVKPTRGVYYVIPLPELD

SEQ ID NO: 50200 - protein, 31 aa, Artificial Sequence
  Cyclic GFR-binding peptide
  MOD_RES (27)..(28): Xaa is C or S
DRYKKLVVNNASDFYLISIANLRTPVXXTPP

SEQ ID NO: 50201 - protein, 36 aa, Artificial Sequence; identical to SEQ ID NO: 9723
  Cyclic GFR-binding peptide
  MOD_RES (2)..(4)..(36): Xaa is C or S

SEQ ID NO: 50202 - protein, 28 aa, Artificial Sequence
  Cyclic GFR-binding peptide
  MOD_RES (26)..(27): Xaa is C or S
NSLQEIKPTKGIYYVIPLPELDQSVXXP

SEQ ID NO: 50203 - protein, 38 aa, Artificial Sequence; identical to SEQ ID NO: 9725
  Cyclic GFR-binding peptide
  MOD_RES (1)..(3)..(35)..(36): Xaa is C or S

SEQ ID NO: 50204 - protein, 24 aa, Artificial Sequence
  Cyclic GFR-binding peptide
DQYNKLVVNNASDLYLISIASLRT

SEQ ID NO: 50205 - protein, 29 aa, Artificial Sequence
  Cyclic GFR-binding peptide
VVMNEYQKYIVNSSDDIFLVSIPSLQTPA

SEQ ID NO: 50206 - protein, 32 aa, Artificial Sequence; identical to SEQ ID NO: 9729
  Cyclic GFR-binding peptide
  MOD_RES (31)..(32): Xaa is C or S

SEQ ID NO: 50207 - protein, 26 aa, Artificial Sequence
  Cyclic GFR-binding peptide
NNSLQEIVNSSDDYYLVTLPELQTPA

SEQ ID NO: 50208 - protein, 32 aa, Artificial Sequence
  Cyclic GFR-binding peptide
  MOD_RES (1)..(3): Xaa is C or S
XKXSRVIMNSLQEVKPKRGVYYLITLPELAQP

SEQ ID NO: 50209 - protein, 27 aa, Artificial Sequence
  Cyclic GFR-binding peptide
  MOD_RES (26)..(27): Xaa is C or S
QYNKLVVNNASDLYLISIASLRTPVXX

SEQ ID NO: 50210 - protein, 26 aa, Artificial Sequence
  Cyclic GFR-binding peptide
NEYQKYIVNSSDDIFLVSIPSLQTPA

SEQ ID NO: 50211 - protein, 29 aa, Artificial Sequence
  Cyclic GFR-binding peptide
  MOD_RES (27)..(28): Xaa is C or S
DNSLQEVVNNASDYYLITLPELRTPVXXT

SEQ ID NO: 50212 - protein, 26 aa, Artificial Sequence
  Cyclic GFR-binding peptide
GEVVMEEYQKYVVKDYEDIFLMSIPS

SEQ ID NO: 50213 - protein, 36 aa, Artificial Sequence; identical to SEQ ID NO: 9733
  Cyclic GFR-binding peptide
  MOD_RES (2)..(34)..(35): Xaa is C or S

SEQ ID NO: 50214 - protein, 30 aa, Artificial Sequence
  Cyclic GFR-binding peptide
  MOD_RES (26)..(27): Xaa is C or S
EYQKYIVNSSDDIFLVSIPSLKTPAXXPKP

SEQ ID NO: 50215 - protein, 27 aa, Artificial Sequence
  Cyclic GFR-binding peptide
VVMENSLQEVVKDYEDYYVMPLPELET

SEQ ID NO: 50216 - protein, 31 aa, Artificial Sequence
  Cyclic GFR-binding peptide
  MOD_RES (30)..(31): Xaa is C or S
KVVMEYQKYVKPTRGVIFLISIPSLDQPVXX

SEQ ID NO: 50217 - protein, 38 aa, Artificial Sequence; identical to SEQ ID NO: 9734
  Cyclic GFR-binding peptide
  MOD_RES (1)..(32)..(33): Xaa is C or S

SEQ ID NO: 50218 - protein, 29 aa, Artificial Sequence
  Cyclic GFR-binding peptide
  MOD_RES (1)..(3): Xaa is C or S
XGXSEVVMDQYNKLVVNNASDLYLISIAS

SEQ ID NO: 50219 - protein, 35 aa, Artificial Sequence; identical to SEQ ID NO: 9735
  Cyclic GFR-binding peptide
  MOD_RES (2)..(4): Xaa is C or S

SEQ ID NO: 50220 - protein, 40 aa, Artificial Sequence; identical to SEQ ID NO: 9736
  Cyclic GFR-binding peptide
  MOD_RES (1)..(3)..(35)..(36): Xaa is C or S

SEQ ID NO: 50221 - protein, 30 aa, Artificial Sequence
  Cyclic GFR-binding peptide
  MOD_RES (1)..(3): Xaa is C or S
XGXSEVVMDQYNKLVVNNASDLYLISIASL

SEQ ID NO: 50222 - protein, 31 aa, Artificial Sequence
  Cyclic GFR-binding peptide
  MOD_RES (29)..(30): Xaa is C or S
VIMNSLQEIKPTKGIYYVIPLPELDQSVXXP

SEQ ID NO: 50223 - protein, 31 aa, Artificial Sequence
  Cyclic GFR-binding peptide
  MOD_RES (28)..(29): Xaa is C or S
MENSLQEVVKDYEDYYVMPLPELETPVXXAK

SEQ ID NO: 50224 - protein, 31 aa, Artificial Sequence
  Cyclic GFR-binding peptide
  MOD_RES (26)..(27): Xaa is C or S
NSLQEIKPTKGIYYVIPLPELDQSVXXPSAS

SEQ ID NO: 50225 - protein, 28 aa, Artificial Sequence
  Cyclic GFR-binding peptide
EVVMDRYKKLVVNNASDFYLISIANLRT

SEQ ID NO: 50226 - protein, 28 aa, Artificial Sequence
  Cyclic GFR-binding peptide
KVIMNSLQEIKPTKGIYYVIPLPELDQS

SEQ ID NO: 50227 - protein, 33 aa, Artificial Sequence
  Cyclic GFR-binding peptide
  MOD_RES (27)..(28): Xaa is C or S
NNSLQEIVNSSDDYYVVPLPELQTPAXXPKPVT

SEQ ID NO: 50228 - protein, 29 aa, Artificial Sequence
  Cyclic GFR-binding peptide
GEVVMDEYQKYVVKENEDIFLMSIPSLET

SEQ ID NO: 50229 - protein, 33 aa, Artificial Sequence; identical to SEQ ID NO: 9738
  Cyclic GFR-binding peptide
  MOD_RES (1)..(32)..(33): Xaa is C or S

SEQ ID NO: 50230 - protein, 25 aa, Artificial Sequence
  Cyclic GFR-binding peptide
EYQKYVVKENEDIFLMSIPSLETPV

SEQ ID NO: 50231 - protein, 26 aa, Artificial Sequence
  Cyclic GFR-binding peptide
  MOD_RES (26)..(26): Xaa is C or S
NSLQEVVKENEDYYVMPLPELETPVX

SEQ ID NO: 50232 - protein, 30 aa, Artificial Sequence
  Cyclic GFR-binding peptide
  MOD_RES (1)..(1): Xaa is C or S
XARVVMNEYQKYIVNSSDDIFLVSIPSLQT

SEQ ID NO: 50233 - protein, 34 aa, Artificial Sequence
  Cyclic GFR-binding peptide
  MOD_RES (28)..(29): Xaa is C or S
MNEYQKYIVNSSDDIFLVSIPSLQTPAXXPKPVT

SEQ ID NO: 50234 - protein, 27 aa, Artificial Sequence
  Cyclic GFR-binding peptide
VIMEYQKYIKPTKGIIFLISIPSLDQS

SEQ ID NO: 50235 - protein, 28 aa, Artificial Sequence
  Cyclic GFR-binding peptide
  MOD_RES (28)..(28): Xaa is C or S
MENSLQEVVKDYEDYYVMPLPELETPVX

SEQ ID NO: 50236 - protein, 26 aa, Artificial Sequence
  Cyclic GFR-binding peptide
VMENSLQEVVKDYEDYYLMTLPELET

SEQ ID NO: 50237 - protein, 32 aa, Artificial Sequence
  Cyclic GFR-binding peptide
  MOD_RES (29)..(30): Xaa is C or S
VVMNSLQEVKPTRGVYYVIPLPELDQPVXXPS

SEQ ID NO: 50238 - protein, 29 aa, Artificial Sequence
  Cyclic GFR-binding peptide
  MOD_RES (1)..(3): Xaa is C or S
XKXSKVIMNSLQEIKPTKGIYYVIPLPEL

SEQ ID NO: 50239 - protein, 36 aa, Artificial Sequence; identical to SEQ ID NO: 9746
  Cyclic GFR-binding peptide
  MOD_RES (31)..(32): Xaa is C or S

SEQ ID NO: 50240 - protein, 35 aa, Artificial Sequence
  Cyclic GFR-binding peptide
  MOD_RES (30)..(31): Xaa is C or S
VVMNNSLQEIVNSSDDYYVVPLPELQTPAXXPKPV

SEQ ID NO: 50241 - protein, 22 aa, Artificial Sequence
  Cyclic GFR-binding peptide
MDNSLQEVVNNASDYYVIPLPE

SEQ ID NO: 50242 - protein, 34 aa, Artificial Sequence; identical to SEQ ID NO: 9747
  Cyclic GFR-binding peptide
  MOD_RES (1)..(3): Xaa is C or S

SEQ ID NO: 50243 - protein, 30 aa, Artificial Sequence
  Cyclic GFR-binding peptide
  MOD_RES (30)..(30): Xaa is C or S
VVMENSLQEVVKDYEDYYLMTLPELETPVX

SEQ ID NO: 50244 - protein, 34 aa, Artificial Sequence
  Cyclic GFR-binding peptide
  MOD_RES (28)..(28): Xaa is C or S
MNNSLQEIVNSSDDYYVVPLPELKTPAXTPKTVH

SEQ ID NO: 50245 - protein, 26 aa, Artificial Sequence
  Cyclic GFR-binding peptide
  MOD_RES (26)..(26): Xaa is C or S
NSLQEVVNNASDYYLITLPELRTPVX

SEQ ID NO: 50246 - protein, 32 aa, Artificial Sequence; identical to SEQ ID NO: 9751
  Cyclic GFR-binding peptide
  MOD_RES (31)..(32): Xaa is C or S

SEQ ID NO: 50247 - protein, 26 aa, Artificial Sequence
  Cyclic GFR-binding peptide
VVMDNSLQEVVKENEDYYLMTLPELE

SEQ ID NO: 50248 - protein, 30 aa, Artificial Sequence
  Cyclic GFR-binding peptide
  MOD_RES (1)..(1): Xaa is C or S
XSEVVMDNSLQEVVNNASDYYLITLPELRT

SEQ ID NO: 50249 - protein, 32 aa, Artificial Sequence
  Cyclic GFR-binding peptide
  MOD_RES (27)..(28): Xaa is C or S
DNSLQEVVNNASDYYLITLPELRTPVXXTPPT

SEQ ID NO: 50250 - protein, 29 aa, Artificial Sequence
  Cyclic GFR-binding peptide
  MOD_RES (1)..(1): Xaa is C or S
XGEVVMEEYQKYVVKDYEDIFLMSIPSLE

SEQ ID NO: 50251 - protein, 33 aa, Artificial Sequence
  Cyclic GFR-binding peptide
  MOD_RES (30)..(30): Xaa is C or S
VVMNNSLQEIVNSSDDYYVVPLPELKTPAXTPK

SEQ ID NO: 50252 - protein, 32 aa, Artificial Sequence
  Cyclic GFR-binding peptide
  MOD_RES (29)..(30): Xaa is C or S
VMEEYQKYVVKDYEDIFLMSIPSLETPVXXAK

SEQ ID NO: 50253 - protein, 28 aa, Artificial Sequence
  Cyclic GFR-binding peptide
  MOD_RES (1)..(1): Xaa is C or S
XGEVVMDEYQKYVVKENEDIFLMSIPSL

SEQ ID NO: 50254 - protein, 37 aa, Artificial Sequence; identical to SEQ ID NO: 9753
  Cyclic GFR-binding peptide
  MOD_RES (2)..(34)..(35): Xaa is C or S

SEQ ID NO: 50255 - protein, 20 aa, Artificial Sequence
  Cyclic GFR-binding peptide
NSLQEVKPTRGVYYVIPLPE

SEQ ID NO: 50256 - protein, 30 aa, Artificial Sequence
  Cyclic GFR-binding peptide
  MOD_RES (28)..(29): Xaa is C or S
IMEYQKYVKPKRGVIFLISIPSLAQPVXXP

SEQ ID NO: 50257 - protein, 40 aa, Artificial Sequence; identical to SEQ ID NO: 9754
  Cyclic GFR-binding peptide
  MOD_RES (2)..(34)..(35): Xaa is C or S

SEQ ID NO: 50258 - protein, 29 aa, Artificial Sequence
  Cyclic GFR-binding peptide
SRVIMEYQKYVKPKRGVIFLISIPSLAQP

SEQ ID NO: 50259 - protein, 22 aa, Artificial Sequence
  Cyclic GFR-binding peptide
NEYQKYIVNSSDDIFLVSIPSL

SEQ ID NO: 50260 - protein, 21 aa, Artificial Sequence
  Cyclic GFR-binding peptide
MNSLQEVKPTRGVYYVIPLPE

SEQ ID NO: 50261 - protein, 28 aa, Artificial Sequence
  Cyclic GFR-binding peptide
  MOD_RES (28)..(28): Xaa is C or S
MDQYNKLVVNNASDLYLISIASLRTPVX

SEQ ID NO: 50262 - protein, 36 aa, Artificial Sequence; identical to SEQ ID NO: 9755
  Cyclic GFR-binding peptide
  MOD_RES (1)..(32)..(33): Xaa is C or S

SEQ ID NO: 50263 - protein, 24 aa, Artificial Sequence
  Cyclic GFR-binding peptide
NSLQEVKPKRGVYYLITLPELAQP

SEQ ID NO: 50264 - protein, 34 aa, Artificial Sequence
  Cyclic GFR-binding peptide
  MOD_RES (2)..(4): Xaa is C or S
HXGXSRVVMNNSLQEIVNSSDDYYLVTLPELKTP

SEQ ID NO: 50265 - protein, 33 aa, Artificial Sequence
  Cyclic GFR-binding peptide
  MOD_RES (27)..(28): Xaa is C or S
DNSLQEVVNNASDYYVIPLPELRTPVXXTPPTS

SEQ ID NO: 50266 - protein, 33 aa, Artificial Sequence; identical to SEQ ID NO: 9758
  Cyclic GFR-binding peptide
  MOD_RES (32)..(33): Xaa is C or S

SEQ ID NO: 50267 - protein, 33 aa, Artificial Sequence; identical to SEQ ID NO: 9759
  Cyclic GFR-binding peptide
  MOD_RES (32)..(33): Xaa is C or S

SEQ ID NO: 50268 - protein, 31 aa, Artificial Sequence
  Cyclic GFR-binding peptide
  MOD_RES (2)..(2): Xaa is C or S
GXARVVMNNSLQEIVNSSDDYYVVPLPELQT

SEQ ID NO: 50269 - protein, 22 aa, Artificial Sequence
  Cyclic GFR-binding peptide
NSLQEVKPKRGVYYLITLPELA

SEQ ID NO: 50270 - protein, 29 aa, Artificial Sequence
  Cyclic GFR-binding peptide
EVVMDNSLQEVVKENEDYYVMPLPELETP

SEQ ID NO: 50271 - protein, 28 aa, Artificial Sequence
  Cyclic GFR-binding peptide
  MOD_RES (28)..(28): Xaa is C or S
VMEYQKYVKPTRGVIFLISIPSLDQPVX

SEQ ID NO: 50272 - protein, 31 aa, Artificial Sequence
  Cyclic GFR-binding peptide
  MOD_RES (27)..(28): Xaa is C or S
DEYQKYVVKENEDIFLMSIPSLETPVXXAKP

SEQ ID NO: 50273 - protein, 37 aa, Artificial Sequence; identical to SEQ ID NO: 9762
  Cyclic GFR-binding peptide
  MOD_RES (32)..(33): Xaa is C or S

SEQ ID NO: 50274 - protein, 39 aa, Artificial Sequence; identical to SEQ ID NO: 9764
  Cyclic GFR-binding peptide
  MOD_RES (1)..(3)..(35)..(36): Xaa is C or S

SEQ ID NO: 50275 - protein, 32 aa, Artificial Sequence
  Cyclic GFR-binding peptide
  MOD_RES (30)..(31): Xaa is C or S
KVVMEYQKYVKPTRGVIFLISIPSLDQPVXXP

SEQ ID NO: 50276 - protein, 33 aa, Artificial Sequence; identical to SEQ ID NO: 9766
  Cyclic GFR-binding peptide
  MOD_RES (2)..(2): Xaa is C or S

SEQ ID NO: 50277 - protein, 35 aa, Artificial Sequence
  Cyclic GFR-binding peptide
  MOD_RES (29)..(30): Xaa is C or S
VMNNSLQEIVNSSDDYYLVTLPELQTPAXXPKPVT

SEQ ID NO: 50278 - protein, 25 aa, Artificial Sequence
  Cyclic GFR-binding peptide
KVIMNSLQEIKPTKGIYYVIPLPEL

SEQ ID NO: 50279 - protein, 29 aa, Artificial Sequence
  Cyclic GFR-binding peptide
EVVMDNSLQEVVNNASDYYLITLPELRTP

SEQ ID NO: 50280 - protein, 22 aa, Artificial Sequence
  Cyclic GFR-binding peptide
MEYQKYIKPTKGIIFLISIPSL

SEQ ID NO: 50281 - protein, 31 aa, Artificial Sequence
  Cyclic GFR-binding peptide
  MOD_RES (1)..(1): Xaa is C or S
XGEVVMDNSLQEVVKENEDYYLMTLPELETP

SEQ ID NO: 50282 - protein, 34 aa, Artificial Sequence
  Cyclic GFR-binding peptide
  MOD_RES (2)..(4): Xaa is C or S
RXGXSEVVMDRYKKLVVNNASDFYLISIANLRTP

SEQ ID NO: 50283 - protein, 34 aa, Artificial Sequence
  Cyclic GFR-binding peptide
  MOD_RES (30)..(31): Xaa is C or S
VVMDQYNKLVVNNASDLYLISIASLRTPVXXTPP

SEQ ID NO: 50284 - protein, 34 aa, Artificial Sequence; identical to SEQ ID NO: 9769
  Cyclic GFR-binding peptide
  MOD_RES (31)..(32): Xaa is C or S

SEQ ID NO: 50285 - protein, 25 aa, Artificial Sequence
  Cyclic GFR-binding peptide
VMDNSLQEVVKENEDYYLMTLPELE

SEQ ID NO: 50286 - protein, 42 aa, Artificial Sequence; identical to SEQ ID NO: 9770
  Cyclic GFR-binding peptide
  MOD_RES (2)..(4)..(36)..(37): Xaa is C or S

SEQ ID NO: 50287 - protein, 39 aa, Artificial Sequence; identical to SEQ ID NO: 9772
  Cyclic GFR-binding peptide
  MOD_RES (2)..(4)..(36)..(37): Xaa is C or S

SEQ ID NO: 50288 - protein, 34 aa, Artificial Sequence
  Cyclic GFR-binding peptide
  MOD_RES (29)..(30): Xaa is C or S
VMDNSLQEVVKENEDYYVMPLPELETPVXXAKPI

SEQ ID NO: 50289 - protein, 23 aa, Artificial Sequence
  Cyclic GFR-binding peptide
NSLQEVVNNASDYYLITLPELRT

SEQ ID NO: 50290 - protein, 32 aa, Artificial Sequence
  Cyclic GFR-binding peptide
  MOD_RES (27)..(28): Xaa is C or S
DNSLQEVVKENEDYYLMTLPELETPVXXAKPI

SEQ ID NO: 50291 - protein, 38 aa, Artificial Sequence; identical to SEQ ID NO: 9773
  Cyclic GFR-binding peptide
  MOD_RES (2)..(33)..(34): Xaa is C or S

SEQ ID NO: 50292 - protein, 38 aa, Artificial Sequence; identical to SEQ ID NO: 9774
  Cyclic GFR-binding peptide
  MOD_RES (1)..(3)..(35)..(36): Xaa is C or S

SEQ ID NO: 50293 - protein, 31 aa, Artificial Sequence
  Cyclic GFR-binding peptide
  MOD_RES (1)..(1): Xaa is C or S
XSRVVMNEYQKYIVNSSDDIFLVSIPSLKTP

SEQ ID NO: 50294 - protein, 23 aa, Artificial Sequence
  Cyclic GFR-binding peptide
VVMEYQKYVKPTRGVIFLISIPS

SEQ ID NO: 50295 - protein, 35 aa, Artificial Sequence; identical to SEQ ID NO: 9776
  Cyclic GFR-binding peptide
  MOD_RES (32)..(33): Xaa is C or S

SEQ ID NO: 50296 - protein, 25 aa, Artificial Sequence
  Cyclic GFR-binding peptide
DEYQKYVVKENEDIFLMSIPSLETP

SEQ ID NO: 50297 - protein, 35 aa, Artificial Sequence; identical to SEQ ID NO: 9781
  Cyclic GFR-binding peptide
  MOD_RES (2)..(34)..(35): Xaa is C or S

SEQ ID NO: 50298 - protein, 35 aa, Artificial Sequence; identical to SEQ ID NO: 9782
  Cyclic GFR-binding peptide
  MOD_RES (31)..(32): Xaa is C or S

SEQ ID NO: 50299 - protein, 34 aa, Artificial Sequence
  Cyclic GFR-binding peptide
  MOD_RES (29)..(29): Xaa is C or S
VMNEYQKYIVNSSDDIFLVSIPSLKTPAXTPKTV

SEQ ID NO: 50300 - protein, 37 aa, Artificial Sequence; identical to SEQ ID NO: 9784
  Cyclic GFR-binding peptide
  MOD_RES (1)..(3)..(34)..(35): Xaa is C or S

SEQ ID NO: 50301 - protein, 36 aa, Artificial Sequence
  Cyclic GFR-binding peptide
  MOD_RES (30)..(31): Xaa is C or S
VVMNNSLQEIVNSSDDYYLVTLPELQTPAXXPKPVT

SEQ ID NO: 50302 - protein, 26 aa, Artificial Sequence
  Cyclic GFR-binding peptide
  MOD_RES (1)..(1): Xaa is C or S
XSKVIMEYQKYIKPTKGIIFLISIPS

SEQ ID NO: 50303 - protein, 20 aa, Artificial Sequence
  Cyclic GFR-binding peptide
EYQKYVVNNASDIFLISIPS

SEQ ID NO: 50304 - protein, 24 aa, Artificial Sequence
  Cyclic GFR-binding peptide
VMDNSLQEVVKENEDYYLMTLPEL

SEQ ID NO: 50305 - protein, 34 aa, Artificial Sequence; identical to SEQ ID NO: 9785
  Cyclic GFR-binding peptide
  MOD_RES (1)..(3): Xaa is C or S

SEQ ID NO: 50306 - protein, 30 aa, Artificial Sequence
  Cyclic GFR-binding peptide
  MOD_RES (27)..(28): Xaa is C or S
ENSLQEVVKDYEDYYLMTLPELETPVXXAK

SEQ ID NO: 50307 - protein, 28 aa, Artificial Sequence
  Cyclic GFR-binding peptide
  MOD_RES (28)..(28): Xaa is C or S
MDRYKKLVVNNASDFYLISIANLRTPVX

SEQ ID NO: 50308 - protein, 29 aa, Artificial Sequence
  Cyclic GFR-binding peptide
  MOD_RES (28)..(29): Xaa is C or S
MDNSLQEVVKENEDYYLMTLPELETPVXX

SEQ ID NO: 50309 - protein, 27 aa, Artificial Sequence
  Cyclic GFR-binding peptide
  MOD_RES (2)..(2): Xaa is C or S
KXSKVVMEYQKYVKPTRGVIFLISIPS

SEQ ID NO: 50310 - protein, 39 aa, Artificial Sequence; identical to SEQ ID NO: 9788
  Cyclic GFR-binding peptide
  MOD_RES (1)..(3)..(35)..(36): Xaa is C or S

SEQ ID NO: 50311 - protein, 21 aa, Artificial Sequence
  Cyclic GFR-binding peptide
EYQKYVVKENEDIFLMSIPSL

SEQ ID NO: 50312 - protein, 34 aa, Artificial Sequence
  Cyclic GFR-binding peptide
  MOD_RES (29)..(30): Xaa is C or S
VMDNSLQEVVNNASDYYVIPLPELRTPVXXTPPT

SEQ ID NO: 50313 - protein, 31 aa, Artificial Sequence
  Cyclic GFR-binding peptide
  MOD_RES (28)..(28): Xaa is C or S
MNNSLQEIVNSSDDYYVVPLPELKTPAXTPK

SEQ ID NO: 50314 - protein, 29 aa, Artificial Sequence
  Cyclic GFR-binding peptide
  MOD_RES (1)..(1): Xaa is C or S
XSKVIMEYQKYIKPTKGIIFLISIPSLDQ

SEQ ID NO: 50315 - protein, 23 aa, Artificial Sequence
  Cyclic GFR-binding peptide
NSLQEIVNSSDDYYLVTLPELQT

SEQ ID NO: 50316 - protein, 40 aa, Artificial Sequence; identical to SEQ ID NO: 9790
  Cyclic GFR-binding peptide
  MOD_RES (2)..(4)..(36): Xaa is C or S

SEQ ID NO: 50317 - protein, 29 aa, Artificial Sequence
  Cyclic GFR-binding peptide
  MOD_RES (1)..(3): Xaa is C or S
XGXSEVVMDNSLQEVVNNASDYYVIPLPE

SEQ ID NO: 50318 - protein, 32 aa, Artificial Sequence
  Cyclic GFR-binding peptide
  MOD_RES (29)..(30): Xaa is C or S
VMNNSLQEIVNSSDDYYVVPLPELQTPAXXPK

SEQ ID NO: 50319 - protein, 29 aa, Artificial Sequence
  Cyclic GFR-binding peptide
  MOD_RES (2)..(2): Xaa is C or S
GXSEVVMDNSLQEVVNNASDYYVIPLPEL

SEQ ID NO: 50320 - protein, 26 aa, Artificial Sequence
  Cyclic GFR-binding peptide
  MOD_RES (26)..(26): Xaa is C or S
EYQKYIKPTKGIIFLISIPSLDQSVX

SEQ ID NO: 50321 - protein, 35 aa, Artificial Sequence; identical to SEQ ID NO: 9792
  Cyclic GFR-binding peptide
  MOD_RES (32)..(33): Xaa is C or S

SEQ ID NO: 50322 - protein, 27 aa, Artificial Sequence
  Cyclic GFR-binding peptide
  MOD_RES (26)..(27): Xaa is C or S
EYQKYIKPTKGIIFLISIPSLDQSVXX

SEQ ID NO: 50323 - protein, 31 aa, Artificial Sequence
  Cyclic GFR-binding peptide
  MOD_RES (2)..(2): Xaa is C or S
GXSEVVMDNSLQEVVNNASDYYLITLPELRT

SEQ ID NO: 50324 - protein, 26 aa, Artificial Sequence
  Cyclic GFR-binding peptide
MDNSLQEVVNNASDYYLITLPELRTP

SEQ ID NO: 50325 - protein, 39 aa, Artificial Sequence; identical to SEQ ID NO: 9793
  Cyclic GFR-binding peptide
  MOD_RES (1)..(3)..(35)..(36): Xaa is C or S

SEQ ID NO: 50326 - protein, 30 aa, Artificial Sequence
  Cyclic GFR-binding peptide
  MOD_RES (1)..(3): Xaa is C or S
XGXSEVVMDNSLQEVVNNASDYYVIPLPEL

SEQ ID NO: 50327 - protein, 39 aa, Artificial Sequence; identical to SEQ ID NO: 9794
  Cyclic GFR-binding peptide
  MOD_RES (2)..(34)..(35): Xaa is C or S

SEQ ID NO: 50328 - protein, 33 aa, Artificial Sequence
  Cyclic GFR-binding peptide
  MOD_RES (30)..(31): Xaa is C or S
VVMENSLQEVVKDYEDYYVMPLPELETPVXXAK

SEQ ID NO: 50329 - protein, 35 aa, Artificial Sequence
  Cyclic GFR-binding peptide
  MOD_RES (30)..(31): Xaa is C or S
VVMNNSLQEIVNSSDDYYVVPLPELKTPAXXPKPV

SEQ ID NO: 50330 - protein, 33 aa, Artificial Sequence
  Cyclic GFR-binding peptide
  MOD_RES (28)..(29): Xaa is C or S
VMEYQKYVKPTRGVIFLISIPSLDQPVXXPSAS

SEQ ID NO: 50331 - protein, 32 aa, Artificial Sequence
  Cyclic GFR-binding peptide
  MOD_RES (26)..(27): Xaa is C or S
EYQKYIVNSSDDIFLVSIPSLKTPAXXPKPVY

SEQ ID NO: 50332 - protein, 27 aa, Artificial Sequence
  Cyclic GFR-binding peptide
GEVVMENSLQEVVKDYEDYYVMPLPEL

SEQ ID NO: 50333 - protein, 37 aa, Artificial Sequence; identical to SEQ ID NO: 9797
  Cyclic GFR-binding peptide
  MOD_RES (1)..(32)..(33): Xaa is C or S

SEQ ID NO: 50334 - protein, 21 aa, Artificial Sequence
  Cyclic GFR-binding peptide
NSLQEVVKDYEDYYVMPLPEL

SEQ ID NO: 50335 - protein, 21 aa, Artificial Sequence
  Cyclic GFR-binding peptide
NSLQEVVNNASDYYLITLPEL

SEQ ID NO: 50336 - protein, 27 aa, Artificial Sequence
  Cyclic GFR-binding peptide
VVMNNSLQEIVNSSDDYYLVTLPELQT

SEQ ID NO: 50337 - protein, 41 aa, Artificial Sequence; identical to SEQ ID NO: 9799
  Cyclic GFR-binding peptide
  MOD_RES (1)..(3)..(35): Xaa is C or S

SEQ ID NO: 50338 - protein, 27 aa, Artificial Sequence
  Cyclic GFR-binding peptide
  MOD_RES (1)..(1): Xaa is C or S
XSKVIMNSLQEIKPTKGIYYVIPLPEL

SEQ ID NO: 50339 - protein, 35 aa, Artificial Sequence; identical to SEQ ID NO: 9800
  Cyclic GFR-binding peptide
  MOD_RES (31)..(32): Xaa is C or S

SEQ ID NO: 50340 - protein, 29 aa, Artificial Sequence
  Cyclic GFR-binding peptide
  MOD_RES (26)..(27): Xaa is C or S
NSLQEIVNSSDDYYLVTLPELQTPAXXPK

SEQ ID NO: 50341 - protein, 26 aa, Artificial Sequence
  Cyclic GFR-binding peptide
MNSLQEVKPTRGVYYVIPLPELDQPV

SEQ ID NO: 50342 - protein, 38 aa, Artificial Sequence; identical to SEQ ID NO: 9802
  Cyclic GFR-binding peptide
  MOD_RES (2)..(34)..(35): Xaa is C or S

SEQ ID NO: 50343 - protein, 30 aa, Artificial Sequence; identical to SEQ ID NO: 9803
  Cyclic GFR-binding peptide

SEQ ID NO: 50344 - protein, 31 aa, Artificial Sequence
  Cyclic GFR-binding peptide
  MOD_RES (28)..(29): Xaa is C or S
MNEYQKYIVNSSDDIFLVSIPSLQTPAXXPK

SEQ ID NO: 50345 - protein, 29 aa, Artificial Sequence
  Cyclic GFR-binding peptide
  MOD_RES (26)..(26): Xaa is C or S
NSLQEIVNSSDDYYVVPLPELKTPAXTPK

SEQ ID NO: 50346 - protein, 28 aa, Artificial Sequence
  Cyclic GFR-binding peptide
VVMENSLQEVVKDYEDYYLMTLPELETP

SEQ ID NO: 50347 - protein, 24 aa, Artificial Sequence
  Cyclic GFR-binding peptide
VMEYQKYVKPTRGVIFLISIPSLD

SEQ ID NO: 50348 - protein, 21 aa, Artificial Sequence
  Cyclic GFR-binding peptide
EYQKYVKPKRGVIFLISIPSL

SEQ ID NO: 50349 - protein, 35 aa, Artificial Sequence; identical to SEQ ID NO: 9806
  Cyclic GFR-binding peptide
  MOD_RES (2)..(34)..(35): Xaa is C or S

SEQ ID NO: 50350 - protein, 26 aa, Artificial Sequence
  Cyclic GFR-binding peptide
  MOD_RES (26)..(26): Xaa is C or S
EYQKYIVNSSDDIFLVSIPSLQTPAX

SEQ ID NO: 50351 - protein, 37 aa, Artificial Sequence; identical to SEQ ID NO: 9809
  Cyclic GFR-binding peptide
  MOD_RES (32)..(33): Xaa is C or S

SEQ ID NO: 50352 - protein, 30 aa, Artificial Sequence
  Cyclic GFR-binding peptide
  MOD_RES (30)..(30): Xaa is C or S
VVMDRYKKLVVNNASDFYLISIANLRTPVX

SEQ ID NO: 50353 - protein, 23 aa, Artificial Sequence
  Cyclic GFR-binding peptide
NSLQEIKPTKGIYYVIPLPELDQ

SEQ ID NO: 50354 - protein, 30 aa, Artificial Sequence
  Cyclic GFR-binding peptide
  MOD_RES (29)..(30): Xaa is C or S
VMDNSLQEVVKENEDYYLMTLPELETPVXX

SEQ ID NO: 50355 - protein, 24 aa, Artificial Sequence
  Cyclic GFR-binding peptide
DEYQKYVVKENEDIFLMSIPSLET

SEQ ID NO: 50356 - protein, 27 aa, Artificial Sequence
  Cyclic GFR-binding peptide
  MOD_RES (27)..(27): Xaa is C or S
MNSLQEVKPKRGVYYLITLPELAQPVX

SEQ ID NO: 50357 - protein, 31 aa, Artificial Sequence; identical to SEQ ID NO: 9811
  Cyclic GFR-binding peptide
  MOD_RES (31)..(31): Xaa is C or S

SEQ ID NO: 50358 - protein, 29 aa, Artificial Sequence
  Cyclic GFR-binding peptide
VVMNEYQKYIVNSSDDIFLVSIPSLKTPA

SEQ ID NO: 50359 - protein, 34 aa, Artificial Sequence
  Cyclic GFR-binding peptide
  MOD_RES (2)..(4): Xaa is C or S
RXGXGEVVMENSLQEVVKDYEDYYLMTLPELETP

SEQ ID NO: 50360 - protein, 26 aa, Artificial Sequence
  Cyclic GFR-binding peptide
EVVMDNSLQEVVNNASDYYLITLPEL

SEQ ID NO: 50361 - protein, 24 aa, Artificial Sequence
  Cyclic GFR-binding peptide
DNSLQEVVNNASDYYVIPLPELRT

SEQ ID NO: 50362 - protein, 27 aa, Artificial Sequence
  Cyclic GFR-binding peptide
MDQYNKLVVNNASDLYLISIASLRTPV

SEQ ID NO: 50363 - protein, 34 aa, Artificial Sequence; identical to SEQ ID NO: 9814
  Cyclic GFR-binding peptide
  MOD_RES (1)..(32)..(33): Xaa is C or S

SEQ ID NO: 50364 - protein, 26 aa, Artificial Sequence
  Cyclic GFR-binding peptide
MDNSLQEVVKENEDYYLMTLPELETP

SEQ ID NO: 50365 - protein, 32 aa, Artificial Sequence
  Cyclic GFR-binding peptide
  MOD_RES (29)..(30): Xaa is C or S
VMDNSLQEVVNNASDYYLITLPELRTPVXXTP

SEQ ID NO: 50366 - protein, 31 aa, Artificial Sequence
  Cyclic GFR-binding peptide
  MOD_RES (27)..(28): Xaa is C or S
DNSLQEVVKENEDYYLMTLPELETPVXXAKP

SEQ ID NO: 50367 - protein, 32 aa, Artificial Sequence; identical to SEQ ID NO: 9816
  Cyclic GFR-binding peptide
  MOD_RES (32)..(32): Xaa is C or S

SEQ ID NO: 50368 - protein, 27 aa, Artificial Sequence
  Cyclic GFR-binding peptide
VMEYQKYVKPTRGVIFLISIPSLDQPV

SEQ ID NO: 50369 - protein, 35 aa, Artificial Sequence; identical to SEQ ID NO: 9817
  Cyclic GFR-binding peptide
  MOD_RES (32)..(33): Xaa is C or S

SEQ ID NO: 50370 - protein, 33 aa, Artificial Sequence
  Cyclic GFR-binding peptide
  MOD_RES (1)..(3): Xaa is C or S
XGXSEVVMDNSLQEVVNNASDYYVIPLPELRTP

SEQ ID NO: 50371 - protein, 32 aa, Artificial Sequence
  Cyclic GFR-binding peptide
  MOD_RES (2)..(4): Xaa is C or S
SXKXSKVVMEYQKYVKPTRGVIFLISIPSLDQ

SEQ ID NO: 50372 - protein, 39 aa, Artificial Sequence; identical to SEQ ID NO: 9818
  Cyclic GFR-binding peptide
  MOD_RES (2)..(4)..(36): Xaa is C or S

SEQ ID NO: 50373 - protein, 29 aa, Artificial Sequence
  Cyclic GFR-binding peptide
RVVMNNSLQEIVNSSDDYYLVTLPELQTP

SEQ ID NO: 50374 - protein, 35 aa, Artificial Sequence
  Cyclic GFR-binding peptide
  MOD_RES (29)..(30): Xaa is C or S
VMEEYQKYVVKDYEDIFLMSIPSLETPVXXAKPIS

SEQ ID NO: 50375 - protein, 34 aa, Artificial Sequence; identical to SEQ ID NO: 9820
  Cyclic GFR-binding peptide
  MOD_RES (2)..(4): Xaa is C or S

SEQ ID NO: 50376 - protein, 25 aa, Artificial Sequence
  Cyclic GFR-binding peptide
DNSLQEVVNNASDYYVIPLPELRTP

SEQ ID NO: 50377 - protein, 25 aa, Artificial Sequence
  Cyclic GFR-binding peptide
DQYNKLVVNNASDLYLISIASLRTP

SEQ ID NO: 50378 - protein, 32 aa, Artificial Sequence
  Cyclic GFR-binding peptide
  MOD_RES (28)..(29): Xaa is C or S
MNNSLQEIVNSSDDYYLVTLPELKTPAXXPKP

SEQ ID NO: 50379 - protein, 29 aa, Artificial Sequence
  Cyclic GFR-binding peptide
  MOD_RES (1)..(1): Xaa is C or S
XSRVVMNNSLQEIVNSSDDYYVVPLPELK

SEQ ID NO: 50380 - protein, 33 aa, Artificial Sequence
  Cyclic GFR-binding peptide
  MOD_RES (30)..(31): Xaa is C or S
VVMDNSLQEVVNNASDYYVIPLPELRTPVXXTP

SEQ ID NO: 50381 - protein, 20 aa, Artificial Sequence
  Cyclic GFR-binding peptide
NSLQEVVKDYEDYYVMPLPE

SEQ ID NO: 50382 - protein, 38 aa, Artificial Sequence; identical to SEQ ID NO: 9822
  Cyclic GFR-binding peptide
  MOD_RES (1)..(33)..(34): Xaa is C or S

SEQ ID NO: 50383 - protein, 29 aa, Artificial Sequence
  Cyclic GFR-binding peptide
  MOD_RES (28)..(29): Xaa is C or S
IMEYQKYVKPKRGVIFLISIPSLAQPVXX

SEQ ID NO: 50384 - protein, 23 aa, Artificial Sequence
  Cyclic GFR-binding peptide
MDNSLQEVVKENEDYYLMTLPEL

SEQ ID NO: 50385 - protein, 40 aa, Artificial Sequence; identical to SEQ ID NO: 9823
  Cyclic GFR-binding peptide
  MOD_RES (2)..(4)..(36)..(37): Xaa is C or S

SEQ ID NO: 50386 - protein, 33 aa, Artificial Sequence; identical to SEQ ID NO: 9824
  Cyclic GFR-binding peptide
  MOD_RES (32)..(33): Xaa is C or S

SEQ ID NO: 50387 - protein, 38 aa, Artificial Sequence; identical to SEQ ID NO: 9825
  Cyclic GFR-binding peptide
  MOD_RES (1)..(33): Xaa is C or S

SEQ ID NO: 50388 - protein, 25 aa, Artificial Sequence
  Cyclic GFR-binding peptide
MNNSLQEIVNSSDDYYVVPLPELKT

SEQ ID NO: 50389 - protein, 38 aa, Artificial Sequence; identical to SEQ ID NO: 9826
  Cyclic GFR-binding peptide
  MOD_RES (1)..(3)..(35)..(36): Xaa is C or S

SEQ ID NO: 50390 - protein, 34 aa, Artificial Sequence
  Cyclic GFR-binding peptide
  MOD_RES (30)..(31): Xaa is C or S
KVVMNSLQEVKPTRGVYYVIPLPELDQPVXXPSA

SEQ ID NO: 50391 - protein, 33 aa, Artificial Sequence
  Cyclic GFR-binding peptide
  MOD_RES (29)..(30): Xaa is C or S
VIMEYQKYIKPTKGIIFLISIPSLDQSVXXPSA

SEQ ID NO: 50392 - protein, 30 aa, Artificial Sequence
  Cyclic GFR-binding peptide
  MOD_RES (26)..(27): Xaa is C or S
NSLQEIKPTKGIYYVIPLPELDQSVXXPSA

SEQ ID NO: 50393 - protein, 39 aa, Artificial Sequence; identical to SEQ ID NO: 9832
  Cyclic GFR-binding peptide
  MOD_RES (2)..(34): Xaa is C or S

SEQ ID NO: 50394 - protein, 27 aa, Artificial Sequence
  Cyclic GFR-binding peptide
SEVVMDNSLQEVVNNASDYYLITLPEL

SEQ ID NO: 50395 - protein, 22 aa, Artificial Sequence
  Cyclic GFR-binding peptide
DEYQKYVVKENEDIFLMSIPSL

SEQ ID NO: 50396 - protein, 27 aa, Artificial Sequence
  Cyclic GFR-binding peptide
  MOD_RES (2)..(2): Xaa is C or S
KXSKVIMEYQKYIKPTKGIIFLISIPS

SEQ ID NO: 50397 - protein, 29 aa, Artificial Sequence
  Cyclic GFR-binding peptide
  MOD_RES (27)..(28): Xaa is C or S
MNSLQEVKPKRGVYYLITLPELAQPVXXP

SEQ ID NO: 50398 - protein, 20 aa, Artificial Sequence
  Cyclic GFR-binding peptide
NSLQEIVNSSDDYYVVPLPE

SEQ ID NO: 50399 - protein, 33 aa, Artificial Sequence; identical to SEQ ID NO: 9833
  Cyclic GFR-binding peptide
  MOD_RES (31)..(31): Xaa is C or S

SEQ ID NO: 50400 - protein, 28 aa, Artificial Sequence
  Cyclic GFR-binding peptide
RVVMNEYQKYIVNSSDDIFLVSIPSLKT

SEQ ID NO: 50401 - protein, 36 aa, Artificial Sequence; identical to SEQ ID NO: 9834
  Cyclic GFR-binding peptide
  MOD_RES (1)..(33)..(34): Xaa is C or S

SEQ ID NO: 50402 - protein, 24 aa, Artificial Sequence
  Cyclic GFR-binding peptide
VIMNSLQEIKPTKGIYYVIPLPEL

SEQ ID NO: 50403 - protein, 32 aa, Artificial Sequence
  Cyclic GFR-binding peptide
  MOD_RES (26)..(27): Xaa is C or S
EYQKYIVNSSDDIFLVSIPSLQTPAXXPKPVT

SEQ ID NO: 50404 - protein, 25 aa, Artificial Sequence
  Cyclic GFR-binding peptide
DNSLQEVVKENEDYYLMTLPELETP

SEQ ID NO: 50405 - protein, 39 aa, Artificial Sequence; identical to SEQ ID NO: 9838
  Cyclic GFR-binding peptide
  MOD_RES (1)..(3)..(34)..(35): Xaa is C or S

SEQ ID NO: 50406 - protein, 34 aa, Artificial Sequence; identical to SEQ ID NO: 9839
  Cyclic GFR-binding peptide
  MOD_RES (1)..(33)..(34): Xaa is C or S

SEQ ID NO: 50407 - protein, 31 aa, Artificial Sequence
  Cyclic GFR-binding peptide
  MOD_RES (28)..(29): Xaa is C or S
MNNSLQEIVNSSDDYYLVTLPELKTPAXXPK

SEQ ID NO: 50408 - protein, 21 aa, Artificial Sequence
  Cyclic GFR-binding peptide
NSLQEIVNSSDDYYLVTLPEL

SEQ ID NO: 50409 - protein, 31 aa, Artificial Sequence
  Cyclic GFR-binding peptide
  MOD_RES (26)..(27): Xaa is C or S
EYQKYVKPTRGVIFLISIPSLDQPVXXPSAS

SEQ ID NO: 50410 - protein, 30 aa, Artificial Sequence
  Cyclic GFR-binding peptide
GEVVMENSLQEVVKDYEDYYLMTLPELETP

SEQ ID NO: 50411 - protein, 28 aa, Artificial Sequence
  Cyclic GFR-binding peptide
GEVVMENSLQEVVKDYEDYYLMTLPELE

SEQ ID NO: 50412 - protein, 27 aa, Artificial Sequence
  Cyclic GFR-binding peptide
VMNNSLQEIVNSSDDYYLVTLPELKTP

SEQ ID NO: 50413 - protein, 28 aa, Artificial Sequence
  Cyclic GFR-binding peptide
  MOD_RES (27)..(28): Xaa is C or S
MNSLQEVKPKRGVYYLITLPELAQPVXX

SEQ ID NO: 50414 - protein, 32 aa, Artificial Sequence
  Cyclic GFR-binding peptide
  MOD_RES (30)..(31): Xaa is C or S
VVMENSLQEVVKDYEDYYLMTLPELETPVXXA

SEQ ID NO: 50415 - protein, 31 aa, Artificial Sequence
  Cyclic GFR-binding peptide
  MOD_RES (2)..(2): Xaa is C or S
GXSEVVMDQYNKLVVNNASDLYLISIASLRT

SEQ ID NO: 50416 - protein, 31 aa, Artificial Sequence
  Cyclic GFR-binding peptide
  MOD_RES (1)..(1): Xaa is C or S
XSEVVMDNSLQEVVNNASDYYLITLPELRTP

SEQ ID NO: 50417 - protein, 39 aa, Artificial Sequence; identical to SEQ ID NO: 9848
  Cyclic GFR-binding peptide
  MOD_RES (1)..(3)..(35)..(36): Xaa is C or S

SEQ ID NO: 50418 - protein, 28 aa, Artificial Sequence
  Cyclic GFR-binding peptide
EVVMENSLQEVVKDYEDYYLMTLPELET

SEQ ID NO: 50419 - protein, 20 aa, Artificial Sequence
  Cyclic GFR-binding peptide
NSLQEVVKDYEDYYVMPLPE

SEQ ID NO: 50420 - protein, 25 aa, Artificial Sequence
  Cyclic GFR-binding peptide
NSLQEVVKDYEDYYVMPLPELETPV

SEQ ID NO: 50421 - protein, 28 aa, Artificial Sequence
  Cyclic GFR-binding peptide
  MOD_RES (1)..(3): Xaa is C or S
XKXSKVVMNSLQEVKPTRGVYYVIPLPE

SEQ ID NO: 50422 - protein, 23 aa, Artificial Sequence
  Cyclic GFR-binding peptide
ENSLQEVVKDYEDYYVMPLPELE

SEQ ID NO: 50423 - protein, 27 aa, Artificial Sequence
  Cyclic GFR-binding peptide
VMDEYQKYVVKENEDIFLMSIPSLETP

SEQ ID NO: 50424 - protein, 34 aa, Artificial Sequence; identical to SEQ ID NO: 9851
  Cyclic GFR-binding peptide
  MOD_RES (32)..(33): Xaa is C or S

SEQ ID NO: 50425 - protein, 23 aa, Artificial Sequence
  Cyclic GFR-binding peptide
VMNNSLQEIVNSSDDYYVVPLPE

SEQ ID NO: 50426 - protein, 33 aa, Artificial Sequence
  Cyclic GFR-binding peptide
  MOD_RES (29)..(30): Xaa is C or S
VMNNSLQEIVNSSDDYYLVTLPELKTPAXXPKP

SEQ ID NO: 50427 - protein, 34 aa, Artificial Sequence; identical to SEQ ID NO: 9853
  Cyclic GFR-binding peptide
  MOD_RES (31)..(32): Xaa is C or S

SEQ ID NO: 50428 - protein, 30 aa, Artificial Sequence
  Cyclic GFR-binding peptide
SEVVMDQYNKLVVNNASDLYLISIASLRTP

SEQ ID NO: 50429 - protein, 29 aa, Artificial Sequence
  Cyclic GFR-binding peptide
  MOD_RES (1)..(3): Xaa is C or S
XKXSRVIMNSLQEVKPKRGVYYLITLPEL

SEQ ID NO: 50430 - protein, 25 aa, Artificial Sequence
  Cyclic GFR-binding peptide
SRVIMEYQKYVKPKRGVIFLISIPS

SEQ ID NO: 50431 - protein, 29 aa, Artificial Sequence
  Cyclic GFR-binding peptide
VVMENSLQEVVKDYEDYYLMTLPELETPV

SEQ ID NO: 50432 - protein, 31 aa, Artificial Sequence; identical to SEQ ID NO: 9854
  Cyclic GFR-binding peptide
  MOD_RES (31)..(31): Xaa is C or S

SEQ ID NO: 50433 - protein, 33 aa, Artificial Sequence; identical to SEQ ID NO: 9855
  Cyclic GFR-binding peptide
  MOD_RES (32)..(33): Xaa is C or S

SEQ ID NO: 50434 - protein, 34 aa, Artificial Sequence; identical to SEQ ID NO: 9856
  Cyclic GFR-binding peptide
  MOD_RES (1)..(3): Xaa is C or S

SEQ ID NO: 50435 - protein, 27 aa, Artificial Sequence
  Cyclic GFR-binding peptide
  MOD_RES (26)..(27): Xaa is C or S
NSLQEVVKENEDYYVMPLPELETPVXX

SEQ ID NO: 50436 - protein, 38 aa, Artificial Sequence; identical to SEQ ID NO: 9857
  Cyclic GFR-binding peptide
  MOD_RES (1)..(3)..(35)..(36): Xaa is C or S

SEQ ID NO: 50437 - protein, 34 aa, Artificial Sequence; identical to SEQ ID NO: 9860
  Cyclic GFR-binding peptide
  MOD_RES (32)..(33): Xaa is C or S

SEQ ID NO: 50438 - protein, 40 aa, Artificial Sequence; identical to SEQ ID NO: 9861
  Cyclic GFR-binding peptide
  MOD_RES (2)..(4)..(36)..(37): Xaa is C or S

SEQ ID NO: 50439 - protein, 32 aa, Artificial Sequence
  Cyclic GFR-binding peptide
  MOD_RES (27)..(28): Xaa is C or S
NNSLQEIVNSSDDYYVVPLPELKTPAXXPKPV

SEQ ID NO: 50440 - protein, 33 aa, Artificial Sequence
  Cyclic GFR-binding peptide
  MOD_RES (29)..(30): Xaa is C or S
VIMNSLQEVKPKRGVYYLITLPELAQPVXXPAA

SEQ ID NO: 50441 - protein, 28 aa, Artificial Sequence
  Cyclic GFR-binding peptide
  MOD_RES (26)..(27): Xaa is C or S
NSLQEVVKENEDYYVMPLPELETPVXXA

SEQ ID NO: 50442 - protein, 26 aa, Artificial Sequence
  Cyclic GFR-binding peptide
VMDNSLQEVVNNASDYYLITLPELRT

SEQ ID NO: 50443 - protein, 31 aa, Artificial Sequence
  Cyclic GFR-binding peptide
  MOD_RES (26)..(27): Xaa is C or S
NSLQEIVNSSDDYYVVPLPELQTPAXXPKPV

SEQ ID NO: 50444 - protein, 26 aa, Artificial Sequence
  Cyclic GFR-binding peptide
EVVMDNSLQEVVKENEDYYLMTLPEL

SEQ ID NO: 50445 - protein, 37 aa, Artificial Sequence; identical to SEQ ID NO: 9865
  Cyclic GFR-binding peptide
  MOD_RES (1)..(3)..(34)..(35): Xaa is C or S

SEQ ID NO: 50446 - protein, 38 aa, Artificial Sequence; identical to SEQ ID NO: 9864
  Cyclic GFR-binding peptide
  MOD_RES (2)..(34)..(35): Xaa is C or S

SEQ ID NO: 50447 - protein, 28 aa, Artificial Sequence
  Cyclic GFR-binding peptide
VVMDQYNKLVVNNASDLYLISIASLRTP

SEQ ID NO: 50448 - protein, 28 aa, Artificial Sequence
  Cyclic GFR-binding peptide
  MOD_RES (2)..(2): Xaa is C or S
GXSEVVMDQYNKLVVNNASDLYLISIAS

SEQ ID NO: 50449 - protein, 34 aa, Artificial Sequence; identical to SEQ ID NO: 9866
  Cyclic GFR-binding peptide
  MOD_RES (2)..(33)..(34): Xaa is C or S

SEQ ID NO: 50450 - protein, 36 aa, Artificial Sequence
  Cyclic GFR-binding peptide
  MOD_RES (30)..(30): Xaa is C or S
VVMNEYQKYIVNSSDDIFLVSIPSLKTPAXTPKTVH

SEQ ID NO: 50451 - protein, 29 aa, Artificial Sequence
  Cyclic GFR-binding peptide
SRVVMNEYQKYIVNSSDDIFLVSIPSLKT

SEQ ID NO: 50452 - protein, 39 aa, Artificial Sequence; identical to SEQ ID NO: 9867
  Cyclic GFR-binding peptide
  MOD_RES (2)..(4)..(36)..(37): Xaa is C or S

SEQ ID NO: 50453 - protein, 26 aa, Artificial Sequence
  Cyclic GFR-binding peptide
VVMENSLQEVVKDYEDYYLMTLPELE

SEQ ID NO: 50454 - protein, 35 aa, Artificial Sequence; identical to SEQ ID NO: 9870
  Cyclic GFR-binding peptide
  MOD_RES (1)..(32)..(33): Xaa is C or S

SEQ ID NO: 50455 - protein, 30 aa, Artificial Sequence
  Cyclic GFR-binding peptide
  MOD_RES (26)..(27): Xaa is C or S
EYQKYVVKDYEDIFLMSIPSLETPVXXAKP

SEQ ID NO: 50456 - protein, 30 aa, Artificial Sequence
  Cyclic GFR-binding peptide
  MOD_RES (29)..(30): Xaa is C or S
VMENSLQEVVKDYEDYYLMTLPELETPVXX

SEQ ID NO: 50457 - protein, 30 aa, Artificial Sequence
  Cyclic GFR-binding peptide
  MOD_RES (1)..(1): Xaa is C or S
XSKVVMNSLQEVKPTRGVYYVIPLPELDQP

SEQ ID NO: 50458 - protein, 24 aa, Artificial Sequence
  Cyclic GFR-binding peptide
RYKKLVVNNASDFYLISIANLRTP

SEQ ID NO: 50459 - protein, 34 aa, Artificial Sequence; identical to SEQ ID NO: 9874
  Cyclic GFR-binding peptide
  MOD_RES (2)..(34): Xaa is C or S

SEQ ID NO: 50460 - protein, 35 aa, Artificial Sequence; identical to SEQ ID NO: 9875
  Cyclic GFR-binding peptide
  MOD_RES (31)..(32): Xaa is C or S

SEQ ID NO: 50461 - protein, 36 aa, Artificial Sequence; identical to SEQ ID NO: 9876
  Cyclic GFR-binding peptide
  MOD_RES (1)..(3)..(35)..(36): Xaa is C or S

SEQ ID NO: 50462 - protein, 32 aa, Artificial Sequence
  Cyclic GFR-binding peptide
  MOD_RES (26)..(27): Xaa is C or S
NSLQEVVKDYEDYYLMTLPELETPVXXAKPIS

SEQ ID NO: 50463 - protein, 29 aa, Artificial Sequence
  Cyclic GFR-binding peptide
  MOD_RES (26)..(27): Xaa is C or S
EYQKYIVNSSDDIFLVSIPSLKTPAXXPK

SEQ ID NO: 50464 - protein, 38 aa, Artificial Sequence; identical to SEQ ID NO: 9879
  Cyclic GFR-binding peptide
  MOD_RES (2)..(4)..(36)..(37): Xaa is C or S

SEQ ID NO: 50465 - protein, 33 aa, Artificial Sequence; identical to SEQ ID NO: 9881
  Cyclic GFR-binding peptide
  MOD_RES (1)..(32)..(33): Xaa is C or S

SEQ ID NO: 50466 - protein, 27 aa, Artificial Sequence
  Cyclic GFR-binding peptide
RVVMNNSLQEIVNSSDDYYLVTLPELQ

SEQ ID NO: 50467 - protein, 31 aa, Artificial Sequence
  Cyclic GFR-binding peptide
  MOD_RES (1)..(1): Xaa is C or S
XSEVVMDNSLQEVVNNASDYYVIPLPELRTP

SEQ ID NO: 50468 - protein, 27 aa, Artificial Sequence
  Cyclic GFR-binding peptide
  MOD_RES (27)..(27): Xaa is C or S
MEYQKYVKPKRGVIFLISIPSLAQPVX

SEQ ID NO: 50469 - protein, 30 aa, Artificial Sequence
  Cyclic GFR-binding peptide
  MOD_RES (30)..(30): Xaa is C or S
KVIMNSLQEIKPTKGIYYVIPLPELDQSVX

SEQ ID NO: 50470 - protein, 26 aa, Artificial Sequence
  Cyclic GFR-binding peptide
ARVVMNNSLQEIVNSSDDYYLVTLPE

SEQ ID NO: 50471 - protein, 36 aa, Artificial Sequence
  Cyclic GFR-binding peptide
  MOD_RES (30)..(31): Xaa is C or S
VVMENSLQEVVKDYEDYYLMTLPELETPVXXAKPIS

SEQ ID NO: 50472 - protein, 28 aa, Artificial Sequence
  Cyclic GFR-binding peptide
  MOD_RES (2)..(2): Xaa is C or S
GXSEVVMDNSLQEVVNNASDYYLITLPE

SEQ ID NO: 50473 - protein, 35 aa, Artificial Sequence; identical to SEQ ID NO: 9888
  Cyclic GFR-binding peptide
  MOD_RES (2)..(34): Xaa is C or S

SEQ ID NO: 50474 - protein, 25 aa, Artificial Sequence
  Cyclic GFR-binding peptide
MNNSLQEIVNSSDDYYVVPLPELQT

SEQ ID NO: 50475 - protein, 30 aa, Artificial Sequence
  Cyclic GFR-binding peptide
  MOD_RES (26)..(26): Xaa is C or S
NSLQEIVNSSDDYYLVTLPELKTPAXTPKT

SEQ ID NO: 50476 - protein, 33 aa, Artificial Sequence
  Cyclic GFR-binding peptide
  MOD_RES (30)..(31): Xaa is C or S
VVMNEYQKYIVNSSDDIFLVSIPSLKTPAXXPK

SEQ ID NO: 50477 - protein, 25 aa, Artificial Sequence
  Cyclic GFR-binding peptide
RVVMNNSLQEIVNSSDDYYVVPLPE

SEQ ID NO: 50478 - protein, 27 aa, Artificial Sequence
  Cyclic GFR-binding peptide
SRVIMNSLQEVKPKRGVYYLITLPELA

SEQ ID NO: 50479 - protein, 23 aa, Artificial Sequence
  Cyclic GFR-binding peptide
EEYQKYVVKDYEDIFLMSIPSLE

SEQ ID NO: 50480 - protein, 35 aa, Artificial Sequence; identical to SEQ ID NO: 9891
  Cyclic GFR-binding peptide
  MOD_RES (32)..(33): Xaa is C or S

SEQ ID NO: 50481 - protein, 40 aa, Artificial Sequence; identical to SEQ ID NO: 9893
  Cyclic GFR-binding peptide
  MOD_RES (2)..(4)..(35)..(36): Xaa is C or S

SEQ ID NO: 50482 - protein, 27 aa, Artificial Sequence
  Cyclic GFR-binding peptide
  MOD_RES (1)..(1): Xaa is C or S
XSEVVMDNSLQEVVNNASDYYVIPLPE

SEQ ID NO: 50483 - protein, 28 aa, Artificial Sequence
  Cyclic GFR-binding peptide
  MOD_RES (28)..(28): Xaa is C or S
MDNSLQEVVKENEDYYLMTLPELETPVX

SEQ ID NO: 50484 - protein, 33 aa, Artificial Sequence
  Cyclic GFR-binding peptide
  MOD_RES (28)..(29): Xaa is C or S
IMEYQKYIKPTKGIIFLISIPSLDQSVXXPSAS

SEQ ID NO: 50485 - protein, 23 aa, Artificial Sequence
  Cyclic GFR-binding peptide
IMEYQKYIKPTKGIIFLISIPSL

SEQ ID NO: 50486 - protein, 30 aa, Artificial Sequence
  Cyclic GFR-binding peptide
  MOD_RES (27)..(28): Xaa is C or S
NNSLQEIVNSSDDYYLVTLPELKTPAXXPK

SEQ ID NO: 50487 - protein, 33 aa, Artificial Sequence
  Cyclic GFR-binding peptide
  MOD_RES (29)..(30): Xaa is C or S
VMDNSLQEVVKENEDYYLMTLPELETPVXXAKP

SEQ ID NO: 50488 - protein, 33 aa, Artificial Sequence
  Cyclic GFR-binding peptide
  MOD_RES (27)..(28): Xaa is C or S
DNSLQEVVNNASDYYLITLPELRTPVXXTPPTS

SEQ ID NO: 50489 - protein, 38 aa, Artificial Sequence; identical to SEQ ID NO: 9897
  Cyclic GFR-binding peptide
  MOD_RES (2)..(34)..(35): Xaa is C or S

SEQ ID NO: 50490 - protein, 33 aa, Artificial Sequence; identical to SEQ ID NO: 9899
  Cyclic GFR-binding peptide
  MOD_RES (1)..(33): Xaa is C or S

SEQ ID NO: 50491 - protein, 29 aa, Artificial Sequence
  Cyclic GFR-binding peptide
GEVVMDNSLQEVVKENEDYYVMPLPELET

SEQ ID NO: 50492 - protein, 26 aa, Artificial Sequence
  Cyclic GFR-binding peptide
  MOD_RES (26)..(26): Xaa is C or S
QYNKLVVNNASDLYLISIASLRTPVX

SEQ ID NO: 50493 - protein, 30 aa, Artificial Sequence
  Cyclic GFR-binding peptide
  MOD_RES (28)..(28): Xaa is C or S
MNNSLQEIVNSSDDYYVVPLPELKTPAXTP

SEQ ID NO: 50494 - protein, 32 aa, Artificial Sequence
  Cyclic GFR-binding peptide
  MOD_RES (27)..(28): Xaa is C or S
MNSLQEVKPKRGVYYLITLPELAQPVXXPAAS

SEQ ID NO: 50495 - protein, 33 aa, Artificial Sequence
  Cyclic GFR-binding peptide
  MOD_RES (30)..(31): Xaa is C or S
RVIMEYQKYVKPKRGVIFLISIPSLAQPVXXPA

SEQ ID NO: 50496 - protein, 31 aa, Artificial Sequence
  Cyclic GFR-binding peptide
  MOD_RES (28)..(29): Xaa is C or S
MNEYQKYIVNSSDDIFLVSIPSLKTPAXXPK

SEQ ID NO: 50497 - protein, 25 aa, Artificial Sequence
  Cyclic GFR-binding peptide
EVVMENSLQEVVKDYEDYYLMTLPE

SEQ ID NO: 50498 - protein, 27 aa, Artificial Sequence
  Cyclic GFR-binding peptide
GEVVMEEYQKYVVKDYEDIFLMSIPSL

SEQ ID NO: 50499 - protein, 41 aa, Artificial Sequence; identical to SEQ ID NO: 9902
  Cyclic GFR-binding peptide
  MOD_RES (2)..(4)..(36)..(37): Xaa is C or S

SEQ ID NO: 50500 - protein, 25 aa, Artificial Sequence
  Cyclic GFR-binding peptide
VMDNSLQEVVNNASDYYLITLPELR

SEQ ID NO: 50501 - protein, 35 aa, Artificial Sequence
  Cyclic GFR-binding peptide
  MOD_RES (30)..(31): Xaa is C or S
RVIMNSLQEVKPKRGVYYLITLPELAQPVXXPAAS

SEQ ID NO: 50502 - protein, 39 aa, Artificial Sequence; identical to SEQ ID NO: 9905
  Cyclic GFR-binding peptide
  MOD_RES (2)..(34)..(35): Xaa is C or S

SEQ ID NO: 50503 - protein, 26 aa, Artificial Sequence
  Cyclic GFR-binding peptide
SRVVMNNSLQEIVNSSDDYYLVTLPE

SEQ ID NO: 50504 - protein, 29 aa, Artificial Sequence
  Cyclic GFR-binding peptide
  MOD_RES (29)..(29): Xaa is C or S
VMNEYQKYIVNSSDDIFLVSIPSLQTPAX

SEQ ID NO: 50505 - protein, 34 aa, Artificial Sequence
  Cyclic GFR-binding peptide
  MOD_RES (29)..(30): Xaa is C or S
VMENSLQEVVKDYEDYYVMPLPELETPVXXAKPI

SEQ ID NO: 50506 - protein, 24 aa, Artificial Sequence
  Cyclic GFR-binding peptide
QYNKLVVNNASDLYLISIASLRTP

SEQ ID NO: 50507 - protein, 33 aa, Artificial Sequence
  Cyclic GFR-binding peptide
  MOD_RES (2)..(4): Xaa is C or S
SXKXSKVIMEYQKYIKPTKGIIFLISIPSLDQS

SEQ ID NO: 50508 - protein, 32 aa, Artificial Sequence; identical to SEQ ID NO: 9906
  Cyclic GFR-binding peptide
  MOD_RES (1)..(1): Xaa is C or S

SEQ ID NO: 50509 - protein, 21 aa, Artificial Sequence
  Cyclic GFR-binding peptide
DNSLQEVVNNASDYYVIPLPE

SEQ ID NO: 50510 - protein, 28 aa, Artificial Sequence
  Cyclic GFR-binding peptide
SEVVMDQYNKLVVNNASDLYLISIASLR

SEQ ID NO: 50511 - protein, 31 aa, Artificial Sequence
  Cyclic GFR-binding peptide
  MOD_RES (26)..(27): Xaa is C or S
NSLQEVVKENEDYYLMTLPELETPVXXAKPI

SEQ ID NO: 50512 - protein, 30 aa, Artificial Sequence
  Cyclic GFR-binding peptide
  MOD_RES (27)..(28): Xaa is C or S
DNSLQEVVNNASDYYLITLPELRTPVXXTP

SEQ ID NO: 50513 - protein, 25 aa, Artificial Sequence
  Cyclic GFR-binding peptide
NSLQEIVNSSDDYYLVTLPELQTPA

SEQ ID NO: 50514 - protein, 25 aa, Artificial Sequence
  Cyclic GFR-binding peptide
VMENSLQEVVKDYEDYYLMTLPELE

SEQ ID NO: 50515 - protein, 33 aa, Artificial Sequence
  Cyclic GFR-binding peptide
  MOD_RES (27)..(27): Xaa is C or S
NNSLQEIVNSSDDYYVVPLPELKTPAXTPKTVH

SEQ ID NO: 50516 - protein, 27 aa, Artificial Sequence
  Cyclic GFR-binding peptide
  MOD_RES (1)..(1): Xaa is C or S
XSEVVMDNSLQEVVNNASDYYLITLPE

SEQ ID NO: 50517 - protein, 34 aa, Artificial Sequence; identical to SEQ ID NO: 9911
  Cyclic GFR-binding peptide
  MOD_RES (32)..(33): Xaa is C or S

SEQ ID NO: 50518 - protein, 37 aa, Artificial Sequence; identical to SEQ ID NO: 9912
  Cyclic GFR-binding peptide
  MOD_RES (1)..(33)..(34): Xaa is C or S

SEQ ID NO: 50519 - protein, 29 aa, Artificial Sequence
  Cyclic GFR-binding peptide
  MOD_RES (27)..(28): Xaa is C or S
EEYQKYVVKDYEDIFLMSIPSLETPVXXA

SEQ ID NO: 50520 - protein, 23 aa, Artificial Sequence
  Cyclic GFR-binding peptide
MDEYQKYVVKENEDIFLMSIPSL

SEQ ID NO: 50521 - protein, 35 aa, Artificial Sequence
  Cyclic GFR-binding peptide
  MOD_RES (29)..(30): Xaa is C or S
VIMEYQKYVKPKRGVIFLISIPSLAQPVXXPAASA

SEQ ID NO: 50522 - protein, 30 aa, Artificial Sequence
  Cyclic GFR-binding peptide
  MOD_RES (27)..(28): Xaa is C or S
NNSLQEIVNSSDDYYVVPLPELKTPAXXPK

SEQ ID NO: 50523 - protein, 27 aa, Artificial Sequence
  Cyclic GFR-binding peptide
  MOD_RES (26)..(27): Xaa is C or S
RYKKLVVNNASDFYLISIANLRTPVXX

SEQ ID NO: 50524 - protein, 30 aa, Artificial Sequence
  Cyclic GFR-binding peptide
  MOD_RES (28)..(29): Xaa is C or S
MNNSLQEIVNSSDDYYVVPLPELKTPAXXP

SEQ ID NO: 50525 - protein, 31 aa, Artificial Sequence; identical to SEQ ID NO: 9919
  Cyclic GFR-binding peptide

SEQ ID NO: 50526 - protein, 25 aa, Artificial Sequence
  Cyclic GFR-binding peptide
VMNNSLQEIVNSSDDYYLVTLPELQ

SEQ ID NO: 50527 - protein, 40 aa, Artificial Sequence; identical to SEQ ID NO: 9920
  Cyclic GFR-binding peptide
  MOD_RES (2)..(34)..(35): Xaa is C or S

SEQ ID NO: 50528 - protein, 29 aa, Artificial Sequence
  Cyclic GFR-binding peptide
  MOD_RES (27)..(28): Xaa is C or S
ENSLQEVVKDYEDYYLMTLPELETPVXXA

SEQ ID NO: 50529 - protein, 35 aa, Artificial Sequence; identical to SEQ ID NO: 9922
  Cyclic GFR-binding peptide
  MOD_RES (2)..(4): Xaa is C or S

SEQ ID NO: 50530 - protein, 40 aa, Artificial Sequence; identical to SEQ ID NO: 9923
  Cyclic GFR-binding peptide
  MOD_RES (1)..(3)..(34)..(35): Xaa is C or S

SEQ ID NO: 50531 - protein, 32 aa, Artificial Sequence
  Cyclic GFR-binding peptide
  MOD_RES (27)..(28): Xaa is C or S
NNSLQEIVNSSDDYYLVTLPELKTPAXXPKPV

SEQ ID NO: 50532 - protein, 33 aa, Artificial Sequence; identical to SEQ ID NO: 9924
  Cyclic GFR-binding peptide
  MOD_RES (2)..(33): Xaa is C or S

SEQ ID NO: 50533 - protein, 31 aa, Artificial Sequence
  Cyclic GFR-binding peptide
  MOD_RES (28)..(29): Xaa is C or S
MNNSLQEIVNSSDDYYLVTLPELQTPAXXPK

SEQ ID NO: 50534 - protein, 26 aa, Artificial Sequence
  Cyclic GFR-binding peptide
  MOD_RES (26)..(26): Xaa is C or S
RYKKLVVNNASDFYLISIANLRTPVX

SEQ ID NO: 50535 - protein, 32 aa, Artificial Sequence; identical to SEQ ID NO: 9925
  Cyclic GFR-binding peptide
  MOD_RES (32)..(32): Xaa is C or S

SEQ ID NO: 50536 - protein, 29 aa, Artificial Sequence
  Cyclic GFR-binding peptide
  MOD_RES (29)..(29): Xaa is C or S
VIMEYQKYIKPTKGIIFLISIPSLDQSVX

SEQ ID NO: 50537 - protein, 30 aa, Artificial Sequence
  Cyclic GFR-binding peptide
  MOD_RES (30)..(30): Xaa is C or S
VVMNEYQKYIVNSSDDIFLVSIPSLKTPAX

SEQ ID NO: 50538 - protein, 34 aa, Artificial Sequence; identical to SEQ ID NO: 9926
  Cyclic GFR-binding peptide
  MOD_RES (1)..(32)..(33): Xaa is C or S

SEQ ID NO: 50539 - protein, 26 aa, Artificial Sequence
  Cyclic GFR-binding peptide
VMEYQKYVKPTRGVIFLISIPSLDQP

SEQ ID NO: 50540 - protein, 29 aa, Artificial Sequence
  Cyclic GFR-binding peptide
  MOD_RES (28)..(29): Xaa is C or S
MENSLQEVVKDYEDYYVMPLPELETPVXX

SEQ ID NO: 50541 - protein, 30 aa, Artificial Sequence
  Cyclic GFR-binding peptide
  MOD_RES (1)..(3): Xaa is C or S
XKXSRVIMEYQKYVKPKRGVIFLISIPSLA

SEQ ID NO: 50542 - protein, 37 aa, Artificial Sequence; identical to SEQ ID NO: 9927
  Cyclic GFR-binding peptide
  MOD_RES (31)..(32): Xaa is C or S

SEQ ID NO: 50543 - protein, 24 aa, Artificial Sequence
  Cyclic GFR-binding peptide
KVIMEYQKYIKPTKGIIFLISIPS

SEQ ID NO: 50544 - protein, 37 aa, Artificial Sequence; identical to SEQ ID NO: 9928
  Cyclic GFR-binding peptide
  MOD_RES (32)..(33): Xaa is C or S

SEQ ID NO: 50545 - protein, 26 aa, Artificial Sequence
  Cyclic GFR-binding peptide
RVIMEYQKYVKPKRGVIFLISIPSLA

SEQ ID NO: 50546 - protein, 23 aa, Artificial Sequence
  Cyclic GFR-binding peptide
EYQKYVKPKRGVIFLISIPSLAQ

SEQ ID NO: 50547 - protein, 31 aa, Artificial Sequence; identical to SEQ ID NO: 9932
  Cyclic GFR-binding peptide

SEQ ID NO: 50548 - protein, 32 aa, Artificial Sequence; identical to SEQ ID NO: 9931
  Cyclic GFR-binding peptide
  MOD_RES (32)..(32): Xaa is C or S

SEQ ID NO: 50549 - protein, 29 aa, Artificial Sequence
  Cyclic GFR-binding peptide
  MOD_RES (1)..(3): Xaa is C or S
XGXARVVMNNSLQEIVNSSDDYYLVTLPE

SEQ ID NO: 50550 - protein, 30 aa, Artificial Sequence
  Cyclic GFR-binding peptide
  MOD_RES (29)..(29): Xaa is C or S
VMNNSLQEIVNSSDDYYVVPLPELKTPAXT

SEQ ID NO: 50551 - protein, 29 aa, Artificial Sequence
  Cyclic GFR-binding peptide
  MOD_RES (26)..(27): Xaa is C or S
NSLQEVKPKRGVYYLITLPELAQPVXXPA

SEQ ID NO: 50552 - protein, 38 aa, Artificial Sequence; identical to SEQ ID NO: 9935
  Cyclic GFR-binding peptide
  MOD_RES (2)..(34)..(35): Xaa is C or S

SEQ ID NO: 50553 - protein, 37 aa, Artificial Sequence; identical to SEQ ID NO: 9936
  Cyclic GFR-binding peptide
  MOD_RES (1)..(3)..(35)..(36): Xaa is C or S

SEQ ID NO: 50554 - protein, 37 aa, Artificial Sequence; identical to SEQ ID NO: 9938
  Cyclic GFR-binding peptide
  MOD_RES (2)..(33)..(34): Xaa is C or S

SEQ ID NO: 50555 - protein, 20 aa, Artificial Sequence
  Cyclic GFR-binding peptide
NSLQEIVNSSDDYYLVTLPE

SEQ ID NO: 50556 - protein, 23 aa, Artificial Sequence
  Cyclic GFR-binding peptide
ENSLQEVVKDYEDYYLMTLPELE

SEQ ID NO: 50557 - protein, 33 aa, Artificial Sequence
  Cyclic GFR-binding peptide
  MOD_RES (27)..(27): Xaa is C or S
NEYQKYIVNSSDDIFLVSIPSLKTPAXTPKTVH

SEQ ID NO: 50558 - protein, 24 aa, Artificial Sequence
  Cyclic GFR-binding peptide
KVVMEYQKYVKPTRGVIFLISIPS

SEQ ID NO: 50559 - protein, 21 aa, Artificial Sequence
  Cyclic GFR-binding peptide
DNSLQEVVNNASDYYLITLPE

SEQ ID NO: 50560 - protein, 34 aa, Artificial Sequence
  Cyclic GFR-binding peptide
  MOD_RES (28)..(29): Xaa is C or S
MNEYQKYIVNSSDDIFLVSIPSLKTPAXXPKPVY

SEQ ID NO: 50561 - protein, 34 aa, Artificial Sequence; identical to SEQ ID NO: 9943
  Cyclic GFR-binding peptide
  MOD_RES (32)..(33): Xaa is C or S

SEQ ID NO: 50562 - protein, 29 aa, Artificial Sequence
  Cyclic GFR-binding peptide
KVIMNSLQEIKPTKGIYYVIPLPELDQSV

SEQ ID NO: 50563 - protein, 29 aa, Artificial Sequence
  Cyclic GFR-binding peptide
  MOD_RES (28)..(29): Xaa is C or S
MDQYNKLVVNNASDLYLISIASLRTPVXX

SEQ ID NO: 50564 - protein, 30 aa, Artificial Sequence
  Cyclic GFR-binding peptide
  MOD_RES (2)..(2): Xaa is C or S
KXSRVIMEYQKYVKPKRGVIFLISIPSLAQ

SEQ ID NO: 50565 - protein, 31 aa, Artificial Sequence
  Cyclic GFR-binding peptide
  MOD_RES (28)..(29): Xaa is C or S
MDNSLQEVVKENEDYYLMTLPELETPVXXAK

SEQ ID NO: 50566 - protein, 38 aa, Artificial Sequence; identical to SEQ ID NO: 9946
  Cyclic GFR-binding peptide
  MOD_RES (2)..(4)..(36)..(37): Xaa is C or S

SEQ ID NO: 50567 - protein, 37 aa, Artificial Sequence; identical to SEQ ID NO: 9947
  Cyclic GFR-binding peptide
  MOD_RES (2)..(33)..(34): Xaa is C or S

SEQ ID NO: 50568 - protein, 39 aa, Artificial Sequence; identical to SEQ ID NO: 9948
  Cyclic GFR-binding peptide
  MOD_RES (2)..(4)..(36): Xaa is C or S

SEQ ID NO: 50569 - protein, 27 aa, Artificial Sequence
  Cyclic GFR-binding peptide
EVVMDNSLQEVVKENEDYYVMPLPELE

SEQ ID NO: 50570 - protein, 31 aa, Artificial Sequence
  Cyclic GFR-binding peptide
  MOD_RES (27)..(28): Xaa is C or S
MEYQKYIKPTKGIIFLISIPSLDQSVXXPSA

SEQ ID NO: 50571 - protein, 30 aa, Artificial Sequence
  Cyclic GFR-binding peptide
  MOD_RES (26)..(27): Xaa is C or S
EYQKYVKPTRGVIFLISIPSLDQPVXXPSA

SEQ ID NO: 50572 - protein, 36 aa, Artificial Sequence; identical to SEQ ID NO: 9951
  Cyclic GFR-binding peptide
  MOD_RES (2)..(4)..(35)..(36): Xaa is C or S

SEQ ID NO: 50573 - protein, 41 aa, Artificial Sequence; identical to SEQ ID NO: 9952
  Cyclic GFR-binding peptide
  MOD_RES (2)..(4)..(36): Xaa is C or S

SEQ ID NO: 50574 - protein, 28 aa, Artificial Sequence
  Cyclic GFR-binding peptide
  MOD_RES (26)..(27): Xaa is C or S
EYQKYVKPTRGVIFLISIPSLDQPVXXP

SEQ ID NO: 50575 - protein, 36 aa, Artificial Sequence; identical to SEQ ID NO: 9954
  Cyclic GFR-binding peptide
  MOD_RES (32)..(33): Xaa is C or S

SEQ ID NO: 50576 - protein, 33 aa, Artificial Sequence; identical to SEQ ID NO: 9956
  Cyclic GFR-binding peptide
  MOD_RES (2)..(2): Xaa is C or S

SEQ ID NO: 50577 - protein, 34 aa, Artificial Sequence
  Cyclic GFR-binding peptide
  MOD_RES (30)..(30): Xaa is C or S
VVMNEYQKYIVNSSDDIFLVSIPSLKTPAXTPKT

SEQ ID NO: 50578 - protein, 29 aa, Artificial Sequence
  Cyclic GFR-binding peptide
  MOD_RES (1)..(3): Xaa is C or S
XGXARVVMNEYQKYIVNSSDDIFLVSIPS

SEQ ID NO: 50579 - protein, 23 aa, Artificial Sequence
  Cyclic GFR-binding peptide
DRYKKLVVNNASDFYLISIANLR

SEQ ID NO: 50580 - protein, 28 aa, Artificial Sequence
  Cyclic GFR-binding peptide
VVMDNSLQEVVKENEDYYLMTLPELETP

SEQ ID NO: 50581 - protein, 31 aa, Artificial Sequence
  Cyclic GFR-binding peptide
  MOD_RES (1)..(3): Xaa is C or S
XGXSEVVMDRYKKLVVNNASDFYLISIANLR

SEQ ID NO: 50582 - protein, 33 aa, Artificial Sequence
  Cyclic GFR-binding peptide
  MOD_RES (29)..(29): Xaa is C or S
VMNNSLQEIVNSSDDYYVVPLPELKTPAXTPKT

SEQ ID NO: 50583 - protein, 32 aa, Artificial Sequence
  Cyclic GFR-binding peptide
  MOD_RES (27)..(28): Xaa is C or S
MEYQKYVKPKRGVIFLISIPSLAQPVXXPAAS

SEQ ID NO: 50584 - protein, 27 aa, Artificial Sequence
  Cyclic GFR-binding peptide
MDNSLQEVVKENEDYYLMTLPELETPV

SEQ ID NO: 50585 - protein, 32 aa, Artificial Sequence
  Cyclic GFR-binding peptide
  MOD_RES (2)..(2): Xaa is C or S
GXGEVVMDNSLQEVVKENEDYYVMPLPELETP

SEQ ID NO: 50586 - protein, 36 aa, Artificial Sequence; identical to SEQ ID NO: 9958
  Cyclic GFR-binding peptide
  MOD_RES (1)..(3)..(35)..(36): Xaa is C or S

SEQ ID NO: 50587 - protein, 34 aa, Artificial Sequence; identical to SEQ ID NO: 9959
  Cyclic GFR-binding peptide
  MOD_RES (2)..(34): Xaa is C or S

SEQ ID NO: 50588 - protein, 24 aa, Artificial Sequence
  Cyclic GFR-binding peptide
NSLQEVVKENEDYYVMPLPELETP

SEQ ID NO: 50589 - protein, 26 aa, Artificial Sequence
  Cyclic GFR-binding peptide
SKVIMNSLQEIKPTKGIYYVIPLPEL

SEQ ID NO: 50590 - protein, 28 aa, Artificial Sequence
  Cyclic GFR-binding peptide
  MOD_RES (27)..(28): Xaa is C or S
MEYQKYVKPKRGVIFLISIPSLAQPVXX

SEQ ID NO: 50591 - protein, 30 aa, Artificial Sequence
  Cyclic GFR-binding peptide
  MOD_RES (28)..(29): Xaa is C or S
MDNSLQEVVNNASDYYVIPLPELRTPVXXT

SEQ ID NO: 50592 - protein, 33 aa, Artificial Sequence
  Cyclic GFR-binding peptide
  MOD_RES (29)..(30): Xaa is C or S
VMDQYNKLVVNNASDLYLISIASLRTPVXXTPP

SEQ ID NO: 50593 - protein, 32 aa, Artificial Sequence; identical to SEQ ID NO: 9968
  Cyclic GFR-binding peptide
  MOD_RES (31)..(32): Xaa is C or S

SEQ ID NO: 50594 - protein, 35 aa, Artificial Sequence; identical to SEQ ID NO: 9970
  Cyclic GFR-binding peptide
  MOD_RES (1)..(3)..(35): Xaa is C or S

SEQ ID NO: 50595 - protein, 30 aa, Artificial Sequence
  Cyclic GFR-binding peptide
  MOD_RES (28)..(29): Xaa is C or S
IMNSLQEVKPKRGVYYLITLPELAQPVXXP

SEQ ID NO: 50596 - protein, 22 aa, Artificial Sequence
  Cyclic GFR-binding peptide
MENSLQEVVKDYEDYYLMTLPE

SEQ ID NO: 50597 - protein, 32 aa, Artificial Sequence
  Cyclic GFR-binding peptide
  MOD_RES (26)..(27): Xaa is C or S
NSLQEVVNNASDYYVIPLPELRTPVXXTPPTS

SEQ ID NO: 50598 - protein, 27 aa, Artificial Sequence
  Cyclic GFR-binding peptide
  MOD_RES (26)..(27): Xaa is C or S
NSLQEVKPKRGVYYLITLPELAQPVXX

SEQ ID NO: 50599 - protein, 30 aa, Artificial Sequence
  Cyclic GFR-binding peptide
  MOD_RES (27)..(28): Xaa is C or S
NEYQKYIVNSSDDIFLVSIPSLKTPAXXPK

SEQ ID NO: 50600 - protein, 29 aa, Artificial Sequence
  Cyclic GFR-binding peptide
  MOD_RES (1)..(1): Xaa is C or S
XSRVVMNNSLQEIVNSSDDYYLVTLPELK

SEQ ID NO: 50601 - protein, 35 aa, Artificial Sequence
  Cyclic GFR-binding peptide
  MOD_RES (30)..(31): Xaa is C or S
VVMDNSLQEVVKENEDYYVMPLPELETPVXXAKPI

SEQ ID NO: 50602 - protein, 28 aa, Artificial Sequence
  Cyclic GFR-binding peptide
  MOD_RES (1)..(1): Xaa is C or S
XARVVMNNSLQEIVNSSDDYYVVPLPEL

SEQ ID NO: 50603 - protein, 31 aa, Artificial Sequence; identical to SEQ ID NO: 9973
  Cyclic GFR-binding peptide
  MOD_RES (31)..(31): Xaa is C or S

SEQ ID NO: 50604 - protein, 24 aa, Artificial Sequence
  Cyclic GFR-binding peptide
VVMNEYQKYIVNSSDDIFLVSIPS

SEQ ID NO: 50605 - protein, 35 aa, Artificial Sequence; identical to SEQ ID NO: 9975
  Cyclic GFR-binding peptide
  MOD_RES (2)..(34): Xaa is C or S

SEQ ID NO: 50606 - protein, 26 aa, Artificial Sequence
  Cyclic GFR-binding peptide
IMEYQKYIKPTKGIIFLISIPSLDQS

SEQ ID NO: 50607 - protein, 30 aa, Artificial Sequence
  Cyclic GFR-binding peptide
  MOD_RES (2)..(4): Xaa is C or S
RXGXSEVVMDNSLQEVVNNASDYYVIPLPE

SEQ ID NO: 50608 - protein, 24 aa, Artificial Sequence
  Cyclic GFR-binding peptide
NNSLQEIVNSSDDYYLVTLPELQT

SEQ ID NO: 50609 - protein, 25 aa, Artificial Sequence
  Cyclic GFR-binding peptide
VMDEYQKYVVKENEDIFLMSIPSLE

SEQ ID NO: 50610 - protein, 34 aa, Artificial Sequence; identical to SEQ ID NO: 9983
  Cyclic GFR-binding peptide
  MOD_RES (1)..(32)..(33): Xaa is C or S

SEQ ID NO: 50611 - protein, 28 aa, Artificial Sequence
  Cyclic GFR-binding peptide
  MOD_RES (28)..(28): Xaa is C or S
MNEYQKYIVNSSDDIFLVSIPSLQTPAX

SEQ ID NO: 50612 - protein, 31 aa, Artificial Sequence
  Cyclic GFR-binding peptide
  MOD_RES (27)..(28): Xaa is C or S
ENSLQEVVKDYEDYYLMTLPELETPVXXAKP

SEQ ID NO: 50613 - protein, 29 aa, Artificial Sequence
  Cyclic GFR-binding peptide
  MOD_RES (1)..(1): Xaa is C or S
XGEVVMDNSLQEVVKENEDYYVMPLPELE

SEQ ID NO: 50614 - protein, 39 aa, Artificial Sequence; identical to SEQ ID NO: 9985
  Cyclic GFR-binding peptide
  MOD_RES (2)..(33)..(34): Xaa is C or S

SEQ ID NO: 50615 - protein, 27 aa, Artificial Sequence
  Cyclic GFR-binding peptide
GEVVMDNSLQEVVKENEDYYLMTLPEL

SEQ ID NO: 50616 - protein, 36 aa, Artificial Sequence; identical to SEQ ID NO: 9986
  Cyclic GFR-binding peptide
  MOD_RES (31)..(31): Xaa is C or S

SEQ ID NO: 50617 - protein, 32 aa, Artificial Sequence
  Cyclic GFR-binding peptide
  MOD_RES (27)..(28): Xaa is C or S
NNSLQEIVNSSDDYYVVPLPELQTPAXXPKPV

SEQ ID NO: 50618 - protein, 26 aa, Artificial Sequence
  Cyclic GFR-binding peptide
  MOD_RES (26)..(26): Xaa is C or S
NSLQEVVKDYEDYYLMTLPELETPVX

SEQ ID NO: 50619 - protein, 28 aa, Artificial Sequence
  Cyclic GFR-binding peptide
  MOD_RES (2)..(2): Xaa is C or S
GXGEVVMEEYQKYVVKDYEDIFLMSIPS

SEQ ID NO: 50620 - protein, 29 aa, Artificial Sequence
  Cyclic GFR-binding peptide
  MOD_RES (2)..(2): Xaa is C or S
GXGEVVMEEYQKYVVKDYEDIFLMSIPSL

SEQ ID NO: 50621 - protein, 35 aa, Artificial Sequence
  Cyclic GFR-binding peptide
  MOD_RES (29)..(30): Xaa is C or S
VIMNSLQEIKPTKGIYYVIPLPELDQSVXXPSASA

SEQ ID NO: 50622 - protein, 27 aa, Artificial Sequence
  Cyclic GFR-binding peptide
VVMDRYKKLVVNNASDFYLISIANLRT

SEQ ID NO: 50623 - protein, 34 aa, Artificial Sequence
  Cyclic GFR-binding peptide
  MOD_RES (28)..(29): Xaa is C or S
MNNSLQEIVNSSDDYYVVPLPELKTPAXXPKPVY

SEQ ID NO: 50624 - protein, 35 aa, Artificial Sequence; identical to SEQ ID NO: 9988
  Cyclic GFR-binding peptide
  MOD_RES (1)..(3)..(35): Xaa is C or S

SEQ ID NO: 50625 - protein, 34 aa, Artificial Sequence; identical to SEQ ID NO: 9989
  Cyclic GFR-binding peptide
  MOD_RES (32)..(33): Xaa is C or S

SEQ ID NO: 50626 - protein, 33 aa, Artificial Sequence; identical to SEQ ID NO: 9990
  Cyclic GFR-binding peptide
  MOD_RES (31)..(32): Xaa is C or S

SEQ ID NO: 50627 - protein, 34 aa, Artificial Sequence; identical to SEQ ID NO: 9991
  Cyclic GFR-binding peptide
  MOD_RES (1)..(32)..(33): Xaa is C or S

SEQ ID NO: 50628 - protein, 30 aa, Artificial Sequence
  Cyclic GFR-binding peptide
  MOD_RES (1)..(3): Xaa is C or S
XGXSRVVMNEYQKYIVNSSDDIFLVSIPSL

SEQ ID NO: 50629 - protein, 29 aa, Artificial Sequence
  Cyclic GFR-binding peptide
  MOD_RES (26)..(27): Xaa is C or S
EYQKYVVKDYEDIFLMSIPSLETPVXXAK

SEQ ID NO: 50630 - protein, 35 aa, Artificial Sequence
  Cyclic GFR-binding peptide
  MOD_RES (29)..(30): Xaa is C or S
VIMEYQKYIKPTKGIIFLISIPSLDQSVXXPSASA

SEQ ID NO: 50631 - protein, 32 aa, Artificial Sequence
  Cyclic GFR-binding peptide
  MOD_RES (29)..(30): Xaa is C or S
VMDRYKKLVVNNASDFYLISIANLRTPVXXTP

SEQ ID NO: 50632 - protein, 32 aa, Artificial Sequence; identical to SEQ ID NO: 9993
  Cyclic GFR-binding peptide
  MOD_RES (1)..(1): Xaa is C or S

SEQ ID NO: 50633 - protein, 27 aa, Artificial Sequence
  Cyclic GFR-binding peptide
RVIMNSLQEVKPKRGVYYLITLPELAQ

SEQ ID NO: 50634 - protein, 32 aa, Artificial Sequence
  Cyclic GFR-binding peptide
  MOD_RES (27)..(28): Xaa is C or S
DRYKKLVVNNASDFYLISIANLRTPVXXTPPT

SEQ ID NO: 50635 - protein, 39 aa, Artificial Sequence; identical to SEQ ID NO: 9994
  Cyclic GFR-binding peptide
  MOD_RES (2)..(4)..(36)..(37): Xaa is C or S

SEQ ID NO: 50636 - protein, 38 aa, Artificial Sequence; identical to SEQ ID NO: 9995
  Cyclic GFR-binding peptide
  MOD_RES (2)..(34)..(35): Xaa is C or S

SEQ ID NO: 50637 - protein, 36 aa, Artificial Sequence; identical to SEQ ID NO: 9998
  Cyclic GFR-binding peptide
  MOD_RES (1)..(3)..(34)..(35): Xaa is C or S

SEQ ID NO: 50638 - protein, 37 aa, Artificial Sequence; identical to SEQ ID NO: 10000
  Cyclic GFR-binding peptide
  MOD_RES (32)..(32): Xaa is C or S

SEQ ID NO: 50639 - protein, 31 aa, Artificial Sequence
  Cyclic GFR-binding peptide
  MOD_RES (26)..(27): Xaa is C or S
EYQKYVVKDYEDIFLMSIPSLETPVXXAKPI

SEQ ID NO: 50640 - protein, 36 aa, Artificial Sequence; identical to SEQ ID NO: 10001
  Cyclic GFR-binding peptide
  MOD_RES (1)..(3)..(35)..(36): Xaa is C or S

SEQ ID NO: 50641 - protein, 33 aa, Artificial Sequence; identical to SEQ ID NO: 10002
  Cyclic GFR-binding peptide
  MOD_RES (1)..(33): Xaa is C or S

SEQ ID NO: 50642 - protein, 23 aa, Artificial Sequence
  Cyclic GFR-binding peptide
EYQKYVKPTRGVIFLISIPSLDQ

SEQ ID NO: 50643 - protein, 29 aa, Artificial Sequence
  Cyclic GFR-binding peptide
  MOD_RES (1)..(3): Xaa is C or S
XGXGEVVMENSLQEVVKDYEDYYLMTLPE

SEQ ID NO: 50644 - protein, 32 aa, Artificial Sequence
  Cyclic GFR-binding peptide
  MOD_RES (30)..(31): Xaa is C or S
VVMDRYKKLVVNNASDFYLISIANLRTPVXXT

SEQ ID NO: 50645 - protein, 35 aa, Artificial Sequence; identical to SEQ ID NO: 10004
  Cyclic GFR-binding peptide
  MOD_RES (1)..(33)..(34): Xaa is C or S

SEQ ID NO: 50646 - protein, 33 aa, Artificial Sequence
  Cyclic GFR-binding peptide
  MOD_RES (30)..(31): Xaa is C or S
VVMNNSLQEIVNSSDDYYVVPLPELKTPAXXPK

SEQ ID NO: 50647 - protein, 22 aa, Artificial Sequence
  Cyclic GFR-binding peptide
MNSLQEIKPTKGIYYVIPLPEL

SEQ ID NO: 50648 - protein, 40 aa, Artificial Sequence; identical to SEQ ID NO: 10007
  Cyclic GFR-binding peptide
  MOD_RES (2)..(4)..(36)..(37): Xaa is C or S

SEQ ID NO: 50649 - protein, 27 aa, Artificial Sequence
  Cyclic GFR-binding peptide
  MOD_RES (27)..(27): Xaa is C or S
MNSLQEVKPTRGVYYVIPLPELDQPVX

SEQ ID NO: 50650 - protein, 26 aa, Artificial Sequence
  Cyclic GFR-binding peptide
VVMNEYQKYIVNSSDDIFLVSIPSLK

SEQ ID NO: 50651 - protein, 36 aa, Artificial Sequence; identical to SEQ ID NO: 10009
  Cyclic GFR-binding peptide
  MOD_RES (1)..(3)..(35)..(36): Xaa is C or S

SEQ ID NO: 50652 - protein, 28 aa, Artificial Sequence
  Cyclic GFR-binding peptide
  MOD_RES (2)..(2): Xaa is C or S
GXARVVMNNSLQEIVNSSDDYYVVPLPE

SEQ ID NO: 50653 - protein, 23 aa, Artificial Sequence
  Cyclic GFR-binding peptide
MDNSLQEVVNNASDYYLITLPEL

SEQ ID NO: 50654 - protein, 22 aa, Artificial Sequence
  Cyclic GFR-binding peptide
DRYKKLVVNNASDFYLISIANL

SEQ ID NO: 50655 - protein, 36 aa, Artificial Sequence
  Cyclic GFR-binding peptide
  MOD_RES (30)..(31): Xaa is C or S
VVMNEYQKYIVNSSDDIFLVSIPSLKTPAXXPKPVY

SEQ ID NO: 50656 - protein, 24 aa, Artificial Sequence
  Cyclic GFR-binding peptide
RVIMEYQKYVKPKRGVIFLISIPS

SEQ ID NO: 50657 - protein, 27 aa, Artificial Sequence
  Cyclic GFR-binding peptide
EVVMENSLQEVVKDYEDYYLMTLPELE

SEQ ID NO: 50658 - protein, 38 aa, Artificial Sequence; identical to SEQ ID NO: 10011
  Cyclic GFR-binding peptide
  MOD_RES (2)..(34)..(35): Xaa is C or S

SEQ ID NO: 50659 - protein, 39 aa, Artificial Sequence; identical to SEQ ID NO: 10012
  Cyclic GFR-binding peptide
  MOD_RES (2)..(33)..(34): Xaa is C or S

SEQ ID NO: 50660 - protein, 28 aa, Artificial Sequence
  Cyclic GFR-binding peptide
SKVVMNSLQEVKPTRGVYYVIPLPELDQ

SEQ ID NO: 50661 - protein, 24 aa, Artificial Sequence
  Cyclic GFR-binding peptide
MDNSLQEVVNNASDYYVIPLPELR

SEQ ID NO: 50662 - protein, 25 aa, Artificial Sequence
  Cyclic GFR-binding peptide
MNSLQEVKPKRGVYYLITLPELAQP

SEQ ID NO: 50663 - protein, 30 aa, Artificial Sequence
  Cyclic GFR-binding peptide
  MOD_RES (30)..(30): Xaa is C or S
VVMNNSLQEIVNSSDDYYLVTLPELQTPAX

SEQ ID NO: 50664 - protein, 36 aa, Artificial Sequence; identical to SEQ ID NO: 10014
  Cyclic GFR-binding peptide
  MOD_RES (2)..(33)..(34): Xaa is C or S

SEQ ID NO: 50665 - protein, 36 aa, Artificial Sequence
  Cyclic GFR-binding peptide
  MOD_RES (1)..(33)..(34): Xaa is C or S
XGEVVMDNSLQEVVKENEDYYVMPLPELETPVXXAK

SEQ ID NO: 50666 - protein, 25 aa, Artificial Sequence
  Cyclic GFR-binding peptide
IMEYQKYIKPTKGIIFLISIPSLDQ

SEQ ID NO: 50667 - protein, 31 aa, Artificial Sequence; identical to SEQ ID NO: 10015
  Cyclic GFR-binding peptide
  MOD_RES (31)..(31): Xaa is C or S

SEQ ID NO: 50668 - protein, 36 aa, Artificial Sequence; identical to SEQ ID NO: 10016
  Cyclic GFR-binding peptide
  MOD_RES (2)..(33)..(34): Xaa is C or S

SEQ ID NO: 50669 - protein, 26 aa, Artificial Sequence
  Cyclic GFR-binding peptide
VVMDEYQKYVVKENEDIFLMSIPSLE

SEQ ID NO: 50670 - protein, 40 aa, Artificial Sequence; identical to SEQ ID NO: 10017
  Cyclic GFR-binding peptide
  MOD_RES (2)..(4)..(36)..(37): Xaa is C or S

SEQ ID NO: 50671 - protein, 31 aa, Artificial Sequence
  Cyclic GFR-binding peptide
  MOD_RES (1)..(1): Xaa is C or S
XGEVVMDNSLQEVVKENEDYYVMPLPELETP

SEQ ID NO: 50672 - protein, 29 aa, Artificial Sequence
  Cyclic GFR-binding peptide
  MOD_RES (27)..(28): Xaa is C or S
DRYKKLVVNNASDFYLISIANLRTPVXXT

SEQ ID NO: 50673 - protein, 35 aa, Artificial Sequence; identical to SEQ ID NO: 10020
  Cyclic GFR-binding peptide
  MOD_RES (1)..(3)..(35): Xaa is C or S

SEQ ID NO: 50674 - protein, 35 aa, Artificial Sequence; identical to SEQ ID NO: 10022
  Cyclic GFR-binding peptide
  MOD_RES (2)..(34)..(35): Xaa is C or S

SEQ ID NO: 50675 - protein, 37 aa, Artificial Sequence; identical to SEQ ID NO: 10021
  Cyclic GFR-binding peptide
  MOD_RES (2)..(34)..(35): Xaa is C or S

SEQ ID NO: 50676 - protein, 24 aa, Artificial Sequence
  Cyclic GFR-binding peptide
MEEYQKYVVKDYEDIFLMSIPSLE

SEQ ID NO: 50677 - protein, 42 aa, Artificial Sequence; identical to SEQ ID NO: 10023
  Cyclic GFR-binding peptide
  MOD_RES (2)..(4)..(36)..(37): Xaa is C or S

SEQ ID NO: 50678 - protein, 40 aa, Artificial Sequence; identical to SEQ ID NO: 10025
  Cyclic GFR-binding peptide
  MOD_RES (2)..(4)..(35)..(36): Xaa is C or S

SEQ ID NO: 50679 - protein, 39 aa, Artificial Sequence; identical to SEQ ID NO: 10028
  Cyclic GFR-binding peptide
  MOD_RES (2)..(4)..(36)..(37): Xaa is C or S

SEQ ID NO: 50680 - protein, 32 aa, Artificial Sequence
  Cyclic GFR-binding peptide
  MOD_RES (28)..(28): Xaa is C or S
MNNSLQEIVNSSDDYYVVPLPELKTPAXTPKT

SEQ ID NO: 50681 - protein, 28 aa, Artificial Sequence
  Cyclic GFR-binding peptide
VIMEYQKYIKPTKGIIFLISIPSLDQSV

SEQ ID NO: 50682 - protein, 33 aa, Artificial Sequence
  Cyclic GFR-binding peptide
  MOD_RES (2)..(4): Xaa is C or S
RXGXSEVVMDNSLQEVVNNASDYYLITLPELRT

SEQ ID NO: 50683 - protein, 28 aa, Artificial Sequence
  Cyclic GFR-binding peptide
  MOD_RES (26)..(27): Xaa is C or S
NSLQEVVKDYEDYYVMPLPELETPVXXA

SEQ ID NO: 50684 - protein, 32 aa, Artificial Sequence
  Cyclic GFR-binding peptide
  MOD_RES (30)..(31): Xaa is C or S
VVMDNSLQEVVKENEDYYLMTLPELETPVXXA

SEQ ID NO: 50685 - protein, 24 aa, Artificial Sequence
  Cyclic GFR-binding peptide
VMDEYQKYVVKENEDIFLMSIPSL

SEQ ID NO: 50686 - protein, 39 aa, Artificial Sequence; identical to SEQ ID NO: 10033
  Cyclic GFR-binding peptide
  MOD_RES (2)..(34)..(35): Xaa is C or S

SEQ ID NO: 50687 - protein, 36 aa, Artificial Sequence; identical to SEQ ID NO: 10035
  Cyclic GFR-binding peptide
  MOD_RES (1)..(3)..(35)..(36): Xaa is C or S

SEQ ID NO: 50688 - protein, 32 aa, Artificial Sequence
  Cyclic GFR-binding peptide
  MOD_RES (27)..(28): Xaa is C or S
MEYQKYIKPTKGIIFLISIPSLDQSVXXPSAS

SEQ ID NO: 50689 - protein, 33 aa, Artificial Sequence
  Cyclic GFR-binding peptide
  MOD_RES (29)..(30): Xaa is C or S
VMENSLQEVVKDYEDYYLMTLPELETPVXXAKP

SEQ ID NO: 50690 - protein, 28 aa, Artificial Sequence
  Cyclic GFR-binding peptide
VMENSLQEVVKDYEDYYVMPLPELETPV

SEQ ID NO: 50691 - protein, 28 aa, Artificial Sequence
  Cyclic GFR-binding peptide
  MOD_RES (26)..(27): Xaa is C or S
EYQKYVKPKRGVIFLISIPSLAQPVXXP

SEQ ID NO: 50692 - protein, 26 aa, Artificial Sequence
  Cyclic GFR-binding peptide
RVVMNEYQKYIVNSSDDIFLVSIPSL

SEQ ID NO: 50693 - protein, 35 aa, Artificial Sequence
  Cyclic GFR-binding peptide
  MOD_RES (29)..(30): Xaa is C or S
VMDEYQKYVVKENEDIFLMSIPSLETPVXXAKPIK

SEQ ID NO: 50694 - protein, 36 aa, Artificial Sequence; identical to SEQ ID NO: 10040
  Cyclic GFR-binding peptide
  MOD_RES (2)..(33)..(34): Xaa is C or S

SEQ ID NO: 50695 - protein, 29 aa, Artificial Sequence
  Cyclic GFR-binding peptide
  MOD_RES (27)..(28): Xaa is C or S
DEYQKYVVKENEDIFLMSIPSLETPVXXA

SEQ ID NO: 50696 - protein, 30 aa, Artificial Sequence
  Cyclic GFR-binding peptide
  MOD_RES (28)..(29): Xaa is C or S
IMNSLQEIKPTKGIYYVIPLPELDQSVXXP

SEQ ID NO: 50697 - protein, 34 aa, Artificial Sequence
  Cyclic GFR-binding peptide
  MOD_RES (29)..(29): Xaa is C or S
VMNNSLQEIVNSSDDYYLVTLPELKTPAXTPKTV

SEQ ID NO: 50698 - protein, 27 aa, Artificial Sequence
  Cyclic GFR-binding peptide
VVMEYQKYVKPTRGVIFLISIPSLDQP

SEQ ID NO: 50699 - protein, 32 aa, Artificial Sequence
  Cyclic GFR-binding peptide
  MOD_RES (29)..(30): Xaa is C or S
VIMEYQKYIKPTKGIIFLISIPSLDQSVXXPS

SEQ ID NO: 50700 - protein, 33 aa, Artificial Sequence; identical to SEQ ID NO: 10042
  Cyclic GFR-binding peptide
  MOD_RES (2)..(2): Xaa is C or S

SEQ ID NO: 50701 - protein, 24 aa, Artificial Sequence
  Cyclic GFR-binding peptide
VVMENSLQEVVKDYEDYYLMTLPE

SEQ ID NO: 50702 - protein, 28 aa, Artificial Sequence
  Cyclic GFR-binding peptide
  MOD_RES (1)..(1): Xaa is C or S
XSEVVMDNSLQEVVNNASDYYLITLPEL

SEQ ID NO: 50703 - protein, 26 aa, Artificial Sequence
  Cyclic GFR-binding peptide
MDEYQKYVVKENEDIFLMSIPSLETP

SEQ ID NO: 50704 - protein, 27 aa, Artificial Sequence
  Cyclic GFR-binding peptide
MDEYQKYVVKENEDIFLMSIPSLETPV

SEQ ID NO: 50705 - protein, 30 aa, Artificial Sequence
  Cyclic GFR-binding peptide
  MOD_RES (26)..(27): Xaa is C or S
NSLQEIVNSSDDYYVVPLPELKTPAXXPKP

SEQ ID NO: 50706 - protein, 31 aa, Artificial Sequence
  Cyclic GFR-binding peptide
  MOD_RES (2)..(2): Xaa is C or S
GXSRVVMNNSLQEIVNSSDDYYVVPLPELKT

SEQ ID NO: 50707 - protein, 33 aa, Artificial Sequence
  Cyclic GFR-binding peptide
  MOD_RES (29)..(30): Xaa is C or S
VMDEYQKYVVKENEDIFLMSIPSLETPVXXAKP

SEQ ID NO: 50708 - protein, 37 aa, Artificial Sequence; identical to SEQ ID NO: 10046
  Cyclic GFR-binding peptide
  MOD_RES (2)..(34)..(35): Xaa is C or S

SEQ ID NO: 50709 - protein, 31 aa, Artificial Sequence
  Cyclic GFR-binding peptide
  MOD_RES (2)..(2): Xaa is C or S
GXGEVVMENSLQEVVKDYEDYYVMPLPELET

SEQ ID NO: 50710 - protein, 27 aa, Artificial Sequence
  Cyclic GFR-binding peptide
VMENSLQEVVKDYEDYYLMTLPELETP

SEQ ID NO: 50711 - protein, 29 aa, Artificial Sequence
  Cyclic GFR-binding peptide
  MOD_RES (26)..(27): Xaa is C or S
QYNKLVVNNASDLYLISIASLRTPVXXTP

SEQ ID NO: 50712 - protein, 26 aa, Artificial Sequence
  Cyclic GFR-binding peptide
  MOD_RES (26)..(26): Xaa is C or S
EYQKYVVKENEDIFLMSIPSLETPVX

SEQ ID NO: 50713 - protein, 23 aa, Artificial Sequence
  Cyclic GFR-binding peptide
IMNSLQEVKPKRGVYYLITLPEL

SEQ ID NO: 50714 - protein, 25 aa, Artificial Sequence
  Cyclic GFR-binding peptide
RVVMNEYQKYIVNSSDDIFLVSIPS

SEQ ID NO: 50715 - protein, 32 aa, Artificial Sequence; identical to SEQ ID NO: 10052
  Cyclic GFR-binding peptide
  MOD_RES (31)..(32): Xaa is C or S

SEQ ID NO: 50716 - protein, 36 aa, Artificial Sequence; identical to SEQ ID NO: 10053
  Cyclic GFR-binding peptide
  MOD_RES (2)..(34)..(35): Xaa is C or S

SEQ ID NO: 50717 - protein, 34 aa, Artificial Sequence; identical to SEQ ID NO: 10055
  Cyclic GFR-binding peptide
  MOD_RES (1)..(3): Xaa is C or S

SEQ ID NO: 50718 - protein, 37 aa, Artificial Sequence; identical to SEQ ID NO: 10057
  Cyclic GFR-binding peptide
  MOD_RES (31)..(32): Xaa is C or S

SEQ ID NO: 50719 - protein, 28 aa, Artificial Sequence
  Cyclic GFR-binding peptide
SEVVMDNSLQEVVNNASDYYLITLPELR

SEQ ID NO: 50720 - protein, 33 aa, Artificial Sequence; identical to SEQ ID NO: 10059
  Cyclic GFR-binding peptide
  MOD_RES (31)..(32): Xaa is C or S

SEQ ID NO: 50721 - protein, 34 aa, Artificial Sequence
  Cyclic GFR-binding peptide
  MOD_RES (30)..(31): Xaa is C or S
KVIMEYQKYIKPTKGIIFLISIPSLDQSVXXPSA

SEQ ID NO: 50722 - protein, 28 aa, Artificial Sequence
  Cyclic GFR-binding peptide
VIMNSLQEIKPTKGIYYVIPLPELDQSV

SEQ ID NO: 50723 - protein, 26 aa, Artificial Sequence
  Cyclic GFR-binding peptide
EVVMDEYQKYVVKENEDIFLMSIPSL

SEQ ID NO: 50724 - protein, 38 aa, Artificial Sequence; identical to SEQ ID NO: 10061
  Cyclic GFR-binding peptide
  MOD_RES (2)..(4)..(35)..(36): Xaa is C or S

SEQ ID NO: 50725 - protein, 31 aa, Artificial Sequence
  Cyclic GFR-binding peptide
  MOD_RES (26)..(27): Xaa is C or S
NSLQEIVNSSDDYYVVPLPELKTPAXXPKPV

SEQ ID NO: 50726 - protein, 28 aa, Artificial Sequence
  Cyclic GFR-binding peptide
  MOD_RES (28)..(28): Xaa is C or S
IMEYQKYVKPKRGVIFLISIPSLAQPVX

SEQ ID NO: 50727 - protein, 35 aa, Artificial Sequence
  Cyclic GFR-binding peptide
  MOD_RES (30)..(31): Xaa is C or S
VVMNNSLQEIVNSSDDYYLVTLPELQTPAXXPKPV

SEQ ID NO: 50728 - protein, 34 aa, Artificial Sequence; identical to SEQ ID NO: 10065
  Cyclic GFR-binding peptide
  MOD_RES (31)..(32): Xaa is C or S

SEQ ID NO: 50729 - protein, 23 aa, Artificial Sequence
  Cyclic GFR-binding peptide
VMNNSLQEIVNSSDDYYLVTLPE

SEQ ID NO: 50730 - protein, 26 aa, Artificial Sequence
  Cyclic GFR-binding peptide
MDRYKKLVVNNASDFYLISIANLRTP

SEQ ID NO: 50731 - protein, 36 aa, Artificial Sequence
  Cyclic GFR-binding peptide
  MOD_RES (30)..(31): Xaa is C or S
VVMNEYQKYIVNSSDDIFLVSIPSLQTPAXXPKPVT

SEQ ID NO: 50732 - protein, 36 aa, Artificial Sequence; identical to SEQ ID NO: 10068
  Cyclic GFR-binding peptide
  MOD_RES (31)..(32): Xaa is C or S

SEQ ID NO: 50733 - protein, 28 aa, Artificial Sequence
  Cyclic GFR-binding peptide
  MOD_RES (28)..(28): Xaa is C or S
MDNSLQEVVNNASDYYLITLPELRTPVX

SEQ ID NO: 50734 - protein, 37 aa, Artificial Sequence; identical to SEQ ID NO: 10069
  Cyclic GFR-binding peptide
  MOD_RES (2)..(34)..(35): Xaa is C or S

SEQ ID NO: 50735 - protein, 33 aa, Artificial Sequence
  Cyclic GFR-binding peptide
  MOD_RES (28)..(29): Xaa is C or S
MDQYNKLVVNNASDLYLISIASLRTPVXXTPPT

SEQ ID NO: 50736 - protein, 34 aa, Artificial Sequence; identical to SEQ ID NO: 10071
  Cyclic GFR-binding peptide
  MOD_RES (1)..(3): Xaa is C or S

SEQ ID NO: 50737 - protein, 27 aa, Artificial Sequence
  Cyclic GFR-binding peptide
SKVIMEYQKYIKPTKGIIFLISIPSLD

SEQ ID NO: 50738 - protein, 35 aa, Artificial Sequence; identical to SEQ ID NO: 10075
  Cyclic GFR-binding peptide
  MOD_RES (31)..(31): Xaa is C or S

SEQ ID NO: 50739 - protein, 30 aa, Artificial Sequence; identical to SEQ ID NO: 2131
  Cyclic GFR-binding peptide

SEQ ID NO: 50740 - protein, 35 aa, Artificial Sequence; identical to SEQ ID NO: 10077
  Cyclic GFR-binding peptide
  MOD_RES (2)..(4): Xaa is C or S

SEQ ID NO: 50741 - protein, 33 aa, Artificial Sequence
  Cyclic GFR-binding peptide
  MOD_RES (29)..(29): Xaa is C or S
VMNNSLQEIVNSSDDYYLVTLPELKTPAXTPKT

SEQ ID NO: 50742 - protein, 30 aa, Artificial Sequence
  Cyclic GFR-binding peptide
  MOD_RES (26)..(27): Xaa is C or S
NSLQEVVNNASDYYVIPLPELRTPVXXTPP

SEQ ID NO: 50743 - protein, 31 aa, Artificial Sequence
  Cyclic GFR-binding peptide
  MOD_RES (2)..(4): Xaa is C or S
RXGXGEVVMDEYQKYVVKENEDIFLMSIPSL

SEQ ID NO: 50744 - protein, 32 aa, Artificial Sequence
  Cyclic GFR-binding peptide
  MOD_RES (28)..(29): Xaa is C or S
MDNSLQEVVNNASDYYLITLPELRTPVXXTPP

SEQ ID NO: 50745 - protein, 39 aa, Artificial Sequence; identical to SEQ ID NO: 10085
  Cyclic GFR-binding peptide
  MOD_RES (2)..(33)..(34): Xaa is C or S

SEQ ID NO: 50746 - protein, 28 aa, Artificial Sequence
  Cyclic GFR-binding peptide
VIMNSLQEVKPKRGVYYLITLPELAQPV

SEQ ID NO: 50747 - protein, 37 aa, Artificial Sequence; identical to SEQ ID NO: 10086
  Cyclic GFR-binding peptide
  MOD_RES (2)..(33)..(34): Xaa is C or S

SEQ ID NO: 50748 - protein, 25 aa, Artificial Sequence
  Cyclic GFR-binding peptide
MNNSLQEIVNSSDDYYLVTLPELQT

SEQ ID NO: 50749 - protein, 29 aa, Artificial Sequence
  Cyclic GFR-binding peptide
  MOD_RES (26)..(27): Xaa is C or S
NSLQEIKPTKGIYYVIPLPELDQSVXXPS

SEQ ID NO: 50750 - protein, 24 aa, Artificial Sequence
  Cyclic GFR-binding peptide
MDQYNKLVVNNASDLYLISIASLR

SEQ ID NO: 50751 - protein, 35 aa, Artificial Sequence; identical to SEQ ID NO: 10091
  Cyclic GFR-binding peptide
  MOD_RES (32)..(33): Xaa is C or S

SEQ ID NO: 50752 - protein, 36 aa, Artificial Sequence
  Cyclic GFR-binding peptide
  MOD_RES (30)..(30): Xaa is C or S
VVMNNSLQEIVNSSDDYYVVPLPELKTPAXTPKTVH

SEQ ID NO: 50753 - protein, 33 aa, Artificial Sequence
  Cyclic GFR-binding peptide
  MOD_RES (2)..(4): Xaa is C or S
RXGXGEVVMEEYQKYVVKDYEDIFLMSIPSLET

SEQ ID NO: 50754 - protein, 28 aa, Artificial Sequence
  Cyclic GFR-binding peptide
  MOD_RES (27)..(28): Xaa is C or S
DQYNKLVVNNASDLYLISIASLRTPVXX

SEQ ID NO: 50755 - protein, 36 aa, Artificial Sequence; identical to SEQ ID NO: 10092
  Cyclic GFR-binding peptide
  MOD_RES (31)..(32): Xaa is C or S

SEQ ID NO: 50756 - protein, 36 aa, Artificial Sequence
  Cyclic GFR-binding peptide
  MOD_RES (30)..(31): Xaa is C or S
VVMEEYQKYVVKDYEDIFLMSIPSLETPVXXAKPIS

SEQ ID NO: 50757 - protein, 34 aa, Artificial Sequence
  Cyclic GFR-binding peptide
  MOD_RES (2)..(4): Xaa is C or S
HXGXSRVVMNEYQKYIVNSSDDIFLVSIPSLKTP

SEQ ID NO: 50758 - protein, 33 aa, Artificial Sequence
  Cyclic GFR-binding peptide
  MOD_RES (28)..(28): Xaa is C or S
MNEYQKYIVNSSDDIFLVSIPSLKTPAXTPKTV

SEQ ID NO: 50759 - protein, 38 aa, Artificial Sequence; identical to SEQ ID NO: 10093
  Cyclic GFR-binding peptide
  MOD_RES (32)..(33): Xaa is C or S

SEQ ID NO: 50760 - protein, 25 aa, Artificial Sequence
  Cyclic GFR-binding peptide
VVMENSLQEVVKDYEDYYLMTLPEL

SEQ ID NO: 50761 - protein, 41 aa, Artificial Sequence; identical to SEQ ID NO: 10094
  Cyclic GFR-binding peptide
  MOD_RES (2)..(4)..(35)..(36): Xaa is C or S

SEQ ID NO: 50762 - protein, 28 aa, Artificial Sequence
  Cyclic GFR-binding peptide
VMDNSLQEVVNNASDYYLITLPELRTPV

SEQ ID NO: 50763 - protein, 22 aa, Artificial Sequence
  Cyclic GFR-binding peptide
NSLQEIVNSSDDYYVVPLPELQ

SEQ ID NO: 50764 - protein, 32 aa, Artificial Sequence; identical to SEQ ID NO: 10096
  Cyclic GFR-binding peptide
  MOD_RES (1)..(1): Xaa is C or S

SEQ ID NO: 50765 - protein, 32 aa, Artificial Sequence; identical to SEQ ID NO: 10097
  Cyclic GFR-binding peptide
  MOD_RES (32)..(32): Xaa is C or S

SEQ ID NO: 50766 - protein, 29 aa, Artificial Sequence
  Cyclic GFR-binding peptide
RVVMNNSLQEIVNSSDDYYVVPLPELQTP

SEQ ID NO: 50767 - protein, 39 aa, Artificial Sequence; identical to SEQ ID NO: 10099
  Cyclic GFR-binding peptide
  MOD_RES (2)..(4)..(36)..(37): Xaa is C or S

SEQ ID NO: 50768 - protein, 31 aa, Artificial Sequence
  Cyclic GFR-binding peptide
  MOD_RES (29)..(29): Xaa is C or S
VMNNSLQEIVNSSDDYYLVTLPELKTPAXTP

SEQ ID NO: 50769 - protein, 24 aa, Artificial Sequence
  Cyclic GFR-binding peptide
VMDNSLQEVVKENEDYYVMPLPEL

SEQ ID NO: 50770 - protein, 25 aa, Artificial Sequence
  Cyclic GFR-binding peptide
NSLQEVVNNASDYYLITLPELRTPV

SEQ ID NO: 50771 - protein, 32 aa, Artificial Sequence
  Cyclic GFR-binding peptide
  MOD_RES (30)..(31): Xaa is C or S
VVMDNSLQEVVNNASDYYVIPLPELRTPVXXT

SEQ ID NO: 50772 - protein, 38 aa, Artificial Sequence; identical to SEQ ID NO: 10100
  Cyclic GFR-binding peptide
  MOD_RES (2)..(4)..(36)..(37): Xaa is C or S

SEQ ID NO: 50773 - protein, 40 aa, Artificial Sequence; identical to SEQ ID NO: 10101
  Cyclic GFR-binding peptide
  MOD_RES (2)..(4)..(36)..(37): Xaa is C or S

SEQ ID NO: 50774 - protein, 20 aa, Artificial Sequence
  Cyclic GFR-binding peptide
EYQKYVVKENEDIFLMSIPS

SEQ ID NO: 50775 - protein, 36 aa, Artificial Sequence
  Cyclic GFR-binding peptide
  MOD_RES (30)..(31): Xaa is C or S
VVMDNSLQEVVNNASDYYVIPLPELRTPVXXTPPTS

SEQ ID NO: 50776 - protein, 34 aa, Artificial Sequence; identical to SEQ ID NO: 10104
  Cyclic GFR-binding peptide
  MOD_RES (1)..(3): Xaa is C or S

SEQ ID NO: 50777 - protein, 34 aa, Artificial Sequence; identical to SEQ ID NO: 10105
  Cyclic GFR-binding peptide
  MOD_RES (1)..(32)..(33): Xaa is C or S

SEQ ID NO: 50778 - protein, 36 aa, Artificial Sequence; identical to SEQ ID NO: 10106
  Cyclic GFR-binding peptide
  MOD_RES (1)..(3)..(34)..(35): Xaa is C or S

SEQ ID NO: 50779 - protein, 42 aa, Artificial Sequence; identical to SEQ ID NO: 10107
  Cyclic GFR-binding peptide
  MOD_RES (2)..(4)..(36)..(37): Xaa is C or S

SEQ ID NO: 50780 - protein, 27 aa, Artificial Sequence
  Cyclic GFR-binding peptide
  MOD_RES (27)..(27): Xaa is C or S
ENSLQEVVKDYEDYYLMTLPELETPVX

SEQ ID NO: 50781 - protein, 33 aa, Artificial Sequence
  Cyclic GFR-binding peptide
  MOD_RES (2)..(4): Xaa is C or S
RXGXSEVVMDNSLQEVVNNASDYYVIPLPELRT

SEQ ID NO: 50782 - protein, 37 aa, Artificial Sequence; identical to SEQ ID NO: 10110
  Cyclic GFR-binding peptide
  MOD_RES (31)..(31): Xaa is C or S

SEQ ID NO: 50783 - protein, 20 aa, Artificial Sequence
  Cyclic GFR-binding peptide
NSLQEIVNSSDDYYVVPLPE

SEQ ID NO: 50784 - protein, 38 aa, Artificial Sequence; identical to SEQ ID NO: 10111
  Cyclic GFR-binding peptide
  MOD_RES (2)..(4)..(36)..(37): Xaa is C or S

SEQ ID NO: 50785 - protein, 29 aa, Artificial Sequence
  Cyclic GFR-binding peptide
  MOD_RES (29)..(29): Xaa is C or S
VMNNSLQEIVNSSDDYYVVPLPELQTPAX

SEQ ID NO: 50786 - protein, 23 aa, Artificial Sequence
  Cyclic GFR-binding peptide
MEYQKYVKPTRGVIFLISIPSLD

SEQ ID NO: 50787 - protein, 38 aa, Artificial Sequence; identical to SEQ ID NO: 10112
  Cyclic GFR-binding peptide
  MOD_RES (32)..(33): Xaa is C or S

SEQ ID NO: 50788 - protein, 27 aa, Artificial Sequence
  Cyclic GFR-binding peptide
  MOD_RES (26)..(26): Xaa is C or S
NSLQEIVNSSDDYYVVPLPELKTPAXT

SEQ ID NO: 50789 - protein, 31 aa, Artificial Sequence; identical to SEQ ID NO: 10113
  Cyclic GFR-binding peptide

SEQ ID NO: 50790 - protein, 32 aa, Artificial Sequence
  Cyclic GFR-binding peptide
  MOD_RES (26)..(27): Xaa is C or S
NSLQEIVNSSDDYYLVTLPELKTPAXXPKPVY

SEQ ID NO: 50791 - protein, 32 aa, Artificial Sequence
  Cyclic GFR-binding peptide
  MOD_RES (30)..(31): Xaa is C or S
VVMNEYQKYIVNSSDDIFLVSIPSLQTPAXXP

SEQ ID NO: 50792 - protein, 20 aa, Artificial Sequence
  Cyclic GFR-binding peptide
NSLQEVVNNASDYYLITLPE

SEQ ID NO: 50793 - protein, 36 aa, Artificial Sequence; identical to SEQ ID NO: 10115
  Cyclic GFR-binding peptide
  MOD_RES (1)..(33)..(34): Xaa is C or S

SEQ ID NO: 50794 - protein, 25 aa, Artificial Sequence
  Cyclic GFR-binding peptide
VIMNSLQEVKPKRGVYYLITLPELA

SEQ ID NO: 50795 - protein, 30 aa, Artificial Sequence
  Cyclic GFR-binding peptide
  MOD_RES (26)..(27): Xaa is C or S
NSLQEVVKENEDYYLMTLPELETPVXXAKP

SEQ ID NO: 50796 - protein, 36 aa, Artificial Sequence; identical to SEQ ID NO: 10119
  Cyclic GFR-binding peptide
  MOD_RES (1)..(3)..(35): Xaa is C or S

SEQ ID NO: 50797 - protein, 24 aa, Artificial Sequence
  Cyclic GFR-binding peptide
MNNSLQEIVNSSDDYYVVPLPELK

SEQ ID NO: 50798 - protein, 33 aa, Artificial Sequence
  Cyclic GFR-binding peptide
  MOD_RES (29)..(30): Xaa is C or S
VMDNSLQEVVKENEDYYVMPLPELETPVXXAKP

SEQ ID NO: 50799 - protein, 29 aa, Artificial Sequence
  Cyclic GFR-binding peptide
  MOD_RES (2)..(2): Xaa is C or S
GXARVVMNNSLQEIVNSSDDYYVVPLPEL

SEQ ID NO: 50800 - protein, 23 aa, Artificial Sequence
  Cyclic GFR-binding peptide
MNSLQEIKPTKGIYYVIPLPELD

SEQ ID NO: 50801 - protein, 33 aa, Artificial Sequence
  Cyclic GFR-binding peptide
  MOD_RES (28)..(29): Xaa is C or S
MDNSLQEVVNNASDYYVIPLPELRTPVXXTPPT

SEQ ID NO: 50802 - protein, 32 aa, Artificial Sequence
  Cyclic GFR-binding peptide
  MOD_RES (2)..(2): Xaa is C or S
GXSEVVMDNSLQEVVNNASDYYLITLPELRTP

SEQ ID NO: 50803 - protein, 32 aa, Artificial Sequence
  Cyclic GFR-binding peptide
  MOD_RES (29)..(30): Xaa is C or S
VIMNSLQEIKPTKGIYYVIPLPELDQSVXXPS

SEQ ID NO: 50804 - protein, 32 aa, Artificial Sequence
  Cyclic GFR-binding peptide
  MOD_RES (2)..(4): Xaa is C or S
HXGXARVVMNEYQKYIVNSSDDIFLVSIPSLQ

SEQ ID NO: 50805 - protein, 37 aa, Artificial Sequence; identical to SEQ ID NO: 10121
  Cyclic GFR-binding peptide
  MOD_RES (2)..(4)..(36)..(37): Xaa is C or S

SEQ ID NO: 50806 - protein, 31 aa, Artificial Sequence; identical to SEQ ID NO: 10122
  Cyclic GFR-binding peptide
  MOD_RES (31)..(31): Xaa is C or S

SEQ ID NO: 50807 - protein, 37 aa, Artificial Sequence; identical to SEQ ID NO: 10123
  Cyclic GFR-binding peptide
  MOD_RES (2)..(4)..(35)..(36): Xaa is C or S

SEQ ID NO: 50808 - protein, 24 aa, Artificial Sequence
  Cyclic GFR-binding peptide
VVMNSLQEVKPTRGVYYVIPLPEL

SEQ ID NO: 50809 - protein, 27 aa, Artificial Sequence
  Cyclic GFR-binding peptide
MENSLQEVVKDYEDYYVMPLPELETPV

SEQ ID NO: 50810 - protein, 37 aa, Artificial Sequence; identical to SEQ ID NO: 10124
  Cyclic GFR-binding peptide
  MOD_RES (2)..(34)..(35): Xaa is C or S

SEQ ID NO: 50811 - protein, 31 aa, Artificial Sequence
  Cyclic GFR-binding peptide
  MOD_RES (30)..(31): Xaa is C or S
VVMDQYNKLVVNNASDLYLISIASLRTPVXX

SEQ ID NO: 50812 - protein, 30 aa, Artificial Sequence; identical to SEQ ID NO: 10125
  Cyclic GFR-binding peptide

SEQ ID NO: 50813 - protein, 36 aa, Artificial Sequence; identical to SEQ ID NO: 10126
  Cyclic GFR-binding peptide
  MOD_RES (1)..(3)..(35)..(36): Xaa is C or S

SEQ ID NO: 50814 - protein, 32 aa, Artificial Sequence
  Cyclic GFR-binding peptide
  MOD_RES (27)..(28): Xaa is C or S
MNSLQEVKPTRGVYYVIPLPELDQPVXXPSAS

SEQ ID NO: 50815 - protein, 37 aa, Artificial Sequence; identical to SEQ ID NO: 10128
  Cyclic GFR-binding peptide
  MOD_RES (2)..(34)..(35): Xaa is C or S

SEQ ID NO: 50816 - protein, 38 aa, Artificial Sequence; identical to SEQ ID NO: 10131
  Cyclic GFR-binding peptide
  MOD_RES (1)..(32)..(33): Xaa is C or S

SEQ ID NO: 50817 - protein, 26 aa, Artificial Sequence
  Cyclic GFR-binding peptide
VMDNSLQEVVKENEDYYLMTLPELET

SEQ ID NO: 50818 - protein, 28 aa, Artificial Sequence
  Cyclic GFR-binding peptide
  MOD_RES (26)..(26): Xaa is C or S
NSLQEIVNSSDDYYVVPLPELKTPAXTP

SEQ ID NO: 50819 - protein, 32 aa, Artificial Sequence
  Cyclic GFR-binding peptide
  MOD_RES (29)..(30): Xaa is C or S
VMNEYQKYIVNSSDDIFLVSIPSLKTPAXXPK

SEQ ID NO: 50820 - protein, 29 aa, Artificial Sequence
  Cyclic GFR-binding peptide
  MOD_RES (2)..(4): Xaa is C or S
SXKXSRVIMNSLQEVKPKRGVYYLITLPE

SEQ ID NO: 50821 - protein, 32 aa, Artificial Sequence
  Cyclic GFR-binding peptide
  MOD_RES (29)..(29): Xaa is C or S
VMNEYQKYIVNSSDDIFLVSIPSLKTPAXTPK

SEQ ID NO: 50822 - protein, 30 aa, Artificial Sequence
  Cyclic GFR-binding peptide
  MOD_RES (28)..(29): Xaa is C or S
MNNSLQEIVNSSDDYYVVPLPELQTPAXXP

SEQ ID NO: 50823 - protein, 31 aa, Artificial Sequence; identical to SEQ ID NO: 10133
  Cyclic GFR-binding peptide
  MOD_RES (31)..(31): Xaa is C or S

SEQ ID NO: 50824 - protein, 38 aa, Artificial Sequence; identical to SEQ ID NO: 10134
  Cyclic GFR-binding peptide
  MOD_RES (32)..(33): Xaa is C or S

SEQ ID NO: 50825 - protein, 31 aa, Artificial Sequence
  Cyclic GFR-binding peptide
  MOD_RES (1)..(3): Xaa is C or S
XKXSRVIMEYQKYVKPKRGVIFLISIPSLAQ

SEQ ID NO: 50826 - protein, 27 aa, Artificial Sequence
  Cyclic GFR-binding peptide
  MOD_RES (26)..(27): Xaa is C or S
NSLQEIVNSSDDYYVVPLPELKTPAXX

SEQ ID NO: 50827 - protein, 36 aa, Artificial Sequence; identical to SEQ ID NO: 10136
  Cyclic GFR-binding peptide
  MOD_RES (1)..(33)..(34): Xaa is C or S

SEQ ID NO: 50828 - protein, 25 aa, Artificial Sequence
  Cyclic GFR-binding peptide
RVIMEYQKYVKPKRGVIFLISIPSL

SEQ ID NO: 50829 - protein, 30 aa, Artificial Sequence
  Cyclic GFR-binding peptide
  MOD_RES (2)..(2): Xaa is C or S
GXGEVVMENSLQEVVKDYEDYYLMTLPELE

SEQ ID NO: 50830 - protein, 28 aa, Artificial Sequence
  Cyclic GFR-binding peptide
  MOD_RES (26)..(27): Xaa is C or S
NSLQEVVNNASDYYLITLPELRTPVXXT

SEQ ID NO: 50831 - protein, 35 aa, Artificial Sequence
  Cyclic GFR-binding peptide
  MOD_RES (30)..(31): Xaa is C or S
VVMENSLQEVVKDYEDYYVMPLPELETPVXXAKPI

SEQ ID NO: 50832 - protein, 26 aa, Artificial Sequence
  Cyclic GFR-binding peptide
  MOD_RES (26)..(26): Xaa is C or S
NSLQEIVNSSDDYYLVTLPELQTPAX

SEQ ID NO: 50833 - protein, 24 aa, Artificial Sequence
  Cyclic GFR-binding peptide
VVMEYQKYVKPTRGVIFLISIPSL

SEQ ID NO: 50834 - protein, 34 aa, Artificial Sequence
  Cyclic GFR-binding peptide
  MOD_RES (28)..(29): Xaa is C or S
MDNSLQEVVNNASDYYLITLPELRTPVXXTPPTS

SEQ ID NO: 50835 - protein, 31 aa, Artificial Sequence
  Cyclic GFR-binding peptide
  MOD_RES (2)..(2): Xaa is C or S
GXGEVVMDEYQKYVVKENEDIFLMSIPSLET

SEQ ID NO: 50836 - protein, 35 aa, Artificial Sequence; identical to SEQ ID NO: 10141
  Cyclic GFR-binding peptide
  MOD_RES (2)..(33)..(34): Xaa is C or S

SEQ ID NO: 50837 - protein, 38 aa, Artificial Sequence; identical to SEQ ID NO: 10140
  Cyclic GFR-binding peptide
  MOD_RES (1)..(3)..(35)..(36): Xaa is C or S

SEQ ID NO: 50838 - protein, 33 aa, Artificial Sequence
  Cyclic GFR-binding peptide
  MOD_RES (30)..(31): Xaa is C or S
VVMNNSLQEIVNSSDDYYLVTLPELQTPAXXPK

SEQ ID NO: 50839 - protein, 36 aa, Artificial Sequence; identical to SEQ ID NO: 10142
  Cyclic GFR-binding peptide
  MOD_RES (2)..(4)..(36): Xaa is C or S

SEQ ID NO: 50840 - protein, 27 aa, Artificial Sequence
  Cyclic GFR-binding peptide
VVMDNSLQEVVNNASDYYVIPLPELRT

SEQ ID NO: 50841 - protein, 35 aa, Artificial Sequence; identical to SEQ ID NO: 10143
  Cyclic GFR-binding peptide
  MOD_RES (1)..(33)..(34): Xaa is C or S

SEQ ID NO: 50842 - protein, 27 aa, Artificial Sequence
  Cyclic GFR-binding peptide
  MOD_RES (27)..(27): Xaa is C or S
DEYQKYVVKENEDIFLMSIPSLETPVX

SEQ ID NO: 50843 - protein, 33 aa, Artificial Sequence
  Cyclic GFR-binding peptide
  MOD_RES (30)..(30): Xaa is C or S
VVMNEYQKYIVNSSDDIFLVSIPSLKTPAXTPK

SEQ ID NO: 50844 - protein, 33 aa, Artificial Sequence; identical to SEQ ID NO: 10148
  Cyclic GFR-binding peptide
  MOD_RES (32)..(33): Xaa is C or S

SEQ ID NO: 50845 - protein, 30 aa, Artificial Sequence
  Cyclic GFR-binding peptide
  MOD_RES (30)..(30): Xaa is C or S
VVMDEYQKYVVKENEDIFLMSIPSLETPVX

SEQ ID NO: 50846 - protein, 23 aa, Artificial Sequence
  Cyclic GFR-binding peptide
VMDNSLQEVVNNASDYYLITLPE

SEQ ID NO: 50847 - protein, 30 aa, Artificial Sequence
  Cyclic GFR-binding peptide
  MOD_RES (1)..(3): Xaa is C or S
XKXSKVVMEYQKYVKPTRGVIFLISIPSLD

SEQ ID NO: 50848 - protein, 31 aa, Artificial Sequence
  Cyclic GFR-binding peptide
  MOD_RES (28)..(28): Xaa is C or S
MNEYQKYIVNSSDDIFLVSIPSLKTPAXTPK

SEQ ID NO: 50849 - protein, 31 aa, Artificial Sequence
  Cyclic GFR-binding peptide
  MOD_RES (29)..(30): Xaa is C or S
VMDNSLQEVVNNASDYYVIPLPELRTPVXXT

SEQ ID NO: 50850 - protein, 36 aa, Artificial Sequence; identical to SEQ ID NO: 10152
  Cyclic GFR-binding peptide
  MOD_RES (2)..(33)..(34): Xaa is C or S

SEQ ID NO: 50851 - protein, 36 aa, Artificial Sequence; identical to SEQ ID NO: 10153
  Cyclic GFR-binding peptide
  MOD_RES (32)..(33): Xaa is C or S

SEQ ID NO: 50852 - protein, 29 aa, Artificial Sequence
  Cyclic GFR-binding peptide
  MOD_RES (27)..(28): Xaa is C or S
MNSLQEIKPTKGIYYVIPLPELDQSVXXP

SEQ ID NO: 50853 - protein, 27 aa, Artificial Sequence
  Cyclic GFR-binding peptide
GEVVMENSLQEVVKDYEDYYLMTLPEL

SEQ ID NO: 50854 - protein, 41 aa, Artificial Sequence; identical to SEQ ID NO: 10156
  Cyclic GFR-binding peptide
  MOD_RES (2)..(4)..(35)..(36): Xaa is C or S

SEQ ID NO: 50855 - protein, 29 aa, Artificial Sequence
  Cyclic GFR-binding peptide
  MOD_RES (26)..(27): Xaa is C or S
NSLQEVKPTRGVYYVIPLPELDQPVXXPS

SEQ ID NO: 50856 - protein, 34 aa, Artificial Sequence; identical to SEQ ID NO: 10159
  Cyclic GFR-binding peptide
  MOD_RES (1)..(33)..(34): Xaa is C or S

SEQ ID NO: 50857 - protein, 41 aa, Artificial Sequence; identical to SEQ ID NO: 10160
  Cyclic GFR-binding peptide
  MOD_RES (2)..(4)..(36)..(37): Xaa is C or S

SEQ ID NO: 50858 - protein, 23 aa, Artificial Sequence
  Cyclic GFR-binding peptide
MENSLQEVVKDYEDYYVMPLPEL

SEQ ID NO: 50859 - protein, 33 aa, Artificial Sequence
  Cyclic GFR-binding peptide
  MOD_RES (1)..(3): Xaa is C or S
XGXGEVVMDNSLQEVVKENEDYYVMPLPELETP

SEQ ID NO: 50860 - protein, 29 aa, Artificial Sequence
  Cyclic GFR-binding peptide
  MOD_RES (28)..(29): Xaa is C or S
IMNSLQEVKPKRGVYYLITLPELAQPVXX

SEQ ID NO: 50861 - protein, 37 aa, Artificial Sequence; identical to SEQ ID NO: 10162
  Cyclic GFR-binding peptide
  MOD_RES (2)..(4)..(36)..(37): Xaa is C or S

SEQ ID NO: 50862 - protein, 29 aa, Artificial Sequence
  Cyclic GFR-binding peptide
SEVVMDRYKKLVVNNASDFYLISIANLRT

SEQ ID NO: 50863 - protein, 36 aa, Artificial Sequence; identical to SEQ ID NO: 10163
  Cyclic GFR-binding peptide
  MOD_RES (32)..(33): Xaa is C or S

SEQ ID NO: 50864 - protein, 30 aa, Artificial Sequence
  Cyclic GFR-binding peptide
  MOD_RES (28)..(29): Xaa is C or S
VMNSLQEVKPTRGVYYVIPLPELDQPVXXP

SEQ ID NO: 50865 - protein, 29 aa, Artificial Sequence
  Cyclic GFR-binding peptide
SRVVMNNSLQEIVNSSDDYYLVTLPELKT

SEQ ID NO: 50866 - protein, 38 aa, Artificial Sequence; identical to SEQ ID NO: 10166
  Cyclic GFR-binding peptide
  MOD_RES (32)..(33): Xaa is C or S

SEQ ID NO: 50867 - protein, 35 aa, Artificial Sequence
  Cyclic GFR-binding peptide
  MOD_RES (30)..(31): Xaa is C or S
KVVMEYQKYVKPTRGVIFLISIPSLDQPVXXPSAS

SEQ ID NO: 50868 - protein, 32 aa, Artificial Sequence; identical to SEQ ID NO: 10167
  Cyclic GFR-binding peptide
  MOD_RES (32)..(32): Xaa is C or S

SEQ ID NO: 50869 - protein, 29 aa, Artificial Sequence
  Cyclic GFR-binding peptide
GEVVMEEYQKYVVKDYEDIFLMSIPSLET

SEQ ID NO: 50870 - protein, 26 aa, Artificial Sequence
  Cyclic GFR-binding peptide
MENSLQEVVKDYEDYYVMPLPELETP

SEQ ID NO: 50871 - protein, 38 aa, Artificial Sequence; identical to SEQ ID NO: 10169
  Cyclic GFR-binding peptide
  MOD_RES (2)..(4)..(36): Xaa is C or S

SEQ ID NO: 50872 - protein, 27 aa, Artificial Sequence
  Cyclic GFR-binding peptide
VMDNSLQEVVKENEDYYVMPLPELETP

SEQ ID NO: 50873 - protein, 36 aa, Artificial Sequence; identical to SEQ ID NO: 10173
  Cyclic GFR-binding peptide
  MOD_RES (31)..(32): Xaa is C or S

SEQ ID NO: 50874 - protein, 29 aa, Artificial Sequence
  Cyclic GFR-binding peptide
ARVVMNNSLQEIVNSSDDYYVVPLPELQT

SEQ ID NO: 50875 - protein, 21 aa, Artificial Sequence
  Cyclic GFR-binding peptide
ENSLQEVVKDYEDYYLMTLPE

SEQ ID NO: 50876 - protein, 28 aa, Artificial Sequence
  Cyclic GFR-binding peptide
  MOD_RES (2)..(2): Xaa is C or S
GXARVVMNEYQKYIVNSSDDIFLVSIPS

SEQ ID NO: 50877 - protein, 26 aa, Artificial Sequence
  Cyclic GFR-binding peptide
MNEYQKYIVNSSDDIFLVSIPSLQTP

SEQ ID NO: 50878 - protein, 29 aa, Artificial Sequence
  Cyclic GFR-binding peptide
  MOD_RES (1)..(1): Xaa is C or S
XSEVVMDNSLQEVVNNASDYYLITLPELR

SEQ ID NO: 50879 - protein, 40 aa, Artificial Sequence; identical to SEQ ID NO: 10176
  Cyclic GFR-binding peptide
  MOD_RES (1)..(3)..(34)..(35): Xaa is C or S

SEQ ID NO: 50880 - protein, 34 aa, Artificial Sequence
  Cyclic GFR-binding peptide
  MOD_RES (29)..(30): Xaa is C or S
VVMNSLQEVKPTRGVYYVIPLPELDQPVXXPSAS

SEQ ID NO: 50881 - protein, 31 aa, Artificial Sequence; identical to SEQ ID NO: 10177
  Cyclic GFR-binding peptide

SEQ ID NO: 50882 - protein, 26 aa, Artificial Sequence
  Cyclic GFR-binding peptide
SEVVMDRYKKLVVNNASDFYLISIAN

SEQ ID NO: 50883 - protein, 33 aa, Artificial Sequence; identical to SEQ ID NO: 10178
  Cyclic GFR-binding peptide
  MOD_RES (2)..(33): Xaa is C or S

SEQ ID NO: 50884 - protein, 30 aa, Artificial Sequence
  Cyclic GFR-binding peptide
  MOD_RES (28)..(29): Xaa is C or S
MDNSLQEVVNNASDYYLITLPELRTPVXXT

SEQ ID NO: 50885 - protein, 36 aa, Artificial Sequence; identical to SEQ ID NO: 10180
  Cyclic GFR-binding peptide
  MOD_RES (1)..(3)..(35): Xaa is C or S

SEQ ID NO: 50886 - protein, 33 aa, Artificial Sequence
  Cyclic GFR-binding peptide
  MOD_RES (2)..(4): Xaa is C or S
SXKXSRVIMEYQKYVKPKRGVIFLISIPSLAQP

SEQ ID NO: 50887 - protein, 38 aa, Artificial Sequence; identical to SEQ ID NO: 10182
  Cyclic GFR-binding peptide
  MOD_RES (1)..(3)..(35)..(36): Xaa is C or S

SEQ ID NO: 50888 - protein, 26 aa, Artificial Sequence
  Cyclic GFR-binding peptide
  MOD_RES (1)..(1): Xaa is C or S
XSRVIMEYQKYVKPKRGVIFLISIPS

SEQ ID NO: 50889 - protein, 32 aa, Artificial Sequence; identical to SEQ ID NO: 10183
  Cyclic GFR-binding peptide
  MOD_RES (31)..(32): Xaa is C or S

SEQ ID NO: 50890 - protein, 29 aa, Artificial Sequence
  Cyclic GFR-binding peptide
  MOD_RES (28)..(29): Xaa is C or S
MNEYQKYIVNSSDDIFLVSIPSLQTPAXX

SEQ ID NO: 50891 - protein, 24 aa, Artificial Sequence
  Cyclic GFR-binding peptide
NSLQEIVNSSDDYYVVPLPELKTP

SEQ ID NO: 50892 - protein, 26 aa, Artificial Sequence
  Cyclic GFR-binding peptide
DNSLQEVVKENEDYYVMPLPELETPV

SEQ ID NO: 50893 - protein, 28 aa, Artificial Sequence
  Cyclic GFR-binding peptide
  MOD_RES (1)..(1): Xaa is C or S
XSKVIMEYQKYIKPTKGIIFLISIPSLD

SEQ ID NO: 50894 - protein, 28 aa, Artificial Sequence
  Cyclic GFR-binding peptide
  MOD_RES (28)..(28): Xaa is C or S
IMEYQKYIKPTKGIIFLISIPSLDQSVX

SEQ ID NO: 50895 - protein, 38 aa, Artificial Sequence; identical to SEQ ID NO: 10184
  Cyclic GFR-binding peptide
  MOD_RES (2)..(4)..(35)..(36): Xaa is C or S

SEQ ID NO: 50896 - protein, 38 aa, Artificial Sequence; identical to SEQ ID NO: 10185
  Cyclic GFR-binding peptide
  MOD_RES (32)..(33): Xaa is C or S

SEQ ID NO: 50897 - protein, 35 aa, Artificial Sequence; identical to SEQ ID NO: 10186
  Cyclic GFR-binding peptide
  MOD_RES (2)..(33)..(34): Xaa is C or S

SEQ ID NO: 50898 - protein, 22 aa, Artificial Sequence
  Cyclic GFR-binding peptide
MDNSLQEVVKENEDYYVMPLPE

SEQ ID NO: 50899 - protein, 30 aa, Artificial Sequence
  Cyclic GFR-binding peptide
  MOD_RES (2)..(2): Xaa is C or S
GXSRVVMNNSLQEIVNSSDDYYLVTLPELK

SEQ ID NO: 50900 - protein, 27 aa, Artificial Sequence
  Cyclic GFR-binding peptide
  MOD_RES (27)..(27): Xaa is C or S
NNSLQEIVNSSDDYYLVTLPELQTPAX

SEQ ID NO: 50901 - protein, 34 aa, Artificial Sequence
  Cyclic GFR-binding peptide
  MOD_RES (28)..(28): Xaa is C or S
MNEYQKYIVNSSDDIFLVSIPSLKTPAXTPKTVH

SEQ ID NO: 50902 - protein, 37 aa, Artificial Sequence; identical to SEQ ID NO: 10187
  Cyclic GFR-binding peptide
  MOD_RES (32)..(32): Xaa is C or S

SEQ ID NO: 50903 - protein, 35 aa, Artificial Sequence; identical to SEQ ID NO: 10188
  Cyclic GFR-binding peptide
  MOD_RES (31)..(32): Xaa is C or S

SEQ ID NO: 50904 - protein, 34 aa, Artificial Sequence
  Cyclic GFR-binding peptide
  MOD_RES (28)..(29): Xaa is C or S
MDEYQKYVVKENEDIFLMSIPSLETPVXXAKPIK

SEQ ID NO: 50905 - protein, 41 aa, Artificial Sequence; identical to SEQ ID NO: 10189
  Cyclic GFR-binding peptide
  MOD_RES (2)..(4)..(36)..(37): Xaa is C or S

SEQ ID NO: 50906 - protein, 28 aa, Artificial Sequence
  Cyclic GFR-binding peptide
  MOD_RES (1)..(3): Xaa is C or S
XKXSKVIMNSLQEIKPTKGIYYVIPLPE

SEQ ID NO: 50907 - protein, 22 aa, Artificial Sequence
  Cyclic GFR-binding peptide
IMEYQKYVKPKRGVIFLISIPS

SEQ ID NO: 50908 - protein, 33 aa, Artificial Sequence
  Cyclic GFR-binding peptide
  MOD_RES (1)..(3): Xaa is C or S
XGXGEVVMENSLQEVVKDYEDYYLMTLPELETP

SEQ ID NO: 50909 - protein, 28 aa, Artificial Sequence
  Cyclic GFR-binding peptide
  MOD_RES (1)..(3): Xaa is C or S
XKXSKVIMEYQKYIKPTKGIIFLISIPS

SEQ ID NO: 50910 - protein, 28 aa, Artificial Sequence
  Cyclic GFR-binding peptide
  MOD_RES (2)..(2): Xaa is C or S
GXGEVVMENSLQEVVKDYEDYYVMPLPE

SEQ ID NO: 50911 - protein, 40 aa, Artificial Sequence; identical to SEQ ID NO: 10191
  Cyclic GFR-binding peptide
  MOD_RES (2)..(34)..(35): Xaa is C or S

SEQ ID NO: 50912 - protein, 27 aa, Artificial Sequence
  Cyclic GFR-binding peptide
KVVMNSLQEVKPTRGVYYVIPLPELDQ

SEQ ID NO: 50913 - protein, 28 aa, Artificial Sequence
  Cyclic GFR-binding peptide
  MOD_RES (28)..(28): Xaa is C or S
VMNSLQEVKPTRGVYYVIPLPELDQPVX

SEQ ID NO: 50914 - protein, 40 aa, Artificial Sequence; identical to SEQ ID NO: 10194
  Cyclic GFR-binding peptide
  MOD_RES (2)..(34)..(35): Xaa is C or S

SEQ ID NO: 50915 - protein, 28 aa, Artificial Sequence
  Cyclic GFR-binding peptide
VVMNEYQKYIVNSSDDIFLVSIPSLKTP

SEQ ID NO: 50916 - protein, 33 aa, Artificial Sequence; identical to SEQ ID NO: 10195
  Cyclic GFR-binding peptide
  MOD_RES (32)..(33): Xaa is C or S

SEQ ID NO: 50917 - protein, 31 aa, Artificial Sequence
  Cyclic GFR-binding peptide
  MOD_RES (28)..(29): Xaa is C or S
MNNSLQEIVNSSDDYYVVPLPELKTPAXXPK

SEQ ID NO: 50918 - protein, 28 aa, Artificial Sequence
  Cyclic GFR-binding peptide
  MOD_RES (27)..(28): Xaa is C or S
NEYQKYIVNSSDDIFLVSIPSLQTPAXX

SEQ ID NO: 50919 - protein, 33 aa, Artificial Sequence
  Cyclic GFR-binding peptide
  MOD_RES (30)..(31): Xaa is C or S
KVVMEYQKYVKPTRGVIFLISIPSLDQPVXXPS

SEQ ID NO: 50920 - protein, 24 aa, Artificial Sequence
  Cyclic GFR-binding peptide
VMENSLQEVVKDYEDYYLMTLPEL

SEQ ID NO: 50921 - protein, 39 aa, Artificial Sequence; identical to SEQ ID NO: 10198
  Cyclic GFR-binding peptide
  MOD_RES (2)..(33)..(34): Xaa is C or S

SEQ ID NO: 50922 - protein, 21 aa, Artificial Sequence
  Cyclic GFR-binding peptide
DQYNKLVVNNASDLYLISIAS

SEQ ID NO: 50923 - protein, 31 aa, Artificial Sequence
  Cyclic GFR-binding peptide
  MOD_RES (26)..(27): Xaa is C or S
EYQKYIKPTKGIIFLISIPSLDQSVXXPSAS

SEQ ID NO: 50924 - protein, 28 aa, Artificial Sequence
  Cyclic GFR-binding peptide
VVMNNSLQEIVNSSDDYYVVPLPELQTP

SEQ ID NO: 50925 - protein, 35 aa, Artificial Sequence; identical to SEQ ID NO: 10203
  Cyclic GFR-binding peptide
  MOD_RES (32)..(33): Xaa is C or S

SEQ ID NO: 50926 - protein, 29 aa, Artificial Sequence
  Cyclic GFR-binding peptide
  MOD_RES (28)..(28): Xaa is C or S
MNNSLQEIVNSSDDYYVVPLPELKTPAXT

SEQ ID NO: 50927 - protein, 25 aa, Artificial Sequence
  Cyclic GFR-binding peptide
KVVMNSLQEVKPTRGVYYVIPLPEL

SEQ ID NO: 50928 - protein, 30 aa, Artificial Sequence
  Cyclic GFR-binding peptide
  MOD_RES (27)..(28): Xaa is C or S
DQYNKLVVNNASDLYLISIASLRTPVXXTP

SEQ ID NO: 50929 - protein, 27 aa, Artificial Sequence
  Cyclic GFR-binding peptide
MDRYKKLVVNNASDFYLISIANLRTPV

SEQ ID NO: 50930 - protein, 36 aa, Artificial Sequence; identical to SEQ ID NO: 10205
  Cyclic GFR-binding peptide
  MOD_RES (2)..(4)..(36): Xaa is C or S

SEQ ID NO: 50931 - protein, 29 aa, Artificial Sequence
  Cyclic GFR-binding peptide
VVMNNSLQEIVNSSDDYYLVTLPELQTPA

SEQ ID NO: 50932 - protein, 37 aa, Artificial Sequence; identical to SEQ ID NO: 10206
  Cyclic GFR-binding peptide
  MOD_RES (1)..(3)..(35)..(36): Xaa is C or S

SEQ ID NO: 50933 - protein, 29 aa, Artificial Sequence
  Cyclic GFR-binding peptide
SKVVMNSLQEVKPTRGVYYVIPLPELDQP

SEQ ID NO: 50934 - protein, 34 aa, Artificial Sequence
  Cyclic GFR-binding peptide
  MOD_RES (30)..(31): Xaa is C or S
VVMDEYQKYVVKENEDIFLMSIPSLETPVXXAKP

SEQ ID NO: 50935 - protein, 32 aa, Artificial Sequence
  Cyclic GFR-binding peptide
  MOD_RES (28)..(29): Xaa is C or S
MENSLQEVVKDYEDYYLMTLPELETPVXXAKP

SEQ ID NO: 50936 - protein, 35 aa, Artificial Sequence; identical to SEQ ID NO: 10208
  Cyclic GFR-binding peptide
  MOD_RES (32)..(32): Xaa is C or S

SEQ ID NO: 50937 - protein, 36 aa, Artificial Sequence; identical to SEQ ID NO: 10210
  Cyclic GFR-binding peptide
  MOD_RES (2)..(4)..(36): Xaa is C or S

SEQ ID NO: 50938 - protein, 30 aa, Artificial Sequence
  Cyclic GFR-binding peptide
  MOD_RES (2)..(2): Xaa is C or S
GXARVVMNNSLQEIVNSSDDYYVVPLPELQ

SEQ ID NO: 50939 - protein, 31 aa, Artificial Sequence
  Cyclic GFR-binding peptide
  MOD_RES (28)..(29): Xaa is C or S
MDEYQKYVVKENEDIFLMSIPSLETPVXXAK

SEQ ID NO: 50940 - protein, 30 aa, Artificial Sequence
  Cyclic GFR-binding peptide
  MOD_RES (27)..(28): Xaa is C or S
NEYQKYIVNSSDDIFLVSIPSLQTPAXXPK

SEQ ID NO: 50941 - protein, 34 aa, Artificial Sequence
  Cyclic GFR-binding peptide
  MOD_RES (30)..(31): Xaa is C or S
RVIMNSLQEVKPKRGVYYLITLPELAQPVXXPAA

SEQ ID NO: 50942 - protein, 34 aa, Artificial Sequence
  Cyclic GFR-binding peptide
  MOD_RES (29)..(30): Xaa is C or S
VMDRYKKLVVNNASDFYLISIANLRTPVXXTPPT

SEQ ID NO: 50943 - protein, 29 aa, Artificial Sequence
  Cyclic GFR-binding peptide
  MOD_RES (28)..(29): Xaa is C or S
VMEYQKYVKPTRGVIFLISIPSLDQPVXX

SEQ ID NO: 50944 - protein, 23 aa, Artificial Sequence
  Cyclic GFR-binding peptide
VMDRYKKLVVNNASDFYLISIAN

SEQ ID NO: 50945 - protein, 32 aa, Artificial Sequence
  Cyclic GFR-binding peptide
  MOD_RES (29)..(30): Xaa is C or S
VIMNSLQEVKPKRGVYYLITLPELAQPVXXPA

SEQ ID NO: 50946 - protein, 31 aa, Artificial Sequence
  Cyclic GFR-binding peptide
  MOD_RES (26)..(26): Xaa is C or S
NSLQEIVNSSDDYYVVPLPELKTPAXTPKTV

SEQ ID NO: 50947 - protein, 25 aa, Artificial Sequence
  Cyclic GFR-binding peptide
VMNNSLQEIVNSSDDYYVVPLPELK

SEQ ID NO: 50948 - protein, 30 aa, Artificial Sequence
  Cyclic GFR-binding peptide
  MOD_RES (1)..(3): Xaa is C or S
XKXSKVVMNSLQEVKPTRGVYYVIPLPELD

SEQ ID NO: 50949 - protein, 36 aa, Artificial Sequence; identical to SEQ ID NO: 10214
  Cyclic GFR-binding peptide
  MOD_RES (2)..(34): Xaa is C or S

SEQ ID NO: 50950 - protein, 39 aa, Artificial Sequence; identical to SEQ ID NO: 10215
  Cyclic GFR-binding peptide
  MOD_RES (1)..(3)..(35): Xaa is C or S

SEQ ID NO: 50951 - protein, 34 aa, Artificial Sequence; identical to SEQ ID NO: 10216
  Cyclic GFR-binding peptide
  MOD_RES (31)..(32): Xaa is C or S

SEQ ID NO: 50952 - protein, 24 aa, Artificial Sequence
  Cyclic GFR-binding peptide
MENSLQEVVKDYEDYYLMTLPELE

SEQ ID NO: 50953 - protein, 30 aa, Artificial Sequence
  Cyclic GFR-binding peptide
  MOD_RES (26)..(27): Xaa is C or S
RYKKLVVNNASDFYLISIANLRTPVXXTPP

SEQ ID NO: 50954 - protein, 36 aa, Artificial Sequence
  Cyclic GFR-binding peptide
  MOD_RES (30)..(31): Xaa is C or S
VVMDRYKKLVVNNASDFYLISIANLRTPVXXTPPTS

SEQ ID NO: 50955 - protein, 32 aa, Artificial Sequence
  Cyclic GFR-binding peptide
  MOD_RES (27)..(28): Xaa is C or S
NEYQKYIVNSSDDIFLVSIPSLQTPAXXPKPV

SEQ ID NO: 50956 - protein, 29 aa, Artificial Sequence
  Cyclic GFR-binding peptide
  MOD_RES (26)..(27): Xaa is C or S
EYQKYVVKENEDIFLMSIPSLETPVXXAK

SEQ ID NO: 50957 - protein, 29 aa, Artificial Sequence
  Cyclic GFR-binding peptide
  MOD_RES (1)..(3): Xaa is C or S
XKXSKVIMEYQKYIKPTKGIIFLISIPSL

SEQ ID NO: 50958 - protein, 33 aa, Artificial Sequence; identical to SEQ ID NO: 10220
  Cyclic GFR-binding peptide
  MOD_RES (1)..(32)..(33): Xaa is C or S

SEQ ID NO: 50959 - protein, 33 aa, Artificial Sequence; identical to SEQ ID NO: 10221
  Cyclic GFR-binding peptide
  MOD_RES (31)..(32): Xaa is C or S

SEQ ID NO: 50960 - protein, 26 aa, Artificial Sequence
  Cyclic GFR-binding peptide
DEYQKYVVKENEDIFLMSIPSLETPV

SEQ ID NO: 50961 - protein, 28 aa, Artificial Sequence
  Cyclic GFR-binding peptide
  MOD_RES (26)..(27): Xaa is C or S
NSLQEIVNSSDDYYLVTLPELKTPAXXP

SEQ ID NO: 50962 - protein, 29 aa, Artificial Sequence
  Cyclic GFR-binding peptide
VVMDEYQKYVVKENEDIFLMSIPSLETPV

SEQ ID NO: 50963 - protein, 30 aa, Artificial Sequence
  Cyclic GFR-binding peptide
  MOD_RES (29)..(30): Xaa is C or S
VMDNSLQEVVKENEDYYVMPLPELETPVXX

SEQ ID NO: 50964 - protein, 40 aa, Artificial Sequence; identical to SEQ ID NO: 10222
  Cyclic GFR-binding peptide
  MOD_RES (1)..(3)..(35): Xaa is C or S

SEQ ID NO: 50965 - protein, 38 aa, Artificial Sequence; identical to SEQ ID NO: 10223
  Cyclic GFR-binding peptide
  MOD_RES (1)..(33)..(34): Xaa is C or S

SEQ ID NO: 50966 - protein, 35 aa, Artificial Sequence
  Cyclic GFR-binding peptide
  MOD_RES (29)..(30): Xaa is C or S
VMDNSLQEVVKENEDYYVMPLPELETPVXXAKPIK

SEQ ID NO: 50967 - protein, 28 aa, Artificial Sequence
  Cyclic GFR-binding peptide
VMEEYQKYVVKDYEDIFLMSIPSLETPV

SEQ ID NO: 50968 - protein, 29 aa, Artificial Sequence
  Cyclic GFR-binding peptide
  MOD_RES (28)..(29): Xaa is C or S
IMEYQKYIKPTKGIIFLISIPSLDQSVXX

SEQ ID NO: 50969 - protein, 36 aa, Artificial Sequence; identical to SEQ ID NO: 10225
  Cyclic GFR-binding peptide
  MOD_RES (32)..(33): Xaa is C or S

SEQ ID NO: 50970 - protein, 31 aa, Artificial Sequence
  Cyclic GFR-binding peptide
  MOD_RES (30)..(30): Xaa is C or S
VVMNNSLQEIVNSSDDYYLVTLPELKTPAXT

SEQ ID NO: 50971 - protein, 25 aa, Artificial Sequence
  Cyclic GFR-binding peptide
VVMDNSLQEVVNNASDYYLITLPEL

SEQ ID NO: 50972 - protein, 30 aa, Artificial Sequence
  Cyclic GFR-binding peptide
  MOD_RES (1)..(3): Xaa is C or S
XGXARVVMNEYQKYIVNSSDDIFLVSIPSL

SEQ ID NO: 50973 - protein, 27 aa, Artificial Sequence
  Cyclic GFR-binding peptide
  MOD_RES (1)..(1): Xaa is C or S
XGEVVMENSLQEVVKDYEDYYLMTLPE

SEQ ID NO: 50974 - protein, 38 aa, Artificial Sequence; identical to SEQ ID NO: 10228
  Cyclic GFR-binding peptide
  MOD_RES (2)..(34)..(35): Xaa is C or S

SEQ ID NO: 50975 - protein, 22 aa, Artificial Sequence
  Cyclic GFR-binding peptide
MNNSLQEIVNSSDDYYVVPLPE

SEQ ID NO: 50976 - protein, 41 aa, Artificial Sequence; identical to SEQ ID NO: 10229
  Cyclic GFR-binding peptide
  MOD_RES (2)..(4)..(35)..(36): Xaa is C or S

SEQ ID NO: 50977 - protein, 34 aa, Artificial Sequence
  Cyclic GFR-binding peptide
  MOD_RES (28)..(29): Xaa is C or S
MNNSLQEIVNSSDDYYVVPLPELQTPAXXPKPVT

SEQ ID NO: 50978 - protein, 33 aa, Artificial Sequence; identical to SEQ ID NO: 10230
  Cyclic GFR-binding peptide
  MOD_RES (2)..(33): Xaa is C or S

SEQ ID NO: 50979 - protein, 31 aa, Artificial Sequence
  Cyclic GFR-binding peptide
  MOD_RES (27)..(28): Xaa is C or S
DNSLQEVVNNASDYYVIPLPELRTPVXXTPP

SEQ ID NO: 50980 - protein, 30 aa, Artificial Sequence
  Cyclic GFR-binding peptide
  MOD_RES (2)..(4): Xaa is C or S
RXGXSEVVMDNSLQEVVNNASDYYLITLPE

SEQ ID NO: 50981 - protein, 30 aa, Artificial Sequence; identical to SEQ ID NO: 10232
  Cyclic GFR-binding peptide

SEQ ID NO: 50982 - protein, 39 aa, Artificial Sequence; identical to SEQ ID NO: 10233
  Cyclic GFR-binding peptide
  MOD_RES (1)..(3)..(34)..(35): Xaa is C or S

SEQ ID NO: 50983 - protein, 41 aa, Artificial Sequence; identical to SEQ ID NO: 10235
  Cyclic GFR-binding peptide
  MOD_RES (2)..(4)..(36)..(37): Xaa is C or S

SEQ ID NO: 50984 - protein, 34 aa, Artificial Sequence
  Cyclic GFR-binding peptide
  MOD_RES (29)..(30): Xaa is C or S
VMNNSLQEIVNSSDDYYLVTLPELKTPAXXPKPV

SEQ ID NO: 50985 - protein, 33 aa, Artificial Sequence
  Cyclic GFR-binding peptide
  MOD_RES (1)..(3): Xaa is C or S
XGXGEVVMDEYQKYVVKENEDIFLMSIPSLETP

SEQ ID NO: 50986 - protein, 32 aa, Artificial Sequence
  Cyclic GFR-binding peptide
  MOD_RES (27)..(28): Xaa is C or S
MEYQKYVKPTRGVIFLISIPSLDQPVXXPSAS

SEQ ID NO: 50987 - protein, 36 aa, Artificial Sequence; identical to SEQ ID NO: 10239
  Cyclic GFR-binding peptide
  MOD_RES (1)..(3)..(35)..(36): Xaa is C or S

SEQ ID NO: 50988 - protein, 36 aa, Artificial Sequence; identical to SEQ ID NO: 10240
  Cyclic GFR-binding peptide
  MOD_RES (31)..(32): Xaa is C or S

SEQ ID NO: 50989 - protein, 28 aa, Artificial Sequence
  Cyclic GFR-binding peptide
  MOD_RES (27)..(28): Xaa is C or S
NNSLQEIVNSSDDYYVVPLPELQTPAXX

SEQ ID NO: 50990 - protein, 28 aa, Artificial Sequence
  Cyclic GFR-binding peptide
  MOD_RES (26)..(27): Xaa is C or S
EYQKYIVNSSDDIFLVSIPSLKTPAXXP

SEQ ID NO: 50991 - protein, 32 aa, Artificial Sequence
  Cyclic GFR-binding peptide
  MOD_RES (1)..(3): Xaa is C or S
XGXGEVVMDNSLQEVVKENEDYYLMTLPELET

SEQ ID NO: 50992 - protein, 27 aa, Artificial Sequence
  Cyclic GFR-binding peptide
SKVVMNSLQEVKPTRGVYYVIPLPELD

SEQ ID NO: 50993 - protein, 23 aa, Artificial Sequence
  Cyclic GFR-binding peptide
VMDQYNKLVVNNASDLYLISIAS

SEQ ID NO: 50994 - protein, 36 aa, Artificial Sequence; identical to SEQ ID NO: 10241
  Cyclic GFR-binding peptide
  MOD_RES (31)..(32): Xaa is C or S

SEQ ID NO: 50995 - protein, 34 aa, Artificial Sequence; identical to SEQ ID NO: 10242
  Cyclic GFR-binding peptide
  MOD_RES (2)..(34): Xaa is C or S

SEQ ID NO: 50996 - protein, 31 aa, Artificial Sequence
  Cyclic GFR-binding peptide
  MOD_RES (1)..(1): Xaa is C or S
XSRVVMNNSLQEIVNSSDDYYVVPLPELKTP

SEQ ID NO: 50997 - protein, 34 aa, Artificial Sequence; identical to SEQ ID NO: 10243
  Cyclic GFR-binding peptide
  MOD_RES (2)..(34): Xaa is C or S

SEQ ID NO: 50998 - protein, 36 aa, Artificial Sequence; identical to SEQ ID NO: 10244
  Cyclic GFR-binding peptide
  MOD_RES (1)..(32)..(33): Xaa is C or S

SEQ ID NO: 50999 - protein, 32 aa, Artificial Sequence
  Cyclic GFR-binding peptide
  MOD_RES (27)..(28): Xaa is C or S
ENSLQEVVKDYEDYYLMTLPELETPVXXAKPI

SEQ ID NO: 51000 - protein, 20 aa, Artificial Sequence
  Cyclic GFR-binding peptide
EYQKYVKPTRGVIFLISIPS

SEQ ID NO: 51001 - protein, 35 aa, Artificial Sequence; identical to SEQ ID NO: 10247
  Cyclic GFR-binding peptide
  MOD_RES (2)..(4)..(35): Xaa is C or S

SEQ ID NO: 51002 - protein, 27 aa, Artificial Sequence
  Cyclic GFR-binding peptide
  MOD_RES (27)..(27): Xaa is C or S
MEYQKYVKPTRGVIFLISIPSLDQPVX

SEQ ID NO: 51003 - protein, 29 aa, Artificial Sequence
  Cyclic GFR-binding peptide
  MOD_RES (29)..(29): Xaa is C or S
VMNNSLQEIVNSSDDYYLVTLPELKTPAX

SEQ ID NO: 51004 - protein, 27 aa, Artificial Sequence
  Cyclic GFR-binding peptide
  MOD_RES (1)..(1): Xaa is C or S
XSRVVMNNSLQEIVNSSDDYYLVTLPE

SEQ ID NO: 51005 - protein, 34 aa, Artificial Sequence; identical to SEQ ID NO: 10249
  Cyclic GFR-binding peptide
  MOD_RES (31)..(32): Xaa is C or S

SEQ ID NO: 51006 - protein, 31 aa, Artificial Sequence
  Cyclic GFR-binding peptide
  MOD_RES (30)..(31): Xaa is C or S
VVMNNSLQEIVNSSDDYYLVTLPELKTPAXX

SEQ ID NO: 51007 - protein, 39 aa, Artificial Sequence; identical to SEQ ID NO: 10253
  Cyclic GFR-binding peptide
  MOD_RES (2)..(34)..(35): Xaa is C or S

SEQ ID NO: 51008 - protein, 33 aa, Artificial Sequence
  Cyclic GFR-binding peptide
  MOD_RES (27)..(28): Xaa is C or S
DNSLQEVVKENEDYYLMTLPELETPVXXAKPIK

SEQ ID NO: 51009 - protein, 25 aa, Artificial Sequence
  Cyclic GFR-binding peptide
NNSLQEIVNSSDDYYLVTLPELQTP

SEQ ID NO: 51010 - protein, 35 aa, Artificial Sequence; identical to SEQ ID NO: 10254
  Cyclic GFR-binding peptide
  MOD_RES (2)..(34)..(35): Xaa is C or S

SEQ ID NO: 51011 - protein, 34 aa, Artificial Sequence; identical to SEQ ID NO: 10256
  Cyclic GFR-binding peptide
  MOD_RES (2)..(33)..(34): Xaa is C or S

SEQ ID NO: 51012 - protein, 26 aa, Artificial Sequence
  Cyclic GFR-binding peptide
EVVMEEYQKYVVKDYEDIFLMSIPSL

SEQ ID NO: 51013 - protein, 28 aa, Artificial Sequence
  Cyclic GFR-binding peptide
  MOD_RES (2)..(2): Xaa is C or S
KXSKVIMEYQKYIKPTKGIIFLISIPSL

SEQ ID NO: 51014 - protein, 21 aa, Artificial Sequence
  Cyclic GFR-binding peptide
NEYQKYIVNSSDDIFLVSIPS

SEQ ID NO: 51015 - protein, 26 aa, Artificial Sequence
  Cyclic GFR-binding peptide
KVVMEYQKYVKPTRGVIFLISIPSLD

SEQ ID NO: 51016 - protein, 35 aa, Artificial Sequence
  Cyclic GFR-binding peptide
  MOD_RES (30)..(31): Xaa is C or S
VVMENSLQEVVKDYEDYYLMTLPELETPVXXAKPI

SEQ ID NO: 51017 - protein, 31 aa, Artificial Sequence
  Cyclic GFR-binding peptide
  MOD_RES (30)..(31): Xaa is C or S
VVMDNSLQEVVKENEDYYVMPLPELETPVXX

SEQ ID NO: 51018 - protein, 28 aa, Artificial Sequence
  Cyclic GFR-binding peptide
VMNNSLQEIVNSSDDYYLVTLPELQTPA

SEQ ID NO: 51019 - protein, 34 aa, Artificial Sequence; identical to SEQ ID NO: 10258
  Cyclic GFR-binding peptide
  MOD_RES (31)..(32): Xaa is C or S

SEQ ID NO: 51020 - protein, 29 aa, Artificial Sequence
  Cyclic GFR-binding peptide
  MOD_RES (1)..(1): Xaa is C or S
XGEVVMENSLQEVVKDYEDYYVMPLPELE

SEQ ID NO: 51021 - protein, 33 aa, Artificial Sequence; identical to SEQ ID NO: 10259
  Cyclic GFR-binding peptide
  MOD_RES (32)..(33): Xaa is C or S

SEQ ID NO: 51022 - protein, 27 aa, Artificial Sequence
  Cyclic GFR-binding peptide
  MOD_RES (1)..(1): Xaa is C or S
XSKVVMNSLQEVKPTRGVYYVIPLPEL

SEQ ID NO: 51023 - protein, 22 aa, Artificial Sequence
  Cyclic GFR-binding peptide
EYQKYIVNSSDDIFLVSIPSLK

SEQ ID NO: 51024 - protein, 32 aa, Artificial Sequence
  Cyclic GFR-binding peptide
  MOD_RES (30)..(31): Xaa is C or S
VVMDNSLQEVVNNASDYYLITLPELRTPVXXT

SEQ ID NO: 51025 - protein, 25 aa, Artificial Sequence
  Cyclic GFR-binding peptide
VMDNSLQEVVKENEDYYVMPLPELE

SEQ ID NO: 51026 - protein, 27 aa, Artificial Sequence
  Cyclic GFR-binding peptide
VVMNSLQEVKPTRGVYYVIPLPELDQP

SEQ ID NO: 51027 - protein, 30 aa, Artificial Sequence
  Cyclic GFR-binding peptide
  MOD_RES (2)..(2): Xaa is C or S
GXARVVMNEYQKYIVNSSDDIFLVSIPSLQ

SEQ ID NO: 51028 - protein, 30 aa, Artificial Sequence
  Cyclic GFR-binding peptide
  MOD_RES (26)..(27): Xaa is C or S
EYQKYVVKENEDIFLMSIPSLETPVXXAKP

SEQ ID NO: 51029 - protein, 33 aa, Artificial Sequence; identical to SEQ ID NO: 10262
  Cyclic GFR-binding peptide
  MOD_RES (2)..(33): Xaa is C or S

SEQ ID NO: 51030 - protein, 31 aa, Artificial Sequence
  Cyclic GFR-binding peptide
  MOD_RES (2)..(2): Xaa is C or S
GXGEVVMEEYQKYVVKDYEDIFLMSIPSLET

SEQ ID NO: 51031 - protein, 32 aa, Artificial Sequence
  Cyclic GFR-binding peptide
  MOD_RES (28)..(29): Xaa is C or S
MNNSLQEIVNSSDDYYVVPLPELQTPAXXPKP

SEQ ID NO: 51032 - protein, 38 aa, Artificial Sequence; identical to SEQ ID NO: 10264
  Cyclic GFR-binding peptide
  MOD_RES (2)..(4)..(36): Xaa is C or S

SEQ ID NO: 51033 - protein, 35 aa, Artificial Sequence; identical to SEQ ID NO: 10265
  Cyclic GFR-binding peptide
  MOD_RES (32)..(32): Xaa is C or S

SEQ ID NO: 51034 - protein, 24 aa, Artificial Sequence
  Cyclic GFR-binding peptide
MNNSLQEIVNSSDDYYLVTLPELQ

SEQ ID NO: 51035 - protein, 35 aa, Artificial Sequence; identical to SEQ ID NO: 10266
  Cyclic GFR-binding peptide
  MOD_RES (1)..(3)..(35): Xaa is C or S

SEQ ID NO: 51036 - protein, 38 aa, Artificial Sequence; identical to SEQ ID NO: 10267
  Cyclic GFR-binding peptide
  MOD_RES (2)..(33)..(34): Xaa is C or S

SEQ ID NO: 51037 - protein, 29 aa, Artificial Sequence
  Cyclic GFR-binding peptide
  MOD_RES (28)..(29): Xaa is C or S
VMNSLQEVKPTRGVYYVIPLPELDQPVXX

SEQ ID NO: 51038 - protein, 23 aa, Artificial Sequence
  Cyclic GFR-binding peptide
MNNSLQEIVNSSDDYYLVTLPEL

SEQ ID NO: 51039 - protein, 30 aa, Artificial Sequence
  Cyclic GFR-binding peptide
  MOD_RES (2)..(4): Xaa is C or S
RXGXGEVVMDNSLQEVVKENEDYYVMPLPE

SEQ ID NO: 51040 - protein, 31 aa, Artificial Sequence
  Cyclic GFR-binding peptide
  MOD_RES (30)..(31): Xaa is C or S
VVMNNSLQEIVNSSDDYYVVPLPELKTPAXX

SEQ ID NO: 51041 - protein, 31 aa, Artificial Sequence
  Cyclic GFR-binding peptide
  MOD_RES (2)..(2): Xaa is C or S
GXSRVVMNEYQKYIVNSSDDIFLVSIPSLKT

SEQ ID NO: 51042 - protein, 22 aa, Artificial Sequence
  Cyclic GFR-binding peptide
DNSLQEVVNNASDYYLITLPEL

SEQ ID NO: 51043 - protein, 37 aa, Artificial Sequence; identical to SEQ ID NO: 10270
  Cyclic GFR-binding peptide
  MOD_RES (1)..(3)..(35)..(36): Xaa is C or S

SEQ ID NO: 51044 - protein, 30 aa, Artificial Sequence
  Cyclic GFR-binding peptide
  MOD_RES (29)..(30): Xaa is C or S
VIMEYQKYVKPKRGVIFLISIPSLAQPVXX

SEQ ID NO: 51045 - protein, 28 aa, Artificial Sequence
  Cyclic GFR-binding peptide
SKVIMEYQKYIKPTKGIIFLISIPSLDQ

SEQ ID NO: 51046 - protein, 33 aa, Artificial Sequence
  Cyclic GFR-binding peptide
  MOD_RES (27)..(28): Xaa is C or S
DNSLQEVVKENEDYYVMPLPELETPVXXAKPIK

SEQ ID NO: 51047 - protein, 37 aa, Artificial Sequence; identical to SEQ ID NO: 10276
  Cyclic GFR-binding peptide
  MOD_RES (1)..(32)..(33): Xaa is C or S

SEQ ID NO: 51048 - protein, 27 aa, Artificial Sequence
  Cyclic GFR-binding peptide
  MOD_RES (1)..(1): Xaa is C or S
XSEVVMDRYKKLVVNNASDFYLISIAN

SEQ ID NO: 51049 - protein, 37 aa, Artificial Sequence; identical to SEQ ID NO: 10277
  Cyclic GFR-binding peptide
  MOD_RES (31)..(32): Xaa is C or S

SEQ ID NO: 51050 - protein, 38 aa, Artificial Sequence; identical to SEQ ID NO: 10279
  Cyclic GFR-binding peptide
  MOD_RES (1)..(3)..(35)..(36): Xaa is C or S

SEQ ID NO: 51051 - protein, 22 aa, Artificial Sequence
  Cyclic GFR-binding peptide
MNSLQEVKPTRGVYYVIPLPEL

SEQ ID NO: 51052 - protein, 33 aa, Artificial Sequence
  Cyclic GFR-binding peptide
  MOD_RES (28)..(29): Xaa is C or S
MNNSLQEIVNSSDDYYLVTLPELKTPAXXPKPV

SEQ ID NO: 51053 - protein, 31 aa, Artificial Sequence
  Cyclic GFR-binding peptide
  MOD_RES (1)..(1): Xaa is C or S
XGEVVMENSLQEVVKDYEDYYVMPLPELETP

SEQ ID NO: 51054 - protein, 28 aa, Artificial Sequence
  Cyclic GFR-binding peptide
  MOD_RES (28)..(28): Xaa is C or S
MNNSLQEIVNSSDDYYLVTLPELQTPAX

SEQ ID NO: 51055 - protein, 32 aa, Artificial Sequence
  Cyclic GFR-binding peptide
  MOD_RES (30)..(31): Xaa is C or S
RVIMNSLQEVKPKRGVYYLITLPELAQPVXXP

SEQ ID NO: 51056 - protein, 36 aa, Artificial Sequence; identical to SEQ ID NO: 10283
  Cyclic GFR-binding peptide
  MOD_RES (32)..(33): Xaa is C or S

SEQ ID NO: 51057 - protein, 32 aa, Artificial Sequence
  Cyclic GFR-binding peptide
  MOD_RES (26)..(26): Xaa is C or S
NSLQEIVNSSDDYYVVPLPELKTPAXTPKTVH

SEQ ID NO: 51058 - protein, 30 aa, Artificial Sequence
  Cyclic GFR-binding peptide
  MOD_RES (2)..(4): Xaa is C or S
RXGXGEVVMEEYQKYVVKDYEDIFLMSIPS

SEQ ID NO: 51059 - protein, 36 aa, Artificial Sequence; identical to SEQ ID NO: 10285
  Cyclic GFR-binding peptide
  MOD_RES (1)..(33)..(34): Xaa is C or S

SEQ ID NO: 51060 - protein, 25 aa, Artificial Sequence
  Cyclic GFR-binding peptide
MDNSLQEVVNNASDYYVIPLPELRT

SEQ ID NO: 51061 - protein, 38 aa, Artificial Sequence; identical to SEQ ID NO: 10287
  Cyclic GFR-binding peptide
  MOD_RES (1)..(33)..(34): Xaa is C or S

SEQ ID NO: 51062 - protein, 31 aa, Artificial Sequence
  Cyclic GFR-binding peptide
  MOD_RES (2)..(4): Xaa is C or S
RXGXSEVVMDQYNKLVVNNASDLYLISIASL

SEQ ID NO: 51063 - protein, 22 aa, Artificial Sequence
  Cyclic GFR-binding peptide
EYQKYVKPTRGVIFLISIPSLD

SEQ ID NO: 51064 - protein, 23 aa, Artificial Sequence
  Cyclic GFR-binding peptide
MEYQKYIKPTKGIIFLISIPSLD

SEQ ID NO: 51065 - protein, 32 aa, Artificial Sequence; identical to SEQ ID NO: 10293
  Cyclic GFR-binding peptide
  MOD_RES (1)..(1): Xaa is C or S

SEQ ID NO: 51066 - protein, 32 aa, Artificial Sequence
  Cyclic GFR-binding peptide
  MOD_RES (1)..(3): Xaa is C or S
XGXARVVMNNSLQEIVNSSDDYYVVPLPELQT

SEQ ID NO: 51067 - protein, 33 aa, Artificial Sequence; identical to SEQ ID NO: 10296
  Cyclic GFR-binding peptide
  MOD_RES (31)..(32): Xaa is C or S

SEQ ID NO: 51068 - protein, 24 aa, Artificial Sequence
  Cyclic GFR-binding peptide
MEYQKYIKPTKGIIFLISIPSLDQ

SEQ ID NO: 51069 - protein, 32 aa, Artificial Sequence
  Cyclic GFR-binding peptide
  MOD_RES (26)..(27): Xaa is C or S
EYQKYVKPKRGVIFLISIPSLAQPVXXPAASA

SEQ ID NO: 51070 - protein, 25 aa, Artificial Sequence
  Cyclic GFR-binding peptide
VVMENSLQEVVKDYEDYYVMPLPEL

SEQ ID NO: 51071 - protein, 29 aa, Artificial Sequence
  Cyclic GFR-binding peptide
  MOD_RES (29)..(29): Xaa is C or S
VIMEYQKYVKPKRGVIFLISIPSLAQPVX

SEQ ID NO: 51072 - protein, 25 aa, Artificial Sequence
  Cyclic GFR-binding peptide
MEEYQKYVVKDYEDIFLMSIPSLET

SEQ ID NO: 51073 - protein, 39 aa, Artificial Sequence; identical to SEQ ID NO: 10297
  Cyclic GFR-binding peptide
  MOD_RES (2)..(4)..(36)..(37): Xaa is C or S

SEQ ID NO: 51074 - protein, 34 aa, Artificial Sequence; identical to SEQ ID NO: 10298
  Cyclic GFR-binding peptide
  MOD_RES (31)..(32): Xaa is C or S

SEQ ID NO: 51075 - protein, 36 aa, Artificial Sequence; identical to SEQ ID NO: 10299
  Cyclic GFR-binding peptide
  MOD_RES (1)..(33)..(34): Xaa is C or S

SEQ ID NO: 51076 - protein, 35 aa, Artificial Sequence; identical to SEQ ID NO: 10300
  Cyclic GFR-binding peptide
  MOD_RES (2)..(4): Xaa is C or S

SEQ ID NO: 51077 - protein, 32 aa, Artificial Sequence; identical to SEQ ID NO: 10301
  Cyclic GFR-binding peptide
  MOD_RES (31)..(32): Xaa is C or S

SEQ ID NO: 51078 - protein, 31 aa, Artificial Sequence
  Cyclic GFR-binding peptide
  MOD_RES (28)..(29): Xaa is C or S
MDNSLQEVVKENEDYYVMPLPELETPVXXAK

SEQ ID NO: 51079 - protein, 35 aa, Artificial Sequence
  Cyclic GFR-binding peptide
  MOD_RES (29)..(30): Xaa is C or S
VMNNSLQEIVNSSDDYYVVPLPELKTPAXXPKPVY

SEQ ID NO: 51080 - protein, 34 aa, Artificial Sequence; identical to SEQ ID NO: 10302
  Cyclic GFR-binding peptide
  MOD_RES (1)..(33)..(34): Xaa is C or S

SEQ ID NO: 51081 - protein, 30 aa, Artificial Sequence
  Cyclic GFR-binding peptide
  MOD_RES (2)..(4): Xaa is C or S
RXGXSEVVMDRYKKLVVNNASDFYLISIAN

SEQ ID NO: 51082 - protein, 31 aa, Artificial Sequence; identical to SEQ ID NO: 10303
  Cyclic GFR-binding peptide
  MOD_RES (31)..(31): Xaa is C or S

SEQ ID NO: 51083 - protein, 28 aa, Artificial Sequence
  Cyclic GFR-binding peptide
SEVVMDNSLQEVVNNASDYYVIPLPELR

SEQ ID NO: 51084 - protein, 34 aa, Artificial Sequence; identical to SEQ ID NO: 10304
  Cyclic GFR-binding peptide
  MOD_RES (31)..(31): Xaa is C or S

SEQ ID NO: 51085 - protein, 35 aa, Artificial Sequence
  Cyclic GFR-binding peptide
  MOD_RES (29)..(30): Xaa is C or S
VMDNSLQEVVNNASDYYLITLPELRTPVXXTPPTS

SEQ ID NO: 51086 - protein, 35 aa, Artificial Sequence; identical to SEQ ID NO: 10305
  Cyclic GFR-binding peptide
  MOD_RES (1)..(33)..(34): Xaa is C or S

SEQ ID NO: 51087 - protein, 39 aa, Artificial Sequence; identical to SEQ ID NO: 10307
  Cyclic GFR-binding peptide
  MOD_RES (1)..(3)..(35)..(36): Xaa is C or S

SEQ ID NO: 51088 - protein, 32 aa, Artificial Sequence
  Cyclic GFR-binding peptide
  MOD_RES (30)..(31): Xaa is C or S
VVMNNSLQEIVNSSDDYYVVPLPELQTPAXXP

SEQ ID NO: 51089 - protein, 32 aa, Artificial Sequence
  Cyclic GFR-binding peptide
  MOD_RES (27)..(28): Xaa is C or S
ENSLQEVVKDYEDYYVMPLPELETPVXXAKPI

SEQ ID NO: 51090 - protein, 28 aa, Artificial Sequence
  Cyclic GFR-binding peptide
  MOD_RES (1)..(1): Xaa is C or S
XSEVVMDQYNKLVVNNASDLYLISIASL

SEQ ID NO: 51091 - protein, 34 aa, Artificial Sequence
  Cyclic GFR-binding peptide
  MOD_RES (30)..(31): Xaa is C or S
VVMDNSLQEVVKENEDYYVMPLPELETPVXXAKP

SEQ ID NO: 51092 - protein, 26 aa, Artificial Sequence
  Cyclic GFR-binding peptide
VVMNNSLQEIVNSSDDYYLVTLPELQ

SEQ ID NO: 51093 - protein, 29 aa, Artificial Sequence
  Cyclic GFR-binding peptide
  MOD_RES (29)..(29): Xaa is C or S
VMDNSLQEVVKENEDYYLMTLPELETPVX

SEQ ID NO: 51094 - protein, 37 aa, Artificial Sequence; identical to SEQ ID NO: 10312
  Cyclic GFR-binding peptide
  MOD_RES (2)..(4)..(36)..(37): Xaa is C or S

SEQ ID NO: 51095 - protein, 31 aa, Artificial Sequence
  Cyclic GFR-binding peptide
  MOD_RES (26)..(27): Xaa is C or S
NSLQEVVNNASDYYVIPLPELRTPVXXTPPT

SEQ ID NO: 51096 - protein, 37 aa, Artificial Sequence; identical to SEQ ID NO: 10313
  Cyclic GFR-binding peptide
  MOD_RES (2)..(34)..(35): Xaa is C or S

SEQ ID NO: 51097 - protein, 36 aa, Artificial Sequence; identical to SEQ ID NO: 10314
  Cyclic GFR-binding peptide
  MOD_RES (1)..(32)..(33): Xaa is C or S

SEQ ID NO: 51098 - protein, 29 aa, Artificial Sequence
  Cyclic GFR-binding peptide
  MOD_RES (27)..(28): Xaa is C or S
NNSLQEIVNSSDDYYLVTLPELQTPAXXP

SEQ ID NO: 51099 - protein, 31 aa, Artificial Sequence
  Cyclic GFR-binding peptide
  MOD_RES (1)..(3): Xaa is C or S
XKXSRVIMNSLQEVKPKRGVYYLITLPELAQ

SEQ ID NO: 51100 - protein, 28 aa, Artificial Sequence
  Cyclic GFR-binding peptide
  MOD_RES (28)..(28): Xaa is C or S
IMNSLQEIKPTKGIYYVIPLPELDQSVX

SEQ ID NO: 51101 - protein, 31 aa, Artificial Sequence
  Cyclic GFR-binding peptide
  MOD_RES (30)..(31): Xaa is C or S
VVMDEYQKYVVKENEDIFLMSIPSLETPVXX

SEQ ID NO: 51102 - protein, 36 aa, Artificial Sequence; identical to SEQ ID NO: 10317
  Cyclic GFR-binding peptide
  MOD_RES (32)..(33): Xaa is C or S

SEQ ID NO: 51103 - protein, 34 aa, Artificial Sequence
  Cyclic GFR-binding peptide
  MOD_RES (30)..(30): Xaa is C or S
VVMNNSLQEIVNSSDDYYLVTLPELKTPAXTPKT

SEQ ID NO: 51104 - protein, 30 aa, Artificial Sequence
  Cyclic GFR-binding peptide
  MOD_RES (29)..(30): Xaa is C or S
VMNNSLQEIVNSSDDYYVVPLPELKTPAXX

SEQ ID NO: 51105 - protein, 34 aa, Artificial Sequence; identical to SEQ ID NO: 10318
  Cyclic GFR-binding peptide
  MOD_RES (31)..(32): Xaa is C or S

SEQ ID NO: 51106 - protein, 20 aa, Artificial Sequence
  Cyclic GFR-binding peptide
NSLQEVVKENEDYYLMTLPE

SEQ ID NO: 51107 - protein, 34 aa, Artificial Sequence; identical to SEQ ID NO: 10320
  Cyclic GFR-binding peptide
  MOD_RES (31)..(32): Xaa is C or S

SEQ ID NO: 51108 - protein, 32 aa, Artificial Sequence
  Cyclic GFR-binding peptide
  MOD_RES (2)..(4): Xaa is C or S
HXGXARVVMNNSLQEIVNSSDDYYVVPLPELQ

SEQ ID NO: 51109 - protein, 33 aa, Artificial Sequence; identical to SEQ ID NO: 10322
  Cyclic GFR-binding peptide
  MOD_RES (1)..(33): Xaa is C or S

SEQ ID NO: 51110 - protein, 36 aa, Artificial Sequence; identical to SEQ ID NO: 10323
  Cyclic GFR-binding peptide
  MOD_RES (1)..(33)..(34): Xaa is C or S

SEQ ID NO: 51111 - protein, 34 aa, Artificial Sequence; identical to SEQ ID NO: 10324
  Cyclic GFR-binding peptide
  MOD_RES (31)..(32): Xaa is C or S

SEQ ID NO: 51112 - protein, 36 aa, Artificial Sequence; identical to SEQ ID NO: 10325
  Cyclic GFR-binding peptide
  MOD_RES (31)..(32): Xaa is C or S

SEQ ID NO: 51113 - protein, 28 aa, Artificial Sequence
  Cyclic GFR-binding peptide
  MOD_RES (27)..(28): Xaa is C or S
NNSLQEIVNSSDDYYVVPLPELKTPAXX

SEQ ID NO: 51114 - protein, 36 aa, Artificial Sequence; identical to SEQ ID NO: 10327
  Cyclic GFR-binding peptide
  MOD_RES (2)..(34)..(35): Xaa is C or S

SEQ ID NO: 51115 - protein, 39 aa, Artificial Sequence; identical to SEQ ID NO: 10331
  Cyclic GFR-binding peptide
  MOD_RES (1)..(33)..(34): Xaa is C or S

SEQ ID NO: 51116 - protein, 41 aa, Artificial Sequence; identical to SEQ ID NO: 10333
  Cyclic GFR-binding peptide
  MOD_RES (2)..(4)..(35)..(36): Xaa is C or S

SEQ ID NO: 51117 - protein, 39 aa, Artificial Sequence; identical to SEQ ID NO: 10334
  Cyclic GFR-binding peptide
  MOD_RES (2)..(4)..(35)..(36): Xaa is C or S

SEQ ID NO: 51118 - protein, 39 aa, Artificial Sequence; identical to SEQ ID NO: 10335
  Cyclic GFR-binding peptide
  MOD_RES (1)..(33)..(34): Xaa is C or S

SEQ ID NO: 51119 - protein, 24 aa, Artificial Sequence
  Cyclic GFR-binding peptide
VIMEYQKYIKPTKGIIFLISIPSL

SEQ ID NO: 51120 - protein, 23 aa, Artificial Sequence
  Cyclic GFR-binding peptide
IMEYQKYVKPKRGVIFLISIPSL

SEQ ID NO: 51121 - protein, 31 aa, Artificial Sequence
  Cyclic GFR-binding peptide
  MOD_RES (27)..(28): Xaa is C or S
MEYQKYVKPTRGVIFLISIPSLDQPVXXPSA

SEQ ID NO: 51122 - protein, 37 aa, Artificial Sequence; identical to SEQ ID NO: 10337
  Cyclic GFR-binding peptide
  MOD_RES (2)..(34)..(35): Xaa is C or S

SEQ ID NO: 51123 - protein, 37 aa, Artificial Sequence; identical to SEQ ID NO: 10338
  Cyclic GFR-binding peptide
  MOD_RES (31)..(32): Xaa is C or S

SEQ ID NO: 51124 - protein, 31 aa, Artificial Sequence
  Cyclic GFR-binding peptide
  MOD_RES (28)..(29): Xaa is C or S
MDRYKKLVVNNASDFYLISIANLRTPVXXTP

SEQ ID NO: 51125 - protein, 32 aa, Artificial Sequence; identical to SEQ ID NO: 10340
  Cyclic GFR-binding peptide
  MOD_RES (32)..(32): Xaa is C or S

SEQ ID NO: 51126 - protein, 39 aa, Artificial Sequence; identical to SEQ ID NO: 10341
  Cyclic GFR-binding peptide
  MOD_RES (1)..(3)..(35)..(36): Xaa is C or S

SEQ ID NO: 51127 - protein, 22 aa, Artificial Sequence
  Cyclic GFR-binding peptide
MEYQKYVKPKRGVIFLISIPSL

SEQ ID NO: 51128 - protein, 36 aa, Artificial Sequence
  Cyclic GFR-binding peptide
  MOD_RES (30)..(31): Xaa is C or S
KVIMNSLQEIKPTKGIYYVIPLPELDQSVXXPSASA

SEQ ID NO: 51129 - protein, 26 aa, Artificial Sequence
  Cyclic GFR-binding peptide
VMNNSLQEIVNSSDDYYLVTLPELKT

SEQ ID NO: 51130 - protein, 42 aa, Artificial Sequence; identical to SEQ ID NO: 10343
  Cyclic GFR-binding peptide
  MOD_RES (2)..(4)..(36)..(37): Xaa is C or S

SEQ ID NO: 51131 - protein, 32 aa, Artificial Sequence; identical to SEQ ID NO: 10345
  Cyclic GFR-binding peptide
  MOD_RES (1)..(1): Xaa is C or S

SEQ ID NO: 51132 - protein, 38 aa, Artificial Sequence; identical to SEQ ID NO: 10346
  Cyclic GFR-binding peptide
  MOD_RES (2)..(4)..(36)..(37): Xaa is C or S

SEQ ID NO: 51133 - protein, 28 aa, Artificial Sequence
  Cyclic GFR-binding peptide
ARVVMNEYQKYIVNSSDDIFLVSIPSLQ

SEQ ID NO: 51134 - protein, 30 aa, Artificial Sequence
  Cyclic GFR-binding peptide
  MOD_RES (26)..(27): Xaa is C or S
NSLQEVVKDYEDYYLMTLPELETPVXXAKP

SEQ ID NO: 51135 - protein, 35 aa, Artificial Sequence; identical to SEQ ID NO: 10351
  Cyclic GFR-binding peptide
  MOD_RES (2)..(34)..(35): Xaa is C or S

SEQ ID NO: 51136 - protein, 26 aa, Artificial Sequence
  Cyclic GFR-binding peptide
SRVVMNEYQKYIVNSSDDIFLVSIPS

SEQ ID NO: 51137 - protein, 33 aa, Artificial Sequence; identical to SEQ ID NO: 10353
  Cyclic GFR-binding peptide
  MOD_RES (32)..(32): Xaa is C or S

SEQ ID NO: 51138 - protein, 39 aa, Artificial Sequence; identical to SEQ ID NO: 10354
  Cyclic GFR-binding peptide
  MOD_RES (2)..(33)..(34): Xaa is C or S

SEQ ID NO: 51139 - protein, 31 aa, Artificial Sequence
  Cyclic GFR-binding peptide
  MOD_RES (26)..(27): Xaa is C or S
NSLQEVVKDYEDYYLMTLPELETPVXXAKPI

SEQ ID NO: 51140 - protein, 28 aa, Artificial Sequence
  Cyclic GFR-binding peptide
EVVMEEYQKYVVKDYEDIFLMSIPSLET

SEQ ID NO: 51141 - protein, 34 aa, Artificial Sequence; identical to SEQ ID NO: 10355
  Cyclic GFR-binding peptide
  MOD_RES (2)..(4): Xaa is C or S

SEQ ID NO: 51142 - protein, 29 aa, Artificial Sequence
  Cyclic GFR-binding peptide
  MOD_RES (1)..(1): Xaa is C or S
XSEVVMDQYNKLVVNNASDLYLISIASLR

SEQ ID NO: 51143 - protein, 39 aa, Artificial Sequence; identical to SEQ ID NO: 10356
  Cyclic GFR-binding peptide
  MOD_RES (2)..(4)..(36)..(37): Xaa is C or S

SEQ ID NO: 51144 - protein, 24 aa, Artificial Sequence
  Cyclic GFR-binding peptide
EYQKYVKPTRGVIFLISIPSLDQP

SEQ ID NO: 51145 - protein, 30 aa, Artificial Sequence
  Cyclic GFR-binding peptide
  MOD_RES (30)..(30): Xaa is C or S
VVMNNSLQEIVNSSDDYYVVPLPELQTPAX

SEQ ID NO: 51146 - protein, 36 aa, Artificial Sequence; identical to SEQ ID NO: 10358
  Cyclic GFR-binding peptide
  MOD_RES (1)..(3)..(34)..(35): Xaa is C or S

SEQ ID NO: 51147 - protein, 36 aa, Artificial Sequence
  Cyclic GFR-binding peptide
  MOD_RES (30)..(31): Xaa is C or S
RVIMNSLQEVKPKRGVYYLITLPELAQPVXXPAASA

SEQ ID NO: 51148 - protein, 31 aa, Artificial Sequence
  Cyclic GFR-binding peptide
  MOD_RES (1)..(3): Xaa is C or S
XGXGEVVMENSLQEVVKDYEDYYVMPLPELE

SEQ ID NO: 51149 - protein, 28 aa, Artificial Sequence
  Cyclic GFR-binding peptide
  MOD_RES (26)..(27): Xaa is C or S
EYQKYIVNSSDDIFLVSIPSLQTPAXXP

SEQ ID NO: 51150 - protein, 27 aa, Artificial Sequence
  Cyclic GFR-binding peptide
VMNEYQKYIVNSSDDIFLVSIPSLKTP

SEQ ID NO: 51151 - protein, 38 aa, Artificial Sequence; identical to SEQ ID NO: 10360
  Cyclic GFR-binding peptide
  MOD_RES (1)..(33)..(34): Xaa is C or S

SEQ ID NO: 51152 - protein, 37 aa, Artificial Sequence; identical to SEQ ID NO: 10362
  Cyclic GFR-binding peptide
  MOD_RES (1)..(33)..(34): Xaa is C or S

SEQ ID NO: 51153 - protein, 35 aa, Artificial Sequence; identical to SEQ ID NO: 10363
  Cyclic GFR-binding peptide
  MOD_RES (1)..(32)..(33): Xaa is C or S

SEQ ID NO: 51154 - protein, 35 aa, Artificial Sequence; identical to SEQ ID NO: 10364
  Cyclic GFR-binding peptide
  MOD_RES (31)..(32): Xaa is C or S

SEQ ID NO: 51155 - protein, 32 aa, Artificial Sequence; identical to SEQ ID NO: 10365
  Cyclic GFR-binding peptide
  MOD_RES (1)..(32): Xaa is C or S

SEQ ID NO: 51156 - protein, 34 aa, Artificial Sequence
  Cyclic GFR-binding peptide
  MOD_RES (30)..(31): Xaa is C or S
KVIMNSLQEIKPTKGIYYVIPLPELDQSVXXPSA

SEQ ID NO: 51157 - protein, 30 aa, Artificial Sequence
  Cyclic GFR-binding peptide
  MOD_RES (29)..(30): Xaa is C or S
VVMNSLQEVKPTRGVYYVIPLPELDQPVXX

SEQ ID NO: 51158 - protein, 36 aa, Artificial Sequence; identical to SEQ ID NO: 10366
  Cyclic GFR-binding peptide
  MOD_RES (1)..(3)..(34)..(35): Xaa is C or S

SEQ ID NO: 51159 - protein, 23 aa, Artificial Sequence
  Cyclic GFR-binding peptide
NEYQKYIVNSSDDIFLVSIPSLK

SEQ ID NO: 51160 - protein, 31 aa, Artificial Sequence; identical to SEQ ID NO: 10367
  Cyclic GFR-binding peptide
  MOD_RES (1)..(1): Xaa is C or S

SEQ ID NO: 51161 - protein, 37 aa, Artificial Sequence; identical to SEQ ID NO: 10368
  Cyclic GFR-binding peptide
  MOD_RES (1)..(3)..(35)..(36): Xaa is C or S

SEQ ID NO: 51162 - protein, 31 aa, Artificial Sequence
  Cyclic GFR-binding peptide
  MOD_RES (1)..(1): Xaa is C or S
XARVVMNNSLQEIVNSSDDYYVVPLPELQTP

SEQ ID NO: 51163 - protein, 40 aa, Artificial Sequence; identical to SEQ ID NO: 10369
  Cyclic GFR-binding peptide
  MOD_RES (2)..(4)..(36)..(37): Xaa is C or S

SEQ ID NO: 51164 - protein, 26 aa, Artificial Sequence
  Cyclic GFR-binding peptide
ARVVMNEYQKYIVNSSDDIFLVSIPS

SEQ ID NO: 51165 - protein, 33 aa, Artificial Sequence
  Cyclic GFR-binding peptide
  MOD_RES (1)..(3): Xaa is C or S
XGXARVVMNEYQKYIVNSSDDIFLVSIPSLQTP

SEQ ID NO: 51166 - protein, 41 aa, Artificial Sequence; identical to SEQ ID NO: 10370
  Cyclic GFR-binding peptide
  MOD_RES (2)..(4)..(36)..(37): Xaa is C or S

SEQ ID NO: 51167 - protein, 32 aa, Artificial Sequence
  Cyclic GFR-binding peptide
  MOD_RES (30)..(31): Xaa is C or S
VVMEEYQKYVVKDYEDIFLMSIPSLETPVXXA

SEQ ID NO: 51168 - protein, 29 aa, Artificial Sequence
  Cyclic GFR-binding peptide
  MOD_RES (1)..(1): Xaa is C or S
XSRVVMNEYQKYIVNSSDDIFLVSIPSLK

SEQ ID NO: 51169 - protein, 30 aa, Artificial Sequence
  Cyclic GFR-binding peptide
  MOD_RES (29)..(30): Xaa is C or S
VMDNSLQEVVNNASDYYVIPLPELRTPVXX

SEQ ID NO: 51170 - protein, 35 aa, Artificial Sequence; identical to SEQ ID NO: 10373
  Cyclic GFR-binding peptide
  MOD_RES (32)..(33): Xaa is C or S

SEQ ID NO: 51171 - protein, 21 aa, Artificial Sequence
  Cyclic GFR-binding peptide
ENSLQEVVKDYEDYYVMPLPE

SEQ ID NO: 51172 - protein, 28 aa, Artificial Sequence
  Cyclic GFR-binding peptide
  MOD_RES (28)..(28): Xaa is C or S
IMNSLQEVKPKRGVYYLITLPELAQPVX

SEQ ID NO: 51173 - protein, 40 aa, Artificial Sequence; identical to SEQ ID NO: 10375
  Cyclic GFR-binding peptide
  MOD_RES (2)..(4)..(36)..(37): Xaa is C or S

SEQ ID NO: 51174 - protein, 38 aa, Artificial Sequence; identical to SEQ ID NO: 10376
  Cyclic GFR-binding peptide
  MOD_RES (2)..(4)..(36)..(37): Xaa is C or S

SEQ ID NO: 51175 - protein, 29 aa, Artificial Sequence
  Cyclic GFR-binding peptide
  MOD_RES (26)..(27): Xaa is C or S
NSLQEVVKDYEDYYLMTLPELETPVXXAK

SEQ ID NO: 51176 - protein, 36 aa, Artificial Sequence; identical to SEQ ID NO: 10380
  Cyclic GFR-binding peptide
  MOD_RES (1)..(33)..(34): Xaa is C or S

SEQ ID NO: 51177 - protein, 34 aa, Artificial Sequence
  Cyclic GFR-binding peptide
  MOD_RES (28)..(29): Xaa is C or S
MENSLQEVVKDYEDYYVMPLPELETPVXXAKPIS

SEQ ID NO: 51178 - protein, 40 aa, Artificial Sequence; identical to SEQ ID NO: 10382
  Cyclic GFR-binding peptide
  MOD_RES (2)..(4)..(36)..(37): Xaa is C or S

SEQ ID NO: 51179 - protein, 35 aa, Artificial Sequence; identical to SEQ ID NO: 10383
  Cyclic GFR-binding peptide
  MOD_RES (2)..(34)..(35): Xaa is C or S

SEQ ID NO: 51180 - protein, 29 aa, Artificial Sequence
  Cyclic GFR-binding peptide
  MOD_RES (2)..(2): Xaa is C or S
GXSEVVMDNSLQEVVNNASDYYLITLPEL

SEQ ID NO: 51181 - protein, 25 aa, Artificial Sequence
  Cyclic GFR-binding peptide
EVVMEEYQKYVVKDYEDIFLMSIPS

SEQ ID NO: 51182 - protein, 39 aa, Artificial Sequence; identical to SEQ ID NO: 10384
  Cyclic GFR-binding peptide
  MOD_RES (1)..(3)..(35)..(36): Xaa is C or S

SEQ ID NO: 51183 - protein, 28 aa, Artificial Sequence
  Cyclic GFR-binding peptide
  MOD_RES (28)..(28): Xaa is C or S
MDNSLQEVVKENEDYYVMPLPELETPVX

SEQ ID NO: 51184 - protein, 32 aa, Artificial Sequence
  Cyclic GFR-binding peptide
  MOD_RES (1)..(3): Xaa is C or S
XGXSRVVMNNSLQEIVNSSDDYYVVPLPELKT

SEQ ID NO: 51185 - protein, 37 aa, Artificial Sequence; identical to SEQ ID NO: 10386
  Cyclic GFR-binding peptide
  MOD_RES (32)..(33): Xaa is C or S

SEQ ID NO: 51186 - protein, 29 aa, Artificial Sequence
  Cyclic GFR-binding peptide
  MOD_RES (28)..(29): Xaa is C or S
MDNSLQEVVNNASDYYLITLPELRTPVXX

SEQ ID NO: 51187 - protein, 28 aa, Artificial Sequence
  Cyclic GFR-binding peptide
VVMNEYQKYIVNSSDDIFLVSIPSLQTP

SEQ ID NO: 51188 - protein, 25 aa, Artificial Sequence
  Cyclic GFR-binding peptide
VIMEYQKYIKPTKGIIFLISIPSLD

SEQ ID NO: 51189 - protein, 27 aa, Artificial Sequence
  Cyclic GFR-binding peptide
MNNSLQEIVNSSDDYYVVPLPELKTPA

SEQ ID NO: 51190 - protein, 29 aa, Artificial Sequence
  Cyclic GFR-binding peptide
  MOD_RES (2)..(2): Xaa is C or S
GXARVVMNEYQKYIVNSSDDIFLVSIPSL

SEQ ID NO: 51191 - protein, 32 aa, Artificial Sequence; identical to SEQ ID NO: 10391
  Cyclic GFR-binding peptide
  MOD_RES (31)..(32): Xaa is C or S

SEQ ID NO: 51192 - protein, 32 aa, Artificial Sequence; identical to SEQ ID NO: 10392
  Cyclic GFR-binding peptide
  MOD_RES (2)..(2): Xaa is C or S

SEQ ID NO: 51193 - protein, 36 aa, Artificial Sequence; identical to SEQ ID NO: 10393
  Cyclic GFR-binding peptide
  MOD_RES (1)..(3)..(34)..(35): Xaa is C or S

SEQ ID NO: 51194 - protein, 29 aa, Artificial Sequence
  Cyclic GFR-binding peptide
  MOD_RES (2)..(4): Xaa is C or S
SXKXSKVIMEYQKYIKPTKGIIFLISIPS

SEQ ID NO: 51195 - protein, 39 aa, Artificial Sequence; identical to SEQ ID NO: 10395
  Cyclic GFR-binding peptide
  MOD_RES (1)..(33)..(34): Xaa is C or S

SEQ ID NO: 51196 - protein, 27 aa, Artificial Sequence
  Cyclic GFR-binding peptide
  MOD_RES (26)..(27): Xaa is C or S
NSLQEIVNSSDDYYVVPLPELQTPAXX

SEQ ID NO: 51197 - protein, 40 aa, Artificial Sequence; identical to SEQ ID NO: 10397
  Cyclic GFR-binding peptide
  MOD_RES (2)..(4)..(35)..(36): Xaa is C or S

SEQ ID NO: 51198 - protein, 39 aa, Artificial Sequence; identical to SEQ ID NO: 10398
  Cyclic GFR-binding peptide
  MOD_RES (2)..(4)..(35)..(36): Xaa is C or S

SEQ ID NO: 51199 - protein, 30 aa, Artificial Sequence; identical to SEQ ID NO: 2099
  Cyclic GFR-binding peptide

SEQ ID NO: 51200 - protein, 35 aa, Artificial Sequence
  Cyclic GFR-binding peptide
  MOD_RES (29)..(30): Xaa is C or S
VIMNSLQEVKPKRGVYYLITLPELAQPVXXPAASA

SEQ ID NO: 51201 - protein, 29 aa, Artificial Sequence
  Cyclic GFR-binding peptide
  MOD_RES (28)..(29): Xaa is C or S
IMNSLQEIKPTKGIYYVIPLPELDQSVXX

SEQ ID NO: 51202 - protein, 37 aa, Artificial Sequence; identical to SEQ ID NO: 10406
  Cyclic GFR-binding peptide
  MOD_RES (31)..(32): Xaa is C or S

SEQ ID NO: 51203 - protein, 25 aa, Artificial Sequence
  Cyclic GFR-binding peptide
VMDNSLQEVVNNASDYYVIPLPELR

SEQ ID NO: 51204 - protein, 35 aa, Artificial Sequence
  Cyclic GFR-binding peptide
  MOD_RES (29)..(30): Xaa is C or S
VMDQYNKLVVNNASDLYLISIASLRTPVXXTPPTS

SEQ ID NO: 51205 - protein, 27 aa, Artificial Sequence
  Cyclic GFR-binding peptide
  MOD_RES (1)..(1): Xaa is C or S
XGEVVMDNSLQEVVKENEDYYVMPLPE

SEQ ID NO: 51206 - protein, 32 aa, Artificial Sequence
  Cyclic GFR-binding peptide
  MOD_RES (29)..(30): Xaa is C or S
VMNNSLQEIVNSSDDYYVVPLPELKTPAXXPK

SEQ ID NO: 51207 - protein, 38 aa, Artificial Sequence; identical to SEQ ID NO: 10409
  Cyclic GFR-binding peptide
  MOD_RES (2)..(4)..(36)..(37): Xaa is C or S

SEQ ID NO: 51208 - protein, 35 aa, Artificial Sequence; identical to SEQ ID NO: 10411
  Cyclic GFR-binding peptide
  MOD_RES (1)..(33)..(34): Xaa is C or S

SEQ ID NO: 51209 - protein, 34 aa, Artificial Sequence; identical to SEQ ID NO: 10412
  Cyclic GFR-binding peptide
  MOD_RES (2)..(34): Xaa is C or S

SEQ ID NO: 51210 - protein, 34 aa, Artificial Sequence; identical to SEQ ID NO: 10414
  Cyclic GFR-binding peptide
  MOD_RES (32)..(33): Xaa is C or S

SEQ ID NO: 51211 - protein, 37 aa, Artificial Sequence; identical to SEQ ID NO: 10416
  Cyclic GFR-binding peptide
  MOD_RES (2)..(4)..(36)..(37): Xaa is C or S

SEQ ID NO: 51212 - protein, 29 aa, Artificial Sequence
  Cyclic GFR-binding peptide
  MOD_RES (26)..(27): Xaa is C or S
RYKKLVVNNASDFYLISIANLRTPVXXTP

SEQ ID NO: 51213 - protein, 32 aa, Artificial Sequence
  Cyclic GFR-binding peptide
  MOD_RES (29)..(29): Xaa is C or S
VMNNSLQEIVNSSDDYYVVPLPELKTPAXTPK

SEQ ID NO: 51214 - protein, 30 aa, Artificial Sequence; identical to SEQ ID NO: 10421
  Cyclic GFR-binding peptide

SEQ ID NO: 51215 - protein, 31 aa, Artificial Sequence; identical to SEQ ID NO: 10422
  Cyclic GFR-binding peptide
  MOD_RES (1)..(1): Xaa is C or S

SEQ ID NO: 51216 - protein, 35 aa, Artificial Sequence; identical to SEQ ID NO: 10423
  Cyclic GFR-binding peptide
  MOD_RES (2)..(34)..(35): Xaa is C or S

SEQ ID NO: 51217 - protein, 35 aa, Artificial Sequence; identical to SEQ ID NO: 10424
  Cyclic GFR-binding peptide
  MOD_RES (2)..(34)..(35): Xaa is C or S

SEQ ID NO: 51218 - protein, 29 aa, Artificial Sequence
  Cyclic GFR-binding peptide
  MOD_RES (28)..(29): Xaa is C or S
MDNSLQEVVKENEDYYVMPLPELETPVXX

SEQ ID NO: 51219 - protein, 39 aa, Artificial Sequence; identical to SEQ ID NO: 10425
  Cyclic GFR-binding peptide
  MOD_RES (1)..(33): Xaa is C or S

SEQ ID NO: 51220 - protein, 32 aa, Artificial Sequence
  Cyclic GFR-binding peptide
  MOD_RES (2)..(2): Xaa is C or S
GXSEVVMDRYKKLVVNNASDFYLISIANLRTP

SEQ ID NO: 51221 - protein, 22 aa, Artificial Sequence
  Cyclic GFR-binding peptide
IMEYQKYIKPTKGIIFLISIPS

SEQ ID NO: 51222 - protein, 34 aa, Artificial Sequence; identical to SEQ ID NO: 10426
  Cyclic GFR-binding peptide
  MOD_RES (2)..(33)..(34): Xaa is C or S

SEQ ID NO: 51223 - protein, 32 aa, Artificial Sequence
  Cyclic GFR-binding peptide
  MOD_RES (2)..(2): Xaa is C or S
GXGEVVMDNSLQEVVKENEDYYLMTLPELETP

SEQ ID NO: 51224 - protein, 32 aa, Artificial Sequence; identical to SEQ ID NO: 10428
  Cyclic GFR-binding peptide
  MOD_RES (1)..(1): Xaa is C or S

SEQ ID NO: 51225 - protein, 31 aa, Artificial Sequence
  Cyclic GFR-binding peptide
  MOD_RES (28)..(28): Xaa is C or S
MNNSLQEIVNSSDDYYLVTLPELKTPAXTPK

SEQ ID NO: 51226 - protein, 27 aa, Artificial Sequence
  Cyclic GFR-binding peptide
  MOD_RES (27)..(27): Xaa is C or S
MEYQKYIKPTKGIIFLISIPSLDQSVX

SEQ ID NO: 51227 - protein, 34 aa, Artificial Sequence; identical to SEQ ID NO: 10430
  Cyclic GFR-binding peptide
  MOD_RES (1)..(33)..(34): Xaa is C or S

SEQ ID NO: 51228 - protein, 22 aa, Artificial Sequence
  Cyclic GFR-binding peptide
NSLQEVVNNASDYYVIPLPELR

SEQ ID NO: 51229 - protein, 34 aa, Artificial Sequence
  Cyclic GFR-binding peptide
  MOD_RES (28)..(29): Xaa is C or S
MDNSLQEVVKENEDYYLMTLPELETPVXXAKPIK

SEQ ID NO: 51230 - protein, 37 aa, Artificial Sequence; identical to SEQ ID NO: 10433
  Cyclic GFR-binding peptide
  MOD_RES (1)..(3)..(35)..(36): Xaa is C or S

SEQ ID NO: 51231 - protein, 22 aa, Artificial Sequence
  Cyclic GFR-binding peptide
EYQKYVVKDYEDIFLMSIPSLE

SEQ ID NO: 51232 - protein, 34 aa, Artificial Sequence; identical to SEQ ID NO: 10437
  Cyclic GFR-binding peptide
  MOD_RES (1)..(33): Xaa is C or S

SEQ ID NO: 51233 - protein, 32 aa, Artificial Sequence
  Cyclic GFR-binding peptide
  MOD_RES (29)..(30): Xaa is C or S
VMNNSLQEIVNSSDDYYLVTLPELQTPAXXPK

SEQ ID NO: 51234 - protein, 34 aa, Artificial Sequence
  Cyclic GFR-binding peptide
  MOD_RES (29)..(30): Xaa is C or S
VMNEYQKYIVNSSDDIFLVSIPSLQTPAXXPKPV

SEQ ID NO: 51235 - protein, 31 aa, Artificial Sequence
  Cyclic GFR-binding peptide
  MOD_RES (2)..(4): Xaa is C or S
HXGXSRVVMNNSLQEIVNSSDDYYLVTLPEL

SEQ ID NO: 51236 - protein, 29 aa, Artificial Sequence
  Cyclic GFR-binding peptide
  MOD_RES (1)..(1): Xaa is C or S
XSRVIMNSLQEVKPKRGVYYLITLPELAQ

SEQ ID NO: 51237 - protein, 27 aa, Artificial Sequence
  Cyclic GFR-binding peptide
MNNSLQEIVNSSDDYYLVTLPELQTPA

SEQ ID NO: 51238 - protein, 32 aa, Artificial Sequence
  Cyclic GFR-binding peptide
  MOD_RES (1)..(3): Xaa is C or S
XGXSRVVMNEYQKYIVNSSDDIFLVSIPSLKT

SEQ ID NO: 51239 - protein, 26 aa, Artificial Sequence
  Cyclic GFR-binding peptide
VVMNNSLQEIVNSSDDYYVVPLPELK

SEQ ID NO: 51240 - protein, 32 aa, Artificial Sequence; identical to SEQ ID NO: 10444
  Cyclic GFR-binding peptide
  MOD_RES (31)..(32): Xaa is C or S

SEQ ID NO: 51241 - protein, 31 aa, Artificial Sequence
  Cyclic GFR-binding peptide
  MOD_RES (26)..(27): Xaa is C or S
RYKKLVVNNASDFYLISIANLRTPVXXTPPT

SEQ ID NO: 51242 - protein, 30 aa, Artificial Sequence
  Cyclic GFR-binding peptide
  MOD_RES (26)..(27): Xaa is C or S
NSLQEVKPTRGVYYVIPLPELDQPVXXPSA

SEQ ID NO: 51243 - protein, 38 aa, Artificial Sequence; identical to SEQ ID NO: 10449
  Cyclic GFR-binding peptide
  MOD_RES (1)..(3)..(35)..(36): Xaa is C or S

SEQ ID NO: 51244 - protein, 39 aa, Artificial Sequence; identical to SEQ ID NO: 10450
  Cyclic GFR-binding peptide
  MOD_RES (1)..(3)..(35)..(36): Xaa is C or S

SEQ ID NO: 51245 - protein, 26 aa, Artificial Sequence
  Cyclic GFR-binding peptide
MNSLQEIKPTKGIYYVIPLPELDQSV

SEQ ID NO: 51246 - protein, 32 aa, Artificial Sequence; identical to SEQ ID NO: 10451
  Cyclic GFR-binding peptide
  MOD_RES (32)..(32): Xaa is C or S

SEQ ID NO: 51247 - protein, 40 aa, Artificial Sequence; identical to SEQ ID NO: 10452
  Cyclic GFR-binding peptide
  MOD_RES (2)..(34)..(35): Xaa is C or S

SEQ ID NO: 51248 - protein, 26 aa, Artificial Sequence
  Cyclic GFR-binding peptide
VVMNNSLQEIVNSSDDYYVVPLPELQ

SEQ ID NO: 51249 - protein, 35 aa, Artificial Sequence
  Cyclic GFR-binding peptide
  MOD_RES (30)..(31): Xaa is C or S
RVIMEYQKYVKPKRGVIFLISIPSLAQPVXXPAAS

SEQ ID NO: 51250 - protein, 31 aa, Artificial Sequence
  Cyclic GFR-binding peptide
  MOD_RES (1)..(1): Xaa is C or S
XGEVVMDEYQKYVVKENEDIFLMSIPSLETP

SEQ ID NO: 51251 - protein, 32 aa, Artificial Sequence
  Cyclic GFR-binding peptide
  MOD_RES (2)..(4): Xaa is C or S
HXGXARVVMNNSLQEIVNSSDDYYLVTLPELQ

SEQ ID NO: 51252 - protein, 33 aa, Artificial Sequence; identical to SEQ ID NO: 10457
  Cyclic GFR-binding peptide
  MOD_RES (31)..(32): Xaa is C or S

SEQ ID NO: 51253 - protein, 31 aa, Artificial Sequence
  Cyclic GFR-binding peptide
  MOD_RES (27)..(28): Xaa is C or S
NNSLQEIVNSSDDYYLVTLPELQTPAXXPKP

SEQ ID NO: 51254 - protein, 26 aa, Artificial Sequence
  Cyclic GFR-binding peptide
VIMEYQKYVKPKRGVIFLISIPSLAQ

SEQ ID NO: 51255 - protein, 37 aa, Artificial Sequence; identical to SEQ ID NO: 10459
  Cyclic GFR-binding peptide
  MOD_RES (1)..(3)..(35)..(36): Xaa is C or S

SEQ ID NO: 51256 - protein, 28 aa, Artificial Sequence
  Cyclic GFR-binding peptide
  MOD_RES (27)..(28): Xaa is C or S
NNSLQEIVNSSDDYYLVTLPELKTPAXX

SEQ ID NO: 51257 - protein, 39 aa, Artificial Sequence; identical to SEQ ID NO: 10460
  Cyclic GFR-binding peptide
  MOD_RES (2)..(34)..(35): Xaa is C or S

SEQ ID NO: 51258 - protein, 31 aa, Artificial Sequence
  Cyclic GFR-binding peptide
  MOD_RES (29)..(30): Xaa is C or S
VMNNSLQEIVNSSDDYYLVTLPELQTPAXXP

SEQ ID NO: 51259 - protein, 29 aa, Artificial Sequence
  Cyclic GFR-binding peptide
  MOD_RES (2)..(4): Xaa is C or S
SXKXSKVIMNSLQEIKPTKGIYYVIPLPE

SEQ ID NO: 51260 - protein, 32 aa, Artificial Sequence
  Cyclic GFR-binding peptide
  MOD_RES (30)..(31): Xaa is C or S
KVIMEYQKYIKPTKGIIFLISIPSLDQSVXXP

SEQ ID NO: 51261 - protein, 24 aa, Artificial Sequence
  Cyclic GFR-binding peptide
MNSLQEVKPKRGVYYLITLPELAQ

SEQ ID NO: 51262 - protein, 28 aa, Artificial Sequence
  Cyclic GFR-binding peptide
  MOD_RES (27)..(28): Xaa is C or S
ENSLQEVVKDYEDYYLMTLPELETPVXX

SEQ ID NO: 51263 - protein, 33 aa, Artificial Sequence
  Cyclic GFR-binding peptide
  MOD_RES (29)..(30): Xaa is C or S
VIMEYQKYVKPKRGVIFLISIPSLAQPVXXPAA

SEQ ID NO: 51264 - protein, 38 aa, Artificial Sequence; identical to SEQ ID NO: 10462
  Cyclic GFR-binding peptide
  MOD_RES (2)..(4)..(36)..(37): Xaa is C or S

SEQ ID NO: 51265 - protein, 29 aa, Artificial Sequence
  Cyclic GFR-binding peptide
  MOD_RES (27)..(27): Xaa is C or S
NNSLQEIVNSSDDYYLVTLPELKTPAXTP

SEQ ID NO: 51266 - protein, 33 aa, Artificial Sequence
  Cyclic GFR-binding peptide
  MOD_RES (30)..(31): Xaa is C or S
VVMNNSLQEIVNSSDDYYLVTLPELKTPAXXPK

SEQ ID NO: 51267 - protein, 27 aa, Artificial Sequence
  Cyclic GFR-binding peptide
SRVIMEYQKYVKPKRGVIFLISIPSLA

SEQ ID NO: 51268 - protein, 31 aa, Artificial Sequence
  Cyclic GFR-binding peptide
  MOD_RES (2)..(4): Xaa is C or S
RXGXGEVVMDNSLQEVVKENEDYYLMTLPEL

SEQ ID NO: 51269 - protein, 33 aa, Artificial Sequence
  Cyclic GFR-binding peptide
  MOD_RES (1)..(3): Xaa is C or S
XGXSRVVMNNSLQEIVNSSDDYYLVTLPELKTP

SEQ ID NO: 51270 - protein, 38 aa, Artificial Sequence; identical to SEQ ID NO: 10468
  Cyclic GFR-binding peptide
  MOD_RES (2)..(34): Xaa is C or S

SEQ ID NO: 51271 - protein, 32 aa, Artificial Sequence
  Cyclic GFR-binding peptide
  MOD_RES (26)..(27): Xaa is C or S
NSLQEIVNSSDDYYVVPLPELQTPAXXPKPVT

SEQ ID NO: 51272 - protein, 23 aa, Artificial Sequence
  Cyclic GFR-binding peptide
QYNKLVVNNASDLYLISIASLRT

SEQ ID NO: 51273 - protein, 28 aa, Artificial Sequence
  Cyclic GFR-binding peptide
  MOD_RES (27)..(28): Xaa is C or S
ENSLQEVVKDYEDYYVMPLPELETPVXX

SEQ ID NO: 51274 - protein, 29 aa, Artificial Sequence
  Cyclic GFR-binding peptide
EVVMDNSLQEVVKENEDYYLMTLPELETP

SEQ ID NO: 51275 - protein, 29 aa, Artificial Sequence
  Cyclic GFR-binding peptide
  MOD_RES (2)..(2): Xaa is C or S
GXSEVVMDRYKKLVVNNASDFYLISIANL

SEQ ID NO: 51276 - protein, 33 aa, Artificial Sequence; identical to SEQ ID NO: 10470
  Cyclic GFR-binding peptide
  MOD_RES (2)..(2): Xaa is C or S

SEQ ID NO: 51277 - protein, 33 aa, Artificial Sequence
  Cyclic GFR-binding peptide
  MOD_RES (29)..(30): Xaa is C or S
VMDNSLQEVVNNASDYYVIPLPELRTPVXXTPP

SEQ ID NO: 51278 - protein, 32 aa, Artificial Sequence; identical to SEQ ID NO: 10471
  Cyclic GFR-binding peptide
  MOD_RES (1)..(1): Xaa is C or S

SEQ ID NO: 51279 - protein, 35 aa, Artificial Sequence
  Cyclic GFR-binding peptide
  MOD_RES (30)..(31): Xaa is C or S
VVMDNSLQEVVNNASDYYLITLPELRTPVXXTPPT

SEQ ID NO: 51280 - protein, 38 aa, Artificial Sequence; identical to SEQ ID NO: 10473
  Cyclic GFR-binding peptide
  MOD_RES (2)..(34)..(35): Xaa is C or S

SEQ ID NO: 51281 - protein, 35 aa, Artificial Sequence; identical to SEQ ID NO: 10475
  Cyclic GFR-binding peptide
  MOD_RES (1)..(33): Xaa is C or S

SEQ ID NO: 51282 - protein, 30 aa, Artificial Sequence
  Cyclic GFR-binding peptide
GEVVMENSLQEVVKDYEDYYVMPLPELETP

SEQ ID NO: 51283 - protein, 33 aa, Artificial Sequence; identical to SEQ ID NO: 10476
  Cyclic GFR-binding peptide
  MOD_RES (31)..(32): Xaa is C or S

SEQ ID NO: 51284 - protein, 32 aa, Artificial Sequence
  Cyclic GFR-binding peptide
  MOD_RES (1)..(3): Xaa is C or S
XGXSEVVMDRYKKLVVNNASDFYLISIANLRT

SEQ ID NO: 51285 - protein, 27 aa, Artificial Sequence
  Cyclic GFR-binding peptide
SEVVMDNSLQEVVNNASDYYVIPLPEL

SEQ ID NO: 51286 - protein, 30 aa, Artificial Sequence
  Cyclic GFR-binding peptide
  MOD_RES (27)..(28): Xaa is C or S
MEYQKYVKPKRGVIFLISIPSLAQPVXXPA

SEQ ID NO: 51287 - protein, 38 aa, Artificial Sequence; identical to SEQ ID NO: 10478
  Cyclic GFR-binding peptide
  MOD_RES (32)..(32): Xaa is C or S

SEQ ID NO: 51288 - protein, 31 aa, Artificial Sequence
  Cyclic GFR-binding peptide
  MOD_RES (27)..(28): Xaa is C or S
MEYQKYVKPKRGVIFLISIPSLAQPVXXPAA

SEQ ID NO: 51289 - protein, 31 aa, Artificial Sequence
  Cyclic GFR-binding peptide
  MOD_RES (1)..(1): Xaa is C or S
XARVVMNEYQKYIVNSSDDIFLVSIPSLQTP

SEQ ID NO: 51290 - protein, 40 aa, Artificial Sequence; identical to SEQ ID NO: 10479
  Cyclic GFR-binding peptide
  MOD_RES (1)..(3)..(35)..(36): Xaa is C or S

SEQ ID NO: 51291 - protein, 35 aa, Artificial Sequence; identical to SEQ ID NO: 10480
  Cyclic GFR-binding peptide
  MOD_RES (32)..(33): Xaa is C or S

SEQ ID NO: 51292 - protein, 35 aa, Artificial Sequence; identical to SEQ ID NO: 10483
  Cyclic GFR-binding peptide
  MOD_RES (31)..(32): Xaa is C or S

SEQ ID NO: 51293 - protein, 27 aa, Artificial Sequence
  Cyclic GFR-binding peptide
VVMEEYQKYVVKDYEDIFLMSIPSLET

SEQ ID NO: 51294 - protein, 35 aa, Artificial Sequence; identical to SEQ ID NO: 10484
  Cyclic GFR-binding peptide
  MOD_RES (2)..(33)..(34): Xaa is C or S

SEQ ID NO: 51295 - protein, 31 aa, Artificial Sequence
  Cyclic GFR-binding peptide
  MOD_RES (2)..(4): Xaa is C or S
HXGXSRVVMNEYQKYIVNSSDDIFLVSIPSL

SEQ ID NO: 51296 - protein, 31 aa, Artificial Sequence
  Cyclic GFR-binding peptide
  MOD_RES (27)..(28): Xaa is C or S
NNSLQEIVNSSDDYYVVPLPELQTPAXXPKP

SEQ ID NO: 51297 - protein, 27 aa, Artificial Sequence
  Cyclic GFR-binding peptide
EVVMENSLQEVVKDYEDYYVMPLPELE

SEQ ID NO: 51298 - protein, 40 aa, Artificial Sequence; identical to SEQ ID NO: 10486
  Cyclic GFR-binding peptide
  MOD_RES (2)..(4)..(36)..(37): Xaa is C or S

SEQ ID NO: 51299 - protein, 36 aa, Artificial Sequence; identical to SEQ ID NO: 10487
  Cyclic GFR-binding peptide
  MOD_RES (32)..(33): Xaa is C or S

SEQ ID NO: 51300 - protein, 31 aa, Artificial Sequence
  Cyclic GFR-binding peptide
  MOD_RES (2)..(2): Xaa is C or S
GXARVVMNEYQKYIVNSSDDIFLVSIPSLQT

SEQ ID NO: 51301 - protein, 26 aa, Artificial Sequence
  Cyclic GFR-binding peptide
  MOD_RES (26)..(26): Xaa is C or S
NSLQEIKPTKGIYYVIPLPELDQSVX

SEQ ID NO: 51302 - protein, 35 aa, Artificial Sequence; identical to SEQ ID NO: 10490
  Cyclic GFR-binding peptide
  MOD_RES (2)..(33)..(34): Xaa is C or S

SEQ ID NO: 51303 - protein, 36 aa, Artificial Sequence; identical to SEQ ID NO: 10492
  Cyclic GFR-binding peptide
  MOD_RES (31)..(31): Xaa is C or S

SEQ ID NO: 51304 - protein, 36 aa, Artificial Sequence; identical to SEQ ID NO: 10491
  Cyclic GFR-binding peptide
  MOD_RES (32)..(33): Xaa is C or S

SEQ ID NO: 51305 - protein, 31 aa, Artificial Sequence; identical to SEQ ID NO: 10494
  Cyclic GFR-binding peptide
  MOD_RES (31)..(31): Xaa is C or S

SEQ ID NO: 51306 - protein, 37 aa, Artificial Sequence; identical to SEQ ID NO: 10495
  Cyclic GFR-binding peptide
  MOD_RES (31)..(32): Xaa is C or S

SEQ ID NO: 51307 - protein, 32 aa, Artificial Sequence
  Cyclic GFR-binding peptide
  MOD_RES (26)..(27): Xaa is C or S
EYQKYVVKDYEDIFLMSIPSLETPVXXAKPIS

SEQ ID NO: 51308 - protein, 33 aa, Artificial Sequence
  Cyclic GFR-binding peptide
  MOD_RES (28)..(29): Xaa is C or S
IMEYQKYVKPKRGVIFLISIPSLAQPVXXPAAS

SEQ ID NO: 51309 - protein, 28 aa, Artificial Sequence
  Cyclic GFR-binding peptide
  MOD_RES (2)..(2): Xaa is C or S
KXSRVIMEYQKYVKPKRGVIFLISIPSL

SEQ ID NO: 51310 - protein, 34 aa, Artificial Sequence; identical to SEQ ID NO: 10497
  Cyclic GFR-binding peptide
  MOD_RES (1)..(33)..(34): Xaa is C or S

SEQ ID NO: 51311 - protein, 31 aa, Artificial Sequence
  Cyclic GFR-binding peptide
  MOD_RES (1)..(3): Xaa is C or S
XGXSEVVMDQYNKLVVNNASDLYLISIASLR

SEQ ID NO: 51312 - protein, 26 aa, Artificial Sequence
  Cyclic GFR-binding peptide
MEYQKYIKPTKGIIFLISIPSLDQSV

SEQ ID NO: 51313 - protein, 28 aa, Artificial Sequence
  Cyclic GFR-binding peptide
RVVMNNSLQEIVNSSDDYYVVPLPELQT

SEQ ID NO: 51314 - protein, 33 aa, Artificial Sequence; identical to SEQ ID NO: 10499
  Cyclic GFR-binding peptide
  MOD_RES (1)..(33): Xaa is C or S

SEQ ID NO: 51315 - protein, 32 aa, Artificial Sequence; identical to SEQ ID NO: 10501
  Cyclic GFR-binding peptide
  MOD_RES (1)..(32): Xaa is C or S

SEQ ID NO: 51316 - protein, 22 aa, Artificial Sequence
  Cyclic GFR-binding peptide
MDQYNKLVVNNASDLYLISIAS

SEQ ID NO: 51317 - protein, 37 aa, Artificial Sequence; identical to SEQ ID NO: 10505
  Cyclic GFR-binding peptide
  MOD_RES (1)..(33)..(34): Xaa is C or S

SEQ ID NO: 51318 - protein, 39 aa, Artificial Sequence; identical to SEQ ID NO: 10506
  Cyclic GFR-binding peptide
  MOD_RES (2)..(34)..(35): Xaa is C or S

SEQ ID NO: 51319 - protein, 31 aa, Artificial Sequence
  Cyclic GFR-binding peptide
  MOD_RES (1)..(1): Xaa is C or S
XGEVVMEEYQKYVVKDYEDIFLMSIPSLETP

SEQ ID NO: 51320 - protein, 27 aa, Artificial Sequence
  Cyclic GFR-binding peptide
VMNNSLQEIVNSSDDYYLVTLPELQTP

SEQ ID NO: 51321 - protein, 24 aa, Artificial Sequence
  Cyclic GFR-binding peptide
MNEYQKYIVNSSDDIFLVSIPSLK

SEQ ID NO: 51322 - protein, 36 aa, Artificial Sequence; identical to SEQ ID NO: 10508
  Cyclic GFR-binding peptide
  MOD_RES (31)..(32): Xaa is C or S

SEQ ID NO: 51323 - protein, 24 aa, Artificial Sequence
  Cyclic GFR-binding peptide
KVVMNSLQEVKPTRGVYYVIPLPE

SEQ ID NO: 51324 - protein, 37 aa, Artificial Sequence; identical to SEQ ID NO: 10509
  Cyclic GFR-binding peptide
  MOD_RES (31)..(32): Xaa is C or S

SEQ ID NO: 51325 - protein, 34 aa, Artificial Sequence; identical to SEQ ID NO: 10511
  Cyclic GFR-binding peptide
  MOD_RES (2)..(34): Xaa is C or S

SEQ ID NO: 51326 - protein, 22 aa, Artificial Sequence
  Cyclic GFR-binding peptide
NSLQEVVKENEDYYVMPLPELE

SEQ ID NO: 51327 - protein, 32 aa, Artificial Sequence
  Cyclic GFR-binding peptide
  MOD_RES (27)..(28): Xaa is C or S
MNSLQEIKPTKGIYYVIPLPELDQSVXXPSAS

SEQ ID NO: 51328 - protein, 36 aa, Artificial Sequence; identical to SEQ ID NO: 10513
  Cyclic GFR-binding peptide
  MOD_RES (32)..(33): Xaa is C or S

SEQ ID NO: 51329 - protein, 36 aa, Artificial Sequence; identical to SEQ ID NO: 10514
  Cyclic GFR-binding peptide
  MOD_RES (32)..(33): Xaa is C or S

SEQ ID NO: 51330 - protein, 31 aa, Artificial Sequence
  Cyclic GFR-binding peptide
  MOD_RES (2)..(4): Xaa is C or S
SXKXSRVIMEYQKYVKPKRGVIFLISIPSLA

SEQ ID NO: 51331 - protein, 27 aa, Artificial Sequence
  Cyclic GFR-binding peptide
  MOD_RES (1)..(1): Xaa is C or S
XARVVMNNSLQEIVNSSDDYYLVTLPE

SEQ ID NO: 51332 - protein, 30 aa, Artificial Sequence
  Cyclic GFR-binding peptide
  MOD_RES (1)..(3): Xaa is C or S
XKXSKVIMNSLQEIKPTKGIYYVIPLPELD

SEQ ID NO: 51333 - protein, 35 aa, Artificial Sequence
  Cyclic GFR-binding peptide
  MOD_RES (29)..(30): Xaa is C or S
VMENSLQEVVKDYEDYYLMTLPELETPVXXAKPIS

SEQ ID NO: 51334 - protein, 22 aa, Artificial Sequence
  Cyclic GFR-binding peptide
MEYQKYVKPTRGVIFLISIPSL

SEQ ID NO: 51335 - protein, 29 aa, Artificial Sequence
  Cyclic GFR-binding peptide
  MOD_RES (1)..(3): Xaa is C or S
XGXGEVVMDEYQKYVVKENEDIFLMSIPS

SEQ ID NO: 51336 - protein, 25 aa, Artificial Sequence
  Cyclic GFR-binding peptide
NSLQEIVNSSDDYYVVPLPELKTPA

SEQ ID NO: 51337 - protein, 27 aa, Artificial Sequence
  Cyclic GFR-binding peptide
  MOD_RES (27)..(27): Xaa is C or S
NNSLQEIVNSSDDYYLVTLPELKTPAX

SEQ ID NO: 51338 - protein, 29 aa, Artificial Sequence
  Cyclic GFR-binding peptide
  MOD_RES (27)..(27): Xaa is C or S
NEYQKYIVNSSDDIFLVSIPSLKTPAXTP

SEQ ID NO: 51339 - protein, 27 aa, Artificial Sequence
  Cyclic GFR-binding peptide
  MOD_RES (27)..(27): Xaa is C or S
MNSLQEIKPTKGIYYVIPLPELDQSVX

SEQ ID NO: 51340 - protein, 29 aa, Artificial Sequence
  Cyclic GFR-binding peptide
  MOD_RES (27)..(28): Xaa is C or S
MNSLQEVKPTRGVYYVIPLPELDQPVXXP

SEQ ID NO: 51341 - protein, 31 aa, Artificial Sequence; identical to SEQ ID NO: 10520
  Cyclic GFR-binding peptide
  MOD_RES (31)..(31): Xaa is C or S

SEQ ID NO: 51342 - protein, 34 aa, Artificial Sequence; identical to SEQ ID NO: 10521
  Cyclic GFR-binding peptide
  MOD_RES (31)..(32): Xaa is C or S

SEQ ID NO: 51343 - protein, 40 aa, Artificial Sequence; identical to SEQ ID NO: 10522
  Cyclic GFR-binding peptide
  MOD_RES (1)..(3)..(35)..(36): Xaa is C or S

SEQ ID NO: 51344 - protein, 29 aa, Artificial Sequence
  Cyclic GFR-binding peptide
VVMNNSLQEIVNSSDDYYVVPLPELKTPA

SEQ ID NO: 51345 - protein, 28 aa, Artificial Sequence
  Cyclic GFR-binding peptide
VMDNSLQEVVKENEDYYLMTLPELETPV

SEQ ID NO: 51346 - protein, 34 aa, Artificial Sequence; identical to SEQ ID NO: 10523
  Cyclic GFR-binding peptide
  MOD_RES (2)..(34): Xaa is C or S

SEQ ID NO: 51347 - protein, 33 aa, Artificial Sequence; identical to SEQ ID NO: 10524
  Cyclic GFR-binding peptide
  MOD_RES (1)..(33): Xaa is C or S

SEQ ID NO: 51348 - protein, 29 aa, Artificial Sequence
  Cyclic GFR-binding peptide
  MOD_RES (1)..(3): Xaa is C or S
XGXGEVVMDNSLQEVVKENEDYYVMPLPE

SEQ ID NO: 51349 - protein, 39 aa, Artificial Sequence; identical to SEQ ID NO: 10526
  Cyclic GFR-binding peptide
  MOD_RES (2)..(34)..(35): Xaa is C or S

SEQ ID NO: 51350 - protein, 26 aa, Artificial Sequence
  Cyclic GFR-binding peptide
IMNSLQEVKPKRGVYYLITLPELAQP

SEQ ID NO: 51351 - protein, 25 aa, Artificial Sequence
  Cyclic GFR-binding peptide
EYQKYVVKDYEDIFLMSIPSLETPV

SEQ ID NO: 51352 - protein, 30 aa, Artificial Sequence
  Cyclic GFR-binding peptide
  MOD_RES (29)..(30): Xaa is C or S
VMDEYQKYVVKENEDIFLMSIPSLETPVXX

SEQ ID NO: 51353 - protein, 25 aa, Artificial Sequence
  Cyclic GFR-binding peptide
NNSLQEIVNSSDDYYLVTLPELKTP

SEQ ID NO: 51354 - protein, 38 aa, Artificial Sequence; identical to SEQ ID NO: 10527
  Cyclic GFR-binding peptide
  MOD_RES (2)..(34)..(35): Xaa is C or S

SEQ ID NO: 51355 - protein, 26 aa, Artificial Sequence
  Cyclic GFR-binding peptide
SKVVMNSLQEVKPTRGVYYVIPLPEL

SEQ ID NO: 51356 - protein, 31 aa, Artificial Sequence; identical to SEQ ID NO: 10532
  Cyclic GFR-binding peptide
  MOD_RES (1)..(1): Xaa is C or S

SEQ ID NO: 51357 - protein, 30 aa, Artificial Sequence
  Cyclic GFR-binding peptide
  MOD_RES (30)..(30): Xaa is C or S
VVMNNSLQEIVNSSDDYYVVPLPELKTPAX

SEQ ID NO: 51358 - protein, 20 aa, Artificial Sequence
  Cyclic GFR-binding peptide
NSLQEVVKENEDYYVMPLPE

SEQ ID NO: 51359 - protein, 35 aa, Artificial Sequence; identical to SEQ ID NO: 10534
  Cyclic GFR-binding peptide
  MOD_RES (1)..(3)..(35): Xaa is C or S

SEQ ID NO: 51360 - protein, 30 aa, Artificial Sequence
  Cyclic GFR-binding peptide
  MOD_RES (2)..(2): Xaa is C or S
GXGEVVMDNSLQEVVKENEDYYVMPLPELE

SEQ ID NO: 51361 - protein, 38 aa, Artificial Sequence; identical to SEQ ID NO: 10536
  Cyclic GFR-binding peptide
  MOD_RES (1)..(33)..(34): Xaa is C or S

SEQ ID NO: 51362 - protein, 37 aa, Artificial Sequence; identical to SEQ ID NO: 10538
  Cyclic GFR-binding peptide
  MOD_RES (2)..(4)..(36)..(37): Xaa is C or S

SEQ ID NO: 51363 - protein, 32 aa, Artificial Sequence; identical to SEQ ID NO: 10540
  Cyclic GFR-binding peptide
  MOD_RES (1)..(32): Xaa is C or S

SEQ ID NO: 51364 - protein, 30 aa, Artificial Sequence
  Cyclic GFR-binding peptide
  MOD_RES (2)..(4): Xaa is C or S
HXGXSRVVMNNSLQEIVNSSDDYYVVPLPE

SEQ ID NO: 51365 - protein, 29 aa, Artificial Sequence
  Cyclic GFR-binding peptide
  MOD_RES (27)..(28): Xaa is C or S
MEYQKYVKPTRGVIFLISIPSLDQPVXXP

SEQ ID NO: 51366 - protein, 27 aa, Artificial Sequence
  Cyclic GFR-binding peptide
EVVMDNSLQEVVKENEDYYLMTLPELE

SEQ ID NO: 51367 - protein, 35 aa, Artificial Sequence
  Cyclic GFR-binding peptide
  MOD_RES (30)..(31): Xaa is C or S
VVMNEYQKYIVNSSDDIFLVSIPSLKTPAXXPKPV

SEQ ID NO: 51368 - protein, 23 aa, Artificial Sequence
  Cyclic GFR-binding peptide
MNSLQEVKPKRGVYYLITLPELA

SEQ ID NO: 51369 - protein, 29 aa, Artificial Sequence
  Cyclic GFR-binding peptide
  MOD_RES (28)..(29): Xaa is C or S
MNNSLQEIVNSSDDYYLVTLPELQTPAXX

SEQ ID NO: 51370 - protein, 31 aa, Artificial Sequence
  Cyclic GFR-binding peptide
  MOD_RES (1)..(3): Xaa is C or S
XGXSEVVMDNSLQEVVNNASDYYLITLPELR

SEQ ID NO: 51371 - protein, 39 aa, Artificial Sequence; identical to SEQ ID NO: 10543
  Cyclic GFR-binding peptide
  MOD_RES (1)..(33)..(34): Xaa is C or S

SEQ ID NO: 51372 - protein, 31 aa, Artificial Sequence
  Cyclic GFR-binding peptide
  MOD_RES (2)..(2): Xaa is C or S
GXSRVVMNNSLQEIVNSSDDYYLVTLPELKT

SEQ ID NO: 51373 - protein, 20 aa, Artificial Sequence
  Cyclic GFR-binding peptide
EYQKYVVKDYEDIFLMSIPS

SEQ ID NO: 51374 - protein, 28 aa, Artificial Sequence
  Cyclic GFR-binding peptide
VVMDEYQKYVVKENEDIFLMSIPSLETP

SEQ ID NO: 51375 - protein, 35 aa, Artificial Sequence; identical to SEQ ID NO: 10545
  Cyclic GFR-binding peptide
  MOD_RES (1)..(33)..(34): Xaa is C or S

SEQ ID NO: 51376 - protein, 28 aa, Artificial Sequence
  Cyclic GFR-binding peptide
  MOD_RES (2)..(2): Xaa is C or S
KXSKVVMEYQKYVKPTRGVIFLISIPSL

SEQ ID NO: 51377 - protein, 34 aa, Artificial Sequence; identical to SEQ ID NO: 10546
  Cyclic GFR-binding peptide
  MOD_RES (1)..(33)..(34): Xaa is C or S

SEQ ID NO: 51378 - protein, 29 aa, Artificial Sequence
  Cyclic GFR-binding peptide
GEVVMDNSLQEVVKENEDYYLMTLPELET

SEQ ID NO: 51379 - protein, 30 aa, Artificial Sequence
  Cyclic GFR-binding peptide
  MOD_RES (1)..(1): Xaa is C or S
XGEVVMDNSLQEVVKENEDYYLMTLPELET

SEQ ID NO: 51380 - protein, 29 aa, Artificial Sequence
  Cyclic GFR-binding peptide
  MOD_RES (27)..(28): Xaa is C or S
DQYNKLVVNNASDLYLISIASLRTPVXXT

SEQ ID NO: 51381 - protein, 26 aa, Artificial Sequence
  Cyclic GFR-binding peptide
SRVVMNNSLQEIVNSSDDYYVVPLPE

SEQ ID NO: 51382 - protein, 41 aa, Artificial Sequence; identical to SEQ ID NO: 10548
  Cyclic GFR-binding peptide
  MOD_RES (2)..(4)..(35)..(36): Xaa is C or S

SEQ ID NO: 51383 - protein, 28 aa, Artificial Sequence
  Cyclic GFR-binding peptide
  MOD_RES (27)..(28): Xaa is C or S
EEYQKYVVKDYEDIFLMSIPSLETPVXX

SEQ ID NO: 51384 - protein, 31 aa, Artificial Sequence; identical to SEQ ID NO: 10550
  Cyclic GFR-binding peptide
  MOD_RES (31)..(31): Xaa is C or S

SEQ ID NO: 51385 - protein, 28 aa, Artificial Sequence
  Cyclic GFR-binding peptide
  MOD_RES (26)..(27): Xaa is C or S
NSLQEVKPKRGVYYLITLPELAQPVXXP

SEQ ID NO: 51386 - protein, 38 aa, Artificial Sequence; identical to SEQ ID NO: 10552
  Cyclic GFR-binding peptide
  MOD_RES (1)..(33)..(34): Xaa is C or S

SEQ ID NO: 51387 - protein, 34 aa, Artificial Sequence
  Cyclic GFR-binding peptide
  MOD_RES (30)..(31): Xaa is C or S
VVMNNSLQEIVNSSDDYYLVTLPELKTPAXXPKP

SEQ ID NO: 51388 - protein, 29 aa, Artificial Sequence
  Cyclic GFR-binding peptide
  MOD_RES (27)..(27): Xaa is C or S
NNSLQEIVNSSDDYYVVPLPELKTPAXTP

SEQ ID NO: 51389 - protein, 34 aa, Artificial Sequence
  Cyclic GFR-binding peptide
  MOD_RES (29)..(30): Xaa is C or S
VMDNSLQEVVKENEDYYLMTLPELETPVXXAKPI

SEQ ID NO: 51390 - protein, 30 aa, Artificial Sequence
  Cyclic GFR-binding peptide
  MOD_RES (2)..(4): Xaa is C or S
SXKXSRVIMEYQKYVKPKRGVIFLISIPSL

SEQ ID NO: 51391 - protein, 33 aa, Artificial Sequence; identical to SEQ ID NO: 10554
  Cyclic GFR-binding peptide
  MOD_RES (31)..(32): Xaa is C or S

SEQ ID NO: 51392 - protein, 35 aa, Artificial Sequence; identical to SEQ ID NO: 10555
  Cyclic GFR-binding peptide
  MOD_RES (2)..(33)..(34): Xaa is C or S

SEQ ID NO: 51393 - protein, 22 aa, Artificial Sequence
  Cyclic GFR-binding peptide
RYKKLVVNNASDFYLISIANLR

SEQ ID NO: 51394 - protein, 24 aa, Artificial Sequence
  Cyclic GFR-binding peptide
NSLQEVVKDYEDYYVMPLPELETP

SEQ ID NO: 51395 - protein, 38 aa, Artificial Sequence; identical to SEQ ID NO: 10556
  Cyclic GFR-binding peptide
  MOD_RES (1)..(3)..(35): Xaa is C or S

SEQ ID NO: 51396 - protein, 31 aa, Artificial Sequence
  Cyclic GFR-binding peptide
  MOD_RES (28)..(29): Xaa is C or S
MDQYNKLVVNNASDLYLISIASLRTPVXXTP

SEQ ID NO: 51397 - protein, 23 aa, Artificial Sequence
  Cyclic GFR-binding peptide
MNEYQKYIVNSSDDIFLVSIPSL

SEQ ID NO: 51398 - protein, 33 aa, Artificial Sequence
  Cyclic GFR-binding peptide
  MOD_RES (2)..(4): Xaa is C or S
RXGXSEVVMDQYNKLVVNNASDLYLISIASLRT

SEQ ID NO: 51399 - protein, 35 aa, Artificial Sequence; identical to SEQ ID NO: 10558
  Cyclic GFR-binding peptide
  MOD_RES (32)..(33): Xaa is C or S

SEQ ID NO: 51400 - protein, 32 aa, Artificial Sequence
  Cyclic GFR-binding peptide
  MOD_RES (29)..(30): Xaa is C or S
VMENSLQEVVKDYEDYYVMPLPELETPVXXAK

SEQ ID NO: 51401 - protein, 27 aa, Artificial Sequence
  Cyclic GFR-binding peptide
MNEYQKYIVNSSDDIFLVSIPSLKTPA

SEQ ID NO: 51402 - protein, 29 aa, Artificial Sequence
  Cyclic GFR-binding peptide
GEVVMENSLQEVVKDYEDYYLMTLPELET

SEQ ID NO: 51403 - protein, 36 aa, Artificial Sequence; identical to SEQ ID NO: 10559
  Cyclic GFR-binding peptide
  MOD_RES (2)..(33)..(34): Xaa is C or S

SEQ ID NO: 51404 - protein, 30 aa, Artificial Sequence
  Cyclic GFR-binding peptide
  MOD_RES (1)..(1): Xaa is C or S
XGEVVMENSLQEVVKDYEDYYLMTLPELET

SEQ ID NO: 51405 - protein, 25 aa, Artificial Sequence
  Cyclic GFR-binding peptide
SKVIMEYQKYIKPTKGIIFLISIPS

SEQ ID NO: 51406 - protein, 24 aa, Artificial Sequence
  Cyclic GFR-binding peptide
MEYQKYVKPKRGVIFLISIPSLAQ

SEQ ID NO: 51407 - protein, 25 aa, Artificial Sequence
  Cyclic GFR-binding peptide
NSLQEVVKENEDYYLMTLPELETPV

SEQ ID NO: 51408 - protein, 33 aa, Artificial Sequence; identical to SEQ ID NO: 10562
  Cyclic GFR-binding peptide
  MOD_RES (1)..(33): Xaa is C or S

SEQ ID NO: 51409 - protein, 36 aa, Artificial Sequence; identical to SEQ ID NO: 10563
  Cyclic GFR-binding peptide
  MOD_RES (1)..(33)..(34): Xaa is C or S

SEQ ID NO: 51410 - protein, 28 aa, Artificial Sequence
  Cyclic GFR-binding peptide
VMDQYNKLVVNNASDLYLISIASLRTPV

SEQ ID NO: 51411 - protein, 33 aa, Artificial Sequence; identical to SEQ ID NO: 10564
  Cyclic GFR-binding peptide
  MOD_RES (2)..(33): Xaa is C or S

SEQ ID NO: 51412 - protein, 36 aa, Artificial Sequence
  Cyclic GFR-binding peptide
  MOD_RES (30)..(30): Xaa is C or S
VVMNNSLQEIVNSSDDYYLVTLPELKTPAXTPKTVH

SEQ ID NO: 51413 - protein, 31 aa, Artificial Sequence
  Cyclic GFR-binding peptide
  MOD_RES (26)..(27): Xaa is C or S
EYQKYVVKENEDIFLMSIPSLETPVXXAKPI

SEQ ID NO: 51414 - protein, 26 aa, Artificial Sequence
  Cyclic GFR-binding peptide
ARVVMNNSLQEIVNSSDDYYVVPLPE

SEQ ID NO: 51415 - protein, 34 aa, Artificial Sequence; identical to SEQ ID NO: 10566
  Cyclic GFR-binding peptide
  MOD_RES (32)..(33): Xaa is C or S

SEQ ID NO: 51416 - protein, 27 aa, Artificial Sequence
  Cyclic GFR-binding peptide
  MOD_RES (26)..(27): Xaa is C or S
EYQKYVKPTRGVIFLISIPSLDQPVXX

SEQ ID NO: 51417 - protein, 24 aa, Artificial Sequence
  Cyclic GFR-binding peptide
NNSLQEIVNSSDDYYLVTLPELKT

SEQ ID NO: 51418 - protein, 26 aa, Artificial Sequence
  Cyclic GFR-binding peptide
VMNEYQKYIVNSSDDIFLVSIPSLQT

SEQ ID NO: 51419 - protein, 35 aa, Artificial Sequence; identical to SEQ ID NO: 10567
  Cyclic GFR-binding peptide
  MOD_RES (31)..(32): Xaa is C or S

SEQ ID NO: 51420 - protein, 28 aa, Artificial Sequence
  Cyclic GFR-binding peptide
EVVMDNSLQEVVKENEDYYLMTLPELET

SEQ ID NO: 51421 - protein, 25 aa, Artificial Sequence
  Cyclic GFR-binding peptide
EYQKYIKPTKGIIFLISIPSLDQSV

SEQ ID NO: 51422 - protein, 26 aa, Artificial Sequence
  Cyclic GFR-binding peptide
MNNSLQEIVNSSDDYYLVTLPELQTP

SEQ ID NO: 51423 - protein, 23 aa, Artificial Sequence
  Cyclic GFR-binding peptide
VVMNSLQEVKPTRGVYYVIPLPE

SEQ ID NO: 51424 - protein, 30 aa, Artificial Sequence
  Cyclic GFR-binding peptide
  MOD_RES (26)..(26): Xaa is C or S
EYQKYIVNSSDDIFLVSIPSLKTPAXTPKT

SEQ ID NO: 51425 - protein, 30 aa, Artificial Sequence
  Cyclic GFR-binding peptide
  MOD_RES (1)..(1): Xaa is C or S
XARVVMNNSLQEIVNSSDDYYLVTLPELQT

SEQ ID NO: 51426 - protein, 41 aa, Artificial Sequence; identical to SEQ ID NO: 10572
  Cyclic GFR-binding peptide
  MOD_RES (1)..(3)..(35)..(36): Xaa is C or S

SEQ ID NO: 51427 - protein, 39 aa, Artificial Sequence; identical to SEQ ID NO: 10573
  Cyclic GFR-binding peptide
  MOD_RES (2)..(4)..(36)..(37): Xaa is C or S

SEQ ID NO: 51428 - protein, 39 aa, Artificial Sequence; identical to SEQ ID NO: 10574
  Cyclic GFR-binding peptide
  MOD_RES (1)..(33)..(34): Xaa is C or S

SEQ ID NO: 51429 - protein, 30 aa, Artificial Sequence
  Cyclic GFR-binding peptide
  MOD_RES (26)..(27): Xaa is C or S
NSLQEIVNSSDDYYVVPLPELQTPAXXPKP

SEQ ID NO: 51430 - protein, 30 aa, Artificial Sequence
  Cyclic GFR-binding peptide
  MOD_RES (2)..(2): Xaa is C or S
KXSKVIMNSLQEIKPTKGIYYVIPLPELDQ

SEQ ID NO: 51431 - protein, 34 aa, Artificial Sequence; identical to SEQ ID NO: 10576
  Cyclic GFR-binding peptide
  MOD_RES (2)..(4): Xaa is C or S

SEQ ID NO: 51432 - protein, 30 aa, Artificial Sequence
  Cyclic GFR-binding peptide
  MOD_RES (30)..(30): Xaa is C or S
VVMDNSLQEVVKENEDYYVMPLPELETPVX

SEQ ID NO: 51433 - protein, 30 aa, Artificial Sequence
  Cyclic GFR-binding peptide
  MOD_RES (2)..(2): Xaa is C or S
GXGEVVMDNSLQEVVKENEDYYLMTLPELE

SEQ ID NO: 51434 - protein, 40 aa, Artificial Sequence; identical to SEQ ID NO: 10579
  Cyclic GFR-binding peptide
  MOD_RES (2)..(4)..(36)..(37): Xaa is C or S

SEQ ID NO: 51435 - protein, 37 aa, Artificial Sequence; identical to SEQ ID NO: 10580
  Cyclic GFR-binding peptide
  MOD_RES (1)..(33)..(34): Xaa is C or S

SEQ ID NO: 51436 - protein, 34 aa, Artificial Sequence; identical to SEQ ID NO: 10582
  Cyclic GFR-binding peptide
  MOD_RES (1)..(33)..(34): Xaa is C or S

SEQ ID NO: 51437 - protein, 36 aa, Artificial Sequence; identical to SEQ ID NO: 10587
  Cyclic GFR-binding peptide
  MOD_RES (1)..(32)..(33): Xaa is C or S

SEQ ID NO: 51438 - protein, 30 aa, Artificial Sequence
  Cyclic GFR-binding peptide
  MOD_RES (28)..(29): Xaa is C or S
IMEYQKYIKPTKGIIFLISIPSLDQSVXXP

SEQ ID NO: 51439 - protein, 32 aa, Artificial Sequence; identical to SEQ ID NO: 10589
  Cyclic GFR-binding peptide
  MOD_RES (31)..(32): Xaa is C or S

SEQ ID NO: 51440 - protein, 29 aa, Artificial Sequence
  Cyclic GFR-binding peptide
  MOD_RES (26)..(26): Xaa is C or S
EYQKYIVNSSDDIFLVSIPSLKTPAXTPK

SEQ ID NO: 51441 - protein, 21 aa, Artificial Sequence
  Cyclic GFR-binding peptide
DNSLQEVVKENEDYYVMPLPE

SEQ ID NO: 51442 - protein, 24 aa, Artificial Sequence
  Cyclic GFR-binding peptide
NEYQKYIVNSSDDIFLVSIPSLQT

SEQ ID NO: 51443 - protein, 31 aa, Artificial Sequence
  Cyclic GFR-binding peptide
  MOD_RES (2)..(4): Xaa is C or S
SXKXSKVVMNSLQEVKPTRGVYYVIPLPELD

SEQ ID NO: 51444 - protein, 29 aa, Artificial Sequence
  Cyclic GFR-binding peptide
SRVIMNSLQEVKPKRGVYYLITLPELAQP

SEQ ID NO: 51445 - protein, 28 aa, Artificial Sequence
  Cyclic GFR-binding peptide
  MOD_RES (1)..(1): Xaa is C or S
XGEVVMEEYQKYVVKDYEDIFLMSIPSL

SEQ ID NO: 51446 - protein, 31 aa, Artificial Sequence; identical to SEQ ID NO: 10593
  Cyclic GFR-binding peptide

SEQ ID NO: 51447 - protein, 34 aa, Artificial Sequence; identical to SEQ ID NO: 10594
  Cyclic GFR-binding peptide
  MOD_RES (1)..(3): Xaa is C or S

SEQ ID NO: 51448 - protein, 35 aa, Artificial Sequence
  Cyclic GFR-binding peptide
  MOD_RES (30)..(31): Xaa is C or S
VVMEEYQKYVVKDYEDIFLMSIPSLETPVXXAKPI

SEQ ID NO: 51449 - protein, 37 aa, Artificial Sequence; identical to SEQ ID NO: 10595
  Cyclic GFR-binding peptide
  MOD_RES (1)..(3)..(35)..(36): Xaa is C or S

SEQ ID NO: 51450 - protein, 30 aa, Artificial Sequence
  Cyclic GFR-binding peptide
  MOD_RES (30)..(30): Xaa is C or S
VVMNNSLQEIVNSSDDYYLVTLPELKTPAX

SEQ ID NO: 51451 - protein, 28 aa, Artificial Sequence
  Cyclic GFR-binding peptide
  MOD_RES (1)..(3): Xaa is C or S
XKXSRVIMNSLQEVKPKRGVYYLITLPE

SEQ ID NO: 51452 - protein, 24 aa, Artificial Sequence
  Cyclic GFR-binding peptide
MENSLQEVVKDYEDYYVMPLPELE

SEQ ID NO: 51453 - protein, 35 aa, Artificial Sequence
  Cyclic GFR-binding peptide
  MOD_RES (29)..(30): Xaa is C or S
VMDNSLQEVVNNASDYYVIPLPELRTPVXXTPPTS

SEQ ID NO: 51454 - protein, 24 aa, Artificial Sequence
  Cyclic GFR-binding peptide
NSLQEVVNNASDYYVIPLPELRTP

SEQ ID NO: 51455 - protein, 34 aa, Artificial Sequence
  Cyclic GFR-binding peptide
  MOD_RES (2)..(4): Xaa is C or S
RXGXSEVVMDNSLQEVVNNASDYYVIPLPELRTP

SEQ ID NO: 51456 - protein, 28 aa, Artificial Sequence
  Cyclic GFR-binding peptide
  MOD_RES (27)..(27): Xaa is C or S
NNSLQEIVNSSDDYYVVPLPELKTPAXT

SEQ ID NO: 51457 - protein, 38 aa, Artificial Sequence; identical to SEQ ID NO: 10596
  Cyclic GFR-binding peptide
  MOD_RES (32)..(32): Xaa is C or S

SEQ ID NO: 51458 - protein, 21 aa, Artificial Sequence
  Cyclic GFR-binding peptide
NSLQEVVKENEDYYVMPLPEL

SEQ ID NO: 51459 - protein, 28 aa, Artificial Sequence
  Cyclic GFR-binding peptide
  MOD_RES (26)..(27): Xaa is C or S
NSLQEIVNSSDDYYLVTLPELQTPAXXP

SEQ ID NO: 51460 - protein, 25 aa, Artificial Sequence
  Cyclic GFR-binding peptide
MEYQKYVKPKRGVIFLISIPSLAQP

SEQ ID NO: 51461 - protein, 27 aa, Artificial Sequence
  Cyclic GFR-binding peptide
  MOD_RES (1)..(1): Xaa is C or S
XSRVIMNSLQEVKPKRGVYYLITLPEL

SEQ ID NO: 51462 - protein, 33 aa, Artificial Sequence; identical to SEQ ID NO: 10600
  Cyclic GFR-binding peptide
  MOD_RES (2)..(2): Xaa is C or S

SEQ ID NO: 51463 - protein, 24 aa, Artificial Sequence
  Cyclic GFR-binding peptide
VVMNNSLQEIVNSSDDYYLVTLPE

SEQ ID NO: 51464 - protein, 33 aa, Artificial Sequence; identical to SEQ ID NO: 10602
  Cyclic GFR-binding peptide
  MOD_RES (1)..(33): Xaa is C or S

SEQ ID NO: 51465 - protein, 33 aa, Artificial Sequence; identical to SEQ ID NO: 10603
  Cyclic GFR-binding peptide
  MOD_RES (1)..(3): Xaa is C or S

SEQ ID NO: 51466 - protein, 35 aa, Artificial Sequence
  Cyclic GFR-binding peptide
  MOD_RES (30)..(31): Xaa is C or S
VVMDNSLQEVVNNASDYYVIPLPELRTPVXXTPPT

SEQ ID NO: 51467 - protein, 25 aa, Artificial Sequence
  Cyclic GFR-binding peptide
MEYQKYIKPTKGIIFLISIPSLDQS

SEQ ID NO: 51468 - protein, 28 aa, Artificial Sequence
  Cyclic GFR-binding peptide
VVMENSLQEVVKDYEDYYVMPLPELETP

SEQ ID NO: 51469 - protein, 33 aa, Artificial Sequence; identical to SEQ ID NO: 10605
  Cyclic GFR-binding peptide
  MOD_RES (31)..(32): Xaa is C or S

SEQ ID NO: 51470 - protein, 33 aa, Artificial Sequence; identical to SEQ ID NO: 10607
  Cyclic GFR-binding peptide
  MOD_RES (2)..(2): Xaa is C or S

SEQ ID NO: 51471 - protein, 28 aa, Artificial Sequence
  Cyclic GFR-binding peptide
  MOD_RES (2)..(2): Xaa is C or S
GXSRVVMNNSLQEIVNSSDDYYLVTLPE

SEQ ID NO: 51472 - protein, 36 aa, Artificial Sequence; identical to SEQ ID NO: 10610
  Cyclic GFR-binding peptide
  MOD_RES (32)..(33): Xaa is C or S

SEQ ID NO: 51473 - protein, 27 aa, Artificial Sequence
  Cyclic GFR-binding peptide
RVVMNNSLQEIVNSSDDYYVVPLPELQ

SEQ ID NO: 51474 - protein, 35 aa, Artificial Sequence; identical to SEQ ID NO: 10611
  Cyclic GFR-binding peptide
  MOD_RES (1)..(33): Xaa is C or S

SEQ ID NO: 51475 - protein, 42 aa, Artificial Sequence; identical to SEQ ID NO: 10612
  Cyclic GFR-binding peptide
  MOD_RES (2)..(4)..(36)..(37): Xaa is C or S

SEQ ID NO: 51476 - protein, 38 aa, Artificial Sequence; identical to SEQ ID NO: 10613
  Cyclic GFR-binding peptide
  MOD_RES (32)..(33): Xaa is C or S

SEQ ID NO: 51477 - protein, 29 aa, Artificial Sequence
  Cyclic GFR-binding peptide
  MOD_RES (29)..(29): Xaa is C or S
VMDQYNKLVVNNASDLYLISIASLRTPVX

SEQ ID NO: 51478 - protein, 26 aa, Artificial Sequence
  Cyclic GFR-binding peptide
KVVMNSLQEVKPTRGVYYVIPLPELD

SEQ ID NO: 51479 - protein, 27 aa, Artificial Sequence
  Cyclic GFR-binding peptide
  MOD_RES (27)..(27): Xaa is C or S
DNSLQEVVNNASDYYVIPLPELRTPVX

SEQ ID NO: 51480 - protein, 26 aa, Artificial Sequence
  Cyclic GFR-binding peptide
VMENSLQEVVKDYEDYYVMPLPELET

SEQ ID NO: 51481 - protein, 24 aa, Artificial Sequence
  Cyclic GFR-binding peptide
MEYQKYVKPTRGVIFLISIPSLDQ

SEQ ID NO: 51482 - protein, 29 aa, Artificial Sequence
  Cyclic GFR-binding peptide
  MOD_RES (2)..(2): Xaa is C or S
GXGEVVMDNSLQEVVKENEDYYVMPLPEL

SEQ ID NO: 51483 - protein, 31 aa, Artificial Sequence
  Cyclic GFR-binding peptide
  MOD_RES (27)..(28): Xaa is C or S
DNSLQEVVNNASDYYLITLPELRTPVXXTPP

SEQ ID NO: 51484 - protein, 39 aa, Artificial Sequence; identical to SEQ ID NO: 10616
  Cyclic GFR-binding peptide
  MOD_RES (2)..(4)..(36)..(37): Xaa is C or S

SEQ ID NO: 51485 - protein, 34 aa, Artificial Sequence; identical to SEQ ID NO: 10617
  Cyclic GFR-binding peptide
  MOD_RES (1)..(33)..(34): Xaa is C or S

SEQ ID NO: 51486 - protein, 27 aa, Artificial Sequence
  Cyclic GFR-binding peptide
VMDRYKKLVVNNASDFYLISIANLRTP

SEQ ID NO: 51487 - protein, 38 aa, Artificial Sequence; identical to SEQ ID NO: 10619
  Cyclic GFR-binding peptide
  MOD_RES (1)..(32)..(33): Xaa is C or S

SEQ ID NO: 51488 - protein, 29 aa, Artificial Sequence
  Cyclic GFR-binding peptide
  MOD_RES (2)..(2): Xaa is C or S
GXARVVMNNSLQEIVNSSDDYYLVTLPEL

SEQ ID NO: 51489 - protein, 30 aa, Artificial Sequence
  Cyclic GFR-binding peptide
  MOD_RES (1)..(3): Xaa is C or S
XGXGEVVMEEYQKYVVKDYEDIFLMSIPSL

SEQ ID NO: 51490 - protein, 27 aa, Artificial Sequence
  Cyclic GFR-binding peptide
VVMNEYQKYIVNSSDDIFLVSIPSLQT

SEQ ID NO: 51491 - protein, 33 aa, Artificial Sequence
  Cyclic GFR-binding peptide
  MOD_RES (30)..(30): Xaa is C or S
VVMNNSLQEIVNSSDDYYLVTLPELKTPAXTPK

SEQ ID NO: 51492 - protein, 29 aa, Artificial Sequence
  Cyclic GFR-binding peptide
SEVVMDNSLQEVVNNASDYYVIPLPELRT

SEQ ID NO: 51493 - protein, 33 aa, Artificial Sequence
  Cyclic GFR-binding peptide
  MOD_RES (27)..(28): Xaa is C or S
DEYQKYVVKENEDIFLMSIPSLETPVXXAKPIK

SEQ ID NO: 51494 - protein, 26 aa, Artificial Sequence
  Cyclic GFR-binding peptide
VMNEYQKYIVNSSDDIFLVSIPSLKT

SEQ ID NO: 51495 - protein, 40 aa, Artificial Sequence; identical to SEQ ID NO: 10620
  Cyclic GFR-binding peptide
  MOD_RES (2)..(4)..(36): Xaa is C or S

SEQ ID NO: 51496 - protein, 30 aa, Artificial Sequence; identical to SEQ ID NO: 10621
  Cyclic GFR-binding peptide

SEQ ID NO: 51497 - protein, 37 aa, Artificial Sequence; identical to SEQ ID NO: 10622
  Cyclic GFR-binding peptide
  MOD_RES (31)..(32): Xaa is C or S

SEQ ID NO: 51498 - protein, 27 aa, Artificial Sequence
  Cyclic GFR-binding peptide
  MOD_RES (26)..(27): Xaa is C or S
NSLQEVVKENEDYYLMTLPELETPVXX

SEQ ID NO: 51499 - protein, 31 aa, Artificial Sequence
  Cyclic GFR-binding peptide
  MOD_RES (2)..(4): Xaa is C or S
HXGXSRVVMNNSLQEIVNSSDDYYVVPLPEL

SEQ ID NO: 51500 - protein, 41 aa, Artificial Sequence; identical to SEQ ID NO: 10624
  Cyclic GFR-binding peptide
  MOD_RES (1)..(3)..(35)..(36): Xaa is C or S

SEQ ID NO: 51501 - protein, 32 aa, Artificial Sequence
  Cyclic GFR-binding peptide
  MOD_RES (29)..(30): Xaa is C or S
VMENSLQEVVKDYEDYYLMTLPELETPVXXAK

SEQ ID NO: 51502 - protein, 34 aa, Artificial Sequence; identical to SEQ ID NO: 10625
  Cyclic GFR-binding peptide
  MOD_RES (2)..(34): Xaa is C or S

SEQ ID NO: 51503 - protein, 26 aa, Artificial Sequence
  Cyclic GFR-binding peptide
  MOD_RES (1)..(1): Xaa is C or S
XSKVIMNSLQEIKPTKGIYYVIPLPE

SEQ ID NO: 51504 - protein, 22 aa, Artificial Sequence
  Cyclic GFR-binding peptide
QYNKLVVNNASDLYLISIASLR

SEQ ID NO: 51505 - protein, 41 aa, Artificial Sequence; identical to SEQ ID NO: 10627
  Cyclic GFR-binding peptide
  MOD_RES (1)..(3)..(35)..(36): Xaa is C or S

SEQ ID NO: 51506 - protein, 30 aa, Artificial Sequence
  Cyclic GFR-binding peptide
  MOD_RES (1)..(3): Xaa is C or S
XGXGEVVMENSLQEVVKDYEDYYLMTLPEL

SEQ ID NO: 51507 - protein, 31 aa, Artificial Sequence
  Cyclic GFR-binding peptide
  MOD_RES (1)..(1): Xaa is C or S
XSEVVMDRYKKLVVNNASDFYLISIANLRTP

SEQ ID NO: 51508 - protein, 24 aa, Artificial Sequence
  Cyclic GFR-binding peptide
MNEYQKYIVNSSDDIFLVSIPSLQ

SEQ ID NO: 51509 - protein, 33 aa, Artificial Sequence; identical to SEQ ID NO: 10632
  Cyclic GFR-binding peptide
  MOD_RES (31)..(32): Xaa is C or S

SEQ ID NO: 51510 - protein, 23 aa, Artificial Sequence
  Cyclic GFR-binding peptide
DNSLQEVVNNASDYYLITLPELR

SEQ ID NO: 51511 - protein, 22 aa, Artificial Sequence
  Cyclic GFR-binding peptide
EYQKYVVKENEDIFLMSIPSLE

SEQ ID NO: 51512 - protein, 34 aa, Artificial Sequence
  Cyclic GFR-binding peptide
  MOD_RES (30)..(30): Xaa is C or S
VVMNNSLQEIVNSSDDYYVVPLPELKTPAXTPKT

SEQ ID NO: 51513 - protein, 30 aa, Artificial Sequence; identical to SEQ ID NO: 10633
  Cyclic GFR-binding peptide

SEQ ID NO: 51514 - protein, 32 aa, Artificial Sequence
  Cyclic GFR-binding peptide
  MOD_RES (26)..(27): Xaa is C or S
EYQKYIKPTKGIIFLISIPSLDQSVXXPSASA

SEQ ID NO: 51515 - protein, 39 aa, Artificial Sequence; identical to SEQ ID NO: 10634
  Cyclic GFR-binding peptide
  MOD_RES (1)..(3)..(34)..(35): Xaa is C or S

SEQ ID NO: 51516 - protein, 32 aa, Artificial Sequence
  Cyclic GFR-binding peptide
  MOD_RES (2)..(4): Xaa is C or S
SXKXSRVIMNSLQEVKPKRGVYYLITLPELAQ

SEQ ID NO: 51517 - protein, 23 aa, Artificial Sequence
  Cyclic GFR-binding peptide
MNNSLQEIVNSSDDYYVVPLPEL

SEQ ID NO: 51518 - protein, 28 aa, Artificial Sequence
  Cyclic GFR-binding peptide
  MOD_RES (28)..(28): Xaa is C or S
MENSLQEVVKDYEDYYLMTLPELETPVX

SEQ ID NO: 51519 - protein, 41 aa, Artificial Sequence; identical to SEQ ID NO: 10638
  Cyclic GFR-binding peptide
  MOD_RES (1)..(3)..(35)..(36): Xaa is C or S

SEQ ID NO: 51520 - protein, 30 aa, Artificial Sequence
  Cyclic GFR-binding peptide
  MOD_RES (28)..(29): Xaa is C or S
MENSLQEVVKDYEDYYLMTLPELETPVXXA

SEQ ID NO: 51521 - protein, 32 aa, Artificial Sequence
  Cyclic GFR-binding peptide
  MOD_RES (27)..(28): Xaa is C or S
EEYQKYVVKDYEDIFLMSIPSLETPVXXAKPI

SEQ ID NO: 51522 - protein, 32 aa, Artificial Sequence
  Cyclic GFR-binding peptide
  MOD_RES (2)..(2): Xaa is C or S
GXGEVVMEEYQKYVVKDYEDIFLMSIPSLETP

SEQ ID NO: 51523 - protein, 24 aa, Artificial Sequence
  Cyclic GFR-binding peptide
VVMDRYKKLVVNNASDFYLISIAN

SEQ ID NO: 51524 - protein, 21 aa, Artificial Sequence
  Cyclic GFR-binding peptide
DRYKKLVVNNASDFYLISIAN

SEQ ID NO: 51525 - protein, 37 aa, Artificial Sequence; identical to SEQ ID NO: 10640
  Cyclic GFR-binding peptide
  MOD_RES (31)..(32): Xaa is C or S

SEQ ID NO: 51526 - protein, 33 aa, Artificial Sequence; identical to SEQ ID NO: 10641
  Cyclic GFR-binding peptide
  MOD_RES (32)..(33): Xaa is C or S

SEQ ID NO: 51527 - protein, 30 aa, Artificial Sequence
  Cyclic GFR-binding peptide
  MOD_RES (28)..(29): Xaa is C or S
MNNSLQEIVNSSDDYYLVTLPELQTPAXXP

SEQ ID NO: 51528 - protein, 34 aa, Artificial Sequence
  Cyclic GFR-binding peptide
  MOD_RES (29)..(30): Xaa is C or S
VIMEYQKYVKPKRGVIFLISIPSLAQPVXXPAAS

SEQ ID NO: 51529 - protein, 35 aa, Artificial Sequence; identical to SEQ ID NO: 10643
  Cyclic GFR-binding peptide
  MOD_RES (1)..(3)..(34)..(35): Xaa is C or S

SEQ ID NO: 51530 - protein, 30 aa, Artificial Sequence
  Cyclic GFR-binding peptide
GEVVMDNSLQEVVKENEDYYVMPLPELETP

SEQ ID NO: 51531 - protein, 29 aa, Artificial Sequence
  Cyclic GFR-binding peptide
  MOD_RES (29)..(29): Xaa is C or S
VMDNSLQEVVKENEDYYVMPLPELETPVX

SEQ ID NO: 51532 - protein, 35 aa, Artificial Sequence; identical to SEQ ID NO: 10647
  Cyclic GFR-binding peptide
  MOD_RES (2)..(33)..(34): Xaa is C or S

SEQ ID NO: 51533 - protein, 31 aa, Artificial Sequence; identical to SEQ ID NO: 10648
  Cyclic GFR-binding peptide

SEQ ID NO: 51534 - protein, 36 aa, Artificial Sequence; identical to SEQ ID NO: 10649
  Cyclic GFR-binding peptide
  MOD_RES (2)..(4)..(35)..(36): Xaa is C or S

SEQ ID NO: 51535 - protein, 33 aa, Artificial Sequence; identical to SEQ ID NO: 10651
  Cyclic GFR-binding peptide
  MOD_RES (1)..(33): Xaa is C or S

SEQ ID NO: 51536 - protein, 39 aa, Artificial Sequence; identical to SEQ ID NO: 10652
  Cyclic GFR-binding peptide
  MOD_RES (1)..(33): Xaa is C or S

SEQ ID NO: 51537 - protein, 36 aa, Artificial Sequence; identical to SEQ ID NO: 10655
  Cyclic GFR-binding peptide
  MOD_RES (31)..(32): Xaa is C or S

SEQ ID NO: 51538 - protein, 34 aa, Artificial Sequence
  Cyclic GFR-binding peptide
  MOD_RES (30)..(31): Xaa is C or S
VVMNEYQKYIVNSSDDIFLVSIPSLQTPAXXPKP

SEQ ID NO: 51539 - protein, 36 aa, Artificial Sequence
  Cyclic GFR-binding peptide
  MOD_RES (30)..(31): Xaa is C or S
KVVMNSLQEVKPTRGVYYVIPLPELDQPVXXPSASA

SEQ ID NO: 51540 - protein, 37 aa, Artificial Sequence; identical to SEQ ID NO: 10656
  Cyclic GFR-binding peptide
  MOD_RES (32)..(33): Xaa is C or S

SEQ ID NO: 51541 - protein, 29 aa, Artificial Sequence
  Cyclic GFR-binding peptide
  MOD_RES (1)..(1): Xaa is C or S
XSKVVMEYQKYVKPTRGVIFLISIPSLDQ

SEQ ID NO: 51542 - protein, 26 aa, Artificial Sequence
  Cyclic GFR-binding peptide
VMEEYQKYVVKDYEDIFLMSIPSLET

SEQ ID NO: 51543 - protein, 38 aa, Artificial Sequence; identical to SEQ ID NO: 10658
  Cyclic GFR-binding peptide
  MOD_RES (32)..(33): Xaa is C or S

SEQ ID NO: 51544 - protein, 32 aa, Artificial Sequence
  Cyclic GFR-binding peptide
  MOD_RES (30)..(31): Xaa is C or S
VVMENSLQEVVKDYEDYYVMPLPELETPVXXA

SEQ ID NO: 51545 - protein, 37 aa, Artificial Sequence; identical to SEQ ID NO: 10659
  Cyclic GFR-binding peptide
  MOD_RES (2)..(34)..(35): Xaa is C or S

SEQ ID NO: 51546 - protein, 37 aa, Artificial Sequence; identical to SEQ ID NO: 10660
  Cyclic GFR-binding peptide
  MOD_RES (1)..(33)..(34): Xaa is C or S

SEQ ID NO: 51547 - protein, 23 aa, Artificial Sequence
  Cyclic GFR-binding peptide
EYQKYVVKENEDIFLMSIPSLET

SEQ ID NO: 51548 - protein, 34 aa, Artificial Sequence
  Cyclic GFR-binding peptide
  MOD_RES (28)..(29): Xaa is C or S
VMEYQKYVKPTRGVIFLISIPSLDQPVXXPSASA

SEQ ID NO: 51549 - protein, 29 aa, Artificial Sequence
  Cyclic GFR-binding peptide
ARVVMNEYQKYIVNSSDDIFLVSIPSLQT

SEQ ID NO: 51550 - protein, 27 aa, Artificial Sequence
  Cyclic GFR-binding peptide
  MOD_RES (1)..(1): Xaa is C or S
XGEVVMENSLQEVVKDYEDYYVMPLPE

SEQ ID NO: 51551 - protein, 37 aa, Artificial Sequence; identical to SEQ ID NO: 10662
  Cyclic GFR-binding peptide
  MOD_RES (1)..(3)..(34)..(35): Xaa is C or S

SEQ ID NO: 51552 - protein, 30 aa, Artificial Sequence
  Cyclic GFR-binding peptide
  MOD_RES (2)..(2): Xaa is C or S
GXGEVVMEEYQKYVVKDYEDIFLMSIPSLE

SEQ ID NO: 51553 - protein, 33 aa, Artificial Sequence
  Cyclic GFR-binding peptide
  MOD_RES (29)..(30): Xaa is C or S
VVMNSLQEVKPTRGVYYVIPLPELDQPVXXPSA

SEQ ID NO: 51554 - protein, 28 aa, Artificial Sequence
  Cyclic GFR-binding peptide
VVMDNSLQEVVKENEDYYVMPLPELETP

SEQ ID NO: 51555 - protein, 26 aa, Artificial Sequence
  Cyclic GFR-binding peptide
DNSLQEVVKENEDYYLMTLPELETPV

SEQ ID NO: 51556 - protein, 28 aa, Artificial Sequence
  Cyclic GFR-binding peptide
EVVMDEYQKYVVKENEDIFLMSIPSLET

SEQ ID NO: 51557 - protein, 35 aa, Artificial Sequence
  Cyclic GFR-binding peptide
  MOD_RES (29)..(30): Xaa is C or S
VMDRYKKLVVNNASDFYLISIANLRTPVXXTPPTS

SEQ ID NO: 51558 - protein, 25 aa, Artificial Sequence
  Cyclic GFR-binding peptide
MEYQKYVKPTRGVIFLISIPSLDQP

SEQ ID NO: 51559 - protein, 30 aa, Artificial Sequence
  Cyclic GFR-binding peptide
  MOD_RES (29)..(29): Xaa is C or S
VMNNSLQEIVNSSDDYYLVTLPELKTPAXT

SEQ ID NO: 51560 - protein, 39 aa, Artificial Sequence; identical to SEQ ID NO: 10667
  Cyclic GFR-binding peptide
  MOD_RES (2)..(4)..(36): Xaa is C or S

SEQ ID NO: 51561 - protein, 30 aa, Artificial Sequence
  Cyclic GFR-binding peptide
  MOD_RES (27)..(28): Xaa is C or S
DNSLQEVVKENEDYYLMTLPELETPVXXAK

SEQ ID NO: 51562 - protein, 36 aa, Artificial Sequence; identical to SEQ ID NO: 10669
  Cyclic GFR-binding peptide
  MOD_RES (31)..(32): Xaa is C or S

SEQ ID NO: 51563 - protein, 22 aa, Artificial Sequence
  Cyclic GFR-binding peptide
MDNSLQEVVNNASDYYLITLPE

SEQ ID NO: 51564 - protein, 29 aa, Artificial Sequence
  Cyclic GFR-binding peptide
  MOD_RES (29)..(29): Xaa is C or S
VIMNSLQEVKPKRGVYYLITLPELAQPVX

SEQ ID NO: 51565 - protein, 27 aa, Artificial Sequence
  Cyclic GFR-binding peptide
VVMENSLQEVVKDYEDYYLMTLPELET

SEQ ID NO: 51566 - protein, 39 aa, Artificial Sequence; identical to SEQ ID NO: 10671
  Cyclic GFR-binding peptide
  MOD_RES (2)..(4)..(35)..(36): Xaa is C or S

SEQ ID NO: 51567 - protein, 33 aa, Artificial Sequence
  Cyclic GFR-binding peptide
  MOD_RES (29)..(30): Xaa is C or S
VMNNSLQEIVNSSDDYYVVPLPELKTPAXXPKP

SEQ ID NO: 51568 - protein, 29 aa, Artificial Sequence
  Cyclic GFR-binding peptide
VVMNNSLQEIVNSSDDYYLVTLPELKTPA

SEQ ID NO: 51569 - protein, 32 aa, Artificial Sequence; identical to SEQ ID NO: 10674
  Cyclic GFR-binding peptide
  MOD_RES (31)..(32): Xaa is C or S

SEQ ID NO: 51570 - protein, 23 aa, Artificial Sequence
  Cyclic GFR-binding peptide
NSLQEVVKDYEDYYVMPLPELET

SEQ ID NO: 51571 - protein, 39 aa, Artificial Sequence; identical to SEQ ID NO: 10676
  Cyclic GFR-binding peptide
  MOD_RES (2)..(4)..(36)..(37): Xaa is C or S

SEQ ID NO: 51572 - protein, 35 aa, Artificial Sequence; identical to SEQ ID NO: 10677
  Cyclic GFR-binding peptide
  MOD_RES (2)..(4): Xaa is C or S

SEQ ID NO: 51573 - protein, 34 aa, Artificial Sequence
  Cyclic GFR-binding peptide
  MOD_RES (28)..(28): Xaa is C or S
MNNSLQEIVNSSDDYYLVTLPELKTPAXTPKTVH

SEQ ID NO: 51574 - protein, 28 aa, Artificial Sequence
  Cyclic GFR-binding peptide
  MOD_RES (27)..(28): Xaa is C or S
MNSLQEIKPTKGIYYVIPLPELDQSVXX

SEQ ID NO: 51575 - protein, 42 aa, Artificial Sequence; identical to SEQ ID NO: 10680
  Cyclic GFR-binding peptide
  MOD_RES (2)..(4)..(36)..(37): Xaa is C or S

SEQ ID NO: 51576 - protein, 36 aa, Artificial Sequence; identical to SEQ ID NO: 10681
  Cyclic GFR-binding peptide
  MOD_RES (2)..(4)..(36): Xaa is C or S

SEQ ID NO: 51577 - protein, 30 aa, Artificial Sequence
  Cyclic GFR-binding peptide
  MOD_RES (2)..(2): Xaa is C or S
GXGEVVMENSLQEVVKDYEDYYVMPLPELE

SEQ ID NO: 51578 - protein, 34 aa, Artificial Sequence
  Cyclic GFR-binding peptide
  MOD_RES (29)..(30): Xaa is C or S
VMNEYQKYIVNSSDDIFLVSIPSLKTPAXXPKPV

SEQ ID NO: 51579 - protein, 37 aa, Artificial Sequence; identical to SEQ ID NO: 10682
  Cyclic GFR-binding peptide
  MOD_RES (1)..(32)..(33): Xaa is C or S

SEQ ID NO: 51580 - protein, 29 aa, Artificial Sequence
  Cyclic GFR-binding peptide
  MOD_RES (26)..(27): Xaa is C or S
NSLQEVVNNASDYYLITLPELRTPVXXTP

SEQ ID NO: 51581 - protein, 29 aa, Artificial Sequence
  Cyclic GFR-binding peptide
  MOD_RES (1)..(1): Xaa is C or S
XGEVVMENSLQEVVKDYEDYYLMTLPELE

SEQ ID NO: 51582 - protein, 31 aa, Artificial Sequence; identical to SEQ ID NO: 10683
  Cyclic GFR-binding peptide
  MOD_RES (31)..(31): Xaa is C or S

SEQ ID NO: 51583 - protein, 39 aa, Artificial Sequence; identical to SEQ ID NO: 10685
  Cyclic GFR-binding peptide
  MOD_RES (2)..(34)..(35): Xaa is C or S

SEQ ID NO: 51584 - protein, 35 aa, Artificial Sequence; identical to SEQ ID NO: 10687
  Cyclic GFR-binding peptide
  MOD_RES (2)..(4): Xaa is C or S

SEQ ID NO: 51585 - protein, 28 aa, Artificial Sequence
  Cyclic GFR-binding peptide
  MOD_RES (1)..(1): Xaa is C or S
XGEVVMDNSLQEVVKENEDYYLMTLPEL

SEQ ID NO: 51586 - protein, 32 aa, Artificial Sequence; identical to SEQ ID NO: 10689
  Cyclic GFR-binding peptide
  MOD_RES (31)..(32): Xaa is C or S

SEQ ID NO: 51587 - protein, 34 aa, Artificial Sequence
  Cyclic GFR-binding peptide
  MOD_RES (29)..(30): Xaa is C or S
VMDNSLQEVVNNASDYYLITLPELRTPVXXTPPT

SEQ ID NO: 51588 - protein, 31 aa, Artificial Sequence
  Cyclic GFR-binding peptide
  MOD_RES (30)..(31): Xaa is C or S
VVMDNSLQEVVKENEDYYLMTLPELETPVXX

SEQ ID NO: 51589 - protein, 29 aa, Artificial Sequence
  Cyclic GFR-binding peptide
VVMDNSLQEVVKENEDYYVMPLPELETPV

SEQ ID NO: 51590 - protein, 32 aa, Artificial Sequence; identical to SEQ ID NO: 10690
  Cyclic GFR-binding peptide
  MOD_RES (1)..(1): Xaa is C or S

SEQ ID NO: 51591 - protein, 24 aa, Artificial Sequence
  Cyclic GFR-binding peptide
VVMDEYQKYVVKENEDIFLMSIPS

SEQ ID NO: 51592 - protein, 39 aa, Artificial Sequence; identical to SEQ ID NO: 10692
  Cyclic GFR-binding peptide
  MOD_RES (1)..(3)..(35)..(36): Xaa is C or S

SEQ ID NO: 51593 - protein, 36 aa, Artificial Sequence; identical to SEQ ID NO: 10693
  Cyclic GFR-binding peptide
  MOD_RES (32)..(32): Xaa is C or S

SEQ ID NO: 51594 - protein, 33 aa, Artificial Sequence
  Cyclic GFR-binding peptide
  MOD_RES (30)..(31): Xaa is C or S
KVVMNSLQEVKPTRGVYYVIPLPELDQPVXXPS

SEQ ID NO: 51595 - protein, 30 aa, Artificial Sequence
  Cyclic GFR-binding peptide
  MOD_RES (2)..(2): Xaa is C or S
GXSEVVMDNSLQEVVNNASDYYVIPLPELR

SEQ ID NO: 51596 - protein, 22 aa, Artificial Sequence
  Cyclic GFR-binding peptide
MNEYQKYIVNSSDDIFLVSIPS

SEQ ID NO: 51597 - protein, 32 aa, Artificial Sequence
  Cyclic GFR-binding peptide
  MOD_RES (2)..(4): Xaa is C or S
SXKXSKVIMNSLQEIKPTKGIYYVIPLPELDQ

SEQ ID NO: 51598 - protein, 33 aa, Artificial Sequence
  Cyclic GFR-binding peptide
  MOD_RES (28)..(29): Xaa is C or S
MENSLQEVVKDYEDYYLMTLPELETPVXXAKPI

SEQ ID NO: 51599 - protein, 34 aa, Artificial Sequence; identical to SEQ ID NO: 10694
  Cyclic GFR-binding peptide
  MOD_RES (1)..(33): Xaa is C or S

SEQ ID NO: 51600 - protein, 35 aa, Artificial Sequence; identical to SEQ ID NO: 10695
  Cyclic GFR-binding peptide
  MOD_RES (31)..(32): Xaa is C or S

SEQ ID NO: 51601 - protein, 29 aa, Artificial Sequence
  Cyclic GFR-binding peptide
  MOD_RES (28)..(28): Xaa is C or S
MNEYQKYIVNSSDDIFLVSIPSLKTPAXT

SEQ ID NO: 51602 - protein, 20 aa, Artificial Sequence
  Cyclic GFR-binding peptide
QYNKLVVNNASDLYLISIAS

SEQ ID NO: 51603 - protein, 24 aa, Artificial Sequence
  Cyclic GFR-binding peptide
NSLQEIVNSSDDYYVVPLPELQTP

SEQ ID NO: 51604 - protein, 30 aa, Artificial Sequence
  Cyclic GFR-binding peptide
  MOD_RES (1)..(1): Xaa is C or S
XGEVVMDNSLQEVVKENEDYYVMPLPELET

SEQ ID NO: 51605 - protein, 22 aa, Artificial Sequence
  Cyclic GFR-binding peptide
VMNSLQEVKPTRGVYYVIPLPE

SEQ ID NO: 51606 - protein, 22 aa, Artificial Sequence
  Cyclic GFR-binding peptide
DQYNKLVVNNASDLYLISIASL

SEQ ID NO: 51607 - protein, 22 aa, Artificial Sequence
  Cyclic GFR-binding peptide
DNSLQEVVNNASDYYVIPLPEL

SEQ ID NO: 51608 - protein, 37 aa, Artificial Sequence; identical to SEQ ID NO: 10699
  Cyclic GFR-binding peptide
  MOD_RES (2)..(4)..(35)..(36): Xaa is C or S

SEQ ID NO: 51609 - protein, 39 aa, Artificial Sequence; identical to SEQ ID NO: 10700
  Cyclic GFR-binding peptide
  MOD_RES (1)..(3)..(35)..(36): Xaa is C or S

SEQ ID NO: 51610 - protein, 29 aa, Artificial Sequence
  Cyclic GFR-binding peptide
  MOD_RES (27)..(28): Xaa is C or S
DNSLQEVVKENEDYYLMTLPELETPVXXA

SEQ ID NO: 51611 - protein, 32 aa, Artificial Sequence
  Cyclic GFR-binding peptide
  MOD_RES (30)..(31): Xaa is C or S
KVVMNSLQEVKPTRGVYYVIPLPELDQPVXXP

SEQ ID NO: 51612 - protein, 32 aa, Artificial Sequence
  Cyclic GFR-binding peptide
  MOD_RES (2)..(4): Xaa is C or S
RXGXSEVVMDQYNKLVVNNASDLYLISIASLR

SEQ ID NO: 51613 - protein, 31 aa, Artificial Sequence; identical to SEQ ID NO: 10704
  Cyclic GFR-binding peptide
  MOD_RES (31)..(31): Xaa is C or S

SEQ ID NO: 51614 - protein, 36 aa, Artificial Sequence; identical to SEQ ID NO: 10706
  Cyclic GFR-binding peptide
  MOD_RES (31)..(32): Xaa is C or S

SEQ ID NO: 51615 - protein, 33 aa, Artificial Sequence; identical to SEQ ID NO: 10708
  Cyclic GFR-binding peptide
  MOD_RES (32)..(32): Xaa is C or S

SEQ ID NO: 51616 - protein, 35 aa, Artificial Sequence
  Cyclic GFR-binding peptide
  MOD_RES (30)..(30): Xaa is C or S
VVMNNSLQEIVNSSDDYYLVTLPELKTPAXTPKTV

SEQ ID NO: 51617 - protein, 28 aa, Artificial Sequence
  Cyclic GFR-binding peptide
KVIMEYQKYIKPTKGIIFLISIPSLDQS

SEQ ID NO: 51618 - protein, 27 aa, Artificial Sequence
  Cyclic GFR-binding peptide
  MOD_RES (26)..(27): Xaa is C or S
NSLQEVVKDYEDYYLMTLPELETPVXX

SEQ ID NO: 51619 - protein, 36 aa, Artificial Sequence; identical to SEQ ID NO: 10709
  Cyclic GFR-binding peptide
  MOD_RES (1)..(33): Xaa is C or S

SEQ ID NO: 51620 - protein, 30 aa, Artificial Sequence
  Cyclic GFR-binding peptide
  MOD_RES (26)..(27): Xaa is C or S
NSLQEVKPKRGVYYLITLPELAQPVXXPAA

SEQ ID NO: 51621 - protein, 26 aa, Artificial Sequence
  Cyclic GFR-binding peptide
MNNSLQEIVNSSDDYYVVPLPELKTP

SEQ ID NO: 51622 - protein, 28 aa, Artificial Sequence
  Cyclic GFR-binding peptide
  MOD_RES (27)..(28): Xaa is C or S
MEYQKYIKPTKGIIFLISIPSLDQSVXX

SEQ ID NO: 51623 - protein, 38 aa, Artificial Sequence; identical to SEQ ID NO: 10712
  Cyclic GFR-binding peptide
  MOD_RES (2)..(34): Xaa is C or S

SEQ ID NO: 51624 - protein, 31 aa, Artificial Sequence
  Cyclic GFR-binding peptide
  MOD_RES (26)..(27): Xaa is C or S
NSLQEVVNNASDYYLITLPELRTPVXXTPPT

SEQ ID NO: 51625 - protein, 33 aa, Artificial Sequence; identical to SEQ ID NO: 10713
  Cyclic GFR-binding peptide
  MOD_RES (31)..(32): Xaa is C or S

SEQ ID NO: 51626 - protein, 25 aa, Artificial Sequence
  Cyclic GFR-binding peptide
NNSLQEIVNSSDDYYVVPLPELQTP

SEQ ID NO: 51627 - protein, 32 aa, Artificial Sequence
  Cyclic GFR-binding peptide
  MOD_RES (26)..(27): Xaa is C or S
NSLQEVVKENEDYYVMPLPELETPVXXAKPIK

SEQ ID NO: 51628 - protein, 31 aa, Artificial Sequence
  Cyclic GFR-binding peptide
  MOD_RES (29)..(30): Xaa is C or S
VMDQYNKLVVNNASDLYLISIASLRTPVXXT

SEQ ID NO: 51629 - protein, 28 aa, Artificial Sequence
  Cyclic GFR-binding peptide
  MOD_RES (2)..(2): Xaa is C or S
GXGEVVMDEYQKYVVKENEDIFLMSIPS

SEQ ID NO: 51630 - protein, 26 aa, Artificial Sequence
  Cyclic GFR-binding peptide
VVMDNSLQEVVKENEDYYVMPLPELE

SEQ ID NO: 51631 - protein, 40 aa, Artificial Sequence; identical to SEQ ID NO: 10714
  Cyclic GFR-binding peptide
  MOD_RES (1)..(3)..(35)..(36): Xaa is C or S

SEQ ID NO: 51632 - protein, 32 aa, Artificial Sequence; identical to SEQ ID NO: 10715
  Cyclic GFR-binding peptide
  MOD_RES (32)..(32): Xaa is C or S

SEQ ID NO: 51633 - protein, 29 aa, Artificial Sequence
  Cyclic GFR-binding peptide
  MOD_RES (28)..(29): Xaa is C or S
MENSLQEVVKDYEDYYLMTLPELETPVXX

SEQ ID NO: 51634 - protein, 25 aa, Artificial Sequence
  Cyclic GFR-binding peptide
NSLQEVKPTRGVYYVIPLPELDQPV

SEQ ID NO: 51635 - protein, 26 aa, Artificial Sequence
  Cyclic GFR-binding peptide
VMDNSLQEVVNNASDYYVIPLPELRT

SEQ ID NO: 51636 - protein, 31 aa, Artificial Sequence
  Cyclic GFR-binding peptide
  MOD_RES (2)..(2): Xaa is C or S
KXSKVIMNSLQEIKPTKGIYYVIPLPELDQS

SEQ ID NO: 51637 - protein, 30 aa, Artificial Sequence
  Cyclic GFR-binding peptide
  MOD_RES (30)..(30): Xaa is C or S
VVMENSLQEVVKDYEDYYVMPLPELETPVX

SEQ ID NO: 51638 - protein, 35 aa, Artificial Sequence; identical to SEQ ID NO: 10718
  Cyclic GFR-binding peptide
  MOD_RES (1)..(32)..(33): Xaa is C or S

SEQ ID NO: 51639 - protein, 38 aa, Artificial Sequence; identical to SEQ ID NO: 10719
  Cyclic GFR-binding peptide
  MOD_RES (1)..(3)..(34)..(35): Xaa is C or S

SEQ ID NO: 51640 - protein, 35 aa, Artificial Sequence; identical to SEQ ID NO: 10720
  Cyclic GFR-binding peptide
  MOD_RES (32)..(33): Xaa is C or S

SEQ ID NO: 51641 - protein, 31 aa, Artificial Sequence
  Cyclic GFR-binding peptide
  MOD_RES (30)..(31): Xaa is C or S
VVMNEYQKYIVNSSDDIFLVSIPSLKTPAXX

SEQ ID NO: 51642 - protein, 37 aa, Artificial Sequence; identical to SEQ ID NO: 10722
  Cyclic GFR-binding peptide
  MOD_RES (1)..(33)..(34): Xaa is C or S

SEQ ID NO: 51643 - protein, 27 aa, Artificial Sequence
  Cyclic GFR-binding peptide
RVVMNEYQKYIVNSSDDIFLVSIPSLQ

SEQ ID NO: 51644 - protein, 35 aa, Artificial Sequence; identical to SEQ ID NO: 10725
  Cyclic GFR-binding peptide
  MOD_RES (1)..(33): Xaa is C or S

SEQ ID NO: 51645 - protein, 27 aa, Artificial Sequence
  Cyclic GFR-binding peptide
  MOD_RES (27)..(27): Xaa is C or S
DNSLQEVVKENEDYYLMTLPELETPVX

SEQ ID NO: 51646 - protein, 30 aa, Artificial Sequence
  Cyclic GFR-binding peptide
  MOD_RES (1)..(1): Xaa is C or S
XSEVVMDQYNKLVVNNASDLYLISIASLRT

SEQ ID NO: 51647 - protein, 29 aa, Artificial Sequence
  Cyclic GFR-binding peptide
  MOD_RES (1)..(3): Xaa is C or S
XGXSRVVMNNSLQEIVNSSDDYYVVPLPE

SEQ ID NO: 51648 - protein, 40 aa, Artificial Sequence; identical to SEQ ID NO: 10728
  Cyclic GFR-binding peptide
  MOD_RES (1)..(3)..(35)..(36): Xaa is C or S

SEQ ID NO: 51649 - protein, 38 aa, Artificial Sequence; identical to SEQ ID NO: 10729
  Cyclic GFR-binding peptide
  MOD_RES (32)..(33): Xaa is C or S

SEQ ID NO: 51650 - protein, 32 aa, Artificial Sequence
  Cyclic GFR-binding peptide
  MOD_RES (1)..(3): Xaa is C or S
XKXSKVIMEYQKYIKPTKGIIFLISIPSLDQS

SEQ ID NO: 51651 - protein, 26 aa, Artificial Sequence
  Cyclic GFR-binding peptide
DNSLQEVVNNASDYYLITLPELRTPV

SEQ ID NO: 51652 - protein, 30 aa, Artificial Sequence
  Cyclic GFR-binding peptide
  MOD_RES (2)..(4): Xaa is C or S
RXGXGEVVMDNSLQEVVKENEDYYLMTLPE

SEQ ID NO: 51653 - protein, 26 aa, Artificial Sequence
  Cyclic GFR-binding peptide
NNSLQEIVNSSDDYYLVTLPELKTPA

SEQ ID NO: 51654 - protein, 31 aa, Artificial Sequence
  Cyclic GFR-binding peptide
  MOD_RES (26)..(27): Xaa is C or S
EYQKYIVNSSDDIFLVSIPSLKTPAXXPKPV

SEQ ID NO: 51655 - protein, 30 aa, Artificial Sequence
  Cyclic GFR-binding peptide
SRVVMNNSLQEIVNSSDDYYLVTLPELKTP

SEQ ID NO: 51656 - protein, 31 aa, Artificial Sequence; identical to SEQ ID NO: 10735
  Cyclic GFR-binding peptide

SEQ ID NO: 51657 - protein, 37 aa, Artificial Sequence; identical to SEQ ID NO: 10734
  Cyclic GFR-binding peptide
  MOD_RES (1)..(33)..(34): Xaa is C or S

SEQ ID NO: 51658 - protein, 31 aa, Artificial Sequence
  Cyclic GFR-binding peptide
  MOD_RES (1)..(3): Xaa is C or S
XGXGEVVMDNSLQEVVKENEDYYVMPLPELE

SEQ ID NO: 51659 - protein, 38 aa, Artificial Sequence; identical to SEQ ID NO: 10736
  Cyclic GFR-binding peptide
  MOD_RES (1)..(33)..(34): Xaa is C or S

SEQ ID NO: 51660 - protein, 42 aa, Artificial Sequence; identical to SEQ ID NO: 10737
  Cyclic GFR-binding peptide
  MOD_RES (2)..(4)..(36)..(37): Xaa is C or S

SEQ ID NO: 51661 - protein, 35 aa, Artificial Sequence; identical to SEQ ID NO: 10738
  Cyclic GFR-binding peptide
  MOD_RES (31)..(32): Xaa is C or S

SEQ ID NO: 51662 - protein, 33 aa, Artificial Sequence; identical to SEQ ID NO: 10739
  Cyclic GFR-binding peptide
  MOD_RES (31)..(32): Xaa is C or S

SEQ ID NO: 51663 - protein, 36 aa, Artificial Sequence; identical to SEQ ID NO: 10740
  Cyclic GFR-binding peptide
  MOD_RES (2)..(34)..(35): Xaa is C or S

SEQ ID NO: 51664 - protein, 36 aa, Artificial Sequence
  Cyclic GFR-binding peptide
  MOD_RES (30)..(31): Xaa is C or S
VVMNNSLQEIVNSSDDYYVVPLPELQTPAXXPKPVT

SEQ ID NO: 51665 - protein, 30 aa, Artificial Sequence
  Cyclic GFR-binding peptide
  MOD_RES (1)..(1): Xaa is C or S
XSKVIMEYQKYIKPTKGIIFLISIPSLDQS

SEQ ID NO: 51666 - protein, 23 aa, Artificial Sequence
  Cyclic GFR-binding peptide
NSLQEVVKENEDYYLMTLPELET

SEQ ID NO: 51667 - protein, 32 aa, Artificial Sequence
  Cyclic GFR-binding peptide
  MOD_RES (30)..(31): Xaa is C or S
VVMDNSLQEVVKENEDYYVMPLPELETPVXXA

SEQ ID NO: 51668 - protein, 36 aa, Artificial Sequence; identical to SEQ ID NO: 10744
  Cyclic GFR-binding peptide
  MOD_RES (2)..(34)..(35): Xaa is C or S

SEQ ID NO: 51669 - protein, 29 aa, Artificial Sequence
  Cyclic GFR-binding peptide
EVVMENSLQEVVKDYEDYYLMTLPELETP

SEQ ID NO: 51670 - protein, 36 aa, Artificial Sequence; identical to SEQ ID NO: 10746
  Cyclic GFR-binding peptide
  MOD_RES (32)..(32): Xaa is C or S

SEQ ID NO: 51671 - protein, 40 aa, Artificial Sequence; identical to SEQ ID NO: 10747
  Cyclic GFR-binding peptide
  MOD_RES (2)..(4)..(35)..(36): Xaa is C or S

SEQ ID NO: 51672 - protein, 22 aa, Artificial Sequence
  Cyclic GFR-binding peptide
NSLQEIVNSSDDYYLVTLPELK

SEQ ID NO: 51673 - protein, 30 aa, Artificial Sequence
  Cyclic GFR-binding peptide
  MOD_RES (26)..(27): Xaa is C or S
QYNKLVVNNASDLYLISIASLRTPVXXTPP

SEQ ID NO: 51674 - protein, 40 aa, Artificial Sequence; identical to SEQ ID NO: 10748
  Cyclic GFR-binding peptide
  MOD_RES (2)..(34)..(35): Xaa is C or S

SEQ ID NO: 51675 - protein, 28 aa, Artificial Sequence
  Cyclic GFR-binding peptide
ARVVMNNSLQEIVNSSDDYYVVPLPELQ

SEQ ID NO: 51676 - protein, 29 aa, Artificial Sequence
  Cyclic GFR-binding peptide
  MOD_RES (27)..(28): Xaa is C or S
MEYQKYIKPTKGIIFLISIPSLDQSVXXP

SEQ ID NO: 51677 - protein, 34 aa, Artificial Sequence; identical to SEQ ID NO: 10750
  Cyclic GFR-binding peptide
  MOD_RES (32)..(33): Xaa is C or S

SEQ ID NO: 51678 - protein, 38 aa, Artificial Sequence; identical to SEQ ID NO: 10751
  Cyclic GFR-binding peptide
  MOD_RES (2)..(34)..(35): Xaa is C or S

SEQ ID NO: 51679 - protein, 33 aa, Artificial Sequence
  Cyclic GFR-binding peptide
  MOD_RES (27)..(28): Xaa is C or S
NNSLQEIVNSSDDYYLVTLPELKTPAXXPKPVY

SEQ ID NO: 51680 - protein, 32 aa, Artificial Sequence
  Cyclic GFR-binding peptide
  MOD_RES (29)..(29): Xaa is C or S
VMNNSLQEIVNSSDDYYLVTLPELKTPAXTPK

SEQ ID NO: 51681 - protein, 33 aa, Artificial Sequence
  Cyclic GFR-binding peptide
  MOD_RES (27)..(28): Xaa is C or S
MEYQKYVKPKRGVIFLISIPSLAQPVXXPAASA

SEQ ID NO: 51682 - protein, 37 aa, Artificial Sequence; identical to SEQ ID NO: 10752
  Cyclic GFR-binding peptide
  MOD_RES (2)..(4)..(36)..(37): Xaa is C or S

SEQ ID NO: 51683 - protein, 31 aa, Artificial Sequence; identical to SEQ ID NO: 10753
  Cyclic GFR-binding peptide

SEQ ID NO: 51684 - protein, 36 aa, Artificial Sequence
  Cyclic GFR-binding peptide
  MOD_RES (30)..(31): Xaa is C or S
VVMNNSLQEIVNSSDDYYVVPLPELKTPAXXPKPVY

SEQ ID NO: 51685 - protein, 25 aa, Artificial Sequence
  Cyclic GFR-binding peptide
NEYQKYIVNSSDDIFLVSIPSLQTP

SEQ ID NO: 51686 - protein, 30 aa, Artificial Sequence
  Cyclic GFR-binding peptide
  MOD_RES (27)..(28): Xaa is C or S
NNSLQEIVNSSDDYYVVPLPELQTPAXXPK

SEQ ID NO: 51687 - protein, 29 aa, Artificial Sequence
  Cyclic GFR-binding peptide
  MOD_RES (1)..(1): Xaa is C or S
XSKVIMNSLQEIKPTKGIYYVIPLPELDQ

SEQ ID NO: 51688 - protein, 30 aa, Artificial Sequence
  Cyclic GFR-binding peptide
  MOD_RES (1)..(3): Xaa is C or S
XGXARVVMNNSLQEIVNSSDDYYVVPLPEL

SEQ ID NO: 51689 - protein, 27 aa, Artificial Sequence
  Cyclic GFR-binding peptide
MDNSLQEVVKENEDYYVMPLPELETPV

SEQ ID NO: 51690 - protein, 34 aa, Artificial Sequence; identical to SEQ ID NO: 10757
  Cyclic GFR-binding peptide
  MOD_RES (31)..(32): Xaa is C or S

SEQ ID NO: 51691 - protein, 37 aa, Artificial Sequence; identical to SEQ ID NO: 10758
  Cyclic GFR-binding peptide
  MOD_RES (32)..(33): Xaa is C or S

SEQ ID NO: 51692 - protein, 27 aa, Artificial Sequence
  Cyclic GFR-binding peptide
MEEYQKYVVKDYEDIFLMSIPSLETPV

SEQ ID NO: 51693 - protein, 25 aa, Artificial Sequence
  Cyclic GFR-binding peptide
MNSLQEVKPTRGVYYVIPLPELDQP

SEQ ID NO: 51694 - protein, 31 aa, Artificial Sequence; identical to SEQ ID NO: 10759
  Cyclic GFR-binding peptide
  MOD_RES (31)..(31): Xaa is C or S

SEQ ID NO: 51695 - protein, 26 aa, Artificial Sequence
  Cyclic GFR-binding peptide
KVIMNSLQEIKPTKGIYYVIPLPELD

SEQ ID NO: 51696 - protein, 36 aa, Artificial Sequence; identical to SEQ ID NO: 10761
  Cyclic GFR-binding peptide
  MOD_RES (1)..(3)..(35)..(36): Xaa is C or S

SEQ ID NO: 51697 - protein, 28 aa, Artificial Sequence
  Cyclic GFR-binding peptide
  MOD_RES (1)..(3): Xaa is C or S
XKXSRVIMEYQKYVKPKRGVIFLISIPS

SEQ ID NO: 51698 - protein, 26 aa, Artificial Sequence
  Cyclic GFR-binding peptide
MDNSLQEVVKENEDYYVMPLPELETP

SEQ ID NO: 51699 - protein, 33 aa, Artificial Sequence
  Cyclic GFR-binding peptide
  MOD_RES (29)..(30): Xaa is C or S
VMNEYQKYIVNSSDDIFLVSIPSLKTPAXXPKP

SEQ ID NO: 51700 - protein, 34 aa, Artificial Sequence
  Cyclic GFR-binding peptide
  MOD_RES (28)..(29): Xaa is C or S
IMEYQKYIKPTKGIIFLISIPSLDQSVXXPSASA

SEQ ID NO: 51701 - protein, 32 aa, Artificial Sequence
  Cyclic GFR-binding peptide
  MOD_RES (2)..(2): Xaa is C or S
GXSEVVMDQYNKLVVNNASDLYLISIASLRTP

SEQ ID NO: 51702 - protein, 27 aa, Artificial Sequence
  Cyclic GFR-binding peptide
  MOD_RES (26)..(27): Xaa is C or S
NSLQEVVNNASDYYVIPLPELRTPVXX

SEQ ID NO: 51703 - protein, 23 aa, Artificial Sequence
  Cyclic GFR-binding peptide
MDNSLQEVVKENEDYYVMPLPEL

SEQ ID NO: 51704 - protein, 32 aa, Artificial Sequence
  Cyclic GFR-binding peptide
  MOD_RES (2)..(4): Xaa is C or S
SXKXSRVIMEYQKYVKPKRGVIFLISIPSLAQ

SEQ ID NO: 51705 - protein, 29 aa, Artificial Sequence
  Cyclic GFR-binding peptide
  MOD_RES (29)..(29): Xaa is C or S
VVMNSLQEVKPTRGVYYVIPLPELDQPVX

SEQ ID NO: 51706 - protein, 34 aa, Artificial Sequence; identical to SEQ ID NO: 10763
  Cyclic GFR-binding peptide
  MOD_RES (1)..(32)..(33): Xaa is C or S

SEQ ID NO: 51707 - protein, 37 aa, Artificial Sequence; identical to SEQ ID NO: 10765
  Cyclic GFR-binding peptide
  MOD_RES (31)..(32): Xaa is C or S

SEQ ID NO: 51708 - protein, 32 aa, Artificial Sequence
  Cyclic GFR-binding peptide
  MOD_RES (1)..(3): Xaa is C or S
XGXGEVVMEEYQKYVVKDYEDIFLMSIPSLET

SEQ ID NO: 51709 - protein, 22 aa, Artificial Sequence
  Cyclic GFR-binding peptide
MENSLQEVVKDYEDYYVMPLPE

SEQ ID NO: 51710 - protein, 37 aa, Artificial Sequence; identical to SEQ ID NO: 10770
  Cyclic GFR-binding peptide
  MOD_RES (2)..(4)..(36)..(37): Xaa is C or S

SEQ ID NO: 51711 - protein, 29 aa, Artificial Sequence
  Cyclic GFR-binding peptide
  MOD_RES (2)..(2): Xaa is C or S
GXGEVVMDEYQKYVVKENEDIFLMSIPSL

SEQ ID NO: 51712 - protein, 27 aa, Artificial Sequence
  Cyclic GFR-binding peptide
  MOD_RES (27)..(27): Xaa is C or S
DNSLQEVVKENEDYYVMPLPELETPVX

SEQ ID NO: 51713 - protein, 36 aa, Artificial Sequence; identical to SEQ ID NO: 10771
  Cyclic GFR-binding peptide
  MOD_RES (1)..(3)..(35)..(36): Xaa is C or S

SEQ ID NO: 51714 - protein, 26 aa, Artificial Sequence
  Cyclic GFR-binding peptide
GEVVMDNSLQEVVKENEDYYLMTLPE

SEQ ID NO: 51715 - protein, 38 aa, Artificial Sequence; identical to SEQ ID NO: 10773
  Cyclic GFR-binding peptide
  MOD_RES (2)..(33)..(34): Xaa is C or S

SEQ ID NO: 51716 - protein, 38 aa, Artificial Sequence; identical to SEQ ID NO: 10774
  Cyclic GFR-binding peptide
  MOD_RES (1)..(33)..(34): Xaa is C or S

SEQ ID NO: 51717 - protein, 34 aa, Artificial Sequence; identical to SEQ ID NO: 10776
  Cyclic GFR-binding peptide
  MOD_RES (2)..(34): Xaa is C or S

SEQ ID NO: 51718 - protein, 37 aa, Artificial Sequence
  Cyclic GFR-binding peptide
  MOD_RES (1)..(32)..(33): Xaa is C or S
XSRVIMEYQKYVKPKRGVIFLISIPSLAQPVXXPAAS

SEQ ID NO: 51719 - protein, 29 aa, Artificial Sequence
  Cyclic GFR-binding peptide
VVMENSLQEVVKDYEDYYVMPLPELETPV

SEQ ID NO: 51720 - protein, 34 aa, Artificial Sequence; identical to SEQ ID NO: 10779
  Cyclic GFR-binding peptide
  MOD_RES (31)..(32): Xaa is C or S

SEQ ID NO: 51721 - protein, 28 aa, Artificial Sequence
  Cyclic GFR-binding peptide
EVVMDNSLQEVVNNASDYYVIPLPELRT

SEQ ID NO: 51722 - protein, 29 aa, Artificial Sequence
  Cyclic GFR-binding peptide
  MOD_RES (29)..(29): Xaa is C or S
VIMNSLQEIKPTKGIYYVIPLPELDQSVX

SEQ ID NO: 51723 - protein, 39 aa, Artificial Sequence; identical to SEQ ID NO: 10786
  Cyclic GFR-binding peptide
  MOD_RES (2)..(34)..(35): Xaa is C or S

SEQ ID NO: 51724 - protein, 31 aa, Artificial Sequence
  Cyclic GFR-binding peptide
  MOD_RES (1)..(1): Xaa is C or S
XGEVVMENSLQEVVKDYEDYYLMTLPELETP

SEQ ID NO: 51725 - protein, 21 aa, Artificial Sequence
  Cyclic GFR-binding peptide
DEYQKYVVKENEDIFLMSIPS

SEQ ID NO: 51726 - protein, 38 aa, Artificial Sequence; identical to SEQ ID NO: 10788
  Cyclic GFR-binding peptide
  MOD_RES (2)..(34)..(35): Xaa is C or S

SEQ ID NO: 51727 - protein, 31 aa, Artificial Sequence
  Cyclic GFR-binding peptide
  MOD_RES (27)..(28): Xaa is C or S
NNSLQEIVNSSDDYYLVTLPELKTPAXXPKP

SEQ ID NO: 51728 - protein, 30 aa, Artificial Sequence
  Cyclic GFR-binding peptide
  MOD_RES (1)..(3): Xaa is C or S
XGXGEVVMDEYQKYVVKENEDIFLMSIPSL

SEQ ID NO: 51729 - protein, 30 aa, Artificial Sequence
  Cyclic GFR-binding peptide
  MOD_RES (2)..(4): Xaa is C or S
SXKXSKVVMNSLQEVKPTRGVYYVIPLPEL

SEQ ID NO: 51730 - protein, 34 aa, Artificial Sequence; identical to SEQ ID NO: 10791
  Cyclic GFR-binding peptide
  MOD_RES (2)..(34): Xaa is C or S

SEQ ID NO: 51731 - protein, 35 aa, Artificial Sequence; identical to SEQ ID NO: 10794
  Cyclic GFR-binding peptide
  MOD_RES (32)..(33): Xaa is C or S

SEQ ID NO: 51732 - protein, 32 aa, Artificial Sequence
  Cyclic GFR-binding peptide
  MOD_RES (27)..(28): Xaa is C or S
NNSLQEIVNSSDDYYLVTLPELQTPAXXPKPV

SEQ ID NO: 51733 - protein, 32 aa, Artificial Sequence
  Cyclic GFR-binding peptide
  MOD_RES (30)..(31): Xaa is C or S
VVMDEYQKYVVKENEDIFLMSIPSLETPVXXA

SEQ ID NO: 51734 - protein, 35 aa, Artificial Sequence
  Cyclic GFR-binding peptide
  MOD_RES (30)..(31): Xaa is C or S
KVVMNSLQEVKPTRGVYYVIPLPELDQPVXXPSAS

SEQ ID NO: 51735 - protein, 34 aa, Artificial Sequence; identical to SEQ ID NO: 10799
  Cyclic GFR-binding peptide
  MOD_RES (1)..(33)..(34): Xaa is C or S

SEQ ID NO: 51736 - protein, 25 aa, Artificial Sequence
  Cyclic GFR-binding peptide
MDEYQKYVVKENEDIFLMSIPSLET

SEQ ID NO: 51737 - protein, 24 aa, Artificial Sequence
  Cyclic GFR-binding peptide
NNSLQEIVNSSDDYYVVPLPELQT

SEQ ID NO: 51738 - protein, 31 aa, Artificial Sequence
  Cyclic GFR-binding peptide
  MOD_RES (26)..(27): Xaa is C or S
EYQKYVKPKRGVIFLISIPSLAQPVXXPAAS

SEQ ID NO: 51739 - protein, 41 aa, Artificial Sequence; identical to SEQ ID NO: 10803
  Cyclic GFR-binding peptide
  MOD_RES (1)..(3)..(35)..(36): Xaa is C or S

SEQ ID NO: 51740 - protein, 30 aa, Artificial Sequence
  Cyclic GFR-binding peptide
  MOD_RES (1)..(3): Xaa is C or S
XKXSRVIMNSLQEVKPKRGVYYLITLPELA

SEQ ID NO: 51741 - protein, 32 aa, Artificial Sequence; identical to SEQ ID NO: 10804
  Cyclic GFR-binding peptide
  MOD_RES (31)..(32): Xaa is C or S

SEQ ID NO: 51742 - protein, 29 aa, Artificial Sequence
  Cyclic GFR-binding peptide
  MOD_RES (2)..(2): Xaa is C or S
KXSKVIMNSLQEIKPTKGIYYVIPLPELD

SEQ ID NO: 51743 - protein, 38 aa, Artificial Sequence; identical to SEQ ID NO: 10805
  Cyclic GFR-binding peptide
  MOD_RES (1)..(33): Xaa is C or S

SEQ ID NO: 51744 - protein, 35 aa, Artificial Sequence; identical to SEQ ID NO: 10806
  Cyclic GFR-binding peptide
  MOD_RES (1)..(33)..(34): Xaa is C or S

SEQ ID NO: 51745 - protein, 20 aa, Artificial Sequence
  Cyclic GFR-binding peptide
NSLQEVVKDYEDYYLMTLPE

SEQ ID NO: 51746 - protein, 36 aa, Artificial Sequence; identical to SEQ ID NO: 10807
  Cyclic GFR-binding peptide
  MOD_RES (31)..(32): Xaa is C or S

SEQ ID NO: 51747 - protein, 31 aa, Artificial Sequence
  Cyclic GFR-binding peptide
  MOD_RES (2)..(2): Xaa is C or S
GXGEVVMDNSLQEVVKENEDYYVMPLPELET

SEQ ID NO: 51748 - protein, 30 aa, Artificial Sequence
  Cyclic GFR-binding peptide
  MOD_RES (29)..(29): Xaa is C or S
VMNEYQKYIVNSSDDIFLVSIPSLKTPAXT

SEQ ID NO: 51749 - protein, 27 aa, Artificial Sequence
  Cyclic GFR-binding peptide
VMNNSLQEIVNSSDDYYVVPLPELKTP

SEQ ID NO: 51750 - protein, 28 aa, Artificial Sequence
  Cyclic GFR-binding peptide
  MOD_RES (2)..(2): Xaa is C or S
KXSKVVMNSLQEVKPTRGVYYVIPLPEL

SEQ ID NO: 51751 - protein, 38 aa, Artificial Sequence; identical to SEQ ID NO: 10809
  Cyclic GFR-binding peptide
  MOD_RES (2)..(4)..(36)..(37): Xaa is C or S

SEQ ID NO: 51752 - protein, 21 aa, Artificial Sequence
  Cyclic GFR-binding peptide
NNSLQEIVNSSDDYYVVPLPE

SEQ ID NO: 51753 - protein, 36 aa, Artificial Sequence; identical to SEQ ID NO: 10810
  Cyclic GFR-binding peptide
  MOD_RES (1)..(33)..(34): Xaa is C or S

SEQ ID NO: 51754 - protein, 30 aa, Artificial Sequence; identical to SEQ ID NO: 10811
  Cyclic GFR-binding peptide

SEQ ID NO: 51755 - protein, 32 aa, Artificial Sequence
  Cyclic GFR-binding peptide
  MOD_RES (29)..(30): Xaa is C or S
VVMEYQKYVKPTRGVIFLISIPSLDQPVXXPS

SEQ ID NO: 51756 - protein, 26 aa, Artificial Sequence
  Cyclic GFR-binding peptide
  MOD_RES (26)..(26): Xaa is C or S
NSLQEIVNSSDDYYLVTLPELKTPAX

SEQ ID NO: 51757 - protein, 34 aa, Artificial Sequence
  Cyclic GFR-binding peptide
  MOD_RES (2)..(4): Xaa is C or S
RXGXGEVVMDEYQKYVVKENEDIFLMSIPSLETP

SEQ ID NO: 51758 - protein, 37 aa, Artificial Sequence; identical to SEQ ID NO: 10816
  Cyclic GFR-binding peptide
  MOD_RES (2)..(4)..(36)..(37): Xaa is C or S

SEQ ID NO: 51759 - protein, 36 aa, Artificial Sequence
  Cyclic GFR-binding peptide
  MOD_RES (30)..(31): Xaa is C or S
VVMDNSLQEVVKENEDYYLMTLPELETPVXXAKPIK

SEQ ID NO: 51760 - protein, 27 aa, Artificial Sequence
  Cyclic GFR-binding peptide
VIMEYQKYVKPKRGVIFLISIPSLAQP

SEQ ID NO: 51761 - protein, 33 aa, Artificial Sequence; identical to SEQ ID NO: 10817
  Cyclic GFR-binding peptide
  MOD_RES (1)..(33): Xaa is C or S

SEQ ID NO: 51762 - protein, 36 aa, Artificial Sequence; identical to SEQ ID NO: 10818
  Cyclic GFR-binding peptide
  MOD_RES (1)..(3)..(35)..(36): Xaa is C or S

SEQ ID NO: 51763 - protein, 38 aa, Artificial Sequence; identical to SEQ ID NO: 10819
  Cyclic GFR-binding peptide
  MOD_RES (1)..(32)..(33): Xaa is C or S

SEQ ID NO: 51764 - protein, 33 aa, Artificial Sequence; identical to SEQ ID NO: 10820
  Cyclic GFR-binding peptide
  MOD_RES (1)..(3): Xaa is C or S

SEQ ID NO: 51765 - protein, 24 aa, Artificial Sequence
  Cyclic GFR-binding peptide
MDNSLQEVVKENEDYYLMTLPELE

SEQ ID NO: 51766 - protein, 30 aa, Artificial Sequence
  Cyclic GFR-binding peptide
  MOD_RES (1)..(3): Xaa is C or S
XGXGEVVMDNSLQEVVKENEDYYLMTLPEL

SEQ ID NO: 51767 - protein, 31 aa, Artificial Sequence; identical to SEQ ID NO: 10821
  Cyclic GFR-binding peptide

SEQ ID NO: 51768 - protein, 30 aa, Artificial Sequence
  Cyclic GFR-binding peptide
  MOD_RES (27)..(27): Xaa is C or S
NNSLQEIVNSSDDYYLVTLPELKTPAXTPK

SEQ ID NO: 51769 - protein, 25 aa, Artificial Sequence
  Cyclic GFR-binding peptide
MNEYQKYIVNSSDDIFLVSIPSLKT

SEQ ID NO: 51770 - protein, 37 aa, Artificial Sequence; identical to SEQ ID NO: 10823
  Cyclic GFR-binding peptide
  MOD_RES (2)..(4)..(35)..(36): Xaa is C or S

SEQ ID NO: 51771 - protein, 35 aa, Artificial Sequence; identical to SEQ ID NO: 10826
  Cyclic GFR-binding peptide
  MOD_RES (31)..(32): Xaa is C or S

SEQ ID NO: 51772 - protein, 40 aa, Artificial Sequence; identical to SEQ ID NO: 10827
  Cyclic GFR-binding peptide
  MOD_RES (2)..(4)..(36)..(37): Xaa is C or S

SEQ ID NO: 51773 - protein, 29 aa, Artificial Sequence
  Cyclic GFR-binding peptide
  MOD_RES (1)..(3): Xaa is C or S
XGXSEVVMDRYKKLVVNNASDFYLISIAN

SEQ ID NO: 51774 - protein, 26 aa, Artificial Sequence
  Cyclic GFR-binding peptide
GEVVMDNSLQEVVKENEDYYVMPLPE

SEQ ID NO: 51775 - protein, 30 aa, Artificial Sequence
  Cyclic GFR-binding peptide
  MOD_RES (28)..(28): Xaa is C or S
MNNSLQEIVNSSDDYYLVTLPELKTPAXTP

SEQ ID NO: 51776 - protein, 29 aa, Artificial Sequence
  Cyclic GFR-binding peptide
  MOD_RES (26)..(27): Xaa is C or S
NSLQEVVKENEDYYVMPLPELETPVXXAK

SEQ ID NO: 51777 - protein, 37 aa, Artificial Sequence; identical to SEQ ID NO: 10831
  Cyclic GFR-binding peptide
  MOD_RES (2)..(33)..(34): Xaa is C or S

SEQ ID NO: 51778 - protein, 31 aa, Artificial Sequence; identical to SEQ ID NO: 10832
  Cyclic GFR-binding peptide
  MOD_RES (31)..(31): Xaa is C or S

SEQ ID NO: 51779 - protein, 35 aa, Artificial Sequence; identical to SEQ ID NO: 10833
  Cyclic GFR-binding peptide
  MOD_RES (2)..(4): Xaa is C or S

SEQ ID NO: 51780 - protein, 34 aa, Artificial Sequence; identical to SEQ ID NO: 10834
  Cyclic GFR-binding peptide
  MOD_RES (32)..(33): Xaa is C or S

SEQ ID NO: 51781 - protein, 40 aa, Artificial Sequence; identical to SEQ ID NO: 10835
  Cyclic GFR-binding peptide
  MOD_RES (1)..(3)..(35)..(36): Xaa is C or S

SEQ ID NO: 51782 - protein, 40 aa, Artificial Sequence; identical to SEQ ID NO: 10837
  Cyclic GFR-binding peptide
  MOD_RES (1)..(3)..(35)..(36): Xaa is C or S

SEQ ID NO: 51783 - protein, 34 aa, Artificial Sequence; identical to SEQ ID NO: 10838
  Cyclic GFR-binding peptide
  MOD_RES (2)..(33)..(34): Xaa is C or S

SEQ ID NO: 51784 - protein, 29 aa, Artificial Sequence
  Cyclic GFR-binding peptide
  MOD_RES (1)..(3): Xaa is C or S
XGXSEVVMDNSLQEVVNNASDYYLITLPE

SEQ ID NO: 51785 - protein, 23 aa, Artificial Sequence
  Cyclic GFR-binding peptide
VIMEYQKYVKPKRGVIFLISIPS

SEQ ID NO: 51786 - protein, 37 aa, Artificial Sequence; identical to SEQ ID NO: 10844
  Cyclic GFR-binding peptide
  MOD_RES (32)..(33): Xaa is C or S

SEQ ID NO: 51787 - protein, 34 aa, Artificial Sequence; identical to SEQ ID NO: 10845
  Cyclic GFR-binding peptide
  MOD_RES (1)..(33)..(34): Xaa is C or S

SEQ ID NO: 51788 - protein, 41 aa, Artificial Sequence; identical to SEQ ID NO: 10846
  Cyclic GFR-binding peptide
  MOD_RES (2)..(4)..(36): Xaa is C or S

SEQ ID NO: 51789 - protein, 39 aa, Artificial Sequence; identical to SEQ ID NO: 10847
  Cyclic GFR-binding peptide
  MOD_RES (2)..(34)..(35): Xaa is C or S

SEQ ID NO: 51790 - protein, 31 aa, Artificial Sequence
  Cyclic GFR-binding peptide
  MOD_RES (28)..(29): Xaa is C or S
MDNSLQEVVNNASDYYVIPLPELRTPVXXTP

SEQ ID NO: 51791 - protein, 39 aa, Artificial Sequence; identical to SEQ ID NO: 10849
  Cyclic GFR-binding peptide
  MOD_RES (2)..(34)..(35): Xaa is C or S

SEQ ID NO: 51792 - protein, 38 aa, Artificial Sequence; identical to SEQ ID NO: 10850
  Cyclic GFR-binding peptide
  MOD_RES (2)..(4)..(36)..(37): Xaa is C or S

SEQ ID NO: 51793 - protein, 36 aa, Artificial Sequence
  Cyclic GFR-binding peptide
  MOD_RES (30)..(31): Xaa is C or S
VVMDQYNKLVVNNASDLYLISIASLRTPVXXTPPTS

SEQ ID NO: 51794 - protein, 30 aa, Artificial Sequence
  Cyclic GFR-binding peptide
  MOD_RES (28)..(29): Xaa is C or S
MNNSLQEIVNSSDDYYLVTLPELKTPAXXP

SEQ ID NO: 51795 - protein, 36 aa, Artificial Sequence; identical to SEQ ID NO: 10853
  Cyclic GFR-binding peptide
  MOD_RES (31)..(32): Xaa is C or S

SEQ ID NO: 51796 - protein, 28 aa, Artificial Sequence
  Cyclic GFR-binding peptide
GEVVMDEYQKYVVKENEDIFLMSIPSLE

SEQ ID NO: 51797 - protein, 36 aa, Artificial Sequence; identical to SEQ ID NO: 10855
  Cyclic GFR-binding peptide
  MOD_RES (1)..(3)..(35)..(36): Xaa is C or S

SEQ ID NO: 51798 - protein, 30 aa, Artificial Sequence
  Cyclic GFR-binding peptide
  MOD_RES (29)..(30): Xaa is C or S
VMNEYQKYIVNSSDDIFLVSIPSLKTPAXX

SEQ ID NO: 51799 - protein, 33 aa, Artificial Sequence
  Cyclic GFR-binding peptide
  MOD_RES (2)..(4): Xaa is C or S
HXGXARVVMNNSLQEIVNSSDDYYLVTLPELQT

SEQ ID NO: 51800 - protein, 35 aa, Artificial Sequence; identical to SEQ ID NO: 10859
  Cyclic GFR-binding peptide
  MOD_RES (2)..(4): Xaa is C or S

SEQ ID NO: 51801 - protein, 33 aa, Artificial Sequence
  Cyclic GFR-binding peptide
  MOD_RES (30)..(31): Xaa is C or S
VVMDNSLQEVVNNASDYYLITLPELRTPVXXTP

SEQ ID NO: 51802 - protein, 34 aa, Artificial Sequence
  Cyclic GFR-binding peptide
  MOD_RES (29)..(30): Xaa is C or S
VMEEYQKYVVKDYEDIFLMSIPSLETPVXXAKPI

SEQ ID NO: 51803 - protein, 25 aa, Artificial Sequence
  Cyclic GFR-binding peptide
SKVVMEYQKYVKPTRGVIFLISIPS

SEQ ID NO: 51804 - protein, 32 aa, Artificial Sequence; identical to SEQ ID NO: 10862
  Cyclic GFR-binding peptide
  MOD_RES (1)..(1): Xaa is C or S

SEQ ID NO: 51805 - protein, 28 aa, Artificial Sequence
  Cyclic GFR-binding peptide
  MOD_RES (2)..(2): Xaa is C or S
GXSRVVMNEYQKYIVNSSDDIFLVSIPS

SEQ ID NO: 51806 - protein, 28 aa, Artificial Sequence
  Cyclic GFR-binding peptide
  MOD_RES (1)..(1): Xaa is C or S
XARVVMNEYQKYIVNSSDDIFLVSIPSL

SEQ ID NO: 51807 - protein, 24 aa, Artificial Sequence
  Cyclic GFR-binding peptide
DRYKKLVVNNASDFYLISIANLRT

SEQ ID NO: 51808 - protein, 36 aa, Artificial Sequence
  Cyclic GFR-binding peptide
  MOD_RES (30)..(31): Xaa is C or S
VVMDNSLQEVVNNASDYYLITLPELRTPVXXTPPTS

SEQ ID NO: 51809 - protein, 24 aa, Artificial Sequence
  Cyclic GFR-binding peptide
VVMDNSLQEVVKENEDYYVMPLPE

SEQ ID NO: 51810 - protein, 21 aa, Artificial Sequence
  Cyclic GFR-binding peptide
NSLQEVVKDYEDYYLMTLPEL

SEQ ID NO: 51811 - protein, 34 aa, Artificial Sequence
  Cyclic GFR-binding peptide
  MOD_RES (29)..(30): Xaa is C or S
VMDEYQKYVVKENEDIFLMSIPSLETPVXXAKPI

SEQ ID NO: 51812 - protein, 25 aa, Artificial Sequence
  Cyclic GFR-binding peptide
ENSLQEVVKDYEDYYVMPLPELETP

SEQ ID NO: 51813 - protein, 33 aa, Artificial Sequence
  Cyclic GFR-binding peptide
  MOD_RES (28)..(29): Xaa is C or S
VMNSLQEVKPTRGVYYVIPLPELDQPVXXPSAS

SEQ ID NO: 51814 - protein, 37 aa, Artificial Sequence; identical to SEQ ID NO: 10865
  Cyclic GFR-binding peptide
  MOD_RES (31)..(32): Xaa is C or S

SEQ ID NO: 51815 - protein, 35 aa, Artificial Sequence
  Cyclic GFR-binding peptide
  MOD_RES (29)..(30): Xaa is C or S
VMDNSLQEVVKENEDYYLMTLPELETPVXXAKPIK

SEQ ID NO: 51816 - protein, 21 aa, Artificial Sequence
  Cyclic GFR-binding peptide
NNSLQEIVNSSDDYYLVTLPE

SEQ ID NO: 51817 - protein, 29 aa, Artificial Sequence
  Cyclic GFR-binding peptide
  MOD_RES (27)..(28): Xaa is C or S
DNSLQEVVKENEDYYVMPLPELETPVXXA

SEQ ID NO: 51818 - protein, 31 aa, Artificial Sequence
  Cyclic GFR-binding peptide
  MOD_RES (27)..(28): Xaa is C or S
DQYNKLVVNNASDLYLISIASLRTPVXXTPP

SEQ ID NO: 51819 - protein, 41 aa, Artificial Sequence; identical to SEQ ID NO: 10869
  Cyclic GFR-binding peptide
  MOD_RES (1)..(3)..(35)..(36): Xaa is C or S

SEQ ID NO: 51820 - protein, 31 aa, Artificial Sequence
  Cyclic GFR-binding peptide
  MOD_RES (29)..(30): Xaa is C or S
VIMEYQKYIKPTKGIIFLISIPSLDQSVXXP

SEQ ID NO: 51821 - protein, 40 aa, Artificial Sequence; identical to SEQ ID NO: 10871
  Cyclic GFR-binding peptide
  MOD_RES (1)..(3)..(35)..(36): Xaa is C or S

SEQ ID NO: 51822 - protein, 23 aa, Artificial Sequence
  Cyclic GFR-binding peptide
DNSLQEVVNNASDYYVIPLPELR

SEQ ID NO: 51823 - protein, 39 aa, Artificial Sequence; identical to SEQ ID NO: 10872
  Cyclic GFR-binding peptide
  MOD_RES (2)..(4)..(36)..(37): Xaa is C or S

SEQ ID NO: 51824 - protein, 30 aa, Artificial Sequence
  Cyclic GFR-binding peptide
  MOD_RES (28)..(29): Xaa is C or S
MNEYQKYIVNSSDDIFLVSIPSLKTPAXXP

SEQ ID NO: 51825 - protein, 31 aa, Artificial Sequence
  Cyclic GFR-binding peptide
  MOD_RES (30)..(31): Xaa is C or S
KVIMNSLQEIKPTKGIYYVIPLPELDQSVXX

SEQ ID NO: 51826 - protein, 32 aa, Artificial Sequence
  Cyclic GFR-binding peptide
  MOD_RES (1)..(3): Xaa is C or S
XGXGEVVMDEYQKYVVKENEDIFLMSIPSLET

SEQ ID NO: 51827 - protein, 33 aa, Artificial Sequence; identical to SEQ ID NO: 10873
  Cyclic GFR-binding peptide
  MOD_RES (31)..(32): Xaa is C or S

SEQ ID NO: 51828 - protein, 24 aa, Artificial Sequence
  Cyclic GFR-binding peptide
VMNSLQEVKPTRGVYYVIPLPELD

SEQ ID NO: 51829 - protein, 32 aa, Artificial Sequence
  Cyclic GFR-binding peptide
  MOD_RES (2)..(4): Xaa is C or S
HXGXSRVVMNNSLQEIVNSSDDYYVVPLPELK

SEQ ID NO: 51830 - protein, 27 aa, Artificial Sequence
  Cyclic GFR-binding peptide
RVVMNNSLQEIVNSSDDYYVVPLPELK

SEQ ID NO: 51831 - protein, 30 aa, Artificial Sequence
  Cyclic GFR-binding peptide
  MOD_RES (26)..(26): Xaa is C or S
NSLQEIVNSSDDYYVVPLPELKTPAXTPKT

SEQ ID NO: 51832 - protein, 34 aa, Artificial Sequence
  Cyclic GFR-binding peptide
  MOD_RES (30)..(31): Xaa is C or S
VVMDNSLQEVVNNASDYYVIPLPELRTPVXXTPP

SEQ ID NO: 51833 - protein, 24 aa, Artificial Sequence
  Cyclic GFR-binding peptide
MNSLQEVKPTRGVYYVIPLPELDQ

SEQ ID NO: 51834 - protein, 31 aa, Artificial Sequence
  Cyclic GFR-binding peptide
  MOD_RES (29)..(29): Xaa is C or S
VMNEYQKYIVNSSDDIFLVSIPSLKTPAXTP

SEQ ID NO: 51835 - protein, 40 aa, Artificial Sequence; identical to SEQ ID NO: 10874
  Cyclic GFR-binding peptide
  MOD_RES (1)..(3)..(35)..(36): Xaa is C or S

SEQ ID NO: 51836 - protein, 39 aa, Artificial Sequence; identical to SEQ ID NO: 10875
  Cyclic GFR-binding peptide
  MOD_RES (1)..(33)..(34): Xaa is C or S

SEQ ID NO: 51837 - protein, 31 aa, Artificial Sequence
  Cyclic GFR-binding peptide
  MOD_RES (30)..(31): Xaa is C or S
VVMNNSLQEIVNSSDDYYVVPLPELQTPAXX

SEQ ID NO: 51838 - protein, 39 aa, Artificial Sequence; identical to SEQ ID NO: 10876
  Cyclic GFR-binding peptide
  MOD_RES (2)..(34)..(35): Xaa is C or S

SEQ ID NO: 51839 - protein, 28 aa, Artificial Sequence
  Cyclic GFR-binding peptide
GEVVMDNSLQEVVKENEDYYLMTLPELE

SEQ ID NO: 51840 - protein, 36 aa, Artificial Sequence; identical to SEQ ID NO: 10877
  Cyclic GFR-binding peptide
  MOD_RES (2)..(4)..(35)..(36): Xaa is C or S

SEQ ID NO: 51841 - protein, 36 aa, Artificial Sequence; identical to SEQ ID NO: 10878
  Cyclic GFR-binding peptide
  MOD_RES (2)..(4)..(36): Xaa is C or S

SEQ ID NO: 51842 - protein, 36 aa, Artificial Sequence; identical to SEQ ID NO: 10880
  Cyclic GFR-binding peptide
  MOD_RES (2)..(4)..(35)..(36): Xaa is C or S

SEQ ID NO: 51843 - protein, 30 aa, Artificial Sequence
  Cyclic GFR-binding peptide
  MOD_RES (2)..(2): Xaa is C or S
GXSEVVMDRYKKLVVNNASDFYLISIANLR

SEQ ID NO: 51844 - protein, 32 aa, Artificial Sequence
  Cyclic GFR-binding peptide
  MOD_RES (30)..(31): Xaa is C or S
KVIMNSLQEIKPTKGIYYVIPLPELDQSVXXP

SEQ ID NO: 51845 - protein, 38 aa, Artificial Sequence; identical to SEQ ID NO: 10881
  Cyclic GFR-binding peptide
  MOD_RES (1)..(3)..(35)..(36): Xaa is C or S

SEQ ID NO: 51846 - protein, 30 aa, Artificial Sequence
  Cyclic GFR-binding peptide
GEVVMDNSLQEVVKENEDYYLMTLPELETP

SEQ ID NO: 51847 - protein, 39 aa, Artificial Sequence; identical to SEQ ID NO: 10883
  Cyclic GFR-binding peptide
  MOD_RES (1)..(3)..(35)..(36): Xaa is C or S

SEQ ID NO: 51848 - protein, 35 aa, Artificial Sequence
  Cyclic GFR-binding peptide
  MOD_RES (29)..(30): Xaa is C or S
VMNEYQKYIVNSSDDIFLVSIPSLKTPAXXPKPVY

SEQ ID NO: 51849 - protein, 23 aa, Artificial Sequence
  Cyclic GFR-binding peptide
MDRYKKLVVNNASDFYLISIANL

SEQ ID NO: 51850 - protein, 35 aa, Artificial Sequence
  Cyclic GFR-binding peptide
  MOD_RES (30)..(31): Xaa is C or S
KVIMEYQKYIKPTKGIIFLISIPSLDQSVXXPSAS

SEQ ID NO: 51851 - protein, 33 aa, Artificial Sequence; identical to SEQ ID NO: 10886
  Cyclic GFR-binding peptide
  MOD_RES (2)..(2): Xaa is C or S

SEQ ID NO: 51852 - protein, 25 aa, Artificial Sequence
  Cyclic GFR-binding peptide
NSLQEIVNSSDDYYVVPLPELQTPA

SEQ ID NO: 51853 - protein, 28 aa, Artificial Sequence
  Cyclic GFR-binding peptide
VIMEYQKYVKPKRGVIFLISIPSLAQPV

SEQ ID NO: 51854 - protein, 32 aa, Artificial Sequence
  Cyclic GFR-binding peptide
  MOD_RES (2)..(2): Xaa is C or S
GXGEVVMENSLQEVVKDYEDYYLMTLPELETP

SEQ ID NO: 51855 - protein, 33 aa, Artificial Sequence; identical to SEQ ID NO: 10891
  Cyclic GFR-binding peptide
  MOD_RES (1)..(32)..(33): Xaa is C or S

SEQ ID NO: 51856 - protein, 33 aa, Artificial Sequence; identical to SEQ ID NO: 10890
  Cyclic GFR-binding peptide
  MOD_RES (32)..(33): Xaa is C or S

SEQ ID NO: 51857 - protein, 27 aa, Artificial Sequence
  Cyclic GFR-binding peptide
  MOD_RES (2)..(2): Xaa is C or S
KXSKVVMNSLQEVKPTRGVYYVIPLPE

SEQ ID NO: 51858 - protein, 35 aa, Artificial Sequence; identical to SEQ ID NO: 10892
  Cyclic GFR-binding peptide
  MOD_RES (1)..(32)..(33): Xaa is C or S

SEQ ID NO: 51859 - protein, 41 aa, Artificial Sequence; identical to SEQ ID NO: 10893
  Cyclic GFR-binding peptide
  MOD_RES (2)..(4)..(36)..(37): Xaa is C or S

SEQ ID NO: 51860 - protein, 32 aa, Artificial Sequence
  Cyclic GFR-binding peptide
  MOD_RES (1)..(3): Xaa is C or S
XGXGEVVMENSLQEVVKDYEDYYLMTLPELET

SEQ ID NO: 51861 - protein, 32 aa, Artificial Sequence
  Cyclic GFR-binding peptide
  MOD_RES (1)..(3): Xaa is C or S
XKXSKVVMEYQKYVKPTRGVIFLISIPSLDQP

SEQ ID NO: 51862 - protein, 33 aa, Artificial Sequence
  Cyclic GFR-binding peptide
  MOD_RES (2)..(4): Xaa is C or S
RXGXGEVVMENSLQEVVKDYEDYYLMTLPELET

SEQ ID NO: 51863 - protein, 25 aa, Artificial Sequence
  Cyclic GFR-binding peptide
MDRYKKLVVNNASDFYLISIANLRT

SEQ ID NO: 51864 - protein, 31 aa, Artificial Sequence
  Cyclic GFR-binding peptide
  MOD_RES (2)..(2): Xaa is C or S
KXSKVVMNSLQEVKPTRGVYYVIPLPELDQP

SEQ ID NO: 51865 - protein, 32 aa, Artificial Sequence; identical to SEQ ID NO: 10896
  Cyclic GFR-binding peptide
  MOD_RES (31)..(32): Xaa is C or S

SEQ ID NO: 51866 - protein, 29 aa, Artificial Sequence
  Cyclic GFR-binding peptide
  MOD_RES (1)..(3): Xaa is C or S
XKXSRVIMEYQKYVKPKRGVIFLISIPSL

SEQ ID NO: 51867 - protein, 29 aa, Artificial Sequence
  Cyclic GFR-binding peptide
  MOD_RES (26)..(26): Xaa is C or S
NSLQEIVNSSDDYYLVTLPELKTPAXTPK

SEQ ID NO: 51868 - protein, 40 aa, Artificial Sequence; identical to SEQ ID NO: 10898
  Cyclic GFR-binding peptide
  MOD_RES (1)..(3)..(35)..(36): Xaa is C or S

SEQ ID NO: 51869 - protein, 22 aa, Artificial Sequence
  Cyclic GFR-binding peptide
MNNSLQEIVNSSDDYYLVTLPE

SEQ ID NO: 51870 - protein, 33 aa, Artificial Sequence; identical to SEQ ID NO: 10900
  Cyclic GFR-binding peptide
  MOD_RES (31)..(32): Xaa is C or S

SEQ ID NO: 51871 - protein, 39 aa, Artificial Sequence; identical to SEQ ID NO: 10901
  Cyclic GFR-binding peptide
  MOD_RES (1)..(33)..(34): Xaa is C or S

SEQ ID NO: 51872 - protein, 33 aa, Artificial Sequence
  Cyclic GFR-binding peptide
  MOD_RES (29)..(30): Xaa is C or S
VMNNSLQEIVNSSDDYYVVPLPELQTPAXXPKP

SEQ ID NO: 51873 - protein, 24 aa, Artificial Sequence
  Cyclic GFR-binding peptide
VMDQYNKLVVNNASDLYLISIASL

SEQ ID NO: 51874 - protein, 26 aa, Artificial Sequence
  Cyclic GFR-binding peptide
  MOD_RES (26)..(26): Xaa is C or S
EYQKYVVKDYEDIFLMSIPSLETPVX

SEQ ID NO: 51875 - protein, 33 aa, Artificial Sequence; identical to SEQ ID NO: 10903
  Cyclic GFR-binding peptide
  MOD_RES (1)..(33): Xaa is C or S

SEQ ID NO: 51876 - protein, 23 aa, Artificial Sequence
  Cyclic GFR-binding peptide
DQYNKLVVNNASDLYLISIASLR

SEQ ID NO: 51877 - protein, 20 aa, Artificial Sequence
  Cyclic GFR-binding peptide
NSLQEIKPTKGIYYLITLPE

SEQ ID NO: 51878 - protein, 37 aa, Artificial Sequence; identical to SEQ ID NO: 10904
  Cyclic GFR-binding peptide
  MOD_RES (1)..(3)..(35)..(36): Xaa is C or S

SEQ ID NO: 51879 - protein, 30 aa, Artificial Sequence
  Cyclic GFR-binding peptide
  MOD_RES (28)..(29): Xaa is C or S
MDEYQKYVVKENEDIFLMSIPSLETPVXXA

SEQ ID NO: 51880 - protein, 29 aa, Artificial Sequence
  Cyclic GFR-binding peptide
  MOD_RES (29)..(29): Xaa is C or S
VMNNSLQEIVNSSDDYYVVPLPELKTPAX

SEQ ID NO: 51881 - protein, 30 aa, Artificial Sequence
  Cyclic GFR-binding peptide
  MOD_RES (2)..(2): Xaa is C or S
GXGEVVMDEYQKYVVKENEDIFLMSIPSLE

SEQ ID NO: 51882 - protein, 29 aa, Artificial Sequence
  Cyclic GFR-binding peptide
RVVMNEYQKYIVNSSDDIFLVSIPSLKTP

SEQ ID NO: 51883 - protein, 40 aa, Artificial Sequence; identical to SEQ ID NO: 10907
  Cyclic GFR-binding peptide
  MOD_RES (2)..(4)..(36)..(37): Xaa is C or S

SEQ ID NO: 51884 - protein, 35 aa, Artificial Sequence; identical to SEQ ID NO: 10909
  Cyclic GFR-binding peptide
  MOD_RES (32)..(33): Xaa is C or S

SEQ ID NO: 51885 - protein, 32 aa, Artificial Sequence
  Cyclic GFR-binding peptide
  MOD_RES (28)..(29): Xaa is C or S
MEEYQKYVVKDYEDIFLMSIPSLETPVXXAKP

SEQ ID NO: 51886 - protein, 27 aa, Artificial Sequence
  Cyclic GFR-binding peptide
RVIMEYQKYVKPKRGVIFLISIPSLAQ

SEQ ID NO: 51887 - protein, 33 aa, Artificial Sequence; identical to SEQ ID NO: 10910
  Cyclic GFR-binding peptide
  MOD_RES (2)..(2): Xaa is C or S

SEQ ID NO: 51888 - protein, 42 aa, Artificial Sequence; identical to SEQ ID NO: 10912
  Cyclic GFR-binding peptide
  MOD_RES (2)..(4)..(36)..(37): Xaa is C or S

SEQ ID NO: 51889 - protein, 41 aa, Artificial Sequence; identical to SEQ ID NO: 10913
  Cyclic GFR-binding peptide
  MOD_RES (2)..(4)..(36)..(37): Xaa is C or S

SEQ ID NO: 51890 - protein, 23 aa, Artificial Sequence
  Cyclic GFR-binding peptide
VMENSLQEVVKDYEDYYVMPLPE

SEQ ID NO: 51891 - protein, 40 aa, Artificial Sequence; identical to SEQ ID NO: 10916
  Cyclic GFR-binding peptide
  MOD_RES (2)..(34)..(35): Xaa is C or S

SEQ ID NO: 51892 - protein, 25 aa, Artificial Sequence
  Cyclic GFR-binding peptide
MNEYQKYIVNSSDDIFLVSIPSLQT

SEQ ID NO: 51893 - protein, 36 aa, Artificial Sequence
  Cyclic GFR-binding peptide
  MOD_RES (30)..(31): Xaa is C or S
VVMENSLQEVVKDYEDYYVMPLPELETPVXXAKPIS

SEQ ID NO: 51894 - protein, 25 aa, Artificial Sequence
  Cyclic GFR-binding peptide
VIMNSLQEIKPTKGIYYVIPLPELD

SEQ ID NO: 51895 - protein, 25 aa, Artificial Sequence
  Cyclic GFR-binding peptide
EVVMDNSLQEVVKENEDYYVMPLPE

SEQ ID NO: 51896 - protein, 27 aa, Artificial Sequence
  Cyclic GFR-binding peptide
GEVVMDEYQKYVVKENEDIFLMSIPSL

SEQ ID NO: 51897 - protein, 33 aa, Artificial Sequence
  Cyclic GFR-binding peptide
  MOD_RES (28)..(29): Xaa is C or S
MDNSLQEVVNNASDYYLITLPELRTPVXXTPPT

SEQ ID NO: 51898 - protein, 31 aa, Artificial Sequence
  Cyclic GFR-binding peptide
  MOD_RES (28)..(29): Xaa is C or S
IMEYQKYVKPKRGVIFLISIPSLAQPVXXPA

SEQ ID NO: 51899 - protein, 32 aa, Artificial Sequence; identical to SEQ ID NO: 10920
  Cyclic GFR-binding peptide
  MOD_RES (1)..(1): Xaa is C or S

SEQ ID NO: 51900 - protein, 27 aa, Artificial Sequence
  Cyclic GFR-binding peptide
  MOD_RES (2)..(2): Xaa is C or S
KXSRVIMEYQKYVKPKRGVIFLISIPS

SEQ ID NO: 51901 - protein, 37 aa, Artificial Sequence; identical to SEQ ID NO: 10922
  Cyclic GFR-binding peptide
  MOD_RES (1)..(3)..(35): Xaa is C or S

SEQ ID NO: 51902 - protein, 26 aa, Artificial Sequence
  Cyclic GFR-binding peptide
MNNSLQEIVNSSDDYYVVPLPELQTP

SEQ ID NO: 51903 - protein, 28 aa, Artificial Sequence
  Cyclic GFR-binding peptide
RVVMNNSLQEIVNSSDDYYLVTLPELQT

SEQ ID NO: 51904 - protein, 26 aa, Artificial Sequence
  Cyclic GFR-binding peptide
VMNNSLQEIVNSSDDYYVVPLPELQT

SEQ ID NO: 51905 - protein, 21 aa, Artificial Sequence
  Cyclic GFR-binding peptide
MNSLQEVKPKRGVYYLITLPE

SEQ ID NO: 51906 - protein, 34 aa, Artificial Sequence; identical to SEQ ID NO: 10923
  Cyclic GFR-binding peptide
  MOD_RES (1)..(33)..(34): Xaa is C or S

SEQ ID NO: 51907 - protein, 33 aa, Artificial Sequence
  Cyclic GFR-binding peptide
  MOD_RES (30)..(31): Xaa is C or S
KVIMEYQKYIKPTKGIIFLISIPSLDQSVXXPS

SEQ ID NO: 51908 - protein, 27 aa, Artificial Sequence
  Cyclic GFR-binding peptide
VMENSLQEVVKDYEDYYVMPLPELETP

SEQ ID NO: 51909 - protein, 29 aa, Artificial Sequence
  Cyclic GFR-binding peptide
  MOD_RES (29)..(29): Xaa is C or S
VMDRYKKLVVNNASDFYLISIANLRTPVX

SEQ ID NO: 51910 - protein, 33 aa, Artificial Sequence
  Cyclic GFR-binding peptide
  MOD_RES (29)..(30): Xaa is C or S
VMEEYQKYVVKDYEDIFLMSIPSLETPVXXAKP

SEQ ID NO: 51911 - protein, 41 aa, Artificial Sequence; identical to SEQ ID NO: 10925
  Cyclic GFR-binding peptide
  MOD_RES (1)..(3)..(35): Xaa is C or S

SEQ ID NO: 51912 - protein, 28 aa, Artificial Sequence
  Cyclic GFR-binding peptide
  MOD_RES (26)..(27): Xaa is C or S
EYQKYVVKDYEDIFLMSIPSLETPVXXA

SEQ ID NO: 51913 - protein, 25 aa, Artificial Sequence
  Cyclic GFR-binding peptide
EYQKYVKPTRGVIFLISIPSLDQPV

SEQ ID NO: 51914 - protein, 31 aa, Artificial Sequence; identical to SEQ ID NO: 10928
  Cyclic GFR-binding peptide

SEQ ID NO: 51915 - protein, 38 aa, Artificial Sequence; identical to SEQ ID NO: 10929
  Cyclic GFR-binding peptide
  MOD_RES (32)..(33): Xaa is C or S

SEQ ID NO: 51916 - protein, 31 aa, Artificial Sequence
  Cyclic GFR-binding peptide
  MOD_RES (2)..(4): Xaa is C or S
HXGXARVVMNNSLQEIVNSSDDYYVVPLPEL

SEQ ID NO: 51917 - protein, 25 aa, Artificial Sequence
  Cyclic GFR-binding peptide
VMEYQKYVKPTRGVIFLISIPSLDQ

SEQ ID NO: 51918 - protein, 41 aa, Artificial Sequence; identical to SEQ ID NO: 10932
  Cyclic GFR-binding peptide
  MOD_RES (1)..(3)..(35)..(36): Xaa is C or S

SEQ ID NO: 51919 - protein, 22 aa, Artificial Sequence
  Cyclic GFR-binding peptide
ENSLQEVVKDYEDYYVMPLPEL

SEQ ID NO: 51920 - protein, 31 aa, Artificial Sequence
  Cyclic GFR-binding peptide
  MOD_RES (29)..(30): Xaa is C or S
VMDNSLQEVVKENEDYYLMTLPELETPVXXA

SEQ ID NO: 51921 - protein, 33 aa, Artificial Sequence
  Cyclic GFR-binding peptide
  MOD_RES (28)..(28): Xaa is C or S
MNNSLQEIVNSSDDYYLVTLPELKTPAXTPKTV

SEQ ID NO: 51922 - protein, 37 aa, Artificial Sequence; identical to SEQ ID NO: 10933
  Cyclic GFR-binding peptide
  MOD_RES (2)..(4)..(36)..(37): Xaa is C or S

SEQ ID NO: 51923 - protein, 35 aa, Artificial Sequence
  Cyclic GFR-binding peptide
  MOD_RES (30)..(31): Xaa is C or S
VVMDNSLQEVVKENEDYYLMTLPELETPVXXAKPI

SEQ ID NO: 51924 - protein, 34 aa, Artificial Sequence
  Cyclic GFR-binding peptide
  MOD_RES (28)..(29): Xaa is C or S
MDNSLQEVVKENEDYYVMPLPELETPVXXAKPIK

SEQ ID NO: 51925 - protein, 26 aa, Artificial Sequence
  Cyclic GFR-binding peptide
  MOD_RES (26)..(26): Xaa is C or S
NSLQEVKPTRGVYYVIPLPELDQPVX

SEQ ID NO: 51926 - protein, 26 aa, Artificial Sequence
  Cyclic GFR-binding peptide
DNSLQEVVNNASDYYVIPLPELRTPV

SEQ ID NO: 51927 - protein, 36 aa, Artificial Sequence; identical to SEQ ID NO: 10935
  Cyclic GFR-binding peptide
  MOD_RES (2)..(34)..(35): Xaa is C or S

SEQ ID NO: 51928 - protein, 35 aa, Artificial Sequence; identical to SEQ ID NO: 10936
  Cyclic GFR-binding peptide
  MOD_RES (2)..(4): Xaa is C or S

SEQ ID NO: 51929 - protein, 31 aa, Artificial Sequence
  Cyclic GFR-binding peptide
  MOD_RES (26)..(27): Xaa is C or S
NSLQEIVNSSDDYYLVTLPELQTPAXXPKPV

SEQ ID NO: 51930 - protein, 31 aa, Artificial Sequence; identical to SEQ ID NO: 10938
  Cyclic GFR-binding peptide
  MOD_RES (31)..(31): Xaa is C or S

SEQ ID NO: 51931 - protein, 28 aa, Artificial Sequence
  Cyclic GFR-binding peptide
VMDNSLQEVVNNASDYYVIPLPELRTPV

SEQ ID NO: 51932 - protein, 30 aa, Artificial Sequence
  Cyclic GFR-binding peptide
  MOD_RES (1)..(1): Xaa is C or S
XSKVVMEYQKYVKPTRGVIFLISIPSLDQP

SEQ ID NO: 51933 - protein, 33 aa, Artificial Sequence; identical to SEQ ID NO: 10940
  Cyclic GFR-binding peptide
  MOD_RES (2)..(2): Xaa is C or S

SEQ ID NO: 51934 - protein, 38 aa, Artificial Sequence; identical to SEQ ID NO: 10941
  Cyclic GFR-binding peptide
  MOD_RES (2)..(4)..(35)..(36): Xaa is C or S

SEQ ID NO: 51935 - protein, 38 aa, Artificial Sequence; identical to SEQ ID NO: 10943
  Cyclic GFR-binding peptide
  MOD_RES (2)..(33)..(34): Xaa is C or S

SEQ ID NO: 51936 - protein, 36 aa, Artificial Sequence; identical to SEQ ID NO: 10944
  Cyclic GFR-binding peptide
  MOD_RES (2)..(4)..(36): Xaa is C or S

SEQ ID NO: 51937 - protein, 41 aa, Artificial Sequence; identical to SEQ ID NO: 10945
  Cyclic GFR-binding peptide
  MOD_RES (2)..(4)..(36)..(37): Xaa is C or S

SEQ ID NO: 51938 - protein, 24 aa, Artificial Sequence
  Cyclic GFR-binding peptide
NSLQEVVKENEDYYLMTLPELETP

SEQ ID NO: 51939 - protein, 25 aa, Artificial Sequence
  Cyclic GFR-binding peptide
DRYKKLVVNNASDFYLISIANLRTP

SEQ ID NO: 51940 - protein, 34 aa, Artificial Sequence; identical to SEQ ID NO: 10948
  Cyclic GFR-binding peptide
  MOD_RES (31)..(32): Xaa is C or S

SEQ ID NO: 51941 - protein, 33 aa, Artificial Sequence; identical to SEQ ID NO: 10950
  Cyclic GFR-binding peptide
  MOD_RES (1)..(33): Xaa is C or S

SEQ ID NO: 51942 - protein, 27 aa, Artificial Sequence
  Cyclic GFR-binding peptide
GEVVMDNSLQEVVKENEDYYVMPLPEL

SEQ ID NO: 51943 - protein, 32 aa, Artificial Sequence
  Cyclic GFR-binding peptide
  MOD_RES (26)..(27): Xaa is C or S
EYQKYVKPTRGVIFLISIPSLDQPVXXPSASA

SEQ ID NO: 51944 - protein, 39 aa, Artificial Sequence; identical to SEQ ID NO: 10951
  Cyclic GFR-binding peptide
  MOD_RES (1)..(33)..(34): Xaa is C or S

SEQ ID NO: 51945 - protein, 29 aa, Artificial Sequence
  Cyclic GFR-binding peptide
EVVMDRYKKLVVNNASDFYLISIANLRTP

SEQ ID NO: 51946 - protein, 27 aa, Artificial Sequence
  Cyclic GFR-binding peptide
EVVMDQYNKLVVNNASDLYLISIASLR

SEQ ID NO: 51947 - protein, 21 aa, Artificial Sequence
  Cyclic GFR-binding peptide
NSLQEIVNSSDDYYVVPLPEL

SEQ ID NO: 51948 - protein, 40 aa, Artificial Sequence; identical to SEQ ID NO: 10953
  Cyclic GFR-binding peptide
  MOD_RES (1)..(3)..(35): Xaa is C or S

SEQ ID NO: 51949 - protein, 26 aa, Artificial Sequence
  Cyclic GFR-binding peptide
VVMEYQKYVKPTRGVIFLISIPSLDQ

SEQ ID NO: 51950 - protein, 34 aa, Artificial Sequence; identical to SEQ ID NO: 10955
  Cyclic GFR-binding peptide
  MOD_RES (2)..(34): Xaa is C or S

SEQ ID NO: 51951 - protein, 29 aa, Artificial Sequence
  Cyclic GFR-binding peptide
  MOD_RES (2)..(2): Xaa is C or S
GXGEVVMENSLQEVVKDYEDYYVMPLPEL

SEQ ID NO: 51952 - protein, 29 aa, Artificial Sequence
  Cyclic GFR-binding peptide
SKVIMNSLQEIKPTKGIYYVIPLPELDQS

SEQ ID NO: 51953 - protein, 26 aa, Artificial Sequence
  Cyclic GFR-binding peptide
RVVMNNSLQEIVNSSDDYYLVTLPEL

SEQ ID NO: 51954 - protein, 40 aa, Artificial Sequence; identical to SEQ ID NO: 10958
  Cyclic GFR-binding peptide
  MOD_RES (2)..(4)..(36): Xaa is C or S

SEQ ID NO: 51955 - protein, 30 aa, Artificial Sequence; identical to SEQ ID NO: 10960
  Cyclic GFR-binding peptide

SEQ ID NO: 51956 - protein, 31 aa, Artificial Sequence
  Cyclic GFR-binding peptide
  MOD_RES (30)..(30): Xaa is C or S
VVMNNSLQEIVNSSDDYYVVPLPELKTPAXT

SEQ ID NO: 51957 - protein, 23 aa, Artificial Sequence
  Cyclic GFR-binding peptide
IMNSLQEIKPTKGIYYVIPLPEL

SEQ ID NO: 51958 - protein, 26 aa, Artificial Sequence
  Cyclic GFR-binding peptide
VMDNSLQEVVKENEDYYVMPLPELET

SEQ ID NO: 51959 - protein, 24 aa, Artificial Sequence
  Cyclic GFR-binding peptide
VVMDQYNKLVVNNASDLYLISIAS

SEQ ID NO: 51960 - protein, 35 aa, Artificial Sequence; identical to SEQ ID NO: 10961
  Cyclic GFR-binding peptide
  MOD_RES (2)..(4): Xaa is C or S

SEQ ID NO: 51961 - protein, 25 aa, Artificial Sequence
  Cyclic GFR-binding peptide
VVMNNSLQEIVNSSDDYYLVTLPEL

SEQ ID NO: 51962 - protein, 34 aa, Artificial Sequence; identical to SEQ ID NO: 10962
  Cyclic GFR-binding peptide
  MOD_RES (1)..(3): Xaa is C or S

SEQ ID NO: 51963 - protein, 30 aa, Artificial Sequence
  Cyclic GFR-binding peptide
  MOD_RES (1)..(1): Xaa is C or S
XGEVVMEEYQKYVVKDYEDIFLMSIPSLET

SEQ ID NO: 51964 - protein, 27 aa, Artificial Sequence
  Cyclic GFR-binding peptide
VVMDNSLQEVVNNASDYYLITLPELRT

SEQ ID NO: 51965 - protein, 30 aa, Artificial Sequence; identical to SEQ ID NO: 2037
  Cyclic GFR-binding peptide

SEQ ID NO: 51966 - protein, 27 aa, Artificial Sequence
  Cyclic GFR-binding peptide
  MOD_RES (26)..(27): Xaa is C or S
EYQKYVVKDYEDIFLMSIPSLETPVXX

SEQ ID NO: 51967 - protein, 32 aa, Artificial Sequence
  Cyclic GFR-binding peptide
  MOD_RES (26)..(27): Xaa is C or S
NSLQEVVNNASDYYLITLPELRTPVXXTPPTS

SEQ ID NO: 51968 - protein, 33 aa, Artificial Sequence
  Cyclic GFR-binding peptide
  MOD_RES (2)..(4): Xaa is C or S
SXKXSKVIMNSLQEIKPTKGIYYVIPLPELDQS

SEQ ID NO: 51969 - protein, 38 aa, Artificial Sequence; identical to SEQ ID NO: 10967
  Cyclic GFR-binding peptide
  MOD_RES (2)..(34): Xaa is C or S

SEQ ID NO: 51970 - protein, 24 aa, Artificial Sequence
  Cyclic GFR-binding peptide
VVMDNSLQEVVNNASDYYLITLPE

SEQ ID NO: 51971 - protein, 23 aa, Artificial Sequence
  Cyclic GFR-binding peptide
MDQYNKLVVNNASDLYLISIASL

SEQ ID NO: 51972 - protein, 34 aa, Artificial Sequence; identical to SEQ ID NO: 10968
  Cyclic GFR-binding peptide
  MOD_RES (31)..(32): Xaa is C or S

SEQ ID NO: 51973 - protein, 26 aa, Artificial Sequence
  Cyclic GFR-binding peptide
VVMENSLQEVVKDYEDYYVMPLPELE

SEQ ID NO: 51974 - protein, 30 aa, Artificial Sequence
  Cyclic GFR-binding peptide
  MOD_RES (26)..(27): Xaa is C or S
EYQKYVKPKRGVIFLISIPSLAQPVXXPAA

SEQ ID NO: 51975 - protein, 20 aa, Artificial Sequence
  Cyclic GFR-binding peptide
EYQKYVKPKRGVIFLISIPS

SEQ ID NO: 51976 - protein, 27 aa, Artificial Sequence
  Cyclic GFR-binding peptide
RVVMNEYQKYIVNSSDDIFLVSIPSLK

SEQ ID NO: 51977 - protein, 41 aa, Artificial Sequence; identical to SEQ ID NO: 10970
  Cyclic GFR-binding peptide
  MOD_RES (1)..(3)..(35): Xaa is C or S

SEQ ID NO: 51978 - protein, 32 aa, Artificial Sequence
  Cyclic GFR-binding peptide
  MOD_RES (2)..(4): Xaa is C or S
RXGXSEVVMDNSLQEVVNNASDYYLITLPELR

SEQ ID NO: 51979 - protein, 31 aa, Artificial Sequence
  Cyclic GFR-binding peptide
  MOD_RES (29)..(30): Xaa is C or S
VMNNSLQEIVNSSDDYYLVTLPELKTPAXXP

SEQ ID NO: 51980 - protein, 30 aa, Artificial Sequence
  Cyclic GFR-binding peptide
  MOD_RES (1)..(1): Xaa is C or S
XSRVVMNNSLQEIVNSSDDYYLVTLPELKT

SEQ ID NO: 51981 - protein, 30 aa, Artificial Sequence; identical to SEQ ID NO: 2102
  Cyclic GFR-binding peptide

SEQ ID NO: 51982 - protein, 25 aa, Artificial Sequence
  Cyclic GFR-binding peptide
MENSLQEVVKDYEDYYVMPLPELET

SEQ ID NO: 51983 - protein, 33 aa, Artificial Sequence
  Cyclic GFR-binding peptide
  MOD_RES (2)..(4): Xaa is C or S
SXKXSKVVMEYQKYVKPTRGVIFLISIPSLDQP

SEQ ID NO: 51984 - protein, 32 aa, Artificial Sequence; identical to SEQ ID NO: 10975
  Cyclic GFR-binding peptide
  MOD_RES (32)..(32): Xaa is C or S

SEQ ID NO: 51985 - protein, 40 aa, Artificial Sequence; identical to SEQ ID NO: 10976
  Cyclic GFR-binding peptide
  MOD_RES (1)..(3)..(35)..(36): Xaa is C or S

SEQ ID NO: 51986 - protein, 36 aa, Artificial Sequence
  Cyclic GFR-binding peptide
  MOD_RES (30)..(31): Xaa is C or S
KVIMEYQKYIKPTKGIIFLISIPSLDQSVXXPSASA

SEQ ID NO: 51987 - protein, 30 aa, Artificial Sequence
  Cyclic GFR-binding peptide
  MOD_RES (27)..(28): Xaa is C or S
DNSLQEVVKENEDYYVMPLPELETPVXXAK

SEQ ID NO: 51988 - protein, 35 aa, Artificial Sequence; identical to SEQ ID NO: 10979
  Cyclic GFR-binding peptide
  MOD_RES (2)..(4): Xaa is C or S

SEQ ID NO: 51989 - protein, 33 aa, Artificial Sequence
  Cyclic GFR-binding peptide
  MOD_RES (30)..(31): Xaa is C or S
VVMDNSLQEVVKENEDYYLMTLPELETPVXXAK

SEQ ID NO: 51990 - protein, 25 aa, Artificial Sequence
  Cyclic GFR-binding peptide
SKVVMNSLQEVKPTRGVYYVIPLPE

SEQ ID NO: 51991 - protein, 33 aa, Artificial Sequence; identical to SEQ ID NO: 10980
  Cyclic GFR-binding peptide
  MOD_RES (1)..(33): Xaa is C or S

SEQ ID NO: 51992 - protein, 34 aa, Artificial Sequence; identical to SEQ ID NO: 10981
  Cyclic GFR-binding peptide
  MOD_RES (32)..(33): Xaa is C or S

SEQ ID NO: 51993 - protein, 30 aa, Artificial Sequence
  Cyclic GFR-binding peptide
  MOD_RES (2)..(4): Xaa is C or S
RXGXGEVVMDEYQKYVVKENEDIFLMSIPS

SEQ ID NO: 51994 - protein, 35 aa, Artificial Sequence; identical to SEQ ID NO: 10983
  Cyclic GFR-binding peptide
  MOD_RES (32)..(33): Xaa is C or S

SEQ ID NO: 51995 - protein, 34 aa, Artificial Sequence
  Cyclic GFR-binding peptide
  MOD_RES (2)..(4): Xaa is C or S
HXGXSRVVMNNSLQEIVNSSDDYYVVPLPELKTP

SEQ ID NO: 51996 - protein, 37 aa, Artificial Sequence; identical to SEQ ID NO: 10985
  Cyclic GFR-binding peptide
  MOD_RES (2)..(4)..(35)..(36): Xaa is C or S

SEQ ID NO: 51997 - protein, 26 aa, Artificial Sequence
  Cyclic GFR-binding peptide
VMDQYNKLVVNNASDLYLISIASLRT

SEQ ID NO: 51998 - protein, 26 aa, Artificial Sequence
  Cyclic GFR-binding peptide
  MOD_RES (26)..(26): Xaa is C or S
NSLQEVVKENEDYYLMTLPELETPVX

SEQ ID NO: 51999 - protein, 26 aa, Artificial Sequence
  Cyclic GFR-binding peptide
  MOD_RES (26)..(26): Xaa is C or S
NSLQEVVNNASDYYVIPLPELRTPVX

SEQ ID NO: 52000 - protein, 33 aa, Artificial Sequence; identical to SEQ ID NO: 10987
  Cyclic GFR-binding peptide
  MOD_RES (32)..(33): Xaa is C or S

SEQ ID NO: 52001 - protein, 28 aa, Artificial Sequence
  Cyclic GFR-binding peptide
  MOD_RES (2)..(2): Xaa is C or S
GXGEVVMENSLQEVVKDYEDYYLMTLPE

SEQ ID NO: 52002 - protein, 26 aa, Artificial Sequence
  Cyclic GFR-binding peptide
VMNSLQEVKPTRGVYYVIPLPELDQP

SEQ ID NO: 52003 - protein, 32 aa, Artificial Sequence
  Cyclic GFR-binding peptide
  MOD_RES (26)..(27): Xaa is C or S
RYKKLVVNNASDFYLISIANLRTPVXXTPPTS

SEQ ID NO: 52004 - protein, 29 aa, Artificial Sequence
  Cyclic GFR-binding peptide
ARVVMNNSLQEIVNSSDDYYLVTLPELQT

SEQ ID NO: 52005 - protein, 38 aa, Artificial Sequence; identical to SEQ ID NO: 10988
  Cyclic GFR-binding peptide
  MOD_RES (32)..(33): Xaa is C or S

SEQ ID NO: 52006 - protein, 37 aa, Artificial Sequence; identical to SEQ ID NO: 10989
  Cyclic GFR-binding peptide
  MOD_RES (31)..(32): Xaa is C or S

SEQ ID NO: 52007 - protein, 25 aa, Artificial Sequence
  Cyclic GFR-binding peptide
MDQYNKLVVNNASDLYLISIASLRT

SEQ ID NO: 52008 - protein, 25 aa, Artificial Sequence
  Cyclic GFR-binding peptide
MNSLQEIKPTKGIYYVIPLPELDQS

SEQ ID NO: 52009 - protein, 37 aa, Artificial Sequence; identical to SEQ ID NO: 10992
  Cyclic GFR-binding peptide
  MOD_RES (1)..(33): Xaa is C or S

SEQ ID NO: 52010 - protein, 31 aa, Artificial Sequence
  Cyclic GFR-binding peptide
  MOD_RES (1)..(3): Xaa is C or S
XGXSRVVMNEYQKYIVNSSDDIFLVSIPSLK

SEQ ID NO: 52011 - protein, 35 aa, Artificial Sequence; identical to SEQ ID NO: 10993
  Cyclic GFR-binding peptide
  MOD_RES (31)..(31): Xaa is C or S

SEQ ID NO: 52012 - protein, 36 aa, Artificial Sequence; identical to SEQ ID NO: 10994
  Cyclic GFR-binding peptide
  MOD_RES (1)..(33)..(34): Xaa is C or S

SEQ ID NO: 52013 - protein, 33 aa, Artificial Sequence
  Cyclic GFR-binding peptide
  MOD_RES (28)..(29): Xaa is C or S
MNNSLQEIVNSSDDYYVVPLPELQTPAXXPKPV

SEQ ID NO: 52014 - protein, 34 aa, Artificial Sequence
  Cyclic GFR-binding peptide
  MOD_RES (29)..(30): Xaa is C or S
VMNNSLQEIVNSSDDYYVVPLPELQTPAXXPKPV

SEQ ID NO: 52015 - protein, 24 aa, Artificial Sequence
  Cyclic GFR-binding peptide
EEYQKYVVKDYEDIFLMSIPSLET

SEQ ID NO: 52016 - protein, 39 aa, Artificial Sequence; identical to SEQ ID NO: 10998
  Cyclic GFR-binding peptide
  MOD_RES (2)..(34)..(35): Xaa is C or S

SEQ ID NO: 52017 - protein, 33 aa, Artificial Sequence
  Cyclic GFR-binding peptide
  MOD_RES (30)..(31): Xaa is C or S
VVMENSLQEVVKDYEDYYLMTLPELETPVXXAK

SEQ ID NO: 52018 - protein, 33 aa, Artificial Sequence
  Cyclic GFR-binding peptide
  MOD_RES (27)..(28): Xaa is C or S
ENSLQEVVKDYEDYYLMTLPELETPVXXAKPIS

SEQ ID NO: 52019 - protein, 35 aa, Artificial Sequence; identical to SEQ ID NO: 10999
  Cyclic GFR-binding peptide
  MOD_RES (2)..(34)..(35): Xaa is C or S

SEQ ID NO: 52020 - protein, 37 aa, Artificial Sequence; identical to SEQ ID NO: 11002
  Cyclic GFR-binding peptide
  MOD_RES (32)..(33): Xaa is C or S

SEQ ID NO: 52021 - protein, 37 aa, Artificial Sequence; identical to SEQ ID NO: 11003
  Cyclic GFR-binding peptide
  MOD_RES (31)..(32): Xaa is C or S

SEQ ID NO: 52022 - protein, 33 aa, Artificial Sequence
  Cyclic GFR-binding peptide
  MOD_RES (29)..(30): Xaa is C or S
VMDNSLQEVVNNASDYYLITLPELRTPVXXTPP

SEQ ID NO: 52023 - protein, 29 aa, Artificial Sequence
  Cyclic GFR-binding peptide
  MOD_RES (28)..(28): Xaa is C or S
MNNSLQEIVNSSDDYYLVTLPELKTPAXT

SEQ ID NO: 52024 - protein, 33 aa, Artificial Sequence; identical to SEQ ID NO: 11004
  Cyclic GFR-binding peptide
  MOD_RES (1)..(33): Xaa is C or S

SEQ ID NO: 52025 - protein, 33 aa, Artificial Sequence; identical to SEQ ID NO: 11005
  Cyclic GFR-binding peptide
  MOD_RES (1)..(32)..(33): Xaa is C or S

SEQ ID NO: 52026 - protein, 41 aa, Artificial Sequence; identical to SEQ ID NO: 11007
  Cyclic GFR-binding peptide
  MOD_RES (1)..(3)..(35)..(36): Xaa is C or S

SEQ ID NO: 52027 - protein, 34 aa, Artificial Sequence
  Cyclic GFR-binding peptide
  MOD_RES (29)..(30): Xaa is C or S
VVMEYQKYVKPTRGVIFLISIPSLDQPVXXPSAS

SEQ ID NO: 52028 - protein, 26 aa, Artificial Sequence
  Cyclic GFR-binding peptide
GEVVMDEYQKYVVKENEDIFLMSIPS

SEQ ID NO: 52029 - protein, 31 aa, Artificial Sequence
  Cyclic GFR-binding peptide
  MOD_RES (1)..(3): Xaa is C or S
XGXARVVMNNSLQEIVNSSDDYYLVTLPELQ

SEQ ID NO: 52030 - protein, 36 aa, Artificial Sequence; identical to SEQ ID NO: 11009
  Cyclic GFR-binding peptide
  MOD_RES (1)..(3)..(35)..(36): Xaa is C or S

SEQ ID NO: 52031 - protein, 26 aa, Artificial Sequence
  Cyclic GFR-binding peptide
SRVIMNSLQEVKPKRGVYYLITLPEL

SEQ ID NO: 52032 - protein, 24 aa, Artificial Sequence
  Cyclic GFR-binding peptide
ENSLQEVVKDYEDYYLMTLPELET

SEQ ID NO: 52033 - protein, 31 aa, Artificial Sequence; identical to SEQ ID NO: 11010
  Cyclic GFR-binding peptide
  MOD_RES (31)..(31): Xaa is C or S

SEQ ID NO: 52034 - protein, 26 aa, Artificial Sequence
  Cyclic GFR-binding peptide
VIMNSLQEIKPTKGIYYVIPLPELDQ

SEQ ID NO: 52035 - protein, 33 aa, Artificial Sequence
  Cyclic GFR-binding peptide
  MOD_RES (27)..(28): Xaa is C or S
EEYQKYVVKDYEDIFLMSIPSLETPVXXAKPIS

SEQ ID NO: 52036 - protein, 30 aa, Artificial Sequence; identical to SEQ ID NO: 2038
  Cyclic GFR-binding peptide

SEQ ID NO: 52037 - protein, 22 aa, Artificial Sequence
  Cyclic GFR-binding peptide
ENSLQEVVKDYEDYYLMTLPEL

SEQ ID NO: 52038 - protein, 38 aa, Artificial Sequence; identical to SEQ ID NO: 11013
  Cyclic GFR-binding peptide
  MOD_RES (1)..(33)..(34): Xaa is C or S

SEQ ID NO: 52039 - protein, 38 aa, Artificial Sequence; identical to SEQ ID NO: 11014
  Cyclic GFR-binding peptide
  MOD_RES (1)..(3)..(35)..(36): Xaa is C or S

SEQ ID NO: 52040 - protein, 38 aa, Artificial Sequence; identical to SEQ ID NO: 11015
  Cyclic GFR-binding peptide
  MOD_RES (1)..(33): Xaa is C or S

SEQ ID NO: 52041 - protein, 33 aa, Artificial Sequence
  Cyclic GFR-binding peptide
  MOD_RES (2)..(4): Xaa is C or S
RXGXSEVVMDRYKKLVVNNASDFYLISIANLRT

SEQ ID NO: 52042 - protein, 34 aa, Artificial Sequence
  Cyclic GFR-binding peptide
  MOD_RES (29)..(30): Xaa is C or S
VIMNSLQEIKPTKGIYYVIPLPELDQSVXXPSAS

SEQ ID NO: 52043 - protein, 32 aa, Artificial Sequence
  Cyclic GFR-binding peptide
  MOD_RES (1)..(3): Xaa is C or S
XGXSEVVMDNSLQEVVNNASDYYVIPLPELRT

SEQ ID NO: 52044 - protein, 37 aa, Artificial Sequence; identical to SEQ ID NO: 11018
  Cyclic GFR-binding peptide
  MOD_RES (32)..(33): Xaa is C or S

SEQ ID NO: 52045 - protein, 27 aa, Artificial Sequence
  Cyclic GFR-binding peptide
VVMDQYNKLVVNNASDLYLISIASLRT

SEQ ID NO: 52046 - protein, 28 aa, Artificial Sequence
  Cyclic GFR-binding peptide
VVMNNSLQEIVNSSDDYYLVTLPELQTP

SEQ ID NO: 52047 - protein, 38 aa, Artificial Sequence; identical to SEQ ID NO: 11022
  Cyclic GFR-binding peptide
  MOD_RES (2)..(4)..(35)..(36): Xaa is C or S

SEQ ID NO: 52048 - protein, 32 aa, Artificial Sequence
  Cyclic GFR-binding peptide
  MOD_RES (1)..(3): Xaa is C or S
XKXSRVIMEYQKYVKPKRGVIFLISIPSLAQP

SEQ ID NO: 52049 - protein, 23 aa, Artificial Sequence
  Cyclic GFR-binding peptide
VIMEYQKYIKPTKGIIFLISIPS

SEQ ID NO: 52050 - protein, 30 aa, Artificial Sequence
  Cyclic GFR-binding peptide
  MOD_RES (2)..(4): Xaa is C or S
RXGXGEVVMENSLQEVVKDYEDYYVMPLPE

SEQ ID NO: 52051 - protein, 23 aa, Artificial Sequence
  Cyclic GFR-binding peptide
DNSLQEVVKENEDYYVMPLPELE

SEQ ID NO: 52052 - protein, 37 aa, Artificial Sequence; identical to SEQ ID NO: 11025
  Cyclic GFR-binding peptide
  MOD_RES (1)..(3)..(35)..(36): Xaa is C or S

SEQ ID NO: 52053 - protein, 37 aa, Artificial Sequence; identical to SEQ ID NO: 11026
  Cyclic GFR-binding peptide
  MOD_RES (1)..(3)..(35)..(36): Xaa is C or S

SEQ ID NO: 52054 - protein, 33 aa, Artificial Sequence; identical to SEQ ID NO: 11027
  Cyclic GFR-binding peptide
  MOD_RES (2)..(2): Xaa is C or S

SEQ ID NO: 52055 - protein, 28 aa, Artificial Sequence
  Cyclic GFR-binding peptide
  MOD_RES (1)..(1): Xaa is C or S
XSKVVMEYQKYVKPTRGVIFLISIPSLD

SEQ ID NO: 52056 - protein, 32 aa, Artificial Sequence
  Cyclic GFR-binding peptide
  MOD_RES (2)..(4): Xaa is C or S
RXGXGEVVMDNSLQEVVKENEDYYLMTLPELE

SEQ ID NO: 52057 - protein, 37 aa, Artificial Sequence; identical to SEQ ID NO: 11029
  Cyclic GFR-binding peptide
  MOD_RES (2)..(34): Xaa is C or S

SEQ ID NO: 52058 - protein, 32 aa, Artificial Sequence
  Cyclic GFR-binding peptide
  MOD_RES (2)..(4): Xaa is C or S
SXKXSKVVMNSLQEVKPTRGVYYVIPLPELDQ

SEQ ID NO: 52059 - protein, 38 aa, Artificial Sequence; identical to SEQ ID NO: 11032
  Cyclic GFR-binding peptide
  MOD_RES (1)..(33)..(34): Xaa is C or S

SEQ ID NO: 52060 - protein, 32 aa, Artificial Sequence
  Cyclic GFR-binding peptide
  MOD_RES (30)..(30): Xaa is C or S
VVMNNSLQEIVNSSDDYYLVTLPELKTPAXTP

SEQ ID NO: 52061 - protein, 32 aa, Artificial Sequence
  Cyclic GFR-binding peptide
  MOD_RES (2)..(2): Xaa is C or S
GXSEVVMDNSLQEVVNNASDYYVIPLPELRTP

SEQ ID NO: 52062 - protein, 33 aa, Artificial Sequence
  Cyclic GFR-binding peptide
  MOD_RES (28)..(29): Xaa is C or S
MEEYQKYVVKDYEDIFLMSIPSLETPVXXAKPI

SEQ ID NO: 52063 - protein, 42 aa, Artificial Sequence; identical to SEQ ID NO: 11033
  Cyclic GFR-binding peptide
  MOD_RES (2)..(4)..(36): Xaa is C or S

SEQ ID NO: 52064 - protein, 20 aa, Artificial Sequence
  Cyclic GFR-binding peptide
RYKKLVVNNASDFYLISIAN

SEQ ID NO: 52065 - protein, 32 aa, Artificial Sequence
  Cyclic GFR-binding peptide
  MOD_RES (29)..(30): Xaa is C or S
VMNNSLQEIVNSSDDYYLVTLPELKTPAXXPK

SEQ ID NO: 52066 - protein, 28 aa, Artificial Sequence
  Cyclic GFR-binding peptide
  MOD_RES (2)..(2): Xaa is C or S
GXSEVVMDRYKKLVVNNASDFYLISIAN

SEQ ID NO: 52067 - protein, 31 aa, Artificial Sequence
  Cyclic GFR-binding peptide
  MOD_RES (1)..(3): Xaa is C or S
XGXSRVVMNNSLQEIVNSSDDYYLVTLPELK

SEQ ID NO: 52068 - protein, 39 aa, Artificial Sequence; identical to SEQ ID NO: 11038
  Cyclic GFR-binding peptide
  MOD_RES (1)..(3)..(35)..(36): Xaa is C or S

SEQ ID NO: 52069 - protein, 37 aa, Artificial Sequence; identical to SEQ ID NO: 11039
  Cyclic GFR-binding peptide
  MOD_RES (31)..(32): Xaa is C or S

SEQ ID NO: 52070 - protein, 25 aa, Artificial Sequence
  Cyclic GFR-binding peptide
VVMEYQKYVKPTRGVIFLISIPSLD

SEQ ID NO: 52071 - protein, 38 aa, Artificial Sequence; identical to SEQ ID NO: 11040
  Cyclic GFR-binding peptide
  MOD_RES (1)..(3)..(35)..(36): Xaa is C or S

SEQ ID NO: 52072 - protein, 29 aa, Artificial Sequence
  Cyclic GFR-binding peptide
  MOD_RES (1)..(3): Xaa is C or S
XGXARVVMNNSLQEIVNSSDDYYVVPLPE

SEQ ID NO: 52073 - protein, 37 aa, Artificial Sequence; identical to SEQ ID NO: 11043
  Cyclic GFR-binding peptide
  MOD_RES (1)..(3)..(35)..(36): Xaa is C or S

SEQ ID NO: 52074 - protein, 24 aa, Artificial Sequence
  Cyclic GFR-binding peptide
VVMENSLQEVVKDYEDYYVMPLPE

SEQ ID NO: 52075 - protein, 33 aa, Artificial Sequence
  Cyclic GFR-binding peptide
  MOD_RES (2)..(4): Xaa is C or S
HXGXSRVVMNNSLQEIVNSSDDYYLVTLPELKT

SEQ ID NO: 52076 - protein, 25 aa, Artificial Sequence
  Cyclic GFR-binding peptide
NSLQEIKPTKGIYYVIPLPELDQSV

SEQ ID NO: 52077 - protein, 35 aa, Artificial Sequence
  Cyclic GFR-binding peptide
  MOD_RES (30)..(31): Xaa is C or S
VVMDRYKKLVVNNASDFYLISIANLRTPVXXTPPT

SEQ ID NO: 52078 - protein, 36 aa, Artificial Sequence; identical to SEQ ID NO: 11045
  Cyclic GFR-binding peptide
  MOD_RES (1)..(3)..(35)..(36): Xaa is C or S

SEQ ID NO: 52079 - protein, 22 aa, Artificial Sequence
  Cyclic GFR-binding peptide
EEYQKYVVKDYEDIFLMSIPSL

SEQ ID NO: 52080 - protein, 30 aa, Artificial Sequence
  Cyclic GFR-binding peptide
  MOD_RES (1)..(3): Xaa is C or S
XGXSEVVMDNSLQEVVNNASDYYLITLPEL

SEQ ID NO: 52081 - protein, 29 aa, Artificial Sequence
  Cyclic GFR-binding peptide
  MOD_RES (26)..(27): Xaa is C or S
EYQKYIKPTKGIIFLISIPSLDQSVXXPS

SEQ ID NO: 52082 - protein, 36 aa, Artificial Sequence; identical to SEQ ID NO: 11046
  Cyclic GFR-binding peptide
  MOD_RES (1)..(33): Xaa is C or S

SEQ ID NO: 52083 - protein, 24 aa, Artificial Sequence
  Cyclic GFR-binding peptide
ENSLQEVVKDYEDYYVMPLPELET

SEQ ID NO: 52084 - protein, 23 aa, Artificial Sequence
  Cyclic GFR-binding peptide
VMDNSLQEVVKENEDYYVMPLPE

SEQ ID NO: 52085 - protein, 24 aa, Artificial Sequence
  Cyclic GFR-binding peptide
MDEYQKYVVKENEDIFLMSIPSLE

SEQ ID NO: 52086 - protein, 37 aa, Artificial Sequence; identical to SEQ ID NO: 11049
  Cyclic GFR-binding peptide
  MOD_RES (31)..(32): Xaa is C or S

SEQ ID NO: 52087 - protein, 31 aa, Artificial Sequence
  Cyclic GFR-binding peptide
  MOD_RES (29)..(30): Xaa is C or S
VMNEYQKYIVNSSDDIFLVSIPSLQTPAXXP

SEQ ID NO: 52088 - protein, 30 aa, Artificial Sequence
  Cyclic GFR-binding peptide
  MOD_RES (1)..(3): Xaa is C or S
XGXSRVVMNNSLQEIVNSSDDYYVVPLPEL

SEQ ID NO: 52089 - protein, 27 aa, Artificial Sequence
  Cyclic GFR-binding peptide
VMDNSLQEVVNNASDYYVIPLPELRTP

SEQ ID NO: 52090 - protein, 37 aa, Artificial Sequence; identical to SEQ ID NO: 11050
  Cyclic GFR-binding peptide
  MOD_RES (1)..(33)..(34): Xaa is C or S

SEQ ID NO: 52091 - protein, 37 aa, Artificial Sequence; identical to SEQ ID NO: 11052
  Cyclic GFR-binding peptide
  MOD_RES (1)..(3)..(34)..(35): Xaa is C or S

SEQ ID NO: 52092 - protein, 34 aa, Artificial Sequence; identical to SEQ ID NO: 11053
  Cyclic GFR-binding peptide
  MOD_RES (2)..(4): Xaa is C or S

SEQ ID NO: 52093 - protein, 25 aa, Artificial Sequence
  Cyclic GFR-binding peptide
EVVMDEYQKYVVKENEDIFLMSIPS

SEQ ID NO: 52094 - protein, 29 aa, Artificial Sequence
  Cyclic GFR-binding peptide
KVVMEYQKYVKPTRGVIFLISIPSLDQPV

SEQ ID NO: 52095 - protein, 33 aa, Artificial Sequence
  Cyclic GFR-binding peptide
  MOD_RES (2)..(4): Xaa is C or S
HXGXSRVVMNEYQKYIVNSSDDIFLVSIPSLKT

SEQ ID NO: 52096 - protein, 23 aa, Artificial Sequence
  Cyclic GFR-binding peptide
DNSLQEVVKENEDYYLMTLPELE

SEQ ID NO: 52097 - protein, 33 aa, Artificial Sequence
  Cyclic GFR-binding peptide
  MOD_RES (28)..(29): Xaa is C or S
IMNSLQEIKPTKGIYYVIPLPELDQSVXXPSAS

SEQ ID NO: 52098 - protein, 30 aa, Artificial Sequence
  Cyclic GFR-binding peptide
  MOD_RES (29)..(30): Xaa is C or S
VIMNSLQEIKPTKGIYYVIPLPELDQSVXX

SEQ ID NO: 52099 - protein, 30 aa, Artificial Sequence
  Cyclic GFR-binding peptide
  MOD_RES (28)..(28): Xaa is C or S
MNEYQKYIVNSSDDIFLVSIPSLKTPAXTP

SEQ ID NO: 52100 - protein, 32 aa, Artificial Sequence
  Cyclic GFR-binding peptide
  MOD_RES (29)..(30): Xaa is C or S
VMDNSLQEVVKENEDYYLMTLPELETPVXXAK

SEQ ID NO: 52101 - protein, 35 aa, Artificial Sequence; identical to SEQ ID NO: 11060
  Cyclic GFR-binding peptide
  MOD_RES (2)..(34)..(35): Xaa is C or S

SEQ ID NO: 52102 - protein, 28 aa, Artificial Sequence
  Cyclic GFR-binding peptide
  MOD_RES (27)..(27): Xaa is C or S
NNSLQEIVNSSDDYYLVTLPELKTPAXT

SEQ ID NO: 52103 - protein, 29 aa, Artificial Sequence
  Cyclic GFR-binding peptide
  MOD_RES (1)..(1): Xaa is C or S
XGEVVMDEYQKYVVKENEDIFLMSIPSLE

SEQ ID NO: 52104 - protein, 28 aa, Artificial Sequence
  Cyclic GFR-binding peptide
  MOD_RES (27)..(27): Xaa is C or S
NEYQKYIVNSSDDIFLVSIPSLKTPAXT

SEQ ID NO: 52105 - protein, 27 aa, Artificial Sequence
  Cyclic GFR-binding peptide
  MOD_RES (1)..(1): Xaa is C or S
XSEVVMDQYNKLVVNNASDLYLISIAS

SEQ ID NO: 52106 - protein, 30 aa, Artificial Sequence
  Cyclic GFR-binding peptide
  MOD_RES (29)..(30): Xaa is C or S
VVMEYQKYVKPTRGVIFLISIPSLDQPVXX

SEQ ID NO: 52107 - protein, 23 aa, Artificial Sequence
  Cyclic GFR-binding peptide
VMNSLQEVKPTRGVYYVIPLPEL

SEQ ID NO: 52108 - protein, 34 aa, Artificial Sequence; identical to SEQ ID NO: 11063
  Cyclic GFR-binding peptide
  MOD_RES (32)..(33): Xaa is C or S

SEQ ID NO: 52109 - protein, 24 aa, Artificial Sequence
  Cyclic GFR-binding peptide
VMNNSLQEIVNSSDDYYLVTLPEL

SEQ ID NO: 52110 - protein, 31 aa, Artificial Sequence; identical to SEQ ID NO: 11065
  Cyclic GFR-binding peptide

SEQ ID NO: 52111 - protein, 34 aa, Artificial Sequence
  Cyclic GFR-binding peptide
  MOD_RES (2)..(4): Xaa is C or S
RXGXGEVVMENSLQEVVKDYEDYYVMPLPELETP

SEQ ID NO: 52112 - protein, 29 aa, Artificial Sequence
  Cyclic GFR-binding peptide
GEVVMENSLQEVVKDYEDYYVMPLPELET

SEQ ID NO: 52113 - protein, 22 aa, Artificial Sequence
  Cyclic GFR-binding peptide
NSLQEVKPTRGVYYVIPLPELD

SEQ ID NO: 52114 - protein, 33 aa, Artificial Sequence
  Cyclic GFR-binding peptide
  MOD_RES (27)..(28): Xaa is C or S
DRYKKLVVNNASDFYLISIANLRTPVXXTPPTS

SEQ ID NO: 52115 - protein, 29 aa, Artificial Sequence
  Cyclic GFR-binding peptide
  MOD_RES (29)..(29): Xaa is C or S
VMENSLQEVVKDYEDYYVMPLPELETPVX

SEQ ID NO: 52116 - protein, 31 aa, Artificial Sequence
  Cyclic GFR-binding peptide
  MOD_RES (26)..(27): Xaa is C or S
NSLQEVVKENEDYYVMPLPELETPVXXAKPI

SEQ ID NO: 52117 - protein, 29 aa, Artificial Sequence
  Cyclic GFR-binding peptide
  MOD_RES (2)..(2): Xaa is C or S
KXSKVVMNSLQEVKPTRGVYYVIPLPELD

SEQ ID NO: 52118 - protein, 28 aa, Artificial Sequence
  Cyclic GFR-binding peptide
  MOD_RES (1)..(3): Xaa is C or S
XKXSKVVMEYQKYVKPTRGVIFLISIPS

SEQ ID NO: 52119 - protein, 38 aa, Artificial Sequence; identical to SEQ ID NO: 11070
  Cyclic GFR-binding peptide
  MOD_RES (32)..(32): Xaa is C or S

SEQ ID NO: 52120 - protein, 27 aa, Artificial Sequence
  Cyclic GFR-binding peptide
  MOD_RES (26)..(27): Xaa is C or S
NSLQEVKPTRGVYYVIPLPELDQPVXX

SEQ ID NO: 52121 - protein, 35 aa, Artificial Sequence; identical to SEQ ID NO: 11071
  Cyclic GFR-binding peptide
  MOD_RES (2)..(34)..(35): Xaa is C or S

SEQ ID NO: 52122 - protein, 30 aa, Artificial Sequence
  Cyclic GFR-binding peptide
  MOD_RES (29)..(30): Xaa is C or S
VIMNSLQEVKPKRGVYYLITLPELAQPVXX

SEQ ID NO: 52123 - protein, 25 aa, Artificial Sequence
  Cyclic GFR-binding peptide
ENSLQEVVKDYEDYYLMTLPELETP

SEQ ID NO: 52124 - protein, 27 aa, Artificial Sequence
  Cyclic GFR-binding peptide
  MOD_RES (1)..(1): Xaa is C or S
XSKVIMEYQKYIKPTKGIIFLISIPSL

SEQ ID NO: 52125 - protein, 32 aa, Artificial Sequence; identical to SEQ ID NO: 11072
  Cyclic GFR-binding peptide
  MOD_RES (32)..(32): Xaa is C or S

SEQ ID NO: 52126 - protein, 33 aa, Artificial Sequence
  Cyclic GFR-binding peptide
  MOD_RES (27)..(28): Xaa is C or S
ENSLQEVVKDYEDYYVMPLPELETPVXXAKPIS

SEQ ID NO: 52127 - protein, 39 aa, Artificial Sequence; identical to SEQ ID NO: 11076
  Cyclic GFR-binding peptide
  MOD_RES (1)..(33)..(34): Xaa is C or S

SEQ ID NO: 52128 - protein, 30 aa, Artificial Sequence
  Cyclic GFR-binding peptide
  MOD_RES (27)..(28): Xaa is C or S
MEYQKYIKPTKGIIFLISIPSLDQSVXXPS

SEQ ID NO: 52129 - protein, 30 aa, Artificial Sequence
  Cyclic GFR-binding peptide
  MOD_RES (27)..(28): Xaa is C or S
DRYKKLVVNNASDFYLISIANLRTPVXXTP

SEQ ID NO: 52130 - protein, 27 aa, Artificial Sequence
  Cyclic GFR-binding peptide
VVMDNSLQEVVKENEDYYLMTLPELET

SEQ ID NO: 52131 - protein, 29 aa, Artificial Sequence
  Cyclic GFR-binding peptide
  MOD_RES (2)..(2): Xaa is C or S
GXSRVVMNNSLQEIVNSSDDYYVVPLPEL

SEQ ID NO: 52132 - protein, 34 aa, Artificial Sequence; identical to SEQ ID NO: 11078
  Cyclic GFR-binding peptide
  MOD_RES (1)..(33)..(34): Xaa is C or S

SEQ ID NO: 52133 - protein, 30 aa, Artificial Sequence
  Cyclic GFR-binding peptide
  MOD_RES (26)..(27): Xaa is C or S
NSLQEVVKENEDYYVMPLPELETPVXXAKP

SEQ ID NO: 52134 - protein, 26 aa, Artificial Sequence
  Cyclic GFR-binding peptide
VIMNSLQEVKPKRGVYYLITLPELAQ

SEQ ID NO: 52135 - protein, 38 aa, Artificial Sequence; identical to SEQ ID NO: 11079
  Cyclic GFR-binding peptide
  MOD_RES (2)..(4)..(35)..(36): Xaa is C or S

SEQ ID NO: 52136 - protein, 31 aa, Artificial Sequence
  Cyclic GFR-binding peptide
  MOD_RES (27)..(28): Xaa is C or S
ENSLQEVVKDYEDYYVMPLPELETPVXXAKP

SEQ ID NO: 52137 - protein, 39 aa, Artificial Sequence; identical to SEQ ID NO: 11082
  Cyclic GFR-binding peptide
  MOD_RES (1)..(33)..(34): Xaa is C or S

SEQ ID NO: 52138 - protein, 36 aa, Artificial Sequence; identical to SEQ ID NO: 11083
  Cyclic GFR-binding peptide
  MOD_RES (1)..(3)..(35)..(36): Xaa is C or S

SEQ ID NO: 52139 - protein, 28 aa, Artificial Sequence
  Cyclic GFR-binding peptide
  MOD_RES (2)..(2): Xaa is C or S
KXSKVIMNSLQEIKPTKGIYYVIPLPEL

SEQ ID NO: 52140 - protein, 28 aa, Artificial Sequence
  Cyclic GFR-binding peptide
VMDRYKKLVVNNASDFYLISIANLRTPV

SEQ ID NO: 52141 - protein, 27 aa, Artificial Sequence
  Cyclic GFR-binding peptide
EVVMDRYKKLVVNNASDFYLISIANLR

SEQ ID NO: 52142 - protein, 29 aa, Artificial Sequence
  Cyclic GFR-binding peptide
  MOD_RES (1)..(1): Xaa is C or S
XARVVMNEYQKYIVNSSDDIFLVSIPSLQ

SEQ ID NO: 52143 - protein, 37 aa, Artificial Sequence; identical to SEQ ID NO: 11087
  Cyclic GFR-binding peptide
  MOD_RES (32)..(33): Xaa is C or S

SEQ ID NO: 52144 - protein, 34 aa, Artificial Sequence; identical to SEQ ID NO: 11088
  Cyclic GFR-binding peptide
  MOD_RES (1)..(3): Xaa is C or S

SEQ ID NO: 52145 - protein, 25 aa, Artificial Sequence
  Cyclic GFR-binding peptide
NSLQEVVKDYEDYYLMTLPELETPV

SEQ ID NO: 52146 - protein, 24 aa, Artificial Sequence
  Cyclic GFR-binding peptide
VIMNSLQEVKPKRGVYYLITLPEL

SEQ ID NO: 52147 - protein, 25 aa, Artificial Sequence
  Cyclic GFR-binding peptide
VMDQYNKLVVNNASDLYLISIASLR

SEQ ID NO: 52148 - protein, 25 aa, Artificial Sequence
  Cyclic GFR-binding peptide
VMNEYQKYIVNSSDDIFLVSIPSLK

SEQ ID NO: 52149 - protein, 37 aa, Artificial Sequence; identical to SEQ ID NO: 11090
  Cyclic GFR-binding peptide
  MOD_RES (2)..(4)..(36): Xaa is C or S

SEQ ID NO: 52150 - protein, 25 aa, Artificial Sequence
  Cyclic GFR-binding peptide
MDNSLQEVVKENEDYYLMTLPELET

SEQ ID NO: 52151 - protein, 37 aa, Artificial Sequence; identical to SEQ ID NO: 11092
  Cyclic GFR-binding peptide
  MOD_RES (2)..(34): Xaa is C or S

SEQ ID NO: 52152 - protein, 39 aa, Artificial Sequence; identical to SEQ ID NO: 11093
  Cyclic GFR-binding peptide
  MOD_RES (2)..(33)..(34): Xaa is C or S

SEQ ID NO: 52153 - protein, 29 aa, Artificial Sequence
  Cyclic GFR-binding peptide
SKVIMEYQKYIKPTKGIIFLISIPSLDQS

SEQ ID NO: 52154 - protein, 28 aa, Artificial Sequence
  Cyclic GFR-binding peptide
EVVMDNSLQEVVKENEDYYVMPLPELET

SEQ ID NO: 52155 - protein, 24 aa, Artificial Sequence
  Cyclic GFR-binding peptide
MDNSLQEVVNNASDYYLITLPELR

SEQ ID NO: 52156 - protein, 35 aa, Artificial Sequence
  Cyclic GFR-binding peptide
  MOD_RES (29)..(29): Xaa is C or S
VMNEYQKYIVNSSDDIFLVSIPSLKTPAXTPKTVH

SEQ ID NO: 52157 - protein, 22 aa, Artificial Sequence
  Cyclic GFR-binding peptide
NSLQEVVKDYEDYYVMPLPELE

SEQ ID NO: 52158 - protein, 31 aa, Artificial Sequence
  Cyclic GFR-binding peptide
  MOD_RES (29)..(30): Xaa is C or S
VMENSLQEVVKDYEDYYLMTLPELETPVXXA

SEQ ID NO: 52159 - protein, 30 aa, Artificial Sequence
  Cyclic GFR-binding peptide
  MOD_RES (1)..(1): Xaa is C or S
XSRVVMNNSLQEIVNSSDDYYVVPLPELKT

SEQ ID NO: 52160 - protein, 37 aa, Artificial Sequence; identical to SEQ ID NO: 11097
  Cyclic GFR-binding peptide
  MOD_RES (2)..(4)..(36)..(37): Xaa is C or S

SEQ ID NO: 52161 - protein, 28 aa, Artificial Sequence
  Cyclic GFR-binding peptide
  MOD_RES (1)..(1): Xaa is C or S
XSEVVMDRYKKLVVNNASDFYLISIANL

SEQ ID NO: 52162 - protein, 35 aa, Artificial Sequence
  Cyclic GFR-binding peptide
  MOD_RES (30)..(31): Xaa is C or S
VVMNNSLQEIVNSSDDYYLVTLPELKTPAXXPKPV

SEQ ID NO: 52163 - protein, 35 aa, Artificial Sequence; identical to SEQ ID NO: 11099
  Cyclic GFR-binding peptide
  MOD_RES (2)..(34)..(35): Xaa is C or S

SEQ ID NO: 52164 - protein, 38 aa, Artificial Sequence; identical to SEQ ID NO: 11100
  Cyclic GFR-binding peptide
  MOD_RES (1)..(3)..(35)..(36): Xaa is C or S

SEQ ID NO: 52165 - protein, 31 aa, Artificial Sequence
  Cyclic GFR-binding peptide
  MOD_RES (2)..(4): Xaa is C or S
RXGXGEVVMENSLQEVVKDYEDYYLMTLPEL

SEQ ID NO: 52166 - protein, 22 aa, Artificial Sequence
  Cyclic GFR-binding peptide
IMNSLQEVKPKRGVYYLITLPE

SEQ ID NO: 52167 - protein, 31 aa, Artificial Sequence
  Cyclic GFR-binding peptide
  MOD_RES (30)..(31): Xaa is C or S
RVIMEYQKYVKPKRGVIFLISIPSLAQPVXX

SEQ ID NO: 52168 - protein, 31 aa, Artificial Sequence
  Cyclic GFR-binding peptide
  MOD_RES (28)..(29): Xaa is C or S
IMNSLQEVKPKRGVYYLITLPELAQPVXXPA

SEQ ID NO: 52169 - protein, 20 aa, Artificial Sequence
  Cyclic GFR-binding peptide
NSLQEIVNSSDDYYLVTLPE

SEQ ID NO: 52170 - protein, 32 aa, Artificial Sequence
  Cyclic GFR-binding peptide
  MOD_RES (2)..(4): Xaa is C or S
RXGXGEVVMDEYQKYVVKENEDIFLMSIPSLE

SEQ ID NO: 52171 - protein, 30 aa, Artificial Sequence
  Cyclic GFR-binding peptide
  MOD_RES (30)..(30): Xaa is C or S
KVVMEYQKYVKPTRGVIFLISIPSLDQPVX

SEQ ID NO: 52172 - protein, 32 aa, Artificial Sequence
  Cyclic GFR-binding peptide
  MOD_RES (30)..(31): Xaa is C or S
VVMNEYQKYIVNSSDDIFLVSIPSLKTPAXXP

SEQ ID NO: 52173 - protein, 28 aa, Artificial Sequence
  Cyclic GFR-binding peptide
VMNNSLQEIVNSSDDYYVVPLPELKTPA

SEQ ID NO: 52174 - protein, 39 aa, Artificial Sequence; identical to SEQ ID NO: 11110
  Cyclic GFR-binding peptide
  MOD_RES (1)..(33)..(34): Xaa is C or S

SEQ ID NO: 52175 - protein, 25 aa, Artificial Sequence
  Cyclic GFR-binding peptide
EEYQKYVVKDYEDIFLMSIPSLETP

SEQ ID NO: 52176 - protein, 28 aa, Artificial Sequence
  Cyclic GFR-binding peptide
  MOD_RES (1)..(1): Xaa is C or S
XSRVVMNEYQKYIVNSSDDIFLVSIPSL

SEQ ID NO: 52177 - protein, 36 aa, Artificial Sequence; identical to SEQ ID NO: 11111
  Cyclic GFR-binding peptide
  MOD_RES (2)..(4)..(35)..(36): Xaa is C or S

SEQ ID NO: 52178 - protein, 29 aa, Artificial Sequence
  Cyclic GFR-binding peptide
  MOD_RES (29)..(29): Xaa is C or S
VMDNSLQEVVNNASDYYVIPLPELRTPVX

SEQ ID NO: 52179 - protein, 32 aa, Artificial Sequence
  Cyclic GFR-binding peptide
  MOD_RES (29)..(30): Xaa is C or S
VMDQYNKLVVNNASDLYLISIASLRTPVXXTP

SEQ ID NO: 52180 - protein, 23 aa, Artificial Sequence
  Cyclic GFR-binding peptide
DEYQKYVVKENEDIFLMSIPSLE

SEQ ID NO: 52181 - protein, 31 aa, Artificial Sequence
  Cyclic GFR-binding peptide
  MOD_RES (1)..(1): Xaa is C or S
XSEVVMDQYNKLVVNNASDLYLISIASLRTP

SEQ ID NO: 52182 - protein, 28 aa, Artificial Sequence
  Cyclic GFR-binding peptide
SRVIMEYQKYVKPKRGVIFLISIPSLAQ

SEQ ID NO: 52183 - protein, 32 aa, Artificial Sequence; identical to SEQ ID NO: 11113
  Cyclic GFR-binding peptide
  MOD_RES (32)..(32): Xaa is C or S

SEQ ID NO: 52184 - protein, 25 aa, Artificial Sequence
  Cyclic GFR-binding peptide
EVVMDNSLQEVVNNASDYYVIPLPE

SEQ ID NO: 52185 - protein, 21 aa, Artificial Sequence
  Cyclic GFR-binding peptide
MEYQKYVKPKRGVIFLISIPS

SEQ ID NO: 52186 - protein, 30 aa, Artificial Sequence
  Cyclic GFR-binding peptide
  MOD_RES (29)..(30): Xaa is C or S
VMNNSLQEIVNSSDDYYVVPLPELQTPAXX

SEQ ID NO: 52187 - protein, 33 aa, Artificial Sequence; identical to SEQ ID NO: 11116
  Cyclic GFR-binding peptide
  MOD_RES (32)..(33): Xaa is C or S

SEQ ID NO: 52188 - protein, 34 aa, Artificial Sequence; identical to SEQ ID NO: 11117
  Cyclic GFR-binding peptide
  MOD_RES (31)..(32): Xaa is C or S

SEQ ID NO: 52189 - protein, 37 aa, Artificial Sequence; identical to SEQ ID NO: 11118
  Cyclic GFR-binding peptide
  MOD_RES (2)..(4)..(36)..(37): Xaa is C or S

SEQ ID NO: 52190 - protein, 31 aa, Artificial Sequence
  Cyclic GFR-binding peptide
  MOD_RES (27)..(28): Xaa is C or S
EEYQKYVVKDYEDIFLMSIPSLETPVXXAKP

SEQ ID NO: 52191 - protein, 30 aa, Artificial Sequence
  Cyclic GFR-binding peptide
  MOD_RES (28)..(29): Xaa is C or S
MNEYQKYIVNSSDDIFLVSIPSLQTPAXXP

SEQ ID NO: 52192 - protein, 31 aa, Artificial Sequence
  Cyclic GFR-binding peptide
  MOD_RES (30)..(31): Xaa is C or S
VVMENSLQEVVKDYEDYYLMTLPELETPVXX

SEQ ID NO: 52193 - protein, 30 aa, Artificial Sequence; identical to SEQ ID NO: 2101
  Cyclic GFR-binding peptide

SEQ ID NO: 52194 - protein, 38 aa, Artificial Sequence; identical to SEQ ID NO: 11121
  Cyclic GFR-binding peptide
  MOD_RES (1)..(3)..(35)..(36): Xaa is C or S

SEQ ID NO: 52195 - protein, 30 aa, Artificial Sequence
  Cyclic GFR-binding peptide
  MOD_RES (1)..(2): Xaa is C or S
XXVPTRLEPLTILYYDSANNVVEQLSNDMV

SEQ ID NO: 52196 - protein, 36 aa, Artificial Sequence; identical to SEQ ID NO: 11122
  Cyclic GFR-binding peptide
  MOD_RES (1)..(33)..(35): Xaa is C or S

SEQ ID NO: 52197 - protein, 32 aa, Artificial Sequence
  Cyclic GFR-binding peptide
  MOD_RES (6)..(7): Xaa is C or S
YVPKPXXAPTKLEPLPVVYYDDSSNVIEQLSN

SEQ ID NO: 52198 - protein, 35 aa, Artificial Sequence; identical to SEQ ID NO: 11123
  Cyclic GFR-binding peptide
  MOD_RES (2)..(3)..(35): Xaa is C or S

SEQ ID NO: 52199 - protein, 34 aa, Artificial Sequence; identical to SEQ ID NO: 11124
  Cyclic GFR-binding peptide
  MOD_RES (1)..(33): Xaa is C or S

SEQ ID NO: 52200 - protein, 25 aa, Artificial Sequence
  Cyclic GFR-binding peptide
VPTRLNAISILYFDSANNVVLKKYR

SEQ ID NO: 52201 - protein, 25 aa, Artificial Sequence
  Cyclic GFR-binding peptide
APTKLSPISVLFIDDSSNVIYKQYE

SEQ ID NO: 52202 - protein, 28 aa, Artificial Sequence
  Cyclic GFR-binding peptide
  MOD_RES (1)..(2): Xaa is C or S
XXVPTRLEPLPIVYYDSANNVVEQLSND

SEQ ID NO: 52203 - protein, 32 aa, Artificial Sequence
  Cyclic GFR-binding peptide
  MOD_RES (6)..(7): Xaa is C or S
ASASPXXVPQDLEPLPIVYYVGRTPKVEQLSN

SEQ ID NO: 52204 - protein, 40 aa, Artificial Sequence; identical to SEQ ID NO: 11125
  Cyclic GFR-binding peptide
  MOD_RES (6)..(7)..(39): Xaa is C or S

SEQ ID NO: 52205 - protein, 27 aa, Artificial Sequence
  Cyclic GFR-binding peptide
  MOD_RES (2)..(2): Xaa is C or S
TXAPTKLEPLTVLYYDDSSNVIEQLSN

SEQ ID NO: 52206 - protein, 26 aa, Artificial Sequence
  Cyclic GFR-binding peptide
TQLEPLTVLYYDDSSNVIEQLSNNMV

SEQ ID NO: 52207 - protein, 35 aa, Artificial Sequence; identical to SEQ ID NO: 11126
  Cyclic GFR-binding peptide
  MOD_RES (2)..(3)..(35): Xaa is C or S

SEQ ID NO: 52208 - protein, 34 aa, Artificial Sequence
  Cyclic GFR-binding peptide
  MOD_RES (6)..(7): Xaa is C or S
ASASPXXVPQDLEPLPIVYYVGRTPKVEQLSNMV

SEQ ID NO: 52209 - protein, 31 aa, Artificial Sequence
  Cyclic GFR-binding peptide
  MOD_RES (2)..(3): Xaa is C or S
PXXVPQDLSPISILFIVGRTPKVYKQYEMVV

SEQ ID NO: 52210 - protein, 29 aa, Artificial Sequence
  Cyclic GFR-binding peptide
PTQLSPISVLFIDDSSNVIYKQYENMVVR

SEQ ID NO: 52211 - protein, 32 aa, Artificial Sequence
  Cyclic GFR-binding peptide
  MOD_RES (6)..(7): Xaa is C or S
STPPTXXVPTRLSAISILYLDSANNVVLKNYQ

SEQ ID NO: 52212 - protein, 36 aa, Artificial Sequence
  Cyclic GFR-binding peptide
  MOD_RES (6)..(7): Xaa is C or S
ASAAPXXVPQALSPISILFIVGRKPKVYKQYEMIVR

SEQ ID NO: 52213 - protein, 33 aa, Artificial Sequence
  Cyclic GFR-binding peptide
  MOD_RES (6)..(7): Xaa is C or S
ASASPXXVSQDLEPLPIVYYIGKTPKIEQLSNM

SEQ ID NO: 52214 - protein, 35 aa, Artificial Sequence; identical to SEQ ID NO: 11129
  Cyclic GFR-binding peptide
  MOD_RES (2)..(3)..(35): Xaa is C or S

SEQ ID NO: 52215 - protein, 35 aa, Artificial Sequence; identical to SEQ ID NO: 11130
  Cyclic GFR-binding peptide
  MOD_RES (1)..(2)..(34): Xaa is C or S

SEQ ID NO: 52216 - protein, 27 aa, Artificial Sequence
  Cyclic GFR-binding peptide
  MOD_RES (1)..(1): Xaa is C or S
XVPTRLNAISILYFDSANNVVLKKYRD

SEQ ID NO: 52217 - protein, 30 aa, Artificial Sequence
  Cyclic GFR-binding peptide
  MOD_RES (3)..(4): Xaa is C or S
SPXXVSQDLEPLPIVYYIGKTPKIEQLSNM

SEQ ID NO: 52218 - protein, 27 aa, Artificial Sequence
  Cyclic GFR-binding peptide
ELSPISMLFIDENEKVVYKQYEDMVVE

SEQ ID NO: 52219 - protein, 37 aa, Artificial Sequence; identical to SEQ ID NO: 11135
  Cyclic GFR-binding peptide
  MOD_RES (5)..(6): Xaa is C or S

SEQ ID NO: 52220 - protein, 22 aa, Artificial Sequence
  Cyclic GFR-binding peptide
LEPLPVVYYDDSSNVIEQLSNN

SEQ ID NO: 52221 - protein, 27 aa, Artificial Sequence
  Cyclic GFR-binding peptide
TELSPISMLFIDENEKVVYKQYEDMVV

SEQ ID NO: 52222 - protein, 35 aa, Artificial Sequence; identical to SEQ ID NO: 11137
  Cyclic GFR-binding peptide
  MOD_RES (4)..(5): Xaa is C or S

SEQ ID NO: 52223 - protein, 33 aa, Artificial Sequence
  Cyclic GFR-binding peptide
  MOD_RES (30)..(32): Xaa is C or S
TKLEPLPVVYYDDSSNVIEQLSNNMVVRSXGXH

SEQ ID NO: 52224 - protein, 25 aa, Artificial Sequence
  Cyclic GFR-binding peptide
PTELEPLPMVYYDENEKVVEQLSND

SEQ ID NO: 52225 - protein, 34 aa, Artificial Sequence
  Cyclic GFR-binding peptide
  MOD_RES (31)..(33): Xaa is C or S
PTRLSAISILYLDSANNVVLKNYQDMVVESXGXR

SEQ ID NO: 52226 - protein, 33 aa, Artificial Sequence; identical to SEQ ID NO: 11140
  Cyclic GFR-binding peptide
  MOD_RES (32)..(32): Xaa is C or S

SEQ ID NO: 52227 - protein, 37 aa, Artificial Sequence; identical to SEQ ID NO: 11141
  Cyclic GFR-binding peptide
  MOD_RES (4)..(5)..(37): Xaa is C or S

SEQ ID NO: 52228 - protein, 24 aa, Artificial Sequence
  Cyclic GFR-binding peptide
PTKLEPLTVLYYDDSSNVIEQLSN

SEQ ID NO: 52229 - protein, 30 aa, Artificial Sequence
  Cyclic GFR-binding peptide
  MOD_RES (30)..(30): Xaa is C or S
SQDLEPLPIVYYIGKTPKIEQLSNMIVKSX

SEQ ID NO: 52230 - protein, 26 aa, Artificial Sequence
  Cyclic GFR-binding peptide
EPLTILYYDSANNVVEQLSNDMVVES

SEQ ID NO: 52231 - protein, 25 aa, Artificial Sequence
  Cyclic GFR-binding peptide
QALSPISILFIVGRKPKVYKQYEMI

SEQ ID NO: 52232 - protein, 41 aa, Artificial Sequence; identical to SEQ ID NO: 11142
  Cyclic GFR-binding peptide
  MOD_RES (6)..(7)..(39)..(41): Xaa is C or S

SEQ ID NO: 52233 - protein, 20 aa, Artificial Sequence
  Cyclic GFR-binding peptide
SPISILFIVGRKPKVYKQYE

SEQ ID NO: 52234 - protein, 29 aa, Artificial Sequence
  Cyclic GFR-binding peptide
  MOD_RES (27)..(29): Xaa is C or S
SPISMLFIDEYDKVVYKQYEEMVVEGXGX

SEQ ID NO: 52235 - protein, 35 aa, Artificial Sequence
  Cyclic GFR-binding peptide
  MOD_RES (5)..(6): Xaa is C or S
TPPTXXVPTRLSAISILYLDSANNVVLKNYQDMVV

SEQ ID NO: 52236 - protein, 30 aa, Artificial Sequence
  Cyclic GFR-binding peptide
  MOD_RES (3)..(4): Xaa is C or S
KAXXVPTELSPISMLFIDENEKVVYKQYED

SEQ ID NO: 52237 - protein, 40 aa, Artificial Sequence; identical to SEQ ID NO: 11145
  Cyclic GFR-binding peptide
  MOD_RES (6)..(7)..(38)..(40): Xaa is C or S

SEQ ID NO: 52238 - protein, 35 aa, Artificial Sequence; identical to SEQ ID NO: 11146
  Cyclic GFR-binding peptide
  MOD_RES (32)..(34): Xaa is C or S

SEQ ID NO: 52239 - protein, 25 aa, Artificial Sequence
  Cyclic GFR-binding peptide
KLEPLTVLYYDDSSNVIEQLSNNMV

SEQ ID NO: 52240 - protein, 34 aa, Artificial Sequence
  Cyclic GFR-binding peptide
  MOD_RES (6)..(7): Xaa is C or S
SIPKAXXVPTELEPLTMLYYDEYDKVVEQLSNEM

SEQ ID NO: 52241 - protein, 25 aa, Artificial Sequence
  Cyclic GFR-binding peptide
LSPISVLFIDDSSNVIYKQYENMVV

SEQ ID NO: 52242 - protein, 31 aa, Artificial Sequence; identical to SEQ ID NO: 11149
  Cyclic GFR-binding peptide

SEQ ID NO: 52243 - protein, 24 aa, Artificial Sequence
  Cyclic GFR-binding peptide
PTELSPISMLFIDEYDKVVYKQYE

SEQ ID NO: 52244 - protein, 32 aa, Artificial Sequence; identical to SEQ ID NO: 11151
  Cyclic GFR-binding peptide
  MOD_RES (32)..(32): Xaa is C or S

SEQ ID NO: 52245 - protein, 24 aa, Artificial Sequence
  Cyclic GFR-binding peptide
ELEPLPMVYYDENEKVVEQLSNDM

SEQ ID NO: 52246 - protein, 30 aa, Artificial Sequence
  Cyclic GFR-binding peptide
  MOD_RES (1)..(1): Xaa is C or S
XVPTELSPISMLFIDEYDKVVYKQYEEMVV

SEQ ID NO: 52247 - protein, 27 aa, Artificial Sequence
  Cyclic GFR-binding peptide
  MOD_RES (1)..(2): Xaa is C or S
XXAPTQLSPISVLFIDDSSNVIYKQYE

SEQ ID NO: 52248 - protein, 27 aa, Artificial Sequence
  Cyclic GFR-binding peptide
  MOD_RES (27)..(27): Xaa is C or S
LSPISILFIVGRKPKVYKQYEMIVRSX

SEQ ID NO: 52249 - protein, 35 aa, Artificial Sequence; identical to SEQ ID NO: 11153
  Cyclic GFR-binding peptide
  MOD_RES (4)..(5): Xaa is C or S

SEQ ID NO: 52250 - protein, 27 aa, Artificial Sequence
  Cyclic GFR-binding peptide
PTQLEPLPVVYYDDSSNVIEQLSNNMV

SEQ ID NO: 52251 - protein, 28 aa, Artificial Sequence
  Cyclic GFR-binding peptide
  MOD_RES (3)..(3): Xaa is C or S
PTXAPTKLEPLTVLYYDDSSNVIEQLSN

SEQ ID NO: 52252 - protein, 25 aa, Artificial Sequence
  Cyclic GFR-binding peptide
VPTELEPLPMVYYDENEKVVEQLSN

SEQ ID NO: 52253 - protein, 36 aa, Artificial Sequence; identical to SEQ ID NO: 11157
  Cyclic GFR-binding peptide
  MOD_RES (3)..(4)..(36): Xaa is C or S

SEQ ID NO: 52254 - protein, 30 aa, Artificial Sequence
  Cyclic GFR-binding peptide
  MOD_RES (1)..(2): Xaa is C or S
XXVPTRLSAISILYLDSANNVVLKNYQDMV

SEQ ID NO: 52255 - protein, 27 aa, Artificial Sequence
  Cyclic GFR-binding peptide
DLEPLPIVYYIGKTPKIEQLSNMIVKS

SEQ ID NO: 52256 - protein, 21 aa, Artificial Sequence
  Cyclic GFR-binding peptide
LEPLPIVYYVGRTPKVEQLSN

SEQ ID NO: 52257 - protein, 30 aa, Artificial Sequence
  Cyclic GFR-binding peptide
  MOD_RES (3)..(4): Xaa is C or S
PTXXVPTRLEPLPIVYYDSANNVVEQLSND

SEQ ID NO: 52258 - protein, 27 aa, Artificial Sequence
  Cyclic GFR-binding peptide
RLEPLPIVYYDSANNVVEQLSNDMVVE

SEQ ID NO: 52259 - protein, 31 aa, Artificial Sequence
  Cyclic GFR-binding peptide
  MOD_RES (29)..(31): Xaa is C or S
QLEPLPVVYYDDSSNVIEQLSNNMVVRAXGX

SEQ ID NO: 52260 - protein, 27 aa, Artificial Sequence
  Cyclic GFR-binding peptide
TKLSPISVLFIDDSSNVIYKQYENMVV

SEQ ID NO: 52261 - protein, 41 aa, Artificial Sequence; identical to SEQ ID NO: 11161
  Cyclic GFR-binding peptide
  MOD_RES (5)..(6)..(38)..(40): Xaa is C or S

SEQ ID NO: 52262 - protein, 32 aa, Artificial Sequence
  Cyclic GFR-binding peptide
  MOD_RES (3)..(3): Xaa is C or S
PTXAPTKLEPLPVVYYDDSSNVIEQLSNNMVV

SEQ ID NO: 52263 - protein, 29 aa, Artificial Sequence
  Cyclic GFR-binding peptide
PQDLSPISILFIVGRTPKVYKQYEMVVKS

SEQ ID NO: 52264 - protein, 34 aa, Artificial Sequence
  Cyclic GFR-binding peptide
  MOD_RES (4)..(5): Xaa is C or S
PKPXXAPTKLSPISVLFIDDSSNVIYKQYENMVV

SEQ ID NO: 52265 - protein, 32 aa, Artificial Sequence
  Cyclic GFR-binding peptide
  MOD_RES (30)..(32): Xaa is C or S
TRLSAISILYLDSANNVVLKNYQDMVVESXGX

SEQ ID NO: 52266 - protein, 32 aa, Artificial Sequence; identical to SEQ ID NO: 11163
  Cyclic GFR-binding peptide
  MOD_RES (1)..(2): Xaa is C or S

SEQ ID NO: 52267 - protein, 30 aa, Artificial Sequence
  Cyclic GFR-binding peptide
  MOD_RES (29)..(29): Xaa is C or S
RLEPLTILYYDSANNVVEQLSNDMVVESXG

SEQ ID NO: 52268 - protein, 40 aa, Artificial Sequence; identical to SEQ ID NO: 11164
  Cyclic GFR-binding peptide
  MOD_RES (5)..(6)..(37)..(39): Xaa is C or S

SEQ ID NO: 52269 - protein, 30 aa, Artificial Sequence
  Cyclic GFR-binding peptide
  MOD_RES (28)..(30): Xaa is C or S
LNAISILYFDSANNVVLKKYRDMVVESXGX

SEQ ID NO: 52270 - protein, 30 aa, Artificial Sequence
  Cyclic GFR-binding peptide
  MOD_RES (4)..(5): Xaa is C or S
PPTXXVPTRLEPLTILYYDSANNVVEQLSN

SEQ ID NO: 52271 - protein, 32 aa, Artificial Sequence; identical to SEQ ID NO: 11167
  Cyclic GFR-binding peptide
  MOD_RES (1)..(1): Xaa is C or S

SEQ ID NO: 52272 - protein, 39 aa, Artificial Sequence; identical to SEQ ID NO: 11168
  Cyclic GFR-binding peptide
  MOD_RES (4)..(5)..(37)..(39): Xaa is C or S

SEQ ID NO: 52273 - protein, 26 aa, Artificial Sequence
  Cyclic GFR-binding peptide
  MOD_RES (1)..(1): Xaa is C or S
XAPTQLEPLPVVYYDDSSNVIEQLSN

SEQ ID NO: 52274 - protein, 32 aa, Artificial Sequence
  Cyclic GFR-binding peptide
  MOD_RES (6)..(7): Xaa is C or S
SIPKAXXVPTELEPLPMVYYDEYDKVVEQLSN

SEQ ID NO: 52275 - protein, 32 aa, Artificial Sequence
  Cyclic GFR-binding peptide
  MOD_RES (4)..(5): Xaa is C or S
ASPXXVPQDLEPLPIVYYVGRTPKVEQLSNMV

SEQ ID NO: 52276 - protein, 25 aa, Artificial Sequence
  Cyclic GFR-binding peptide
TKLEPLTVLYYDDSSNVIEQLSNNM

SEQ ID NO: 52277 - protein, 33 aa, Artificial Sequence
  Cyclic GFR-binding peptide
  MOD_RES (31)..(33): Xaa is C or S
PTRLEPLTILYYDSANNVVEQLSNDMVVESXGX

SEQ ID NO: 52278 - protein, 31 aa, Artificial Sequence
  Cyclic GFR-binding peptide
  MOD_RES (2)..(3): Xaa is C or S
PXXVPQDLEPLPIVYYVGRTPKVEQLSNMVV

SEQ ID NO: 52279 - protein, 31 aa, Artificial Sequence; identical to SEQ ID NO: 11171
  Cyclic GFR-binding peptide
  MOD_RES (1)..(1): Xaa is C or S

SEQ ID NO: 52280 - protein, 32 aa, Artificial Sequence; identical to SEQ ID NO: 11173
  Cyclic GFR-binding peptide
  MOD_RES (1)..(2): Xaa is C or S

SEQ ID NO: 52281 - protein, 29 aa, Artificial Sequence
  Cyclic GFR-binding peptide
VPTRLEPLPIVYYDSANNVVEQLSNDMVV

SEQ ID NO: 52282 - protein, 30 aa, Artificial Sequence
  Cyclic GFR-binding peptide
  MOD_RES (1)..(1): Xaa is C or S
XVPQDLEPLPIVYYVGRTPKVEQLSNMVVK

SEQ ID NO: 52283 - protein, 31 aa, Artificial Sequence
  Cyclic GFR-binding peptide
  MOD_RES (3)..(4): Xaa is C or S
PTXXVPTRLEPLTILYYDSANNVVEQLSNDM

SEQ ID NO: 52284 - protein, 23 aa, Artificial Sequence
  Cyclic GFR-binding peptide
QLEPLTVLYYDDSSNVIEQLSNN

SEQ ID NO: 52285 - protein, 34 aa, Artificial Sequence; identical to SEQ ID NO: 11178
  Cyclic GFR-binding peptide
  MOD_RES (4)..(4): Xaa is C or S

SEQ ID NO: 52286 - protein, 20 aa, Artificial Sequence
  Cyclic GFR-binding peptide
EPLTMLYYDEYDKVVEQLSN

SEQ ID NO: 52287 - protein, 38 aa, Artificial Sequence; identical to SEQ ID NO: 11185
  Cyclic GFR-binding peptide
  MOD_RES (5)..(6)..(38): Xaa is C or S

SEQ ID NO: 52288 - protein, 25 aa, Artificial Sequence
  Cyclic GFR-binding peptide
PTKLSPISVLFIDDSSNVIYKQYEN

SEQ ID NO: 52289 - protein, 28 aa, Artificial Sequence
  Cyclic GFR-binding peptide
  MOD_RES (27)..(27): Xaa is C or S
EPLPVVYYDDSSNVIEQLSNNMVVRSXG

SEQ ID NO: 52290 - protein, 30 aa, Artificial Sequence
  Cyclic GFR-binding peptide
  MOD_RES (1)..(2): Xaa is C or S
XXVSQDLSPISILFIIGKTPKIYKQYEMIV

SEQ ID NO: 52291 - protein, 39 aa, Artificial Sequence; identical to SEQ ID NO: 11189
  Cyclic GFR-binding peptide
  MOD_RES (6)..(38): Xaa is C or S

SEQ ID NO: 52292 - protein, 33 aa, Artificial Sequence
  Cyclic GFR-binding peptide
  MOD_RES (6)..(7): Xaa is C or S
ASASPXXVPQDLEPLPIVYYVGRTPKVEQLSNM

SEQ ID NO: 52293 - protein, 34 aa, Artificial Sequence
  Cyclic GFR-binding peptide
  MOD_RES (4)..(5): Xaa is C or S
PPTXXVPTRLEPLTILYYDSANNVVEQLSNDMVV

SEQ ID NO: 52294 - protein, 32 aa, Artificial Sequence
  Cyclic GFR-binding peptide
  MOD_RES (7)..(7): Xaa is C or S
HVTKPTXAPTKLSPISVLFIDDSSNVIYKQYE

SEQ ID NO: 52295 - protein, 30 aa, Artificial Sequence
  Cyclic GFR-binding peptide
  MOD_RES (3)..(4): Xaa is C or S
APXXVPQALEPLTILYYVGRKPKVEQLSNM

SEQ ID NO: 52296 - protein, 28 aa, Artificial Sequence
  Cyclic GFR-binding peptide
ELEPLPMVYYDEYDKVVEQLSNEMVVEG

SEQ ID NO: 52297 - protein, 30 aa, Artificial Sequence
  Cyclic GFR-binding peptide
  MOD_RES (30)..(30): Xaa is C or S
TRLNAISILYFDSANNVVLKKYRDMVVESX

SEQ ID NO: 52298 - protein, 35 aa, Artificial Sequence; identical to SEQ ID NO: 11192
  Cyclic GFR-binding peptide
  MOD_RES (1)..(2)..(33)..(35): Xaa is C or S

SEQ ID NO: 52299 - protein, 38 aa, Artificial Sequence; identical to SEQ ID NO: 11193
  Cyclic GFR-binding peptide
  MOD_RES (2)..(3)..(35)..(37): Xaa is C or S

SEQ ID NO: 52300 - protein, 30 aa, Artificial Sequence
  Cyclic GFR-binding peptide
  MOD_RES (1)..(2): Xaa is C or S
XXVPTELEPLPMVYYDEYDKVVEQLSNEMV

SEQ ID NO: 52301 - protein, 34 aa, Artificial Sequence; identical to SEQ ID NO: 11195
  Cyclic GFR-binding peptide
  MOD_RES (2)..(3): Xaa is C or S

SEQ ID NO: 52302 - protein, 40 aa, Artificial Sequence; identical to SEQ ID NO: 11196
  Cyclic GFR-binding peptide
  MOD_RES (6)..(7)..(39): Xaa is C or S

SEQ ID NO: 52303 - protein, 32 aa, Artificial Sequence
  Cyclic GFR-binding peptide
  MOD_RES (4)..(5): Xaa is C or S
ASPXXVSQDLEPLPIVYYIGKTPKIEQLSNMI

SEQ ID NO: 52304 - protein, 33 aa, Artificial Sequence
  Cyclic GFR-binding peptide
  MOD_RES (3)..(4): Xaa is C or S
SPXXVSQDLEPLPIVYYIGKTPKIEQLSNMIVK

SEQ ID NO: 52305 - protein, 29 aa, Artificial Sequence
  Cyclic GFR-binding peptide
  MOD_RES (28)..(28): Xaa is C or S
LEPLTMLYYDENEKVVEQLSNDMVVEGXG

SEQ ID NO: 52306 - protein, 34 aa, Artificial Sequence; identical to SEQ ID NO: 11198
  Cyclic GFR-binding peptide
  MOD_RES (32)..(34): Xaa is C or S

SEQ ID NO: 52307 - protein, 30 aa, Artificial Sequence
  Cyclic GFR-binding peptide
  MOD_RES (30)..(30): Xaa is C or S
TRLEPLPIVYYDSANNVVEQLSNDMVVESX

SEQ ID NO: 52308 - protein, 22 aa, Artificial Sequence
  Cyclic GFR-binding peptide
SPISMLFIDEYDKVVYKQYEEM

SEQ ID NO: 52309 - protein, 30 aa, Artificial Sequence; identical to SEQ ID NO: 11200
  Cyclic GFR-binding peptide

SEQ ID NO: 52310 - protein, 37 aa, Artificial Sequence; identical to SEQ ID NO: 11202
  Cyclic GFR-binding peptide
  MOD_RES (3)..(4)..(35)..(37): Xaa is C or S

SEQ ID NO: 52311 - protein, 26 aa, Artificial Sequence
  Cyclic GFR-binding peptide
RLEPLPIVYYDSANNVVEQLSNDMVV

SEQ ID NO: 52312 - protein, 24 aa, Artificial Sequence
  Cyclic GFR-binding peptide
TELEPLPMVYYDENEKVVEQLSND

SEQ ID NO: 52313 - protein, 38 aa, Artificial Sequence; identical to SEQ ID NO: 11205
  Cyclic GFR-binding peptide
  MOD_RES (2)..(3)..(35)..(37): Xaa is C or S

SEQ ID NO: 52314 - protein, 32 aa, Artificial Sequence
  Cyclic GFR-binding peptide
  MOD_RES (30)..(32): Xaa is C or S
TKLEPLTVLYYDDSSNVIEQLSNNMVVRSXGX

SEQ ID NO: 52315 - protein, 24 aa, Artificial Sequence
  Cyclic GFR-binding peptide
EPLTMLYYDENEKVVEQLSNDMVV

SEQ ID NO: 52316 - protein, 31 aa, Artificial Sequence; identical to SEQ ID NO: 11208
  Cyclic GFR-binding peptide
  MOD_RES (1)..(1): Xaa is C or S

SEQ ID NO: 52317 - protein, 20 aa, Artificial Sequence
  Cyclic GFR-binding peptide
NAISILYFDSANNVVLKKYR

SEQ ID NO: 52318 - protein, 22 aa, Artificial Sequence
  Cyclic GFR-binding peptide
LEPLPMVYYDENEKVVEQLSND

SEQ ID NO: 52319 - protein, 41 aa, Artificial Sequence; identical to SEQ ID NO: 11212
  Cyclic GFR-binding peptide
  MOD_RES (6)..(7)..(38)..(40): Xaa is C or S

SEQ ID NO: 52320 - protein, 37 aa, Artificial Sequence; identical to SEQ ID NO: 11213
  Cyclic GFR-binding peptide
  MOD_RES (6)..(7): Xaa is C or S

SEQ ID NO: 52321 - protein, 33 aa, Artificial Sequence
  Cyclic GFR-binding peptide
  MOD_RES (5)..(6): Xaa is C or S
VPKPXXAPTKLEPLPVVYYDDSSNVIEQLSNNM

SEQ ID NO: 52322 - protein, 36 aa, Artificial Sequence; identical to SEQ ID NO: 11214
  Cyclic GFR-binding peptide
  MOD_RES (4)..(5): Xaa is C or S

SEQ ID NO: 52323 - protein, 31 aa, Artificial Sequence
  Cyclic GFR-binding peptide
  MOD_RES (3)..(4): Xaa is C or S
SPXXVPQDLSPISILFIVGRTPKVYKQYEMV

SEQ ID NO: 52324 - protein, 31 aa, Artificial Sequence; identical to SEQ ID NO: 11217
  Cyclic GFR-binding peptide
  MOD_RES (31)..(31): Xaa is C or S

SEQ ID NO: 52325 - protein, 28 aa, Artificial Sequence
  Cyclic GFR-binding peptide
TQLSPISVLFIDDSSNVIYKQYENMVVR

SEQ ID NO: 52326 - protein, 28 aa, Artificial Sequence
  Cyclic GFR-binding peptide
  MOD_RES (2)..(3): Xaa is C or S
PXXVSQDLSPISILFIIGKTPKIYKQYE

SEQ ID NO: 52327 - protein, 34 aa, Artificial Sequence; identical to SEQ ID NO: 11219
  Cyclic GFR-binding peptide
  MOD_RES (32)..(34): Xaa is C or S

SEQ ID NO: 52328 - protein, 28 aa, Artificial Sequence
  Cyclic GFR-binding peptide
TRLSAISILYLDSANNVVLKNYQDMVVE

SEQ ID NO: 52329 - protein, 33 aa, Artificial Sequence
  Cyclic GFR-binding peptide
  MOD_RES (4)..(5): Xaa is C or S
PKPXXAPTQLEPLTVLYYDDSSNVIEQLSNNMV

SEQ ID NO: 52330 - protein, 35 aa, Artificial Sequence
  Cyclic GFR-binding peptide
  MOD_RES (6)..(7): Xaa is C or S
YVPKPXXAPTKLEPLTVLYYDDSSNVIEQLSNNMV

SEQ ID NO: 52331 - protein, 26 aa, Artificial Sequence
  Cyclic GFR-binding peptide
PTKLSPISVLFIDDSSNVIYKQYENM

SEQ ID NO: 52332 - protein, 29 aa, Artificial Sequence
  Cyclic GFR-binding peptide
VPQALEPLTILYYVGRKPKVEQLSNMIVR

SEQ ID NO: 52333 - protein, 28 aa, Artificial Sequence
  Cyclic GFR-binding peptide
ELEPLPMVYYDENEKVVEQLSNDMVVEG

SEQ ID NO: 52334 - protein, 30 aa, Artificial Sequence
  Cyclic GFR-binding peptide
  MOD_RES (1)..(2): Xaa is C or S
XXVPTELSPISMLFIDEYDKVVYKQYEEMV

SEQ ID NO: 52335 - protein, 34 aa, Artificial Sequence; identical to SEQ ID NO: 11226
  Cyclic GFR-binding peptide
  MOD_RES (2)..(3): Xaa is C or S

SEQ ID NO: 52336 - protein, 41 aa, Artificial Sequence; identical to SEQ ID NO: 11228
  Cyclic GFR-binding peptide
  MOD_RES (5)..(6)..(38)..(40): Xaa is C or S

SEQ ID NO: 52337 - protein, 31 aa, Artificial Sequence
  Cyclic GFR-binding peptide
  MOD_RES (1)..(2): Xaa is C or S
XXAPTQLSPISVLFIDDSSNVIYKQYENMVV

SEQ ID NO: 52338 - protein, 30 aa, Artificial Sequence
  Cyclic GFR-binding peptide
  MOD_RES (3)..(4): Xaa is C or S
SPXXVPQDLEPLPIVYYVGRTPKVEQLSNM

SEQ ID NO: 52339 - protein, 23 aa, Artificial Sequence
  Cyclic GFR-binding peptide
EPLPIVYYDSANNVVEQLSNDMV

SEQ ID NO: 52340 - protein, 29 aa, Artificial Sequence
  Cyclic GFR-binding peptide
VPTRLNAISILYFDSANNVVLKKYRDMVV

SEQ ID NO: 52341 - protein, 28 aa, Artificial Sequence
  Cyclic GFR-binding peptide
QDLSPISILFIVGRTPKVYKQYEMVVKS

SEQ ID NO: 52342 - protein, 33 aa, Artificial Sequence; identical to SEQ ID NO: 11229
  Cyclic GFR-binding peptide
  MOD_RES (1)..(33): Xaa is C or S

SEQ ID NO: 52343 - protein, 35 aa, Artificial Sequence; identical to SEQ ID NO: 11230
  Cyclic GFR-binding peptide
  MOD_RES (2)..(3)..(35): Xaa is C or S

SEQ ID NO: 52344 - protein, 37 aa, Artificial Sequence; identical to SEQ ID NO: 11231
  Cyclic GFR-binding peptide
  MOD_RES (5)..(6): Xaa is C or S

SEQ ID NO: 52345 - protein, 31 aa, Artificial Sequence
  Cyclic GFR-binding peptide
  MOD_RES (3)..(4): Xaa is C or S
SPXXVSQDLSPISILFIIGKTPKIYKQYEMI

SEQ ID NO: 52346 - protein, 28 aa, Artificial Sequence
  Cyclic GFR-binding peptide
VPTELSPISMLFIDENEKVVYKQYEDMV

SEQ ID NO: 52347 - protein, 38 aa, Artificial Sequence; identical to SEQ ID NO: 11232
  Cyclic GFR-binding peptide
  MOD_RES (5)..(6)..(38): Xaa is C or S

SEQ ID NO: 52348 - protein, 26 aa, Artificial Sequence
  Cyclic GFR-binding peptide
LEPLPIVYYDSANNVVEQLSNDMVVE

SEQ ID NO: 52349 - protein, 31 aa, Artificial Sequence
  Cyclic GFR-binding peptide
  MOD_RES (29)..(31): Xaa is C or S
QLSPISVLFIDDSSNVIYKQYENMVVRAXGX

SEQ ID NO: 52350 - protein, 37 aa, Artificial Sequence; identical to SEQ ID NO: 11233
  Cyclic GFR-binding peptide
  MOD_RES (3)..(4)..(35)..(37): Xaa is C or S

SEQ ID NO: 52351 - protein, 35 aa, Artificial Sequence; identical to SEQ ID NO: 11234
  Cyclic GFR-binding peptide
  MOD_RES (3)..(4)..(35): Xaa is C or S

SEQ ID NO: 52352 - protein, 33 aa, Artificial Sequence
  Cyclic GFR-binding peptide
  MOD_RES (5)..(6): Xaa is C or S
IPKAXXVPTELEPLTMLYYDENEKVVEQLSNDM

SEQ ID NO: 52353 - protein, 34 aa, Artificial Sequence; identical to SEQ ID NO: 11236
  Cyclic GFR-binding peptide
  MOD_RES (3)..(4): Xaa is C or S

SEQ ID NO: 52354 - protein, 30 aa, Artificial Sequence
  Cyclic GFR-binding peptide
PTQLEPLTVLYYDDSSNVIEQLSNNMVVRA

SEQ ID NO: 52355 - protein, 21 aa, Artificial Sequence
  Cyclic GFR-binding peptide
LSPISMLFIDEYDKVVYKQYE

SEQ ID NO: 52356 - protein, 32 aa, Artificial Sequence
  Cyclic GFR-binding peptide
  MOD_RES (3)..(4): Xaa is C or S
APXXVPQALSPISILFIVGRKPKVYKQYEMIV

SEQ ID NO: 52357 - protein, 33 aa, Artificial Sequence
  Cyclic GFR-binding peptide
  MOD_RES (31)..(33): Xaa is C or S
PTELEPLPMVYYDEYDKVVEQLSNEMVVEGXGX

SEQ ID NO: 52358 - protein, 28 aa, Artificial Sequence
  Cyclic GFR-binding peptide
  MOD_RES (2)..(3): Xaa is C or S
TXXVPTRLNAISILYFDSANNVVLKKYR

SEQ ID NO: 52359 - protein, 21 aa, Artificial Sequence
  Cyclic GFR-binding peptide
LSPISILFIIGKTPKIYKQYE

SEQ ID NO: 52360 - protein, 34 aa, Artificial Sequence; identical to SEQ ID NO: 11239
  Cyclic GFR-binding peptide
  MOD_RES (1)..(2)..(34): Xaa is C or S

SEQ ID NO: 52361 - protein, 27 aa, Artificial Sequence
  Cyclic GFR-binding peptide
PTQLSPISVLFIDDSSNVIYKQYENMV

SEQ ID NO: 52362 - protein, 34 aa, Artificial Sequence; identical to SEQ ID NO: 11240
  Cyclic GFR-binding peptide
  MOD_RES (32)..(34): Xaa is C or S

SEQ ID NO: 52363 - protein, 31 aa, Artificial Sequence
  Cyclic GFR-binding peptide
  MOD_RES (1)..(2): Xaa is C or S
XXVPTELEPLPMVYYDEYDKVVEQLSNEMVV

SEQ ID NO: 52364 - protein, 27 aa, Artificial Sequence
  Cyclic GFR-binding peptide
LSAISILYLDSANNVVLKNYQDMVVES

SEQ ID NO: 52365 - protein, 28 aa, Artificial Sequence
  Cyclic GFR-binding peptide
  MOD_RES (2)..(3): Xaa is C or S
AXXVPTELEPLTMLYYDEYDKVVEQLSN

SEQ ID NO: 52366 - protein, 27 aa, Artificial Sequence
  Cyclic GFR-binding peptide
DLSPISILFIVGRTPKVYKQYEMVVKS

SEQ ID NO: 52367 - protein, 34 aa, Artificial Sequence; identical to SEQ ID NO: 11241
  Cyclic GFR-binding peptide
  MOD_RES (3)..(3): Xaa is C or S

SEQ ID NO: 52368 - protein, 34 aa, Artificial Sequence; identical to SEQ ID NO: 11243
  Cyclic GFR-binding peptide
  MOD_RES (1)..(2)..(33): Xaa is C or S

SEQ ID NO: 52369 - protein, 30 aa, Artificial Sequence
  Cyclic GFR-binding peptide
  MOD_RES (27)..(29): Xaa is C or S
EPLPVVYYDDSSNVIEQLSNNMVVRAXGXH

SEQ ID NO: 52370 - protein, 32 aa, Artificial Sequence
  Cyclic GFR-binding peptide
  MOD_RES (29)..(31): Xaa is C or S
ELEPLTMLYYDEYDKVVEQLSNEMVVEGXGXR

SEQ ID NO: 52371 - protein, 36 aa, Artificial Sequence; identical to SEQ ID NO: 11247
  Cyclic GFR-binding peptide
  MOD_RES (6)..(6): Xaa is C or S

SEQ ID NO: 52372 - protein, 29 aa, Artificial Sequence
  Cyclic GFR-binding peptide
VPTELSPISMLFIDEYDKVVYKQYEEMVV

SEQ ID NO: 52373 - protein, 33 aa, Artificial Sequence
  Cyclic GFR-binding peptide
  MOD_RES (6)..(7): Xaa is C or S
ASAAPXXVPQALEPLTILYYVGRKPKVEQLSNM

SEQ ID NO: 52374 - protein, 41 aa, Artificial Sequence; identical to SEQ ID NO: 11249
  Cyclic GFR-binding peptide
  MOD_RES (5)..(6)..(38)..(40): Xaa is C or S

SEQ ID NO: 52375 - protein, 30 aa, Artificial Sequence
  Cyclic GFR-binding peptide
  MOD_RES (28)..(30): Xaa is C or S
LEPLTVLYYDDSSNVIEQLSNNMVVRSXGX

SEQ ID NO: 52376 - protein, 34 aa, Artificial Sequence; identical to SEQ ID NO: 11252
  Cyclic GFR-binding peptide
  MOD_RES (1)..(2)..(34): Xaa is C or S

SEQ ID NO: 52377 - protein, 29 aa, Artificial Sequence
  Cyclic GFR-binding peptide
PTKLEPLTVLYYDDSSNVIEQLSNNMVVR

SEQ ID NO: 52378 - protein, 28 aa, Artificial Sequence
  Cyclic GFR-binding peptide
PTELSPISMLFIDEYDKVVYKQYEEMVV

SEQ ID NO: 52379 - protein, 33 aa, Artificial Sequence; identical to SEQ ID NO: 11253
  Cyclic GFR-binding peptide
  MOD_RES (2)..(3): Xaa is C or S

SEQ ID NO: 52380 - protein, 30 aa, Artificial Sequence; identical to SEQ ID NO: 11254
  Cyclic GFR-binding peptide

SEQ ID NO: 52381 - protein, 36 aa, Artificial Sequence
  Cyclic GFR-binding peptide
  MOD_RES (6)..(7): Xaa is C or S
KIPKAXXVPTELEPLPMVYYDENEKVVEQLSNDMVV

SEQ ID NO: 52382 - protein, 26 aa, Artificial Sequence
  Cyclic GFR-binding peptide
APTKLEPLPVVYYDDSSNVIEQLSNN

SEQ ID NO: 52383 - protein, 28 aa, Artificial Sequence
  Cyclic GFR-binding peptide
  MOD_RES (2)..(3): Xaa is C or S
AXXVPTELEPLTMLYYDENEKVVEQLSN

SEQ ID NO: 52384 - protein, 26 aa, Artificial Sequence
  Cyclic GFR-binding peptide
LEPLPMVYYDEYDKVVEQLSNEMVVE

SEQ ID NO: 52385 - protein, 28 aa, Artificial Sequence
  Cyclic GFR-binding peptide
RLNAISILYFDSANNVVLKKYRDMVVES

SEQ ID NO: 52386 - protein, 39 aa, Artificial Sequence; identical to SEQ ID NO: 11258
  Cyclic GFR-binding peptide
  MOD_RES (5)..(6)..(38): Xaa is C or S

SEQ ID NO: 52387 - protein, 35 aa, Artificial Sequence; identical to SEQ ID NO: 11260
  Cyclic GFR-binding peptide
  MOD_RES (4)..(5): Xaa is C or S

SEQ ID NO: 52388 - protein, 31 aa, Artificial Sequence
  Cyclic GFR-binding peptide
  MOD_RES (28)..(30): Xaa is C or S
LSPISMLFIDEYDKVVYKQYEEMVVEGXGXR

SEQ ID NO: 52389 - protein, 35 aa, Artificial Sequence; identical to SEQ ID NO: 11261
  Cyclic GFR-binding peptide
  MOD_RES (2)..(3)..(35): Xaa is C or S

SEQ ID NO: 52390 - protein, 36 aa, Artificial Sequence; identical to SEQ ID NO: 11262
  Cyclic GFR-binding peptide
  MOD_RES (2)..(3)..(35): Xaa is C or S

SEQ ID NO: 52391 - protein, 36 aa, Artificial Sequence; identical to SEQ ID NO: 11263
  Cyclic GFR-binding peptide
  MOD_RES (2)..(3)..(35): Xaa is C or S

SEQ ID NO: 52392 - protein, 24 aa, Artificial Sequence
  Cyclic GFR-binding peptide
PQDLEPLPIVYYVGRTPKVEQLSN

SEQ ID NO: 52393 - protein, 33 aa, Artificial Sequence
  Cyclic GFR-binding peptide
  MOD_RES (6)..(7): Xaa is C or S
TVPKPXXAPTQLSPISVLFIDDSSNVIYKQYEN

SEQ ID NO: 52394 - protein, 30 aa, Artificial Sequence
  Cyclic GFR-binding peptide
  MOD_RES (2)..(3): Xaa is C or S
AXXVPTELEPLTMLYYDENEKVVEQLSNDM

SEQ ID NO: 52395 - protein, 34 aa, Artificial Sequence; identical to SEQ ID NO: 11264
  Cyclic GFR-binding peptide
  MOD_RES (32)..(34): Xaa is C or S

SEQ ID NO: 52396 - protein, 27 aa, Artificial Sequence
  Cyclic GFR-binding peptide
  MOD_RES (1)..(2): Xaa is C or S
XXVSQDLEPLPIVYYIGKTPKIEQLSN

SEQ ID NO: 52397 - protein, 28 aa, Artificial Sequence
  Cyclic GFR-binding peptide
PTKLEPLTVLYYDDSSNVIEQLSNNMVV

SEQ ID NO: 52398 - protein, 39 aa, Artificial Sequence; identical to SEQ ID NO: 11266
  Cyclic GFR-binding peptide
  MOD_RES (4)..(5)..(37)..(39): Xaa is C or S

SEQ ID NO: 52399 - protein, 23 aa, Artificial Sequence
  Cyclic GFR-binding peptide
SPISVLFIDDSSNVIYKQYENMV

SEQ ID NO: 52400 - protein, 29 aa, Artificial Sequence
  Cyclic GFR-binding peptide
  MOD_RES (1)..(2): Xaa is C or S
XXVPTELSPISMLFIDEYDKVVYKQYEEM

SEQ ID NO: 52401 - protein, 35 aa, Artificial Sequence; identical to SEQ ID NO: 11267
  Cyclic GFR-binding peptide
  MOD_RES (2)..(3)..(35): Xaa is C or S

SEQ ID NO: 52402 - protein, 25 aa, Artificial Sequence
  Cyclic GFR-binding peptide
LEPLPMVYYDENEKVVEQLSNDMVV

SEQ ID NO: 52403 - protein, 25 aa, Artificial Sequence
  Cyclic GFR-binding peptide
ELSPISMLFIDEYDKVVYKQYEEMV

SEQ ID NO: 52404 - protein, 35 aa, Artificial Sequence; identical to SEQ ID NO: 11268
  Cyclic GFR-binding peptide
  MOD_RES (2)..(3)..(35): Xaa is C or S

SEQ ID NO: 52405 - protein, 22 aa, Artificial Sequence
  Cyclic GFR-binding peptide
QLEPLTVLYYDDSSNVIEQLSN

SEQ ID NO: 52406 - protein, 34 aa, Artificial Sequence; identical to SEQ ID NO: 11269
  Cyclic GFR-binding peptide
  MOD_RES (1)..(33): Xaa is C or S

SEQ ID NO: 52407 - protein, 32 aa, Artificial Sequence; identical to SEQ ID NO: 11270
  Cyclic GFR-binding peptide
  MOD_RES (32)..(32): Xaa is C or S

SEQ ID NO: 52408 - protein, 32 aa, Artificial Sequence; identical to SEQ ID NO: 11272
  Cyclic GFR-binding peptide
  MOD_RES (31)..(31): Xaa is C or S

SEQ ID NO: 52409 - protein, 31 aa, Artificial Sequence
  Cyclic GFR-binding peptide
  MOD_RES (6)..(6): Xaa is C or S
VTKPTXAPTKLEPLTVLYYDDSSNVIEQLSN

SEQ ID NO: 52410 - protein, 36 aa, Artificial Sequence; identical to SEQ ID NO: 11273
  Cyclic GFR-binding peptide
  MOD_RES (1)..(33)..(35): Xaa is C or S

SEQ ID NO: 52411 - protein, 32 aa, Artificial Sequence; identical to SEQ ID NO: 11277
  Cyclic GFR-binding peptide
  MOD_RES (1)..(2): Xaa is C or S

SEQ ID NO: 52412 - protein, 33 aa, Artificial Sequence
  Cyclic GFR-binding peptide
  MOD_RES (5)..(5): Xaa is C or S
TKPTXAPTKLSPISVLFIDDSSNVIYKQYENMV

SEQ ID NO: 52413 - protein, 28 aa, Artificial Sequence
  Cyclic GFR-binding peptide
PTRLEPLPIVYYDSANNVVEQLSNDMVV

SEQ ID NO: 52414 - protein, 34 aa, Artificial Sequence
  Cyclic GFR-binding peptide
  MOD_RES (31)..(33): Xaa is C or S
PTQLEPLPVVYYDDSSNVIEQLSNNMVVRAXGXH

SEQ ID NO: 52415 - protein, 34 aa, Artificial Sequence
  Cyclic GFR-binding peptide
  MOD_RES (6)..(7): Xaa is C or S
STPPTXXVPTRLNAISILYFDSANNVVLKKYRDM

SEQ ID NO: 52416 - protein, 31 aa, Artificial Sequence; identical to SEQ ID NO: 11279
  Cyclic GFR-binding peptide
  MOD_RES (1)..(1): Xaa is C or S

SEQ ID NO: 52417 - protein, 35 aa, Artificial Sequence; identical to SEQ ID NO: 11280
  Cyclic GFR-binding peptide
  MOD_RES (2)..(3)..(35): Xaa is C or S

SEQ ID NO: 52418 - protein, 39 aa, Artificial Sequence; identical to SEQ ID NO: 11281
  Cyclic GFR-binding peptide
  MOD_RES (5)..(37)..(39): Xaa is C or S

SEQ ID NO: 52419 - protein, 41 aa, Artificial Sequence; identical to SEQ ID NO: 11282
  Cyclic GFR-binding peptide
  MOD_RES (6)..(38)..(40): Xaa is C or S

SEQ ID NO: 52420 - protein, 36 aa, Artificial Sequence; identical to SEQ ID NO: 11283
  Cyclic GFR-binding peptide
  MOD_RES (2)..(3)..(35): Xaa is C or S

SEQ ID NO: 52421 - protein, 36 aa, Artificial Sequence; identical to SEQ ID NO: 11284
  Cyclic GFR-binding peptide
  MOD_RES (5)..(6): Xaa is C or S

SEQ ID NO: 52422 - protein, 29 aa, Artificial Sequence
  Cyclic GFR-binding peptide
  MOD_RES (28)..(28): Xaa is C or S
DLSPISILFIVGRTPKVYKQYEMVVKSXK

SEQ ID NO: 52423 - protein, 26 aa, Artificial Sequence
  Cyclic GFR-binding peptide
SQDLEPLPIVYYIGKTPKIEQLSNMI

SEQ ID NO: 52424 - protein, 32 aa, Artificial Sequence
  Cyclic GFR-binding peptide
  MOD_RES (29)..(31): Xaa is C or S
RLEPLPIVYYDSANNVVEQLSNDMVVESXGXR

SEQ ID NO: 52425 - protein, 29 aa, Artificial Sequence
  Cyclic GFR-binding peptide
PTKLEPLPVVYYDDSSNVIEQLSNNMVVR

SEQ ID NO: 52426 - protein, 30 aa, Artificial Sequence
  Cyclic GFR-binding peptide
  MOD_RES (4)..(4): Xaa is C or S
KPTXAPTKLEPLPVVYYDDSSNVIEQLSNN

SEQ ID NO: 52427 - protein, 33 aa, Artificial Sequence
  Cyclic GFR-binding peptide
  MOD_RES (6)..(7): Xaa is C or S
YVPKPXXAPTKLSPISVLFIDDSSNVIYKQYEN

SEQ ID NO: 52428 - protein, 27 aa, Artificial Sequence
  Cyclic GFR-binding peptide
  MOD_RES (26)..(26): Xaa is C or S
EPLPIVYYIGKTPKIEQLSNMIVKSXK

SEQ ID NO: 52429 - protein, 29 aa, Artificial Sequence
  Cyclic GFR-binding peptide
  MOD_RES (2)..(3): Xaa is C or S
PXXAPTKLSPISVLFIDDSSNVIYKQYEN

SEQ ID NO: 52430 - protein, 25 aa, Artificial Sequence
  Cyclic GFR-binding peptide
QDLEPLPIVYYVGRTPKVEQLSNMV

SEQ ID NO: 52431 - protein, 28 aa, Artificial Sequence
  Cyclic GFR-binding peptide
  MOD_RES (28)..(28): Xaa is C or S
LEPLTVLYYDDSSNVIEQLSNNMVVRAX

SEQ ID NO: 52432 - protein, 24 aa, Artificial Sequence
  Cyclic GFR-binding peptide
LSPISMLFIDEYDKVVYKQYEEMV

SEQ ID NO: 52433 - protein, 23 aa, Artificial Sequence
  Cyclic GFR-binding peptide
TKLSPISVLFIDDSSNVIYKQYE

SEQ ID NO: 52434 - protein, 33 aa, Artificial Sequence
  Cyclic GFR-binding peptide
  MOD_RES (30)..(32): Xaa is C or S
TQLSPISVLFIDDSSNVIYKQYENMVVRAXGXH

SEQ ID NO: 52435 - protein, 28 aa, Artificial Sequence
  Cyclic GFR-binding peptide
  MOD_RES (1)..(2): Xaa is C or S
XXVPTELEPLTMLYYDENEKVVEQLSND

SEQ ID NO: 52436 - protein, 40 aa, Artificial Sequence; identical to SEQ ID NO: 11288
  Cyclic GFR-binding peptide
  MOD_RES (6)..(38)..(40): Xaa is C or S

SEQ ID NO: 52437 - protein, 31 aa, Artificial Sequence; identical to SEQ ID NO: 11289
  Cyclic GFR-binding peptide
  MOD_RES (31)..(31): Xaa is C or S

SEQ ID NO: 52438 - protein, 42 aa, Artificial Sequence; identical to SEQ ID NO: 11290
  Cyclic GFR-binding peptide
  MOD_RES (6)..(7)..(39)..(41): Xaa is C or S

SEQ ID NO: 52439 - protein, 25 aa, Artificial Sequence
  Cyclic GFR-binding peptide
QLEPLPVVYYDDSSNVIEQLSNNMV

SEQ ID NO: 52440 - protein, 30 aa, Artificial Sequence
  Cyclic GFR-binding peptide
  MOD_RES (1)..(1): Xaa is C or S
XVPQALEPLTILYYVGRKPKVEQLSNMIVR

SEQ ID NO: 52441 - protein, 36 aa, Artificial Sequence; identical to SEQ ID NO: 11293
  Cyclic GFR-binding peptide
  MOD_RES (1)..(2)..(33)..(35): Xaa is C or S

SEQ ID NO: 52442 - protein, 20 aa, Artificial Sequence
  Cyclic GFR-binding peptide
EPLPIVYYIGKTPKIEQLSN

SEQ ID NO: 52443 - protein, 33 aa, Artificial Sequence
  Cyclic GFR-binding peptide
  MOD_RES (31)..(33): Xaa is C or S
PTQLEPLTVLYYDDSSNVIEQLSNNMVVRAXGX

SEQ ID NO: 52444 - protein, 33 aa, Artificial Sequence; identical to SEQ ID NO: 11294
  Cyclic GFR-binding peptide
  MOD_RES (31)..(33): Xaa is C or S

SEQ ID NO: 52445 - protein, 31 aa, Artificial Sequence
  Cyclic GFR-binding peptide
  MOD_RES (1)..(2): Xaa is C or S
XXVSQDLSPISILFIIGKTPKIYKQYEMIVK

SEQ ID NO: 52446 - protein, 36 aa, Artificial Sequence; identical to SEQ ID NO: 11297
  Cyclic GFR-binding peptide
  MOD_RES (5)..(6): Xaa is C or S

SEQ ID NO: 52447 - protein, 25 aa, Artificial Sequence
  Cyclic GFR-binding peptide
VPQALSPISILFIVGRKPKVYKQYE

SEQ ID NO: 52448 - protein, 35 aa, Artificial Sequence; identical to SEQ ID NO: 11298
  Cyclic GFR-binding peptide
  MOD_RES (3)..(4): Xaa is C or S

SEQ ID NO: 52449 - protein, 33 aa, Artificial Sequence; identical to SEQ ID NO: 11299
  Cyclic GFR-binding peptide
  MOD_RES (2)..(3): Xaa is C or S

SEQ ID NO: 52450 - protein, 29 aa, Artificial Sequence
  Cyclic GFR-binding peptide
  MOD_RES (1)..(2): Xaa is C or S
XXVPTRLEPLPIVYYDSANNVVEQLSNDM

SEQ ID NO: 52451 - protein, 34 aa, Artificial Sequence; identical to SEQ ID NO: 11301
  Cyclic GFR-binding peptide
  MOD_RES (3)..(4): Xaa is C or S

SEQ ID NO: 52452 - protein, 27 aa, Artificial Sequence
  Cyclic GFR-binding peptide
  MOD_RES (27)..(27): Xaa is C or S
SPISVLFIDDSSNVIYKQYENMVVRAX

SEQ ID NO: 52453 - protein, 38 aa, Artificial Sequence; identical to SEQ ID NO: 11302
  Cyclic GFR-binding peptide
  MOD_RES (6)..(7)..(38): Xaa is C or S

SEQ ID NO: 52454 - protein, 33 aa, Artificial Sequence
  Cyclic GFR-binding peptide
  MOD_RES (6)..(7): Xaa is C or S
YVPKPXXAPTKLEPLPVVYYDDSSNVIEQLSNN

SEQ ID NO: 52455 - protein, 34 aa, Artificial Sequence
  Cyclic GFR-binding peptide
  MOD_RES (6)..(7): Xaa is C or S
ASASPXXVSQDLEPLPIVYYIGKTPKIEQLSNMI

SEQ ID NO: 52456 - protein, 20 aa, Artificial Sequence
  Cyclic GFR-binding peptide
EPLTILYYVGRKPKVEQLSN

SEQ ID NO: 52457 - protein, 22 aa, Artificial Sequence
  Cyclic GFR-binding peptide
DLEPLPIVYYIGKTPKIEQLSN

SEQ ID NO: 52458 - protein, 37 aa, Artificial Sequence; identical to SEQ ID NO: 11303
  Cyclic GFR-binding peptide
  MOD_RES (6)..(7): Xaa is C or S

SEQ ID NO: 52459 - protein, 33 aa, Artificial Sequence
  Cyclic GFR-binding peptide
  MOD_RES (30)..(32): Xaa is C or S
PQALEPLTILYYVGRKPKVEQLSNMIVRSXKXS

SEQ ID NO: 52460 - protein, 35 aa, Artificial Sequence
  Cyclic GFR-binding peptide
  MOD_RES (6)..(7): Xaa is C or S
TVPKPXXAPTQLSPISVLFIDDSSNVIYKQYENMV

SEQ ID NO: 52461 - protein, 26 aa, Artificial Sequence
  Cyclic GFR-binding peptide
LEPLTMLYYDEYDKVVEQLSNEMVVE

SEQ ID NO: 52462 - protein, 30 aa, Artificial Sequence
  Cyclic GFR-binding peptide
PTQLEPLPVVYYDDSSNVIEQLSNNMVVRA

SEQ ID NO: 52463 - protein, 35 aa, Artificial Sequence
  Cyclic GFR-binding peptide
  MOD_RES (5)..(6): Xaa is C or S
SASPXXVSQDLEPLPIVYYIGKTPKIEQLSNMIVK

SEQ ID NO: 52464 - protein, 31 aa, Artificial Sequence
  Cyclic GFR-binding peptide
  MOD_RES (5)..(6): Xaa is C or S
VPKPXXAPTKLEPLTVLYYDDSSNVIEQLSN

SEQ ID NO: 52465 - protein, 26 aa, Artificial Sequence
  Cyclic GFR-binding peptide
VPTRLNAISILYFDSANNVVLKKYRD

SEQ ID NO: 52466 - protein, 37 aa, Artificial Sequence; identical to SEQ ID NO: 11304
  Cyclic GFR-binding peptide
  MOD_RES (1)..(2)..(34)..(36): Xaa is C or S

SEQ ID NO: 52467 - protein, 33 aa, Artificial Sequence
  Cyclic GFR-binding peptide
  MOD_RES (30)..(32): Xaa is C or S
TELSPISMLFIDENEKVVYKQYEDMVVEGXGXR

SEQ ID NO: 52468 - protein, 38 aa, Artificial Sequence; identical to SEQ ID NO: 11306
  Cyclic GFR-binding peptide
  MOD_RES (5)..(6)..(38): Xaa is C or S

SEQ ID NO: 52469 - protein, 33 aa, Artificial Sequence; identical to SEQ ID NO: 11307
  Cyclic GFR-binding peptide
  MOD_RES (2)..(3): Xaa is C or S

SEQ ID NO: 52470 - protein, 32 aa, Artificial Sequence
  Cyclic GFR-binding peptide
  MOD_RES (31)..(31): Xaa is C or S
PTQLSPISVLFIDDSSNVIYKQYENMVVRAXG

SEQ ID NO: 52471 - protein, 28 aa, Artificial Sequence
  Cyclic GFR-binding peptide
VPTELEPLPMVYYDENEKVVEQLSNDMV

SEQ ID NO: 52472 - protein, 38 aa, Artificial Sequence; identical to SEQ ID NO: 11308
  Cyclic GFR-binding peptide
  MOD_RES (4)..(5)..(36)..(38): Xaa is C or S

SEQ ID NO: 52473 - protein, 26 aa, Artificial Sequence
  Cyclic GFR-binding peptide
QDLSPISILFIIGKTPKIYKQYEMIV

SEQ ID NO: 52474 - protein, 34 aa, Artificial Sequence; identical to SEQ ID NO: 11310
  Cyclic GFR-binding peptide
  MOD_RES (32)..(34): Xaa is C or S

SEQ ID NO: 52475 - protein, 33 aa, Artificial Sequence
  Cyclic GFR-binding peptide
  MOD_RES (5)..(6): Xaa is C or S
IPKAXXVPTELEPLPMVYYDEYDKVVEQLSNEM

SEQ ID NO: 52476 - protein, 33 aa, Artificial Sequence
  Cyclic GFR-binding peptide
  MOD_RES (3)..(4): Xaa is C or S
KPXXAPTQLSPISVLFIDDSSNVIYKQYENMVV

SEQ ID NO: 52477 - protein, 34 aa, Artificial Sequence
  Cyclic GFR-binding peptide
  MOD_RES (4)..(5): Xaa is C or S
AAPXXVPQALSPISILFIVGRKPKVYKQYEMIVR

SEQ ID NO: 52478 - protein, 35 aa, Artificial Sequence; identical to SEQ ID NO: 11311
  Cyclic GFR-binding peptide
  MOD_RES (1)..(32)..(34): Xaa is C or S

SEQ ID NO: 52479 - protein, 36 aa, Artificial Sequence; identical to SEQ ID NO: 11313
  Cyclic GFR-binding peptide
  MOD_RES (4)..(5)..(36): Xaa is C or S

SEQ ID NO: 52480 - protein, 30 aa, Artificial Sequence
  Cyclic GFR-binding peptide
  MOD_RES (1)..(1): Xaa is C or S
XVPTELEPLTMLYYDENEKVVEQLSNDMVV

SEQ ID NO: 52481 - protein, 35 aa, Artificial Sequence
  Cyclic GFR-binding peptide
  MOD_RES (6)..(7): Xaa is C or S
SIPKAXXVPTELEPLPMVYYDEYDKVVEQLSNEMV

SEQ ID NO: 52482 - protein, 40 aa, Artificial Sequence; identical to SEQ ID NO: 11314
  Cyclic GFR-binding peptide
  MOD_RES (5)..(6)..(38)..(40): Xaa is C or S

SEQ ID NO: 52483 - protein, 40 aa, Artificial Sequence; identical to SEQ ID NO: 11315
  Cyclic GFR-binding peptide
  MOD_RES (4)..(5)..(37)..(39): Xaa is C or S

SEQ ID NO: 52484 - protein, 30 aa, Artificial Sequence
  Cyclic GFR-binding peptide
  MOD_RES (2)..(3): Xaa is C or S
AXXVPTELEPLPMVYYDEYDKVVEQLSNEM

SEQ ID NO: 52485 - protein, 31 aa, Artificial Sequence
  Cyclic GFR-binding peptide
  MOD_RES (29)..(31): Xaa is C or S
QDLEPLPIVYYIGKTPKIEQLSNMIVKSXKX

SEQ ID NO: 52486 - protein, 32 aa, Artificial Sequence
  Cyclic GFR-binding peptide
  MOD_RES (7)..(7): Xaa is C or S
HVTKPTXAPTKLEPLTVLYYDDSSNVIEQLSN

SEQ ID NO: 52487 - protein, 24 aa, Artificial Sequence
  Cyclic GFR-binding peptide
DLEPLPIVYYIGKTPKIEQLSNMI

SEQ ID NO: 52488 - protein, 28 aa, Artificial Sequence
  Cyclic GFR-binding peptide
  MOD_RES (2)..(3): Xaa is C or S
PXXAPTKLEPLPVVYYDDSSNVIEQLSN

SEQ ID NO: 52489 - protein, 25 aa, Artificial Sequence
  Cyclic GFR-binding peptide
NAISILYFDSANNVVLKKYRDMVVE

SEQ ID NO: 52490 - protein, 35 aa, Artificial Sequence; identical to SEQ ID NO: 11318
  Cyclic GFR-binding peptide
  MOD_RES (1)..(33)..(35): Xaa is C or S

SEQ ID NO: 52491 - protein, 30 aa, Artificial Sequence
  Cyclic GFR-binding peptide
  MOD_RES (4)..(4): Xaa is C or S
KPTXAPTKLSPISVLFIDDSSNVIYKQYEN

SEQ ID NO: 52492 - protein, 29 aa, Artificial Sequence
  Cyclic GFR-binding peptide
  MOD_RES (3)..(4): Xaa is C or S
KPXXAPTQLEPLPVVYYDDSSNVIEQLSN

SEQ ID NO: 52493 - protein, 35 aa, Artificial Sequence
  Cyclic GFR-binding peptide
  MOD_RES (6)..(6): Xaa is C or S
VTKPTXAPTKLSPISVLFIDDSSNVIYKQYENMVV

SEQ ID NO: 52494 - protein, 36 aa, Artificial Sequence; identical to SEQ ID NO: 11321
  Cyclic GFR-binding peptide
  MOD_RES (2)..(34)..(36): Xaa is C or S

SEQ ID NO: 52495 - protein, 33 aa, Artificial Sequence
  Cyclic GFR-binding peptide
  MOD_RES (31)..(33): Xaa is C or S
PTELSPISMLFIDEYDKVVYKQYEEMVVEGXGX

SEQ ID NO: 52496 - protein, 32 aa, Artificial Sequence
  Cyclic GFR-binding peptide
  MOD_RES (31)..(31): Xaa is C or S
PTQLEPLPVVYYDDSSNVIEQLSNNMVVRAXG

SEQ ID NO: 52497 - protein, 32 aa, Artificial Sequence
  Cyclic GFR-binding peptide
  MOD_RES (3)..(4): Xaa is C or S
KPXXAPTQLSPISVLFIDDSSNVIYKQYENMV

SEQ ID NO: 52498 - protein, 36 aa, Artificial Sequence; identical to SEQ ID NO: 11324
  Cyclic GFR-binding peptide
  MOD_RES (2)..(3)..(35): Xaa is C or S

SEQ ID NO: 52499 - protein, 30 aa, Artificial Sequence
  Cyclic GFR-binding peptide
  MOD_RES (27)..(29): Xaa is C or S
LSPISILFIVGRTPKVYKQYEMVVKSXKXS

SEQ ID NO: 52500 - protein, 30 aa, Artificial Sequence
  Cyclic GFR-binding peptide
  MOD_RES (2)..(3): Xaa is C or S
TXXVPTRLNAISILYFDSANNVVLKKYRDM

SEQ ID NO: 52501 - protein, 23 aa, Artificial Sequence
  Cyclic GFR-binding peptide
TRLEPLPIVYYDSANNVVEQLSN

SEQ ID NO: 52502 - protein, 32 aa, Artificial Sequence
  Cyclic GFR-binding peptide
  MOD_RES (29)..(31): Xaa is C or S
ELEPLPMVYYDEYDKVVEQLSNEMVVEGXGXR

SEQ ID NO: 52503 - protein, 24 aa, Artificial Sequence
  Cyclic GFR-binding peptide
PTKLSPISVLFIDDSSNVIYKQYE

SEQ ID NO: 52504 - protein, 20 aa, Artificial Sequence
  Cyclic GFR-binding peptide
EPLPIVYYDSANNVVEQLSN

SEQ ID NO: 52505 - protein, 34 aa, Artificial Sequence
  Cyclic GFR-binding peptide
  MOD_RES (6)..(7): Xaa is C or S
ASAAPXXVPQALSPISILFIVGRKPKVYKQYEMI

SEQ ID NO: 52506 - protein, 37 aa, Artificial Sequence; identical to SEQ ID NO: 11327
  Cyclic GFR-binding peptide
  MOD_RES (6)..(7): Xaa is C or S

SEQ ID NO: 52507 - protein, 35 aa, Artificial Sequence; identical to SEQ ID NO: 11328
  Cyclic GFR-binding peptide
  MOD_RES (1)..(32)..(34): Xaa is C or S

SEQ ID NO: 52508 - protein, 21 aa, Artificial Sequence
  Cyclic GFR-binding peptide
EPLTMLYYDENEKVVEQLSND

SEQ ID NO: 52509 - protein, 35 aa, Artificial Sequence; identical to SEQ ID NO: 11329
  Cyclic GFR-binding peptide
  MOD_RES (4)..(5): Xaa is C or S

SEQ ID NO: 52510 - protein, 28 aa, Artificial Sequence
  Cyclic GFR-binding peptide
VPQDLEPLPIVYYVGRTPKVEQLSNMVV

SEQ ID NO: 52511 - protein, 29 aa, Artificial Sequence
  Cyclic GFR-binding peptide
  MOD_RES (2)..(3): Xaa is C or S
PXXAPTKLEPLPVVYYDDSSNVIEQLSNN

SEQ ID NO: 52512 - protein, 34 aa, Artificial Sequence
  Cyclic GFR-binding peptide
  MOD_RES (4)..(5): Xaa is C or S
PKAXXVPTELEPLPMVYYDEYDKVVEQLSNEMVV

SEQ ID NO: 52513 - protein, 38 aa, Artificial Sequence; identical to SEQ ID NO: 11336
  Cyclic GFR-binding peptide
  MOD_RES (4)..(5)..(36)..(38): Xaa is C or S

SEQ ID NO: 52514 - protein, 33 aa, Artificial Sequence; identical to SEQ ID NO: 11338
  Cyclic GFR-binding peptide
  MOD_RES (2)..(3): Xaa is C or S

SEQ ID NO: 52515 - protein, 31 aa, Artificial Sequence
  Cyclic GFR-binding peptide
  MOD_RES (2)..(3): Xaa is C or S
PXXAPTKLEPLPVVYYDDSSNVIEQLSNNMV

SEQ ID NO: 52516 - protein, 30 aa, Artificial Sequence
  Cyclic GFR-binding peptide
  MOD_RES (28)..(30): Xaa is C or S
LEPLTVLYYDDSSNVIEQLSNNMVVRAXGX

SEQ ID NO: 52517 - protein, 34 aa, Artificial Sequence; identical to SEQ ID NO: 11340
  Cyclic GFR-binding peptide
  MOD_RES (1)..(32)..(34): Xaa is C or S

SEQ ID NO: 52518 - protein, 39 aa, Artificial Sequence; identical to SEQ ID NO: 11341
  Cyclic GFR-binding peptide
  MOD_RES (3)..(4)..(36)..(38): Xaa is C or S

SEQ ID NO: 52519 - protein, 24 aa, Artificial Sequence
  Cyclic GFR-binding peptide
QLEPLPVVYYDDSSNVIEQLSNNM

SEQ ID NO: 52520 - protein, 32 aa, Artificial Sequence
  Cyclic GFR-binding peptide
  MOD_RES (4)..(5): Xaa is C or S
PKPXXAPTQLEPLTVLYYDDSSNVIEQLSNNM

SEQ ID NO: 52521 - protein, 28 aa, Artificial Sequence
  Cyclic GFR-binding peptide
  MOD_RES (27)..(27): Xaa is C or S
LEPLTILYYVGRKPKVEQLSNMIVRSXK

SEQ ID NO: 52522 - protein, 32 aa, Artificial Sequence
  Cyclic GFR-binding peptide
  MOD_RES (6)..(7): Xaa is C or S
ASASPXXVSQDLEPLPIVYYIGKTPKIEQLSN

SEQ ID NO: 52523 - protein, 26 aa, Artificial Sequence
  Cyclic GFR-binding peptide
EPLPIVYYDSANNVVEQLSNDMVVES

SEQ ID NO: 52524 - protein, 38 aa, Artificial Sequence; identical to SEQ ID NO: 11343
  Cyclic GFR-binding peptide
  MOD_RES (6)..(7): Xaa is C or S

SEQ ID NO: 52525 - protein, 31 aa, Artificial Sequence; identical to SEQ ID NO: 11344
  Cyclic GFR-binding peptide

SEQ ID NO: 52526 - protein, 27 aa, Artificial Sequence
  Cyclic GFR-binding peptide
APTQLEPLPVVYYDDSSNVIEQLSNNM

SEQ ID NO: 52527 - protein, 41 aa, Artificial Sequence; identical to SEQ ID NO: 11345
  Cyclic GFR-binding peptide
  MOD_RES (5)..(6)..(38)..(40): Xaa is C or S

SEQ ID NO: 52528 - protein, 35 aa, Artificial Sequence; identical to SEQ ID NO: 11346
  Cyclic GFR-binding peptide
  MOD_RES (3)..(4): Xaa is C or S

SEQ ID NO: 52529 - protein, 31 aa, Artificial Sequence
  Cyclic GFR-binding peptide
  MOD_RES (30)..(30): Xaa is C or S
TELEPLTMLYYDENEKVVEQLSNDMVVEGXG

SEQ ID NO: 52530 - protein, 31 aa, Artificial Sequence; identical to SEQ ID NO: 11347
  Cyclic GFR-binding peptide
  MOD_RES (1)..(1): Xaa is C or S

SEQ ID NO: 52531 - protein, 29 aa, Artificial Sequence
  Cyclic GFR-binding peptide
  MOD_RES (3)..(4): Xaa is C or S
SPXXVPQDLSPISILFIVGRTPKVYKQYE

SEQ ID NO: 52532 - protein, 30 aa, Artificial Sequence
  Cyclic GFR-binding peptide
  MOD_RES (4)..(5): Xaa is C or S
PKPXXAPTKLEPLTVLYYDDSSNVIEQLSN

SEQ ID NO: 52533 - protein, 25 aa, Artificial Sequence
  Cyclic GFR-binding peptide
TRLEPLTILYYDSANNVVEQLSNDM

SEQ ID NO: 52534 - protein, 28 aa, Artificial Sequence
  Cyclic GFR-binding peptide
KLEPLPVVYYDDSSNVIEQLSNNMVVRS

SEQ ID NO: 52535 - protein, 34 aa, Artificial Sequence; identical to SEQ ID NO: 11350
  Cyclic GFR-binding peptide
  MOD_RES (1)..(32)..(34): Xaa is C or S

SEQ ID NO: 52536 - protein, 22 aa, Artificial Sequence
  Cyclic GFR-binding peptide
RLEPLTILYYDSANNVVEQLSN

SEQ ID NO: 52537 - protein, 31 aa, Artificial Sequence
  Cyclic GFR-binding peptide
  MOD_RES (30)..(30): Xaa is C or S
TRLNAISILYFDSANNVVLKKYRDMVVESXG

SEQ ID NO: 52538 - protein, 31 aa, Artificial Sequence
  Cyclic GFR-binding peptide
  MOD_RES (1)..(2): Xaa is C or S
XXVPTRLEPLTILYYDSANNVVEQLSNDMVV

SEQ ID NO: 52539 - protein, 25 aa, Artificial Sequence
  Cyclic GFR-binding peptide
LEPLTILYYVGRKPKVEQLSNMIVR

SEQ ID NO: 52540 - protein, 41 aa, Artificial Sequence; identical to SEQ ID NO: 11355
  Cyclic GFR-binding peptide
  MOD_RES (5)..(6)..(38)..(40): Xaa is C or S

SEQ ID NO: 52541 - protein, 26 aa, Artificial Sequence
  Cyclic GFR-binding peptide
RLNAISILYFDSANNVVLKKYRDMVV

SEQ ID NO: 52542 - protein, 35 aa, Artificial Sequence; identical to SEQ ID NO: 11356
  Cyclic GFR-binding peptide
  MOD_RES (3)..(4)..(35): Xaa is C or S

SEQ ID NO: 52543 - protein, 28 aa, Artificial Sequence
  Cyclic GFR-binding peptide
  MOD_RES (28)..(28): Xaa is C or S
ALEPLTILYYVGRKPKVEQLSNMIVRSX

SEQ ID NO: 52544 - protein, 29 aa, Artificial Sequence
  Cyclic GFR-binding peptide
  MOD_RES (29)..(29): Xaa is C or S
QDLEPLPIVYYVGRTPKVEQLSNMVVKSX

SEQ ID NO: 52545 - protein, 22 aa, Artificial Sequence
  Cyclic GFR-binding peptide
EPLPIVYYIGKTPKIEQLSNMI

SEQ ID NO: 52546 - protein, 33 aa, Artificial Sequence; identical to SEQ ID NO: 11359
  Cyclic GFR-binding peptide
  MOD_RES (1)..(2): Xaa is C or S

SEQ ID NO: 52547 - protein, 28 aa, Artificial Sequence
  Cyclic GFR-binding peptide
TKLEPLTVLYYDDSSNVIEQLSNNMVVR

SEQ ID NO: 52548 - protein, 30 aa, Artificial Sequence
  Cyclic GFR-binding peptide
  MOD_RES (30)..(30): Xaa is C or S
PQALEPLTILYYVGRKPKVEQLSNMIVRSX

SEQ ID NO: 52549 - protein, 34 aa, Artificial Sequence; identical to SEQ ID NO: 11361
  Cyclic GFR-binding peptide
  MOD_RES (4)..(4): Xaa is C or S

SEQ ID NO: 52550 - protein, 31 aa, Artificial Sequence
  Cyclic GFR-binding peptide
  MOD_RES (2)..(3): Xaa is C or S
TXXVPTRLNAISILYFDSANNVVLKKYRDMV

SEQ ID NO: 52551 - protein, 31 aa, Artificial Sequence
  Cyclic GFR-binding peptide
  MOD_RES (5)..(6): Xaa is C or S
SAAPXXVPQALEPLTILYYVGRKPKVEQLSN

SEQ ID NO: 52552 - protein, 34 aa, Artificial Sequence
  Cyclic GFR-binding peptide
  MOD_RES (5)..(6): Xaa is C or S
VPKPXXAPTQLEPLTVLYYDDSSNVIEQLSNNMV

SEQ ID NO: 52553 - protein, 37 aa, Artificial Sequence; identical to SEQ ID NO: 11364
  Cyclic GFR-binding peptide
  MOD_RES (7)..(7): Xaa is C or S

SEQ ID NO: 52554 - protein, 30 aa, Artificial Sequence
  Cyclic GFR-binding peptide
PTELSPISMLFIDENEKVVYKQYEDMVVEG

SEQ ID NO: 52555 - protein, 32 aa, Artificial Sequence; identical to SEQ ID NO: 11365
  Cyclic GFR-binding peptide
  MOD_RES (1)..(1): Xaa is C or S

SEQ ID NO: 52556 - protein, 26 aa, Artificial Sequence
  Cyclic GFR-binding peptide
DLSPISILFIIGKTPKIYKQYEMIVK

SEQ ID NO: 52557 - protein, 27 aa, Artificial Sequence
  Cyclic GFR-binding peptide
VSQDLEPLPIVYYIGKTPKIEQLSNMI

SEQ ID NO: 52558 - protein, 29 aa, Artificial Sequence
  Cyclic GFR-binding peptide
  MOD_RES (26)..(28): Xaa is C or S
SPISILFIVGRKPKVYKQYEMIVRSXKXS

SEQ ID NO: 52559 - protein, 30 aa, Artificial Sequence
  Cyclic GFR-binding peptide
  MOD_RES (27)..(29): Xaa is C or S
LEPLPIVYYIGKTPKIEQLSNMIVKSXKXS

SEQ ID NO: 52560 - protein, 29 aa, Artificial Sequence
  Cyclic GFR-binding peptide
PTRLSAISILYLDSANNVVLKNYQDMVVE

SEQ ID NO: 52561 - protein, 28 aa, Artificial Sequence
  Cyclic GFR-binding peptide
KLEPLTVLYYDDSSNVIEQLSNNMVVRS

SEQ ID NO: 52562 - protein, 25 aa, Artificial Sequence
  Cyclic GFR-binding peptide
ALSPISILFIVGRKPKVYKQYEMIV

SEQ ID NO: 52563 - protein, 27 aa, Artificial Sequence
  Cyclic GFR-binding peptide
TQLEPLPVVYYDDSSNVIEQLSNNMVV

SEQ ID NO: 52564 - protein, 34 aa, Artificial Sequence; identical to SEQ ID NO: 11368
  Cyclic GFR-binding peptide
  MOD_RES (2)..(34): Xaa is C or S

SEQ ID NO: 52565 - protein, 33 aa, Artificial Sequence
  Cyclic GFR-binding peptide
  MOD_RES (3)..(4): Xaa is C or S
PTXXVPTRLSAISILYLDSANNVVLKNYQDMVV

SEQ ID NO: 52566 - protein, 36 aa, Artificial Sequence; identical to SEQ ID NO: 11371
  Cyclic GFR-binding peptide
  MOD_RES (3)..(4)..(36): Xaa is C or S

SEQ ID NO: 52567 - protein, 33 aa, Artificial Sequence; identical to SEQ ID NO: 11372
  Cyclic GFR-binding peptide
  MOD_RES (2)..(3): Xaa is C or S

SEQ ID NO: 52568 - protein, 37 aa, Artificial Sequence; identical to SEQ ID NO: 11373
  Cyclic GFR-binding peptide
  MOD_RES (5)..(6)..(37): Xaa is C or S

SEQ ID NO: 52569 - protein, 28 aa, Artificial Sequence
  Cyclic GFR-binding peptide
QDLEPLPIVYYIGKTPKIEQLSNMIVKS

SEQ ID NO: 52570 - protein, 28 aa, Artificial Sequence
  Cyclic GFR-binding peptide
  MOD_RES (2)..(3): Xaa is C or S
TXXVPTRLEPLPIVYYDSANNVVEQLSN

SEQ ID NO: 52571 - protein, 30 aa, Artificial Sequence
  Cyclic GFR-binding peptide
PTELSPISMLFIDEYDKVVYKQYEEMVVEG

SEQ ID NO: 52572 - protein, 28 aa, Artificial Sequence
  Cyclic GFR-binding peptide
  MOD_RES (1)..(1): Xaa is C or S
XVPTELSPISMLFIDEYDKVVYKQYEEM

SEQ ID NO: 52573 - protein, 31 aa, Artificial Sequence
  Cyclic GFR-binding peptide
  MOD_RES (4)..(5): Xaa is C or S
PKPXXAPTKLSPISVLFIDDSSNVIYKQYEN

SEQ ID NO: 52574 - protein, 23 aa, Artificial Sequence
  Cyclic GFR-binding peptide
TQLEPLPVVYYDDSSNVIEQLSN

SEQ ID NO: 52575 - protein, 33 aa, Artificial Sequence
  Cyclic GFR-binding peptide
  MOD_RES (6)..(7): Xaa is C or S
ASASPXXVSQDLSPISILFIIGKTPKIYKQYEM

SEQ ID NO: 52576 - protein, 40 aa, Artificial Sequence; identical to SEQ ID NO: 11378
  Cyclic GFR-binding peptide
  MOD_RES (7)..(39): Xaa is C or S

SEQ ID NO: 52577 - protein, 28 aa, Artificial Sequence
  Cyclic GFR-binding peptide
  MOD_RES (27)..(27): Xaa is C or S
EPLTMLYYDENEKVVEQLSNDMVVEGXG

SEQ ID NO: 52578 - protein, 31 aa, Artificial Sequence; identical to SEQ ID NO: 11380
  Cyclic GFR-binding peptide

SEQ ID NO: 52579 - protein, 25 aa, Artificial Sequence
  Cyclic GFR-binding peptide
LSAISILYLDSANNVVLKNYQDMVV

SEQ ID NO: 52580 - protein, 26 aa, Artificial Sequence
  Cyclic GFR-binding peptide
VPQALEPLTILYYVGRKPKVEQLSNM

SEQ ID NO: 52581 - protein, 25 aa, Artificial Sequence
  Cyclic GFR-binding peptide
LEPLTMLYYDENEKVVEQLSNDMVV

SEQ ID NO: 52582 - protein, 32 aa, Artificial Sequence
  Cyclic GFR-binding peptide
  MOD_RES (4)..(5): Xaa is C or S
AAPXXVPQALSPISILFIVGRKPKVYKQYEMI

SEQ ID NO: 52583 - protein, 36 aa, Artificial Sequence; identical to SEQ ID NO: 11384
  Cyclic GFR-binding peptide
  MOD_RES (1)..(2)..(34)..(36): Xaa is C or S

SEQ ID NO: 52584 - protein, 28 aa, Artificial Sequence
  Cyclic GFR-binding peptide
  MOD_RES (3)..(3): Xaa is C or S
PTXAPTKLSPISVLFIDDSSNVIYKQYE

SEQ ID NO: 52585 - protein, 30 aa, Artificial Sequence; identical to SEQ ID NO: 11389
  Cyclic GFR-binding peptide

SEQ ID NO: 52586 - protein, 27 aa, Artificial Sequence
  Cyclic GFR-binding peptide
RLEPLTILYYDSANNVVEQLSNDMVVE

SEQ ID NO: 52587 - protein, 21 aa, Artificial Sequence
  Cyclic GFR-binding peptide
LEPLPIVYYDSANNVVEQLSN

SEQ ID NO: 52588 - protein, 27 aa, Artificial Sequence
  Cyclic GFR-binding peptide
VPQDLEPLPIVYYVGRTPKVEQLSNMV

SEQ ID NO: 52589 - protein, 37 aa, Artificial Sequence; identical to SEQ ID NO: 11390
  Cyclic GFR-binding peptide
  MOD_RES (6)..(7): Xaa is C or S

SEQ ID NO: 52590 - protein, 36 aa, Artificial Sequence; identical to SEQ ID NO: 11391
  Cyclic GFR-binding peptide
  MOD_RES (1)..(33)..(35): Xaa is C or S

SEQ ID NO: 52591 - protein, 28 aa, Artificial Sequence
  Cyclic GFR-binding peptide
  MOD_RES (28)..(28): Xaa is C or S
LEPLPMVYYDENEKVVEQLSNDMVVEGX

SEQ ID NO: 52592 - protein, 40 aa, Artificial Sequence; identical to SEQ ID NO: 11392
  Cyclic GFR-binding peptide
  MOD_RES (6)..(7)..(39): Xaa is C or S

SEQ ID NO: 52593 - protein, 28 aa, Artificial Sequence
  Cyclic GFR-binding peptide
PQDLEPLPIVYYVGRTPKVEQLSNMVVK

SEQ ID NO: 52594 - protein, 33 aa, Artificial Sequence
  Cyclic GFR-binding peptide
  MOD_RES (3)..(4): Xaa is C or S
KAXXVPTELEPLPMVYYDENEKVVEQLSNDMVV

SEQ ID NO: 52595 - protein, 32 aa, Artificial Sequence
  Cyclic GFR-binding peptide
  MOD_RES (2)..(3): Xaa is C or S
PXXVPQALSPISILFIVGRKPKVYKQYEMIVR

SEQ ID NO: 52596 - protein, 28 aa, Artificial Sequence
  Cyclic GFR-binding peptide
TKLEPLPVVYYDDSSNVIEQLSNNMVVR

SEQ ID NO: 52597 - protein, 20 aa, Artificial Sequence
  Cyclic GFR-binding peptide
EPLPIVYYVGRTPKVEQLSN

SEQ ID NO: 52598 - protein, 35 aa, Artificial Sequence; identical to SEQ ID NO: 11394
  Cyclic GFR-binding peptide
  MOD_RES (1)..(2)..(33)..(35): Xaa is C or S

SEQ ID NO: 52599 - protein, 36 aa, Artificial Sequence; identical to SEQ ID NO: 11396
  Cyclic GFR-binding peptide
  MOD_RES (5)..(5): Xaa is C or S

SEQ ID NO: 52600 - protein, 35 aa, Artificial Sequence; identical to SEQ ID NO: 11397
  Cyclic GFR-binding peptide
  MOD_RES (1)..(2)..(33)..(35): Xaa is C or S

SEQ ID NO: 52601 - protein, 31 aa, Artificial Sequence
  Cyclic GFR-binding peptide
  MOD_RES (4)..(5): Xaa is C or S
PKPXXAPTKLEPLPVVYYDDSSNVIEQLSNN

SEQ ID NO: 52602 - protein, 28 aa, Artificial Sequence
  Cyclic GFR-binding peptide
TRLEPLTILYYDSANNVVEQLSNDMVVE

SEQ ID NO: 52603 - protein, 25 aa, Artificial Sequence
  Cyclic GFR-binding peptide
TELEPLPMVYYDENEKVVEQLSNDM

SEQ ID NO: 52604 - protein, 23 aa, Artificial Sequence
  Cyclic GFR-binding peptide
TELEPLPMVYYDENEKVVEQLSN

SEQ ID NO: 52605 - protein, 28 aa, Artificial Sequence
  Cyclic GFR-binding peptide
  MOD_RES (28)..(28): Xaa is C or S
DLEPLPIVYYIGKTPKIEQLSNMIVKSX

SEQ ID NO: 52606 - protein, 28 aa, Artificial Sequence
  Cyclic GFR-binding peptide
PQDLSPISILFIVGRTPKVYKQYEMVVK

SEQ ID NO: 52607 - protein, 23 aa, Artificial Sequence
  Cyclic GFR-binding peptide
QLEPLPVVYYDDSSNVIEQLSNN

SEQ ID NO: 52608 - protein, 31 aa, Artificial Sequence
  Cyclic GFR-binding peptide
  MOD_RES (3)..(3): Xaa is C or S
PTXAPTKLEPLPVVYYDDSSNVIEQLSNNMV

SEQ ID NO: 52609 - protein, 31 aa, Artificial Sequence
  Cyclic GFR-binding peptide
  MOD_RES (1)..(2): Xaa is C or S
XXVPTRLNAISILYFDSANNVVLKKYRDMVV

SEQ ID NO: 52610 - protein, 31 aa, Artificial Sequence
  Cyclic GFR-binding peptide
  MOD_RES (30)..(30): Xaa is C or S
PQALSPISILFIVGRKPKVYKQYEMIVRSXK

SEQ ID NO: 52611 - protein, 34 aa, Artificial Sequence
  Cyclic GFR-binding peptide
  MOD_RES (5)..(6): Xaa is C or S
SAAPXXVPQALEPLTILYYVGRKPKVEQLSNMIV

SEQ ID NO: 52612 - protein, 35 aa, Artificial Sequence; identical to SEQ ID NO: 11402
  Cyclic GFR-binding peptide
  MOD_RES (1)..(2)..(33)..(35): Xaa is C or S

SEQ ID NO: 52613 - protein, 27 aa, Artificial Sequence
  Cyclic GFR-binding peptide
  MOD_RES (1)..(2): Xaa is C or S
XXAPTQLEPLTVLYYDDSSNVIEQLSN

SEQ ID NO: 52614 - protein, 32 aa, Artificial Sequence
  Cyclic GFR-binding peptide
  MOD_RES (31)..(31): Xaa is C or S
PTKLEPLPVVYYDDSSNVIEQLSNNMVVRSXG

SEQ ID NO: 52615 - protein, 37 aa, Artificial Sequence; identical to SEQ ID NO: 11403
  Cyclic GFR-binding peptide
  MOD_RES (2)..(3)..(35)..(37): Xaa is C or S

SEQ ID NO: 52616 - protein, 27 aa, Artificial Sequence
  Cyclic GFR-binding peptide
QDLEPLPIVYYIGKTPKIEQLSNMIVK

SEQ ID NO: 52617 - protein, 33 aa, Artificial Sequence
  Cyclic GFR-binding peptide
  MOD_RES (31)..(33): Xaa is C or S
PTKLEPLPVVYYDDSSNVIEQLSNNMVVRSXGX

SEQ ID NO: 52618 - protein, 28 aa, Artificial Sequence
  Cyclic GFR-binding peptide
  MOD_RES (1)..(1): Xaa is C or S
XVPTRLEPLPIVYYDSANNVVEQLSNDM

SEQ ID NO: 52619 - protein, 34 aa, Artificial Sequence
  Cyclic GFR-binding peptide
  MOD_RES (31)..(33): Xaa is C or S
PTQLEPLTVLYYDDSSNVIEQLSNNMVVRAXGXH

SEQ ID NO: 52620 - protein, 31 aa, Artificial Sequence
  Cyclic GFR-binding peptide
  MOD_RES (28)..(30): Xaa is C or S
LEPLPIVYYDSANNVVEQLSNDMVVESXGXR

SEQ ID NO: 52621 - protein, 31 aa, Artificial Sequence; identical to SEQ ID NO: 11408
  Cyclic GFR-binding peptide

SEQ ID NO: 52622 - protein, 27 aa, Artificial Sequence
  Cyclic GFR-binding peptide
PQALEPLTILYYVGRKPKVEQLSNMIV

SEQ ID NO: 52623 - protein, 39 aa, Artificial Sequence; identical to SEQ ID NO: 11409
  Cyclic GFR-binding peptide
  MOD_RES (5)..(37)..(39): Xaa is C or S

SEQ ID NO: 52624 - protein, 28 aa, Artificial Sequence
  Cyclic GFR-binding peptide
PTRLNAISILYFDSANNVVLKKYRDMVV

SEQ ID NO: 52625 - protein, 31 aa, Artificial Sequence
  Cyclic GFR-binding peptide
  MOD_RES (3)..(4): Xaa is C or S
KPXXAPTQLEPLPVVYYDDSSNVIEQLSNNM

SEQ ID NO: 52626 - protein, 37 aa, Artificial Sequence; identical to SEQ ID NO: 11410
  Cyclic GFR-binding peptide
  MOD_RES (5)..(37): Xaa is C or S

SEQ ID NO: 52627 - protein, 33 aa, Artificial Sequence; identical to SEQ ID NO: 11411
  Cyclic GFR-binding peptide
  MOD_RES (2)..(3): Xaa is C or S

SEQ ID NO: 52628 - protein, 38 aa, Artificial Sequence; identical to SEQ ID NO: 11412
  Cyclic GFR-binding peptide
  MOD_RES (6)..(7): Xaa is C or S

SEQ ID NO: 52629 - protein, 32 aa, Artificial Sequence; identical to SEQ ID NO: 11413
  Cyclic GFR-binding peptide
  MOD_RES (1)..(32): Xaa is C or S

SEQ ID NO: 52630 - protein, 34 aa, Artificial Sequence; identical to SEQ ID NO: 11414
  Cyclic GFR-binding peptide
  MOD_RES (1)..(32)..(34): Xaa is C or S

SEQ ID NO: 52631 - protein, 29 aa, Artificial Sequence
  Cyclic GFR-binding peptide
  MOD_RES (27)..(29): Xaa is C or S
LEPLPIVYYVGRTPKVEQLSNMVVKSXKX

SEQ ID NO: 52632 - protein, 33 aa, Artificial Sequence
  Cyclic GFR-binding peptide
  MOD_RES (6)..(7): Xaa is C or S
ASASPXXVPQDLSPISILFIVGRTPKVYKQYEM

SEQ ID NO: 52633 - protein, 32 aa, Artificial Sequence; identical to SEQ ID NO: 11415
  Cyclic GFR-binding peptide
  MOD_RES (2)..(2): Xaa is C or S

SEQ ID NO: 52634 - protein, 34 aa, Artificial Sequence; identical to SEQ ID NO: 11417
  Cyclic GFR-binding peptide
  MOD_RES (1)..(32)..(34): Xaa is C or S

SEQ ID NO: 52635 - protein, 32 aa, Artificial Sequence
  Cyclic GFR-binding peptide
  MOD_RES (4)..(5): Xaa is C or S
PPTXXVPTRLNAISILYFDSANNVVLKKYRDM

SEQ ID NO: 52636 - protein, 27 aa, Artificial Sequence
  Cyclic GFR-binding peptide
LEPLPVVYYDDSSNVIEQLSNNMVVRA

SEQ ID NO: 52637 - protein, 34 aa, Artificial Sequence
  Cyclic GFR-binding peptide
  MOD_RES (31)..(33): Xaa is C or S
PTELEPLTMLYYDENEKVVEQLSNDMVVEGXGXR

SEQ ID NO: 52638 - protein, 31 aa, Artificial Sequence
  Cyclic GFR-binding peptide
  MOD_RES (5)..(5): Xaa is C or S
TKPTXAPTKLEPLPVVYYDDSSNVIEQLSNN

SEQ ID NO: 52639 - protein, 32 aa, Artificial Sequence
  Cyclic GFR-binding peptide
  MOD_RES (31)..(31): Xaa is C or S
PTELEPLPMVYYDEYDKVVEQLSNEMVVEGXG

SEQ ID NO: 52640 - protein, 27 aa, Artificial Sequence
  Cyclic GFR-binding peptide
  MOD_RES (1)..(1): Xaa is C or S
XVPTRLEPLTILYYDSANNVVEQLSND

SEQ ID NO: 52641 - protein, 38 aa, Artificial Sequence; identical to SEQ ID NO: 11422
  Cyclic GFR-binding peptide
  MOD_RES (6)..(7): Xaa is C or S

SEQ ID NO: 52642 - protein, 27 aa, Artificial Sequence
  Cyclic GFR-binding peptide
LEPLPVVYYDDSSNVIEQLSNNMVVRS

SEQ ID NO: 52643 - protein, 37 aa, Artificial Sequence; identical to SEQ ID NO: 11423
  Cyclic GFR-binding peptide
  MOD_RES (4)..(5)..(37): Xaa is C or S

SEQ ID NO: 52644 - protein, 37 aa, Artificial Sequence; identical to SEQ ID NO: 11424
  Cyclic GFR-binding peptide
  MOD_RES (2)..(3)..(35)..(37): Xaa is C or S

SEQ ID NO: 52645 - protein, 36 aa, Artificial Sequence; identical to SEQ ID NO: 11426
  Cyclic GFR-binding peptide
  MOD_RES (2)..(3)..(35): Xaa is C or S

SEQ ID NO: 52646 - protein, 32 aa, Artificial Sequence
  Cyclic GFR-binding peptide
  MOD_RES (2)..(3): Xaa is C or S
PXXAPTKLEPLPVVYYDDSSNVIEQLSNNMVV

SEQ ID NO: 52647 - protein, 35 aa, Artificial Sequence; identical to SEQ ID NO: 11425
  Cyclic GFR-binding peptide
  MOD_RES (1)..(33)..(35): Xaa is C or S

SEQ ID NO: 52648 - protein, 32 aa, Artificial Sequence
  Cyclic GFR-binding peptide
  MOD_RES (4)..(5): Xaa is C or S
PPTXXVPTRLEPLPIVYYDSANNVVEQLSNDM

SEQ ID NO: 52649 - protein, 29 aa, Artificial Sequence
  Cyclic GFR-binding peptide
  MOD_RES (28)..(28): Xaa is C or S
LSPISVLFIDDSSNVIYKQYENMVVRSXG

SEQ ID NO: 52650 - protein, 30 aa, Artificial Sequence
  Cyclic GFR-binding peptide
PTRLEPLPIVYYDSANNVVEQLSNDMVVES

SEQ ID NO: 52651 - protein, 37 aa, Artificial Sequence; identical to SEQ ID NO: 11427
  Cyclic GFR-binding peptide
  MOD_RES (2)..(3)..(35)..(37): Xaa is C or S

SEQ ID NO: 52652 - protein, 34 aa, Artificial Sequence; identical to SEQ ID NO: 11428
  Cyclic GFR-binding peptide
  MOD_RES (3)..(3): Xaa is C or S

SEQ ID NO: 52653 - protein, 20 aa, Artificial Sequence
  Cyclic GFR-binding peptide
SPISVLFIDDSSNVIYKQYE

SEQ ID NO: 52654 - protein, 33 aa, Artificial Sequence; identical to SEQ ID NO: 11429
  Cyclic GFR-binding peptide
  MOD_RES (2)..(3): Xaa is C or S

SEQ ID NO: 52655 - protein, 22 aa, Artificial Sequence
  Cyclic GFR-binding peptide
NAISILYFDSANNVVLKKYRDM

SEQ ID NO: 52656 - protein, 31 aa, Artificial Sequence
  Cyclic GFR-binding peptide
  MOD_RES (3)..(4): Xaa is C or S
KAXXVPTELSPISMLFIDEYDKVVYKQYEEM

SEQ ID NO: 52657 - protein, 27 aa, Artificial Sequence
  Cyclic GFR-binding peptide
  MOD_RES (2)..(2): Xaa is C or S
TXAPTKLSPISVLFIDDSSNVIYKQYE

SEQ ID NO: 52658 - protein, 33 aa, Artificial Sequence; identical to SEQ ID NO: 11430
  Cyclic GFR-binding peptide
  MOD_RES (32)..(32): Xaa is C or S

SEQ ID NO: 52659 - protein, 35 aa, Artificial Sequence; identical to SEQ ID NO: 11432
  Cyclic GFR-binding peptide
  MOD_RES (4)..(5): Xaa is C or S

SEQ ID NO: 52660 - protein, 27 aa, Artificial Sequence
  Cyclic GFR-binding peptide
  MOD_RES (1)..(2): Xaa is C or S
XXAPTKLEPLTVLYYDDSSNVIEQLSN

SEQ ID NO: 52661 - protein, 20 aa, Artificial Sequence
  Cyclic GFR-binding peptide
SPISVLFIDDSSNVIYKQYE

SEQ ID NO: 52662 - protein, 31 aa, Artificial Sequence
  Cyclic GFR-binding peptide
  MOD_RES (30)..(30): Xaa is C or S
TRLEPLPIVYYDSANNVVEQLSNDMVVESXG

SEQ ID NO: 52663 - protein, 20 aa, Artificial Sequence
  Cyclic GFR-binding peptide
SPISILFIVGRTPKVYKQYE

SEQ ID NO: 52664 - protein, 29 aa, Artificial Sequence
  Cyclic GFR-binding peptide
  MOD_RES (29)..(29): Xaa is C or S
ELEPLTMLYYDENEKVVEQLSNDMVVEGX

SEQ ID NO: 52665 - protein, 26 aa, Artificial Sequence
  Cyclic GFR-binding peptide
LNAISILYFDSANNVVLKKYRDMVVE

SEQ ID NO: 52666 - protein, 31 aa, Artificial Sequence
  Cyclic GFR-binding peptide
  MOD_RES (30)..(30): Xaa is C or S
SQDLSPISILFIIGKTPKIYKQYEMIVKSXK

SEQ ID NO: 52667 - protein, 24 aa, Artificial Sequence
  Cyclic GFR-binding peptide
PTQLSPISVLFIDDSSNVIYKQYE

SEQ ID NO: 52668 - protein, 38 aa, Artificial Sequence; identical to SEQ ID NO: 11435
  Cyclic GFR-binding peptide
  MOD_RES (5)..(6)..(38): Xaa is C or S

SEQ ID NO: 52669 - protein, 26 aa, Artificial Sequence
  Cyclic GFR-binding peptide
VPTELSPISMLFIDEYDKVVYKQYEE

SEQ ID NO: 52670 - protein, 31 aa, Artificial Sequence
  Cyclic GFR-binding peptide
  MOD_RES (30)..(30): Xaa is C or S
PQDLSPISILFIVGRTPKVYKQYEMVVKSXK

SEQ ID NO: 52671 - protein, 35 aa, Artificial Sequence; identical to SEQ ID NO: 11436
  Cyclic GFR-binding peptide
  MOD_RES (4)..(5): Xaa is C or S

SEQ ID NO: 52672 - protein, 30 aa, Artificial Sequence
  Cyclic GFR-binding peptide
  MOD_RES (1)..(2): Xaa is C or S
XXAPTQLEPLTVLYYDDSSNVIEQLSNNMV

SEQ ID NO: 52673 - protein, 30 aa, Artificial Sequence
  Cyclic GFR-binding peptide
  MOD_RES (27)..(29): Xaa is C or S
LSPISILFIIGKTPKIYKQYEMIVKSXKXS

SEQ ID NO: 52674 - protein, 29 aa, Artificial Sequence
  Cyclic GFR-binding peptide
VSQDLSPISILFIIGKTPKIYKQYEMIVK

SEQ ID NO: 52675 - protein, 28 aa, Artificial Sequence
  Cyclic GFR-binding peptide
  MOD_RES (28)..(28): Xaa is C or S
LEPLPIVYYDSANNVVEQLSNDMVVESX

SEQ ID NO: 52676 - protein, 20 aa, Artificial Sequence
  Cyclic GFR-binding peptide
EPLTILYYVGRKPKVEQLSN

SEQ ID NO: 52677 - protein, 31 aa, Artificial Sequence
  Cyclic GFR-binding peptide
  MOD_RES (29)..(31): Xaa is C or S
QDLSPISILFIVGRTPKVYKQYEMVVKSXKX

SEQ ID NO: 52678 - protein, 34 aa, Artificial Sequence; identical to SEQ ID NO: 11439
  Cyclic GFR-binding peptide
  MOD_RES (1)..(32)..(34): Xaa is C or S

SEQ ID NO: 52679 - protein, 28 aa, Artificial Sequence
  Cyclic GFR-binding peptide
VPQDLSPISILFIVGRTPKVYKQYEMVV

SEQ ID NO: 52680 - protein, 38 aa, Artificial Sequence; identical to SEQ ID NO: 11440
  Cyclic GFR-binding peptide
  MOD_RES (2)..(3)..(35)..(37): Xaa is C or S

SEQ ID NO: 52681 - protein, 32 aa, Artificial Sequence
  Cyclic GFR-binding peptide
  MOD_RES (4)..(5): Xaa is C or S
PKAXXVPTELEPLPMVYYDENEKVVEQLSNDM

SEQ ID NO: 52682 - protein, 25 aa, Artificial Sequence
  Cyclic GFR-binding peptide
PTKLEPLPVVYYDDSSNVIEQLSNN

SEQ ID NO: 52683 - protein, 23 aa, Artificial Sequence
  Cyclic GFR-binding peptide
TELSPISMLFIDEYDKVVYKQYE

SEQ ID NO: 52684 - protein, 41 aa, Artificial Sequence; identical to SEQ ID NO: 11444
  Cyclic GFR-binding peptide
  MOD_RES (5)..(6)..(38)..(40): Xaa is C or S

SEQ ID NO: 52685 - protein, 29 aa, Artificial Sequence
  Cyclic GFR-binding peptide
VPTRLEPLTILYYDSANNVVEQLSNDMVV

SEQ ID NO: 52686 - protein, 29 aa, Artificial Sequence
  Cyclic GFR-binding peptide
  MOD_RES (1)..(1): Xaa is C or S
XAPTQLEPLTVLYYDDSSNVIEQLSNNMV

SEQ ID NO: 52687 - protein, 28 aa, Artificial Sequence
  Cyclic GFR-binding peptide
  MOD_RES (2)..(3): Xaa is C or S
TXXVPTRLSAISILYLDSANNVVLKNYQ

SEQ ID NO: 52688 - protein, 30 aa, Artificial Sequence
  Cyclic GFR-binding peptide
  MOD_RES (3)..(4): Xaa is C or S
SPXXVPQDLSPISILFIVGRTPKVYKQYEM

SEQ ID NO: 52689 - protein, 36 aa, Artificial Sequence; identical to SEQ ID NO: 11445
  Cyclic GFR-binding peptide
  MOD_RES (3)..(4)..(36): Xaa is C or S

SEQ ID NO: 52690 - protein, 37 aa, Artificial Sequence; identical to SEQ ID NO: 11446
  Cyclic GFR-binding peptide
  MOD_RES (2)..(3)..(34)..(36): Xaa is C or S

SEQ ID NO: 52691 - protein, 37 aa, Artificial Sequence; identical to SEQ ID NO: 11448
  Cyclic GFR-binding peptide
  MOD_RES (5)..(6): Xaa is C or S

SEQ ID NO: 52692 - protein, 26 aa, Artificial Sequence
  Cyclic GFR-binding peptide
  MOD_RES (1)..(1): Xaa is C or S
XAPTKLSPISVLFIDDSSNVIYKQYE

SEQ ID NO: 52693 - protein, 31 aa, Artificial Sequence
  Cyclic GFR-binding peptide
  MOD_RES (29)..(31): Xaa is C or S
QDLSPISILFIIGKTPKIYKQYEMIVKSXKX

SEQ ID NO: 52694 - protein, 33 aa, Artificial Sequence
  Cyclic GFR-binding peptide
  MOD_RES (5)..(6): Xaa is C or S
VPKPXXAPTQLEPLTVLYYDDSSNVIEQLSNNM

SEQ ID NO: 52695 - protein, 27 aa, Artificial Sequence
  Cyclic GFR-binding peptide
ELSPISMLFIDEYDKVVYKQYEEMVVE

SEQ ID NO: 52696 - protein, 33 aa, Artificial Sequence
  Cyclic GFR-binding peptide
  MOD_RES (4)..(5): Xaa is C or S
ASPXXVSQDLEPLPIVYYIGKTPKIEQLSNMIV

SEQ ID NO: 52697 - protein, 39 aa, Artificial Sequence; identical to SEQ ID NO: 11450
  Cyclic GFR-binding peptide
  MOD_RES (4)..(5)..(37)..(39): Xaa is C or S

SEQ ID NO: 52698 - protein, 32 aa, Artificial Sequence; identical to SEQ ID NO: 11451
  Cyclic GFR-binding peptide
  MOD_RES (1)..(2): Xaa is C or S

SEQ ID NO: 52699 - protein, 23 aa, Artificial Sequence
  Cyclic GFR-binding peptide
EPLTILYYVGRKPKVEQLSNMIV

SEQ ID NO: 52700 - protein, 29 aa, Artificial Sequence
  Cyclic GFR-binding peptide
  MOD_RES (1)..(1): Xaa is C or S
XVPQDLSPISILFIVGRTPKVYKQYEMVV

SEQ ID NO: 52701 - protein, 26 aa, Artificial Sequence
  Cyclic GFR-binding peptide
  MOD_RES (26)..(26): Xaa is C or S
EPLPIVYYVGRTPKVEQLSNMVVKSX

SEQ ID NO: 52702 - protein, 23 aa, Artificial Sequence
  Cyclic GFR-binding peptide
KLEPLTVLYYDDSSNVIEQLSNN

SEQ ID NO: 52703 - protein, 25 aa, Artificial Sequence
  Cyclic GFR-binding peptide
VPTRLSAISILYLDSANNVVLKNYQ

SEQ ID NO: 52704 - protein, 38 aa, Artificial Sequence; identical to SEQ ID NO: 11456
  Cyclic GFR-binding peptide
  MOD_RES (6)..(7): Xaa is C or S

SEQ ID NO: 52705 - protein, 26 aa, Artificial Sequence
  Cyclic GFR-binding peptide
KLEPLTVLYYDDSSNVIEQLSNNMVV

SEQ ID NO: 52706 - protein, 25 aa, Artificial Sequence
  Cyclic GFR-binding peptide
EPLPIVYYIGKTPKIEQLSNMIVKS

SEQ ID NO: 52707 - protein, 36 aa, Artificial Sequence; identical to SEQ ID NO: 11457
  Cyclic GFR-binding peptide
  MOD_RES (2)..(3)..(35): Xaa is C or S

SEQ ID NO: 52708 - protein, 29 aa, Artificial Sequence
  Cyclic GFR-binding peptide
TRLEPLTILYYDSANNVVEQLSNDMVVES

SEQ ID NO: 52709 - protein, 34 aa, Artificial Sequence; identical to SEQ ID NO: 11458
  Cyclic GFR-binding peptide
  MOD_RES (1)..(33): Xaa is C or S

SEQ ID NO: 52710 - protein, 27 aa, Artificial Sequence
  Cyclic GFR-binding peptide
  MOD_RES (1)..(2): Xaa is C or S
XXVPTELSPISMLFIDENEKVVYKQYE

SEQ ID NO: 52711 - protein, 33 aa, Artificial Sequence; identical to SEQ ID NO: 11462
  Cyclic GFR-binding peptide
  MOD_RES (1)..(2)..(33): Xaa is C or S

SEQ ID NO: 52712 - protein, 24 aa, Artificial Sequence
  Cyclic GFR-binding peptide
PTELEPLTMLYYDEYDKVVEQLSN

SEQ ID NO: 52713 - protein, 30 aa, Artificial Sequence
  Cyclic GFR-binding peptide
PTQLSPISVLFIDDSSNVIYKQYENMVVRA

SEQ ID NO: 52714 - protein, 38 aa, Artificial Sequence; identical to SEQ ID NO: 11463
  Cyclic GFR-binding peptide
  MOD_RES (4)..(5)..(36)..(38): Xaa is C or S

SEQ ID NO: 52715 - protein, 37 aa, Artificial Sequence; identical to SEQ ID NO: 11464
  Cyclic GFR-binding peptide
  MOD_RES (4)..(5)..(37): Xaa is C or S

SEQ ID NO: 52716 - protein, 24 aa, Artificial Sequence
  Cyclic GFR-binding peptide
EPLPVVYYDDSSNVIEQLSNNMVV

SEQ ID NO: 52717 - protein, 36 aa, Artificial Sequence; identical to SEQ ID NO: 11465
  Cyclic GFR-binding peptide
  MOD_RES (5)..(6): Xaa is C or S

SEQ ID NO: 52718 - protein, 38 aa, Artificial Sequence; identical to SEQ ID NO: 11466
  Cyclic GFR-binding peptide
  MOD_RES (4)..(36)..(38): Xaa is C or S

SEQ ID NO: 52719 - protein, 39 aa, Artificial Sequence; identical to SEQ ID NO: 11467
  Cyclic GFR-binding peptide
  MOD_RES (3)..(4)..(36)..(38): Xaa is C or S

SEQ ID NO: 52720 - protein, 42 aa, Artificial Sequence; identical to SEQ ID NO: 11468
  Cyclic GFR-binding peptide
  MOD_RES (6)..(7)..(39)..(41): Xaa is C or S

SEQ ID NO: 52721 - protein, 26 aa, Artificial Sequence
  Cyclic GFR-binding peptide
PTKLEPLTVLYYDDSSNVIEQLSNNM

SEQ ID NO: 52722 - protein, 26 aa, Artificial Sequence
  Cyclic GFR-binding peptide
  MOD_RES (1)..(1): Xaa is C or S
XVPQALSPISILFIVGRKPKVYKQYE

SEQ ID NO: 52723 - protein, 38 aa, Artificial Sequence; identical to SEQ ID NO: 11469
  Cyclic GFR-binding peptide
  MOD_RES (3)..(4)..(36)..(38): Xaa is C or S

SEQ ID NO: 52724 - protein, 29 aa, Artificial Sequence
  Cyclic GFR-binding peptide
  MOD_RES (26)..(28): Xaa is C or S
SPISILFIVGRTPKVYKQYEMVVKSXKXS

SEQ ID NO: 52725 - protein, 28 aa, Artificial Sequence
  Cyclic GFR-binding peptide
APTKLSPISVLFIDDSSNVIYKQYENMV

SEQ ID NO: 52726 - protein, 27 aa, Artificial Sequence
  Cyclic GFR-binding peptide
  MOD_RES (27)..(27): Xaa is C or S
SPISVLFIDDSSNVIYKQYENMVVRSX

SEQ ID NO: 52727 - protein, 28 aa, Artificial Sequence
  Cyclic GFR-binding peptide
  MOD_RES (1)..(2): Xaa is C or S
XXVPTRLEPLTILYYDSANNVVEQLSND

SEQ ID NO: 52728 - protein, 42 aa, Artificial Sequence; identical to SEQ ID NO: 11471
  Cyclic GFR-binding peptide
  MOD_RES (7)..(39)..(41): Xaa is C or S

SEQ ID NO: 52729 - protein, 23 aa, Artificial Sequence
  Cyclic GFR-binding peptide
TRLNAISILYFDSANNVVLKKYR

SEQ ID NO: 52730 - protein, 40 aa, Artificial Sequence; identical to SEQ ID NO: 11472
  Cyclic GFR-binding peptide
  MOD_RES (6)..(7)..(39): Xaa is C or S

SEQ ID NO: 52731 - protein, 25 aa, Artificial Sequence
  Cyclic GFR-binding peptide
VPQALEPLTILYYVGRKPKVEQLSN

SEQ ID NO: 52732 - protein, 20 aa, Artificial Sequence
  Cyclic GFR-binding peptide
EPLTMLYYDENEKVVEQLSN

SEQ ID NO: 52733 - protein, 30 aa, Artificial Sequence
  Cyclic GFR-binding peptide
  MOD_RES (30)..(30): Xaa is C or S
TQLEPLPVVYYDDSSNVIEQLSNNMVVRAX

SEQ ID NO: 52734 - protein, 31 aa, Artificial Sequence
  Cyclic GFR-binding peptide
  MOD_RES (28)..(30): Xaa is C or S
LSPISVLFIDDSSNVIYKQYENMVVRAXGXH

SEQ ID NO: 52735 - protein, 30 aa, Artificial Sequence
  Cyclic GFR-binding peptide
  MOD_RES (4)..(5): Xaa is C or S
PKPXXAPTQLSPISVLFIDDSSNVIYKQYE

SEQ ID NO: 52736 - protein, 33 aa, Artificial Sequence; identical to SEQ ID NO: 11474
  Cyclic GFR-binding peptide
  MOD_RES (32)..(32): Xaa is C or S

SEQ ID NO: 52737 - protein, 39 aa, Artificial Sequence; identical to SEQ ID NO: 11477
  Cyclic GFR-binding peptide
  MOD_RES (5)..(6)..(37)..(39): Xaa is C or S

SEQ ID NO: 52738 - protein, 38 aa, Artificial Sequence; identical to SEQ ID NO: 11478
  Cyclic GFR-binding peptide
  MOD_RES (3)..(4)..(36)..(38): Xaa is C or S

SEQ ID NO: 52739 - protein, 26 aa, Artificial Sequence
  Cyclic GFR-binding peptide
PTELEPLTMLYYDEYDKVVEQLSNEM

SEQ ID NO: 52740 - protein, 35 aa, Artificial Sequence; identical to SEQ ID NO: 11479
  Cyclic GFR-binding peptide
  MOD_RES (4)..(5): Xaa is C or S

SEQ ID NO: 52741 - protein, 26 aa, Artificial Sequence
  Cyclic GFR-binding peptide
TRLNAISILYFDSANNVVLKKYRDMV

SEQ ID NO: 52742 - protein, 28 aa, Artificial Sequence
  Cyclic GFR-binding peptide
PQALEPLTILYYVGRKPKVEQLSNMIVR

SEQ ID NO: 52743 - protein, 34 aa, Artificial Sequence; identical to SEQ ID NO: 11480
  Cyclic GFR-binding peptide
  MOD_RES (1)..(33): Xaa is C or S

SEQ ID NO: 52744 - protein, 27 aa, Artificial Sequence
  Cyclic GFR-binding peptide
TKLEPLPVVYYDDSSNVIEQLSNNMVV

SEQ ID NO: 52745 - protein, 36 aa, Artificial Sequence
  Cyclic GFR-binding peptide
  MOD_RES (6)..(7): Xaa is C or S
ASASPXXVPQDLSPISILFIVGRTPKVYKQYEMVVK

SEQ ID NO: 52746 - protein, 38 aa, Artificial Sequence; identical to SEQ ID NO: 11482
  Cyclic GFR-binding peptide
  MOD_RES (5)..(6)..(38): Xaa is C or S

SEQ ID NO: 52747 - protein, 23 aa, Artificial Sequence
  Cyclic GFR-binding peptide
LEPLPIVYYDSANNVVEQLSNDM

SEQ ID NO: 52748 - protein, 26 aa, Artificial Sequence
  Cyclic GFR-binding peptide
LSPISILFIVGRTPKVYKQYEMVVKS

SEQ ID NO: 52749 - protein, 32 aa, Artificial Sequence
  Cyclic GFR-binding peptide
  MOD_RES (6)..(7): Xaa is C or S
KIPKAXXVPTELSPISMLFIDENEKVVYKQYE

SEQ ID NO: 52750 - protein, 30 aa, Artificial Sequence
  Cyclic GFR-binding peptide
  MOD_RES (29)..(29): Xaa is C or S
QDLSPISILFIVGRTPKVYKQYEMVVKSXK

SEQ ID NO: 52751 - protein, 38 aa, Artificial Sequence; identical to SEQ ID NO: 11485
  Cyclic GFR-binding peptide
  MOD_RES (3)..(4)..(36)..(38): Xaa is C or S

SEQ ID NO: 52752 - protein, 23 aa, Artificial Sequence
  Cyclic GFR-binding peptide
TKLEPLTVLYYDDSSNVIEQLSN

SEQ ID NO: 52753 - protein, 29 aa, Artificial Sequence
  Cyclic GFR-binding peptide
  MOD_RES (1)..(1): Xaa is C or S
XAPTKLSPISVLFIDDSSNVIYKQYENMV

SEQ ID NO: 52754 - protein, 34 aa, Artificial Sequence
  Cyclic GFR-binding peptide
  MOD_RES (31)..(33): Xaa is C or S
PTRLEPLTILYYDSANNVVEQLSNDMVVESXGXR

SEQ ID NO: 52755 - protein, 27 aa, Artificial Sequence
  Cyclic GFR-binding peptide
SQDLEPLPIVYYIGKTPKIEQLSNMIV

SEQ ID NO: 52756 - protein, 29 aa, Artificial Sequence
  Cyclic GFR-binding peptide
  MOD_RES (1)..(2): Xaa is C or S
XXAPTKLSPISVLFIDDSSNVIYKQYENM

SEQ ID NO: 52757 - protein, 23 aa, Artificial Sequence
  Cyclic GFR-binding peptide
LEPLTMLYYDEYDKVVEQLSNEM

SEQ ID NO: 52758 - protein, 22 aa, Artificial Sequence
  Cyclic GFR-binding peptide
ELEPLTMLYYDENEKVVEQLSN

SEQ ID NO: 52759 - protein, 33 aa, Artificial Sequence; identical to SEQ ID NO: 11489
  Cyclic GFR-binding peptide
  MOD_RES (1)..(33): Xaa is C or S

SEQ ID NO: 52760 - protein, 26 aa, Artificial Sequence
  Cyclic GFR-binding peptide
QDLEPLPIVYYVGRTPKVEQLSNMVV

SEQ ID NO: 52761 - protein, 39 aa, Artificial Sequence; identical to SEQ ID NO: 11491
  Cyclic GFR-binding peptide
  MOD_RES (6)..(7)..(39): Xaa is C or S

SEQ ID NO: 52762 - protein, 36 aa, Artificial Sequence; identical to SEQ ID NO: 11492
  Cyclic GFR-binding peptide
  MOD_RES (4)..(5): Xaa is C or S

SEQ ID NO: 52763 - protein, 25 aa, Artificial Sequence
  Cyclic GFR-binding peptide
QALEPLTILYYVGRKPKVEQLSNMI

SEQ ID NO: 52764 - protein, 20 aa, Artificial Sequence
  Cyclic GFR-binding peptide
SAISILYLDSANNVVLKNYQ

SEQ ID NO: 52765 - protein, 30 aa, Artificial Sequence
  Cyclic GFR-binding peptide
  MOD_RES (3)..(4): Xaa is C or S
KPXXAPTQLEPLTVLYYDDSSNVIEQLSNN

SEQ ID NO: 52766 - protein, 40 aa, Artificial Sequence; identical to SEQ ID NO: 11495
  Cyclic GFR-binding peptide
  MOD_RES (4)..(5)..(37)..(39): Xaa is C or S

SEQ ID NO: 52767 - protein, 20 aa, Artificial Sequence
  Cyclic GFR-binding peptide
EPLPMVYYDENEKVVEQLSN

SEQ ID NO: 52768 - protein, 26 aa, Artificial Sequence
  Cyclic GFR-binding peptide
PQALSPISILFIVGRKPKVYKQYEMI

SEQ ID NO: 52769 - protein, 35 aa, Artificial Sequence; identical to SEQ ID NO: 11497
  Cyclic GFR-binding peptide
  MOD_RES (1)..(32)..(34): Xaa is C or S

SEQ ID NO: 52770 - protein, 35 aa, Artificial Sequence
  Cyclic GFR-binding peptide
  MOD_RES (6)..(6): Xaa is C or S
VTKPTXAPTKLEPLPVVYYDDSSNVIEQLSNNMVV

SEQ ID NO: 52771 - protein, 28 aa, Artificial Sequence
  Cyclic GFR-binding peptide
  MOD_RES (1)..(1): Xaa is C or S
XAPTKLEPLTVLYYDDSSNVIEQLSNNM

SEQ ID NO: 52772 - protein, 27 aa, Artificial Sequence
  Cyclic GFR-binding peptide
  MOD_RES (27)..(27): Xaa is C or S
SPISMLFIDEYDKVVYKQYEEMVVEGX

SEQ ID NO: 52773 - protein, 36 aa, Artificial Sequence; identical to SEQ ID NO: 11498
  Cyclic GFR-binding peptide
  MOD_RES (4)..(5): Xaa is C or S

SEQ ID NO: 52774 - protein, 27 aa, Artificial Sequence
  Cyclic GFR-binding peptide
PTRLEPLTILYYDSANNVVEQLSNDMV

SEQ ID NO: 52775 - protein, 34 aa, Artificial Sequence; identical to SEQ ID NO: 11499
  Cyclic GFR-binding peptide
  MOD_RES (31)..(33): Xaa is C or S

SEQ ID NO: 52776 - protein, 30 aa, Artificial Sequence
  Cyclic GFR-binding peptide
  MOD_RES (30)..(30): Xaa is C or S
TELEPLPMVYYDEYDKVVEQLSNEMVVEGX

SEQ ID NO: 52777 - protein, 28 aa, Artificial Sequence
  Cyclic GFR-binding peptide
VPTELEPLTMLYYDEYDKVVEQLSNEMV

SEQ ID NO: 52778 - protein, 30 aa, Artificial Sequence
  Cyclic GFR-binding peptide
  MOD_RES (29)..(29): Xaa is C or S
QALEPLTILYYVGRKPKVEQLSNMIVRSXK

SEQ ID NO: 52779 - protein, 35 aa, Artificial Sequence; identical to SEQ ID NO: 11503
  Cyclic GFR-binding peptide
  MOD_RES (2)..(3)..(35): Xaa is C or S

SEQ ID NO: 52780 - protein, 33 aa, Artificial Sequence; identical to SEQ ID NO: 11502
  Cyclic GFR-binding peptide
  MOD_RES (32)..(32): Xaa is C or S

SEQ ID NO: 52781 - protein, 40 aa, Artificial Sequence; identical to SEQ ID NO: 11504
  Cyclic GFR-binding peptide
  MOD_RES (4)..(5)..(37)..(39): Xaa is C or S

SEQ ID NO: 52782 - protein, 32 aa, Artificial Sequence; identical to SEQ ID NO: 11505
  Cyclic GFR-binding peptide
  MOD_RES (31)..(31): Xaa is C or S

SEQ ID NO: 52783 - protein, 32 aa, Artificial Sequence
  Cyclic GFR-binding peptide
  MOD_RES (4)..(5): Xaa is C or S
PKPXXAPTQLSPISVLFIDDSSNVIYKQYENM

SEQ ID NO: 52784 - protein, 20 aa, Artificial Sequence
  Cyclic GFR-binding peptide
SPISILFIIGKTPKIYKQYE

SEQ ID NO: 52785 - protein, 25 aa, Artificial Sequence
  Cyclic GFR-binding peptide
APTKLEPLTVLYYDDSSNVIEQLSN

SEQ ID NO: 52786 - protein, 34 aa, Artificial Sequence
  Cyclic GFR-binding peptide
  MOD_RES (4)..(5): Xaa is C or S
PPTXXVPTRLNAISILYFDSANNVVLKKYRDMVV

SEQ ID NO: 52787 - protein, 35 aa, Artificial Sequence
  Cyclic GFR-binding peptide
  MOD_RES (6)..(7): Xaa is C or S
ASASPXXVPQDLEPLPIVYYVGRTPKVEQLSNMVV

SEQ ID NO: 52788 - protein, 25 aa, Artificial Sequence
  Cyclic GFR-binding peptide
ELEPLPMVYYDEYDKVVEQLSNEMV

SEQ ID NO: 52789 - protein, 34 aa, Artificial Sequence
  Cyclic GFR-binding peptide
  MOD_RES (4)..(5): Xaa is C or S
PKAXXVPTELSPISMLFIDEYDKVVYKQYEEMVV

SEQ ID NO: 52790 - protein, 21 aa, Artificial Sequence
  Cyclic GFR-binding peptide
LNAISILYFDSANNVVLKKYR

SEQ ID NO: 52791 - protein, 28 aa, Artificial Sequence
  Cyclic GFR-binding peptide
  MOD_RES (1)..(2): Xaa is C or S
XXVPTELEPLPMVYYDENEKVVEQLSND

SEQ ID NO: 52792 - protein, 27 aa, Artificial Sequence
  Cyclic GFR-binding peptide
  MOD_RES (27)..(27): Xaa is C or S
EPLPVVYYDDSSNVIEQLSNNMVVRAX

SEQ ID NO: 52793 - protein, 28 aa, Artificial Sequence
  Cyclic GFR-binding peptide
  MOD_RES (28)..(28): Xaa is C or S
LEPLTVLYYDDSSNVIEQLSNNMVVRSX

SEQ ID NO: 52794 - protein, 30 aa, Artificial Sequence
  Cyclic GFR-binding peptide
  MOD_RES (1)..(1): Xaa is C or S
XVPTRLEPLTILYYDSANNVVEQLSNDMVV

SEQ ID NO: 52795 - protein, 33 aa, Artificial Sequence; identical to SEQ ID NO: 11510
  Cyclic GFR-binding peptide
  MOD_RES (1)..(32): Xaa is C or S

SEQ ID NO: 52796 - protein, 34 aa, Artificial Sequence
  Cyclic GFR-binding peptide
  MOD_RES (5)..(6): Xaa is C or S
IPKAXXVPTELEPLTMLYYDEYDKVVEQLSNEMV

SEQ ID NO: 52797 - protein, 34 aa, Artificial Sequence
  Cyclic GFR-binding peptide
  MOD_RES (4)..(5): Xaa is C or S
PKPXXAPTQLEPLTVLYYDDSSNVIEQLSNNMVV

SEQ ID NO: 52798 - protein, 31 aa, Artificial Sequence
  Cyclic GFR-binding peptide
  MOD_RES (5)..(6): Xaa is C or S
TPPTXXVPTRLSAISILYLDSANNVVLKNYQ

SEQ ID NO: 52799 - protein, 36 aa, Artificial Sequence; identical to SEQ ID NO: 11511
  Cyclic GFR-binding peptide
  MOD_RES (4)..(5): Xaa is C or S

SEQ ID NO: 52800 - protein, 36 aa, Artificial Sequence; identical to SEQ ID NO: 11512
  Cyclic GFR-binding peptide
  MOD_RES (2)..(3)..(35): Xaa is C or S

SEQ ID NO: 52801 - protein, 42 aa, Artificial Sequence; identical to SEQ ID NO: 11514
  Cyclic GFR-binding peptide
  MOD_RES (6)..(7)..(39)..(41): Xaa is C or S

SEQ ID NO: 52802 - protein, 34 aa, Artificial Sequence; identical to SEQ ID NO: 11515
  Cyclic GFR-binding peptide
  MOD_RES (3)..(3): Xaa is C or S

SEQ ID NO: 52803 - protein, 31 aa, Artificial Sequence
  Cyclic GFR-binding peptide
  MOD_RES (29)..(31): Xaa is C or S
RLEPLPIVYYDSANNVVEQLSNDMVVESXGX

SEQ ID NO: 52804 - protein, 20 aa, Artificial Sequence
  Cyclic GFR-binding peptide
EPLTILYYDSANNVVEQLSN

SEQ ID NO: 52805 - protein, 39 aa, Artificial Sequence; identical to SEQ ID NO: 11516
  Cyclic GFR-binding peptide
  MOD_RES (6)..(38): Xaa is C or S

SEQ ID NO: 52806 - protein, 27 aa, Artificial Sequence
  Cyclic GFR-binding peptide
APTQLSPISVLFIDDSSNVIYKQYENM

SEQ ID NO: 52807 - protein, 28 aa, Artificial Sequence
  Cyclic GFR-binding peptide
  MOD_RES (1)..(2): Xaa is C or S
XXVPTELSPISMLFIDENEKVVYKQYED

SEQ ID NO: 52808 - protein, 35 aa, Artificial Sequence; identical to SEQ ID NO: 11518
  Cyclic GFR-binding peptide
  MOD_RES (32)..(34): Xaa is C or S

SEQ ID NO: 52809 - protein, 36 aa, Artificial Sequence; identical to SEQ ID NO: 11519
  Cyclic GFR-binding peptide
  MOD_RES (1)..(33)..(35): Xaa is C or S

SEQ ID NO: 52810 - protein, 24 aa, Artificial Sequence
  Cyclic GFR-binding peptide
PTELSPISMLFIDENEKVVYKQYE

SEQ ID NO: 52811 - protein, 26 aa, Artificial Sequence
  Cyclic GFR-binding peptide
LEPLPVVYYDDSSNVIEQLSNNMVVR

SEQ ID NO: 52812 - protein, 34 aa, Artificial Sequence
  Cyclic GFR-binding peptide
  MOD_RES (5)..(6): Xaa is C or S
SASPXXVSQDLSPISILFIIGKTPKIYKQYEMIV

SEQ ID NO: 52813 - protein, 37 aa, Artificial Sequence; identical to SEQ ID NO: 11521
  Cyclic GFR-binding peptide
  MOD_RES (6)..(7): Xaa is C or S

SEQ ID NO: 52814 - protein, 31 aa, Artificial Sequence
  Cyclic GFR-binding peptide
  MOD_RES (31)..(31): Xaa is C or S
PTKLEPLTVLYYDDSSNVIEQLSNNMVVRSX

SEQ ID NO: 52815 - protein, 31 aa, Artificial Sequence
  Cyclic GFR-binding peptide
  MOD_RES (28)..(30): Xaa is C or S
DLSPISILFIVGRTPKVYKQYEMVVKSXKXS

SEQ ID NO: 52816 - protein, 36 aa, Artificial Sequence; identical to SEQ ID NO: 11522
  Cyclic GFR-binding peptide
  MOD_RES (4)..(5): Xaa is C or S

SEQ ID NO: 52817 - protein, 30 aa, Artificial Sequence
  Cyclic GFR-binding peptide
  MOD_RES (29)..(29): Xaa is C or S
QDLEPLPIVYYVGRTPKVEQLSNMVVKSXK
